United States Patent Application Publication US 2007/0048756 A1 - sequence listing, part 28

SEQ ID NO: 981680 - DNA, 33 bp, Homo sapien
tttcaaatattagcatgaagtgattcacaaaat

SEQ ID NO: 981681 - DNA, 33 bp, Homo sapien
atccataagcccaggacgatattgatagcttca

SEQ ID NO: 981682 - DNA, 33 bp, Homo sapien
atccataagcccaggatgatattgatagcttca

SEQ ID NO: 981683 - DNA, 33 bp, Homo sapien
cttcatctccctagcaaaaaaatgaccatattc

SEQ ID NO: 981684 - DNA, 33 bp, Homo sapien
cttcatctccctagcagaaaaatgaccatattc

SEQ ID NO: 981685 - DNA, 33 bp, Homo sapien
cattattctgtctacaatgggatacttctccat

SEQ ID NO: 981686 - DNA, 33 bp, Homo sapien
cattattctgtctacattgggatacttctccat

SEQ ID NO: 981687 - DNA, 33 bp, Homo sapien
ctggcttcagagtctgaatattaaaacggtaca

SEQ ID NO: 981688 - DNA, 33 bp, Homo sapien
ctggcttcagagtctggatattaaaacggtaca

SEQ ID NO: 981689 - DNA, 33 bp, Homo sapien
ctcatatgcttgttcactgaaatggaaccaaca

SEQ ID NO: 981690 - DNA, 33 bp, Homo sapien
ctcatatgcttgttcattgaaatggaaccaaca

SEQ ID NO: 981691 - DNA, 33 bp, Homo sapien
attgtagatcctgtgcgacaacagaattctaca

SEQ ID NO: 981692 - DNA, 33 bp, Homo sapien
attgtagatcctgtgctacaacagaattctaca

SEQ ID NO: 981693 - DNA, 33 bp, Homo sapien
gactgaaatagcttcaccccctcttgctctctt

SEQ ID NO: 981694 - DNA, 33 bp, Homo sapien
gactgaaatagcttcatcccctcttgctctctt

SEQ ID NO: 981695 - DNA, 33 bp, Homo sapien
cttctcatagacagtaaaaaaataaatcagtag

SEQ ID NO: 981696 - DNA, 33 bp, Homo sapien
cttctcatagacagtagaaaaataaatcagtag

SEQ ID NO: 981697 - DNA, 33 bp, Homo sapien
tttaggaaactggaaaaccacacattctctcct

SEQ ID NO: 981698 - DNA, 33 bp, Homo sapien
tttaggaaactggaaagccacacattctctcct

SEQ ID NO: 981699 - DNA, 33 bp, Homo sapien
tcatagaatagaaaacactttgctctcggctta

SEQ ID NO: 981700 - DNA, 33 bp, Homo sapien
tcatagaatagaaaacgctttgctctcggctta

SEQ ID NO: 981701 - DNA, 33 bp, Homo sapien
tttccataagaagtaaatcatttctcatttgta

SEQ ID NO: 981702 - DNA, 33 bp, Homo sapien
tttccataagaagtaagtcatttctcatttgta

SEQ ID NO: 981703 - DNA, 33 bp, Homo sapien
gactgagctccaactaaagccttaattctcacc

SEQ ID NO: 981704 - DNA, 33 bp, Homo sapien
gactgagctccaactacagccttaattctcacc

SEQ ID NO: 981705 - DNA, 33 bp, Homo sapien
ttaaacaatgacgagactctcatttattaagca

SEQ ID NO: 981706 - DNA, 33 bp, Homo sapien
ttaaacaatgacgagattctcatttattaagca

SEQ ID NO: 981707 - DNA, 33 bp, Homo sapien
gtatgaacatttgacactgtaacctattactat

SEQ ID NO: 981708 - DNA, 33 bp, Homo sapien
gtatgaacatttgacattgtaacctattactat

SEQ ID NO: 981709 - DNA, 33 bp, Homo sapien
gtctctaggactgaaaaagccaaaagatcaggg

SEQ ID NO: 981710 - DNA, 33 bp, Homo sapien
gtctctaggactgaaagagccaaaagatcaggg

SEQ ID NO: 981711 - DNA, 33 bp, Homo sapien
ttctccacataaaaaacgtcttctgttaaaatt

SEQ ID NO: 981712 - DNA, 33 bp, Homo sapien
ttctccacataaaaaatgtcttctgttaaaatt

SEQ ID NO: 981713 - DNA, 33 bp, Homo sapien
agccctccagattcaccctccaggatggatcag

SEQ ID NO: 981714 - DNA, 33 bp, Homo sapien
agccctccagattcactctccaggatggatcag

SEQ ID NO: 981715 - DNA, 33 bp, Homo sapien
tcagctcccaggagtacgaatttttatcacaga

SEQ ID NO: 981716 - DNA, 33 bp, Homo sapien
tcagctcccaggagtatgaatttttatcacaga

SEQ ID NO: 981717 - DNA, 33 bp, Homo sapien
ctctctggtacagacaactctgtgataaaaatt

SEQ ID NO: 981718 - DNA, 33 bp, Homo sapien
ctctctggtacagacatctctgtgataaaaatt

SEQ ID NO: 981719 - DNA, 33 bp, Homo sapien
ttgaattgcctgtgtacatagctttaattttca

SEQ ID NO: 981720 - DNA, 33 bp, Homo sapien
ttgaattgcctgtgtatatagctttaattttca

SEQ ID NO: 981721 - DNA, 33 bp, Homo sapien
caaacattctctgagcacagggattctgcctgg

SEQ ID NO: 981722 - DNA, 33 bp, Homo sapien
caaacattctctgagcgcagggattctgcctgg

SEQ ID NO: 981723 - DNA, 33 bp, Homo sapien
ggcaaaatattaacaacgagtcaatctaggtaa

SEQ ID NO: 981724 - DNA, 33 bp, Homo sapien
ggcaaaatattaacaatgagtcaatctaggtaa

SEQ ID NO: 981725 - DNA, 33 bp, Homo sapien
tgagcaaccactgcctaaaccattggactttgg

SEQ ID NO: 981726 - DNA, 33 bp, Homo sapien
tgagcaaccactgcctgaaccattggactttgg

SEQ ID NO: 981727 - DNA, 33 bp, Homo sapien
ggcgattctgatgcacactaaattaggaaacgc

SEQ ID NO: 981728 - DNA, 33 bp, Homo sapien
ggcgattctgatgcacgctaaattaggaaacgc

SEQ ID NO: 981729 - DNA, 33 bp, Homo sapien
aaatggtagcataaaacgcacacaggtctgcat

SEQ ID NO: 981730 - DNA, 33 bp, Homo sapien
aaatggtagcataaaatgcacacaggtctgcat

SEQ ID NO: 981731 - DNA, 33 bp, Homo sapien
gtaattagatattaaactgaatactccagactc

SEQ ID NO: 981732 - DNA, 33 bp, Homo sapien
gtaattagatattaaattgaatactccagactc

SEQ ID NO: 981733 - DNA, 33 bp, Homo sapien
atttaactcaactatcccttcttctggaaggtg

SEQ ID NO: 981734 - DNA, 33 bp, Homo sapien
atttaactcaactatctcttcttctggaaggtg

SEQ ID NO: 981735 - DNA, 33 bp, Homo sapien
actgtctcttacctacaattgaaaaggctctca

SEQ ID NO: 981736 - DNA, 33 bp, Homo sapien
actgtctcttacctacgattgaaaaggctctca

SEQ ID NO: 981737 - DNA, 33 bp, Homo sapien
cagacaatacataaacaaattgacacagctgtt

SEQ ID NO: 981738 - DNA, 33 bp, Homo sapien
cagacaatacataaacgaattgacacagctgtt

SEQ ID NO: 981739 - DNA, 33 bp, Homo sapien
aggttctgctcctcatcagctagggaatcattt

SEQ ID NO: 981740 - DNA, 33 bp, Homo sapien
aggttctgctcctcattagctagggaatcattt

SEQ ID NO: 981741 - DNA, 33 bp, Homo sapien
tatgttcattctaaccactgggaatgtattatc

SEQ ID NO: 981742 - DNA, 33 bp, Homo sapien
tatgttcattctaaccgctgggaatgtattatc

SEQ ID NO: 981743 - DNA, 33 bp, Homo sapien
aatgttgtttctgtgacgccacattgtgcctca

SEQ ID NO: 981744 - DNA, 33 bp, Homo sapien
aatgttgtttctgtgatgccacattgtgcctca

SEQ ID NO: 981745 - DNA, 33 bp, Homo sapien
ttaatttgacattgagcatcttgcgtaagatct

SEQ ID NO: 981746 - DNA, 33 bp, Homo sapien
ttaatttgacattgaggatcttgcgtaagatct

SEQ ID NO: 981747 - DNA, 33 bp, Homo sapien
gtgaagttgaccctggaaggtaggctgcaacat

SEQ ID NO: 981748 - DNA, 33 bp, Homo sapien
gtgaagttgaccctggcaggtaggctgcaacat

SEQ ID NO: 981749 - DNA, 33 bp, Homo sapien
aaatccctggtgtccacatggtgtccaagtcac

SEQ ID NO: 981750 - DNA, 33 bp, Homo sapien
aaatccctggtgtccatatggtgtccaagtcac

SEQ ID NO: 981751 - DNA, 33 bp, Homo sapien
ctggaaaagctcataaaatattcagacctctct

SEQ ID NO: 981752 - DNA, 33 bp, Homo sapien
ctggaaaagctcataagatattcagacctctct

SEQ ID NO: 981753 - DNA, 33 bp, Homo sapien
gagccactgttcttgaaaattctaccgcttcat

SEQ ID NO: 981754 - DNA, 33 bp, Homo sapien
gagccactgttcttgacaattctaccgcttcat

SEQ ID NO: 981755 - DNA, 33 bp, Homo sapien
taatttcaaagtatgacgaatgaatgtcatcag

SEQ ID NO: 981756 - DNA, 33 bp, Homo sapien
taatttcaaagtatgatgaatgaatgtcatcag

SEQ ID NO: 981757 - DNA, 33 bp, Homo sapien
caaatatgattattgaactaaacattttttgaa

SEQ ID NO: 981758 - DNA, 33 bp, Homo sapien
caaatatgattattgatctaaacattttttgaa

SEQ ID NO: 981759 - DNA, 33 bp, Homo sapien
actgtgagacacgactcaaatctcactgtcagt

SEQ ID NO: 981760 - DNA, 33 bp, Homo sapien
actgtgagacacgactgaaatctcactgtcagt

SEQ ID NO: 981761 - DNA, 33 bp, Homo sapien
agaatgacctttcccacgagacagcgcaaaggg

SEQ ID NO: 981762 - DNA, 33 bp, Homo sapien
agaatgacctttcccatgagacagcgcaaaggg

SEQ ID NO: 981763 - DNA, 33 bp, Homo sapien
gccaaatgctatgaacagccctttcttaaagac

SEQ ID NO: 981764 - DNA, 33 bp, Homo sapien
gccaaatgctatgaacggccctttcttaaagac

SEQ ID NO: 981765 - DNA, 33 bp, Homo sapien
acacccttgggaatgcacacaatgattattctg

SEQ ID NO: 981766 - DNA, 33 bp, Homo sapien
acacccttgggaatgcgcacaatgattattctg

SEQ ID NO: 981767 - DNA, 33 bp, Homo sapien
gctccttttctctacagtaacggcctcctgtgc

SEQ ID NO: 981768 - DNA, 33 bp, Homo sapien
gctccttttctctacattaacggcctcctgtgc

SEQ ID NO: 981769 - DNA, 33 bp, Homo sapien
aagttccaagaatgtacgtgatgttttttcgag

SEQ ID NO: 981770 - DNA, 33 bp, Homo sapien
aagttccaagaatgtatgtgatgttttttcgag

SEQ ID NO: 981771 - DNA, 33 bp, Homo sapien
tcttgtttggaagtcaaatctgtctttgcacaa

SEQ ID NO: 981772 - DNA, 33 bp, Homo sapien
tcttgtttggaagtcatatctgtctttgcacaa

SEQ ID NO: 981773 - DNA, 33 bp, Homo sapien
cattatgggaaccaaccgggtgctgccagggcc

SEQ ID NO: 981774 - DNA, 33 bp, Homo sapien
cattatgggaaccaactgggtgctgccagggcc

SEQ ID NO: 981775 - DNA, 33 bp, Homo sapien
gaggtcaaaagatagacactggaggctatggct

SEQ ID NO: 981776 - DNA, 33 bp, Homo sapien
gaggtcaaaagatagatactggaggctatggct

SEQ ID NO: 981777 - DNA, 33 bp, Homo sapien
accttcaagcagtacccggaatacaaccaggtg

SEQ ID NO: 981778 - DNA, 33 bp, Homo sapien
accttcaagcagtacctggaatacaaccaggtg

SEQ ID NO: 981779 - DNA, 33 bp, Homo sapien
ttggcatttgctattccagagcttaggagggca

SEQ ID NO: 981780 - DNA, 33 bp, Homo sapien
ttggcatttgctattcgagagcttaggagggca

SEQ ID NO: 981781 - DNA, 33 bp, Homo sapien
cctggccgtcagaccactgcaacagagctgcct

SEQ ID NO: 981782 - DNA, 33 bp, Homo sapien
cctggccgtcagaccattgcaacagagctgcct

SEQ ID NO: 981783 - DNA, 33 bp, Homo sapien
aaacctggccatgtccaacaaaaacaccacttt

SEQ ID NO: 981784 - DNA, 33 bp, Homo sapien
aaacctggccatgtccgacaaaaacaccacttt

SEQ ID NO: 981785 - DNA, 33 bp, Homo sapien
ctaccatttcttaatcaaagccttcactgtctt

SEQ ID NO: 981786 - DNA, 33 bp, Homo sapien
ctaccatttcttaatccaagccttcactgtctt

SEQ ID NO: 981787 - DNA, 33 bp, Homo sapien
cttgtaatctaatgaggatcagtttatcaaact

SEQ ID NO: 981788 - DNA, 33 bp, Homo sapien
cttgtaatctaatgagtatcagtttatcaaact

SEQ ID NO: 981789 - DNA, 33 bp, Homo sapien
ttaggttccaggatacagtacagaacgtgcagg

SEQ ID NO: 981790 - DNA, 33 bp, Homo sapien
ttaggttccaggatacggtacagaacgtgcagg

SEQ ID NO: 981791 - DNA, 33 bp, Homo sapien
acagttccaaagtaacggagaagtctccatctc

SEQ ID NO: 981792 - DNA, 33 bp, Homo sapien
acagttccaaagtaactgagaagtctccatctc

SEQ ID NO: 981793 - DNA, 33 bp, Homo sapien
atggaataaaatggcaacaggcacgccaaaaag

SEQ ID NO: 981794 - DNA, 33 bp, Homo sapien
atggaataaaatggcagcaggcacgccaaaaag

SEQ ID NO: 981795 - DNA, 33 bp, Homo sapien
ttattaggatgctgtcaactgtaaataagagat

SEQ ID NO: 981796 - DNA, 33 bp, Homo sapien
ttattaggatgctgtctactgtaaataagagat

SEQ ID NO: 981797 - DNA, 33 bp, Homo sapien
aaatattgatgtatgaagtaagttggggatggc

SEQ ID NO: 981798 - DNA, 33 bp, Homo sapien
aaatattgatgtatgaggtaagttggggatggc

SEQ ID NO: 981799 - DNA, 33 bp, Homo sapien
ttcatacacattttccaccacttagttggaatt

SEQ ID NO: 981800 - DNA, 33 bp, Homo sapien
ttcatacacattttccgccacttagttggaatt

SEQ ID NO: 981801 - DNA, 33 bp, Homo sapien
taacccagctaaagttaaaatggctactcacac

SEQ ID NO: 981802 - DNA, 33 bp, Homo sapien
taacccagctaaagttgaaatggctactcacac

SEQ ID NO: 981803 - DNA, 33 bp, Homo sapien
gagctttgagtctctaacaacttgataaagaaa

SEQ ID NO: 981804 - DNA, 33 bp, Homo sapien
gagctttgagtctctagcaacttgataaagaaa

SEQ ID NO: 981805 - DNA, 33 bp, Homo sapien
gttcacatagctaccaaattgtaactttctttt

SEQ ID NO: 981806 - DNA, 33 bp, Homo sapien
gttcacatagctaccatattgtaactttctttt

SEQ ID NO: 981807 - DNA, 33 bp, Homo sapien
atctatctttggcctaaaaagttctatggcaag

SEQ ID NO: 981808 - DNA, 33 bp, Homo sapien
atctatctttggcctacaaagttctatggcaag

SEQ ID NO: 981809 - DNA, 33 bp, Homo sapien
attatatagctacgatgatcaagactgtgggat

SEQ ID NO: 981810 - DNA, 33 bp, Homo sapien
attatatagctacgattatcaagactgtgggat

SEQ ID NO: 981811 - DNA, 33 bp, Homo sapien
ccagctctgtgaatgaataaatgttcacttggc

SEQ ID NO: 981812 - DNA, 33 bp, Homo sapien
ccagctctgtgaatgagtaaatgttcacttggc

SEQ ID NO: 981813 - DNA, 33 bp, Homo sapien
ctgcttcatgtgtggacgaactagactggaaga

SEQ ID NO: 981814 - DNA, 33 bp, Homo sapien
ctgcttcatgtgtggatgaactagactggaaga

SEQ ID NO: 981815 - DNA, 33 bp, Homo sapien
agttgagtgcttgagacggagatggtatgacct

SEQ ID NO: 981816 - DNA, 33 bp, Homo sapien
agttgagtgcttgagagggagatggtatgacct

SEQ ID NO: 981817 - DNA, 33 bp, Homo sapien
gtgtgtgtgtgccacgcatgggaaaaagtacca

SEQ ID NO: 981818 - DNA, 33 bp, Homo sapien
gtgtgtgtgtgccacgtatgggaaaaagtacca

SEQ ID NO: 981819 - DNA, 33 bp, Homo sapien
cttcttttaaggatacaagtcatactggattag

SEQ ID NO: 981820 - DNA, 33 bp, Homo sapien
cttcttttaaggatacgagtcatactggattag

SEQ ID NO: 981821 - DNA, 33 bp, Homo sapien
tccacggagcagcaggaagttacagggaccaat

SEQ ID NO: 981822 - DNA, 33 bp, Homo sapien
tccacggagcagcagggagttacagggaccaat

SEQ ID NO: 981823 - DNA, 33 bp, Homo sapien
gagagtcacattgaaacggtcctaagattttta

SEQ ID NO: 981824 - DNA, 33 bp, Homo sapien
gagagtcacattgaaatggtcctaagattttta

SEQ ID NO: 981825 - DNA, 33 bp, Homo sapien
aactggacaactgtcaatctgggtcttctcatt

SEQ ID NO: 981826 - DNA, 33 bp, Homo sapien
aactggacaactgtcagtctgggtcttctcatt

SEQ ID NO: 981827 - DNA, 33 bp, Homo sapien
catgcagtggcttacaagtcaaccagacttctc

SEQ ID NO: 981828 - DNA, 33 bp, Homo sapien
catgcagtggcttacaggtcaaccagacttctc

SEQ ID NO: 981829 - DNA, 33 bp, Homo sapien
ctttactcagaaaggagagagtattcccttatg

SEQ ID NO: 981830 - DNA, 33 bp, Homo sapien
ctttactcagaaaggatagagtattcccttatg

SEQ ID NO: 981831 - DNA, 33 bp, Homo sapien
gatgacagctgtctcactctactttcaaactgg

SEQ ID NO: 981832 - DNA, 33 bp, Homo sapien
gatgacagctgtctcattctactttcaaactgg

SEQ ID NO: 981833 - DNA, 33 bp, Homo sapien
tacagtgaaaaaataaacagtacctggacatga

SEQ ID NO: 981834 - DNA, 33 bp, Homo sapien
tacagtgaaaaaataagcagtacctggacatga

SEQ ID NO: 981835 - DNA, 33 bp, Homo sapien
tatcatggaatgcaacagtcttgtttactactt

SEQ ID NO: 981836 - DNA, 33 bp, Homo sapien
tatcatggaatgcaaccgtcttgtttactactt

SEQ ID NO: 981837 - DNA, 33 bp, Homo sapien
gttgagtccttaagacagataaagattacaagt

SEQ ID NO: 981838 - DNA, 33 bp, Homo sapien
gttgagtccttaagacggataaagattacaagt

SEQ ID NO: 981839 - DNA, 33 bp, Homo sapien
tacgacggcctcctaactggtgtcgctagttct

SEQ ID NO: 981840 - DNA, 33 bp, Homo sapien
tacgacggcctcctaattggtgtcgctagttct

SEQ ID NO: 981841 - DNA, 33 bp, Homo sapien
ggaggatcagagtcaggagtaggagatgtggtg

SEQ ID NO: 981842 - DNA, 33 bp, Homo sapien
ggaggatcagagtcagtagtaggagatgtggtg

SEQ ID NO: 981843 - DNA, 33 bp, Homo sapien
accacaagataataaactggcatggttttaggc

SEQ ID NO: 981844 - DNA, 33 bp, Homo sapien
accacaagataataaattggcatggttttaggc

SEQ ID NO: 981845 - DNA, 33 bp, Homo sapien
cctgtttagagcatgaacccaatagcaggaagt

SEQ ID NO: 981846 - DNA, 33 bp, Homo sapien
cctgtttagagcatgatcccaatagcaggaagt

SEQ ID NO: 981847 - DNA, 33 bp, Homo sapien
tagtagaggaatgcccagattctcagatgtata

SEQ ID NO: 981848 - DNA, 33 bp, Homo sapien
tagtagaggaatgcccggattctcagatgtata

SEQ ID NO: 981849 - DNA, 33 bp, Homo sapien
tgaataatcagcctcaacaaccgatgacttcca

SEQ ID NO: 981850 - DNA, 33 bp, Homo sapien
tgaataatcagcctcagcaaccgatgacttcca

SEQ ID NO: 981851 - DNA, 33 bp, Homo sapien
actttgattaaaccgcagataatatgggaacat

SEQ ID NO: 981852 - DNA, 33 bp, Homo sapien
actttgattaaaccgccgataatatgggaacat

SEQ ID NO: 981853 - DNA, 33 bp, Homo sapien
aactcacagagtctaacactgatggagaaggag

SEQ ID NO: 981854 - DNA, 33 bp, Homo sapien
aactcacagagtctaatactgatggagaaggag

SEQ ID NO: 981855 - DNA, 33 bp, Homo sapien
atgactgcaagagataaatcttcctccagcttt

SEQ ID NO: 981856 - DNA, 33 bp, Homo sapien
atgactgcaagagatagatcttcctccagcttt

SEQ ID NO: 981857 - DNA, 33 bp, Homo sapien
agcattttaacctccagcattgcatggtaattc

SEQ ID NO: 981858 - DNA, 33 bp, Homo sapien
agcattttaacctccatcattgcatggtaattc

SEQ ID NO: 981859 - DNA, 33 bp, Homo sapien
gtttcacagttggtcacaagttcataatagcta

SEQ ID NO: 981860 - DNA, 33 bp, Homo sapien
gtttcacagttggtcataagttcataatagcta

SEQ ID NO: 981861 - DNA, 33 bp, Homo sapien
gcctgtgtaaaatcaaaccggatgccaaaaggg

SEQ ID NO: 981862 - DNA, 33 bp, Homo sapien
gcctgtgtaaaatcaagccggatgccaaaaggg

SEQ ID NO: 981863 - DNA, 33 bp, Homo sapien
tgggaaaagtggtcccaagaagaggatgggagg

SEQ ID NO: 981864 - DNA, 33 bp, Homo sapien
tgggaaaagtggtcccgagaagaggatgggagg

SEQ ID NO: 981865 - DNA, 33 bp, Homo sapien
gaggtcgccagaaaagaagagctcagaatgaga

SEQ ID NO: 981866 - DNA, 33 bp, Homo sapien
gaggtcgccagaaaaggagagctcagaatgaga

SEQ ID NO: 981867 - DNA, 33 bp, Homo sapien
ttaatcaccgtaatacagaaaggatgttaggat

SEQ ID NO: 981868 - DNA, 33 bp, Homo sapien
ttaatcaccgtaatacggaaaggatgttaggat

SEQ ID NO: 981869 - DNA, 33 bp, Homo sapien
taatcccagatgattacgtgttctacctaacta

SEQ ID NO: 981870 - DNA, 33 bp, Homo sapien
taatcccagatgattatgtgttctacctaacta

SEQ ID NO: 981871 - DNA, 33 bp, Homo sapien
gtgccctctaaaatccacatgatcatcttataa

SEQ ID NO: 981872 - DNA, 33 bp, Homo sapien
gtgccctctaaaatccgcatgatcatcttataa

SEQ ID NO: 981873 - DNA, 33 bp, Homo sapien
gacttctcttatttcaaacactagccacaagct

SEQ ID NO: 981874 - DNA, 33 bp, Homo sapien
gacttctcttatttcagacactagccacaagct

SEQ ID NO: 981875 - DNA, 33 bp, Homo sapien
aagactatggagatccaaaagttaatttctctg

SEQ ID NO: 981876 - DNA, 33 bp, Homo sapien
aagactatggagatccgaaagttaatttctctg

SEQ ID NO: 981877 - DNA, 33 bp, Homo sapien
tttttaggattgataggagattttagtgagaca

SEQ ID NO: 981878 - DNA, 33 bp, Homo sapien
tttttaggattgatagtagattttagtgagaca

SEQ ID NO: 981879 - DNA, 33 bp, Homo sapien
accagttttctcctccactagccacactattcc

SEQ ID NO: 981880 - DNA, 33 bp, Homo sapien
accagttttctcctccgctagccacactattcc

SEQ ID NO: 981881 - DNA, 33 bp, Homo sapien
catacttaaccactcaaaaacccataataatct

SEQ ID NO: 981882 - DNA, 33 bp, Homo sapien
catacttaaccactcagaaacccataataatct

SEQ ID NO: 981883 - DNA, 33 bp, Homo sapien
atggctctcttctaaccatcttattctcaagtt

SEQ ID NO: 981884 - DNA, 33 bp, Homo sapien
atggctctcttctaactatcttattctcaagtt

SEQ ID NO: 981885 - DNA, 33 bp, Homo sapien
tctctttgcagaggagaaggtagaaagtcgaat

SEQ ID NO: 981886 - DNA, 33 bp, Homo sapien
tctctttgcagaggaggaggtagaaagtcgaat

SEQ ID NO: 981887 - DNA, 33 bp, Homo sapien
tctcacaaaacctctcacaggaatccacggatt

SEQ ID NO: 981888 - DNA, 33 bp, Homo sapien
tctcacaaaacctctcgcaggaatccacggatt

SEQ ID NO: 981889 - DNA, 33 bp, Homo sapien
cctgctacctgaaagacgccctcctgattactt

SEQ ID NO: 981890 - DNA, 33 bp, Homo sapien
cctgctacctgaaagatgccctcctgattactt

SEQ ID NO: 981891 - DNA, 33 bp, Homo sapien
caagctcaaaattaccgaattagcaattctttc

SEQ ID NO: 981892 - DNA, 33 bp, Homo sapien
caagctcaaaattacctaattagcaattctttc

SEQ ID NO: 981893 - DNA, 33 bp, Homo sapien
tcaacaactggtagagaaccaaaacatcttcct

SEQ ID NO: 981894 - DNA, 33 bp, Homo sapien
tcaacaactggtagaggaccaaaacatcttcct

SEQ ID NO: 981895 - DNA, 33 bp, Homo sapien
tactgtgccgtgaaagcactcttagaatagaga

SEQ ID NO: 981896 - DNA, 33 bp, Homo sapien
tactgtgccgtgaaagtactcttagaatagaga

SEQ ID NO: 981897 - DNA, 33 bp, Homo sapien
agctgttgctgctatacaatggagtatcatatg

SEQ ID NO: 981898 - DNA, 33 bp, Homo sapien
agctgttgctgctatataatggagtatcatatg

SEQ ID NO: 981899 - DNA, 33 bp, Homo sapien
agggatggccctgaaaaatagcgtagagagaaa

SEQ ID NO: 981900 - DNA, 33 bp, Homo sapien
agggatggccctgaaagatagcgtagagagaaa

SEQ ID NO: 981901 - DNA, 33 bp, Homo sapien
tttttagcagtttttcaattctgttctttccaa

SEQ ID NO: 981902 - DNA, 33 bp, Homo sapien
tttttagcagtttttctattctgttctttccaa

SEQ ID NO: 981903 - DNA, 33 bp, Homo sapien
gcatgcacatgagatacaaatatttcccactca

SEQ ID NO: 981904 - DNA, 33 bp, Homo sapien
gcatgcacatgagatataaatatttcccactca

SEQ ID NO: 981905 - DNA, 33 bp, Homo sapien
tgtggcacccctcaagacatcacttctgatcaa

SEQ ID NO: 981906 - DNA, 33 bp, Homo sapien
tgtggcacccctcaagtcatcacttctgatcaa

SEQ ID NO: 981907 - DNA, 33 bp, Homo sapien
acatgtatccaatcctcactataagctagactt

SEQ ID NO: 981908 - DNA, 33 bp, Homo sapien
acatgtatccaatccttactataagctagactt

SEQ ID NO: 981909 - DNA, 33 bp, Homo sapien
ttgaagtgagaatagacgctccctaaacctttc

SEQ ID NO: 981910 - DNA, 33 bp, Homo sapien
ttgaagtgagaatagatgctccctaaacctttc

SEQ ID NO: 981911 - DNA, 33 bp, Homo sapien
aactgtaggagccccacgtgaagctctctgagt

SEQ ID NO: 981912 - DNA, 33 bp, Homo sapien
aactgtaggagccccatgtgaagctctctgagt

SEQ ID NO: 981913 - DNA, 33 bp, Homo sapien
catgagaagggtgaggccatatttcattccaca

SEQ ID NO: 981914 - DNA, 33 bp, Homo sapien
catgagaagggtgaggtcatatttcattccaca

SEQ ID NO: 981915 - DNA, 33 bp, Homo sapien
attcaatgcattagtacgtgggaagtgcacagt

SEQ ID NO: 981916 - DNA, 33 bp, Homo sapien
attcaatgcattagtaggtgggaagtgcacagt

SEQ ID NO: 981917 - DNA, 33 bp, Homo sapien
atgtttattgagcctacaatgtggcaatcactg

SEQ ID NO: 981918 - DNA, 33 bp, Homo sapien
atgtttattgagcctataatgtggcaatcactg

SEQ ID NO: 981919 - DNA, 33 bp, Homo sapien
gcttttctaatttgtaaaagttgtctcagaata

SEQ ID NO: 981920 - DNA, 33 bp, Homo sapien
gcttttctaatttgtagaagttgtctcagaata

SEQ ID NO: 981921 - DNA, 33 bp, Homo sapien
gatgggtagattatcacaggtttttcagggtgg

SEQ ID NO: 981922 - DNA, 33 bp, Homo sapien
gatgggtagattatcataggtttttcagggtgg

SEQ ID NO: 981923 - DNA, 33 bp, Homo sapien
ttctggactcatgtgaataggttggaccaccct

SEQ ID NO: 981924 - DNA, 33 bp, Homo sapien
ttctggactcatgtgattaggttggaccaccct

SEQ ID NO: 981925 - DNA, 33 bp, Homo sapien
aggaatgcttgctacaaacctttgggaggttat

SEQ ID NO: 981926 - DNA, 33 bp, Homo sapien
aggaatgcttgctacacacctttgggaggttat

SEQ ID NO: 981927 - DNA, 33 bp, Homo sapien
ccctctgggcaaactcccattctattctataaa

SEQ ID NO: 981928 - DNA, 33 bp, Homo sapien
ccctctgggcaaactcgcattctattctataaa

SEQ ID NO: 981929 - DNA, 33 bp, Homo sapien
tcatgaaaatgtttccacgttggctaggtgcgg

SEQ ID NO: 981930 - DNA, 33 bp, Homo sapien
tcatgaaaatgtttcctcgttggctaggtgcgg

SEQ ID NO: 981931 - DNA, 33 bp, Homo sapien
attgtgagtttgttacaaggcaaagcagtaggt

SEQ ID NO: 981932 - DNA, 33 bp, Homo sapien
attgtgagtttgttacgaggcaaagcagtaggt

SEQ ID NO: 981933 - DNA, 33 bp, Homo sapien
cttgtgttggatcacccagttgtaatctaagct

SEQ ID NO: 981934 - DNA, 33 bp, Homo sapien
cttgtgttggatcacctagttgtaatctaagct

SEQ ID NO: 981935 - DNA, 33 bp, Homo sapien
actcctatctatgcagaataaacagtacttccc

SEQ ID NO: 981936 - DNA, 33 bp, Homo sapien
actcctatctatgcagcataaacagtacttccc

SEQ ID NO: 981937 - DNA, 33 bp, Homo sapien
acctcacaggtactctaagaaaggaaattcaag

SEQ ID NO: 981938 - DNA, 33 bp, Homo sapien
acctcacaggtactctgagaaaggaaattcaag

SEQ ID NO: 981939 - DNA, 33 bp, Homo sapien
gaaaggtatctgaagacggttttttcattattt

SEQ ID NO: 981940 - DNA, 33 bp, Homo sapien
gaaaggtatctgaagatggttttttcattattt

SEQ ID NO: 981941 - DNA, 33 bp, Homo sapien
gatgaaatcagttgataagagtcttgtataagg

SEQ ID NO: 981942 - DNA, 33 bp, Homo sapien
gatgaaatcagttgatgagagtcttgtataagg

SEQ ID NO: 981943 - DNA, 33 bp, Homo sapien
cagtcctgagtagtaaaaatggcctcctttact

SEQ ID NO: 981944 - DNA, 33 bp, Homo sapien
cagtcctgagtagtaacaatggcctcctttact

SEQ ID NO: 981945 - DNA, 33 bp, Homo sapien
aattctttcccttgacaagtctttggtgccttg

SEQ ID NO: 981946 - DNA, 33 bp, Homo sapien
aattctttcccttgaccagtctttggtgccttg

SEQ ID NO: 981947 - DNA, 33 bp, Homo sapien
tagaggatcagggcacactgcaggataaggatg

SEQ ID NO: 981948 - DNA, 33 bp, Homo sapien
tagaggatcagggcacgctgcaggataaggatg

SEQ ID NO: 981949 - DNA, 33 bp, Homo sapien
gaccatttgagcttataaaatatgcatcggtca

SEQ ID NO: 981950 - DNA, 33 bp, Homo sapien
gaccatttgagcttatcaaatatgcatcggtca

SEQ ID NO: 981951 - DNA, 33 bp, Homo sapien
agtgccttagttcagaacagagaagagtagcga

SEQ ID NO: 981952 - DNA, 33 bp, Homo sapien
agtgccttagttcagatcagagaagagtagcga

SEQ ID NO: 981953 - DNA, 33 bp, Homo sapien
ctgtggctagtttggcaaattgggaggcaccag

SEQ ID NO: 981954 - DNA, 33 bp, Homo sapien
ctgtggctagtttggccaattgggaggcaccag

SEQ ID NO: 981955 - DNA, 33 bp, Homo sapien
ctagaattttcatttgaactatcaggaaagcag

SEQ ID NO: 981956 - DNA, 33 bp, Homo sapien
ctagaattttcatttggactatcaggaaagcag

SEQ ID NO: 981957 - DNA, 33 bp, Homo sapien
tcctgcacagaacctaagttaatactaagtaaa

SEQ ID NO: 981958 - DNA, 33 bp, Homo sapien
tcctgcacagaacctatgttaatactaagtaaa

SEQ ID NO: 981959 - DNA, 33 bp, Homo sapien
gagaccctagccctggaagatttcagccttgta

SEQ ID NO: 981960 - DNA, 33 bp, Homo sapien
gagaccctagccctggcagatttcagccttgta

SEQ ID NO: 981961 - DNA, 33 bp, Homo sapien
cccattaggcacaaccaaagagtaaactattaa

SEQ ID NO: 981962 - DNA, 33 bp, Homo sapien
cccattaggcacaaccgaagagtaaactattaa

SEQ ID NO: 981963 - DNA, 33 bp, Homo sapien
ctctaattgtctttaccatagtccgtggtcatc

SEQ ID NO: 981964 - DNA, 33 bp, Homo sapien
ctctaattgtctttacgatagtccgtggtcatc

SEQ ID NO: 981965 - DNA, 33 bp, Homo sapien
ttcttatagcccagcaactttattatggaggct

SEQ ID NO: 981966 - DNA, 33 bp, Homo sapien
ttcttatagcccagcagctttattatggaggct

SEQ ID NO: 981967 - DNA, 33 bp, Homo sapien
gcaatgctctatcccaaagatatttttcctgac

SEQ ID NO: 981968 - DNA, 33 bp, Homo sapien
gcaatgctctatcccagagatatttttcctgac

SEQ ID NO: 981969 - DNA, 33 bp, Homo sapien
ggactaaagaataaacagagctttgtcttgtgc

SEQ ID NO: 981970 - DNA, 33 bp, Homo sapien
ggactaaagaataaacggagctttgtcttgtgc

SEQ ID NO: 981971 - DNA, 33 bp, Homo sapien
ctgtaggaataggaccagaagagttgaaataag

SEQ ID NO: 981972 - DNA, 33 bp, Homo sapien
ctgtaggaataggaccggaagagttgaaataag

SEQ ID NO: 981973 - DNA, 33 bp, Homo sapien
acgtctttaagtcaaacagttacaaacattcaa

SEQ ID NO: 981974 - DNA, 33 bp, Homo sapien
acgtctttaagtcaaagagttacaaacattcaa

SEQ ID NO: 981975 - DNA, 33 bp, Homo sapien
tcaacatttatgggtgaaattgagcttgcagag

SEQ ID NO: 981976 - DNA, 33 bp, Homo sapien
tcaacatttatgggtggaattgagcttgcagag

SEQ ID NO: 981977 - DNA, 33 bp, Homo sapien
gttcagtggtgtagccaggactccattagccac

SEQ ID NO: 981978 - DNA, 33 bp, Homo sapien
gttcagtggtgtagccgggactccattagccac

SEQ ID NO: 981979 - DNA, 33 bp, Homo sapien
cattcagccaagaagcagagtgtatacaatggg

SEQ ID NO: 981980 - DNA, 33 bp, Homo sapien
cattcagccaagaagcggagtgtatacaatggg

SEQ ID NO: 981981 - DNA, 33 bp, Homo sapien
ggcccggcctgaccacagtgataaaggagctgt

SEQ ID NO: 981982 - DNA, 33 bp, Homo sapien
ggcccggcctgaccacggtgataaaggagctgt

SEQ ID NO: 981983 - DNA, 33 bp, Homo sapien
ctgaagggtaggctgacagaaacagaagcccac

SEQ ID NO: 981984 - DNA, 33 bp, Homo sapien
ctgaagggtaggctgagagaaacagaagcccac

SEQ ID NO: 981985 - DNA, 33 bp, Homo sapien
gctaagccagcggtagcattctatgtaatgtgt

SEQ ID NO: 981986 - DNA, 33 bp, Homo sapien
gctaagccagcggtagtattctatgtaatgtgt

SEQ ID NO: 981987 - DNA, 33 bp, Homo sapien
aaatgctgtggtgacacgagtatcctggtaatt

SEQ ID NO: 981988 - DNA, 33 bp, Homo sapien
aaatgctgtggtgacatgagtatcctggtaatt

SEQ ID NO: 981989 - DNA, 33 bp, Homo sapien
gccatctgtaaatcaggaagagggccttcacca

SEQ ID NO: 981990 - DNA, 33 bp, Homo sapien
gccatctgtaaatcagtaagagggccttcacca

SEQ ID NO: 981991 - DNA, 33 bp, Homo sapien
cttactccagcgtccacccattgtcacctcgcc

SEQ ID NO: 981992 - DNA, 33 bp, Homo sapien
cttactccagcgtccatccattgtcacctcgcc

SEQ ID NO: 981993 - DNA, 33 bp, Homo sapien
agttgaaaaccccagaaattatggagcaggaaa

SEQ ID NO: 981994 - DNA, 33 bp, Homo sapien
agttgaaaaccccagacattatggagcaggaaa

SEQ ID NO: 981995 - DNA, 33 bp, Homo sapien
tgtctccattcctctcaaggatcataatagtct

SEQ ID NO: 981996 - DNA, 33 bp, Homo sapien
tgtctccattcctctcgaggatcataatagtct

SEQ ID NO: 981997 - DNA, 33 bp, Homo sapien
aaaccctacctttctaatacatgagaagaaact

SEQ ID NO: 981998 - DNA, 33 bp, Homo sapien
aaaccctacctttctactacatgagaagaaact

SEQ ID NO: 981999 - DNA, 33 bp, Homo sapien
gacactgcaaataacccgaaaataaatgcatgt

SEQ ID NO: 982000 - DNA, 33 bp, Homo sapien
gacactgcaaataacctgaaaataaatgcatgt

SEQ ID NO: 982001 - DNA, 33 bp, Homo sapien
actcccctttgaggacacaagatttgcctgtcc

SEQ ID NO: 982002 - DNA, 33 bp, Homo sapien
actcccctttgaggactcaagatttgcctgtcc

SEQ ID NO: 982003 - DNA, 33 bp, Homo sapien
caataattatctcaggaaattgttcgttagtag

SEQ ID NO: 982004 - DNA, 33 bp, Homo sapien
caataattatctcagggaattgttcgttagtag

SEQ ID NO: 982005 - DNA, 33 bp, Homo sapien
agtcataggatgttaacctgacaataccatgta

SEQ ID NO: 982006 - DNA, 33 bp, Homo sapien
agtcataggatgttaatctgacaataccatgta

SEQ ID NO: 982007 - DNA, 33 bp, Homo sapien
atgcttagactgatgaatacatagagtttcaaa

SEQ ID NO: 982008 - DNA, 33 bp, Homo sapien
atgcttagactgatgagtacatagagtttcaaa

SEQ ID NO: 982009 - DNA, 33 bp, Homo sapien
ttccatcttcaacaacacctttgagcagatact

SEQ ID NO: 982010 - DNA, 33 bp, Homo sapien
ttccatcttcaacaacgcctttgagcagatact

SEQ ID NO: 982011 - DNA, 33 bp, Homo sapien
acataggctgttggaaaactccaatgatattga

SEQ ID NO: 982012 - DNA, 33 bp, Homo sapien
acataggctgttggaagactccaatgatattga

SEQ ID NO: 982013 - DNA, 33 bp, Homo sapien
tctactttttctaaaaacttgtccagtagcaca

SEQ ID NO: 982014 - DNA, 33 bp, Homo sapien
tctactttttctaaaagcttgtccagtagcaca

SEQ ID NO: 982015 - DNA, 33 bp, Homo sapien
agaaaactccacaaaactgtcacagaccagagg

SEQ ID NO: 982016 - DNA, 33 bp, Homo sapien
agaaaactccacaaaattgtcacagaccagagg

SEQ ID NO: 982017 - DNA, 33 bp, Homo sapien
aagcacagcttctcacaagctctcagtttgcct

SEQ ID NO: 982018 - DNA, 33 bp, Homo sapien
aagcacagcttctcacgagctctcagtttgcct

SEQ ID NO: 982019 - DNA, 33 bp, Homo sapien
tctcccccctagaatcaagaggacatggcttcc

SEQ ID NO: 982020 - DNA, 33 bp, Homo sapien
tctcccccctagaatcgagaggacatggcttcc

SEQ ID NO: 982021 - DNA, 33 bp, Homo sapien
acagcccaactgttaaacctcttagtttctatt

SEQ ID NO: 982022 - DNA, 33 bp, Homo sapien
acagcccaactgttaagcctcttagtttctatt

SEQ ID NO: 982023 - DNA, 33 bp, Homo sapien
accaagcagcaacgtccaccttagggaatctaa

SEQ ID NO: 982024 - DNA, 33 bp, Homo sapien
accaagcagcaacgtcgaccttagggaatctaa

SEQ ID NO: 982025 - DNA, 33 bp, Homo sapien
agactgtcgctaaaaagttgcctgattttcttt

SEQ ID NO: 982026 - DNA, 33 bp, Homo sapien
agactgtcgctaaaaatttgcctgattttcttt

SEQ ID NO: 982027 - DNA, 33 bp, Homo sapien
tttttgagtctcctaacagttgttgaattccat

SEQ ID NO: 982028 - DNA, 33 bp, Homo sapien
tttttgagtctcctaatagttgttgaattccat

SEQ ID NO: 982029 - DNA, 33 bp, Homo sapien
gttgtatcctccagtccacgttggcgtaaagta

SEQ ID NO: 982030 - DNA, 33 bp, Homo sapien
gttgtatcctccagtctacgttggcgtaaagta

SEQ ID NO: 982031 - DNA, 33 bp, Homo sapien
caacatgtcttgtcacaaatacaagtccactga

SEQ ID NO: 982032 - DNA, 33 bp, Homo sapien
caacatgtcttgtcacgaatacaagtccactga

SEQ ID NO: 982033 - DNA, 33 bp, Homo sapien
attatgatttggatgccactcagtggacttgta

SEQ ID NO: 982034 - DNA, 33 bp, Homo sapien
attatgatttggatgctactcagtggacttgta

SEQ ID NO: 982035 - DNA, 33 bp, Homo sapien
attcaggctgtacttacccattcacttaaaatc

SEQ ID NO: 982036 - DNA, 33 bp, Homo sapien
attcaggctgtacttatccattcacttaaaatc

SEQ ID NO: 982037 - DNA, 33 bp, Homo sapien
acacatctcttcttaaactgatattcagaaata

SEQ ID NO: 982038 - DNA, 33 bp, Homo sapien
acacatctcttcttaacctgatattcagaaata

SEQ ID NO: 982039 - DNA, 33 bp, Homo sapien
aaaactaaggcatagagaattaagcagtgtttc

SEQ ID NO: 982040 - DNA, 33 bp, Homo sapien
aaaactaaggcatagataattaagcagtgtttc

SEQ ID NO: 982041 - DNA, 33 bp, Homo sapien
tctccaaatacagttacgttgggggttaggact

SEQ ID NO: 982042 - DNA, 33 bp, Homo sapien
tctccaaatacagttatgttgggggttaggact

SEQ ID NO: 982043 - DNA, 33 bp, Homo sapien
aggagggtagagaaataagctagagtctcaatc

SEQ ID NO: 982044 - DNA, 33 bp, Homo sapien
aggagggtagagaaatgagctagagtctcaatc

SEQ ID NO: 982045 - DNA, 33 bp, Homo sapien
ataataaaaacagtctcaagggtgataatccag

SEQ ID NO: 982046 - DNA, 33 bp, Homo sapien
ataataaaaacagtctgaagggtgataatccag

SEQ ID NO: 982047 - DNA, 33 bp, Homo sapien
gagttctagctgcacaatgcctcaaagccacaa

SEQ ID NO: 982048 - DNA, 33 bp, Homo sapien
gagttctagctgcacagtgcctcaaagccacaa

SEQ ID NO: 982049 - DNA, 33 bp, Homo sapien
tcagtacacagtgcttaaacatcaaatatgaaa

SEQ ID NO: 982050 - DNA, 33 bp, Homo sapien
tcagtacacagtgcttgaacatcaaatatgaaa

SEQ ID NO: 982051 - DNA, 33 bp, Homo sapien
tgagattcgtgccaacaacagacacttgggtac

SEQ ID NO: 982052 - DNA, 33 bp, Homo sapien
tgagattcgtgccaaccacagacacttgggtac

SEQ ID NO: 982053 - DNA, 33 bp, Homo sapien
gcaaagtactccaatgaagcctagaggaaggcc

SEQ ID NO: 982054 - DNA, 33 bp, Homo sapien
gcaaagtactccaatgcagcctagaggaaggcc

SEQ ID NO: 982055 - DNA, 33 bp, Homo sapien
acattgttttccagatcatccagtgaaatggcc

SEQ ID NO: 982056 - DNA, 33 bp, Homo sapien
acattgttttccagatgatccagtgaaatggcc

SEQ ID NO: 982057 - DNA, 33 bp, Homo sapien
agtacgagatgatgggaaacaatcagaatgagg

SEQ ID NO: 982058 - DNA, 33 bp, Homo sapien
agtacgagatgatggggaacaatcagaatgagg

SEQ ID NO: 982059 - DNA, 33 bp, Homo sapien
gaaatttcaccctagagagtcaatgggatgtca

SEQ ID NO: 982060 - DNA, 33 bp, Homo sapien
gaaatttcaccctagatagtcaatgggatgtca

SEQ ID NO: 982061 - DNA, 33 bp, Homo sapien
agtgcgctgacaagtacatcacggagcttagtc

SEQ ID NO: 982062 - DNA, 33 bp, Homo sapien
agtgcgctgacaagtatatcacggagcttagtc

SEQ ID NO: 982063 - DNA, 33 bp, Homo sapien
atccaatactacttaactgtgttgcttaaatgg

SEQ ID NO: 982064 - DNA, 33 bp, Homo sapien
atccaatactacttaattgtgttgcttaaatgg

SEQ ID NO: 982065 - DNA, 33 bp, Homo sapien
tgggtatatggaaacactactatctttgcaatt

SEQ ID NO: 982066 - DNA, 33 bp, Homo sapien
tgggtatatggaaacattactatctttgcaatt

SEQ ID NO: 982067 - DNA, 33 bp, Homo sapien
gggaagagctttcaaactgaaccaggattcggg

SEQ ID NO: 982068 - DNA, 33 bp, Homo sapien
gggaagagctttcaaattgaaccaggattcggg

SEQ ID NO: 982069 - DNA, 33 bp, Homo sapien
tttctgtgtaatactaggctaccaaaacgaaat

SEQ ID NO: 982070 - DNA, 33 bp, Homo sapien
tttctgtgtaatactatgctaccaaaacgaaat

SEQ ID NO: 982071 - DNA, 33 bp, Homo sapien
ctggtccctttcctgacggtgaagccgttccct

SEQ ID NO: 982072 - DNA, 33 bp, Homo sapien
ctggtccctttcctgatggtgaagccgttccct

SEQ ID NO: 982073 - DNA, 33 bp, Homo sapien
gtatttcaacagccacaaggatcctgtctacgt

SEQ ID NO: 982074 - DNA, 33 bp, Homo sapien
gtatttcaacagccacgaggatcctgtctacgt

SEQ ID NO: 982075 - DNA, 33 bp, Homo sapien
tcaaaatgatcaaattaaaagacctggtatatt

SEQ ID NO: 982076 - DNA, 33 bp, Homo sapien
tcaaaatgatcaaattgaaagacctggtatatt

SEQ ID NO: 982077 - DNA, 33 bp, Homo sapien
gataaagttgattttcaaagagcactgcctcta

SEQ ID NO: 982078 - DNA, 33 bp, Homo sapien
gataaagttgattttcgaagagcactgcctcta

SEQ ID NO: 982079 - DNA, 33 bp, Homo sapien
gagccctggaactagacgagatcttctgggcaa

SEQ ID NO: 982080 - DNA, 33 bp, Homo sapien
gagccctggaactagatgagatcttctgggcaa

SEQ ID NO: 982081 - DNA, 33 bp, Homo sapien
tcctttttctatatcccgcatgtaacaacttct

SEQ ID NO: 982082 - DNA, 33 bp, Homo sapien
tcctttttctatatcctgcatgtaacaacttct

SEQ ID NO: 982083 - DNA, 33 bp, Homo sapien
aagtgctaatttttaaacattcttgaatatttt

SEQ ID NO: 982084 - DNA, 33 bp, Homo sapien
aagtgctaatttttaagcattcttgaatatttt

SEQ ID NO: 982085 - DNA, 33 bp, Homo sapien
tgttggagggagtgtcaactagaaccagtacca

SEQ ID NO: 982086 - DNA, 33 bp, Homo sapien
tgttggagggagtgtccactagaaccagtacca

SEQ ID NO: 982087 - DNA, 33 bp, Homo sapien
attgagttgtaaataaatgataccaagtttatc

SEQ ID NO: 982088 - DNA, 33 bp, Homo sapien
attgagttgtaaataagtgataccaagtttatc

SEQ ID NO: 982089 - DNA, 33 bp, Homo sapien
atgcaagacactctcccaagaagtgtgatgtca

SEQ ID NO: 982090 - DNA, 33 bp, Homo sapien
atgcaagacactctcctaagaagtgtgatgtca

SEQ ID NO: 982091 - DNA, 33 bp, Homo sapien
ccatctccttgatccactgaaactggggtttta

SEQ ID NO: 982092 - DNA, 33 bp, Homo sapien
ccatctccttgatccattgaaactggggtttta

SEQ ID NO: 982093 - DNA, 33 bp, Homo sapien
cccagggctgcaccagaaaccctcttagcatct

SEQ ID NO: 982094 - DNA, 33 bp, Homo sapien
cccagggctgcaccaggaaccctcttagcatct

SEQ ID NO: 982095 - DNA, 33 bp, Homo sapien
catggacatctttgtaaggtcattattccgctt

SEQ ID NO: 982096 - DNA, 33 bp, Homo sapien
catggacatctttgtagggtcattattccgctt

SEQ ID NO: 982097 - DNA, 33 bp, Homo sapien
catggagggttgtcgcagaaatcaaagagggtg

SEQ ID NO: 982098 - DNA, 33 bp, Homo sapien
catggagggttgtcgcggaaatcaaagagggtg

SEQ ID NO: 982099 - DNA, 33 bp, Homo sapien
aaatctactgaagaaacgattgatgctttcatg

SEQ ID NO: 982100 - DNA, 33 bp, Homo sapien
aaatctactgaagaaatgattgatgctttcatg

SEQ ID NO: 982101 - DNA, 33 bp, Homo sapien
gggagaaaagaggcaaatggacagctgcaggga

SEQ ID NO: 982102 - DNA, 33 bp, Homo sapien
gggagaaaagaggcaagtggacagctgcaggga

SEQ ID NO: 982103 - DNA, 33 bp, Homo sapien
aagagtgagactcagacataagaagtaacttgc

SEQ ID NO: 982104 - DNA, 33 bp, Homo sapien
aagagtgagactcagatataagaagtaacttgc

SEQ ID NO: 982105 - DNA, 33 bp, Homo sapien
tcttggagctccacaaacccccatctttggctt

SEQ ID NO: 982106 - DNA, 33 bp, Homo sapien
tcttggagctccacaaccccccatctttggctt

SEQ ID NO: 982107 - DNA, 33 bp, Homo sapien
aaggaattcacgatacaggccaataagagagga

SEQ ID NO: 982108 - DNA, 33 bp, Homo sapien
aaggaattcacgatacgggccaataagagagga

SEQ ID NO: 982109 - DNA, 33 bp, Homo sapien
gctactgagagaagcacgctctttggattcaaa

SEQ ID NO: 982110 - DNA, 33 bp, Homo sapien
gctactgagagaagcaggctctttggattcaaa

SEQ ID NO: 982111 - DNA, 33 bp, Homo sapien
tacattcccatgtataataaaaggctacccatc

SEQ ID NO: 982112 - DNA, 33 bp, Homo sapien
tacattcccatgtatagtaaaaggctacccatc

SEQ ID NO: 982113 - DNA, 33 bp, Homo sapien
gtcactttctggcttacgtatggctatttgtca

SEQ ID NO: 982114 - DNA, 33 bp, Homo sapien
gtcactttctggcttatgtatggctatttgtca

SEQ ID NO: 982115 - DNA, 33 bp, Homo sapien
acgcaggaggtctctcaaaggtgaccatacagt

SEQ ID NO: 982116 - DNA, 33 bp, Homo sapien
acgcaggaggtctctcgaaggtgaccatacagt

SEQ ID NO: 982117 - DNA, 33 bp, Homo sapien
aggtctgaaggaagtcaagtcgggggtgtaagg

SEQ ID NO: 982118 - DNA, 33 bp, Homo sapien
aggtctgaaggaagtcgagtcgggggtgtaagg

SEQ ID NO: 982119 - DNA, 33 bp, Homo sapien
tgttgacaggagtgagcaattaatgtagagagg

SEQ ID NO: 982120 - DNA, 33 bp, Homo sapien
tgttgacaggagtgagtaattaatgtagagagg

SEQ ID NO: 982121 - DNA, 33 bp, Homo sapien
cacagctctcgggtgccatttatcagtggttgt

SEQ ID NO: 982122 - DNA, 33 bp, Homo sapien
cacagctctcgggtgctatttatcagtggttgt

SEQ ID NO: 982123 - DNA, 33 bp, Homo sapien
ctgcaacctagcctcactaaggcatcctgacaa

SEQ ID NO: 982124 - DNA, 33 bp, Homo sapien
ctgcaacctagcctcattaaggcatcctgacaa

SEQ ID NO: 982125 - DNA, 33 bp, Homo sapien
cacaattcaatctgcaatgacttctatagaaaa

SEQ ID NO: 982126 - DNA, 33 bp, Homo sapien
cacaattcaatctgcagtgacttctatagaaaa

SEQ ID NO: 982127 - DNA, 33 bp, Homo sapien
tgttgtagaaacatcacgctgatgctgacttca

SEQ ID NO: 982128 - DNA, 33 bp, Homo sapien
tgttgtagaaacatcatgctgatgctgacttca

SEQ ID NO: 982129 - DNA, 33 bp, Homo sapien
cagccaccttagcaaactatatggaggggaagc

SEQ ID NO: 982130 - DNA, 33 bp, Homo sapien
cagccaccttagcaaagtatatggaggggaagc

SEQ ID NO: 982131 - DNA, 33 bp, Homo sapien
gtgtggtgtcagctgaacccgaaaacctaaggt

SEQ ID NO: 982132 - DNA, 33 bp, Homo sapien
gtgtggtgtcagctgagcccgaaaacctaaggt

SEQ ID NO: 982133 - DNA, 33 bp, Homo sapien
gagtcaagtctttttaacactgagtgtctggct

SEQ ID NO: 982134 - DNA, 33 bp, Homo sapien
gagtcaagtctttttagcactgagtgtctggct

SEQ ID NO: 982135 - DNA, 33 bp, Homo sapien
atgagaaaagcttcataaaggtggcaatccagc

SEQ ID NO: 982136 - DNA, 33 bp, Homo sapien
atgagaaaagcttcatgaaggtggcaatccagc

SEQ ID NO: 982137 - DNA, 33 bp, Homo sapien
aacactgcctggtggaaaagggtctggtgctct

SEQ ID NO: 982138 - DNA, 33 bp, Homo sapien
aacactgcctggtggagaagggtctggtgctct

SEQ ID NO: 982139 - DNA, 33 bp, Homo sapien
agcagacaacgtggcacaggctttttttaaatt

SEQ ID NO: 982140 - DNA, 33 bp, Homo sapien
agcagacaacgtggcataggctttttttaaatt

SEQ ID NO: 982141 - DNA, 33 bp, Homo sapien
tatgaaatttacaggcagaactaaaggtcggaa

SEQ ID NO: 982142 - DNA, 33 bp, Homo sapien
tatgaaatttacaggcggaactaaaggtcggaa

SEQ ID NO: 982143 - DNA, 33 bp, Homo sapien
attatactgatttggacaagttgctctgggcct

SEQ ID NO: 982144 - DNA, 33 bp, Homo sapien
attatactgatttggagaagttgctctgggcct

SEQ ID NO: 982145 - DNA, 33 bp, Homo sapien
ttataaaaacatcaggcccactggatcaagtct

SEQ ID NO: 982146 - DNA, 33 bp, Homo sapien
ttataaaaacatcaggtccactggatcaagtct

SEQ ID NO: 982147 - DNA, 33 bp, Homo sapien
aatactgtttcagagacacctaagcaggaaacc

SEQ ID NO: 982148 - DNA, 33 bp, Homo sapien
aatactgtttcagagatacctaagcaggaaacc

SEQ ID NO: 982149 - DNA, 33 bp, Homo sapien
ctacttaaactgccagccagtggaataaggact

SEQ ID NO: 982150 - DNA, 33 bp, Homo sapien
ctacttaaactgccagtcagtggaataaggact

SEQ ID NO: 982151 - DNA, 33 bp, Homo sapien
aacctacatgagctaagaagataccatacttgt

SEQ ID NO: 982152 - DNA, 33 bp, Homo sapien
aacctacatgagctaataagataccatacttgt

SEQ ID NO: 982153 - DNA, 33 bp, Homo sapien
ggatccttgcagtaaaaagcaagaagcagataa

SEQ ID NO: 982154 - DNA, 33 bp, Homo sapien
ggatccttgcagtaaagagcaagaagcagataa

SEQ ID NO: 982155 - DNA, 33 bp, Homo sapien
tgtatgatgtagtacgcaaacactgtaaaaatg

SEQ ID NO: 982156 - DNA, 33 bp, Homo sapien
tgtatgatgtagtacgtaaacactgtaaaaatg

SEQ ID NO: 982157 - DNA, 33 bp, Homo sapien
ttgctctattggacaccgaaatcctggggttaa

SEQ ID NO: 982158 - DNA, 33 bp, Homo sapien
ttgctctattggacactgaaatcctggggttaa

SEQ ID NO: 982159 - DNA, 33 bp, Homo sapien
tggtgtgcatgacaaaaaaagggtgatagagtc

SEQ ID NO: 982160 - DNA, 33 bp, Homo sapien
tggtgtgcatgacaaacaaagggtgatagagtc

SEQ ID NO: 982161 - DNA, 33 bp, Homo sapien
accgattttgccttaccgatcattgttctctaa

SEQ ID NO: 982162 - DNA, 33 bp, Homo sapien
accgattttgccttacggatcattgttctctaa

SEQ ID NO: 982163 - DNA, 33 bp, Homo sapien
aatttgaaaaatctccaatcttattaaaatgta

SEQ ID NO: 982164 - DNA, 33 bp, Homo sapien
aatttgaaaaatctcccatcttattaaaatgta

SEQ ID NO: 982165 - DNA, 33 bp, Homo sapien
gggtggctctgaacgaatcatcttcctctggga

SEQ ID NO: 982166 - DNA, 33 bp, Homo sapien
gggtggctctgaacgattcatcttcctctggga

SEQ ID NO: 982167 - DNA, 33 bp, Homo sapien
acgaataggcaatgacaccaccaaatgtatcta

SEQ ID NO: 982168 - DNA, 33 bp, Homo sapien
acgaataggcaatgacgccaccaaatgtatcta

SEQ ID NO: 982169 - DNA, 33 bp, Homo sapien
cattttactgtttatacgtatctcataacatca

SEQ ID NO: 982170 - DNA, 33 bp, Homo sapien
cattttactgtttatatgtatctcataacatca

SEQ ID NO: 982171 - DNA, 33 bp, Homo sapien
tatatcctgctatacacacaatcctgcaccttg

SEQ ID NO: 982172 - DNA, 33 bp, Homo sapien
tatatcctgctatacatacaatcctgcaccttg

SEQ ID NO: 982173 - DNA, 33 bp, Homo sapien
caggatttgggcacaaagaaaggagatttattt

SEQ ID NO: 982174 - DNA, 33 bp, Homo sapien
caggatttgggcacaaggaaaggagatttattt

SEQ ID NO: 982175 - DNA, 33 bp, Homo sapien
ctggctccttcttagcggaaatatccccttttt

SEQ ID NO: 982176 - DNA, 33 bp, Homo sapien
ctggctccttcttagctgaaatatccccttttt

SEQ ID NO: 982177 - DNA, 33 bp, Homo sapien
gacaatggcactaataagttaggcaacagatat

SEQ ID NO: 982178 - DNA, 33 bp, Homo sapien
gacaatggcactaataggttaggcaacagatat

SEQ ID NO: 982179 - DNA, 33 bp, Homo sapien
acagggattcataaaagaattcaccatataaaa

SEQ ID NO: 982180 - DNA, 33 bp, Homo sapien
acagggattcataaaataattcaccatataaaa

SEQ ID NO: 982181 - DNA, 33 bp, Homo sapien
ctgcttttctctttgcagattctggtttagact

SEQ ID NO: 982182 - DNA, 33 bp, Homo sapien
ctgcttttctctttgcggattctggtttagact

SEQ ID NO: 982183 - DNA, 33 bp, Homo sapien
acatctttcactggaaggacttgggagtgtact

SEQ ID NO: 982184 - DNA, 33 bp, Homo sapien
acatctttcactggaatgacttgggagtgtact

SEQ ID NO: 982185 - DNA, 33 bp, Homo sapien
acgtataccacacataccattcagcgctgaaga

SEQ ID NO: 982186 - DNA, 33 bp, Homo sapien
acgtataccacacatatcattcagcgctgaaga

SEQ ID NO: 982187 - DNA, 33 bp, Homo sapien
ttcttccccctgtgtcccaagaatactcttatc

SEQ ID NO: 982188 - DNA, 33 bp, Homo sapien
ttcttccccctgtgtctcaagaatactcttatc

SEQ ID NO: 982189 - DNA, 33 bp, Homo sapien
ttaaaaatacagactcccacactttacatccag

SEQ ID NO: 982190 - DNA, 33 bp, Homo sapien
ttaaaaatacagactcgcacactttacatccag

SEQ ID NO: 982191 - DNA, 33 bp, Homo sapien
agcaataccaccagacaatagatgtaatttgga

SEQ ID NO: 982192 - DNA, 33 bp, Homo sapien
agcaataccaccagacgatagatgtaatttgga

SEQ ID NO: 982193 - DNA, 33 bp, Homo sapien
atcacattctagaaaacatggaagaatcaatga

SEQ ID NO: 982194 - DNA, 33 bp, Homo sapien
atcacattctagaaaatatggaagaatcaatga

SEQ ID NO: 982195 - DNA, 33 bp, Homo sapien
tggttctgttaggaagcaaaaagagggaattgg

SEQ ID NO: 982196 - DNA, 33 bp, Homo sapien
tggttctgttaggaaggaaaaagagggaattgg

SEQ ID NO: 982197 - DNA, 33 bp, Homo sapien
gctttaataaagtctacgctcaaatgcctttat

SEQ ID NO: 982198 - DNA, 33 bp, Homo sapien
gctttaataaagtctatgctcaaatgcctttat

SEQ ID NO: 982199 - DNA, 33 bp, Homo sapien
gatggagtatcctgtacaaatttcatcactaga

SEQ ID NO: 982200 - DNA, 33 bp, Homo sapien
gatggagtatcctgtataaatttcatcactaga

SEQ ID NO: 982201 - DNA, 33 bp, Homo sapien
tgaatctgctaaaatgaactactagccagtata

SEQ ID NO: 982202 - DNA, 33 bp, Homo sapien
tgaatctgctaaaatggactactagccagtata

SEQ ID NO: 982203 - DNA, 33 bp, Homo sapien
acttttaacctctgtaacctcaacatcttaata

SEQ ID NO: 982204 - DNA, 33 bp, Homo sapien
acttttaacctctgtatcctcaacatcttaata

SEQ ID NO: 982205 - DNA, 33 bp, Homo sapien
gaagcacaatgtaatcaccagagcactgcgctg

SEQ ID NO: 982206 - DNA, 33 bp, Homo sapien
gaagcacaatgtaatcgccagagcactgcgctg

SEQ ID NO: 982207 - DNA, 33 bp, Homo sapien
ttttctttggaaggaaactgggtatctcatttc

SEQ ID NO: 982208 - DNA, 33 bp, Homo sapien
ttttctttggaaggaacctgggtatctcatttc

SEQ ID NO: 982209 - DNA, 33 bp, Homo sapien
tggttggcttgtcagacgaactggctaaactgg

SEQ ID NO: 982210 - DNA, 33 bp, Homo sapien
tggttggcttgtcagatgaactggctaaactgg

SEQ ID NO: 982211 - DNA, 33 bp, Homo sapien
tctaggccctgggtggaattcaaaatcatacaa

SEQ ID NO: 982212 - DNA, 33 bp, Homo sapien
tctaggccctgggtgggattcaaaatcatacaa

SEQ ID NO: 982213 - DNA, 33 bp, Homo sapien
gaaaggaaatcctagaacttgagaggaaaaaaa

SEQ ID NO: 982214 - DNA, 33 bp, Homo sapien
gaaaggaaatcctagaccttgagaggaaaaaaa

SEQ ID NO: 982215 - DNA, 33 bp, Homo sapien
tatgcggtgtgctgtacagttaaatgtaaataa

SEQ ID NO: 982216 - DNA, 33 bp, Homo sapien
tatgcggtgtgctgtatagttaaatgtaaataa

SEQ ID NO: 982217 - DNA, 33 bp, Homo sapien
gccacaaaacattgtgcaacaaccttctctaga

SEQ ID NO: 982218 - DNA, 33 bp, Homo sapien
gccacaaaacattgtggaacaaccttctctaga

SEQ ID NO: 982219 - DNA, 33 bp, Homo sapien
acactgagtaatgcagaaaaaacagatcaccac

SEQ ID NO: 982220 - DNA, 33 bp, Homo sapien
acactgagtaatgcaggaaaaacagatcaccac

SEQ ID NO: 982221 - DNA, 33 bp, Homo sapien
agctgtcgaagaaatcaaagtagcatatgcaca

SEQ ID NO: 982222 - DNA, 33 bp, Homo sapien
agctgtcgaagaaatcgaagtagcatatgcaca

SEQ ID NO: 982223 - DNA, 33 bp, Homo sapien
gacctcaagatgcttacaaattctaaatcaaca

SEQ ID NO: 982224 - DNA, 33 bp, Homo sapien
gacctcaagatgcttataaattctaaatcaaca

SEQ ID NO: 982225 - DNA, 33 bp, Homo sapien
agttggaggcagcaaaggttattgttgatgttg

SEQ ID NO: 982226 - DNA, 33 bp, Homo sapien
agttggaggcagcaaatgttattgttgatgttg

SEQ ID NO: 982227 - DNA, 33 bp, Homo sapien
aaccagaagatgaacaagaactatttagaatat

SEQ ID NO: 982228 - DNA, 33 bp, Homo sapien
aaccagaagatgaacaggaactatttagaatat

SEQ ID NO: 982229 - DNA, 33 bp, Homo sapien
ttacgtcgtgcttggcacattcatagcaggcac

SEQ ID NO: 982230 - DNA, 33 bp, Homo sapien
ttacgtcgtgcttggcgcattcatagcaggcac

SEQ ID NO: 982231 - DNA, 33 bp, Homo sapien
ttgaggtgacttcagaatacaacacaacatcca

SEQ ID NO: 982232 - DNA, 33 bp, Homo sapien
ttgaggtgacttcagagtacaacacaacatcca

SEQ ID NO: 982233 - DNA, 33 bp, Homo sapien
agaaagtaccgagaatgatcagtagtggaactt

SEQ ID NO: 982234 - DNA, 33 bp, Homo sapien
agaaagtaccgagaattatcagtagtggaactt

SEQ ID NO: 982235 - DNA, 33 bp, Homo sapien
gaacacttgcattaaaattaagagtgggtaatc

SEQ ID NO: 982236 - DNA, 33 bp, Homo sapien
gaacacttgcattaaacttaagagtgggtaatc

SEQ ID NO: 982237 - DNA, 33 bp, Homo sapien
gaatttggaagtaggacaaaagcttaattgctg

SEQ ID NO: 982238 - DNA, 33 bp, Homo sapien
gaatttggaagtaggagaaaagcttaattgctg

SEQ ID NO: 982239 - DNA, 33 bp, Homo sapien
caggtaagtactaatcacaggctgcagagggat

SEQ ID NO: 982240 - DNA, 33 bp, Homo sapien
caggtaagtactaatcgcaggctgcagagggat

SEQ ID NO: 982241 - DNA, 33 bp, Homo sapien
ggctggtttccagaacacaaataaccgttcgta

SEQ ID NO: 982242 - DNA, 33 bp, Homo sapien
ggctggtttccagaactcaaataaccgttcgta

SEQ ID NO: 982243 - DNA, 33 bp, Homo sapien
tgaatggaaggtagaaacttttcagccaaagtg

SEQ ID NO: 982244 - DNA, 33 bp, Homo sapien
tgaatggaaggtagaatcttttcagccaaagtg

SEQ ID NO: 982245 - DNA, 33 bp, Homo sapien
tgacccaagctaaggaaagaagcctgggctaga

SEQ ID NO: 982246 - DNA, 33 bp, Homo sapien
tgacccaagctaaggagagaagcctgggctaga

SEQ ID NO: 982247 - DNA, 33 bp, Homo sapien
ccacgttacatgcaaacaaaacccctgaacatc

SEQ ID NO: 982248 - DNA, 33 bp, Homo sapien
ccacgttacatgcaaataaaacccctgaacatc

SEQ ID NO: 982249 - DNA, 33 bp, Homo sapien
tcgtacttaccaaatacggattgagtccaggag

SEQ ID NO: 982250 - DNA, 33 bp, Homo sapien
tcgtacttaccaaatatggattgagtccaggag

SEQ ID NO: 982251 - DNA, 33 bp, Homo sapien
gtaaatgtatgtaaaacattaccggagtccatg

SEQ ID NO: 982252 - DNA, 33 bp, Homo sapien
gtaaatgtatgtaaaagattaccggagtccatg

SEQ ID NO: 982253 - DNA, 33 bp, Homo sapien
ttctcccgggaaagccggcattgtcaggagaat

SEQ ID NO: 982254 - DNA, 33 bp, Homo sapien
ttctcccgggaaagcctgcattgtcaggagaat

SEQ ID NO: 982255 - DNA, 33 bp, Homo sapien
ttgccttaaccaaatacggggcctgacagcttt

SEQ ID NO: 982256 - DNA, 33 bp, Homo sapien
ttgccttaaccaaatatggggcctgacagcttt

SEQ ID NO: 982257 - DNA, 33 bp, Homo sapien
ttcagtccagaaatcaagggctggcaaatgatc

SEQ ID NO: 982258 - DNA, 33 bp, Homo sapien
ttcagtccagaaatcacgggctggcaaatgatc

SEQ ID NO: 982259 - DNA, 33 bp, Homo sapien
ctcagagtagactgaactatcccacagttttat

SEQ ID NO: 982260 - DNA, 33 bp, Homo sapien
ctcagagtagactgaagtatcccacagttttat

SEQ ID NO: 982261 - DNA, 33 bp, Homo sapien
ggtcttctttttcagacactggaaagtccagaa

SEQ ID NO: 982262 - DNA, 33 bp, Homo sapien
ggtcttctttttcagatactggaaagtccagaa

SEQ ID NO: 982263 - DNA, 33 bp, Homo sapien
tgagcaacttctctcaaattatttttccctgcg

SEQ ID NO: 982264 - DNA, 33 bp, Homo sapien
tgagcaacttctctcatattatttttccctgcg

SEQ ID NO: 982265 - DNA, 33 bp, Homo sapien
taatttgctgtatttccaacaaatagtgtctgt

SEQ ID NO: 982266 - DNA, 33 bp, Homo sapien
taatttgctgtatttctaacaaatagtgtctgt

SEQ ID NO: 982267 - DNA, 33 bp, Homo sapien
tatgaaaggctctcacgcaagcatttttctgta

SEQ ID NO: 982268 - DNA, 33 bp, Homo sapien
tatgaaaggctctcactcaagcatttttctgta

SEQ ID NO: 982269 - DNA, 33 bp, Homo sapien
cagttttatcattctgcactgtaggaaggttga

SEQ ID NO: 982270 - DNA, 33 bp, Homo sapien
cagttttatcattctgtactgtaggaaggttga

SEQ ID NO: 982271 - DNA, 33 bp, Homo sapien
gacacgagtggaattagagaatttctcatggcc

SEQ ID NO: 982272 - DNA, 33 bp, Homo sapien
gacacgagtggaattatagaatttctcatggcc

SEQ ID NO: 982273 - DNA, 33 bp, Homo sapien
cactgccttagtgtataaatcactattatctct

SEQ ID NO: 982274 - DNA, 33 bp, Homo sapien
cactgccttagtgtatgaatcactattatctct

SEQ ID NO: 982275 - DNA, 33 bp, Homo sapien
tttggccacaggttcacggaggaagggaatttg

SEQ ID NO: 982276 - DNA, 33 bp, Homo sapien
tttggccacaggttcatggaggaagggaatttg

SEQ ID NO: 982277 - DNA, 33 bp, Homo sapien
ttgagaaaaaaattccaattccaagaagcatct

SEQ ID NO: 982278 - DNA, 33 bp, Homo sapien
ttgagaaaaaaattccgattccaagaagcatct

SEQ ID NO: 982279 - DNA, 33 bp, Homo sapien
atagagccatcccataataactctttcataccc

SEQ ID NO: 982280 - DNA, 33 bp, Homo sapien
atagagccatcccatagtaactctttcataccc

SEQ ID NO: 982281 - DNA, 33 bp, Homo sapien
gaaaaattctcacatacagtaaatgcaaatagt

SEQ ID NO: 982282 - DNA, 33 bp, Homo sapien
gaaaaattctcacatatagtaaatgcaaatagt

SEQ ID NO: 982283 - DNA, 33 bp, Homo sapien
tcttctgagacggtggaatgttcttctaacagg

SEQ ID NO: 982284 - DNA, 33 bp, Homo sapien
tcttctgagacggtgggatgttcttctaacagg

SEQ ID NO: 982285 - DNA, 33 bp, Homo sapien
gataattattcctcacacctgttagaagaacat

SEQ ID NO: 982286 - DNA, 33 bp, Homo sapien
gataattattcctcacgcctgttagaagaacat

SEQ ID NO: 982287 - DNA, 33 bp, Homo sapien
gagtcaagagtcaaacaggggatcccactagcc

SEQ ID NO: 982288 - DNA, 33 bp, Homo sapien
gagtcaagagtcaaacgggggatcccactagcc

SEQ ID NO: 982289 - DNA, 33 bp, Homo sapien
gactgacaagtaggaacacactaactttggtat

SEQ ID NO: 982290 - DNA, 33 bp, Homo sapien
gactgacaagtaggaatacactaactttggtat

SEQ ID NO: 982291 - DNA, 33 bp, Homo sapien
agctaaacagtcacacaattatgcagctatgca

SEQ ID NO: 982292 - DNA, 33 bp, Homo sapien
agctaaacagtcacactattatgcagctatgca

SEQ ID NO: 982293 - DNA, 33 bp, Homo sapien
agagaaggagaagctaaatttccatcattgaaa

SEQ ID NO: 982294 - DNA, 33 bp, Homo sapien
agagaaggagaagctacatttccatcattgaaa

SEQ ID NO: 982295 - DNA, 33 bp, Homo sapien
ggacttctccacccagcccttgtctcaaaagcc

SEQ ID NO: 982296 - DNA, 33 bp, Homo sapien
ggacttctccacccaggccttgtctcaaaagcc

SEQ ID NO: 982297 - DNA, 33 bp, Homo sapien
agtccagcaaaggggaggtagcacagcaggaag

SEQ ID NO: 982298 - DNA, 33 bp, Homo sapien
agtccagcaaaggggatgtagcacagcaggaag

SEQ ID NO: 982299 - DNA, 33 bp, Homo sapien
agtcctgatagtagagaccctatgttattgatt

SEQ ID NO: 982300 - DNA, 33 bp, Homo sapien
agtcctgatagtagagtccctatgttattgatt

SEQ ID NO: 982301 - DNA, 33 bp, Homo sapien
atctttgggattctgacaaaggactcttggcca

SEQ ID NO: 982302 - DNA, 33 bp, Homo sapien
atctttgggattctgagaaaggactcttggcca

SEQ ID NO: 982303 - DNA, 33 bp, Homo sapien
tgttcaagccactaaaattgtggtagcttgttg

SEQ ID NO: 982304 - DNA, 33 bp, Homo sapien
tgttcaagccactaaagttgtggtagcttgttg

SEQ ID NO: 982305 - DNA, 33 bp, Homo sapien
aggttccacagcaaaaaggaattcaggttgtaa

SEQ ID NO: 982306 - DNA, 33 bp, Homo sapien
aggttccacagcaaaagggaattcaggttgtaa

SEQ ID NO: 982307 - DNA, 33 bp, Homo sapien
atgatttcactgcatcccccaaaattcaatccc

SEQ ID NO: 982308 - DNA, 33 bp, Homo sapien
atgatttcactgcatctcccaaaattcaatccc

SEQ ID NO: 982309 - DNA, 33 bp, Homo sapien
actcaatacatccaaactgcatttaccatgtta

SEQ ID NO: 982310 - DNA, 33 bp, Homo sapien
actcaatacatccaaattgcatttaccatgtta

SEQ ID NO: 982311 - DNA, 33 bp, Homo sapien
gtaacaatttagaaagaacacagtcaggatgaa

SEQ ID NO: 982312 - DNA, 33 bp, Homo sapien
gtaacaatttagaaaggacacagtcaggatgaa

SEQ ID NO: 982313 - DNA, 33 bp, Homo sapien
cccagctggactcaccaaattggaaatctctct

SEQ ID NO: 982314 - DNA, 33 bp, Homo sapien
cccagctggactcaccgaattggaaatctctct

SEQ ID NO: 982315 - DNA, 33 bp, Homo sapien
gtcatgaagacttacacctatattttcctttca

SEQ ID NO: 982316 - DNA, 33 bp, Homo sapien
gtcatgaagacttacatctatattttcctttca

SEQ ID NO: 982317 - DNA, 33 bp, Homo sapien
tatctaaaggttctaacgatgcctgcacacata

SEQ ID NO: 982318 - DNA, 33 bp, Homo sapien
tatctaaaggttctaatgatgcctgcacacata

SEQ ID NO: 982319 - DNA, 33 bp, Homo sapien
attgccagaacatccaaaggcagacttgtctag

SEQ ID NO: 982320 - DNA, 33 bp, Homo sapien
attgccagaacatccagaggcagacttgtctag

SEQ ID NO: 982321 - DNA, 33 bp, Homo sapien
gatcagtttggtttgacacttataaatagaatc

SEQ ID NO: 982322 - DNA, 33 bp, Homo sapien
gatcagtttggtttgagacttataaatagaatc

SEQ ID NO: 982323 - DNA, 33 bp, Homo sapien
catcttagacagaaaaactttgcgttggccttt

SEQ ID NO: 982324 - DNA, 33 bp, Homo sapien
catcttagacagaaaacctttgcgttggccttt

SEQ ID NO: 982325 - DNA, 33 bp, Homo sapien
aggtttagaaaaactaaagttgcgtgtatggta

SEQ ID NO: 982326 - DNA, 33 bp, Homo sapien
aggtttagaaaaactatagttgcgtgtatggta

SEQ ID NO: 982327 - DNA, 33 bp, Homo sapien
acctggcaggactgtacgattgatgagatagtg

SEQ ID NO: 982328 - DNA, 33 bp, Homo sapien
acctggcaggactgtatgattgatgagatagtg

SEQ ID NO: 982329 - DNA, 33 bp, Homo sapien
tattttgaggcaaacacatctgttagaggaatt

SEQ ID NO: 982330 - DNA, 33 bp, Homo sapien
tattttgaggcaaacatatctgttagaggaatt

SEQ ID NO: 982331 - DNA, 33 bp, Homo sapien
tatataaagagagagaaggttaagtgagataat

SEQ ID NO: 982332 - DNA, 33 bp, Homo sapien
tatataaagagagagagggttaagtgagataat

SEQ ID NO: 982333 - DNA, 33 bp, Homo sapien
gcagatccaaaccagaaaagtcctgtgccttgc

SEQ ID NO: 982334 - DNA, 33 bp, Homo sapien
gcagatccaaaccagagaagtcctgtgccttgc

SEQ ID NO: 982335 - DNA, 33 bp, Homo sapien
gagagaaatggatcaacagtgcttgtaaagatc

SEQ ID NO: 982336 - DNA, 33 bp, Homo sapien
gagagaaatggatcaatagtgcttgtaaagatc

SEQ ID NO: 982337 - DNA, 33 bp, Homo sapien
tcaaaaccaatgaaaggagtcttaacaacagta

SEQ ID NO: 982338 - DNA, 33 bp, Homo sapien
tcaaaaccaatgaaagtagtcttaacaacagta

SEQ ID NO: 982339 - DNA, 33 bp, Homo sapien
cacaattactggaatacaaccagtgctgctgtc

SEQ ID NO: 982340 - DNA, 33 bp, Homo sapien
cacaattactggaatagaaccagtgctgctgtc

SEQ ID NO: 982341 - DNA, 33 bp, Homo sapien
ccactttgcttgtggcagagctatcagcctcct

SEQ ID NO: 982342 - DNA, 33 bp, Homo sapien
ccactttgcttgtggcggagctatcagcctcct

SEQ ID NO: 982343 - DNA, 33 bp, Homo sapien
tcttcatgtcttgacaatgcttccttttttgtt

SEQ ID NO: 982344 - DNA, 33 bp, Homo sapien
tcttcatgtcttgacagtgcttccttttttgtt

SEQ ID NO: 982345 - DNA, 33 bp, Homo sapien
atagatctcaaagatacgggaaagtagcatatt

SEQ ID NO: 982346 - DNA, 33 bp, Homo sapien
atagatctcaaagatatgggaaagtagcatatt

SEQ ID NO: 982347 - DNA, 33 bp, Homo sapien
tgactcaaggtgggaactaaaacactaggctgg

SEQ ID NO: 982348 - DNA, 33 bp, Homo sapien
tgactcaaggtgggaagtaaaacactaggctgg

SEQ ID NO: 982349 - DNA, 33 bp, Homo sapien
tccttgtaaccacttagcttggttttagcttag

SEQ ID NO: 982350 - DNA, 33 bp, Homo sapien
tccttgtaaccacttatcttggttttagcttag

SEQ ID NO: 982351 - DNA, 33 bp, Homo sapien
tggagttgagtagcagcagcttcccaaatactc

SEQ ID NO: 982352 - DNA, 33 bp, Homo sapien
tggagttgagtagcaggagcttcccaaatactc

SEQ ID NO: 982353 - DNA, 33 bp, Homo sapien
gaaaatgcctgtaagacgatagggagtatttgg

SEQ ID NO: 982354 - DNA, 33 bp, Homo sapien
gaaaatgcctgtaagatgatagggagtatttgg

SEQ ID NO: 982355 - DNA, 33 bp, Homo sapien
gtttttgattaaatgaatagtcagtgataatat

SEQ ID NO: 982356 - DNA, 33 bp, Homo sapien
gtttttgattaaatgagtagtcagtgataatat

SEQ ID NO: 982357 - DNA, 33 bp, Homo sapien
ttctctcgaacacatacccttctttcccagact

SEQ ID NO: 982358 - DNA, 33 bp, Homo sapien
ttctctcgaacacatatccttctttcccagact

SEQ ID NO: 982359 - DNA, 33 bp, Homo sapien
ttacctaaaatgttacaaagcctctctaattga

SEQ ID NO: 982360 - DNA, 33 bp, Homo sapien
ttacctaaaatgttacgaagcctctctaattga

SEQ ID NO: 982361 - DNA, 33 bp, Homo sapien
attaaaccatgtcccagtaatataaagcaaacc

SEQ ID NO: 982362 - DNA, 33 bp, Homo sapien
attaaaccatgtcccattaatataaagcaaacc

SEQ ID NO: 982363 - DNA, 33 bp, Homo sapien
cagaactgtgtggttacggcatgcattaggctc

SEQ ID NO: 982364 - DNA, 33 bp, Homo sapien
cagaactgtgtggttatggcatgcattaggctc

SEQ ID NO: 982365 - DNA, 33 bp, Homo sapien
aggctgtgctatcgcccagcaaaaatccaatga

SEQ ID NO: 982366 - DNA, 33 bp, Homo sapien
aggctgtgctatcgcctagcaaaaatccaatga

SEQ ID NO: 982367 - DNA, 33 bp, Homo sapien
tgagtctgagcctgaaacagccattatttctgg

SEQ ID NO: 982368 - DNA, 33 bp, Homo sapien
tgagtctgagcctgaagcagccattatttctgg

SEQ ID NO: 982369 - DNA, 33 bp, Homo sapien
gtcctgtgtcccaatccagagaaatatggaaga

SEQ ID NO: 982370 - DNA, 33 bp, Homo sapien
gtcctgtgtcccaatctagagaaatatggaaga

SEQ ID NO: 982371 - DNA, 33 bp, Homo sapien
tcctaagaaaaccacacgtcaagcctctatcac

SEQ ID NO: 982372 - DNA, 33 bp, Homo sapien
tcctaagaaaaccacatgtcaagcctctatcac

SEQ ID NO: 982373 - DNA, 33 bp, Homo sapien
gtgatcccagaaataaccacaaattatggtatc

SEQ ID NO: 982374 - DNA, 33 bp, Homo sapien
gtgatcccagaaataatcacaaattatggtatc

SEQ ID NO: 982375 - DNA, 33 bp, Homo sapien
aggtccttgctctcataaaacttacattccagg

SEQ ID NO: 982376 - DNA, 33 bp, Homo sapien
aggtccttgctctcatgaaacttacattccagg

SEQ ID NO: 982377 - DNA, 33 bp, Homo sapien
ttattgcttcagatgcaaagtccaaaaatctca

SEQ ID NO: 982378 - DNA, 33 bp, Homo sapien
ttattgcttcagatgcgaagtccaaaaatctca

SEQ ID NO: 982379 - DNA, 33 bp, Homo sapien
caaagcgatttttacaatgaaggtgatggcaat

SEQ ID NO: 982380 - DNA, 33 bp, Homo sapien
caaagcgatttttacagtgaaggtgatggcaat

SEQ ID NO: 982381 - DNA, 33 bp, Homo sapien
tctgttgtgagtttaaatccattgcacaggtgt

SEQ ID NO: 982382 - DNA, 33 bp, Homo sapien
tctgttgtgagtttaactccattgcacaggtgt

SEQ ID NO: 982383 - DNA, 33 bp, Homo sapien
ctcctcttacacatccaatagtagaatttccaa

SEQ ID NO: 982384 - DNA, 33 bp, Homo sapien
ctcctcttacacatccgatagtagaatttccaa

SEQ ID NO: 982385 - DNA, 33 bp, Homo sapien
ttttaactgaatcatcactttaaatgccccatc

SEQ ID NO: 982386 - DNA, 33 bp, Homo sapien
ttttaactgaatcatcgctttaaatgccccatc

SEQ ID NO: 982387 - DNA, 33 bp, Homo sapien
cctgctcagaaattgccctcctgtctagtcaca

SEQ ID NO: 982388 - DNA, 33 bp, Homo sapien
cctgctcagaaattgctctcctgtctagtcaca

SEQ ID NO: 982389 - DNA, 33 bp, Homo sapien
agacctaatctcagccagagagaatgcaacatg

SEQ ID NO: 982390 - DNA, 33 bp, Homo sapien
agacctaatctcagccggagagaatgcaacatg

SEQ ID NO: 982391 - DNA, 33 bp, Homo sapien
acactcagaaaatccaagccaactgcccttcac

SEQ ID NO: 982392 - DNA, 33 bp, Homo sapien
acactcagaaaatccacgccaactgcccttcac

SEQ ID NO: 982393 - DNA, 33 bp, Homo sapien
tctcaaaactcattgccattgcatctgtaaaca

SEQ ID NO: 982394 - DNA, 33 bp, Homo sapien
tctcaaaactcattgctattgcatctgtaaaca

SEQ ID NO: 982395 - DNA, 33 bp, Homo sapien
taaacttccctcatcccagaactataacataat

SEQ ID NO: 982396 - DNA, 33 bp, Homo sapien
taaacttccctcatccgagaactataacataat

SEQ ID NO: 982397 - DNA, 33 bp, Homo sapien
aatctaggaaatgcaaccagagtgagaagacca

SEQ ID NO: 982398 - DNA, 33 bp, Homo sapien
aatctaggaaatgcaatcagagtgagaagacca

SEQ ID NO: 982399 - DNA, 33 bp, Homo sapien
agattggggcccactaatagaggttagagatga

SEQ ID NO: 982400 - DNA, 33 bp, Homo sapien
agattggggcccactagtagaggttagagatga

SEQ ID NO: 982401 - DNA, 33 bp, Homo sapien
ggacttgagggatccacgttgtatccaggaaga

SEQ ID NO: 982402 - DNA, 33 bp, Homo sapien
ggacttgagggatccatgttgtatccaggaaga

SEQ ID NO: 982403 - DNA, 33 bp, Homo sapien
tctactccagacaacacagtttaagagcaacat

SEQ ID NO: 982404 - DNA, 33 bp, Homo sapien
tctactccagacaacagagtttaagagcaacat

SEQ ID NO: 982405 - DNA, 33 bp, Homo sapien
catgctaggggtaagaagggatgacgtggggct

SEQ ID NO: 982406 - DNA, 33 bp, Homo sapien
catgctaggggtaagacgggatgacgtggggct

SEQ ID NO: 982407 - DNA, 33 bp, Homo sapien
gattactggttgtgaaaacttgctaaccactgt

SEQ ID NO: 982408 - DNA, 33 bp, Homo sapien
gattactggttgtgaagacttgctaaccactgt

SEQ ID NO: 982409 - DNA, 33 bp, Homo sapien
tttccaagaaattaccacattgatctggaagca

SEQ ID NO: 982410 - DNA, 33 bp, Homo sapien
tttccaagaaattaccccattgatctggaagca

SEQ ID NO: 982411 - DNA, 33 bp, Homo sapien
gcttgcaagcaaagagaaaatatgcagagctat

SEQ ID NO: 982412 - DNA, 33 bp, Homo sapien
gcttgcaagcaaagaggaaatatgcagagctat

SEQ ID NO: 982413 - DNA, 33 bp, Homo sapien
ttaatacagccagcaaagaatccaatgactgtt

SEQ ID NO: 982414 - DNA, 33 bp, Homo sapien
ttaatacagccagcaatgaatccaatgactgtt

SEQ ID NO: 982415 - DNA, 33 bp, Homo sapien
gatgctgtgcagccaactaacaggtattcatta

SEQ ID NO: 982416 - DNA, 33 bp, Homo sapien
gatgctgtgcagccaattaacaggtattcatta

SEQ ID NO: 982417 - DNA, 33 bp, Homo sapien
taaaactgacacgaaggatagagtttcacagat

SEQ ID NO: 982418 - DNA, 33 bp, Homo sapien
taaaactgacacgaagtatagagtttcacagat

SEQ ID NO: 982419 - DNA, 33 bp, Homo sapien
ctccaatccaaactcaatccttttatctgtcac

SEQ ID NO: 982420 - DNA, 33 bp, Homo sapien
ctccaatccaaactcagtccttttatctgtcac

SEQ ID NO: 982421 - DNA, 33 bp, Homo sapien
ccaatcttccactgaaacttaaagatacacatg

SEQ ID NO: 982422 - DNA, 33 bp, Homo sapien
ccaatcttccactgaaccttaaagatacacatg

SEQ ID NO: 982423 - DNA, 33 bp, Homo sapien
attctcttaatatttgcagactgctgtatgggc

SEQ ID NO: 982424 - DNA, 33 bp, Homo sapien
attctcttaatatttgtagactgctgtatgggc

SEQ ID NO: 982425 - DNA, 33 bp, Homo sapien
agaaatcagtggttgacactttggaggattgac

SEQ ID NO: 982426 - DNA, 33 bp, Homo sapien
agaaatcagtggttgatactttggaggattgac

SEQ ID NO: 982427 - DNA, 33 bp, Homo sapien
gaactgggaatcacaactcagacttctgagcaa

SEQ ID NO: 982428 - DNA, 33 bp, Homo sapien
gaactgggaatcacaattcagacttctgagcaa

SEQ ID NO: 982429 - DNA, 33 bp, Homo sapien
tgagaaagatataataaagacagacactccaga

SEQ ID NO: 982430 - DNA, 33 bp, Homo sapien
tgagaaagatataatagagacagacactccaga

SEQ ID NO: 982431 - DNA, 33 bp, Homo sapien
ttgtgtatttctatcaggaatggcttaattgta

SEQ ID NO: 982432 - DNA, 33 bp, Homo sapien
ttgtgtatttctatcatgaatggcttaattgta

SEQ ID NO: 982433 - DNA, 33 bp, Homo sapien
aatatgatgttcaaccaaggtaactttgtaaca

SEQ ID NO: 982434 - DNA, 33 bp, Homo sapien
aatatgatgttcaaccgaggtaactttgtaaca

SEQ ID NO: 982435 - DNA, 33 bp, Homo sapien
atcattttgttacagggaatgatattttcctca

SEQ ID NO: 982436 - DNA, 33 bp, Homo sapien
atcattttgttacaggtaatgatattttcctca

SEQ ID NO: 982437 - DNA, 33 bp, Homo sapien
tttgttatccacagaacctatcttacccgacca

SEQ ID NO: 982438 - DNA, 33 bp, Homo sapien
tttgttatccacagaatctatcttacccgacca

SEQ ID NO: 982439 - DNA, 33 bp, Homo sapien
gcaaaagacaatttaacaagaaggtcagcatat

SEQ ID NO: 982440 - DNA, 33 bp, Homo sapien
gcaaaagacaatttaagaagaaggtcagcatat

SEQ ID NO: 982441 - DNA, 33 bp, Homo sapien
ggaagcatttttaagaagaccgcaaaacaactt

SEQ ID NO: 982442 - DNA, 33 bp, Homo sapien
ggaagcatttttaagaggaccgcaaaacaactt

SEQ ID NO: 982443 - DNA, 33 bp, Homo sapien
tagcctcccaagtcaccgcaattacaggtgtga

SEQ ID NO: 982444 - DNA, 33 bp, Homo sapien
tagcctcccaagtcactgcaattacaggtgtga

SEQ ID NO: 982445 - DNA, 33 bp, Homo sapien
ttacttgaagccattacggagttatcttagtac

SEQ ID NO: 982446 - DNA, 33 bp, Homo sapien
ttacttgaagccattagggagttatcttagtac

SEQ ID NO: 982447 - DNA, 33 bp, Homo sapien
tattgcagtatttaacaaagtcctacgattttt

SEQ ID NO: 982448 - DNA, 33 bp, Homo sapien
tattgcagtatttaacgaagtcctacgattttt

SEQ ID NO: 982449 - DNA, 33 bp, Homo sapien
cagtgattcctttcacagacataatgtggctga

SEQ ID NO: 982450 - DNA, 33 bp, Homo sapien
cagtgattcctttcacggacataatgtggctga

SEQ ID NO: 982451 - DNA, 33 bp, Homo sapien
taataaatgatgaagacatgaaataaggcagta

SEQ ID NO: 982452 - DNA, 33 bp, Homo sapien
taataaatgatgaagatatgaaataaggcagta

SEQ ID NO: 982453 - DNA, 33 bp, Homo sapien
tataaagaagttagcacataaagctatggggcc

SEQ ID NO: 982454 - DNA, 33 bp, Homo sapien
tataaagaagttagcagataaagctatggggcc

SEQ ID NO: 982455 - DNA, 33 bp, Homo sapien
ctgaatcactttgatgaatactactaaatatta

SEQ ID NO: 982456 - DNA, 33 bp, Homo sapien
ctgaatcactttgatgcatactactaaatatta

SEQ ID NO: 982457 - DNA, 33 bp, Homo sapien
tcatcatttgattttgcattgggcatcagttca

SEQ ID NO: 982458 - DNA, 33 bp, Homo sapien
tcatcatttgattttgtattgggcatcagttca

SEQ ID NO: 982459 - DNA, 33 bp, Homo sapien
taaggaatagctcttacaaaagttgactagtcc

SEQ ID NO: 982460 - DNA, 33 bp, Homo sapien
taaggaatagctcttagaaaagttgactagtcc

SEQ ID NO: 982461 - DNA, 33 bp, Homo sapien
tgctgcttgaagttcacattacatggaaagagg

SEQ ID NO: 982462 - DNA, 33 bp, Homo sapien
tgctgcttgaagttcatattacatggaaagagg

SEQ ID NO: 982463 - DNA, 33 bp, Homo sapien
tagatgtaaccatcatcacttctgtgcattttt

SEQ ID NO: 982464 - DNA, 33 bp, Homo sapien
tagatgtaaccatcatgacttctgtgcattttt

SEQ ID NO: 982465 - DNA, 33 bp, Homo sapien
ggtggtttcaacaatacagctcatactgatagt

SEQ ID NO: 982466 - DNA, 33 bp, Homo sapien
ggtggtttcaacaatatagctcatactgatagt

SEQ ID NO: 982467 - DNA, 33 bp, Homo sapien
ggtatcaatgcttgtaggatgggtctcttgtag

SEQ ID NO: 982468 - DNA, 33 bp, Homo sapien
ggtatcaatgcttgtatgatgggtctcttgtag

SEQ ID NO: 982469 - DNA, 33 bp, Homo sapien
gtgtctaagtctgttgaatactcttggtcttaa

SEQ ID NO: 982470 - DNA, 33 bp, Homo sapien
gtgtctaagtctgttgcatactcttggtcttaa

SEQ ID NO: 982471 - DNA, 33 bp, Homo sapien
tttgaacatctccctgaaacaactgagaaagag

SEQ ID NO: 982472 - DNA, 33 bp, Homo sapien
tttgaacatctccctggaacaactgagaaagag

SEQ ID NO: 982473 - DNA, 33 bp, Homo sapien
tggtttccttcgatataacactgaagcacaaag

SEQ ID NO: 982474 - DNA, 33 bp, Homo sapien
tggtttccttcgatatgacactgaagcacaaag

SEQ ID NO: 982475 - DNA, 33 bp, Homo sapien
tttacacatcctttagaactgcattaggtaacc

SEQ ID NO: 982476 - DNA, 33 bp, Homo sapien
tttacacatcctttaggactgcattaggtaacc

SEQ ID NO: 982477 - DNA, 33 bp, Homo sapien
agaccgatattgttcacagccttgtcctgaact

SEQ ID NO: 982478 - DNA, 33 bp, Homo sapien
agaccgatattgttcatagccttgtcctgaact

SEQ ID NO: 982479 - DNA, 33 bp, Homo sapien
ccaactagtgccaaaaaggtggcagcaacatgg

SEQ ID NO: 982480 - DNA, 33 bp, Homo sapien
ccaactagtgccaaaacggtggcagcaacatgg

SEQ ID NO: 982481 - DNA, 33 bp, Homo sapien
acatctggtgcagaagcaatgcaggtaaaacac

SEQ ID NO: 982482 - DNA, 33 bp, Homo sapien
acatctggtgcagaagtaatgcaggtaaaacac

SEQ ID NO: 982483 - DNA, 33 bp, Homo sapien
ggacaatcattctccaatatgtagaagtgttct

SEQ ID NO: 982484 - DNA, 33 bp, Homo sapien
ggacaatcattctccattatgtagaagtgttct

SEQ ID NO: 982485 - DNA, 33 bp, Homo sapien
tatttacatttatgagcagagctaattcaccac

SEQ ID NO: 982486 - DNA, 33 bp, Homo sapien
tatttacatttatgaggagagctaattcaccac

SEQ ID NO: 982487 - DNA, 33 bp, Homo sapien
ttctaccacattgttaaccaaatcatttcctgg

SEQ ID NO: 982488 - DNA, 33 bp, Homo sapien
ttctaccacattgttatccaaatcatttcctgg

SEQ ID NO: 982489 - DNA, 33 bp, Homo sapien
ccgtgttgggtgttcaagaagggatggtgcaag

SEQ ID NO: 982490 - DNA, 33 bp, Homo sapien
ccgtgttgggtgttcaggaagggatggtgcaag

SEQ ID NO: 982491 - DNA, 33 bp, Homo sapien
aagggatggtgcaagcactactttaaccacccc

SEQ ID NO: 982492 - DNA, 33 bp, Homo sapien
aagggatggtgcaagcgctactttaaccacccc

SEQ ID NO: 982493 - DNA, 33 bp, Homo sapien
gccctgcatgaataccaaattccaacaatgatc

SEQ ID NO: 982494 - DNA, 33 bp, Homo sapien
gccctgcatgaataccgaattccaacaatgatc

SEQ ID NO: 982495 - DNA, 33 bp, Homo sapien
atgccaattcaactgtaaagtcaaaagtttaat

SEQ ID NO: 982496 - DNA, 33 bp, Homo sapien
atgccaattcaactgtgaagtcaaaagtttaat

SEQ ID NO: 982497 - DNA, 33 bp, Homo sapien
taaaagataagtcttacgagtggttttcatctt

SEQ ID NO: 982498 - DNA, 33 bp, Homo sapien
taaaagataagtcttatgagtggttttcatctt

SEQ ID NO: 982499 - DNA, 33 bp, Homo sapien
ttgatgtaaattataactatgtcagacctgcct

SEQ ID NO: 982500 - DNA, 33 bp, Homo sapien
ttgatgtaaattataagtatgtcagacctgcct

SEQ ID NO: 982501 - DNA, 33 bp, Homo sapien
caactaattacaatcactctctactgccagttt

SEQ ID NO: 982502 - DNA, 33 bp, Homo sapien
caactaattacaatcattctctactgccagttt

SEQ ID NO: 982503 - DNA, 33 bp, Homo sapien
ggtgtatgtgtccagacattatttgtttcttat

SEQ ID NO: 982504 - DNA, 33 bp, Homo sapien
ggtgtatgtgtccagatattatttgtttcttat

SEQ ID NO: 982505 - DNA, 33 bp, Homo sapien; identical to SEQ ID NO: 982503

SEQ ID NO: 982506 - DNA, 33 bp, Homo sapien; identical to SEQ ID NO: 982504

SEQ ID NO: 982507 - DNA, 33 bp, Homo sapien
ctcaacatccaggtaactgacgtggaagacctg

SEQ ID NO: 982508 - DNA, 33 bp, Homo sapien
ctcaacatccaggtaattgacgtggaagacctg

SEQ ID NO: 982509 - DNA, 33 bp, Homo sapien
aacaaactcaaacgcacatcaatagtaaaactg

SEQ ID NO: 982510 - DNA, 33 bp, Homo sapien
aacaaactcaaacgcatatcaatagtaaaactg

SEQ ID NO: 982511 - DNA, 33 bp, Homo sapien
taacaacctatactcacatgtgggaccaaagaa

SEQ ID NO: 982512 - DNA, 33 bp, Homo sapien
taacaacctatactcatatgtgggaccaaagaa

SEQ ID NO: 982513 - DNA, 33 bp, Homo sapien
aaaaaacaggtatttggaagactgatagagtaa

SEQ ID NO: 982514 - DNA, 33 bp, Homo sapien
aaaaaacaggtatttgtaagactgatagagtaa

SEQ ID NO: 982515 - DNA, 33 bp, Homo sapien
aaaatttatatctgaaaagcacagagctgagac

SEQ ID NO: 982516 - DNA, 33 bp, Homo sapien
aaaatttatatctgaacagcacagagctgagac

SEQ ID NO: 982517 - DNA, 33 bp, Homo sapien
gacaaagcaattctcacgacttttctaattaga

SEQ ID NO: 982518 - DNA, 33 bp, Homo sapien
gacaaagcaattctcatgacttttctaattaga

SEQ ID NO: 982519 - DNA, 33 bp, Homo sapien
aaatagttaattagaaaaagaaccaagcgtgga

SEQ ID NO: 982520 - DNA, 33 bp, Homo sapien
aaatagttaattagaacaagaaccaagcgtgga

SEQ ID NO: 982521 - DNA, 33 bp, Homo sapien
gtgagtagcctaactaagagactattctctaga

SEQ ID NO: 982522 - DNA, 33 bp, Homo sapien
gtgagtagcctaactaggagactattctctaga

SEQ ID NO: 982523 - DNA, 33 bp, Homo sapien
accaggaaaaaaaaatcacttatccacaaaaga

SEQ ID NO: 982524 - DNA, 33 bp, Homo sapien
accaggaaaaaaaaatgacttatccacaaaaga

SEQ ID NO: 982525 - DNA, 33 bp, Homo sapien
ccagatcaaggatgacacacagtctgggacatg

SEQ ID NO: 982526 - DNA, 33 bp, Homo sapien
ccagatcaaggatgacgcacagtctgggacatg

SEQ ID NO: 982527 - DNA, 33 bp, Homo sapien
atgaggcacttgatgacaaaactcagctttaga

SEQ ID NO: 982528 - DNA, 33 bp, Homo sapien
atgaggcacttgatgataaaactcagctttaga

SEQ ID NO: 982529 - DNA, 33 bp, Homo sapien
gaaagaagcaaagagaccaattaagaagttatt

SEQ ID NO: 982530 - DNA, 33 bp, Homo sapien
gaaagaagcaaagagatcaattaagaagttatt

SEQ ID NO: 982531 - DNA, 33 bp, Homo sapien
aggtgaatcctactaaacttttcaggaaccatt

SEQ ID NO: 982532 - DNA, 33 bp, Homo sapien
aggtgaatcctactaagcttttcaggaaccatt

SEQ ID NO: 982533 - DNA, 33 bp, Homo sapien
catggaggatctaaaagagttttgttcattaac

SEQ ID NO: 982534 - DNA, 33 bp, Homo sapien
catggaggatctaaaatagttttgttcattaac

SEQ ID NO: 982535 - DNA, 33 bp, Homo sapien
tacacaagtatgattacctcaattgatcaagtg

SEQ ID NO: 982536 - DNA, 33 bp, Homo sapien
tacacaagtatgattagctcaattgatcaagtg

SEQ ID NO: 982537 - DNA, 33 bp, Homo sapien
ttcatttcgttatgcacccagtagtcattcagg

SEQ ID NO: 982538 - DNA, 33 bp, Homo sapien
ttcatttcgttatgcatccagtagtcattcagg

SEQ ID NO: 982539 - DNA, 33 bp, Homo sapien
tctagcttcattttaaataatttgcttgaatgt

SEQ ID NO: 982540 - DNA, 33 bp, Homo sapien
tctagcttcattttaagtaatttgcttgaatgt

SEQ ID NO: 982541 - DNA, 33 bp, Homo sapien
tcatggaattctctgaaatacagtatgagattg

SEQ ID NO: 982542 - DNA, 33 bp, Homo sapien
tcatggaattctctgacatacagtatgagattg

SEQ ID NO: 982543 - DNA, 33 bp, Homo sapien
ctatcaagtgagtcaaatgagtttatgcaggat

SEQ ID NO: 982544 - DNA, 33 bp, Homo sapien
ctatcaagtgagtcaagtgagtttatgcaggat

SEQ ID NO: 982545 - DNA, 33 bp, Homo sapien
ttaagattttcacctacagcgaattggaataga

SEQ ID NO: 982546 - DNA, 33 bp, Homo sapien
ttaagattttcacctatagcgaattggaataga

SEQ ID NO: 982547 - DNA, 33 bp, Homo sapien
tagttagattaaccaggacaaacaaaaagaaga

SEQ ID NO: 982548 - DNA, 33 bp, Homo sapien
tagttagattaaccagtacaaacaaaaagaaga

SEQ ID NO: 982549 - DNA, 33 bp, Homo sapien
tctgattaacagaagcactattttttttctatt

SEQ ID NO: 982550 - DNA, 33 bp, Homo sapien
tctgattaacagaagcgctattttttttctatt

SEQ ID NO: 982551 - DNA, 33 bp, Homo sapien
tacaatattgataccaaaacttcatcaagttaa

SEQ ID NO: 982552 - DNA, 33 bp, Homo sapien
tacaatattgataccacaacttcatcaagttaa

SEQ ID NO: 982553 - DNA, 33 bp, Homo sapien
tggttctcaaattgcagtcctcaaaatagcatc

SEQ ID NO: 982554 - DNA, 33 bp, Homo sapien
tggttctcaaattgcattcctcaaaatagcatc

SEQ ID NO: 982555 - DNA, 33 bp, Homo sapien
ttatcttttgtcaacaccaaggaatgtgagagg

SEQ ID NO: 982556 - DNA, 33 bp, Homo sapien
ttatcttttgtcaacatcaaggaatgtgagagg

SEQ ID NO: 982557 - DNA, 33 bp, Homo sapien
ttctctgcctaactcaaaaagttacattatcat

SEQ ID NO: 982558 - DNA, 33 bp, Homo sapien
ttctctgcctaactcagaaagttacattatcat

SEQ ID NO: 982559 - DNA, 33 bp, Homo sapien
agtttactgaacagaccgtaccactaataagta

SEQ ID NO: 982560 - DNA, 33 bp, Homo sapien
agtttactgaacagactgtaccactaataagta

SEQ ID NO: 982561 - DNA, 33 bp, Homo sapien
agagaagggaaagagagaattggttattagtca

SEQ ID NO: 982562 - DNA, 33 bp, Homo sapien
agagaagggaaagagataattggttattagtca

SEQ ID NO: 982563 - DNA, 33 bp, Homo sapien
taaaaactgaaggccaatcccgaatgaaaagaa

SEQ ID NO: 982564 - DNA, 33 bp, Homo sapien
taaaaactgaaggccagtcccgaatgaaaagaa

SEQ ID NO: 982565 - DNA, 33 bp, Homo sapien
ataaaggactgttgtcaaaaatatacagagaac

SEQ ID NO: 982566 - DNA, 33 bp, Homo sapien
ataaaggactgttgtccaaaatatacagagaac

SEQ ID NO: 982567 - DNA, 33 bp, Homo sapien
ttaattttagtgaataacagaggcacacatagt

SEQ ID NO: 982568 - DNA, 33 bp, Homo sapien
ttaattttagtgaatagcagaggcacacatagt

SEQ ID NO: 982569 - DNA, 33 bp, Homo sapien
aacacaatgcaacatacgaaagtcggcatttgc

SEQ ID NO: 982570 - DNA, 33 bp, Homo sapien
aacacaatgcaacatatgaaagtcggcatttgc

SEQ ID NO: 982571 - DNA, 33 bp, Homo sapien
aaaaatattggctcagaaggggataccataact

SEQ ID NO: 982572 - DNA, 33 bp, Homo sapien
aaaaatattggctcaggaggggataccataact

SEQ ID NO: 982573 - DNA, 33 bp, Homo sapien
gtttgtgtctgactaacctgcatttagtagttt

SEQ ID NO: 982574 - DNA, 33 bp, Homo sapien
gtttgtgtctgactaatctgcatttagtagttt

SEQ ID NO: 982575 - DNA, 33 bp, Homo sapien
ttatgtgtttgtatacagctcttagcaatagaa

SEQ ID NO: 982576 - DNA, 33 bp, Homo sapien
ttatgtgtttgtataccgctcttagcaatagaa

SEQ ID NO: 982577 - DNA, 33 bp, Homo sapien
aaagtcttagagcagaacttgatatgtaacagc

SEQ ID NO: 982578 - DNA, 33 bp, Homo sapien
aaagtcttagagcagagcttgatatgtaacagc

SEQ ID NO: 982579 - DNA, 33 bp, Homo sapien
agatcaaattctaaataaagtttgcctgataaa

SEQ ID NO: 982580 - DNA, 33 bp, Homo sapien
agatcaaattctaaattaagtttgcctgataaa

SEQ ID NO: 982581 - DNA, 33 bp, Homo sapien
cagtccttctcatcaacattcacagcatacctg

SEQ ID NO: 982582 - DNA, 33 bp, Homo sapien
cagtccttctcatcaagattcacagcatacctg

SEQ ID NO: 982583 - DNA, 33 bp, Homo sapien
tgacagatggaactagcaaatgaattgtaaaat

SEQ ID NO: 982584 - DNA, 33 bp, Homo sapien
tgacagatggaactaggaaatgaattgtaaaat

SEQ ID NO: 982585 - DNA, 33 bp, Homo sapien
agctgtaagtggccaacgttttcttttagaata

SEQ ID NO: 982586 - DNA, 33 bp, Homo sapien
agctgtaagtggccaaggttttcttttagaata

SEQ ID NO: 982587 - DNA, 33 bp, Homo sapien
aatacctttatgtaaactggattgatttaaaac

SEQ ID NO: 982588 - DNA, 33 bp, Homo sapien
aatacctttatgtaaattggattgatttaaaac

SEQ ID NO: 982589 - DNA, 33 bp, Homo sapien
aacatcttgccacaaactgattgattcctttag

SEQ ID NO: 982590 - DNA, 33 bp, Homo sapien
aacatcttgccacaaattgattgattcctttag

SEQ ID NO: 982591 - DNA, 33 bp, Homo sapien
caatctatgttctcacagtcttaggacagctct

SEQ ID NO: 982592 - DNA, 33 bp, Homo sapien
caatctatgttctcacggtcttaggacagctct

SEQ ID NO: 982593 - DNA, 33 bp, Homo sapien
cagctaccacattttaagaaaggaatggtattt

SEQ ID NO: 982594 - DNA, 33 bp, Homo sapien
cagctaccacattttaggaaaggaatggtattt

SEQ ID NO: 982595 - DNA, 33 bp, Homo sapien
aatactgcaactgggagtaattaaagaaatgac

SEQ ID NO: 982596 - DNA, 33 bp, Homo sapien
aatactgcaactgggattaattaaagaaatgac

SEQ ID NO: 982597 - DNA, 33 bp, Homo sapien
tgaaagctggtgttaacattatcataaattgtg

SEQ ID NO: 982598 - DNA, 33 bp, Homo sapien
tgaaagctggtgttaatattatcataaattgtg

SEQ ID NO: 982599 - DNA, 33 bp, Homo sapien
cccaagtgcctactgacagatgaatggataaac

SEQ ID NO: 982600 - DNA, 33 bp, Homo sapien
cccaagtgcctactgagagatgaatggataaac

SEQ ID NO: 982601 - DNA, 33 bp, Homo sapien
ttagaaatatttgtacacccatatacatagtag

SEQ ID NO: 982602 - DNA, 33 bp, Homo sapien
ttagaaatatttgtacccccatatacatagtag

SEQ ID NO: 982603 - DNA, 33 bp, Homo sapien
gcttagcaacttaaaacaatgcacatttaccat

SEQ ID NO: 982604 - DNA, 33 bp, Homo sapien
gcttagcaacttaaaataatgcacatttaccat

SEQ ID NO: 982605 - DNA, 33 bp, Homo sapien
aaaatcaaccgtgtaggatctgaatttgtatac

SEQ ID NO: 982606 - DNA, 33 bp, Homo sapien
aaaatcaaccgtgtagtatctgaatttgtatac

SEQ ID NO: 982607 - DNA, 33 bp, Homo sapien
tattgtcctgtgcttcgaaaagttaaatgggtt

SEQ ID NO: 982608 - DNA, 33 bp, Homo sapien
tattgtcctgtgcttctaaaagttaaatgggtt

SEQ ID NO: 982609 - DNA, 33 bp, Homo sapien
tgtgcagtaacttcaacggagctggaggccatc

SEQ ID NO: 982610 - DNA, 33 bp, Homo sapien
tgtgcagtaacttcaatggagctggaggccatc

SEQ ID NO: 982611 - DNA, 33 bp, Homo sapien
cattacaggggagcgactatgatcttttggtgg

SEQ ID NO: 982612 - DNA, 33 bp, Homo sapien
cattacaggggagcgagtatgatcttttggtgg

SEQ ID NO: 982613 - DNA, 33 bp, Homo sapien
tcctttccttgaatccgatcttaactggtagac

SEQ ID NO: 982614 - DNA, 33 bp, Homo sapien
tcctttccttgaatcctatcttaactggtagac

SEQ ID NO: 982615 - DNA, 33 bp, Homo sapien
aatgtcaatcttattaaccttaaacatctgcaa

SEQ ID NO: 982616 - DNA, 33 bp, Homo sapien
aatgtcaatcttattatccttaaacatctgcaa

SEQ ID NO: 982617 - DNA, 33 bp, Homo sapien
ttgcaaatattttataagctcattcctccaatc

SEQ ID NO: 982618 - DNA, 33 bp, Homo sapien
ttgcaaatattttataggctcattcctccaatc

SEQ ID NO: 982619 - DNA, 33 bp, Homo sapien
taactgctcttcttggaaaatgaatttctattc

SEQ ID NO: 982620 - DNA, 33 bp, Homo sapien
taactgctcttcttgggaaatgaatttctattc

SEQ ID NO: 982621 - DNA, 33 bp, Homo sapien
agcagttctcgatgataagtgtgcctgataatc

SEQ ID NO: 982622 - DNA, 33 bp, Homo sapien
agcagttctcgatgatgagtgtgcctgataatc

SEQ ID NO: 982623 - DNA, 33 bp, Homo sapien
tagtcatcttaaaacaagacaaattattatgaa

SEQ ID NO: 982624 - DNA, 33 bp, Homo sapien
tagtcatcttaaaacaggacaaattattatgaa

SEQ ID NO: 982625 - DNA, 33 bp, Homo sapien
tgttggggaccactaacgtagctgatgatgagg

SEQ ID NO: 982626 - DNA, 33 bp, Homo sapien
tgttggggaccactaatgtagctgatgatgagg

SEQ ID NO: 982627 - DNA, 33 bp, Homo sapien
caataattgtaatatccagtgctgacccttgcc

SEQ ID NO: 982628 - DNA, 33 bp, Homo sapien
caataattgtaatatctagtgctgacccttgcc

SEQ ID NO: 982629 - DNA, 33 bp, Homo sapien
tataattcaaatctctaaaagtctaaacaaaat

SEQ ID NO: 982630 - DNA, 33 bp, Homo sapien
tataattcaaatctctgaaagtctaaacaaaat

SEQ ID NO: 982631 - DNA, 33 bp, Homo sapien
attattctttgacaaacggtgctggttctcata

SEQ ID NO: 982632 - DNA, 33 bp, Homo sapien
attattctttgacaaatggtgctggttctcata

SEQ ID NO: 982633 - DNA, 33 bp, Homo sapien
aggtctgactctatcacagttaaagcgacttga

SEQ ID NO: 982634 - DNA, 33 bp, Homo sapien
aggtctgactctatcatagttaaagcgacttga

SEQ ID NO: 982635 - DNA, 33 bp, Homo sapien
tgagctggacatgaaaaataggcagattgggac

SEQ ID NO: 982636 - DNA, 33 bp, Homo sapien
tgagctggacatgaaacataggcagattgggac

SEQ ID NO: 982637 - DNA, 33 bp, Homo sapien
agtggagtggcaacaaggaaaacatgattagac

SEQ ID NO: 982638 - DNA, 33 bp, Homo sapien
agtggagtggcaacaatgaaaacatgattagac

SEQ ID NO: 982639 - DNA, 33 bp, Homo sapien
cattaggtgacattcaagtaggaatgatggaca

SEQ ID NO: 982640 - DNA, 33 bp, Homo sapien
cattaggtgacattcaggtaggaatgatggaca

SEQ ID NO: 982641 - DNA, 33 bp, Homo sapien
catctctcaggactggaagcatttccctttatt

SEQ ID NO: 982642 - DNA, 33 bp, Homo sapien
catctctcaggactgggagcatttccctttatt

SEQ ID NO: 982643 - DNA, 33 bp, Homo sapien
aaaattcctgttctaaataagaatgcctgagtt

SEQ ID NO: 982644 - DNA, 33 bp, Homo sapien
aaaattcctgttctaagtaagaatgcctgagtt

SEQ ID NO: 982645 - DNA, 33 bp, Homo sapien
ctgcggggctttctcaaagagaagtgatagggt

SEQ ID NO: 982646 - DNA, 33 bp, Homo sapien
ctgcggggctttctcagagagaagtgatagggt

SEQ ID NO: 982647 - DNA, 33 bp, Homo sapien
cttccagggtcttcccaaagagctgagtgtgcc

SEQ ID NO: 982648 - DNA, 33 bp, Homo sapien
cttccagggtcttcccgaagagctgagtgtgcc

SEQ ID NO: 982649 - DNA, 33 bp, Homo sapien
atacagctgataaaccactctacccaacagaca

SEQ ID NO: 982650 - DNA, 33 bp, Homo sapien
atacagctgataaacctctctacccaacagaca

SEQ ID NO: 982651 - DNA, 33 bp, Homo sapien
agttagttattctcacaacccattttagtaaag

SEQ ID NO: 982652 - DNA, 33 bp, Homo sapien
agttagttattctcactacccattttagtaaag

SEQ ID NO: 982653 - DNA, 33 bp, Homo sapien
gtcttcttcaaggttagacccagctttgcctca

SEQ ID NO: 982654 - DNA, 33 bp, Homo sapien
gtcttcttcaaggttatacccagctttgcctca

SEQ ID NO: 982655 - DNA, 33 bp, Homo sapien
catgtggggattatcaaaatgcaaggtaagatt

SEQ ID NO: 982656 - DNA, 33 bp, Homo sapien
catgtggggattatcacaatgcaaggtaagatt

SEQ ID NO: 982657 - DNA, 33 bp, Homo sapien
taagagagtctttggcaaggtttcccttttaat

SEQ ID NO: 982658 - DNA, 33 bp, Homo sapien
taagagagtctttggctaggtttcccttttaat

SEQ ID NO: 982659 - DNA, 33 bp, Homo sapien
ttgagagatttgagcagataaaattaaaaactt

SEQ ID NO: 982660 - DNA, 33 bp, Homo sapien
ttgagagatttgagcatataaaattaaaaactt

SEQ ID NO: 982661 - DNA, 33 bp, Homo sapien
tgctgcattaactccacctgtagcaacggacat

SEQ ID NO: 982662 - DNA, 33 bp, Homo sapien
tgctgcattaactccatctgtagcaacggacat

SEQ ID NO: 982663 - DNA, 33 bp, Homo sapien
tgtgtgacttaagctaaacctgtgtttttattg

SEQ ID NO: 982664 - DNA, 33 bp, Homo sapien
tgtgtgacttaagctacacctgtgtttttattg

SEQ ID NO: 982665 - DNA, 33 bp, Homo sapien
gagaggaacgggaacaatagtaactcagataat

SEQ ID NO: 982666 - DNA, 33 bp, Homo sapien
gagaggaacgggaacagtagtaactcagataat

SEQ ID NO: 982667 - DNA, 33 bp, Homo sapien
tcagataattatctacaaaggtaatcagaggca

SEQ ID NO: 982668 - DNA, 33 bp, Homo sapien
tcagataattatctacgaaggtaatcagaggca

SEQ ID NO: 982669 - DNA, 33 bp, Homo sapien
cagatgacttcaaagacatacaatagggctcaa

SEQ ID NO: 982670 - DNA, 33 bp, Homo sapien
cagatgacttcaaagagatacaatagggctcaa

SEQ ID NO: 982671 - DNA, 33 bp, Homo sapien
gtgtggcttagaacaccagagatgtatcgtctc

SEQ ID NO: 982672 - DNA, 33 bp, Homo sapien
gtgtggcttagaacactagagatgtatcgtctc

SEQ ID NO: 982673 - DNA, 33 bp, Homo sapien
cctactgtacagaaaaaaccagttcactgagac

SEQ ID NO: 982674 - DNA, 33 bp, Homo sapien
cctactgtacagaaaagaccagttcactgagac

SEQ ID NO: 982675 - DNA, 33 bp, Homo sapien
gaattatgcaaaatggcattgtaaaaaagagct

SEQ ID NO: 982676 - DNA, 33 bp, Homo sapien
gaattatgcaaaatggtattgtaaaaaagagct

SEQ ID NO: 982677 - DNA, 33 bp, Homo sapien
ccacgtttgctttgcacgtactcttccaaactg

SEQ ID NO: 982678 - DNA, 33 bp, Homo sapien
ccacgtttgctttgcatgtactcttccaaactg

SEQ ID NO: 982679 - DNA, 33 bp, Homo sapien
gaagaagcaggttccacggacccaagtctgttc

SEQ ID NO: 982680 - DNA, 33 bp, Homo sapien
gaagaagcaggttccagggacccaagtctgttc

SEQ ID NO: 982681 - DNA, 33 bp, Homo sapien
tgctccacagcacagaacgcagattagaagtct

SEQ ID NO: 982682 - DNA, 33 bp, Homo sapien
tgctccacagcacagagcgcagattagaagtct

SEQ ID NO: 982683 - DNA, 33 bp, Homo sapien
tataactatagacatccatagcttactataata

SEQ ID NO: 982684 - DNA, 33 bp, Homo sapien
tataactatagacatcgatagcttactataata

SEQ ID NO: 982685 - DNA, 33 bp, Homo sapien
ctgatgccttgggaacactcttgtatttgataa

SEQ ID NO: 982686 - DNA, 33 bp, Homo sapien
ctgatgccttgggaaccctcttgtatttgataa

SEQ ID NO: 982687 - DNA, 33 bp, Homo sapien
ctatgtccaactcaggaaattcttaacacacat

SEQ ID NO: 982688 - DNA, 33 bp, Homo sapien
ctatgtccaactcaggcaattcttaacacacat

SEQ ID NO: 982689 - DNA, 33 bp, Homo sapien
gaacccctgttctaaacccctcactccaagaac

SEQ ID NO: 982690 - DNA, 33 bp, Homo sapien
gaacccctgttctaaatccctcactccaagaac

SEQ ID NO: 982691 - DNA, 33 bp, Homo sapien
atgctgacatttcagacgatctggatattgtga

SEQ ID NO: 982692 - DNA, 33 bp, Homo sapien
atgctgacatttcagaggatctggatattgtga

SEQ ID NO: 982693 - DNA, 33 bp, Homo sapien
ttcccaagccatgtaacacaacttctgggttat

SEQ ID NO: 982694 - DNA, 33 bp, Homo sapien
ttcccaagccatgtaagacaacttctgggttat

SEQ ID NO: 982695 - DNA, 33 bp, Homo sapien
cagtagctgtttccacaggtctgatttgcccta

SEQ ID NO: 982696 - DNA, 33 bp, Homo sapien
cagtagctgtttccacgggtctgatttgcccta

SEQ ID NO: 982697 - DNA, 33 bp, Homo sapien
ggagcagggtggataacggaagtagtgttttag

SEQ ID NO: 982698 - DNA, 33 bp, Homo sapien
ggagcagggtggataatggaagtagtgttttag

SEQ ID NO: 982699 - DNA, 33 bp, Homo sapien
actatagctttgtaaacgccaaagaatttgttc

SEQ ID NO: 982700 - DNA, 33 bp, Homo sapien
actatagctttgtaaatgccaaagaatttgttc

SEQ ID NO: 982701 - DNA, 33 bp, Homo sapien
agcaaatggacatggcaagtgcagacaagtcat

SEQ ID NO: 982702 - DNA, 33 bp, Homo sapien
agcaaatggacatggcgagtgcagacaagtcat

SEQ ID NO: 982703 - DNA, 33 bp, Homo sapien
atgtaacaagactctacctgggtcccctggtga

SEQ ID NO: 982704 - DNA, 33 bp, Homo sapien
atgtaacaagactctagctgggtcccctggtga

SEQ ID NO: 982705 - DNA, 33 bp, Homo sapien
aacaggtagaatcaaaatcctgtatgtatgttc

SEQ ID NO: 982706 - DNA, 33 bp, Homo sapien
aacaggtagaatcaaagtcctgtatgtatgttc

SEQ ID NO: 982707 - DNA, 33 bp, Homo sapien
tttccatgagtcactaccccatccatattgaag

SEQ ID NO: 982708 - DNA, 33 bp, Homo sapien
tttccatgagtcactatcccatccatattgaag

SEQ ID NO: 982709 - DNA, 33 bp, Homo sapien
aacaggcattgaaacaaaaatccatacacgaat

SEQ ID NO: 982710 - DNA, 33 bp, Homo sapien
aacaggcattgaaacagaaatccatacacgaat

SEQ ID NO: 982711 - DNA, 33 bp, Homo sapien
cacagtttccaagccaatatcagtgaaagtgta

SEQ ID NO: 982712 - DNA, 33 bp, Homo sapien
cacagtttccaagccagtatcagtgaaagtgta

SEQ ID NO: 982713 - DNA, 33 bp, Homo sapien
aacccaattctaaggacgagcaaatattaaaag

SEQ ID NO: 982714 - DNA, 33 bp, Homo sapien
aacccaattctaaggatgagcaaatattaaaag

SEQ ID NO: 982715 - DNA, 33 bp, Homo sapien
tccttctctctaatgacgatggcaaacctctgt

SEQ ID NO: 982716 - DNA, 33 bp, Homo sapien
tccttctctctaatgatgatggcaaacctctgt

SEQ ID NO: 982717 - DNA, 33 bp, Homo sapien
tgctcaaacacaactagaacttaagcaccatga

SEQ ID NO: 982718 - DNA, 33 bp, Homo sapien
tgctcaaacacaactataacttaagcaccatga

SEQ ID NO: 982719 - DNA, 33 bp, Homo sapien
gaattaatgccaactgaaatttttatgagttca

SEQ ID NO: 982720 - DNA, 33 bp, Homo sapien
gaattaatgccaactgcaatttttatgagttca

SEQ ID NO: 982721 - DNA, 33 bp, Homo sapien
agataatgctaaacgacggaggaaaatgttcag

SEQ ID NO: 982722 - DNA, 33 bp, Homo sapien
agataatgctaaacgatggaggaaaatgttcag

SEQ ID NO: 982723 - DNA, 33 bp, Homo sapien
agctacctggaaagcacgcggttgatgaaaaca

SEQ ID NO: 982724 - DNA, 33 bp, Homo sapien
agctacctggaaagcatgcggttgatgaaaaca

SEQ ID NO: 982725 - DNA, 33 bp, Homo sapien
aatttagatttaataacgtggctgaagcaattc

SEQ ID NO: 982726 - DNA, 33 bp, Homo sapien
aatttagatttaataatgtggctgaagcaattc

SEQ ID NO: 982727 - DNA, 33 bp, Homo sapien
aggtaaaagattaggcacaatggttaagggaca

SEQ ID NO: 982728 - DNA, 33 bp, Homo sapien
aggtaaaagattaggcccaatggttaagggaca

SEQ ID NO: 982729 - DNA, 33 bp, Homo sapien
aattgaagtcagaaaaatccaatggagaatgag

SEQ ID NO: 982730 - DNA, 33 bp, Homo sapien
aattgaagtcagaaaagtccaatggagaatgag

SEQ ID NO: 982731 - DNA, 33 bp, Homo sapien
tcaaaatcaccttgacacagttgcacatcgatt

SEQ ID NO: 982732 - DNA, 33 bp, Homo sapien
tcaaaatcaccttgactcagttgcacatcgatt

SEQ ID NO: 982733 - DNA, 33 bp, Homo sapien
atttactcatgtgcaacgaactgatgcttaggc

SEQ ID NO: 982734 - DNA, 33 bp, Homo sapien
atttactcatgtgcaatgaactgatgcttaggc

SEQ ID NO: 982735 - DNA, 33 bp, Homo sapien
tgcaagttagtgctataaatttctctgaagttc

SEQ ID NO: 982736 - DNA, 33 bp, Homo sapien
tgcaagttagtgctatgaatttctctgaagttc

SEQ ID NO: 982737 - DNA, 33 bp, Homo sapien
ggtgcattttactcaaagactttagtcccatgg

SEQ ID NO: 982738 - DNA, 33 bp, Homo sapien
ggtgcattttactcaatgactttagtcccatgg

SEQ ID NO: 982739 - DNA, 33 bp, Homo sapien
tttaaatatgatagctaaatgcaaagctctccg

SEQ ID NO: 982740 - DNA, 33 bp, Homo sapien
tttaaatatgatagctgaatgcaaagctctccg

SEQ ID NO: 982741 - DNA, 33 bp, Homo sapien
ttagaataatttcctcaaatcgggagatagatg

SEQ ID NO: 982742 - DNA, 33 bp, Homo sapien
ttagaataatttcctcgaatcgggagatagatg

SEQ ID NO: 982743 - DNA, 33 bp, Homo sapien
actgaatacagaaaacccagatgacgggctgat

SEQ ID NO: 982744 - DNA, 33 bp, Homo sapien
actgaatacagaaaactcagatgacgggctgat

SEQ ID NO: 982745 - DNA, 33 bp, Homo sapien
gaactgcatgaagagacgctctgaggaagaaga

SEQ ID NO: 982746 - DNA, 33 bp, Homo sapien
gaactgcatgaagagatgctctgaggaagaaga

SEQ ID NO: 982747 - DNA, 33 bp, Homo sapien
tcaacttgttacttgacgtgtgagaagaaagca

SEQ ID NO: 982748 - DNA, 33 bp, Homo sapien
tcaacttgttacttgatgtgtgagaagaaagca

SEQ ID NO: 982749 - DNA, 33 bp, Homo sapien
ttttaggttgagcagacaagaggcttgttcttt

SEQ ID NO: 982750 - DNA, 33 bp, Homo sapien
ttttaggttgagcagataagaggcttgttcttt

SEQ ID NO: 982751 - DNA, 33 bp, Homo sapien
gtaacggtggagtagaagattaaatgagatgat

SEQ ID NO: 982752 - DNA, 33 bp, Homo sapien
gtaacggtggagtagaggattaaatgagatgat

SEQ ID NO: 982753 - DNA, 33 bp, Homo sapien
ttatttaggatatttgcacttgtattaatcagt

SEQ ID NO: 982754 - DNA, 33 bp, Homo sapien
ttatttaggatatttggacttgtattaatcagt

SEQ ID NO: 982755 - DNA, 33 bp, Homo sapien
tcactctgaaggtcaccctttaacagttaacca

SEQ ID NO: 982756 - DNA, 33 bp, Homo sapien
tcactctgaaggtcactctttaacagttaacca

SEQ ID NO: 982757 - DNA, 33 bp, Homo sapien
aagatgtgagtagaaagagatggaaagagaagg

SEQ ID NO: 982758 - DNA, 33 bp, Homo sapien
aagatgtgagtagaaatagatggaaagagaagg

SEQ ID NO: 982759 - DNA, 33 bp, Homo sapien
ataaaaaggtaaggcacaaatcctcacttaagc

SEQ ID NO: 982760 - DNA, 33 bp, Homo sapien
ataaaaaggtaaggcagaaatcctcacttaagc

SEQ ID NO: 982761 - DNA, 33 bp, Homo sapien
ttgtaggtcatctctaacagctttgacatagtt

SEQ ID NO: 982762 - DNA, 33 bp, Homo sapien
ttgtaggtcatctctatcagctttgacatagtt

SEQ ID NO: 982763 - DNA, 33 bp, Homo sapien
caatatgccagagtccaggaagtctccaggcag

SEQ ID NO: 982764 - DNA, 33 bp, Homo sapien
caatatgccagagtccgggaagtctccaggcag

SEQ ID NO: 982765 - DNA, 33 bp, Homo sapien
ttgataagtgaagatacagggagaagaggattt

SEQ ID NO: 982766 - DNA, 33 bp, Homo sapien
ttgataagtgaagatagagggagaagaggattt

SEQ ID NO: 982767 - DNA, 33 bp, Homo sapien
cttgttctgttgtttcaattttccaatgtattt

SEQ ID NO: 982768 - DNA, 33 bp, Homo sapien
cttgttctgttgtttcgattttccaatgtattt

SEQ ID NO: 982769 - DNA, 33 bp, Homo sapien
gggaagatctgacaatcagaaaaattcctacag

SEQ ID NO: 982770 - DNA, 33 bp, Homo sapien
gggaagatctgacaattagaaaaattcctacag

SEQ ID NO: 982771 - DNA, 33 bp, Homo sapien
cctgattttagtggcacctacatgaatgtgtac

SEQ ID NO: 982772 - DNA, 33 bp, Homo sapien
cctgattttagtggcagctacatgaatgtgtac

SEQ ID NO: 982773 - DNA, 33 bp, Homo sapien
ccgaaagtttggaaaccgctgctaaacagaatt

SEQ ID NO: 982774 - DNA, 33 bp, Homo sapien
ccgaaagtttggaaactgctgctaaacagaatt

SEQ ID NO: 982775 - DNA, 33 bp, Homo sapien
aagagatagatgttatcaccactataagttatt

SEQ ID NO: 982776 - DNA, 33 bp, Homo sapien
aagagatagatgttattaccactataagttatt

SEQ ID NO: 982777 - DNA, 33 bp, Homo sapien
gtggtattaggaaaaacgaggcaaagtgttgta

SEQ ID NO: 982778 - DNA, 33 bp, Homo sapien
gtggtattaggaaaaatgaggcaaagtgttgta

SEQ ID NO: 982779 - DNA, 33 bp, Homo sapien
actgctggtaggattggaaattagctcagctat

SEQ ID NO: 982780 - DNA, 33 bp, Homo sapien
actgctggtaggattgtaaattagctcagctat

SEQ ID NO: 982781 - DNA, 33 bp, Homo sapien
tgacccagaatcaactcaaattcaacacagtct

SEQ ID NO: 982782 - DNA, 33 bp, Homo sapien
tgacccagaatcaactgaaattcaacacagtct

SEQ ID NO: 982783 - DNA, 33 bp, Homo sapien
ggttttggcaaaaagcaatcttagtggtacttt

SEQ ID NO: 982784 - DNA, 33 bp, Homo sapien
ggttttggcaaaaagcgatcttagtggtacttt

SEQ ID NO: 982785 - DNA, 33 bp, Homo sapien
tagaagttagagtataagttagttttaaaccac

SEQ ID NO: 982786 - DNA, 33 bp, Homo sapien
tagaagttagagtatacgttagttttaaaccac

SEQ ID NO: 982787 - DNA, 33 bp, Homo sapien
actgtgttcatgagacaggaaaaattattattc

SEQ ID NO: 982788 - DNA, 33 bp, Homo sapien
actgtgttcatgagacgggaaaaattattattc

SEQ ID NO: 982789 - DNA, 33 bp, Homo sapien
aattatttttctgaacactagctgttaaacata

SEQ ID NO: 982790 - DNA, 33 bp, Homo sapien
aattatttttctgaacgctagctgttaaacata

SEQ ID NO: 982791 - DNA, 33 bp, Homo sapien
gaaaaacttggtccaaacttctgtcacctgtct

SEQ ID NO: 982792 - DNA, 33 bp, Homo sapien
gaaaaacttggtccaagcttctgtcacctgtct

SEQ ID NO: 982793 - DNA, 33 bp, Homo sapien
gaatctttcaaccataggaagggccatccatga

SEQ ID NO: 982794 - DNA, 33 bp, Homo sapien
gaatctttcaaccatatgaagggccatccatga

SEQ ID NO: 982795 - DNA, 33 bp, Homo sapien
gcctggcatctccctcactagaaccgcactctc

SEQ ID NO: 982796 - DNA, 33 bp, Homo sapien
gcctggcatctccctcgctagaaccgcactctc

SEQ ID NO: 982797 - DNA, 33 bp, Homo sapien
ccttaagaacaagagacgaaatgaagatttttg

SEQ ID NO: 982798 - DNA, 33 bp, Homo sapien
ccttaagaacaagagatgaaatgaagatttttg

SEQ ID NO: 982799 - DNA, 33 bp, Homo sapien
tttgttttatgtaggacatggtaataatcatta

SEQ ID NO: 982800 - DNA, 33 bp, Homo sapien
tttgttttatgtaggagatggtaataatcatta

SEQ ID NO: 982801 - DNA, 33 bp, Homo sapien
tcatggtactcttaaacaggaagttctttagca

SEQ ID NO: 982802 - DNA, 33 bp, Homo sapien
tcatggtactcttaaataggaagttctttagca

SEQ ID NO: 982803 - DNA, 33 bp, Homo sapien
aatggcagttaatgaccgggcagactgggggat

SEQ ID NO: 982804 - DNA, 33 bp, Homo sapien
aatggcagttaatgactgggcagactgggggat

SEQ ID NO: 982805 - DNA, 33 bp, Homo sapien
ctctagtttgtctgtccagagccttgtgggaac

SEQ ID NO: 982806 - DNA, 33 bp, Homo sapien
ctctagtttgtctgtctagagccttgtgggaac

SEQ ID NO: 982807 - DNA, 33 bp, Homo sapien
gcctggtaagctttaaggtttggagaccaaaac

SEQ ID NO: 982808 - DNA, 33 bp, Homo sapien
gcctggtaagctttaatgtttggagaccaaaac

SEQ ID NO: 982809 - DNA, 33 bp, Homo sapien
cagagcagacagctccagagaagaggaactcaa

SEQ ID NO: 982810 - DNA, 33 bp, Homo sapien
cagagcagacagctccggagaagaggaactcaa

SEQ ID NO: 982811 - DNA, 33 bp, Homo sapien
atagcaatttctgtaacggagggtccagaagca

SEQ ID NO: 982812 - DNA, 33 bp, Homo sapien
atagcaatttctgtaatggagggtccagaagca

SEQ ID NO: 982813 - DNA, 33 bp, Homo sapien
ctaccaggtgctttcactcaaggttagctgatc

SEQ ID NO: 982814 - DNA, 33 bp, Homo sapien
ctaccaggtgctttcattcaaggttagctgatc

SEQ ID NO: 982815 - DNA, 33 bp, Homo sapien
gctttctgttttgaagaccttgaaatattttaa

SEQ ID NO: 982816 - DNA, 33 bp, Homo sapien
gctttctgttttgaaggccttgaaatattttaa

SEQ ID NO: 982817 - DNA, 33 bp, Homo sapien
ggccgagtcctacaataacacatgacagagcca

SEQ ID NO: 982818 - DNA, 33 bp, Homo sapien
ggccgagtcctacaattacacatgacagagcca

SEQ ID NO: 982819 - DNA, 33 bp, Homo sapien
ctaactattcttctaaaaacacgtgtgtggagc

SEQ ID NO: 982820 - DNA, 33 bp, Homo sapien
ctaactattcttctaacaacacgtgtgtggagc

SEQ ID NO: 982821 - DNA, 33 bp, Homo sapien
caccagccaggacttgaattgaatccctagcac

SEQ ID NO: 982822 - DNA, 33 bp, Homo sapien
caccagccaggacttgtattgaatccctagcac

SEQ ID NO: 982823 - DNA, 33 bp, Homo sapien
ctttggctaactgtacccagagtggtgtgtcag

SEQ ID NO: 982824 - DNA, 33 bp, Homo sapien
ctttggctaactgtactcagagtggtgtgtcag

SEQ ID NO: 982825 - DNA, 33 bp, Homo sapien
gaatacagaccataaaaatgcccatagaccaga

SEQ ID NO: 982826 - DNA, 33 bp, Homo sapien
gaatacagaccataaatatgcccatagaccaga

SEQ ID NO: 982827 - DNA, 33 bp, Homo sapien
aacagaagaaagggaaaagactagaggctgtag

SEQ ID NO: 982828 - DNA, 33 bp, Homo sapien
aacagaagaaagggaacagactagaggctgtag

SEQ ID NO: 982829 - DNA, 33 bp, Homo sapien
aaggccagactgaatacgtagaattgttgatct

SEQ ID NO: 982830 - DNA, 33 bp, Homo sapien
aaggccagactgaatatgtagaattgttgatct

SEQ ID NO: 982831 - DNA, 33 bp, Homo sapien
taggtaatgctgatgaacctgggcttgcatcat

SEQ ID NO: 982832 - DNA, 33 bp, Homo sapien
taggtaatgctgatgaccctgggcttgcatcat

SEQ ID NO: 982833 - DNA, 33 bp, Homo sapien
cctggattaagaactagaacactgtcagaaccc

SEQ ID NO: 982834 - DNA, 33 bp, Homo sapien
cctggattaagaactataacactgtcagaaccc

SEQ ID NO: 982835 - DNA, 33 bp, Homo sapien
caacaagttgtgagaacctattctgttcagatt

SEQ ID NO: 982836 - DNA, 33 bp, Homo sapien
caacaagttgtgagaatctattctgttcagatt

SEQ ID NO: 982837 - DNA, 33 bp, Homo sapien
tctgtgcaattggaagcctggagttactactga

SEQ ID NO: 982838 - DNA, 33 bp, Homo sapien
tctgtgcaattggaaggctggagttactactga

SEQ ID NO: 982839 - DNA, 33 bp, Homo sapien
gtcggccagatctttaaatgacaaagtatgagt

SEQ ID NO: 982840 - DNA, 33 bp, Homo sapien
gtcggccagatctttagatgacaaagtatgagt

SEQ ID NO: 982841 - DNA, 33 bp, Homo sapien
agtcttgattttactgaatctgtcagagttatt

SEQ ID NO: 982842 - DNA, 33 bp, Homo sapien
agtcttgattttactggatctgtcagagttatt

SEQ ID NO: 982843 - DNA, 33 bp, Homo sapien
tagctttaaccccagaagtatcatttccataca

SEQ ID NO: 982844 - DNA, 33 bp, Homo sapien
tagctttaaccccagatgtatcatttccataca

SEQ ID NO: 982845 - DNA, 33 bp, Homo sapien
actttaaaatagtaaagttccataatgcagctt

SEQ ID NO: 982846 - DNA, 33 bp, Homo sapien
actttaaaatagtaaatttccataatgcagctt

SEQ ID NO: 982847 - DNA, 33 bp, Homo sapien
tggatggaaaagcccaacataactagtaccaag

SEQ ID NO: 982848 - DNA, 33 bp, Homo sapien
tggatggaaaagcccagcataactagtaccaag

SEQ ID NO: 982849 - DNA, 33 bp, Homo sapien
gaatttatgagggatcaaaaataaagagcaata

SEQ ID NO: 982850 - DNA, 33 bp, Homo sapien
gaatttatgagggatcgaaaataaagagcaata

SEQ ID NO: 982851 - DNA, 33 bp, Homo sapien
tcaacacccatacccaatcaatcattatgtttt

SEQ ID NO: 982852 - DNA, 33 bp, Homo sapien
tcaacacccatacccagtcaatcattatgtttt

SEQ ID NO: 982853 - DNA, 33 bp, Homo sapien
gagaggggggaaaggaatatcttctaagctgta

SEQ ID NO: 982854 - DNA, 33 bp, Homo sapien
gagaggggggaaaggattatcttctaagctgta

SEQ ID NO: 982855 - DNA, 33 bp, Homo sapien
ctgcttcatgaattcaactcaattctacatgat

SEQ ID NO: 982856 - DNA, 33 bp, Homo sapien
ctgcttcatgaattcagctcaattctacatgat

SEQ ID NO: 982857 - DNA, 33 bp, Homo sapien
aaggtaatttggagtaaaatggatttagtttta

SEQ ID NO: 982858 - DNA, 33 bp, Homo sapien
aaggtaatttggagtacaatggatttagtttta

SEQ ID NO: 982859 - DNA, 33 bp, Homo sapien
gcattatggtataatgcaaatgccaggatatcg

SEQ ID NO: 982860 - DNA, 33 bp, Homo sapien
gcattatggtataatgtaaatgccaggatatcg

SEQ ID NO: 982861 - DNA, 33 bp, Homo sapien
tgaaacattttgttgcaccactgaatatttgca

SEQ ID NO: 982862 - DNA, 33 bp, Homo sapien
tgaaacattttgttgccccactgaatatttgca

SEQ ID NO: 982863 - DNA, 33 bp, Homo sapien
cgttgcacatacagtacattaagggatcacatt

SEQ ID NO: 982864 - DNA, 33 bp, Homo sapien
cgttgcacatacagtatattaagggatcacatt

SEQ ID NO: 982865 - DNA, 33 bp, Homo sapien
aatgtccatttactcacctactcagttgttacc

SEQ ID NO: 982866 - DNA, 33 bp, Homo sapien
aatgtccatttactcatctactcagttgttacc

SEQ ID NO: 982867 - DNA, 33 bp, Homo sapien
aatatgaaataggaaagcaatgggctaagagcc

SEQ ID NO: 982868 - DNA, 33 bp, Homo sapien
aatatgaaataggaaatcaatgggctaagagcc

SEQ ID NO: 982869 - DNA, 33 bp, Homo sapien
acttgggtgccttcatgagcgttatctcaactg

SEQ ID NO: 982870 - DNA, 33 bp, Homo sapien
acttgggtgccttcattagcgttatctcaactg

SEQ ID NO: 982871 - DNA, 33 bp, Homo sapien
gggtaagtgtgtaagaaagtttcagtaagagtt

SEQ ID NO: 982872 - DNA, 33 bp, Homo sapien
gggtaagtgtgtaagagagtttcagtaagagtt

SEQ ID NO: 982873 - DNA, 33 bp, Homo sapien
ttctgcatcactacccactccatcagtgtgaat

SEQ ID NO: 982874 - DNA, 33 bp, Homo sapien
ttctgcatcactacccgctccatcagtgtgaat

SEQ ID NO: 982875 - DNA, 33 bp, Homo sapien
acaaacttggaaccaaaagacaaactccaggcc

SEQ ID NO: 982876 - DNA, 33 bp, Homo sapien
acaaacttggaaccaagagacaaactccaggcc

SEQ ID NO: 982877 - DNA, 33 bp, Homo sapien
catgtctctaaatgggaaagtctcatgagggga

SEQ ID NO: 982878 - DNA, 33 bp, Homo sapien
catgtctctaaatggggaagtctcatgagggga

SEQ ID NO: 982879 - DNA, 33 bp, Homo sapien
tgatttttcattcctacgaaggtgcttttttgt

SEQ ID NO: 982880 - DNA, 33 bp, Homo sapien
tgatttttcattcctatgaaggtgcttttttgt

SEQ ID NO: 982881 - DNA, 33 bp, Homo sapien
ctctcaagaaaacagcaaactcttaaggaacaa

SEQ ID NO: 982882 - DNA, 33 bp, Homo sapien
ctctcaagaaaacagcgaactcttaaggaacaa

SEQ ID NO: 982883 - DNA, 33 bp, Homo sapien
caatttagcatttcaccccatctctgcagtata

SEQ ID NO: 982884 - DNA, 33 bp, Homo sapien
caatttagcatttcactccatctctgcagtata

SEQ ID NO: 982885 - DNA, 33 bp, Homo sapien
gctgactctgaactcacctaatttcttgtatca

SEQ ID NO: 982886 - DNA, 33 bp, Homo sapien
gctgactctgaactcatctaatttcttgtatca

SEQ ID NO: 982887 - DNA, 33 bp, Homo sapien
cttttctagtaacaaacagtgggttgctcaaga

SEQ ID NO: 982888 - DNA, 33 bp, Homo sapien
cttttctagtaacaaagagtgggttgctcaaga

SEQ ID NO: 982889 - DNA, 33 bp, Homo sapien
actaaaccttgaagaaatgttccataaatatta

SEQ ID NO: 982890 - DNA, 33 bp, Homo sapien
actaaaccttgaagaagtgttccataaatatta

SEQ ID NO: 982891 - DNA, 33 bp, Homo sapien
ataattggataattgacctagtaccaggattca

SEQ ID NO: 982892 - DNA, 33 bp, Homo sapien
ataattggataattgatctagtaccaggattca

SEQ ID NO: 982893 - DNA, 33 bp, Homo sapien
tagaaaatatagccaacacgtgcatgagaatta

SEQ ID NO: 982894 - DNA, 33 bp, Homo sapien
tagaaaatatagccaatacgtgcatgagaatta

SEQ ID NO: 982895 - DNA, 33 bp, Homo sapien
gaggtagtaggagaaacagtattcagagtctga

SEQ ID NO: 982896 - DNA, 33 bp, Homo sapien
gaggtagtaggagaaatagtattcagagtctga

SEQ ID NO: 982897 - DNA, 33 bp, Homo sapien
taaaatataatgaaaagatctgaagttctcaac

SEQ ID NO: 982898 - DNA, 33 bp, Homo sapien
taaaatataatgaaaatatctgaagttctcaac

SEQ ID NO: 982899 - DNA, 33 bp, Homo sapien
aatgatgtgctctccactccgtcctccccattc

SEQ ID NO: 982900 - DNA, 33 bp, Homo sapien
aatgatgtgctctccattccgtcctccccattc

SEQ ID NO: 982901 - DNA, 33 bp, Homo sapien
acccaagcagcactataaacctgtttgttctga

SEQ ID NO: 982902 - DNA, 33 bp, Homo sapien
acccaagcagcactatcaacctgtttgttctga

SEQ ID NO: 982903 - DNA, 33 bp, Homo sapien
gacacatgaaatagtaacaaatagtgaatgaga

SEQ ID NO: 982904 - DNA, 33 bp, Homo sapien
gacacatgaaatagtagcaaatagtgaatgaga

SEQ ID NO: 982905 - DNA, 33 bp, Homo sapien
gtgaatgagatacctaaccttaattcaaaggca

SEQ ID NO: 982906 - DNA, 33 bp, Homo sapien
gtgaatgagatacctagccttaattcaaaggca

SEQ ID NO: 982907 - DNA, 33 bp, Homo sapien
atcatgcttattccacagaactctgcaacccac

SEQ ID NO: 982908 - DNA, 33 bp, Homo sapien
atcatgcttattccacggaactctgcaacccac

SEQ ID NO: 982909 - DNA, 33 bp, Homo sapien
attgagatatgatttaagaacaacagaacagag

SEQ ID NO: 982910 - DNA, 33 bp, Homo sapien
attgagatatgatttaggaacaacagaacagag

SEQ ID NO: 982911 - DNA, 33 bp, Homo sapien
gttaaatagattctggaaagtgtaaagttcttt

SEQ ID NO: 982912 - DNA, 33 bp, Homo sapien
gttaaatagattctgggaagtgtaaagttcttt

SEQ ID NO: 982913 - DNA, 33 bp, Homo sapien
ggggaacagagtggacagaggatatatctgact

SEQ ID NO: 982914 - DNA, 33 bp, Homo sapien
ggggaacagagtggactgaggatatatctgact

SEQ ID NO: 982915 - DNA, 33 bp, Homo sapien
actcaagtttcagagaagtattgatgagtaaat

SEQ ID NO: 982916 - DNA, 33 bp, Homo sapien
actcaagtttcagagatgtattgatgagtaaat

SEQ ID NO: 982917 - DNA, 33 bp, Homo sapien
agcccataagccaacaccttcttcctttctctg

SEQ ID NO: 982918 - DNA, 33 bp, Homo sapien
agcccataagccaacatcttcttcctttctctg

SEQ ID NO: 982919 - DNA, 33 bp, Homo sapien
atctgtattctttcacaagtagttttcctggag

SEQ ID NO: 982920 - DNA, 33 bp, Homo sapien
atctgtattctttcacgagtagttttcctggag

SEQ ID NO: 982921 - DNA, 33 bp, Homo sapien
tatcgattagtgtacaagaagtttattgtgatg

SEQ ID NO: 982922 - DNA, 33 bp, Homo sapien
tatcgattagtgtacaggaagtttattgtgatg

SEQ ID NO: 982923 - DNA, 33 bp, Homo sapien
agttctgtctagattcaaagctggtgattttaa

SEQ ID NO: 982924 - DNA, 33 bp, Homo sapien
agttctgtctagattctaagctggtgattttaa

SEQ ID NO: 982925 - DNA, 33 bp, Homo sapien
aaaagctggttgtagcaatagacatagaaaaaa

SEQ ID NO: 982926 - DNA, 33 bp, Homo sapien
aaaagctggttgtagcgatagacatagaaaaaa

SEQ ID NO: 982927 - DNA, 33 bp, Homo sapien
atgaatacagataaaactggtgaattggtatgt

SEQ ID NO: 982928 - DNA, 33 bp, Homo sapien
atgaatacagataaaattggtgaattggtatgt

SEQ ID NO: 982929 - DNA, 33 bp, Homo sapien
aacttgctgcacagagaccagagtgactgattt

SEQ ID NO: 982930 - DNA, 33 bp, Homo sapien
aacttgctgcacagaggccagagtgactgattt

SEQ ID NO: 982931 - DNA, 33 bp, Homo sapien
ctcctgatgcattatagaatttaatttctgatg

SEQ ID NO: 982932 - DNA, 33 bp, Homo sapien
ctcctgatgcattatataatttaatttctgatg

SEQ ID NO: 982933 - DNA, 33 bp, Homo sapien
gatgaggaaactgaaactcagaataggtggcac

SEQ ID NO: 982934 - DNA, 33 bp, Homo sapien
gatgaggaaactgaaattcagaataggtggcac

SEQ ID NO: 982935 - DNA, 33 bp, Homo sapien
ttctgtccctttccagcattaaaagtgttgagg

SEQ ID NO: 982936 - DNA, 33 bp, Homo sapien
ttctgtccctttccaggattaaaagtgttgagg

SEQ ID NO: 982937 - DNA, 33 bp, Homo sapien
agtaagttttttcacaatgtactctttgggaga

SEQ ID NO: 982938 - DNA, 33 bp, Homo sapien
agtaagttttttcacagtgtactctttgggaga

SEQ ID NO: 982939 - DNA, 33 bp, Homo sapien
ttcttctcaggtgagacagttgtagggaggagt

SEQ ID NO: 982940 - DNA, 33 bp, Homo sapien
ttcttctcaggtgagatagttgtagggaggagt

SEQ ID NO: 982941 - DNA, 33 bp, Homo sapien
cagttctatgtggccaaaaaaggtgggaagcca

SEQ ID NO: 982942 - DNA, 33 bp, Homo sapien
cagttctatgtggccagaaaaggtgggaagcca

SEQ ID NO: 982943 - DNA, 33 bp, Homo sapien
tgacctcactttcctccctgattcatacaaatt

SEQ ID NO: 982944 - DNA, 33 bp, Homo sapien
tgacctcactttcctctctgattcatacaaatt

SEQ ID NO: 982945 - DNA, 33 bp, Homo sapien
cacatcttaggttaagcatagcccaagaactgg

SEQ ID NO: 982946 - DNA, 33 bp, Homo sapien
cacatcttaggttaagtatagcccaagaactgg

SEQ ID NO: 982947 - DNA, 33 bp, Homo sapien
atatgcctgaactaaaaagagaatctgggaaaa

SEQ ID NO: 982948 - DNA, 33 bp, Homo sapien
atatgcctgaactaaagagagaatctgggaaaa

SEQ ID NO: 982949 - DNA, 33 bp, Homo sapien
atatatccagctttaagaaagaagtcaggaaat

SEQ ID NO: 982950 - DNA, 33 bp, Homo sapien
atatatccagctttaataaagaagtcaggaaat

SEQ ID NO: 982951 - DNA, 33 bp, Homo sapien
atcattattatgataccagtggttgtttcgaga

SEQ ID NO: 982952 - DNA, 33 bp, Homo sapien
atcattattatgatactagtggttgtttcgaga

SEQ ID NO: 982953 - DNA, 33 bp, Homo sapien
ttcacaattcagtttacctccactactagatta

SEQ ID NO: 982954 - DNA, 33 bp, Homo sapien
ttcacaattcagtttatctccactactagatta

SEQ ID NO: 982955 - DNA, 33 bp, Homo sapien
tatactgtgctaaaaaggttatctatttcttcc

SEQ ID NO: 982956 - DNA, 33 bp, Homo sapien
tatactgtgctaaaaatgttatctatttcttcc

SEQ ID NO: 982957 - DNA, 33 bp, Homo sapien
gtttggatggaattgcaactgtttcttccttaa

SEQ ID NO: 982958 - DNA, 33 bp, Homo sapien
gtttggatggaattgctactgtttcttccttaa

SEQ ID NO: 982959 - DNA, 33 bp, Homo sapien
aagaggtttccctttgaatgatggactggcagt

SEQ ID NO: 982960 - DNA, 33 bp, Homo sapien
aagaggtttccctttggatgatggactggcagt

SEQ ID NO: 982961 - DNA, 33 bp, Homo sapien
acttctgaaagctttgaattatttaccagtctt

SEQ ID NO: 982962 - DNA, 33 bp, Homo sapien
acttctgaaagctttggattatttaccagtctt

SEQ ID NO: 982963 - DNA, 33 bp, Homo sapien
aacagcaaattccacacggcagaaaaccagatt

SEQ ID NO: 982964 - DNA, 33 bp, Homo sapien
aacagcaaattccacatggcagaaaaccagatt

SEQ ID NO: 982965 - DNA, 33 bp, Homo sapien
cgagattaagctcaacaggaactcaatcttcaa

SEQ ID NO: 982966 - DNA, 33 bp, Homo sapien
cgagattaagctcaactggaactcaatcttcaa

SEQ ID NO: 982967 - DNA, 33 bp, Homo sapien
gtttgtcattgaacaactatctggtgttttatt

SEQ ID NO: 982968 - DNA, 33 bp, Homo sapien
gtttgtcattgaacaattatctggtgttttatt

SEQ ID NO: 982969 - DNA, 33 bp, Homo sapien
gacagcaacataacagccatttataacaaagtc

SEQ ID NO: 982970 - DNA, 33 bp, Homo sapien
gacagcaacataacagtcatttataacaaagtc

SEQ ID NO: 982971 - DNA, 33 bp, Homo sapien
tcctactggtgaaaaagtcacaatcacaatcaa

SEQ ID NO: 982972 - DNA, 33 bp, Homo sapien
tcctactggtgaaaaattcacaatcacaatcaa

SEQ ID NO: 982973 - DNA, 33 bp, Homo sapien
ccacttcctcatagcagatttttactgtgtcct

SEQ ID NO: 982974 - DNA, 33 bp, Homo sapien
ccacttcctcatagcatatttttactgtgtcct

SEQ ID NO: 982975 - DNA, 33 bp, Homo sapien
agaatgaatggtaggaatatcatagatgacagc

SEQ ID NO: 982976 - DNA, 33 bp, Homo sapien
agaatgaatggtaggagtatcatagatgacagc

SEQ ID NO: 982977 - DNA, 33 bp, Homo sapien
gaaaatgacctttctaaataattctaatcccat

SEQ ID NO: 982978 - DNA, 33 bp, Homo sapien
gaaaatgacctttctagataattctaatcccat

SEQ ID NO: 982979 - DNA, 33 bp, Homo sapien
acactgaaagtcacagaacagggtaagaccaag

SEQ ID NO: 982980 - DNA, 33 bp, Homo sapien
acactgaaagtcacagcacagggtaagaccaag

SEQ ID NO: 982981 - DNA, 33 bp, Homo sapien
gctctctgacctttaactgccaatattcttgga

SEQ ID NO: 982982 - DNA, 33 bp, Homo sapien
gctctctgacctttaattgccaatattcttgga

SEQ ID NO: 982983 - DNA, 33 bp, Homo sapien
ccaaaaatatcgagaacgaatctttatatatca

SEQ ID NO: 982984 - DNA, 33 bp, Homo sapien
ccaaaaatatcgagaatgaatctttatatatca

SEQ ID NO: 982985 - DNA, 33 bp, Homo sapien
tggaaatgaaaggctacgaaaggcacctctagg

SEQ ID NO: 982986 - DNA, 33 bp, Homo sapien
tggaaatgaaaggctatgaaaggcacctctagg

SEQ ID NO: 982987 - DNA, 33 bp, Homo sapien
ttgcaagtcaggttaacgctggaataaatgaaa

SEQ ID NO: 982988 - DNA, 33 bp, Homo sapien
ttgcaagtcaggttaatgctggaataaatgaaa

SEQ ID NO: 982989 - DNA, 33 bp, Homo sapien
ttgttattatggaggaagtgtagttctcaaact

SEQ ID NO: 982990 - DNA, 33 bp, Homo sapien
ttgttattatggaggatgtgtagttctcaaact

SEQ ID NO: 982991 - DNA, 33 bp, Homo sapien
cgaataataaagatccaggagtaagactttagc

SEQ ID NO: 982992 - DNA, 33 bp, Homo sapien
cgaataataaagatcctggagtaagactttagc

SEQ ID NO: 982993 - DNA, 33 bp, Homo sapien
ggaaaaaaccttggaaatgtaaatgcctctaag

SEQ ID NO: 982994 - DNA, 33 bp, Homo sapien
ggaaaaaaccttggaagtgtaaatgcctctaag

SEQ ID NO: 982995 - DNA, 33 bp, Homo sapien
agttaacaaacgagaaagattctaacatagttc

SEQ ID NO: 982996 - DNA, 33 bp, Homo sapien
agttaacaaacgagaatgattctaacatagttc

SEQ ID NO: 982997 - DNA, 33 bp, Homo sapien
tagacaaatcatcccacgttattccagtggttc

SEQ ID NO: 982998 - DNA, 33 bp, Homo sapien
tagacaaatcatcccatgttattccagtggttc

SEQ ID NO: 982999 - DNA, 33 bp, Homo sapien
atctggataaaacataactttctgcatttcagc

SEQ ID NO: 983000 - DNA, 33 bp, Homo sapien
atctggataaaacatagctttctgcatttcagc

SEQ ID NO: 983001 - DNA, 33 bp, Homo sapien
tctgtaagaagctttaagtctctttcaatgtca

SEQ ID NO: 983002 - DNA, 33 bp, Homo sapien
tctgtaagaagctttaggtctctttcaatgtca

SEQ ID NO: 983003 - DNA, 33 bp, Homo sapien
tctcttatttgaaccagactgatcatgttcact

SEQ ID NO: 983004 - DNA, 33 bp, Homo sapien
tctcttatttgaaccatactgatcatgttcact

SEQ ID NO: 983005 - DNA, 33 bp, Homo sapien
cagccatagaaaacaaatagaagtgaagaactg

SEQ ID NO: 983006 - DNA, 33 bp, Homo sapien
cagccatagaaaacaagtagaagtgaagaactg

SEQ ID NO: 983007 - DNA, 33 bp, Homo sapien
tggccaaattatcccaactgtattcccctattt

SEQ ID NO: 983008 - DNA, 33 bp, Homo sapien
tggccaaattatcccagctgtattcccctattt

SEQ ID NO: 983009 - DNA, 33 bp, Homo sapien
aacaaagtccctaatcacaaatatctctaaaca

SEQ ID NO: 983010 - DNA, 33 bp, Homo sapien
aacaaagtccctaatcgcaaatatctctaaaca

SEQ ID NO: 983011 - DNA, 33 bp, Homo sapien
gacaacttcatgaggccattttgtcccctgttc

SEQ ID NO: 983012 - DNA, 33 bp, Homo sapien
gacaacttcatgaggctattttgtcccctgttc

SEQ ID NO: 983013 - DNA, 33 bp, Homo sapien
tttttttctcctctgacgaaattgtggttgctc

SEQ ID NO: 983014 - DNA, 33 bp, Homo sapien
tttttttctcctctgatgaaattgtggttgctc

SEQ ID NO: 983015 - DNA, 33 bp, Homo sapien
aggcagtgttttcaaaatacacagttgatatgg

SEQ ID NO: 983016 - DNA, 33 bp, Homo sapien
aggcagtgttttcaaagtacacagttgatatgg

SEQ ID NO: 983017 - DNA, 33 bp, Homo sapien
ggcagaaaacaaacaaattctggatttaaattg

SEQ ID NO: 983018 - DNA, 33 bp, Homo sapien
ggcagaaaacaaacaagttctggatttaaattg

SEQ ID NO: 983019 - DNA, 33 bp, Homo sapien
tctggacaaagtcatccacatcctccttgctgt

SEQ ID NO: 983020 - DNA, 33 bp, Homo sapien
tctggacaaagtcatcgacatcctccttgctgt

SEQ ID NO: 983021 - DNA, 33 bp, Homo sapien
atttatgagattcgctcaagtaggttatcatca

SEQ ID NO: 983022 - DNA, 33 bp, Homo sapien
atttatgagattcgcttaagtaggttatcatca

SEQ ID NO: 983023 - DNA, 33 bp, Homo sapien
ctctcatcacttgtccccacaattacagaatac

SEQ ID NO: 983024 - DNA, 33 bp, Homo sapien
ctctcatcacttgtcctcacaattacagaatac

SEQ ID NO: 983025 - DNA, 33 bp, Homo sapien
attcatttgaaagctcaattttactttttgata

SEQ ID NO: 983026 - DNA, 33 bp, Homo sapien
attcatttgaaagctccattttactttttgata

SEQ ID NO: 983027 - DNA, 33 bp, Homo sapien
tgagagagtacgtgcacctttatttgtataagg

SEQ ID NO: 983028 - DNA, 33 bp, Homo sapien
tgagagagtacgtgcatctttatttgtataagg

SEQ ID NO: 983029 - DNA, 33 bp, Homo sapien
gcaggttcaaaaatcaagcctatatgatatagg

SEQ ID NO: 983030 - DNA, 33 bp, Homo sapien
gcaggttcaaaaatcatgcctatatgatatagg

SEQ ID NO: 983031 - DNA, 33 bp, Homo sapien
taataaaacctttggacgtgctagaagatgagg

SEQ ID NO: 983032 - DNA, 33 bp, Homo sapien
taataaaacctttggatgtgctagaagatgagg

SEQ ID NO: 983033 - DNA, 33 bp, Homo sapien
aaaaaaatgagccgtgcatggcggctggcacct

SEQ ID NO: 983034 - DNA, 33 bp, Homo sapien
aaaaaaatgagccgtgtatggcggctggcacct

SEQ ID NO: 983035 - DNA, 33 bp, Homo sapien
cttggccaaacttaacaggaaccagatggcaaa

SEQ ID NO: 983036 - DNA, 33 bp, Homo sapien
cttggccaaacttaacgggaaccagatggcaaa

SEQ ID NO: 983037 - DNA, 33 bp, Homo sapien
tgaagaaaggacaccaacctaaacaaacaaaca

SEQ ID NO: 983038 - DNA, 33 bp, Homo sapien
tgaagaaaggacaccagcctaaacaaacaaaca

SEQ ID NO: 983039 - DNA, 33 bp, Homo sapien
tcactggcaagtgatacgttggttgggtttagt

SEQ ID NO: 983040 - DNA, 33 bp, Homo sapien
tcactggcaagtgatatgttggttgggtttagt

SEQ ID NO: 983041 - DNA, 33 bp, Homo sapien
tttcttgaacttcaaaataccaggataagcatg

SEQ ID NO: 983042 - DNA, 33 bp, Homo sapien
tttcttgaacttcaaagtaccaggataagcatg

SEQ ID NO: 983043 - DNA, 33 bp, Homo sapien
tagtttggaaagtagggccaatcttgttctaac

SEQ ID NO: 983044 - DNA, 33 bp, Homo sapien
tagtttggaaagtaggtccaatcttgttctaac

SEQ ID NO: 983045 - DNA, 33 bp, Homo sapien
cttggaaggtcttaccaaagttgaacccagatg

SEQ ID NO: 983046 - DNA, 33 bp, Homo sapien
cttggaaggtcttaccgaagttgaacccagatg

SEQ ID NO: 983047 - DNA, 33 bp, Homo sapien
tgtctcatagaccctagcaccatttaattagaa

SEQ ID NO: 983048 - DNA, 33 bp, Homo sapien
tgtctcatagaccctatcaccatttaattagaa

SEQ ID NO: 983049 - DNA, 33 bp, Homo sapien
aagaatggggctgatacggagatgaagagaaca

SEQ ID NO: 983050 - DNA, 33 bp, Homo sapien
aagaatggggctgatatggagatgaagagaaca

SEQ ID NO: 983051 - DNA, 33 bp, Homo sapien
gttgttgtccaacactcagacagttatctttgg

SEQ ID NO: 983052 - DNA, 33 bp, Homo sapien
gttgttgtccaacacttagacagttatctttgg

SEQ ID NO: 983053 - DNA, 33 bp, Homo sapien
ccacggcaggtcaagaagctctcttgagcagct

SEQ ID NO: 983054 - DNA, 33 bp, Homo sapien
ccacggcaggtcaagacgctctcttgagcagct

SEQ ID NO: 983055 - DNA, 33 bp, Homo sapien
tattagcacatcttaaacagtctgaagagatgt

SEQ ID NO: 983056 - DNA, 33 bp, Homo sapien
tattagcacatcttaagcagtctgaagagatgt

SEQ ID NO: 983057 - DNA, 33 bp, Homo sapien
ttgtgagaacagtctcacgatgaataagtctca

SEQ ID NO: 983058 - DNA, 33 bp, Homo sapien
ttgtgagaacagtctcccgatgaataagtctca

SEQ ID NO: 983059 - DNA, 33 bp, Homo sapien
aatgcacaccatgaaaataatttgtatacagtg

SEQ ID NO: 983060 - DNA, 33 bp, Homo sapien
aatgcacaccatgaaagtaatttgtatacagtg

SEQ ID NO: 983061 - DNA, 33 bp, Homo sapien
cccctctcagccttaaccacttgagtctgcctc

SEQ ID NO: 983062 - DNA, 33 bp, Homo sapien
cccctctcagccttaagcacttgagtctgcctc

SEQ ID NO: 983063 - DNA, 33 bp, Homo sapien
ctgttcaaaatggcccagccttctttgaggata

SEQ ID NO: 983064 - DNA, 33 bp, Homo sapien
ctgttcaaaatggcccggccttctttgaggata

SEQ ID NO: 983065 - DNA, 33 bp, Homo sapien
aattctgaaagtggaaagtttaaccactgtgtt

SEQ ID NO: 983066 - DNA, 33 bp, Homo sapien
aattctgaaagtggaacgtttaaccactgtgtt

SEQ ID NO: 983067 - DNA, 33 bp, Homo sapien
tgcctataaaaatatcaatttagtgtcagaatt

SEQ ID NO: 983068 - DNA, 33 bp, Homo sapien
tgcctataaaaatatccatttagtgtcagaatt

SEQ ID NO: 983069 - DNA, 33 bp, Homo sapien
acggtgcatgtcctgacggataaaacttagaag

SEQ ID NO: 983070 - DNA, 33 bp, Homo sapien
acggtgcatgtcctgatggataaaacttagaag

SEQ ID NO: 983071 - DNA, 33 bp, Homo sapien
aatccatataacagcaaaaatgaatacagtgct

SEQ ID NO: 983072 - DNA, 33 bp, Homo sapien
aatccatataacagcagaaatgaatacagtgct

SEQ ID NO: 983073 - DNA, 33 bp, Homo sapien
tataagtcgtgaaagacgagaaggcatttgcag

SEQ ID NO: 983074 - DNA, 33 bp, Homo sapien
tataagtcgtgaaagatgagaaggcatttgcag

SEQ ID NO: 983075 - DNA, 33 bp, Homo sapien
gtgtgtgtaggcatgaagggagagacgaataga

SEQ ID NO: 983076 - DNA, 33 bp, Homo sapien
gtgtgtgtaggcatgaggggagagacgaataga

SEQ ID NO: 983077 - DNA, 33 bp, Homo sapien
tctctatgcctactcagatgtcattgaccaatt

SEQ ID NO: 983078 - DNA, 33 bp, Homo sapien
tctctatgcctactcatatgtcattgaccaatt

SEQ ID NO: 983079 - DNA, 33 bp, Homo sapien
gtgtaaatagcgtgaactaaaatatattggttt

SEQ ID NO: 983080 - DNA, 33 bp, Homo sapien
gtgtaaatagcgtgaagtaaaatatattggttt

SEQ ID NO: 983081 - DNA, 33 bp, Homo sapien
ctggacatttaattcacgttgctcttaaatcca

SEQ ID NO: 983082 - DNA, 33 bp, Homo sapien
ctggacatttaattcatgttgctcttaaatcca

SEQ ID NO: 983083 - DNA, 33 bp, Homo sapien
ggttaagtaagtcctgacaaatctaatattctg

SEQ ID NO: 983084 - DNA, 33 bp, Homo sapien
ggttaagtaagtcctggcaaatctaatattctg

SEQ ID NO: 983085 - DNA, 33 bp, Homo sapien
tttctatcgttgccctcactttgactatttggt

SEQ ID NO: 983086 - DNA, 33 bp, Homo sapien
tttctatcgttgcccttactttgactatttggt

SEQ ID NO: 983087 - DNA, 33 bp, Homo sapien
ccatttctttagctacaccatcaaatcaggctt

SEQ ID NO: 983088 - DNA, 33 bp, Homo sapien
ccatttctttagctacgccatcaaatcaggctt

SEQ ID NO: 983089 - DNA, 33 bp, Homo sapien
gaaaaatgttacaataataagagccattgaaga

SEQ ID NO: 983090 - DNA, 33 bp, Homo sapien
gaaaaatgttacaatagtaagagccattgaaga

SEQ ID NO: 983091 - DNA, 33 bp, Homo sapien
ataactacaaactcccaaggttgctttccagac

SEQ ID NO: 983092 - DNA, 33 bp, Homo sapien
ataactacaaactcccgaggttgctttccagac

SEQ ID NO: 983093 - DNA, 33 bp, Homo sapien
ttaatgccaataacctcaacttagatttgttac

SEQ ID NO: 983094 - DNA, 33 bp, Homo sapien
ttaatgccaataaccttaacttagatttgttac

SEQ ID NO: 983095 - DNA, 33 bp, Homo sapien
tcaaagattcaggtcaataagcttacaggcgat

SEQ ID NO: 983096 - DNA, 33 bp, Homo sapien
tcaaagattcaggtcagtaagcttacaggcgat

SEQ ID NO: 983097 - DNA, 33 bp, Homo sapien
atttagtctgtgaaaaagtaatcaaaaggtcac

SEQ ID NO: 983098 - DNA, 33 bp, Homo sapien
atttagtctgtgaaaatgtaatcaaaaggtcac

SEQ ID NO: 983099 - DNA, 33 bp, Homo sapien
ggtttaaactacagaacgaagtgtacagatttt

SEQ ID NO: 983100 - DNA, 33 bp, Homo sapien
ggtttaaactacagaatgaagtgtacagatttt

SEQ ID NO: 983101 - DNA, 33 bp, Homo sapien
ttttacatctaaagcaaggagctcagagcttcc

SEQ ID NO: 983102 - DNA, 33 bp, Homo sapien
ttttacatctaaagcatggagctcagagcttcc

SEQ ID NO: 983103 - DNA, 33 bp, Homo sapien
ttcattccatcggtaaagttgtaactatcttta

SEQ ID NO: 983104 - DNA, 33 bp, Homo sapien
ttcattccatcggtaaggttgtaactatcttta

SEQ ID NO: 983105 - DNA, 33 bp, Homo sapien
agactggacccatactaaaaatgccagagccag

SEQ ID NO: 983106 - DNA, 33 bp, Homo sapien
agactggacccatacttaaaatgccagagccag

SEQ ID NO: 983107 - DNA, 33 bp, Homo sapien
agttatatttgtaggcgcagttatgcaatataa

SEQ ID NO: 983108 - DNA, 33 bp, Homo sapien
agttatatttgtaggctcagttatgcaatataa

SEQ ID NO: 983109 - DNA, 33 bp, Homo sapien
aaacttcagacttcacaagagcaagatgaattt

SEQ ID NO: 983110 - DNA, 33 bp, Homo sapien
aaacttcagacttcacgagagcaagatgaattt

SEQ ID NO: 983111 - DNA, 33 bp, Homo sapien
aagatatgtcagtggaaagattaactgcttgtc

SEQ ID NO: 983112 - DNA, 33 bp, Homo sapien
aagatatgtcagtggacagattaactgcttgtc

SEQ ID NO: 983113 - DNA, 33 bp, Homo sapien
gaagaagccttgactcgaatcctgtcattgcaa

SEQ ID NO: 983114 - DNA, 33 bp, Homo sapien
gaagaagccttgactctaatcctgtcattgcaa

SEQ ID NO: 983115 - DNA, 33 bp, Homo sapien
tatattatcacttcttaaaacctaacgttctgt

SEQ ID NO: 983116 - DNA, 33 bp, Homo sapien
tatattatcacttctttaaacctaacgttctgt

SEQ ID NO: 983117 - DNA, 33 bp, Homo sapien
tttttattataactgaccctaacaatgacctag

SEQ ID NO: 983118 - DNA, 33 bp, Homo sapien
tttttattataactgagcctaacaatgacctag

SEQ ID NO: 983119 - DNA, 33 bp, Homo sapien
gagcacttgttagataccatcatttggtcacag

SEQ ID NO: 983120 - DNA, 33 bp, Homo sapien
gagcacttgttagatatcatcatttggtcacag

SEQ ID NO: 983121 - DNA, 33 bp, Homo sapien
ttgactcctcaactatcaagatgtaacattatt

SEQ ID NO: 983122 - DNA, 33 bp, Homo sapien
ttgactcctcaactattaagatgtaacattatt

SEQ ID NO: 983123 - DNA, 33 bp, Homo sapien
cacagatacccaagcactctgaagtgaatatgt

SEQ ID NO: 983124 - DNA, 33 bp, Homo sapien
cacagatacccaagcattctgaagtgaatatgt

SEQ ID NO: 983125 - DNA, 33 bp, Homo sapien
tgagagcaactaatctaagaataagtctaaagc

SEQ ID NO: 983126 - DNA, 33 bp, Homo sapien
tgagagcaactaatctcagaataagtctaaagc

SEQ ID NO: 983127 - DNA, 33 bp, Homo sapien
taaaattgcctagagaaaagagctcccctactc

SEQ ID NO: 983128 - DNA, 33 bp, Homo sapien
taaaattgcctagagagaagagctcccctactc

SEQ ID NO: 983129 - DNA, 33 bp, Homo sapien
agatccaccaagcacaaggaaattgcagcagac

SEQ ID NO: 983130 - DNA, 33 bp, Homo sapien
agatccaccaagcacacggaaattgcagcagac

SEQ ID NO: 983131 - DNA, 33 bp, Homo sapien
acatacacaaattttacaggatttcagacagca

SEQ ID NO: 983132 - DNA, 33 bp, Homo sapien
acatacacaaattttataggatttcagacagca

SEQ ID NO: 983133 - DNA, 33 bp, Homo sapien
atagctaccctaataacaattggagtctgcatc

SEQ ID NO: 983134 - DNA, 33 bp, Homo sapien
atagctaccctaataataattggagtctgcatc

SEQ ID NO: 983135 - DNA, 33 bp, Homo sapien
ttcacagtggtcaaatcaaaagtctcctccagt

SEQ ID NO: 983136 - DNA, 33 bp, Homo sapien
ttcacagtggtcaaatgaaaagtctcctccagt

SEQ ID NO: 983137 - DNA, 33 bp, Homo sapien
tgtatgaaataaaggtcacaaatcttcatttat

SEQ ID NO: 983138 - DNA, 33 bp, Homo sapien
tgtatgaaataaaggtgacaaatcttcatttat

SEQ ID NO: 983139 - DNA, 33 bp, Homo sapien
agagaaatagagaagacgaaatatgtgggtagg

SEQ ID NO: 983140 - DNA, 33 bp, Homo sapien
agagaaatagagaagatgaaatatgtgggtagg

SEQ ID NO: 983141 - DNA, 33 bp, Homo sapien
aaccactcttttaacaatgacaaaccaaacact

SEQ ID NO: 983142 - DNA, 33 bp, Homo sapien
aaccactcttttaacagtgacaaaccaaacact

SEQ ID NO: 983143 - DNA, 33 bp, Homo sapien
caatctgttaatacaactcaatcaactgaggcc

SEQ ID NO: 983144 - DNA, 33 bp, Homo sapien
caatctgttaatacaattcaatcaactgaggcc

SEQ ID NO: 983145 - DNA, 33 bp, Homo sapien
agtgaaaggaaaaaataaatgtgctgattcatt

SEQ ID NO: 983146 - DNA, 33 bp, Homo sapien
agtgaaaggaaaaaattaatgtgctgattcatt

SEQ ID NO: 983147 - DNA, 33 bp, Homo sapien
tcttctcttggaacaaccttgctcttacggttc

SEQ ID NO: 983148 - DNA, 33 bp, Homo sapien
tcttctcttggaacaatcttgctcttacggttc

SEQ ID NO: 983149 - DNA, 33 bp, Homo sapien
tgctaagtcctcataacgctggcacaatatttg

SEQ ID NO: 983150 - DNA, 33 bp, Homo sapien
tgctaagtcctcataatgctggcacaatatttg

SEQ ID NO: 983151 - DNA, 33 bp, Homo sapien
tcccaccaaatttttgaacaaatcacgttttgt

SEQ ID NO: 983152 - DNA, 33 bp, Homo sapien
tcccaccaaatttttgtacaaatcacgttttgt

SEQ ID NO: 983153 - DNA, 33 bp, Homo sapien
gatggctctctacagtaaagaataatctggccc

SEQ ID NO: 983154 - DNA, 33 bp, Homo sapien
gatggctctctacagtgaagaataatctggccc

SEQ ID NO: 983155 - DNA, 33 bp, Homo sapien
tatcatttggcaagcagatattctaagtttaaa

SEQ ID NO: 983156 - DNA, 33 bp, Homo sapien
tatcatttggcaagcatatattctaagtttaaa

SEQ ID NO: 983157 - DNA, 33 bp, Homo sapien
gttcaggagcataacccagggtgagagggagga

SEQ ID NO: 983158 - DNA, 33 bp, Homo sapien
gttcaggagcataaccgagggtgagagggagga

SEQ ID NO: 983159 - DNA, 33 bp, Homo sapien
gaagccaaggagtgagccatatgaaggtctgta

SEQ ID NO: 983160 - DNA, 33 bp, Homo sapien
gaagccaaggagtgagtcatatgaaggtctgta

SEQ ID NO: 983161 - DNA, 33 bp, Homo sapien
gagctttattagaaaactggtatggtcttatga

SEQ ID NO: 983162 - DNA, 33 bp, Homo sapien
gagctttattagaaaattggtatggtcttatga

SEQ ID NO: 983163 - DNA, 33 bp, Homo sapien
ttggtttactgatggaatataaatgcctagaaa

SEQ ID NO: 983164 - DNA, 33 bp, Homo sapien
ttggtttactgatggagtataaatgcctagaaa

SEQ ID NO: 983165 - DNA, 33 bp, Homo sapien
tctgtgaaaagacctacgcctatttattacatc

SEQ ID NO: 983166 - DNA, 33 bp, Homo sapien
tctgtgaaaagacctatgcctatttattacatc

SEQ ID NO: 983167 - DNA, 33 bp, Homo sapien
gagtcaccgcacccaaactatggtgtggatctt

SEQ ID NO: 983168 - DNA, 33 bp, Homo sapien
gagtcaccgcacccaacctatggtgtggatctt

SEQ ID NO: 983169 - DNA, 33 bp, Homo sapien
aattacatctttttcgcaaggcttttagagaac

SEQ ID NO: 983170 - DNA, 33 bp, Homo sapien
aattacatctttttcgtaaggcttttagagaac

SEQ ID NO: 983171 - DNA, 33 bp, Homo sapien
ttttgcaaggttcttacgaatttaagcatgcaa

SEQ ID NO: 983172 - DNA, 33 bp, Homo sapien
ttttgcaaggttcttatgaatttaagcatgcaa

SEQ ID NO: 983173 - DNA, 33 bp, Homo sapien
tcatccctgatatcaacgaaccacccgacacta

SEQ ID NO: 983174 - DNA, 33 bp, Homo sapien
tcatccctgatatcaatgaaccacccgacacta

SEQ ID NO: 983175 - DNA, 33 bp, Homo sapien
gagtatgacaggatagaaggtcagatatgcctc

SEQ ID NO: 983176 - DNA, 33 bp, Homo sapien
gagtatgacaggataggaggtcagatatgcctc

SEQ ID NO: 983177 - DNA, 33 bp, Homo sapien
atctaaaggctctatacgccagttttccaaaga

SEQ ID NO: 983178 - DNA, 33 bp, Homo sapien
atctaaaggctctatatgccagttttccaaaga

SEQ ID NO: 983179 - DNA, 33 bp, Homo sapien
aaacgtagctgacctaaagaataatcattcttg

SEQ ID NO: 983180 - DNA, 33 bp, Homo sapien
aaacgtagctgacctagagaataatcattcttg

SEQ ID NO: 983181 - DNA, 33 bp, Homo sapien
taatgtggactgtgaaagacatttaggacaaac

SEQ ID NO: 983182 - DNA, 33 bp, Homo sapien
taatgtggactgtgaaggacatttaggacaaac

SEQ ID NO: 983183 - DNA, 33 bp, Homo sapien
atcactgtttaagttaactatctcaggacaaat

SEQ ID NO: 983184 - DNA, 33 bp, Homo sapien
atcactgtttaagttacctatctcaggacaaat

SEQ ID NO: 983185 - DNA, 33 bp, Homo sapien
aaccagtgtaataaaccaactcaacaaggagaa

SEQ ID NO: 983186 - DNA, 33 bp, Homo sapien
aaccagtgtaataaactaactcaacaaggagaa

SEQ ID NO: 983187 - DNA, 33 bp, Homo sapien
attttattctagctacgatttcacagaacaact

SEQ ID NO: 983188 - DNA, 33 bp, Homo sapien
attttattctagctactatttcacagaacaact

SEQ ID NO: 983189 - DNA, 33 bp, Homo sapien
agttatttccatcaacaaaaaaaatctgaatag

SEQ ID NO: 983190 - DNA, 33 bp, Homo sapien
agttatttccatcaacgaaaaaaatctgaatag

SEQ ID NO: 983191 - DNA, 33 bp, Homo sapien
gcctcatgacccacagaaactaatatctctcat

SEQ ID NO: 983192 - DNA, 33 bp, Homo sapien
gcctcatgacccacaggaactaatatctctcat

SEQ ID NO: 983193 - DNA, 33 bp, Homo sapien
gtagttgcccacctatcacctctgtctgcgttc

SEQ ID NO: 983194 - DNA, 33 bp, Homo sapien
gtagttgcccacctatgacctctgtctgcgttc

SEQ ID NO: 983195 - DNA, 33 bp, Homo sapien
cagctaacttccattaagtagtgttttgtgggg

SEQ ID NO: 983196 - DNA, 33 bp, Homo sapien
cagctaacttccattaggtagtgttttgtgggg

SEQ ID NO: 983197 - DNA, 33 bp, Homo sapien
ggtaagatttgattccaacatacctccgcatca

SEQ ID NO: 983198 - DNA, 33 bp, Homo sapien
ggtaagatttgattccgacatacctccgcatca

SEQ ID NO: 983199 - DNA, 33 bp, Homo sapien
tcttacttacaatttgaagctaaaccctgaata

SEQ ID NO: 983200 - DNA, 33 bp, Homo sapien
tcttacttacaatttggagctaaaccctgaata

SEQ ID NO: 983201 - DNA, 33 bp, Homo sapien
actattccactaggacagaatcaactgaagagc

SEQ ID NO: 983202 - DNA, 33 bp, Homo sapien
actattccactaggacggaatcaactgaagagc

SEQ ID NO: 983203 - DNA, 33 bp, Homo sapien
ccagaggttttcaagaatacagcacaacagggt

SEQ ID NO: 983204 - DNA, 33 bp, Homo sapien
ccagaggttttcaagagtacagcacaacagggt

SEQ ID NO: 983205 - DNA, 33 bp, Homo sapien
tgaaggacattatccaagactaacttcttacat

SEQ ID NO: 983206 - DNA, 33 bp, Homo sapien
tgaaggacattatccaggactaacttcttacat

SEQ ID NO: 983207 - DNA, 33 bp, Homo sapien
ggttgggaggaataaactgttgatagctttttg

SEQ ID NO: 983208 - DNA, 33 bp, Homo sapien
ggttgggaggaataaattgttgatagctttttg

SEQ ID NO: 983209 - DNA, 33 bp, Homo sapien
attgcgaattttactaaccagcattcttctagg

SEQ ID NO: 983210 - DNA, 33 bp, Homo sapien
attgcgaattttactagccagcattcttctagg

SEQ ID NO: 983211 - DNA, 33 bp, Homo sapien
atagagtgaaaaccaacagtgacctaaatacag

SEQ ID NO: 983212 - DNA, 33 bp, Homo sapien
atagagtgaaaaccaatagtgacctaaatacag

SEQ ID NO: 983213 - DNA, 33 bp, Homo sapien
atcaacacattagggaacttaatttgaagactc

SEQ ID NO: 983214 - DNA, 33 bp, Homo sapien
atcaacacattagggaccttaatttgaagactc

SEQ ID NO: 983215 - DNA, 33 bp, Homo sapien
ctctgaacaacgtaaacagaccactggggttag

SEQ ID NO: 983216 - DNA, 33 bp, Homo sapien
ctctgaacaacgtaaagagaccactggggttag

SEQ ID NO: 983217 - DNA, 33 bp, Homo sapien
ggtagagcatctaacaaccaggtgagcggagca

SEQ ID NO: 983218 - DNA, 33 bp, Homo sapien
ggtagagcatctaacacccaggtgagcggagca

SEQ ID NO: 983219 - DNA, 33 bp, Homo sapien
agagggtcgtgattcccagcaataaaaaggcct

SEQ ID NO: 983220 - DNA, 33 bp, Homo sapien
agagggtcgtgattccgagcaataaaaaggcct

SEQ ID NO: 983221 - DNA, 33 bp, Homo sapien
gcttccatattatccacagaggagtgaagagat

SEQ ID NO: 983222 - DNA, 33 bp, Homo sapien
gcttccatattatccatagaggagtgaagagat

SEQ ID NO: 983223 - DNA, 33 bp, Homo sapien
ctcgccattcaaatgcaaccataagtacacaga

SEQ ID NO: 983224 - DNA, 33 bp, Homo sapien
ctcgccattcaaatgcgaccataagtacacaga

SEQ ID NO: 983225 - DNA, 33 bp, Homo sapien
gatcacacgggtttagcacttgatcaaacagag

SEQ ID NO: 983226 - DNA, 33 bp, Homo sapien
gatcacacgggtttagtacttgatcaaacagag

SEQ ID NO: 983227 - DNA, 33 bp, Homo sapien
gtgcctggagcataatgaaagaggaaaaatcac

SEQ ID NO: 983228 - DNA, 33 bp, Homo sapien
gtgcctggagcataattaaagaggaaaaatcac

SEQ ID NO: 983229 - DNA, 33 bp, Homo sapien
aaagaaaatggtatgccaagtggcctcttgttt

SEQ ID NO: 983230 - DNA, 33 bp, Homo sapien
aaagaaaatggtatgctaagtggcctcttgttt

SEQ ID NO: 983231 - DNA, 33 bp, Homo sapien
atttagctaaaatctcactggttaaactgaatg

SEQ ID NO: 983232 - DNA, 33 bp, Homo sapien
atttagctaaaatctcgctggttaaactgaatg

SEQ ID NO: 983233 - DNA, 33 bp, Homo sapien
aaatggggtttgttaaatagctttgctaggaaa

SEQ ID NO: 983234 - DNA, 33 bp, Homo sapien
aaatggggtttgttaagtagctttgctaggaaa

SEQ ID NO: 983235 - DNA, 33 bp, Homo sapien
tttggaagtgatcagcacattctaattgaccat

SEQ ID NO: 983236 - DNA, 33 bp, Homo sapien
tttggaagtgatcagcgcattctaattgaccat

SEQ ID NO: 983237 - DNA, 33 bp, Homo sapien
tacaaggtttgtattacaggtgctgaaaaacta

SEQ ID NO: 983238 - DNA, 33 bp, Homo sapien
tacaaggtttgtattataggtgctgaaaaacta

SEQ ID NO: 983239 - DNA, 33 bp, Homo sapien
gaacactctccaagtgcaactgaagacagctta

SEQ ID NO: 983240 - DNA, 33 bp, Homo sapien
gaacactctccaagtggaactgaagacagctta

SEQ ID NO: 983241 - DNA, 33 bp, Homo sapien
tcacgaaccagagaccagagatacagcctacaa

SEQ ID NO: 983242 - DNA, 33 bp, Homo sapien
tcacgaaccagagaccggagatacagcctacaa

SEQ ID NO: 983243 - DNA, 33 bp, Homo sapien
gacttagtctcacttacccttcatattttcttc

SEQ ID NO: 983244 - DNA, 33 bp, Homo sapien
gacttagtctcacttatccttcatattttcttc

SEQ ID NO: 983245 - DNA, 33 bp, Homo sapien
tttcaagtatcgtttgaatagttgaaagtaagt

SEQ ID NO: 983246 - DNA, 33 bp, Homo sapien
tttcaagtatcgtttgtatagttgaaagtaagt

SEQ ID NO: 983247 - DNA, 33 bp, Homo sapien
tgttcacagaaaaaagaacatagcataggttga

SEQ ID NO: 983248 - DNA, 33 bp, Homo sapien
tgttcacagaaaaaaggacatagcataggttga

SEQ ID NO: 983249 - DNA, 33 bp, Homo sapien
ggtgtggatccacttacggtgcagagagttcag

SEQ ID NO: 983250 - DNA, 33 bp, Homo sapien
ggtgtggatccacttatggtgcagagagttcag

SEQ ID NO: 983251 - DNA, 33 bp, Homo sapien
aaagcaatggtttgaaaactatctggcaaatta

SEQ ID NO: 983252 - DNA, 33 bp, Homo sapien
aaagcaatggtttgaagactatctggcaaatta

SEQ ID NO: 983253 - DNA, 33 bp, Homo sapien
agatgtatgtatatataacaaccaatgtatgca

SEQ ID NO: 983254 - DNA, 33 bp, Homo sapien
agatgtatgtatatatgacaaccaatgtatgca

SEQ ID NO: 983255 - DNA, 33 bp, Homo sapien
tgacataggatggcagaaacacttaccttggtt

SEQ ID NO: 983256 - DNA, 33 bp, Homo sapien
tgacataggatggcaggaacacttaccttggtt

SEQ ID NO: 983257 - DNA, 33 bp, Homo sapien
ttaagatgaagaaacaatggtattaaaaggcaa

SEQ ID NO: 983258 - DNA, 33 bp, Homo sapien
ttaagatgaagaaacagtggtattaaaaggcaa

SEQ ID NO: 983259 - DNA, 33 bp, Homo sapien
ctccttgagaaactcaatatcttcttaggctat

SEQ ID NO: 983260 - DNA, 33 bp, Homo sapien
ctccttgagaaactcagtatcttcttaggctat

SEQ ID NO: 983261 - DNA, 33 bp, Homo sapien
aacagtaatacgacatgagagcagtccacagag

SEQ ID NO: 983262 - DNA, 33 bp, Homo sapien
aacagtaatacgacattagagcagtccacagag

SEQ ID NO: 983263 - DNA, 33 bp, Homo sapien
tggggatgtcacttcaccagctagaaatctctg

SEQ ID NO: 983264 - DNA, 33 bp, Homo sapien
tggggatgtcacttcatcagctagaaatctctg

SEQ ID NO: 983265 - DNA, 33 bp, Homo sapien
tgactgtggtttgttacaaatgagactactttc

SEQ ID NO: 983266 - DNA, 33 bp, Homo sapien
tgactgtggtttgttagaaatgagactactttc

SEQ ID NO: 983267 - DNA, 33 bp, Homo sapien
catcctgagctggcagaaacataatccacttct

SEQ ID NO: 983268 - DNA, 33 bp, Homo sapien
catcctgagctggcaggaacataatccacttct

SEQ ID NO: 983269 - DNA, 33 bp, Homo sapien
actgaaaaattcactacagcagtttcaaaattc

SEQ ID NO: 983270 - DNA, 33 bp, Homo sapien
actgaaaaattcactagagcagtttcaaaattc

SEQ ID NO: 983271 - DNA, 33 bp, Homo sapien
cagcatggtatttgtaaaaccaaatagagaaat

SEQ ID NO: 983272 - DNA, 33 bp, Homo sapien
cagcatggtatttgtacaaccaaatagagaaat

SEQ ID NO: 983273 - DNA, 33 bp, Homo sapien
aaggggtctgggttaaagtagataaaaataatt

SEQ ID NO: 983274 - DNA, 33 bp, Homo sapien
aaggggtctgggttaacgtagataaaaataatt

SEQ ID NO: 983275 - DNA, 33 bp, Homo sapien
tggtttgtggtgactaaattatattaaaggtac

SEQ ID NO: 983276 - DNA, 33 bp, Homo sapien
tggtttgtggtgactagattatattaaaggtac

SEQ ID NO: 983277 - DNA, 33 bp, Homo sapien
tcggtgaagtggccccaacaagaccgggagatt

SEQ ID NO: 983278 - DNA, 33 bp, Homo sapien
tcggtgaagtggcccccacaagaccgggagatt

SEQ ID NO: 983279 - DNA, 33 bp, Homo sapien
agtacattaaccacaaaggctagccagggtttc

SEQ ID NO: 983280 - DNA, 33 bp, Homo sapien
agtacattaaccacaagggctagccagggtttc

SEQ ID NO: 983281 - DNA, 33 bp, Homo sapien
gatgttggtcaaactacgtaataatttcaatca

SEQ ID NO: 983282 - DNA, 33 bp, Homo sapien
gatgttggtcaaactatgtaataatttcaatca

SEQ ID NO: 983283 - DNA, 33 bp, Homo sapien
tgtaatcatcctttctcaatggtccctgaaagt

SEQ ID NO: 983284 - DNA, 33 bp, Homo sapien
tgtaatcatcctttcttaatggtccctgaaagt

SEQ ID NO: 983285 - DNA, 33 bp, Homo sapien
atcctaggaattatctcagactctcttctgcca

SEQ ID NO: 983286 - DNA, 33 bp, Homo sapien
atcctaggaattatcttagactctcttctgcca

SEQ ID NO: 983287 - DNA, 33 bp, Homo sapien
aaatgtttctaaactccaaaacggagaaggtat

SEQ ID NO: 983288 - DNA, 33 bp, Homo sapien
aaatgtttctaaactctaaaacggagaaggtat

SEQ ID NO: 983289 - DNA, 33 bp, Homo sapien
aactatacttaatgacaccttcttctaaatgtc

SEQ ID NO: 983290 - DNA, 33 bp, Homo sapien
aactatacttaatgacgccttcttctaaatgtc

SEQ ID NO: 983291 - DNA, 33 bp, Homo sapien
taaatgagaatgctaacaggctgtaaacatttc

SEQ ID NO: 983292 - DNA, 33 bp, Homo sapien
taaatgagaatgctaataggctgtaaacatttc

SEQ ID NO: 983293 - DNA, 33 bp, Homo sapien
caacctgatgaaataaatgtttcaagacataag

SEQ ID NO: 983294 - DNA, 33 bp, Homo sapien
caacctgatgaaataactgtttcaagacataag

SEQ ID NO: 983295 - DNA, 33 bp, Homo sapien
tagttaggatgtagacaatatgaaataccttta

SEQ ID NO: 983296 - DNA, 33 bp, Homo sapien
tagttaggatgtagacgatatgaaataccttta

SEQ ID NO: 983297 - DNA, 33 bp, Homo sapien
gagatacctgagtctacatggcaacaaggttaa

SEQ ID NO: 983298 - DNA, 33 bp, Homo sapien
gagatacctgagtctatatggcaacaaggttaa

SEQ ID NO: 983299 - DNA, 33 bp, Homo sapien
attattaagcaagcagaatactatcagactcat

SEQ ID NO: 983300 - DNA, 33 bp, Homo sapien
attattaagcaagcaggatactatcagactcat

SEQ ID NO: 983301 - DNA, 33 bp, Homo sapien
aaaattagcttgaaccaaagaagaaaagatcac

SEQ ID NO: 983302 - DNA, 33 bp, Homo sapien
aaaattagcttgaaccgaagaagaaaagatcac

SEQ ID NO: 983303 - DNA, 33 bp, Homo sapien
tttgcctattgcctccaaattacatagaccctg

SEQ ID NO: 983304 - DNA, 33 bp, Homo sapien
tttgcctattgcctccgaattacatagaccctg

SEQ ID NO: 983305 - DNA, 33 bp, Homo sapien
tcatcgtatagccttaaaatatgtagctgactg

SEQ ID NO: 983306 - DNA, 33 bp, Homo sapien
tcatcgtatagccttataatatgtagctgactg

SEQ ID NO: 983307 - DNA, 33 bp, Homo sapien
tgcaatttcctgaagacataaaaggattgcaaa

SEQ ID NO: 983308 - DNA, 33 bp, Homo sapien
tgcaatttcctgaagagataaaaggattgcaaa

SEQ ID NO: 983309 - DNA, 33 bp, Homo sapien
cttatttgaccacaacaaagaggtttccacttt

SEQ ID NO: 983310 - DNA, 33 bp, Homo sapien
cttatttgaccacaacgaagaggtttccacttt

SEQ ID NO: 983311 - DNA, 33 bp, Homo sapien
tagatgagaagacaaacgaaagtacttgaggaa

SEQ ID NO: 983312 - DNA, 33 bp, Homo sapien
tagatgagaagacaaatgaaagtacttgaggaa

SEQ ID NO: 983313 - DNA, 33 bp, Homo sapien
ttgaattgtatccccccgccaccaaatttatat

SEQ ID NO: 983314 - DNA, 33 bp, Homo sapien
ttgaattgtatccccctgccaccaaatttatat

SEQ ID NO: 983315 - DNA, 33 bp, Homo sapien
aaaattgaacactgggaactacagagcagggaa

SEQ ID NO: 983316 - DNA, 33 bp, Homo sapien
aaaattgaacactggggactacagagcagggaa

SEQ ID NO: 983317 - DNA, 33 bp, Homo sapien
tttacaaatatacttcaaagtgaaaaggttgca

SEQ ID NO: 983318 - DNA, 33 bp, Homo sapien
tttacaaatatacttcgaagtgaaaaggttgca

SEQ ID NO: 983319 - DNA, 33 bp, Homo sapien
agatttatcaattttacgggtagccaacttcag

SEQ ID NO: 983320 - DNA, 33 bp, Homo sapien
agatttatcaattttatgggtagccaacttcag

SEQ ID NO: 983321 - DNA, 33 bp, Homo sapien
agacactataagcaaccgcaaaagatgaatgtt

SEQ ID NO: 983322 - DNA, 33 bp, Homo sapien
agacactataagcaactgcaaaagatgaatgtt

SEQ ID NO: 983323 - DNA, 33 bp, Homo sapien
aaatctgcagagttgacacttaaaatgagagct

SEQ ID NO: 983324 - DNA, 33 bp, Homo sapien
aaatctgcagagttgatacttaaaatgagagct

SEQ ID NO: 983325 - DNA, 33 bp, Homo sapien
ttaattgtataaactaccctaatgtttctcttg

SEQ ID NO: 983326 - DNA, 33 bp, Homo sapien
ttaattgtataaactatcctaatgtttctcttg

SEQ ID NO: 983327 - DNA, 33 bp, Homo sapien
tccactgggcagataccaaaatccacagatgct

SEQ ID NO: 983328 - DNA, 33 bp, Homo sapien
tccactgggcagatacgaaaatccacagatgct

SEQ ID NO: 983329 - DNA, 33 bp, Homo sapien
agtagataggcaatacacaggaaaggataaatc

SEQ ID NO: 983330 - DNA, 33 bp, Homo sapien
agtagataggcaatacgcaggaaaggataaatc

SEQ ID NO: 983331 - DNA, 33 bp, Homo sapien
aaaaggattatgattacgtattgggcaattccg

SEQ ID NO: 983332 - DNA, 33 bp, Homo sapien
aaaaggattatgattatgtattgggcaattccg

SEQ ID NO: 983333 - DNA, 33 bp, Homo sapien
ctaagactcaaatccaatgataagtaatcccta

SEQ ID NO: 983334 - DNA, 33 bp, Homo sapien
ctaagactcaaatccagtgataagtaatcccta

SEQ ID NO: 983335 - DNA, 33 bp, Homo sapien
gacttagacttgaccacatatttaaccatatac

SEQ ID NO: 983336 - DNA, 33 bp, Homo sapien
gacttagacttgaccatatatttaaccatatac

SEQ ID NO: 983337 - DNA, 33 bp, Homo sapien
agcaagcagtggttaaatgttgcacgaggacca

SEQ ID NO: 983338 - DNA, 33 bp, Homo sapien
agcaagcagtggttaagtgttgcacgaggacca

SEQ ID NO: 983339 - DNA, 33 bp, Homo sapien
tgcctcatactgggaaaggggagagtaaaacag

SEQ ID NO: 983340 - DNA, 33 bp, Homo sapien
tgcctcatactgggaacggggagagtaaaacag

SEQ ID NO: 983341 - DNA, 33 bp, Homo sapien
aaaatacctttgcacaatagattttgtcagcag

SEQ ID NO: 983342 - DNA, 33 bp, Homo sapien
aaaatacctttgcacagtagattttgtcagcag

SEQ ID NO: 983343 - DNA, 33 bp, Homo sapien
ttcttcactgagatcacattgatttatatttac

SEQ ID NO: 983344 - DNA, 33 bp, Homo sapien
ttcttcactgagatcatattgatttatatttac

SEQ ID NO: 983345 - DNA, 33 bp, Homo sapien
tttgaagtgttgcactcactttcaaaattcatt

SEQ ID NO: 983346 - DNA, 33 bp, Homo sapien
tttgaagtgttgcacttactttcaaaattcatt

SEQ ID NO: 983347 - DNA, 33 bp, Homo sapien
gactcatggaacagtgaaggaatattactaaat

SEQ ID NO: 983348 - DNA, 33 bp, Homo sapien
gactcatggaacagtggaggaatattactaaat

SEQ ID NO: 983349 - DNA, 33 bp, Homo sapien
tctgtattattgaagtgaatgcatgagtcgatg

SEQ ID NO: 983350 - DNA, 33 bp, Homo sapien
tctgtattattgaagttaatgcatgagtcgatg

SEQ ID NO: 983351 - DNA, 33 bp, Homo sapien
tataaacttcaactggccaccacaagagtgtgc

SEQ ID NO: 983352 - DNA, 33 bp, Homo sapien
tataaacttcaactggtcaccacaagagtgtgc

SEQ ID NO: 983353 - DNA, 33 bp, Homo sapien
tagggaaggatgtaaaagtttcataatactaaa

SEQ ID NO: 983354 - DNA, 33 bp, Homo sapien
tagggaaggatgtaaatgtttcataatactaaa

SEQ ID NO: 983355 - DNA, 33 bp, Homo sapien
ccaaacgagtaagatacattgatcttgtggtaa

SEQ ID NO: 983356 - DNA, 33 bp, Homo sapien
ccaaacgagtaagatatattgatcttgtggtaa

SEQ ID NO: 983357 - DNA, 33 bp, Homo sapien
aatcaaaggggtaaaagcctacatctcactctc

SEQ ID NO: 983358 - DNA, 33 bp, Homo sapien
aatcaaaggggtaaaatcctacatctcactctc

SEQ ID NO: 983359 - DNA, 33 bp, Homo sapien
aggaggacaggagtcacctctaatatgaaaggc

SEQ ID NO: 983360 - DNA, 33 bp, Homo sapien
aggaggacaggagtcatctctaatatgaaaggc

SEQ ID NO: 983361 - DNA, 33 bp, Homo sapien
atgagaataaataagaactagcaacactgacac

SEQ ID NO: 983362 - DNA, 33 bp, Homo sapien
atgagaataaataagatctagcaacactgacac

SEQ ID NO: 983363 - DNA, 33 bp, Homo sapien
atgaaagaaagtcaaaggataaatacagggaaa

SEQ ID NO: 983364 - DNA, 33 bp, Homo sapien
atgaaagaaagtcaaatgataaatacagggaaa

SEQ ID NO: 983365 - DNA, 33 bp, Homo sapien
tgtaactgcagaaaacgcttctccacaagatag

SEQ ID NO: 983366 - DNA, 33 bp, Homo sapien
tgtaactgcagaaaactcttctccacaagatag

SEQ ID NO: 983367 - DNA, 33 bp, Homo sapien
ataactccaatgactacgggcaggagaagatgg

SEQ ID NO: 983368 - DNA, 33 bp, Homo sapien
ataactccaatgactatgggcaggagaagatgg

SEQ ID NO: 983369 - DNA, 33 bp, Homo sapien
tacatttacattaagaccaggattaagttaacc

SEQ ID NO: 983370 - DNA, 33 bp, Homo sapien
tacatttacattaagatcaggattaagttaacc

SEQ ID NO: 983371 - DNA, 33 bp, Homo sapien
atcagcatttgttttacatgacagtgtggtcaa

SEQ ID NO: 983372 - DNA, 33 bp, Homo sapien
atcagcatttgttttatatgacagtgtggtcaa

SEQ ID NO: 983373 - DNA, 33 bp, Homo sapien
agagacaattctgaatcacaaaatcagaaggaa

SEQ ID NO: 983374 - DNA, 33 bp, Homo sapien
agagacaattctgaatgacaaaatcagaaggaa

SEQ ID NO: 983375 - DNA, 33 bp, Homo sapien
ctgacatctggcagatcaagcacaagcgtggac

SEQ ID NO: 983376 - DNA, 33 bp, Homo sapien
ctgacatctggcagatgaagcacaagcgtggac

SEQ ID NO: 983377 - DNA, 33 bp, Homo sapien
tatggcaatagcaagcaaacagctgaataattt

SEQ ID NO: 983378 - DNA, 33 bp, Homo sapien
tatggcaatagcaagcgaacagctgaataattt

SEQ ID NO: 983379 - DNA, 33 bp, Homo sapien
tcagaaataaagccacacacttaatctgatttt

SEQ ID NO: 983380 - DNA, 33 bp, Homo sapien
tcagaaataaagccacgcacttaatctgatttt

SEQ ID NO: 983381 - DNA, 33 bp, Homo sapien
atttggttatttaaaactgtttggcacctttct

SEQ ID NO: 983382 - DNA, 33 bp, Homo sapien
atttggttatttaaaagtgtttggcacctttct

SEQ ID NO: 983383 - DNA, 33 bp, Homo sapien
ccagcagtgtacacaactatccttttgttcctt

SEQ ID NO: 983384 - DNA, 33 bp, Homo sapien
ccagcagtgtacacaattatccttttgttcctt

SEQ ID NO: 983385 - DNA, 33 bp, Homo sapien
tgaactccagctgatactaaagcaaataagaga

SEQ ID NO: 983386 - DNA, 33 bp, Homo sapien
tgaactccagctgatattaaagcaaataagaga

SEQ ID NO: 983387 - DNA, 33 bp, Homo sapien
acaaaccaaatgtaaaacttgcaaaggaatatt

SEQ ID NO: 983388 - DNA, 33 bp, Homo sapien
acaaaccaaatgtaaaccttgcaaaggaatatt

SEQ ID NO: 983389 - DNA, 33 bp, Homo sapien
atactgtagcagcttgcattactattcaaaaat

SEQ ID NO: 983390 - DNA, 33 bp, Homo sapien
atactgtagcagcttgtattactattcaaaaat

SEQ ID NO: 983391 - DNA, 33 bp, Homo sapien
gttttgtgggaagagacggacacgttgtagaaa

SEQ ID NO: 983392 - DNA, 33 bp, Homo sapien
gttttgtgggaagagatggacacgttgtagaaa

SEQ ID NO: 983393 - DNA, 33 bp, Homo sapien
agtataacaggagacactgtatatgttggacag

SEQ ID NO: 983394 - DNA, 33 bp, Homo sapien
agtataacaggagacattgtatatgttggacag

SEQ ID NO: 983395 - DNA, 33 bp, Homo sapien
atgaggaagaacctacaaatccaatgtacgttt

SEQ ID NO: 983396 - DNA, 33 bp, Homo sapien
atgaggaagaacctaccaatccaatgtacgttt

SEQ ID NO: 983397 - DNA, 33 bp, Homo sapien
tatatggtgtaaagaaacttctgcatatgccta

SEQ ID NO: 983398 - DNA, 33 bp, Homo sapien
tatatggtgtaaagaatcttctgcatatgccta

SEQ ID NO: 983399 - DNA, 33 bp, Homo sapien
acgatgtggtcaaagacggtacattcccaccaa

SEQ ID NO: 983400 - DNA, 33 bp, Homo sapien
acgatgtggtcaaagatggtacattcccaccaa

SEQ ID NO: 983401 - DNA, 33 bp, Homo sapien
ggttaagaaacttgaacctccatatattgctga

SEQ ID NO: 983402 - DNA, 33 bp, Homo sapien
ggttaagaaacttgaatctccatatattgctga

SEQ ID NO: 983403 - DNA, 33 bp, Homo sapien
gcataaaggtcagtaaactataatggagagtcc

SEQ ID NO: 983404 - DNA, 33 bp, Homo sapien
gcataaaggtcagtaatctataatggagagtcc

SEQ ID NO: 983405 - DNA, 33 bp, Homo sapien
aattggaatcaaattaagttacccgtctttaac

SEQ ID NO: 983406 - DNA, 33 bp, Homo sapien
aattggaatcaaattatgttacccgtctttaac

SEQ ID NO: 983407 - DNA, 33 bp, Homo sapien
caggaaggtgttcactaagaagacgacacttga

SEQ ID NO: 983408 - DNA, 33 bp, Homo sapien
caggaaggtgttcactgagaagacgacacttga

SEQ ID NO: 983409 - DNA, 33 bp, Homo sapien
gatcttcaaagaattacagcgccatcagtaggt

SEQ ID NO: 983410 - DNA, 33 bp, Homo sapien
gatcttcaaagaattatagcgccatcagtaggt

SEQ ID NO: 983411 - DNA, 33 bp, Homo sapien
aaaactctagagtagaagtcatccaatttttca

SEQ ID NO: 983412 - DNA, 33 bp, Homo sapien
aaaactctagagtagaggtcatccaatttttca

SEQ ID NO: 983413 - DNA, 33 bp, Homo sapien
ctagaacctataaatacggctccaaattaaaga

SEQ ID NO: 983414 - DNA, 33 bp, Homo sapien
ctagaacctataaatatggctccaaattaaaga

SEQ ID NO: 983415 - DNA, 33 bp, Homo sapien
agtactttgtgaccaacaatctctgaataattt

SEQ ID NO: 983416 - DNA, 33 bp, Homo sapien
agtactttgtgaccaataatctctgaataattt

SEQ ID NO: 983417 - DNA, 33 bp, Homo sapien
atgaactcaggctttgcaaccctgtcttttatg

SEQ ID NO: 983418 - DNA, 33 bp, Homo sapien
atgaactcaggctttgtaaccctgtcttttatg

SEQ ID NO: 983419 - DNA, 33 bp, Homo sapien
agatcttaatgtgacacgttgatggaccagctc

SEQ ID NO: 983420 - DNA, 33 bp, Homo sapien
agatcttaatgtgacaggttgatggaccagctc

SEQ ID NO: 983421 - DNA, 33 bp, Homo sapien
ttctgctcctgctaccactgcttaagtcttact

SEQ ID NO: 983422 - DNA, 33 bp, Homo sapien
ttctgctcctgctaccgctgcttaagtcttact

SEQ ID NO: 983423 - DNA, 33 bp, Homo sapien
ttgtggtcataattacagctaacttatcctgat

SEQ ID NO: 983424 - DNA, 33 bp, Homo sapien
ttgtggtcataattacggctaacttatcctgat

SEQ ID NO: 983425 - DNA, 33 bp, Homo sapien
ggcttcagaccctgtaggtaaatagaataaagt

SEQ ID NO: 983426 - DNA, 33 bp, Homo sapien
ggcttcagaccctgtatgtaaatagaataaagt

SEQ ID NO: 983427 - DNA, 33 bp, Homo sapien
ttatttactttttataaacaagcatcattttgt

SEQ ID NO: 983428 - DNA, 33 bp, Homo sapien
ttatttactttttatagacaagcatcattttgt

SEQ ID NO: 983429 - DNA, 33 bp, Homo sapien
taacactgtcaaggaccggcaactgcttatgtt

SEQ ID NO: 983430 - DNA, 33 bp, Homo sapien
taacactgtcaaggacgggcaactgcttatgtt

SEQ ID NO: 983431 - DNA, 33 bp, Homo sapien
ttatctaggtactaagcattgtcaaaagcattc

SEQ ID NO: 983432 - DNA, 33 bp, Homo sapien
ttatctaggtactaaggattgtcaaaagcattc

SEQ ID NO: 983433 - DNA, 33 bp, Homo sapien
atcttagttgagcttacgtaaattttttaaaag

SEQ ID NO: 983434 - DNA, 33 bp, Homo sapien
atcttagttgagcttatgtaaattttttaaaag

SEQ ID NO: 983435 - DNA, 33 bp, Homo sapien
tactatcttgcaccttaaagctcgtatgttcct

SEQ ID NO: 983436 - DNA, 33 bp, Homo sapien
tactatcttgcaccttgaagctcgtatgttcct

SEQ ID NO: 983437 - DNA, 33 bp, Homo sapien
tttaaaaactaactggaaaaatgggtatgatca

SEQ ID NO: 983438 - DNA, 33 bp, Homo sapien
tttaaaaactaactgggaaaatgggtatgatca

SEQ ID NO: 983439 - DNA, 33 bp, Homo sapien
gggtggctgtgtgtcaatagctgaaaatgtgtt

SEQ ID NO: 983440 - DNA, 33 bp, Homo sapien
gggtggctgtgtgtcagtagctgaaaatgtgtt

SEQ ID NO: 983441 - DNA, 33 bp, Homo sapien
tggtactggcatatcacgttgaaccatttgcag

SEQ ID NO: 983442 - DNA, 33 bp, Homo sapien
tggtactggcatatcatgttgaaccatttgcag

SEQ ID NO: 983443 - DNA, 33 bp, Homo sapien
ataattaactctaaaaagcatgaatagtctgaa

SEQ ID NO: 983444 - DNA, 33 bp, Homo sapien
ataattaactctaaaaggcatgaatagtctgaa

SEQ ID NO: 983445 - DNA, 33 bp, Homo sapien
tctgtatcttaccccgacctaatcttgtcatag

SEQ ID NO: 983446 - DNA, 33 bp, Homo sapien
tctgtatcttaccccggcctaatcttgtcatag

SEQ ID NO: 983447 - DNA, 33 bp, Homo sapien
gctatcaagccatgaaaagttattaagaaatct

SEQ ID NO: 983448 - DNA, 33 bp, Homo sapien
gctatcaagccatgaacagttattaagaaatct

SEQ ID NO: 983449 - DNA, 33 bp, Homo sapien
ttacagttgggcttaacgatagaaaaagaatta

SEQ ID NO: 983450 - DNA, 33 bp, Homo sapien
ttacagttgggcttaatgatagaaaaagaatta

SEQ ID NO: 983451 - DNA, 33 bp, Homo sapien
ttttgtgccaataggaagtttactcagttgtat

SEQ ID NO: 983452 - DNA, 33 bp, Homo sapien
ttttgtgccaataggaggtttactcagttgtat

SEQ ID NO: 983453 - DNA, 33 bp, Homo sapien
aattttaaagaagtccagaaattgtttccaaga

SEQ ID NO: 983454 - DNA, 33 bp, Homo sapien
aattttaaagaagtccggaaattgtttccaaga

SEQ ID NO: 983455 - DNA, 33 bp, Homo sapien
tatggcttttctgcaggcctaaaatctattgcc

SEQ ID NO: 983456 - DNA, 33 bp, Homo sapien
tatggcttttctgcagtcctaaaatctattgcc

SEQ ID NO: 983457 - DNA, 33 bp, Homo sapien
atgaaagcaatagttcaaaatacgctaaataac

SEQ ID NO: 983458 - DNA, 33 bp, Homo sapien
atgaaagcaatagttcgaaatacgctaaataac

SEQ ID NO: 983459 - DNA, 33 bp, Homo sapien
ggaaagaacgagcaaaagcaaaggcccagagga

SEQ ID NO: 983460 - DNA, 33 bp, Homo sapien
ggaaagaacgagcaaacgcaaaggcccagagga

SEQ ID NO: 983461 - DNA, 33 bp, Homo sapien
atgatttagtggaagaatagtgttgcctattac

SEQ ID NO: 983462 - DNA, 33 bp, Homo sapien
atgatttagtggaagagtagtgttgcctattac

SEQ ID NO: 983463 - DNA, 33 bp, Homo sapien
attctagagtatagtacggacagtttccaaaag

SEQ ID NO: 983464 - DNA, 33 bp, Homo sapien
attctagagtatagtatggacagtttccaaaag

SEQ ID NO: 983465 - DNA, 33 bp, Homo sapien
gacctttgtcttcctccaacacagcaaacatgt

SEQ ID NO: 983466 - DNA, 33 bp, Homo sapien
gacctttgtcttcctctaacacagcaaacatgt

SEQ ID NO: 983467 - DNA, 33 bp, Homo sapien
ataaattcatattcagaagtccccgatgtgctt

SEQ ID NO: 983468 - DNA, 33 bp, Homo sapien
ataaattcatattcagcagtccccgatgtgctt

SEQ ID NO: 983469 - DNA, 33 bp, Homo sapien
gtgaacaggacaaacaaccactttagaaattca

SEQ ID NO: 983470 - DNA, 33 bp, Homo sapien
gtgaacaggacaaacacccactttagaaattca

SEQ ID NO: 983471 - DNA, 33 bp, Homo sapien
cgtgtgaacagtccctaaagatctgcactggtc

SEQ ID NO: 983472 - DNA, 33 bp, Homo sapien
cgtgtgaacagtccctgaagatctgcactggtc

SEQ ID NO: 983473 - DNA, 33 bp, Homo sapien
atatctacctatgttaaaatgcaaaacaggagt

SEQ ID NO: 983474 - DNA, 33 bp, Homo sapien
atatctacctatgttataatgcaaaacaggagt

SEQ ID NO: 983475 - DNA, 33 bp, Homo sapien
tttacagatgataaaaatgaatatcagagcagt

SEQ ID NO: 983476 - DNA, 33 bp, Homo sapien
tttacagatgataaaagtgaatatcagagcagt

SEQ ID NO: 983477 - DNA, 33 bp, Homo sapien
ctgctctaacaaactacgatagactggctgtgt

SEQ ID NO: 983478 - DNA, 33 bp, Homo sapien
ctgctctaacaaactatgatagactggctgtgt

SEQ ID NO: 983479 - DNA, 33 bp, Homo sapien
tttagaaacactagaagaagaactctccttgaa

SEQ ID NO: 983480 - DNA, 33 bp, Homo sapien
tttagaaacactagaataagaactctccttgaa

SEQ ID NO: 983481 - DNA, 33 bp, Homo sapien
gcagacaaagacaagcacattacctatacataa

SEQ ID NO: 983482 - DNA, 33 bp, Homo sapien
gcagacaaagacaagcgcattacctatacataa

SEQ ID NO: 983483 - DNA, 33 bp, Homo sapien
aaggagtgtcttttacaaaattagtgaataagt

SEQ ID NO: 983484 - DNA, 33 bp, Homo sapien
aaggagtgtcttttacgaaattagtgaataagt

SEQ ID NO: 983485 - DNA, 33 bp, Homo sapien
aaagtatttgcaccaactaaagtgatgccttgg

SEQ ID NO: 983486 - DNA, 33 bp, Homo sapien
aaagtatttgcaccaagtaaagtgatgccttgg

SEQ ID NO: 983487 - DNA, 33 bp, Homo sapien
gattgatatgggaagccactagaggtactgaac

SEQ ID NO: 983488 - DNA, 33 bp, Homo sapien
gattgatatgggaagcgactagaggtactgaac

SEQ ID NO: 983489 - DNA, 33 bp, Homo sapien
tgtcaaccctagccaaacattcaagtctactaa

SEQ ID NO: 983490 - DNA, 33 bp, Homo sapien
tgtcaaccctagccaagcattcaagtctactaa

SEQ ID NO: 983491 - DNA, 33 bp, Homo sapien
ccagatctctccaaaaatctcaaaaacctattg

SEQ ID NO: 983492 - DNA, 33 bp, Homo sapien
ccagatctctccaaaattctcaaaaacctattg

SEQ ID NO: 983493 - DNA, 33 bp, Homo sapien
tatttaatgaggaaaaaggtatgaaattgccaa

SEQ ID NO: 983494 - DNA, 33 bp, Homo sapien
tatttaatgaggaaaatggtatgaaattgccaa

SEQ ID NO: 983495 - DNA, 33 bp, Homo sapien
aggtcacttggtcatcggactccataggaaaat

SEQ ID NO: 983496 - DNA, 33 bp, Homo sapien
aggtcacttggtcatctgactccataggaaaat

SEQ ID NO: 983497 - DNA, 33 bp, Homo sapien
ttaaaatagtgcatccagctgggttcagtggct

SEQ ID NO: 983498 - DNA, 33 bp, Homo sapien
ttaaaatagtgcatccggctgggttcagtggct

SEQ ID NO: 983499 - DNA, 33 bp, Homo sapien
gatggtgagaaggactcaagatggaaatgtaag

SEQ ID NO: 983500 - DNA, 33 bp, Homo sapien
gatggtgagaaggactgaagatggaaatgtaag

SEQ ID NO: 983501 - DNA, 33 bp, Homo sapien
caattgaggtggtttacgtgagtgtttagatca

SEQ ID NO: 983502 - DNA, 33 bp, Homo sapien
caattgaggtggtttatgtgagtgtttagatca

SEQ ID NO: 983503 - DNA, 33 bp, Homo sapien
cagagctactttgataaccagttcagaaagcag

SEQ ID NO: 983504 - DNA, 33 bp, Homo sapien
cagagctactttgatacccagttcagaaagcag

SEQ ID NO: 983505 - DNA, 33 bp, Homo sapien
agcaagggaatcataaatgcgactgtaatagtc

SEQ ID NO: 983506 - DNA, 33 bp, Homo sapien
agcaagggaatcataagtgcgactgtaatagtc

SEQ ID NO: 983507 - DNA, 33 bp, Homo sapien
ccatcttgtttataggcaatgaaagacttgaaa

SEQ ID NO: 983508 - DNA, 33 bp, Homo sapien
ccatcttgtttatagggaatgaaagacttgaaa

SEQ ID NO: 983509 - DNA, 33 bp, Homo sapien
agccttgccaacgaacaaacccgtctacaagcc

SEQ ID NO: 983510 - DNA, 33 bp, Homo sapien
agccttgccaacgaacgaacccgtctacaagcc

SEQ ID NO: 983511 - DNA, 33 bp, Homo sapien
agaggaggtatccagacgtccatttctaccaac

SEQ ID NO: 983512 - DNA, 33 bp, Homo sapien
agaggaggtatccagatgtccatttctaccaac

SEQ ID NO: 983513 - DNA, 33 bp, Homo sapien
ctctttgtggtttctcaaagttgtaattctgta

SEQ ID NO: 983514 - DNA, 33 bp, Homo sapien
ctctttgtggtttctcgaagttgtaattctgta

SEQ ID NO: 983515 - DNA, 33 bp, Homo sapien
tggaattaagtctctgaaagttaaatgacttat

SEQ ID NO: 983516 - DNA, 33 bp, Homo sapien
tggaattaagtctctggaagttaaatgacttat

SEQ ID NO: 983517 - DNA, 33 bp, Homo sapien
tcacaagttcctaagacgccaagagtaagccca

SEQ ID NO: 983518 - DNA, 33 bp, Homo sapien
tcacaagttcctaagatgccaagagtaagccca

SEQ ID NO: 983519 - DNA, 33 bp, Homo sapien
agaagaatggatcttgaagtagaaacctgaata

SEQ ID NO: 983520 - DNA, 33 bp, Homo sapien
agaagaatggatcttggagtagaaacctgaata

SEQ ID NO: 983521 - DNA, 33 bp, Homo sapien
tgatacaggtagccagaaccaaatacatacagt

SEQ ID NO: 983522 - DNA, 33 bp, Homo sapien
tgatacaggtagccaggaccaaatacatacagt

SEQ ID NO: 983523 - DNA, 33 bp, Homo sapien
tcgtcatcacaagagacggattttccctgaaag

SEQ ID NO: 983524 - DNA, 33 bp, Homo sapien
tcgtcatcacaagagatggattttccctgaaag

SEQ ID NO: 983525 - DNA, 33 bp, Homo sapien
acattagacttttttaaacttggcactaacgtc

SEQ ID NO: 983526 - DNA, 33 bp, Homo sapien
acattagacttttttagacttggcactaacgtc

SEQ ID NO: 983527 - DNA, 33 bp, Homo sapien
tcattagatcaaataacgttccagctgaatgtc

SEQ ID NO: 983528 - DNA, 33 bp, Homo sapien
tcattagatcaaataatgttccagctgaatgtc

SEQ ID NO: 983529 - DNA, 33 bp, Homo sapien
gagacctgtctcagacacatgttggtttacata

SEQ ID NO: 983530 - DNA, 33 bp, Homo sapien
gagacctgtctcagacgcatgttggtttacata

SEQ ID NO: 983531 - DNA, 33 bp, Homo sapien
taactcattcctcactaaagtaagcacaaaaca

SEQ ID NO: 983532 - DNA, 33 bp, Homo sapien
taactcattcctcactgaagtaagcacaaaaca

SEQ ID NO: 983533 - DNA, 33 bp, Homo sapien
tccttttaggacatgaagttttcaggaagagtt

SEQ ID NO: 983534 - DNA, 33 bp, Homo sapien
tccttttaggacatgaggttttcaggaagagtt

SEQ ID NO: 983535 - DNA, 33 bp, Homo sapien
ttttcttctgcactaccgatcaagtaacagaag

SEQ ID NO: 983536 - DNA, 33 bp, Homo sapien
ttttcttctgcactactgatcaagtaacagaag

SEQ ID NO: 983537 - DNA, 33 bp, Homo sapien
aagcctgcacaaaatgaagtcagcatgaaggaa

SEQ ID NO: 983538 - DNA, 33 bp, Homo sapien
aagcctgcacaaaatggagtcagcatgaaggaa

SEQ ID NO: 983539 - DNA, 33 bp, Homo sapien
ttgtgttttagaagtgcataacttgtctggtgt

SEQ ID NO: 983540 - DNA, 33 bp, Homo sapien
ttgtgttttagaagtgtataacttgtctggtgt

SEQ ID NO: 983541 - DNA, 33 bp, Homo sapien
aagtcaaacatcatcacatatttagtgtgctca

SEQ ID NO: 983542 - DNA, 33 bp, Homo sapien
aagtcaaacatcatcatatatttagtgtgctca

SEQ ID NO: 983543 - DNA, 33 bp, Homo sapien
gccagaagtttgaggcaaatcagggatcaggag

SEQ ID NO: 983544 - DNA, 33 bp, Homo sapien
gccagaagtttgaggccaatcagggatcaggag

SEQ ID NO: 983545 - DNA, 33 bp, Homo sapien
gataatcagacatgcagaaagtcacctaattct

SEQ ID NO: 983546 - DNA, 33 bp, Homo sapien
gataatcagacatgcataaagtcacctaattct

SEQ ID NO: 983547 - DNA, 33 bp, Homo sapien
tcgagtaactaaaaaccgtattgctggccgggc

SEQ ID NO: 983548 - DNA, 33 bp, Homo sapien
tcgagtaactaaaaactgtattgctggccgggc

SEQ ID NO: 983549 - DNA, 33 bp, Homo sapien
aaaagctccaggtccaatcatgctaccaaaaat

SEQ ID NO: 983550 - DNA, 33 bp, Homo sapien
aaaagctccaggtccactcatgctaccaaaaat

SEQ ID NO: 983551 - DNA, 33 bp, Homo sapien
aaacttccagtggaaacagacgatgaattaatc

SEQ ID NO: 983552 - DNA, 33 bp, Homo sapien
aaacttccagtggaaatagacgatgaattaatc

SEQ ID NO: 983553 - DNA, 33 bp, Homo sapien
ttctgaaaacaaaagcagcagttaagggtgggt

SEQ ID NO: 983554 - DNA, 33 bp, Homo sapien
ttctgaaaacaaaagccgcagttaagggtgggt

SEQ ID NO: 983555 - DNA, 33 bp, Homo sapien
ctctgagaagagattacgtactcacactgaagg

SEQ ID NO: 983556 - DNA, 33 bp, Homo sapien
ctctgagaagagattatgtactcacactgaagg

SEQ ID NO: 983557 - DNA, 33 bp, Homo sapien
ccaatgctaatggcaaacaggcccttctgagat

SEQ ID NO: 983558 - DNA, 33 bp, Homo sapien
ccaatgctaatggcaagcaggcccttctgagat

SEQ ID NO: 983559 - DNA, 33 bp, Homo sapien
ccagaattcaaatgaccatttttgacataagtt

SEQ ID NO: 983560 - DNA, 33 bp, Homo sapien
ccagaattcaaatgacgatttttgacataagtt

SEQ ID NO: 983561 - DNA, 33 bp, Homo sapien
tagttgattctgtttaaattttccttccgataa

SEQ ID NO: 983562 - DNA, 33 bp, Homo sapien
tagttgattctgtttacattttccttccgataa

SEQ ID NO: 983563 - DNA, 33 bp, Homo sapien
tgattagtcacctctactagaatctaagttcta

SEQ ID NO: 983564 - DNA, 33 bp, Homo sapien
tgattagtcacctctattagaatctaagttcta

SEQ ID NO: 983565 - DNA, 33 bp, Homo sapien
ttctcttttcttagaacgctcttccccagacat

SEQ ID NO: 983566 - DNA, 33 bp, Homo sapien
ttctcttttcttagaatgctcttccccagacat

SEQ ID NO: 983567 - DNA, 33 bp, Homo sapien
ctgtatggatctgtgacgatgcagttggaggtt

SEQ ID NO: 983568 - DNA, 33 bp, Homo sapien
ctgtatggatctgtgatgatgcagttggaggtt

SEQ ID NO: 983569 - DNA, 33 bp, Homo sapien
atgtcctcagagtgccaacttattacagaatat

SEQ ID NO: 983570 - DNA, 33 bp, Homo sapien
atgtcctcagagtgccgacttattacagaatat

SEQ ID NO: 983571 - DNA, 33 bp, Homo sapien
gtggggcaggtgaataatagtggtggaaaggga

SEQ ID NO: 983572 - DNA, 33 bp, Homo sapien
gtggggcaggtgaatagtagtggtggaaaggga

SEQ ID NO: 983573 - DNA, 33 bp, Homo sapien
ccagttcatttccccaaactacctcaatctatt

SEQ ID NO: 983574 - DNA, 33 bp, Homo sapien
ccagttcatttccccagactacctcaatctatt

SEQ ID NO: 983575 - DNA, 33 bp, Homo sapien
aattgctgcaatgaatgaaaaacaggcaacctt

SEQ ID NO: 983576 - DNA, 33 bp, Homo sapien
aattgctgcaatgaattaaaaacaggcaacctt

SEQ ID NO: 983577 - DNA, 33 bp, Homo sapien
gcttcaattggcacagaaaaatctgggaatgaa

SEQ ID NO: 983578 - DNA, 33 bp, Homo sapien
gcttcaattggcacaggaaaatctgggaatgaa

SEQ ID NO: 983579 - DNA, 33 bp, Homo sapien
ctcttcaatctacatcaagttgctctccctacc

SEQ ID NO: 983580 - DNA, 33 bp, Homo sapien
ctcttcaatctacatcgagttgctctccctacc

SEQ ID NO: 983581 - DNA, 33 bp, Homo sapien
gaactggattgagaaaattggattcaggattct

SEQ ID NO: 983582 - DNA, 33 bp, Homo sapien
gaactggattgagaaatttggattcaggattct

SEQ ID NO: 983583 - DNA, 33 bp, Homo sapien
tttttaagatagtcaaagttgatttagttttgc

SEQ ID NO: 983584 - DNA, 33 bp, Homo sapien
tttttaagatagtcaaggttgatttagttttgc

SEQ ID NO: 983585 - DNA, 33 bp, Homo sapien
gttttacttctgaatacgtgatcagttttagag

SEQ ID NO: 983586 - DNA, 33 bp, Homo sapien
gttttacttctgaatatgtgatcagttttagag

SEQ ID NO: 983587 - DNA, 33 bp, Homo sapien
cataagagcaaatgccaagagtactggttagca

SEQ ID NO: 983588 - DNA, 33 bp, Homo sapien
cataagagcaaatgccgagagtactggttagca

SEQ ID NO: 983589 - DNA, 33 bp, Homo sapien
tatttactttgcctaacagcttttcgatctgtg

SEQ ID NO: 983590 - DNA, 33 bp, Homo sapien
tatttactttgcctaatagcttttcgatctgtg

SEQ ID NO: 983591 - DNA, 33 bp, Homo sapien
actttctgcatatctcaagtgcctatatttcta

SEQ ID NO: 983592 - DNA, 33 bp, Homo sapien
actttctgcatatctcgagtgcctatatttcta

SEQ ID NO: 983593 - DNA, 33 bp, Homo sapien
cagtggttgctggtaacataaactgacaatttc

SEQ ID NO: 983594 - DNA, 33 bp, Homo sapien
cagtggttgctggtaatataaactgacaatttc

SEQ ID NO: 983595 - DNA, 33 bp, Homo sapien
tagtggtttactatgaagctaaaaatatgttcc

SEQ ID NO: 983596 - DNA, 33 bp, Homo sapien
tagtggtttactatgaggctaaaaatatgttcc

SEQ ID NO: 983597 - DNA, 33 bp, Homo sapien
taaatagaacatcttaagtgcaaccaaagatag

SEQ ID NO: 983598 - DNA, 33 bp, Homo sapien
taaatagaacatcttaggtgcaaccaaagatag

SEQ ID NO: 983599 - DNA, 33 bp, Homo sapien
gaaggaaaaaagtgaacggagtatgagggagct

SEQ ID NO: 983600 - DNA, 33 bp, Homo sapien
gaaggaaaaaagtgaatggagtatgagggagct

SEQ ID NO: 983601 - DNA, 33 bp, Homo sapien
cagtttcagcaaataaagattattgggaggtgg

SEQ ID NO: 983602 - DNA, 33 bp, Homo sapien
cagtttcagcaaataaggattattgggaggtgg

SEQ ID NO: 983603 - DNA, 33 bp, Homo sapien
ctcttccctttcaaatcactgttttgtcattca

SEQ ID NO: 983604 - DNA, 33 bp, Homo sapien
ctcttccctttcaaattactgttttgtcattca

SEQ ID NO: 983605 - DNA, 33 bp, Homo sapien
cagaatatagccaaataaaatgtttaagttaat

SEQ ID NO: 983606 - DNA, 33 bp, Homo sapien
cagaatatagccaaatgaaatgtttaagttaat

SEQ ID NO: 983607 - DNA, 33 bp, Homo sapien
taatacttgggatggcaccaaacacaaattatg

SEQ ID NO: 983608 - DNA, 33 bp, Homo sapien
taatacttgggatggcgccaaacacaaattatg

SEQ ID NO: 983609 - DNA, 33 bp, Homo sapien
actatatgccagataccatactaggatttgcac

SEQ ID NO: 983610 - DNA, 33 bp, Homo sapien
actatatgccagatactatactaggatttgcac

SEQ ID NO: 983611 - DNA, 33 bp, Homo sapien
aaggattatgagaagtaaagcgacaaagcattt

SEQ ID NO: 983612 - DNA, 33 bp, Homo sapien
aaggattatgagaagtgaagcgacaaagcattt

SEQ ID NO: 983613 - DNA, 33 bp, Homo sapien
gtctcaatcgaaattcaaattcttgggagttct

SEQ ID NO: 983614 - DNA, 33 bp, Homo sapien
gtctcaatcgaaattcgaattcttgggagttct

SEQ ID NO: 983615 - DNA, 33 bp, Homo sapien
taaccagccttgtatgccagagattaatcccac

SEQ ID NO: 983616 - DNA, 33 bp, Homo sapien
taaccagccttgtatggcagagattaatcccac

SEQ ID NO: 983617 - DNA, 33 bp, Homo sapien
tccactgcaataagaaactcttttttactctat

SEQ ID NO: 983618 - DNA, 33 bp, Homo sapien
tccactgcaataagaagctcttttttactctat

SEQ ID NO: 983619 - DNA, 33 bp, Homo sapien
accaggcggagagaaaacttttagacataacct

SEQ ID NO: 983620 - DNA, 33 bp, Homo sapien
accaggcggagagaaaccttttagacataacct

SEQ ID NO: 983621 - DNA, 33 bp, Homo sapien
taagacagcagaggccaagtctacattagagcc

SEQ ID NO: 983622 - DNA, 33 bp, Homo sapien
taagacagcagaggccgagtctacattagagcc

SEQ ID NO: 983623 - DNA, 33 bp, Homo sapien
caaattggaagccacaaaaaagaaaatatagcc

SEQ ID NO: 983624 - DNA, 33 bp, Homo sapien
caaattggaagccacacaaaagaaaatatagcc

SEQ ID NO: 983625 - DNA, 33 bp, Homo sapien
tgccagagagaggctaacattggtatctgtcat

SEQ ID NO: 983626 - DNA, 33 bp, Homo sapien
tgccagagagaggctagcattggtatctgtcat

SEQ ID NO: 983627 - DNA, 33 bp, Homo sapien
gtttcacgtaccagaaatgtaaaggcctatggg

SEQ ID NO: 983628 - DNA, 33 bp, Homo sapien
gtttcacgtaccagaagtgtaaaggcctatggg

SEQ ID NO: 983629 - DNA, 33 bp, Homo sapien
gaggagcaagtctcacacagaaatatccttgta

SEQ ID NO: 983630 - DNA, 33 bp, Homo sapien
gaggagcaagtctcacccagaaatatccttgta

SEQ ID NO: 983631 - DNA, 33 bp, Homo sapien
gagaattcactgaaaacacgtctcttaaaagtt

SEQ ID NO: 983632 - DNA, 33 bp, Homo sapien
gagaattcactgaaaatacgtctcttaaaagtt

SEQ ID NO: 983633 - DNA, 33 bp, Homo sapien
tctcttaaaagtttggaaggtgtgtccatttta

SEQ ID NO: 983634 - DNA, 33 bp, Homo sapien
tctcttaaaagtttggtaggtgtgtccatttta

SEQ ID NO: 983635 - DNA, 33 bp, Homo sapien
tcttctgactgtgtcacgtatttggatctcaga

SEQ ID NO: 983636 - DNA, 33 bp, Homo sapien
tcttctgactgtgtcatgtatttggatctcaga

SEQ ID NO: 983637 - DNA, 33 bp, Homo sapien
ttcatttctttgctaaaggtcctcaatattaga

SEQ ID NO: 983638 - DNA, 33 bp, Homo sapien
ttcatttctttgctaagggtcctcaatattaga

SEQ ID NO: 983639 - DNA, 33 bp, Homo sapien
aaagtgttccagagaaatactgaaactatgggg

SEQ ID NO: 983640 - DNA, 33 bp, Homo sapien
aaagtgttccagagaagtactgaaactatgggg

SEQ ID NO: 983641 - DNA, 33 bp, Homo sapien
aattagtgaatcatagcaatgaggatggagaga

SEQ ID NO: 983642 - DNA, 33 bp, Homo sapien
aattagtgaatcataggaatgaggatggagaga

SEQ ID NO: 983643 - DNA, 33 bp, Homo sapien
acattcttgatattgacgattggagaagatgat

SEQ ID NO: 983644 - DNA, 33 bp, Homo sapien
acattcttgatattgatgattggagaagatgat

SEQ ID NO: 983645 - DNA, 33 bp, Homo sapien
gaaataagccttcagagagcaataacactaaag

SEQ ID NO: 983646 - DNA, 33 bp, Homo sapien
gaaataagccttcagatagcaataacactaaag

SEQ ID NO: 983647 - DNA, 33 bp, Homo sapien
atttctcacaggattcaaagtggttatgcttga

SEQ ID NO: 983648 - DNA, 33 bp, Homo sapien
atttctcacaggattcgaagtggttatgcttga

SEQ ID NO: 983649 - DNA, 33 bp, Homo sapien
ttgcagataactcaacacttcatagatgctcgc

SEQ ID NO: 983650 - DNA, 33 bp, Homo sapien
ttgcagataactcaacgcttcatagatgctcgc

SEQ ID NO: 983651 - DNA, 33 bp, Homo sapien
aggttggaggtcctataaaaaggagaaatgtta

SEQ ID NO: 983652 - DNA, 33 bp, Homo sapien
aggttggaggtcctatgaaaaggagaaatgtta

SEQ ID NO: 983653 - DNA, 33 bp, Homo sapien
tgctactcggattccaccagcaatttaaatggt

SEQ ID NO: 983654 - DNA, 33 bp, Homo sapien
tgctactcggattccatcagcaatttaaatggt

SEQ ID NO: 983655 - DNA, 33 bp, Homo sapien
taatattgccaaaatacgagtcaatagccagtt

SEQ ID NO: 983656 - DNA, 33 bp, Homo sapien
taatattgccaaaatatgagtcaatagccagtt

SEQ ID NO: 983657 - DNA, 33 bp, Homo sapien
agtcaatagccagttaaatgagaaccattatac

SEQ ID NO: 983658 - DNA, 33 bp, Homo sapien
agtcaatagccagttagatgagaaccattatac

SEQ ID NO: 983659 - DNA, 33 bp, Homo sapien
agaagggcaggcttaaataatttaacattcatt

SEQ ID NO: 983660 - DNA, 33 bp, Homo sapien
agaagggcaggcttaagtaatttaacattcatt

SEQ ID NO: 983661 - DNA, 33 bp, Homo sapien
actaaaattacagcctaaagattatggaataag

SEQ ID NO: 983662 - DNA, 33 bp, Homo sapien
actaaaattacagcctgaagattatggaataag

SEQ ID NO: 983663 - DNA, 33 bp, Homo sapien
gtccagttacgaagtcaacagatggcaaagcct

SEQ ID NO: 983664 - DNA, 33 bp, Homo sapien
gtccagttacgaagtcgacagatggcaaagcct

SEQ ID NO: 983665 - DNA, 33 bp, Homo sapien
tgaagatcatttgcaagaaatctgcaccctcta

SEQ ID NO: 983666 - DNA, 33 bp, Homo sapien
tgaagatcatttgcaataaatctgcaccctcta

SEQ ID NO: 983667 - DNA, 33 bp, Homo sapien
caccaacatcatgagccatactattctggcaaa

SEQ ID NO: 983668 - DNA, 33 bp, Homo sapien
caccaacatcatgagctatactattctggcaaa

SEQ ID NO: 983669 - DNA, 33 bp, Homo sapien
agcctagctagtttgagcttcagaacattttgt

SEQ ID NO: 983670 - DNA, 33 bp, Homo sapien
agcctagctagtttgatcttcagaacattttgt

SEQ ID NO: 983671 - DNA, 33 bp, Homo sapien
cctaaaattgtgcaacaaccaaaggtcaaagct

SEQ ID NO: 983672 - DNA, 33 bp, Homo sapien
cctaaaattgtgcaactaccaaaggtcaaagct

SEQ ID NO: 983673 - DNA, 33 bp, Homo sapien
ttcagtaccctcttgcagacctaacacacacag

SEQ ID NO: 983674 - DNA, 33 bp, Homo sapien
ttcagtaccctcttgccgacctaacacacacag

SEQ ID NO: 983675 - DNA, 33 bp, Homo sapien
tctgagattgtcttcactctctcacagtgttcc

SEQ ID NO: 983676 - DNA, 33 bp, Homo sapien
tctgagattgtcttcattctctcacagtgttcc

SEQ ID NO: 983677 - DNA, 33 bp, Homo sapien
agaattaaatgaatggacatcaaaaagtaatga

SEQ ID NO: 983678 - DNA, 33 bp, Homo sapien
agaattaaatgaatgggcatcaaaaagtaatga

SEQ ID NO: 983679 - DNA, 33 bp, Homo sapien
cacatctgggtctgaactcgattgcctctactt

SEQ ID NO: 983680 - DNA, 33 bp, Homo sapien
cacatctgggtctgaattcgattgcctctactt

SEQ ID NO: 983681 - DNA, 33 bp, Homo sapien
ttccattgtaccgttaacttaccaagaaggaaa

SEQ ID NO: 983682 - DNA, 33 bp, Homo sapien
ttccattgtaccgttagcttaccaagaaggaaa

SEQ ID NO: 983683 - DNA, 33 bp, Homo sapien
caattaatgctaacagcaacagttccttctctg

SEQ ID NO: 983684 - DNA, 33 bp, Homo sapien
caattaatgctaacagtaacagttccttctctg

SEQ ID NO: 983685 - DNA, 33 bp, Homo sapien
ccattgtcaatagcccaagagtctgtaaaaatg

SEQ ID NO: 983686 - DNA, 33 bp, Homo sapien
ccattgtcaatagcccgagagtctgtaaaaatg

SEQ ID NO: 983687 - DNA, 33 bp, Homo sapien
tgatccagatggccaaaattctatgctgagtaa

SEQ ID NO: 983688 - DNA, 33 bp, Homo sapien
tgatccagatggccaagattctatgctgagtaa

SEQ ID NO: 983689 - DNA, 33 bp, Homo sapien
cagaccatgcagcaaaactatttactcagcata

SEQ ID NO: 983690 - DNA, 33 bp, Homo sapien
cagaccatgcagcaaagctatttactcagcata

SEQ ID NO: 983691 - DNA, 33 bp, Homo sapien
tctcttaaaagtgaaacgacactgcttgaaaaa

SEQ ID NO: 983692 - DNA, 33 bp, Homo sapien
tctcttaaaagtgaaatgacactgcttgaaaaa

SEQ ID NO: 983693 - DNA, 33 bp, Homo sapien
tggctctgcaaccaaaagcactaagtcacctgg

SEQ ID NO: 983694 - DNA, 33 bp, Homo sapien
tggctctgcaaccaaaggcactaagtcacctgg

SEQ ID NO: 983695 - DNA, 33 bp, Homo sapien
gcttgaccttagaatgaatttgatccaggaact

SEQ ID NO: 983696 - DNA, 33 bp, Homo sapien
gcttgaccttagaatggatttgatccaggaact

SEQ ID NO: 983697 - DNA, 33 bp, Homo sapien
tatattcaagtggccaagttatccctgttctat

SEQ ID NO: 983698 - DNA, 33 bp, Homo sapien
tatattcaagtggccaggttatccctgttctat

SEQ ID NO: 983699 - DNA, 33 bp, Homo sapien
gccacttggcttctgccaacttcaagccatttt

SEQ ID NO: 983700 - DNA, 33 bp, Homo sapien
gccacttggcttctgctaacttcaagccatttt

SEQ ID NO: 983701 - DNA, 33 bp, Homo sapien
gataggataaataccagaaaagacacaatctgg

SEQ ID NO: 983702 - DNA, 33 bp, Homo sapien
gataggataaataccataaaagacacaatctgg

SEQ ID NO: 983703 - DNA, 33 bp, Homo sapien
aattatgtctcttatacgggatgccaaaattct

SEQ ID NO: 983704 - DNA, 33 bp, Homo sapien
aattatgtctcttatatgggatgccaaaattct

SEQ ID NO: 983705 - DNA, 33 bp, Homo sapien
gtgacaggcaaggaccaaaaaacctggcaccca

SEQ ID NO: 983706 - DNA, 33 bp, Homo sapien
gtgacaggcaaggaccgaaaaacctggcaccca

SEQ ID NO: 983707 - DNA, 33 bp, Homo sapien
gccactggggccaggaagtggactcaagagaga

SEQ ID NO: 983708 - DNA, 33 bp, Homo sapien
gccactggggccaggacgtggactcaagagaga

SEQ ID NO: 983709 - DNA, 33 bp, Homo sapien
ctttcacattaaaaaactagtgttgaggtcttg

SEQ ID NO: 983710 - DNA, 33 bp, Homo sapien
ctttcacattaaaaaattagtgttgaggtcttg

SEQ ID NO: 983711 - DNA, 33 bp, Homo sapien
acctcttaatggcccacatgagcggcctttaga

SEQ ID NO: 983712 - DNA, 33 bp, Homo sapien
acctcttaatggcccatatgagcggcctttaga

SEQ ID NO: 983713 - DNA, 33 bp, Homo sapien
catttcttcatcttcacctttttgctcaaccgt

SEQ ID NO: 983714 - DNA, 33 bp, Homo sapien
catttcttcatcttcagctttttgctcaaccgt

SEQ ID NO: 983715 - DNA, 33 bp, Homo sapien
aacaataaaatcttccaaaatcctccttgagat

SEQ ID NO: 983716 - DNA, 33 bp, Homo sapien
aacaataaaatcttccgaaatcctccttgagat

SEQ ID NO: 983717 - DNA, 33 bp, Homo sapien
aagggtaaatgaaccaagtaatcagaccacaga

SEQ ID NO: 983718 - DNA, 33 bp, Homo sapien
aagggtaaatgaaccaggtaatcagaccacaga

SEQ ID NO: 983719 - DNA, 33 bp, Homo sapien
tgtgtctgtattcaccactgtatttctagatca

SEQ ID NO: 983720 - DNA, 33 bp, Homo sapien
tgtgtctgtattcaccgctgtatttctagatca

SEQ ID NO: 983721 - DNA, 33 bp, Homo sapien
aactgaaaattacccacctaagtgacagaagat

SEQ ID NO: 983722 - DNA, 33 bp, Homo sapien
aactgaaaattacccatctaagtgacagaagat

SEQ ID NO: 983723 - DNA, 33 bp, Homo sapien
ttggtgcccttttataagtgagaggcagtgtac

SEQ ID NO: 983724 - DNA, 33 bp, Homo sapien
ttggtgcccttttataggtgagaggcagtgtac

SEQ ID NO: 983725 - DNA, 33 bp, Homo sapien
tgctactttcaaatacgcaatttgtgctgtaga

SEQ ID NO: 983726 - DNA, 33 bp, Homo sapien
tgctactttcaaatactcaatttgtgctgtaga

SEQ ID NO: 983727 - DNA, 33 bp, Homo sapien
agaaagttggggacacaagatggatgtaataca

SEQ ID NO: 983728 - DNA, 33 bp, Homo sapien
agaaagttggggacacgagatggatgtaataca

SEQ ID NO: 983729 - DNA, 33 bp, Homo sapien
agcatggtacagaacccggccacttctattaat

SEQ ID NO: 983730 - DNA, 33 bp, Homo sapien
agcatggtacagaacctggccacttctattaat

SEQ ID NO: 983731 - DNA, 33 bp, Homo sapien
ctggtcaaagaattgcccaataaagtcagaaca

SEQ ID NO: 983732 - DNA, 33 bp, Homo sapien
ctggtcaaagaattgctcaataaagtcagaaca

SEQ ID NO: 983733 - DNA, 33 bp, Homo sapien
actgggaccactaagacaccttcagcagagaag

SEQ ID NO: 983734 - DNA, 33 bp, Homo sapien
actgggaccactaagagaccttcagcagagaag

SEQ ID NO: 983735 - DNA, 33 bp, Homo sapien
gtgagggcttcaggaaattcccaattatggtag

SEQ ID NO: 983736 - DNA, 33 bp, Homo sapien
gtgagggcttcaggaagttcccaattatggtag

SEQ ID NO: 983737 - DNA, 33 bp, Homo sapien
tctggaactggggtaggccttaagactgagtct

SEQ ID NO: 983738 - DNA, 33 bp, Homo sapien
tctggaactggggtagtccttaagactgagtct

SEQ ID NO: 983739 - DNA, 33 bp, Homo sapien
aaaagtctcctgtcaacggaaagtccaggactt

SEQ ID NO: 983740 - DNA, 33 bp, Homo sapien
aaaagtctcctgtcaatggaaagtccaggactt

SEQ ID NO: 983741 - DNA, 33 bp, Homo sapien
cattacacactacaatcactgcaatcaactcag

SEQ ID NO: 983742 - DNA, 33 bp, Homo sapien
cattacacactacaatgactgcaatcaactcag

SEQ ID NO: 983743 - DNA, 33 bp, Homo sapien
aaagtattacccagctcaaagtcatggagcttt

SEQ ID NO: 983744 - DNA, 33 bp, Homo sapien
aaagtattacccagcttaaagtcatggagcttt

SEQ ID NO: 983745 - DNA, 33 bp, Homo sapien
ttctcattgaagtgaaggttgtctcttcactct

SEQ ID NO: 983746 - DNA, 33 bp, Homo sapien
ttctcattgaagtgaatgttgtctcttcactct

SEQ ID NO: 983747 - DNA, 33 bp, Homo sapien
ttcttcttctctctgcaattatgtgaagaatga

SEQ ID NO: 983748 - DNA, 33 bp, Homo sapien
ttcttcttctctctgcgattatgtgaagaatga

SEQ ID NO: 983749 - DNA, 33 bp, Homo sapien
ggcctcaggaaacttaaaaacatggtagaagga

SEQ ID NO: 983750 - DNA, 33 bp, Homo sapien
ggcctcaggaaacttacaaacatggtagaagga

SEQ ID NO: 983751 - DNA, 33 bp, Homo sapien
atttattttgtgaaagcataatgtatcttccaa

SEQ ID NO: 983752 - DNA, 33 bp, Homo sapien
atttattttgtgaaaggataatgtatcttccaa

SEQ ID NO: 983753 - DNA, 33 bp, Homo sapien
actctctgaggacttaggagataaacagcattg

SEQ ID NO: 983754 - DNA, 33 bp, Homo sapien
actctctgaggacttatgagataaacagcattg

SEQ ID NO: 983755 - DNA, 33 bp, Homo sapien
ttggtcctgcaaaacacactacagagaggcact

SEQ ID NO: 983756 - DNA, 33 bp, Homo sapien
ttggtcctgcaaaacatactacagagaggcact

SEQ ID NO: 983757 - DNA, 33 bp, Homo sapien
catacgctcaccctaagtaagcatctgttaaca

SEQ ID NO: 983758 - DNA, 33 bp, Homo sapien
catacgctcaccctaattaagcatctgttaaca

SEQ ID NO: 983759 - DNA, 33 bp, Homo sapien
tccttttttacctgtcaagacatgggtcaaatg

SEQ ID NO: 983760 - DNA, 33 bp, Homo sapien
tccttttttacctgtcgagacatgggtcaaatg

SEQ ID NO: 983761 - DNA, 33 bp, Homo sapien
ggaatttgatcagataccaaggttgagggattc

SEQ ID NO: 983762 - DNA, 33 bp, Homo sapien
ggaatttgatcagatatcaaggttgagggattc

SEQ ID NO: 983763 - DNA, 33 bp, Homo sapien
aaggtgaggtggataaataggccagaggcagga

SEQ ID NO: 983764 - DNA, 33 bp, Homo sapien
aaggtgaggtggataattaggccagaggcagga

SEQ ID NO: 983765 - DNA, 33 bp, Homo sapien
ggccaattatgatacccattcttttcacgacac

SEQ ID NO: 983766 - DNA, 33 bp, Homo sapien
ggccaattatgatacctattcttttcacgacac

SEQ ID NO: 983767 - DNA, 33 bp, Homo sapien
actaaagctaggtaaacgtttggtgcagttcac

SEQ ID NO: 983768 - DNA, 33 bp, Homo sapien
actaaagctaggtaaatgtttggtgcagttcac

SEQ ID NO: 983769 - DNA, 33 bp, Homo sapien
acctaatgcaaacttacgcaaacataaccatct

SEQ ID NO: 983770 - DNA, 33 bp, Homo sapien
acctaatgcaaacttatgcaaacataaccatct

SEQ ID NO: 983771 - DNA, 33 bp, Homo sapien
atgtgcttagcatcaaatccaaggtttagtgag

SEQ ID NO: 983772 - DNA, 33 bp, Homo sapien
atgtgcttagcatcaagtccaaggtttagtgag

SEQ ID NO: 983773 - DNA, 33 bp, Homo sapien
gtagaatgttccttccaagatcacatagctccc

SEQ ID NO: 983774 - DNA, 33 bp, Homo sapien
gtagaatgttccttccgagatcacatagctccc

SEQ ID NO: 983775 - DNA, 33 bp, Homo sapien
ccccagtgcataaaaaatagaagcaataagttc

SEQ ID NO: 983776 - DNA, 33 bp, Homo sapien
ccccagtgcataaaaagtagaagcaataagttc

SEQ ID NO: 983777 - DNA, 33 bp, Homo sapien
aatacgtagattgaaagtaactctaaatccaga

SEQ ID NO: 983778 - DNA, 33 bp, Homo sapien
aatacgtagattgaaattaactctaaatccaga

SEQ ID NO: 983779 - DNA, 33 bp, Homo sapien
tctgttacaaatagaaggaatccagtagaccct

SEQ ID NO: 983780 - DNA, 33 bp, Homo sapien
tctgttacaaatagaatgaatccagtagaccct

SEQ ID NO: 983781 - DNA, 33 bp, Homo sapien
tgtccattccttaaccaatctctttagctaaag

SEQ ID NO: 983782 - DNA, 33 bp, Homo sapien
tgtccattccttaacccatctctttagctaaag

SEQ ID NO: 983783 - DNA, 33 bp, Homo sapien
atatcctgccaacttaacaagcccaatggagag

SEQ ID NO: 983784 - DNA, 33 bp, Homo sapien
atatcctgccaacttatcaagcccaatggagag

SEQ ID NO: 983785 - DNA, 33 bp, Homo sapien
gctactggaatatctgcagtgaaataatgctat

SEQ ID NO: 983786 - DNA, 33 bp, Homo sapien
gctactggaatatctgtagtgaaataatgctat

SEQ ID NO: 983787 - DNA, 33 bp, Homo sapien
tccttgctgtttcctaacacacagacatatcct

SEQ ID NO: 983788 - DNA, 33 bp, Homo sapien
tccttgctgtttcctagcacacagacatatcct

SEQ ID NO: 983789 - DNA, 33 bp, Homo sapien
ttgcagagccctttgcactatgaagaagctttc

SEQ ID NO: 983790 - DNA, 33 bp, Homo sapien
ttgcagagccctttgcgctatgaagaagctttc

SEQ ID NO: 983791 - DNA, 33 bp, Homo sapien
agttgggaacttaaaacgaatcaagtcataggt

SEQ ID NO: 983792 - DNA, 33 bp, Homo sapien
agttgggaacttaaaatgaatcaagtcataggt

SEQ ID NO: 983793 - DNA, 33 bp, Homo sapien
ttaatgtcatcatcaactcatggcccaggggtc

SEQ ID NO: 983794 - DNA, 33 bp, Homo sapien
ttaatgtcatcatcaattcatggcccaggggtc

SEQ ID NO: 983795 - DNA, 33 bp, Homo sapien
accctttttgcaataactagcacaccctagatg

SEQ ID NO: 983796 - DNA, 33 bp, Homo sapien
accctttttgcaataattagcacaccctagatg

SEQ ID NO: 983797 - DNA, 33 bp, Homo sapien
cagaagctggttagaacggctctatggccagta

SEQ ID NO: 983798 - DNA, 33 bp, Homo sapien
cagaagctggttagaatggctctatggccagta

SEQ ID NO: 983799 - DNA, 33 bp, Homo sapien
gaagatctttacaagacctgagccatagaatat

SEQ ID NO: 983800 - DNA, 33 bp, Homo sapien
gaagatctttacaagagctgagccatagaatat

SEQ ID NO: 983801 - DNA, 33 bp, Homo sapien
agtacatttctccagacagagtgtgtgtgtgtg

SEQ ID NO: 983802 - DNA, 33 bp, Homo sapien
agtacatttctccagatagagtgtgtgtgtgtg

SEQ ID NO: 983803 - DNA, 33 bp, Homo sapien
actacatggctgtggcaagtttctcaagggaaa

SEQ ID NO: 983804 - DNA, 33 bp, Homo sapien
actacatggctgtggctagtttctcaagggaaa

SEQ ID NO: 983805 - DNA, 33 bp, Homo sapien
tctgaaaataagcaaacgagaaaagacaatagg

SEQ ID NO: 983806 - DNA, 33 bp, Homo sapien
tctgaaaataagcaaatgagaaaagacaatagg

SEQ ID NO: 983807 - DNA, 33 bp, Homo sapien
tttgctctgaaattgaagcaggcgctgggagtg

SEQ ID NO: 983808 - DNA, 33 bp, Homo sapien
tttgctctgaaattgaggcaggcgctgggagtg

SEQ ID NO: 983809 - DNA, 33 bp, Homo sapien
tggaccaggtgtactacaggtggcttccactgt

SEQ ID NO: 983810 - DNA, 33 bp, Homo sapien
tggaccaggtgtactataggtggcttccactgt

SEQ ID NO: 983811 - DNA, 33 bp, Homo sapien
taaggcaaacaaactcactcattcatttatctt

SEQ ID NO: 983812 - DNA, 33 bp, Homo sapien
taaggcaaacaaactcgctcattcatttatctt

SEQ ID NO: 983813 - DNA, 33 bp, Homo sapien
ttttgttacacctcaccggagtttaatacctca

SEQ ID NO: 983814 - DNA, 33 bp, Homo sapien
ttttgttacacctcactggagtttaatacctca

SEQ ID NO: 983815 - DNA, 33 bp, Homo sapien
gcaaggcagggctacaagttgatgataaacttc

SEQ ID NO: 983816 - DNA, 33 bp, Homo sapien
gcaaggcagggctacaggttgatgataaacttc

SEQ ID NO: 983817 - DNA, 33 bp, Homo sapien
tagtgagactctgaaacagaggatggatatcta

SEQ ID NO: 983818 - DNA, 33 bp, Homo sapien
tagtgagactctgaaatagaggatggatatcta

SEQ ID NO: 983819 - DNA, 33 bp, Homo sapien
ggcacttgagattggccagtatgaacacatcag

SEQ ID NO: 983820 - DNA, 33 bp, Homo sapien
ggcacttgagattggctagtatgaacacatcag

SEQ ID NO: 983821 - DNA, 33 bp, Homo sapien
acagttgttgtgaagaaaactgtgtagaacctg

SEQ ID NO: 983822 - DNA, 33 bp, Homo sapien
acagttgttgtgaagagaactgtgtagaacctg

SEQ ID NO: 983823 - DNA, 33 bp, Homo sapien
cctctaagctaacagcaattaaagttcacagtt

SEQ ID NO: 983824 - DNA, 33 bp, Homo sapien
cctctaagctaacagcgattaaagttcacagtt

SEQ ID NO: 983825 - DNA, 33 bp, Homo sapien
atagaaaagatgtgtccaggattgctgtatcaa

SEQ ID NO: 983826 - DNA, 33 bp, Homo sapien
atagaaaagatgtgtctaggattgctgtatcaa

SEQ ID NO: 983827 - DNA, 33 bp, Homo sapien
gggtttagaaagagtcacaggaaataagcaact

SEQ ID NO: 983828 - DNA, 33 bp, Homo sapien
gggtttagaaagagtcgcaggaaataagcaact

SEQ ID NO: 983829 - DNA, 33 bp, Homo sapien
tcagagtcaattactacagttctcacaaggtca

SEQ ID NO: 983830 - DNA, 33 bp, Homo sapien
tcagagtcaattactagagttctcacaaggtca

SEQ ID NO: 983831 - DNA, 33 bp, Homo sapien
tttctgaacataatcaactgtaaccgaaaaagc

SEQ ID NO: 983832 - DNA, 33 bp, Homo sapien
tttctgaacataatcacctgtaaccgaaaaagc

SEQ ID NO: 983833 - DNA, 33 bp, Homo sapien
agaaaatcgcctaaaaagattcttgcaaaaaca

SEQ ID NO: 983834 - DNA, 33 bp, Homo sapien
agaaaatcgcctaaaacgattcttgcaaaaaca

SEQ ID NO: 983835 - DNA, 33 bp, Homo sapien
ctacagtaccaggggaagtatgttcaggaataa

SEQ ID NO: 983836 - DNA, 33 bp, Homo sapien
ctacagtaccaggggaggtatgttcaggaataa

SEQ ID NO: 983837 - DNA, 33 bp, Homo sapien
ggcacatctgtgtagaactcctactctttattc

SEQ ID NO: 983838 - DNA, 33 bp, Homo sapien
ggcacatctgtgtagatctcctactctttattc

SEQ ID NO: 983839 - DNA, 33 bp, Homo sapien
cagaggcagaatagtccgaaggcttgttatggc

SEQ ID NO: 983840 - DNA, 33 bp, Homo sapien
cagaggcagaatagtctgaaggcttgttatggc

SEQ ID NO: 983841 - DNA, 33 bp, Homo sapien
tcgagggggtaacacagtaggtgagaaatggga

SEQ ID NO: 983842 - DNA, 33 bp, Homo sapien
tcgagggggtaacacattaggtgagaaatggga

SEQ ID NO: 983843 - DNA, 33 bp, Homo sapien
tctccttttcctctacaaagactatattttgtt

SEQ ID NO: 983844 - DNA, 33 bp, Homo sapien
tctccttttcctctacgaagactatattttgtt

SEQ ID NO: 983845 - DNA, 33 bp, Homo sapien
agacatgacatagtacagatgagccttgaaaac

SEQ ID NO: 983846 - DNA, 33 bp, Homo sapien
agacatgacatagtacggatgagccttgaaaac

SEQ ID NO: 983847 - DNA, 33 bp, Homo sapien
ccatcatctgtgtccacagagcacatccagtga

SEQ ID NO: 983848 - DNA, 33 bp, Homo sapien
ccatcatctgtgtccatagagcacatccagtga

SEQ ID NO: 983849 - DNA, 33 bp, Homo sapien
gtttgcaagattgaaacggtgagcaaggatttc

SEQ ID NO: 983850 - DNA, 33 bp, Homo sapien
gtttgcaagattgaaatggtgagcaaggatttc

SEQ ID NO: 983851 - DNA, 33 bp, Homo sapien
tcattttaaagtaatgcagatgccaacacttgg

SEQ ID NO: 983852 - DNA, 33 bp, Homo sapien
tcattttaaagtaatgtagatgccaacacttgg

SEQ ID NO: 983853 - DNA, 33 bp, Homo sapien
tgctctcagaagctcaaggtctactgagaaaga

SEQ ID NO: 983854 - DNA, 33 bp, Homo sapien
tgctctcagaagctcatggtctactgagaaaga

SEQ ID NO: 983855 - DNA, 33 bp, Homo sapien
agaaagaaagtcacaaacaataaacaaatcctg

SEQ ID NO: 983856 - DNA, 33 bp, Homo sapien
agaaagaaagtcacaagcaataaacaaatcctg

SEQ ID NO: 983857 - DNA, 33 bp, Homo sapien
agctggggccacataacgaaggactttaagtcg

SEQ ID NO: 983858 - DNA, 33 bp, Homo sapien
agctggggccacataatgaaggactttaagtcg

SEQ ID NO: 983859 - DNA, 33 bp, Homo sapien
aaacctaatagctaatcaatctggaatatgcaa

SEQ ID NO: 983860 - DNA, 33 bp, Homo sapien
aaacctaatagctaattaatctggaatatgcaa

SEQ ID NO: 983861 - DNA, 33 bp, Homo sapien
cacaggctaaaggatacgctcattgggaaactt

SEQ ID NO: 983862 - DNA, 33 bp, Homo sapien
cacaggctaaaggatatgctcattgggaaactt

SEQ ID NO: 983863 - DNA, 33 bp, Homo sapien
gcctccatttgcagtcaaagtaggaatatggtg

SEQ ID NO: 983864 - DNA, 33 bp, Homo sapien
gcctccatttgcagtccaagtaggaatatggtg

SEQ ID NO: 983865 - DNA, 33 bp, Homo sapien
cttgtggtgcctaaaagaccaggccaatggcca

SEQ ID NO: 983866 - DNA, 33 bp, Homo sapien
cttgtggtgcctaaaataccaggccaatggcca

SEQ ID NO: 983867 - DNA, 33 bp, Homo sapien
gaactattaaactctaccttcttttatctttat

SEQ ID NO: 983868 - DNA, 33 bp, Homo sapien
gaactattaaactctagcttcttttatctttat

SEQ ID NO: 983869 - DNA, 33 bp, Homo sapien
ttgctaggaaactacaagtggttaactgttgct

SEQ ID NO: 983870 - DNA, 33 bp, Homo sapien
ttgctaggaaactacacgtggttaactgttgct

SEQ ID NO: 983871 - DNA, 33 bp, Homo sapien
gaagtgagactcagcacgtcttgctaggaaact

SEQ ID NO: 983872 - DNA, 33 bp, Homo sapien
gaagtgagactcagcatgtcttgctaggaaact

SEQ ID NO: 983873 - DNA, 33 bp, Homo sapien
ctctttagtcacagcacatttgtgattgtaagt

SEQ ID NO: 983874 - DNA, 33 bp, Homo sapien
ctctttagtcacagcatatttgtgattgtaagt

SEQ ID NO: 983875 - DNA, 33 bp, Homo sapien
ccttgactgagatgaaatactgaagacaaaaaa

SEQ ID NO: 983876 - DNA, 33 bp, Homo sapien
ccttgactgagatgaattactgaagacaaaaaa

SEQ ID NO: 983877 - DNA, 33 bp, Homo sapien
tcagtcaacatttcccagaagtggaagaaagaa

SEQ ID NO: 983878 - DNA, 33 bp, Homo sapien
tcagtcaacatttcccggaagtggaagaaagaa

SEQ ID NO: 983879 - DNA, 33 bp, Homo sapien
gggtgagccttagaaagggacaagcattagcct

SEQ ID NO: 983880 - DNA, 33 bp, Homo sapien
gggtgagccttagaaatggacaagcattagcct

SEQ ID NO: 983881 - DNA, 33 bp, Homo sapien
tggttatggttggtcaaaaggaaagtccagatt

SEQ ID NO: 983882 - DNA, 33 bp, Homo sapien
tggttatggttggtcacaaggaaagtccagatt

SEQ ID NO: 983883 - DNA, 33 bp, Homo sapien
ttgagtcaatatttcactagaggcaacatttgt

SEQ ID NO: 983884 - DNA, 33 bp, Homo sapien
ttgagtcaatatttcattagaggcaacatttgt

SEQ ID NO: 983885 - DNA, 33 bp, Homo sapien
tccgacgataatcccactacagatatgtttctc

SEQ ID NO: 983886 - DNA, 33 bp, Homo sapien
tccgacgataatcccattacagatatgtttctc

SEQ ID NO: 983887 - DNA, 33 bp, Homo sapien
ttcgctctttgaatgacatttcttgccactgct

SEQ ID NO: 983888 - DNA, 33 bp, Homo sapien
ttcgctctttgaatgatatttcttgccactgct

SEQ ID NO: 983889 - DNA, 33 bp, Homo sapien
cctaacaaatgcatgacatccacttaacagtat

SEQ ID NO: 983890 - DNA, 33 bp, Homo sapien
cctaacaaatgcatgatatccacttaacagtat

SEQ ID NO: 983891 - DNA, 33 bp, Homo sapien
ccaacccactcttttaggtaaatatggaaagca

SEQ ID NO: 983892 - DNA, 33 bp, Homo sapien
ccaacccactcttttatgtaaatatggaaagca

SEQ ID NO: 983893 - DNA, 33 bp, Homo sapien
gtgtccacctggcagaaggagtatattcttgca

SEQ ID NO: 983894 - DNA, 33 bp, Homo sapien
gtgtccacctggcagatggagtatattcttgca

SEQ ID NO: 983895 - DNA, 33 bp, Homo sapien
ggttcatgtatttccaatatttaccgaacatca

SEQ ID NO: 983896 - DNA, 33 bp, Homo sapien
ggttcatgtatttccagtatttaccgaacatca

SEQ ID NO: 983897 - DNA, 33 bp, Homo sapien
aggaattggatcattgaaagtacgtgtgtatgt

SEQ ID NO: 983898 - DNA, 33 bp, Homo sapien
aggaattggatcattgcaagtacgtgtgtatgt

SEQ ID NO: 983899 - DNA, 33 bp, Homo sapien
atttacttaaaacttcaaagtggaattttgtgt

SEQ ID NO: 983900 - DNA, 33 bp, Homo sapien
atttacttaaaacttcgaagtggaattttgtgt

SEQ ID NO: 983901 - DNA, 33 bp, Homo sapien
tagaaggagcaggaatcatgacatctctgttct

SEQ ID NO: 983902 - DNA, 33 bp, Homo sapien
tagaaggagcaggaattatgacatctctgttct

SEQ ID NO: 983903 - DNA, 33 bp, Homo sapien
ttcacaagtgggatgacgtcctttagaatagtg

SEQ ID NO: 983904 - DNA, 33 bp, Homo sapien
ttcacaagtgggatgatgtcctttagaatagtg

SEQ ID NO: 983905 - DNA, 33 bp, Homo sapien
tgtcatctcatgttgaacatacacgtggcaaat

SEQ ID NO: 983906 - DNA, 33 bp, Homo sapien
tgtcatctcatgttgagcatacacgtggcaaat

SEQ ID NO: 983907 - DNA, 33 bp, Homo sapien
tggttatctatgtacactggtgattaaaatgtc

SEQ ID NO: 983908 - DNA, 33 bp, Homo sapien
tggttatctatgtacagtggtgattaaaatgtc

SEQ ID NO: 983909 - DNA, 33 bp, Homo sapien
ttttaagtggttgttacgagttcaattatggcc

SEQ ID NO: 983910 - DNA, 33 bp, Homo sapien
ttttaagtggttgttatgagttcaattatggcc

SEQ ID NO: 983911 - DNA, 33 bp, Homo sapien
tccatggaactaagaaagctactctacagcaca

SEQ ID NO: 983912 - DNA, 33 bp, Homo sapien
tccatggaactaagaaggctactctacagcaca

SEQ ID NO: 983913 - DNA, 33 bp, Homo sapien
aggtggccactcccaacggacctggataacgaa

SEQ ID NO: 983914 - DNA, 33 bp, Homo sapien
aggtggccactcccaatggacctggataacgaa

SEQ ID NO: 983915 - DNA, 33 bp, Homo sapien
tgactatctaactttaagacactggggctgcag

SEQ ID NO: 983916 - DNA, 33 bp, Homo sapien
tgactatctaactttaggacactggggctgcag

SEQ ID NO: 983917 - DNA, 33 bp, Homo sapien
ctattctgcattgtcaaaagcccattgcatggc

SEQ ID NO: 983918 - DNA, 33 bp, Homo sapien
ctattctgcattgtcagaagcccattgcatggc

SEQ ID NO: 983919 - DNA, 33 bp, Homo sapien
tgccctacctcaagtccatttgtcacacagcat

SEQ ID NO: 983920 - DNA, 33 bp, Homo sapien
tgccctacctcaagtctatttgtcacacagcat

SEQ ID NO: 983921 - DNA, 33 bp, Homo sapien
atgaatagagtgtatgaaggttaaggaataatt

SEQ ID NO: 983922 - DNA, 33 bp, Homo sapien
atgaatagagtgtatggaggttaaggaataatt

SEQ ID NO: 983923 - DNA, 33 bp, Homo sapien
attacccaaagcaagaagagtaaatactgctat

SEQ ID NO: 983924 - DNA, 33 bp, Homo sapien
attacccaaagcaagaggagtaaatactgctat

SEQ ID NO: 983925 - DNA, 33 bp, Homo sapien
agggaagttaagtaaactgtctaagatcataca

SEQ ID NO: 983926 - DNA, 33 bp, Homo sapien
agggaagttaagtaaattgtctaagatcataca

SEQ ID NO: 983927 - DNA, 33 bp, Homo sapien
cttactatgtctgaaaatatggtaaagtgcaca

SEQ ID NO: 983928 - DNA, 33 bp, Homo sapien
cttactatgtctgaaactatggtaaagtgcaca

SEQ ID NO: 983929 - DNA, 33 bp, Homo sapien
agtttggaagaagtcaagtagattgcaaagatt

SEQ ID NO: 983930 - DNA, 33 bp, Homo sapien
agtttggaagaagtcatgtagattgcaaagatt

SEQ ID NO: 983931 - DNA, 33 bp, Homo sapien
atggtgctctcccccacgagaagtagtgcctta

SEQ ID NO: 983932 - DNA, 33 bp, Homo sapien
atggtgctctcccccatgagaagtagtgcctta

SEQ ID NO: 983933 - DNA, 33 bp, Homo sapien
agccgtgatcatttcacctctaacattgtgttt

SEQ ID NO: 983934 - DNA, 33 bp, Homo sapien
agccgtgatcatttcagctctaacattgtgttt

SEQ ID NO: 983935 - DNA, 33 bp, Homo sapien
atttcaaccacatggcaagcaacttgtggcaag

SEQ ID NO: 983936 - DNA, 33 bp, Homo sapien
atttcaaccacatggcgagcaacttgtggcaag

SEQ ID NO: 983937 - DNA, 33 bp, Homo sapien
caataaacattcgatgacaaataactagttgat

SEQ ID NO: 983938 - DNA, 33 bp, Homo sapien
caataaacattcgatgtcaaataactagttgat

SEQ ID NO: 983939 - DNA, 33 bp, Homo sapien
ctccacaggttttggaagaccatgtccacctct

SEQ ID NO: 983940 - DNA, 33 bp, Homo sapien
ctccacaggttttggatgaccatgtccacctct

SEQ ID NO: 983941 - DNA, 33 bp, Homo sapien
gttgttgcagaggccaagatctgattttttttt

SEQ ID NO: 983942 - DNA, 33 bp, Homo sapien
gttgttgcagaggccaggatctgattttttttt

SEQ ID NO: 983943 - DNA, 33 bp, Homo sapien
ggagagcaagtttctccgaaaatgtgacagtca

SEQ ID NO: 983944 - DNA, 33 bp, Homo sapien
ggagagcaagtttctctgaaaatgtgacagtca

SEQ ID NO: 983945 - DNA, 33 bp, Homo sapien
caagactactacaaaaacatcattcctagagga

SEQ ID NO: 983946 - DNA, 33 bp, Homo sapien
caagactactacaaaaccatcattcctagagga

SEQ ID NO: 983947 - DNA, 33 bp, Homo sapien
atgtttccagtatgaagagttgacttgctggtt

SEQ ID NO: 983948 - DNA, 33 bp, Homo sapien
atgtttccagtatgaatagttgacttgctggtt

SEQ ID NO: 983949 - DNA, 33 bp, Homo sapien
caggattcatgttcttataatggagtggaaagg

SEQ ID NO: 983950 - DNA, 33 bp, Homo sapien
caggattcatgttcttttaatggagtggaaagg

SEQ ID NO: 983951 - DNA, 33 bp, Homo sapien
aatcagactttcttaccgcagcttgtctgttga

SEQ ID NO: 983952 - DNA, 33 bp, Homo sapien
aatcagactttcttactgcagcttgtctgttga

SEQ ID NO: 983953 - DNA, 33 bp, Homo sapien
tctgtcaggttcaccaatgggactcaggccagt

SEQ ID NO: 983954 - DNA, 33 bp, Homo sapien
tctgtcaggttcaccagtgggactcaggccagt

SEQ ID NO: 983955 - DNA, 33 bp, Homo sapien
tgcaatcatgaacagaagaagattttcaggtac

SEQ ID NO: 983956 - DNA, 33 bp, Homo sapien
tgcaatcatgaacagatgaagattttcaggtac

SEQ ID NO: 983957 - DNA, 33 bp, Homo sapien
gagtggaaagtcatggaaaaatgtgattggagg

SEQ ID NO: 983958 - DNA, 33 bp, Homo sapien
gagtggaaagtcatgggaaaatgtgattggagg

SEQ ID NO: 983959 - DNA, 33 bp, Homo sapien
gtttttataaaagcaacgatgtcttgacttaaa

SEQ ID NO: 983960 - DNA, 33 bp, Homo sapien
gtttttataaaagcaatgatgtcttgacttaaa

SEQ ID NO: 983961 - DNA, 33 bp, Homo sapien
gacgataggcactggaaatacaattgtaagcat

SEQ ID NO: 983962 - DNA, 33 bp, Homo sapien
gacgataggcactggagatacaattgtaagcat

SEQ ID NO: 983963 - DNA, 33 bp, Homo sapien
aacataatattctggaggatgaatgcaatgtaa

SEQ ID NO: 983964 - DNA, 33 bp, Homo sapien
aacataatattctggatgatgaatgcaatgtaa

SEQ ID NO: 983965 - DNA, 33 bp, Homo sapien
taaggatagatagacaacacttgcttggaaggt

SEQ ID NO: 983966 - DNA, 33 bp, Homo sapien
taaggatagatagacagcacttgcttggaaggt

SEQ ID NO: 983967 - DNA, 33 bp, Homo sapien
gtgggagagataatgacgctcagaaatcaattt

SEQ ID NO: 983968 - DNA, 33 bp, Homo sapien
gtgggagagataatgatgctcagaaatcaattt

SEQ ID NO: 983969 - DNA, 33 bp, Homo sapien
agatgtgatgtgattccctataggcagcatgtg

SEQ ID NO: 983970 - DNA, 33 bp, Homo sapien
agatgtgatgtgattctctataggcagcatgtg

SEQ ID NO: 983971 - DNA, 33 bp, Homo sapien
attttacattgtaggcaatctgttcacacatca

SEQ ID NO: 983972 - DNA, 33 bp, Homo sapien
attttacattgtaggctatctgttcacacatca

SEQ ID NO: 983973 - DNA, 33 bp, Homo sapien
ccagatctccgaggtacatttcacatggtaggc

SEQ ID NO: 983974 - DNA, 33 bp, Homo sapien
ccagatctccgaggtatatttcacatggtaggc

SEQ ID NO: 983975 - DNA, 33 bp, Homo sapien
aggtcaagtctgccaaaaatcatttggagttca

SEQ ID NO: 983976 - DNA, 33 bp, Homo sapien
aggtcaagtctgccaacaatcatttggagttca

SEQ ID NO: 983977 - DNA, 33 bp, Homo sapien
ctgtgaaatgctcagacgtgtccttgtccctgg

SEQ ID NO: 983978 - DNA, 33 bp, Homo sapien
ctgtgaaatgctcagatgtgtccttgtccctgg

SEQ ID NO: 983979 - DNA, 33 bp, Homo sapien
ctgttcatctcaaacaaaatttcttatatgtat

SEQ ID NO: 983980 - DNA, 33 bp, Homo sapien
ctgttcatctcaaacacaatttcttatatgtat

SEQ ID NO: 983981 - DNA, 33 bp, Homo sapien
atggatacttaaactcaccaggtactgtctcta

SEQ ID NO: 983982 - DNA, 33 bp, Homo sapien
atggatacttaaactcgccaggtactgtctcta

SEQ ID NO: 983983 - DNA, 33 bp, Homo sapien
agatacagaaatatcccaccatcacaaagatct

SEQ ID NO: 983984 - DNA, 33 bp, Homo sapien
agatacagaaatatcctaccatcacaaagatct

SEQ ID NO: 983985 - DNA, 33 bp, Homo sapien
agatattaggaaaacgaagataaatcagcaaag

SEQ ID NO: 983986 - DNA, 33 bp, Homo sapien
agatattaggaaaacgtagataaatcagcaaag

SEQ ID NO: 983987 - DNA, 33 bp, Homo sapien
gaaacctaaatcctgaaagacattgtgttcaaa

SEQ ID NO: 983988 - DNA, 33 bp, Homo sapien
gaaacctaaatcctgagagacattgtgttcaaa

SEQ ID NO: 983989 - DNA, 33 bp, Homo sapien
tctttcttgacatgaaaataatgccgtgtaaac

SEQ ID NO: 983990 - DNA, 33 bp, Homo sapien
tctttcttgacatgaagataatgccgtgtaaac

SEQ ID NO: 983991 - DNA, 33 bp, Homo sapien
ttaataggaaatctagaactacatatgtggctt

SEQ ID NO: 983992 - DNA, 33 bp, Homo sapien
ttaataggaaatctagtactacatatgtggctt

SEQ ID NO: 983993 - DNA, 33 bp, Homo sapien
ggaaaaagaaatgttcaaagaattccgggaaaa

SEQ ID NO: 983994 - DNA, 33 bp, Homo sapien
ggaaaaagaaatgttcgaagaattccgggaaaa

SEQ ID NO: 983995 - DNA, 33 bp, Homo sapien
ataatatccagggacgcagaggatgatattact

SEQ ID NO: 983996 - DNA, 33 bp, Homo sapien
ataatatccagggacggagaggatgatattact

SEQ ID NO: 983997 - DNA, 33 bp, Homo sapien
actgggcatcatatcaacctctcccaacctgga

SEQ ID NO: 983998 - DNA, 33 bp, Homo sapien
actgggcatcatatcaccctctcccaacctgga

SEQ ID NO: 983999 - DNA, 33 bp, Homo sapien
aatattatcctctcaaacgctggaaattatgaa

SEQ ID NO: 984000 - DNA, 33 bp, Homo sapien
aatattatcctctcaaccgctggaaattatgaa

SEQ ID NO: 984001 - DNA, 33 bp, Homo sapien
tctcaacatggcattcaaaatctgctaacagac

SEQ ID NO: 984002 - DNA, 33 bp, Homo sapien
tctcaacatggcattcgaaatctgctaacagac

SEQ ID NO: 984003 - DNA, 33 bp, Homo sapien
ttagcctcatcttggacgcctcttctgtcagac

SEQ ID NO: 984004 - DNA, 33 bp, Homo sapien
ttagcctcatcttggatgcctcttctgtcagac

SEQ ID NO: 984005 - DNA, 33 bp, Homo sapien
ttttggggtgaggatacgacagtataggctgaa

SEQ ID NO: 984006 - DNA, 33 bp, Homo sapien
ttttggggtgaggatatgacagtataggctgaa

SEQ ID NO: 984007 - DNA, 33 bp, Homo sapien
cacactggaaagagaaagtaaactccatgagct

SEQ ID NO: 984008 - DNA, 33 bp, Homo sapien
cacactggaaagagaacgtaaactccatgagct

SEQ ID NO: 984009 - DNA, 33 bp, Homo sapien
ctctctcttccaaaaacacatcatatctataac

SEQ ID NO: 984010 - DNA, 33 bp, Homo sapien
ctctctcttccaaaaatacatcatatctataac

SEQ ID NO: 984011 - DNA, 33 bp, Homo sapien
ataaatatatataagcaagaatacggtactcca

SEQ ID NO: 984012 - DNA, 33 bp, Homo sapien
ataaatatatataagcgagaatacggtactcca

SEQ ID NO: 984013 - DNA, 33 bp, Homo sapien
acaagaaactaatataacatgccaaaataaaat

SEQ ID NO: 984014 - DNA, 33 bp, Homo sapien
acaagaaactaatatagcatgccaaaataaaat

SEQ ID NO: 984015 - DNA, 33 bp, Homo sapien
agacccttatacgtagacacctgtttttcctga

SEQ ID NO: 984016 - DNA, 33 bp, Homo sapien
agacccttatacgtaggcacctgtttttcctga

SEQ ID NO: 984017 - DNA, 33 bp, Homo sapien
catgctagaaccttgaagtaggtactcttattt

SEQ ID NO: 984018 - DNA, 33 bp, Homo sapien
catgctagaaccttgaggtaggtactcttattt

SEQ ID NO: 984019 - DNA, 33 bp, Homo sapien
ttttgatttctcctagccagaaagtgttgattg

SEQ ID NO: 984020 - DNA, 33 bp, Homo sapien
ttttgatttctcctagtcagaaagtgttgattg

SEQ ID NO: 984021 - DNA, 33 bp, Homo sapien
cagcttctgtaccttcaaggttttggaactcgg

SEQ ID NO: 984022 - DNA, 33 bp, Homo sapien
cagcttctgtaccttcgaggttttggaactcgg

SEQ ID NO: 984023 - DNA, 33 bp, Homo sapien
gagaagcacatatcaaccttataggcagaatct

SEQ ID NO: 984024 - DNA, 33 bp, Homo sapien
gagaagcacatatcaagcttataggcagaatct

SEQ ID NO: 984025 - DNA, 33 bp, Homo sapien
aagttgtagctgcagacgtggttagtgtgacac

SEQ ID NO: 984026 - DNA, 33 bp, Homo sapien
aagttgtagctgcagaggtggttagtgtgacac

SEQ ID NO: 984027 - DNA, 33 bp, Homo sapien
atggaatgaagtacagacataggcaacagcacg

SEQ ID NO: 984028 - DNA, 33 bp, Homo sapien
atggaatgaagtacaggcataggcaacagcacg

SEQ ID NO: 984029 - DNA, 33 bp, Homo sapien
taggctggtttggaaacgctgtccttgctgttg

SEQ ID NO: 984030 - DNA, 33 bp, Homo sapien
taggctggtttggaaatgctgtccttgctgttg

SEQ ID NO: 984031 - DNA, 33 bp, Homo sapien
gaaggaattaaaatgcggatggtttgaaaggga

SEQ ID NO: 984032 - DNA, 33 bp, Homo sapien
gaaggaattaaaatgctgatggtttgaaaggga

SEQ ID NO: 984033 - DNA, 33 bp, Homo sapien
tcataactatgaaagacgggtctccaagtatag

SEQ ID NO: 984034 - DNA, 33 bp, Homo sapien
tcataactatgaaagatgggtctccaagtatag

SEQ ID NO: 984035 - DNA, 33 bp, Homo sapien
tttggtagatacaaataagataaaatccattct

SEQ ID NO: 984036 - DNA, 33 bp, Homo sapien
tttggtagatacaaatcagataaaatccattct

SEQ ID NO: 984037 - DNA, 33 bp, Homo sapien
tcatgtttatgataacagcttttaggaattaga

SEQ ID NO: 984038 - DNA, 33 bp, Homo sapien
tcatgtttatgataactgcttttaggaattaga

SEQ ID NO: 984039 - DNA, 33 bp, Homo sapien
cataatacaatcccaacttctaaaaactgaaga

SEQ ID NO: 984040 - DNA, 33 bp, Homo sapien
cataatacaatcccaagttctaaaaactgaaga

SEQ ID NO: 984041 - DNA, 33 bp, Homo sapien
ccaagattagttacccagaaagtattaattagc

SEQ ID NO: 984042 - DNA, 33 bp, Homo sapien
ccaagattagttacccggaaagtattaattagc

SEQ ID NO: 984043 - DNA, 33 bp, Homo sapien
tggggagaatctttaagatcattaaccaacata

SEQ ID NO: 984044 - DNA, 33 bp, Homo sapien
tggggagaatctttaatatcattaaccaacata

SEQ ID NO: 984045 - DNA, 33 bp, Homo sapien
tgcatacaactgaactaaagtctcatttcttac

SEQ ID NO: 984046 - DNA, 33 bp, Homo sapien
tgcatacaactgaactcaagtctcatttcttac

SEQ ID NO: 984047 - DNA, 33 bp, Homo sapien
tgacgacaacgaaaaaaggatgtccgcttatga

SEQ ID NO: 984048 - DNA, 33 bp, Homo sapien
tgacgacaacgaaaaacggatgtccgcttatga

SEQ ID NO: 984049 - DNA, 33 bp, Homo sapien
ctttctttgaactcctaaagtattttcagtcca

SEQ ID NO: 984050 - DNA, 33 bp, Homo sapien
ctttctttgaactcctgaagtattttcagtcca

SEQ ID NO: 984051 - DNA, 33 bp, Homo sapien
ttctaaaacatagtcaaatttgggctccagatt

SEQ ID NO: 984052 - DNA, 33 bp, Homo sapien
ttctaaaacatagtcacatttgggctccagatt

SEQ ID NO: 984053 - DNA, 33 bp, Homo sapien
ttgagttgggtagcagaaaaataggcaggagag

SEQ ID NO: 984054 - DNA, 33 bp, Homo sapien
ttgagttgggtagcagcaaaataggcaggagag

SEQ ID NO: 984055 - DNA, 33 bp, Homo sapien
caaccagcggaatgacacagaagccgaagggaa

SEQ ID NO: 984056 - DNA, 33 bp, Homo sapien
caaccagcggaatgacgcagaagccgaagggaa

SEQ ID NO: 984057 - DNA, 33 bp, Homo sapien
ctatcaccataaaatcccaacttgctgaaaatg

SEQ ID NO: 984058 - DNA, 33 bp, Homo sapien
ctatcaccataaaatctcaacttgctgaaaatg

SEQ ID NO: 984059 - DNA, 33 bp, Homo sapien
tctgagtccattgggcagagaagtggctagcag

SEQ ID NO: 984060 - DNA, 33 bp, Homo sapien
tctgagtccattgggcggagaagtggctagcag

SEQ ID NO: 984061 - DNA, 33 bp, Homo sapien
aattcaactactgatacaaggattcagttaatc

SEQ ID NO: 984062 - DNA, 33 bp, Homo sapien
aattcaactactgatataaggattcagttaatc

SEQ ID NO: 984063 - DNA, 33 bp, Homo sapien
tgtaaaattaagatgacaagatggtaagtatga

SEQ ID NO: 984064 - DNA, 33 bp, Homo sapien
tgtaaaattaagatgataagatggtaagtatga

SEQ ID NO: 984065 - DNA, 33 bp, Homo sapien
atgattggaagaattaaggaagagaaagtcact

SEQ ID NO: 984066 - DNA, 33 bp, Homo sapien
atgattggaagaattagggaagagaaagtcact

SEQ ID NO: 984067 - DNA, 33 bp, Homo sapien
tgtcttctggtttgggaaatgtttccatgaact

SEQ ID NO: 984068 - DNA, 33 bp, Homo sapien
tgtcttctggtttgggtaatgtttccatgaact

SEQ ID NO: 984069 - DNA, 33 bp, Homo sapien
acacacacatacacacagagagaagtaacagac

SEQ ID NO: 984070 - DNA, 33 bp, Homo sapien
acacacacatacacacggagagaagtaacagac

SEQ ID NO: 984071 - DNA, 33 bp, Homo sapien
tacacagggcctagagaagaagccagtaaaatt

SEQ ID NO: 984072 - DNA, 33 bp, Homo sapien
tacacagggcctagagcagaagccagtaaaatt

SEQ ID NO: 984073 - DNA, 33 bp, Homo sapien
atcttcggccaatttaagatgcaaattaacact

SEQ ID NO: 984074 - DNA, 33 bp, Homo sapien
atcttcggccaatttaggatgcaaattaacact

SEQ ID NO: 984075 - DNA, 33 bp, Homo sapien
tagagtatgttcaaataatagctactctatagg

SEQ ID NO: 984076 - DNA, 33 bp, Homo sapien
tagagtatgttcaaatcatagctactctatagg

SEQ ID NO: 984077 - DNA, 33 bp, Homo sapien
ttattactgacagaacaaggctgaaagatgtga

SEQ ID NO: 984078 - DNA, 33 bp, Homo sapien
ttattactgacagaacgaggctgaaagatgtga

SEQ ID NO: 984079 - DNA, 33 bp, Homo sapien
ctctgaaatctagccaatagagggcagtcaaag

SEQ ID NO: 984080 - DNA, 33 bp, Homo sapien
ctctgaaatctagccagtagagggcagtcaaag

SEQ ID NO: 984081 - DNA, 33 bp, Homo sapien
aacctagaaataaagccaggtattcacagccaa

SEQ ID NO: 984082 - DNA, 33 bp, Homo sapien
aacctagaaataaagctaggtattcacagccaa

SEQ ID NO: 984083 - DNA, 33 bp, Homo sapien
acaggtaaataatgaaatggcaattatggtcaa

SEQ ID NO: 984084 - DNA, 33 bp, Homo sapien
acaggtaaataatgaattggcaattatggtcaa

SEQ ID NO: 984085 - DNA, 33 bp, Homo sapien
aagaaaaggagagggggaaagaacgtctgagtg

SEQ ID NO: 984086 - DNA, 33 bp, Homo sapien
aagaaaaggagaggggtaaagaacgtctgagtg

SEQ ID NO: 984087 - DNA, 33 bp, Homo sapien
gaactgaggaacaaagaacagtaacttgcggga

SEQ ID NO: 984088 - DNA, 33 bp, Homo sapien
gaactgaggaacaaagtacagtaacttgcggga

SEQ ID NO: 984089 - DNA, 33 bp, Homo sapien
atggcgttgctaaccaccttgttgttcatgtca

SEQ ID NO: 984090 - DNA, 33 bp, Homo sapien
atggcgttgctaaccatcttgttgttcatgtca

SEQ ID NO: 984091 - DNA, 33 bp, Homo sapien
aataaaataaacctaccggaatgactagattgg

SEQ ID NO: 984092 - DNA, 33 bp, Homo sapien
aataaaataaacctactggaatgactagattgg

SEQ ID NO: 984093 - DNA, 33 bp, Homo sapien
cagagtaatacatggccctttctttcttcttct

SEQ ID NO: 984094 - DNA, 33 bp, Homo sapien
cagagtaatacatggctctttctttcttcttct

SEQ ID NO: 984095 - DNA, 33 bp, Homo sapien
ttcttgtatctccccccgcaactcccagtgaga

SEQ ID NO: 984096 - DNA, 33 bp, Homo sapien
ttcttgtatctccccctgcaactcccagtgaga

SEQ ID NO: 984097 - DNA, 33 bp, Homo sapien
tgattctaaaatgcaaagcttggttaggatttt

SEQ ID NO: 984098 - DNA, 33 bp, Homo sapien
tgattctaaaatgcaaggcttggttaggatttt

SEQ ID NO: 984099 - DNA, 33 bp, Homo sapien
agaacttgggcttttacgatgtattatttttct

SEQ ID NO: 984100 - DNA, 33 bp, Homo sapien
agaacttgggcttttatgatgtattatttttct

SEQ ID NO: 984101 - DNA, 33 bp, Homo sapien
ctgaccaggtaagcaaagaatgaagagggggac

SEQ ID NO: 984102 - DNA, 33 bp, Homo sapien
ctgaccaggtaagcaaggaatgaagagggggac

SEQ ID NO: 984103 - DNA, 33 bp, Homo sapien
cctcttctttcaactcactgtctacctcctggc

SEQ ID NO: 984104 - DNA, 33 bp, Homo sapien
cctcttctttcaactcgctgtctacctcctggc

SEQ ID NO: 984105 - DNA, 33 bp, Homo sapien
aatcctgactatacagaatcctacaggacatct

SEQ ID NO: 984106 - DNA, 33 bp, Homo sapien
aatcctgactatacagcatcctacaggacatct

SEQ ID NO: 984107 - DNA, 33 bp, Homo sapien
tgccagctagtggttaagaccttacaaggttgg

SEQ ID NO: 984108 - DNA, 33 bp, Homo sapien
tgccagctagtggttacgaccttacaaggttgg

SEQ ID NO: 984109 - DNA, 33 bp, Homo sapien
aatgcaatggttgctacgtccccttgtgaaagc

SEQ ID NO: 984110 - DNA, 33 bp, Homo sapien
aatgcaatggttgctatgtccccttgtgaaagc

SEQ ID NO: 984111 - DNA, 33 bp, Homo sapien
aatttgaagggatgtccactcctacactcatat

SEQ ID NO: 984112 - DNA, 33 bp, Homo sapien
aatttgaagggatgtctactcctacactcatat

SEQ ID NO: 984113 - DNA, 33 bp, Homo sapien
tgtttcaaaatagtcaaaactatacaatggtta

SEQ ID NO: 984114 - DNA, 33 bp, Homo sapien
tgtttcaaaatagtcacaactatacaatggtta

SEQ ID NO: 984115 - DNA, 33 bp, Homo sapien
tagcaacttttagacactgaagttaatccaaat

SEQ ID NO: 984116 - DNA, 33 bp, Homo sapien
tagcaacttttagacattgaagttaatccaaat

SEQ ID NO: 984117 - DNA, 33 bp, Homo sapien
tcacaatatggattcccgagctacattttttga

SEQ ID NO: 984118 - DNA, 33 bp, Homo sapien
tcacaatatggattcctgagctacattttttga

SEQ ID NO: 984119 - DNA, 33 bp, Homo sapien
ggtaactcggcctctacacaaattgtgaggtat

SEQ ID NO: 984120 - DNA, 33 bp, Homo sapien
ggtaactcggcctctatacaaattgtgaggtat

SEQ ID NO: 984121 - DNA, 33 bp, Homo sapien
gaatattcgaaggagagacttagggacagtcaa

SEQ ID NO: 984122 - DNA, 33 bp, Homo sapien
gaatattcgaaggagatacttagggacagtcaa

SEQ ID NO: 984123 - DNA, 33 bp, Homo sapien
aatgtgtgatgaataaagattttgatggatttc

SEQ ID NO: 984124 - DNA, 33 bp, Homo sapien
aatgtgtgatgaataaggattttgatggatttc

SEQ ID NO: 984125 - DNA, 33 bp, Homo sapien
atacagccaaacaaaactgcaataggaggtggt

SEQ ID NO: 984126 - DNA, 33 bp, Homo sapien
atacagccaaacaaaattgcaataggaggtggt

SEQ ID NO: 984127 - DNA, 33 bp, Homo sapien
atatgtccacaggagaaatgaatctgctatagc

SEQ ID NO: 984128 - DNA, 33 bp, Homo sapien
atatgtccacaggagagatgaatctgctatagc

SEQ ID NO: 984129 - DNA, 33 bp, Homo sapien
gggtagttgacaaagactctgaagtgaccaaaa

SEQ ID NO: 984130 - DNA, 33 bp, Homo sapien
gggtagttgacaaagattctgaagtgaccaaaa

SEQ ID NO: 984131 - DNA, 33 bp, Homo sapien
aaagcttttagcacaaaatacaggagaatacag

SEQ ID NO: 984132 - DNA, 33 bp, Homo sapien
aaagcttttagcacaatatacaggagaatacag

SEQ ID NO: 984133 - DNA, 33 bp, Homo sapien
caagctttaaatacacaaactcgcataacagca

SEQ ID NO: 984134 - DNA, 33 bp, Homo sapien
caagctttaaatacacgaactcgcataacagca

SEQ ID NO: 984135 - DNA, 33 bp, Homo sapien
gatgttgtacatgggcacatattaatggtaatt

SEQ ID NO: 984136 - DNA, 33 bp, Homo sapien
gatgttgtacatgggcgcatattaatggtaatt

SEQ ID NO: 984137 - DNA, 33 bp, Homo sapien
atcataaaaagactaacagccatgatgcaactt

SEQ ID NO: 984138 - DNA, 33 bp, Homo sapien
atcataaaaagactaatagccatgatgcaactt

SEQ ID NO: 984139 - DNA, 33 bp, Homo sapien
atactactttatggaaactgaagagctctagtg

SEQ ID NO: 984140 - DNA, 33 bp, Homo sapien
atactactttatggaagctgaagagctctagtg

SEQ ID NO: 984141 - DNA, 33 bp, Homo sapien
gtatttgagagcttgcaaagaagacatttaaac

SEQ ID NO: 984142 - DNA, 33 bp, Homo sapien
gtatttgagagcttgcgaagaagacatttaaac

SEQ ID NO: 984143 - DNA, 33 bp, Homo sapien
ccttggcattcttataccaccatttgaaaggta

SEQ ID NO: 984144 - DNA, 33 bp, Homo sapien
ccttggcattcttatatcaccatttgaaaggta

SEQ ID NO: 984145 - DNA, 33 bp, Homo sapien
aaggtattttaccaacactcagaagatataaaa

SEQ ID NO: 984146 - DNA, 33 bp, Homo sapien
aaggtattttaccaactctcagaagatataaaa

SEQ ID NO: 984147 - DNA, 33 bp, Homo sapien
gaaattgatgtattacacggatgattaaaaaaa

SEQ ID NO: 984148 - DNA, 33 bp, Homo sapien
gaaattgatgtattacccggatgattaaaaaaa

SEQ ID NO: 984149 - DNA, 33 bp, Homo sapien
agctaatgcaacttctaaaatgttaccaaattt

SEQ ID NO: 984150 - DNA, 33 bp, Homo sapien
agctaatgcaacttctgaaatgttaccaaattt

SEQ ID NO: 984151 - DNA, 33 bp, Homo sapien
accgctctacttctaccgtaatataaaagggtg

SEQ ID NO: 984152 - DNA, 33 bp, Homo sapien
accgctctacttctactgtaatataaaagggtg

SEQ ID NO: 984153 - DNA, 33 bp, Homo sapien
agtcttcagattttccaaagagtgtgttataaa

SEQ ID NO: 984154 - DNA, 33 bp, Homo sapien
agtcttcagattttccgaagagtgtgttataaa

SEQ ID NO: 984155 - DNA, 33 bp, Homo sapien
agaaactgaacctccacgagtttagcgtctgcc

SEQ ID NO: 984156 - DNA, 33 bp, Homo sapien
agaaactgaacctccatgagtttagcgtctgcc

SEQ ID NO: 984157 - DNA, 33 bp, Homo sapien
taaaggtgtttcctgccaggctaagaagtcttg

SEQ ID NO: 984158 - DNA, 33 bp, Homo sapien
taaaggtgtttcctgctaggctaagaagtcttg

SEQ ID NO: 984159 - DNA, 33 bp, Homo sapien
ttaccactgtgttttaaaattgagaatggccac

SEQ ID NO: 984160 - DNA, 33 bp, Homo sapien
ttaccactgtgttttagaattgagaatggccac

SEQ ID NO: 984161 - DNA, 33 bp, Homo sapien
ccataccttagaccgaaccaatttgaaatctaa

SEQ ID NO: 984162 - DNA, 33 bp, Homo sapien
ccataccttagaccgacccaatttgaaatctaa

SEQ ID NO: 984163 - DNA, 33 bp, Homo sapien
tgcagcgcaccataatcaggcctgtgaatagcc

SEQ ID NO: 984164 - DNA, 33 bp, Homo sapien
tgcagcgcaccataattaggcctgtgaatagcc

SEQ ID NO: 984165 - DNA, 33 bp, Homo sapien
ttgctcgctctctaagacacttctgaactcttc

SEQ ID NO: 984166 - DNA, 33 bp, Homo sapien
ttgctcgctctctaagccacttctgaactcttc

SEQ ID NO: 984167 - DNA, 33 bp, Homo sapien
cattctgtattgaaaaatggaggcttaaatgac

SEQ ID NO: 984168 - DNA, 33 bp, Homo sapien
cattctgtattgaaaactggaggcttaaatgac

SEQ ID NO: 984169 - DNA, 33 bp, Homo sapien
tacctttccaaaaacacagttagtggaaaagct

SEQ ID NO: 984170 - DNA, 33 bp, Homo sapien
tacctttccaaaaacatagttagtggaaaagct

SEQ ID NO: 984171 - DNA, 33 bp, Homo sapien
tgtaaagttcagccaaattgccatgggtatctc

SEQ ID NO: 984172 - DNA, 33 bp, Homo sapien
tgtaaagttcagccaagttgccatgggtatctc

SEQ ID NO: 984173 - DNA, 33 bp, Homo sapien
aatacctaagaagcacacggcatagtacttagc

SEQ ID NO: 984174 - DNA, 33 bp, Homo sapien
aatacctaagaagcacgcggcatagtacttagc

SEQ ID NO: 984175 - DNA, 33 bp, Homo sapien
cagaactgggatataacacattgtgaaaggaca

SEQ ID NO: 984176 - DNA, 33 bp, Homo sapien
cagaactgggatataagacattgtgaaaggaca

SEQ ID NO: 984177 - DNA, 33 bp, Homo sapien
tctggcacacctatgaaggcataataggcttaa

SEQ ID NO: 984178 - DNA, 33 bp, Homo sapien
tctggcacacctatgagggcataataggcttaa

SEQ ID NO: 984179 - DNA, 33 bp, Homo sapien
aggaagcttacaaaaaccctagccctacctctg

SEQ ID NO: 984180 - DNA, 33 bp, Homo sapien
aggaagcttacaaaaatcctagccctacctctg

SEQ ID NO: 984181 - DNA, 33 bp, Homo sapien
ctcttgctgaaagatactaagagcacttataaa

SEQ ID NO: 984182 - DNA, 33 bp, Homo sapien
ctcttgctgaaagatattaagagcacttataaa

SEQ ID NO: 984183 - DNA, 33 bp, Homo sapien
cagatatccctttacaaatcccaagtttctggc

SEQ ID NO: 984184 - DNA, 33 bp, Homo sapien
cagatatccctttacacatcccaagtttctggc

SEQ ID NO: 984185 - DNA, 33 bp, Homo sapien
ccatccacatcccaaagcactgacagtctaact

SEQ ID NO: 984186 - DNA, 33 bp, Homo sapien
ccatccacatcccaaatcactgacagtctaact

SEQ ID NO: 984187 - DNA, 33 bp, Homo sapien
aatacaattttggaaacgtagaattttggaaca

SEQ ID NO: 984188 - DNA, 33 bp, Homo sapien
aatacaattttggaaatgtagaattttggaaca

SEQ ID NO: 984189 - DNA, 33 bp, Homo sapien
ggaagggagaagaacaagttggaatgcagagaa

SEQ ID NO: 984190 - DNA, 33 bp, Homo sapien
ggaagggagaagaacaggttggaatgcagagaa

SEQ ID NO: 984191 - DNA, 33 bp, Homo sapien
gcttttttccagatcccaaaacccttccattca

SEQ ID NO: 984192 - DNA, 33 bp, Homo sapien
gcttttttccagatccgaaaacccttccattca

SEQ ID NO: 984193 - DNA, 33 bp, Homo sapien
gttataaggggacaaaagacggtagcttgtatt

SEQ ID NO: 984194 - DNA, 33 bp, Homo sapien
gttataaggggacaaaggacggtagcttgtatt

SEQ ID NO: 984195 - DNA, 33 bp, Homo sapien
agtcaacctaaaataaaattggcaacagttaaa

SEQ ID NO: 984196 - DNA, 33 bp, Homo sapien
agtcaacctaaaataagattggcaacagttaaa

SEQ ID NO: 984197 - DNA, 33 bp, Homo sapien
aataaaataaaatgaacgcaatcctctttcatc

SEQ ID NO: 984198 - DNA, 33 bp, Homo sapien
aataaaataaaatgaaggcaatcctctttcatc

SEQ ID NO: 984199 - DNA, 33 bp, Homo sapien
taaacacagattgaaactctcccaaaactactc

SEQ ID NO: 984200 - DNA, 33 bp, Homo sapien
taaacacagattgaaattctcccaaaactactc

SEQ ID NO: 984201 - DNA, 33 bp, Homo sapien
ccatgttttcaaattacgtagttgaaccatgtc

SEQ ID NO: 984202 - DNA, 33 bp, Homo sapien
ccatgttttcaaattatgtagttgaaccatgtc

SEQ ID NO: 984203 - DNA, 33 bp, Homo sapien
tctaaatgtgctgatacggaccaacctcaagat

SEQ ID NO: 984204 - DNA, 33 bp, Homo sapien
tctaaatgtgctgatatggaccaacctcaagat

SEQ ID NO: 984205 - DNA, 33 bp, Homo sapien
tagatcacctttggggaaatcttggcactaatg

SEQ ID NO: 984206 - DNA, 33 bp, Homo sapien
tagatcacctttgggggaatcttggcactaatg

SEQ ID NO: 984207 - DNA, 33 bp, Homo sapien
agtgagtcttgacaaccaaaatggtgtgaagtg

SEQ ID NO: 984208 - DNA, 33 bp, Homo sapien
agtgagtcttgacaactaaaatggtgtgaagtg

SEQ ID NO: 984209 - DNA, 33 bp, Homo sapien
aaaaaaagatttaaaccattgcaaaaggaatat

SEQ ID NO: 984210 - DNA, 33 bp, Homo sapien
aaaaaaagatttaaactattgcaaaaggaatat

SEQ ID NO: 984211 - DNA, 33 bp, Homo sapien
ctaaggcaatgaggacactagagtctgcttttg

SEQ ID NO: 984212 - DNA, 33 bp, Homo sapien
ctaaggcaatgaggaccctagagtctgcttttg

SEQ ID NO: 984213 - DNA, 33 bp, Homo sapien
catgaaacaagcttcaccaagtcacaaaatacc

SEQ ID NO: 984214 - DNA, 33 bp, Homo sapien
catgaaacaagcttcagcaagtcacaaaatacc

SEQ ID NO: 984215 - DNA, 33 bp, Homo sapien
aatccgatgaaacaaaatctccatgaggaagtt

SEQ ID NO: 984216 - DNA, 33 bp, Homo sapien
aatccgatgaaacaaagtctccatgaggaagtt

SEQ ID NO: 984217 - DNA, 33 bp, Homo sapien
ccttgctaactagtagacaccaatggtcacaaa

SEQ ID NO: 984218 - DNA, 33 bp, Homo sapien
ccttgctaactagtaggcaccaatggtcacaaa

SEQ ID NO: 984219 - DNA, 33 bp, Homo sapien
catgccaacatcagcaccaaagatacaaaggta

SEQ ID NO: 984220 - DNA, 33 bp, Homo sapien
catgccaacatcagcagcaaagatacaaaggta

SEQ ID NO: 984221 - DNA, 33 bp, Homo sapien
tttaggcccttgtgctgaaactgtgtttcttac

SEQ ID NO: 984222 - DNA, 33 bp, Homo sapien
tttaggcccttgtgcttaaactgtgtttcttac

SEQ ID NO: 984223 - DNA, 33 bp, Homo sapien
aggaaacacagggaaactgatcctataatgtta

SEQ ID NO: 984224 - DNA, 33 bp, Homo sapien
aggaaacacagggaaattgatcctataatgtta

SEQ ID NO: 984225 - DNA, 33 bp, Homo sapien
tgtgcctattgacttgcactatgcacgacctat

SEQ ID NO: 984226 - DNA, 33 bp, Homo sapien
tgtgcctattgacttgtactatgcacgacctat

SEQ ID NO: 984227 - DNA, 33 bp, Homo sapien
ctggtagacctttttgcatttcacatacatagg

SEQ ID NO: 984228 - DNA, 33 bp, Homo sapien
ctggtagacctttttggatttcacatacatagg

SEQ ID NO: 984229 - DNA, 33 bp, Homo sapien
aatttagggaactgataagggttgtatcaactc

SEQ ID NO: 984230 - DNA, 33 bp, Homo sapien
aatttagggaactgattagggttgtatcaactc

SEQ ID NO: 984231 - DNA, 33 bp, Homo sapien
ttaattacagttttgaagttagtgatgtttgtc

SEQ ID NO: 984232 - DNA, 33 bp, Homo sapien
ttaattacagttttgatgttagtgatgtttgtc

SEQ ID NO: 984233 - DNA, 33 bp, Homo sapien
taatgtctactgaagacgctctaatttataaac

SEQ ID NO: 984234 - DNA, 33 bp, Homo sapien
taatgtctactgaagatgctctaatttataaac

SEQ ID NO: 984235 - DNA, 33 bp, Homo sapien
cagatgtgctaaagcaatagaagcaagtaaggg

SEQ ID NO: 984236 - DNA, 33 bp, Homo sapien
cagatgtgctaaagcagtagaagcaagtaaggg

SEQ ID NO: 984237 - DNA, 33 bp, Homo sapien
agtacatttgaaaggaagaatctcagtatagac

SEQ ID NO: 984238 - DNA, 33 bp, Homo sapien
agtacatttgaaaggatgaatctcagtatagac

SEQ ID NO: 984239 - DNA, 33 bp, Homo sapien
aactgtggaatcctaacggtatgtgaaatattt

SEQ ID NO: 984240 - DNA, 33 bp, Homo sapien
aactgtggaatcctaatggtatgtgaaatattt

SEQ ID NO: 984241 - DNA, 33 bp, Homo sapien
aagaaatgatgcgaaaatccctcccgcactgac

SEQ ID NO: 984242 - DNA, 33 bp, Homo sapien
aagaaatgatgcgaaagtccctcccgcactgac

SEQ ID NO: 984243 - DNA, 33 bp, Homo sapien
tattcttccctgtatgcaacttcctggaaagca

SEQ ID NO: 984244 - DNA, 33 bp, Homo sapien
tattcttccctgtatgtaacttcctggaaagca

SEQ ID NO: 984245 - DNA, 33 bp, Homo sapien
tccttctcttaccacaactctcagctaacttgt

SEQ ID NO: 984246 - DNA, 33 bp, Homo sapien
tccttctcttaccacagctctcagctaacttgt

SEQ ID NO: 984247 - DNA, 33 bp, Homo sapien
cccaaacaggaattgactatcagtggaggtaga

SEQ ID NO: 984248 - DNA, 33 bp, Homo sapien
cccaaacaggaattgattatcagtggaggtaga

SEQ ID NO: 984249 - DNA, 33 bp, Homo sapien
actctctactggcaacaaacttttatctcagag

SEQ ID NO: 984250 - DNA, 33 bp, Homo sapien
actctctactggcaacgaacttttatctcagag

SEQ ID NO: 984251 - DNA, 33 bp, Homo sapien
attaactgagcatctaccatgcactaagatata

SEQ ID NO: 984252 - DNA, 33 bp, Homo sapien
attaactgagcatctatcatgcactaagatata

SEQ ID NO: 984253 - DNA, 33 bp, Homo sapien
caaaaggaacattccactccagtctatcctaaa

SEQ ID NO: 984254 - DNA, 33 bp, Homo sapien
caaaaggaacattccagtccagtctatcctaaa

SEQ ID NO: 984255 - DNA, 33 bp, Homo sapien
atcactgtgttaaaagcctgtttcattatttaa

SEQ ID NO: 984256 - DNA, 33 bp, Homo sapien
atcactgtgttaaaaggctgtttcattatttaa

SEQ ID NO: 984257 - DNA, 33 bp, Homo sapien
gacaatagggccttaaccatgtcgatatgtgct

SEQ ID NO: 984258 - DNA, 33 bp, Homo sapien
gacaatagggccttaatcatgtcgatatgtgct

SEQ ID NO: 984259 - DNA, 33 bp, Homo sapien
tattggtttatttttgcagcaagagcaatggga

SEQ ID NO: 984260 - DNA, 33 bp, Homo sapien
tattggtttatttttgtagcaagagcaatggga

SEQ ID NO: 984261 - DNA, 33 bp, Homo sapien
tgtatgtaagtttgtggactacattcaccatta

SEQ ID NO: 984262 - DNA, 33 bp, Homo sapien
tgtatgtaagtttgtgtactacattcaccatta

SEQ ID NO: 984263 - DNA, 33 bp, Homo sapien
aaagtatctttttgtaagtttgtgagttagaca

SEQ ID NO: 984264 - DNA, 33 bp, Homo sapien
aaagtatctttttgtacgtttgtgagttagaca

SEQ ID NO: 984265 - DNA, 33 bp, Homo sapien
ggcagtacagaaataccgaaacttttggacctt

SEQ ID NO: 984266 - DNA, 33 bp, Homo sapien
ggcagtacagaaatactgaaacttttggacctt

SEQ ID NO: 984267 - DNA, 33 bp, Homo sapien
gacagctataaataacaggcattaacaccatgc

SEQ ID NO: 984268 - DNA, 33 bp, Homo sapien
gacagctataaataactggcattaacaccatgc

SEQ ID NO: 984269 - DNA, 33 bp, Homo sapien
ctttattttgccaataacttaaaccatatggaa

SEQ ID NO: 984270 - DNA, 33 bp, Homo sapien
ctttattttgccaatatcttaaaccatatggaa

SEQ ID NO: 984271 - DNA, 33 bp, Homo sapien
atgcaacccagtccagaaaaaatgagacctaag

SEQ ID NO: 984272 - DNA, 33 bp, Homo sapien
atgcaacccagtccaggaaaaatgagacctaag

SEQ ID NO: 984273 - DNA, 33 bp, Homo sapien
caattttgtttgggtagtaatctcccaacccca

SEQ ID NO: 984274 - DNA, 33 bp, Homo sapien
caattttgtttgggtattaatctcccaacccca

SEQ ID NO: 984275 - DNA, 33 bp, Homo sapien
taggtaatattggtaacgcttgaaactaaggtc

SEQ ID NO: 984276 - DNA, 33 bp, Homo sapien
taggtaatattggtaatgcttgaaactaaggtc

SEQ ID NO: 984277 - DNA, 33 bp, Homo sapien
taagtaggagaaatcaaatacaaaagctacaaa

SEQ ID NO: 984278 - DNA, 33 bp, Homo sapien
taagtaggagaaatcagatacaaaagctacaaa

SEQ ID NO: 984279 - DNA, 33 bp, Homo sapien
attttctgttcttccccagatgcccattcctat

SEQ ID NO: 984280 - DNA, 33 bp, Homo sapien
attttctgttcttcccgagatgcccattcctat

SEQ ID NO: 984281 - DNA, 33 bp, Homo sapien
aggtataattcttcttcaaagtctgcagtgcac

SEQ ID NO: 984282 - DNA, 33 bp, Homo sapien
aggtataattcttcttgaaagtctgcagtgcac

SEQ ID NO: 984283 - DNA, 33 bp, Homo sapien
gagttacagaaggtaaaattgatgtttatgttt

SEQ ID NO: 984284 - DNA, 33 bp, Homo sapien
gagttacagaaggtaagattgatgtttatgttt

SEQ ID NO: 984285 - DNA, 33 bp, Homo sapien
ctacgatctaaacaacggatctccatatgaatc

SEQ ID NO: 984286 - DNA, 33 bp, Homo sapien
ctacgatctaaacaactgatctccatatgaatc

SEQ ID NO: 984287 - DNA, 33 bp, Homo sapien
tggccaatgagaaaaaactacgtaactctccac

SEQ ID NO: 984288 - DNA, 33 bp, Homo sapien
tggccaatgagaaaaagctacgtaactctccac

SEQ ID NO: 984289 - DNA, 33 bp, Homo sapien
aatgttaaagatgataaaaatagtccactgaag

SEQ ID NO: 984290 - DNA, 33 bp, Homo sapien
aatgttaaagatgatacaaatagtccactgaag

SEQ ID NO: 984291 - DNA, 33 bp, Homo sapien
gaacaagtatccataactgactcatcaacttga

SEQ ID NO: 984292 - DNA, 33 bp, Homo sapien
gaacaagtatccataattgactcatcaacttga

SEQ ID NO: 984293 - DNA, 33 bp, Homo sapien
tggatacttgttcaaaaaaattggtattccatc

SEQ ID NO: 984294 - DNA, 33 bp, Homo sapien
tggatacttgttcaaagaaattggtattccatc

SEQ ID NO: 984295 - DNA, 33 bp, Homo sapien
tggaagacttcggtaacgattataaatgcattt

SEQ ID NO: 984296 - DNA, 33 bp, Homo sapien
tggaagacttcggtaatgattataaatgcattt

SEQ ID NO: 984297 - DNA, 33 bp, Homo sapien
tgagatatcacagcaacaaggatccaactctaa

SEQ ID NO: 984298 - DNA, 33 bp, Homo sapien
tgagatatcacagcaataaggatccaactctaa

SEQ ID NO: 984299 - DNA, 33 bp, Homo sapien
aggacctgagctcaggaatagaggaacagactt

SEQ ID NO: 984300 - DNA, 33 bp, Homo sapien
aggacctgagctcagggatagaggaacagactt

SEQ ID NO: 984301 - DNA, 33 bp, Homo sapien
tttttcttagttcttcgaaatctgaagtatatg

SEQ ID NO: 984302 - DNA, 33 bp, Homo sapien
tttttcttagttcttctaaatctgaagtatatg

SEQ ID NO: 984303 - DNA, 33 bp, Homo sapien
tatctgtttcagagtacagcagagaacttgaaa

SEQ ID NO: 984304 - DNA, 33 bp, Homo sapien
tatctgtttcagagtatagcagagaacttgaaa

SEQ ID NO: 984305 - DNA, 33 bp, Homo sapien
ctctttttggtcttaaagctagttagttacaaa

SEQ ID NO: 984306 - DNA, 33 bp, Homo sapien
ctctttttggtcttaaggctagttagttacaaa

SEQ ID NO: 984307 - DNA, 33 bp, Homo sapien
aactgaataatgatagaaatatgcaagacaaaa

SEQ ID NO: 984308 - DNA, 33 bp, Homo sapien
aactgaataatgataggaatatgcaagacaaaa

SEQ ID NO: 984309 - DNA, 33 bp, Homo sapien
gaaatgaaatgtgttcaaatgcctcagtcattt

SEQ ID NO: 984310 - DNA, 33 bp, Homo sapien
gaaatgaaatgtgttcgaatgcctcagtcattt

SEQ ID NO: 984311 - DNA, 33 bp, Homo sapien
aatacgtagaaaaatcacatacgaaatattata

SEQ ID NO: 984312 - DNA, 33 bp, Homo sapien
aatacgtagaaaaatcccatacgaaatattata

SEQ ID NO: 984313 - DNA, 33 bp, Homo sapien
ccaattacctaattgaagagcaaatagtagcca

SEQ ID NO: 984314 - DNA, 33 bp, Homo sapien
ccaattacctaattgacgagcaaatagtagcca

SEQ ID NO: 984315 - DNA, 33 bp, Homo sapien
ttcaaatggttcatcacgttgaaaatgcagtta

SEQ ID NO: 984316 - DNA, 33 bp, Homo sapien
ttcaaatggttcatcatgttgaaaatgcagtta

SEQ ID NO: 984317 - DNA, 33 bp, Homo sapien
caatagagagacagaacggatggttgatttcct

SEQ ID NO: 984318 - DNA, 33 bp, Homo sapien
caatagagagacagaatggatggttgatttcct

SEQ ID NO: 984319 - DNA, 33 bp, Homo sapien
ggttattattgatagaaactggtgtctgggata

SEQ ID NO: 984320 - DNA, 33 bp, Homo sapien
ggttattattgatagatactggtgtctgggata

SEQ ID NO: 984321 - DNA, 33 bp, Homo sapien
ttaaggaattttaatgccagttggcctaaccct

SEQ ID NO: 984322 - DNA, 33 bp, Homo sapien
ttaaggaattttaatgtcagttggcctaaccct

SEQ ID NO: 984323 - DNA, 33 bp, Homo sapien
cctaattatatctctcaaattagttatgcacga

SEQ ID NO: 984324 - DNA, 33 bp, Homo sapien
cctaattatatctctccaattagttatgcacga

SEQ ID NO: 984325 - DNA, 33 bp, Homo sapien
atgtatcatgtccacccgaaaaccataagaagc

SEQ ID NO: 984326 - DNA, 33 bp, Homo sapien
atgtatcatgtccacctgaaaaccataagaagc

SEQ ID NO: 984327 - DNA, 33 bp, Homo sapien
catagctaatcagagaggtacttagtgattcag

SEQ ID NO: 984328 - DNA, 33 bp, Homo sapien
catagctaatcagagatgtacttagtgattcag

SEQ ID NO: 984329 - DNA, 33 bp, Homo sapien
atataacagtaatgcccgataagtgacggaaaa

SEQ ID NO: 984330 - DNA, 33 bp, Homo sapien
atataacagtaatgcctgataagtgacggaaaa

SEQ ID NO: 984331 - DNA, 33 bp, Homo sapien
tcccctgggtgcacaactagccaggaacattct

SEQ ID NO: 984332 - DNA, 33 bp, Homo sapien
tcccctgggtgcacaattagccaggaacattct

SEQ ID NO: 984333 - DNA, 33 bp, Homo sapien
caggtatatacacacaaaaaaatgaagtcagga

SEQ ID NO: 984334 - DNA, 33 bp, Homo sapien
caggtatatacacacacaaaaatgaagtcagga

SEQ ID NO: 984335 - DNA, 33 bp, Homo sapien
aaaaactcatagcatacaaggcaataggaatgg

SEQ ID NO: 984336 - DNA, 33 bp, Homo sapien
aaaaactcatagcatataaggcaataggaatgg

SEQ ID NO: 984337 - DNA, 33 bp, Homo sapien
gatattttgcacttgaaacctacatataaaaac

SEQ ID NO: 984338 - DNA, 33 bp, Homo sapien
gatattttgcacttgacacctacatataaaaac

SEQ ID NO: 984339 - DNA, 33 bp, Homo sapien
agggcttttataggacaaggagaaaccagggtg

SEQ ID NO: 984340 - DNA, 33 bp, Homo sapien
agggcttttataggaccaggagaaaccagggtg

SEQ ID NO: 984341 - DNA, 33 bp, Homo sapien
tgttgcctattataaaaagtagaaatccaagca

SEQ ID NO: 984342 - DNA, 33 bp, Homo sapien
tgttgcctattataaagagtagaaatccaagca

SEQ ID NO: 984343 - DNA, 33 bp, Homo sapien
gactgtgctagagcaactagaggaaatcatctc

SEQ ID NO: 984344 - DNA, 33 bp, Homo sapien
gactgtgctagagcaagtagaggaaatcatctc

SEQ ID NO: 984345 - DNA, 33 bp, Homo sapien
ttatatcttaagggttgaaaagcaattgcaaat

SEQ ID NO: 984346 - DNA, 33 bp, Homo sapien
ttatatcttaagggtttaaaagcaattgcaaat

SEQ ID NO: 984347 - DNA, 33 bp, Homo sapien
acaaagtaatagatgtaaaatgccttgcattta

SEQ ID NO: 984348 - DNA, 33 bp, Homo sapien
acaaagtaatagatgttaaatgccttgcattta

SEQ ID NO: 984349 - DNA, 33 bp, Homo sapien
gacagaatatgacaaacgctctcttgatttggt

SEQ ID NO: 984350 - DNA, 33 bp, Homo sapien
gacagaatatgacaaatgctctcttgatttggt

SEQ ID NO: 984351 - DNA, 33 bp, Homo sapien
aaactatagtgtcacaaaatagatcaatggtta

SEQ ID NO: 984352 - DNA, 33 bp, Homo sapien
aaactatagtgtcacagaatagatcaatggtta

SEQ ID NO: 984353 - DNA, 33 bp, Homo sapien
aataatcagcgtttcaactatgcactttttttt

SEQ ID NO: 984354 - DNA, 33 bp, Homo sapien
aataatcagcgtttcagctatgcactttttttt

SEQ ID NO: 984355 - DNA, 33 bp, Homo sapien
ttgaagatatttacatcaatgttgatcgaggat

SEQ ID NO: 984356 - DNA, 33 bp, Homo sapien
ttgaagatatttacattaatgttgatcgaggat

SEQ ID NO: 984357 - DNA, 33 bp, Homo sapien
ttacattgggtttataagaacataactccatca

SEQ ID NO: 984358 - DNA, 33 bp, Homo sapien
ttacattgggtttataggaacataactccatca

SEQ ID NO: 984359 - DNA, 33 bp, Homo sapien
taaatatatttcaagagagcatttctcagtgtc

SEQ ID NO: 984360 - DNA, 33 bp, Homo sapien
taaatatatttcaagatagcatttctcagtgtc

SEQ ID NO: 984361 - DNA, 33 bp, Homo sapien
caggtggattgggggaagatatcagaattcaaa

SEQ ID NO: 984362 - DNA, 33 bp, Homo sapien
caggtggattgggggacgatatcagaattcaaa

SEQ ID NO: 984363 - DNA, 33 bp, Homo sapien
taatttttgactcctcaatgtatatattgtgca

SEQ ID NO: 984364 - DNA, 33 bp, Homo sapien
taatttttgactcctcgatgtatatattgtgca

SEQ ID NO: 984365 - DNA, 33 bp, Homo sapien
agcttcaaactgactcaaggtttttacagtgaa

SEQ ID NO: 984366 - DNA, 33 bp, Homo sapien
agcttcaaactgactcgaggtttttacagtgaa

SEQ ID NO: 984367 - DNA, 33 bp, Homo sapien
ttgttcaaaacgtaaaaaagtcatttatgtgta

SEQ ID NO: 984368 - DNA, 33 bp, Homo sapien
ttgttcaaaacgtaaagaagtcatttatgtgta

SEQ ID NO: 984369 - DNA, 33 bp, Homo sapien
tattatcattggtacagctatcactgtttgtct

SEQ ID NO: 984370 - DNA, 33 bp, Homo sapien
tattatcattggtacatctatcactgtttgtct

SEQ ID NO: 984371 - DNA, 33 bp, Homo sapien
tgatctgttgtattaacctcctggaaattctac

SEQ ID NO: 984372 - DNA, 33 bp, Homo sapien
tgatctgttgtattaatctcctggaaattctac

SEQ ID NO: 984373 - DNA, 33 bp, Homo sapien
acttctgattcactagaaagaatatacacaaac

SEQ ID NO: 984374 - DNA, 33 bp, Homo sapien
acttctgattcactaggaagaatatacacaaac

SEQ ID NO: 984375 - DNA, 33 bp, Homo sapien
cacaatatcacttctaggtcatgatgctagttt

SEQ ID NO: 984376 - DNA, 33 bp, Homo sapien
cacaatatcacttctatgtcatgatgctagttt

SEQ ID NO: 984377 - DNA, 33 bp, Homo sapien
atttagattttctgcagagttttcccacagaat

SEQ ID NO: 984378 - DNA, 33 bp, Homo sapien
atttagattttctgcatagttttcccacagaat

SEQ ID NO: 984379 - DNA, 33 bp, Homo sapien
aacattatttagcttacatgttcaaccaaatgc

SEQ ID NO: 984380 - DNA, 33 bp, Homo sapien
aacattatttagcttatatgttcaaccaaatgc

SEQ ID NO: 984381 - DNA, 33 bp, Homo sapien
ggctggaatagtcagaaaaatcttcatgaaaag

SEQ ID NO: 984382 - DNA, 33 bp, Homo sapien
ggctggaatagtcagagaaatcttcatgaaaag

SEQ ID NO: 984383 - DNA, 33 bp, Homo sapien
gcaattttttgccacacatatttttggaaagtg

SEQ ID NO: 984384 - DNA, 33 bp, Homo sapien
gcaattttttgccacatatatttttggaaagtg

SEQ ID NO: 984385 - DNA, 33 bp, Homo sapien
tgagatctagcagaaagaagaaattttggttgt

SEQ ID NO: 984386 - DNA, 33 bp, Homo sapien
tgagatctagcagaaataagaaattttggttgt

SEQ ID NO: 984387 - DNA, 33 bp, Homo sapien
tcatgtccaagaaacacggcaaaaatggggcat

SEQ ID NO: 984388 - DNA, 33 bp, Homo sapien
tcatgtccaagaaacatggcaaaaatggggcat

SEQ ID NO: 984389 - DNA, 33 bp, Homo sapien
gccttgcctgtcattcccttacccaaaacatgg

SEQ ID NO: 984390 - DNA, 33 bp, Homo sapien
gccttgcctgtcattctcttacccaaaacatgg

SEQ ID NO: 984391 - DNA, 33 bp, Homo sapien
tcttagaatgtctgaaagtccatttccacaact

SEQ ID NO: 984392 - DNA, 33 bp, Homo sapien
tcttagaatgtctgaatgtccatttccacaact

SEQ ID NO: 984393 - DNA, 33 bp, Homo sapien
ccttccctaatctcatcactgcttaccactata

SEQ ID NO: 984394 - DNA, 33 bp, Homo sapien
ccttccctaatctcattactgcttaccactata

SEQ ID NO: 984395 - DNA, 33 bp, Homo sapien
tatttgatctgctgtcaaaagtcctttctttat

SEQ ID NO: 984396 - DNA, 33 bp, Homo sapien
tatttgatctgctgtcgaaagtcctttctttat

SEQ ID NO: 984397 - DNA, 33 bp, Homo sapien
ttgagtgaaagagttgaaatagttcaaacacag

SEQ ID NO: 984398 - DNA, 33 bp, Homo sapien
ttgagtgaaagagttggaatagttcaaacacag

SEQ ID NO: 984399 - DNA, 33 bp, Homo sapien
agctgctgtgtagcagcctacattggaagcata

SEQ ID NO: 984400 - DNA, 33 bp, Homo sapien
agctgctgtgtagcagtctacattggaagcata

SEQ ID NO: 984401 - DNA, 33 bp, Homo sapien
cctcatttcttggtgcaaatatgcttccaatgt

SEQ ID NO: 984402 - DNA, 33 bp, Homo sapien
cctcatttcttggtgccaatatgcttccaatgt

SEQ ID NO: 984403 - DNA, 33 bp, Homo sapien
tacagctaaatactgaagcctggagttgacaaa

SEQ ID NO: 984404 - DNA, 33 bp, Homo sapien
tacagctaaatactgatgcctggagttgacaaa

SEQ ID NO: 984405 - DNA, 33 bp, Homo sapien
gggacttgatctataacagaagttgacagatta

SEQ ID NO: 984406 - DNA, 33 bp, Homo sapien
gggacttgatctataagagaagttgacagatta

SEQ ID NO: 984407 - DNA, 33 bp, Homo sapien
agaatgatctcatccaagaggcaagggatctgg

SEQ ID NO: 984408 - DNA, 33 bp, Homo sapien
agaatgatctcatccaggaggcaagggatctgg

SEQ ID NO: 984409 - DNA, 33 bp, Homo sapien
cttctctcacatgtaaacttcccagtgaagact

SEQ ID NO: 984410 - DNA, 33 bp, Homo sapien
cttctctcacatgtaaccttcccagtgaagact

SEQ ID NO: 984411 - DNA, 33 bp, Homo sapien
gtgagatcacaactcacgttcacgctcagtcca

SEQ ID NO: 984412 - DNA, 33 bp, Homo sapien
gtgagatcacaactcatgttcacgctcagtcca

SEQ ID NO: 984413 - DNA, 33 bp, Homo sapien
atacttatttgcatgacaattgcctgttagtca

SEQ ID NO: 984414 - DNA, 33 bp, Homo sapien
atacttatttgcatgataattgcctgttagtca

SEQ ID NO: 984415 - DNA, 33 bp, Homo sapien
tctactttaatgaccacgtagctgttctttttg

SEQ ID NO: 984416 - DNA, 33 bp, Homo sapien
tctactttaatgaccatgtagctgttctttttg

SEQ ID NO: 984417 - DNA, 33 bp, Homo sapien
tacactttaaagtggtcaatttcacatgacacg

SEQ ID NO: 984418 - DNA, 33 bp, Homo sapien
tacactttaaagtggttaatttcacatgacacg

SEQ ID NO: 984419 - DNA, 33 bp, Homo sapien
gaaacatagggtaaaagcttcttgtcgttggtt

SEQ ID NO: 984420 - DNA, 33 bp, Homo sapien
gaaacatagggtaaaatcttcttgtcgttggtt

SEQ ID NO: 984421 - DNA, 33 bp, Homo sapien
aattgctgagaagaaaaggttgtagaggttaga

SEQ ID NO: 984422 - DNA, 33 bp, Homo sapien
aattgctgagaagaaagggttgtagaggttaga

SEQ ID NO: 984423 - DNA, 33 bp, Homo sapien
tgagcacaacaggacactaaggcagatccatgc

SEQ ID NO: 984424 - DNA, 33 bp, Homo sapien
tgagcacaacaggacattaaggcagatccatgc

SEQ ID NO: 984425 - DNA, 33 bp, Homo sapien
ctcgagctctgagtacacatatcaggctgctcc

SEQ ID NO: 984426 - DNA, 33 bp, Homo sapien
ctcgagctctgagtacgcatatcaggctgctcc

SEQ ID NO: 984427 - DNA, 33 bp, Homo sapien
ctttcctgtaatgagacctgggattctgcacac

SEQ ID NO: 984428 - DNA, 33 bp, Homo sapien
ctttcctgtaatgagatctgggattctgcacac

SEQ ID NO: 984429 - DNA, 33 bp, Homo sapien
tcagttattgtcctcccctagaatatctataca

SEQ ID NO: 984430 - DNA, 33 bp, Homo sapien
tcagttattgtcctcctctagaatatctataca

SEQ ID NO: 984431 - DNA, 33 bp, Homo sapien
gaattaatctgtcacaatggaatacaattgtat

SEQ ID NO: 984432 - DNA, 33 bp, Homo sapien
gaattaatctgtcacagtggaatacaattgtat

SEQ ID NO: 984433 - DNA, 33 bp, Homo sapien
tctcactagaatcttaccaaattccagctggga

SEQ ID NO: 984434 - DNA, 33 bp, Homo sapien
tctcactagaatcttatcaaattccagctggga

SEQ ID NO: 984435 - DNA, 33 bp, Homo sapien
gtaagagcactgaggaataaacaaaggacctga

SEQ ID NO: 984436 - DNA, 33 bp, Homo sapien
gtaagagcactgaggagtaaacaaaggacctga

SEQ ID NO: 984437 - DNA, 33 bp, Homo sapien
aatggtgggattttacaacatacaaatttctcc

SEQ ID NO: 984438 - DNA, 33 bp, Homo sapien
aatggtgggattttactacatacaaatttctcc

SEQ ID NO: 984439 - DNA, 33 bp, Homo sapien
acaagaaaataaatgcagaatattcatagcctg

SEQ ID NO: 984440 - DNA, 33 bp, Homo sapien
acaagaaaataaatgctgaatattcatagcctg

SEQ ID NO: 984441 - DNA, 33 bp, Homo sapien
tgaggacttccagtgaaaacacaaaatgtgcca

SEQ ID NO: 984442 - DNA, 33 bp, Homo sapien
tgaggacttccagtgagaacacaaaatgtgcca

SEQ ID NO: 984443 - DNA, 33 bp, Homo sapien
cataaaatcacatgagcaatcctatgagaaaat

SEQ ID NO: 984444 - DNA, 33 bp, Homo sapien
cataaaatcacatgaggaatcctatgagaaaat

SEQ ID NO: 984445 - DNA, 33 bp, Homo sapien
gttatataagaatccaaagaaaaatcagtttga

SEQ ID NO: 984446 - DNA, 33 bp, Homo sapien
gttatataagaatccagagaaaaatcagtttga

SEQ ID NO: 984447 - DNA, 33 bp, Homo sapien
aaattgaattttcaaaagcagaacacctttcag

SEQ ID NO: 984448 - DNA, 33 bp, Homo sapien
aaattgaattttcaaaggcagaacacctttcag

SEQ ID NO: 984449 - DNA, 33 bp, Homo sapien
acatttcagagattcaaataatacaaatatata

SEQ ID NO: 984450 - DNA, 33 bp, Homo sapien
acatttcagagattcagataatacaaatatata

SEQ ID NO: 984451 - DNA, 33 bp, Homo sapien
ttctggtaataactgacaagcaggagaatgaga

SEQ ID NO: 984452 - DNA, 33 bp, Homo sapien
ttctggtaataactgataagcaggagaatgaga

SEQ ID NO: 984453 - DNA, 33 bp, Homo sapien
cttgcgattgtgtgagcccattttccttaataa

SEQ ID NO: 984454 - DNA, 33 bp, Homo sapien
cttgcgattgtgtgagtccattttccttaataa

SEQ ID NO: 984455 - DNA, 33 bp, Homo sapien
ttagaaagaacactcaaatgataggatcgagaa

SEQ ID NO: 984456 - DNA, 33 bp, Homo sapien
ttagaaagaacactcagatgataggatcgagaa

SEQ ID NO: 984457 - DNA, 33 bp, Homo sapien
atatactaatggaacaaggacatgataaccata

SEQ ID NO: 984458 - DNA, 33 bp, Homo sapien
atatactaatggaacagggacatgataaccata

SEQ ID NO: 984459 - DNA, 33 bp, Homo sapien
gtaggaaggagaatacaaaatctaggtttcttc

SEQ ID NO: 984460 - DNA, 33 bp, Homo sapien
gtaggaaggagaatacgaaatctaggtttcttc

SEQ ID NO: 984461 - DNA, 33 bp, Homo sapien
ctaaatgtattttttcccaagttgttagaaatg

SEQ ID NO: 984462 - DNA, 33 bp, Homo sapien
ctaaatgtattttttctcaagttgttagaaatg

SEQ ID NO: 984463 - DNA, 33 bp, Homo sapien
agtgtcttctgggtcaaatgaaatcaatcttgc

SEQ ID NO: 984464 - DNA, 33 bp, Homo sapien
agtgtcttctgggtcagatgaaatcaatcttgc

SEQ ID NO: 984465 - DNA, 33 bp, Homo sapien
tatagtcattggtgaaaggaaagagagaaatgt

SEQ ID NO: 984466 - DNA, 33 bp, Homo sapien
tatagtcattggtgaacggaaagagagaaatgt

SEQ ID NO: 984467 - DNA, 33 bp, Homo sapien
cgtatttaggtatttccatctggatgtcatttt

SEQ ID NO: 984468 - DNA, 33 bp, Homo sapien
cgtatttaggtatttctatctggatgtcatttt

SEQ ID NO: 984469 - DNA, 33 bp, Homo sapien
tctaccagtgcctctcactggccaaaaccaaca

SEQ ID NO: 984470 - DNA, 33 bp, Homo sapien
tctaccagtgcctctctctggccaaaaccaaca

SEQ ID NO: 984471 - DNA, 33 bp, Homo sapien
gcaaaagagatgtgtaaaaattgagtttgctgg

SEQ ID NO: 984472 - DNA, 33 bp, Homo sapien
gcaaaagagatgtgtagaaattgagtttgctgg

SEQ ID NO: 984473 - DNA, 33 bp, Homo sapien
cttttatctttgtttacgatcttttgtggaaca

SEQ ID NO: 984474 - DNA, 33 bp, Homo sapien
cttttatctttgtttatgatcttttgtggaaca

SEQ ID NO: 984475 - DNA, 33 bp, Homo sapien
aatggcctatgatcctcaaccaaaaatcagaga

SEQ ID NO: 984476 - DNA, 33 bp, Homo sapien
aatggcctatgatcctgaaccaaaaatcagaga

SEQ ID NO: 984477 - DNA, 33 bp, Homo sapien
aagaacttctgctaaagtgttgctatgatcaga

SEQ ID NO: 984478 - DNA, 33 bp, Homo sapien
aagaacttctgctaaattgttgctatgatcaga

SEQ ID NO: 984479 - DNA, 33 bp, Homo sapien
cctcttaggtcatcaaagctaatcccatcaacc

SEQ ID NO: 984480 - DNA, 33 bp, Homo sapien
cctcttaggtcatcaaggctaatcccatcaacc

SEQ ID NO: 984481 - DNA, 33 bp, Homo sapien
tttgctttgtttcgaaaggccctctctcttcct

SEQ ID NO: 984482 - DNA, 33 bp, Homo sapien
tttgctttgtttcgaagggccctctctcttcct

SEQ ID NO: 984483 - DNA, 33 bp, Homo sapien
tatcatgagatctgacagtaattataaagggga

SEQ ID NO: 984484 - DNA, 33 bp, Homo sapien
tatcatgagatctgacggtaattataaagggga

SEQ ID NO: 984485 - DNA, 33 bp, Homo sapien
tggcaggagtatggacaaataaaaatgagtttc

SEQ ID NO: 984486 - DNA, 33 bp, Homo sapien
tggcaggagtatggacgaataaaaatgagtttc

SEQ ID NO: 984487 - DNA, 33 bp, Homo sapien
tcttgttgcaacaagggaggcacacatcagagg

SEQ ID NO: 984488 - DNA, 33 bp, Homo sapien
tcttgttgcaacaaggtaggcacacatcagagg

SEQ ID NO: 984489 - DNA, 33 bp, Homo sapien
attaagacatttgtgaatatcatgtgatctttt

SEQ ID NO: 984490 - DNA, 33 bp, Homo sapien
attaagacatttgtgagtatcatgtgatctttt

SEQ ID NO: 984491 - DNA, 33 bp, Homo sapien
gagtcagaaggcttcaaaaatagtcaaaacctg

SEQ ID NO: 984492 - DNA, 33 bp, Homo sapien
gagtcagaaggcttcagaaatagtcaaaacctg

SEQ ID NO: 984493 - DNA, 33 bp, Homo sapien
agatacatctccaaaccgaaaggagcgaggaat

SEQ ID NO: 984494 - DNA, 33 bp, Homo sapien
agatacatctccaaacggaaaggagcgaggaat

SEQ ID NO: 984495 - DNA, 33 bp, Homo sapien
gttgagcacttgtgacagagacaaaatgaccca

SEQ ID NO: 984496 - DNA, 33 bp, Homo sapien
gttgagcacttgtgacggagacaaaatgaccca

SEQ ID NO: 984497 - DNA, 33 bp, Homo sapien
cacacaaaagaaatgaagaaatcggaaggctag

SEQ ID NO: 984498 - DNA, 33 bp, Homo sapien
cacacaaaagaaatgaggaaatcggaaggctag

SEQ ID NO: 984499 - DNA, 33 bp, Homo sapien
tttgaaccagattgtgaagagtgcagaggccaa

SEQ ID NO: 984500 - DNA, 33 bp, Homo sapien
tttgaaccagattgtggagagtgcagaggccaa

SEQ ID NO: 984501 - DNA, 33 bp, Homo sapien
tactaactctgtggtcaaagtaaattctacata

SEQ ID NO: 984502 - DNA, 33 bp, Homo sapien
tactaactctgtggtcgaagtaaattctacata

SEQ ID NO: 984503 - DNA, 33 bp, Homo sapien
ccattacgttgtggtcactttctgtatatagta

SEQ ID NO: 984504 - DNA, 33 bp, Homo sapien
ccattacgttgtggtccctttctgtatatagta

SEQ ID NO: 984505 - DNA, 33 bp, Homo sapien
aaactgccacgtacaaataggcctgccatctgc

SEQ ID NO: 984506 - DNA, 33 bp, Homo sapien
aaactgccacgtacaactaggcctgccatctgc

SEQ ID NO: 984507 - DNA, 33 bp, Homo sapien
ctctccaagacagaacaagccatgagaatgtct

SEQ ID NO: 984508 - DNA, 33 bp, Homo sapien
ctctccaagacagaaccagccatgagaatgtct

SEQ ID NO: 984509 - DNA, 33 bp, Homo sapien
tgtaatatgatcgagacaagtgaggcaagttta

SEQ ID NO: 984510 - DNA, 33 bp, Homo sapien
tgtaatatgatcgagataagtgaggcaagttta

SEQ ID NO: 984511 - DNA, 33 bp, Homo sapien
ctgaagaaatgctgaaacctgccaaaacaactg

SEQ ID NO: 984512 - DNA, 33 bp, Homo sapien
ctgaagaaatgctgaaccctgccaaaacaactg

SEQ ID NO: 984513 - DNA, 33 bp, Homo sapien
caacaacaacaaaagaatacgcaggtgcacagt

SEQ ID NO: 984514 - DNA, 33 bp, Homo sapien
caacaacaacaaaagagtacgcaggtgcacagt

SEQ ID NO: 984515 - DNA, 33 bp, Homo sapien
aactatgtatttcataactttagagccaggctt

SEQ ID NO: 984516 - DNA, 33 bp, Homo sapien
aactatgtatttcatagctttagagccaggctt

SEQ ID NO: 984517 - DNA, 33 bp, Homo sapien
agtttgggttggtaataagacctatctcttaga

SEQ ID NO: 984518 - DNA, 33 bp, Homo sapien
agtttgggttggtaatgagacctatctcttaga

SEQ ID NO: 984519 - DNA, 33 bp, Homo sapien
gtacccacctcataaacggtttcaagaagtggc

SEQ ID NO: 984520 - DNA, 33 bp, Homo sapien
gtacccacctcataaatggtttcaagaagtggc

SEQ ID NO: 984521 - DNA, 33 bp, Homo sapien
accagttaccttacagaaaatttagctaagggt

SEQ ID NO: 984522 - DNA, 33 bp, Homo sapien
accagttaccttacaggaaatttagctaagggt

SEQ ID NO: 984523 - DNA, 33 bp, Homo sapien
ccaagtattacagcacaatttaaaatgcagtat

SEQ ID NO: 984524 - DNA, 33 bp, Homo sapien
ccaagtattacagcaccatttaaaatgcagtat

SEQ ID NO: 984525 - DNA, 33 bp, Homo sapien
atacaggatgtgaatcagaaaatagaaaactat

SEQ ID NO: 984526 - DNA, 33 bp, Homo sapien
atacaggatgtgaatcggaaaatagaaaactat

SEQ ID NO: 984527 - DNA, 33 bp, Homo sapien
acatactttcttctacacccatgcttacaactt

SEQ ID NO: 984528 - DNA, 33 bp, Homo sapien
acatactttcttctacgcccatgcttacaactt

SEQ ID NO: 984529 - DNA, 33 bp, Homo sapien
cttctccactaacacaatcaccatcgtactggc

SEQ ID NO: 984530 - DNA, 33 bp, Homo sapien
cttctccactaacacagtcaccatcgtactggc

SEQ ID NO: 984531 - DNA, 33 bp, Homo sapien
cagaaggcatagagagccagagaaatgaccacc

SEQ ID NO: 984532 - DNA, 33 bp, Homo sapien
cagaaggcatagagaggcagagaaatgaccacc

SEQ ID NO: 984533 - DNA, 33 bp, Homo sapien
ggtgactaattttcctcaaacagttttcacaca

SEQ ID NO: 984534 - DNA, 33 bp, Homo sapien
ggtgactaattttccttaaacagttttcacaca

SEQ ID NO: 984535 - DNA, 33 bp, Homo sapien
gtgacttgtatcccacggggggcttgctcttca

SEQ ID NO: 984536 - DNA, 33 bp, Homo sapien
gtgacttgtatcccactgggggcttgctcttca

SEQ ID NO: 984537 - DNA, 33 bp, Homo sapien
gtgatagtgtgaggtacgaatgctcttaataaa

SEQ ID NO: 984538 - DNA, 33 bp, Homo sapien
gtgatagtgtgaggtatgaatgctcttaataaa

SEQ ID NO: 984539 - DNA, 33 bp, Homo sapien
ccttcttctatttcctcaagccttatcagatac

SEQ ID NO: 984540 - DNA, 33 bp, Homo sapien
ccttcttctatttccttaagccttatcagatac

SEQ ID NO: 984541 - DNA, 33 bp, Homo sapien
gtggtattctagatgggatcctgcaacagaaac

SEQ ID NO: 984542 - DNA, 33 bp, Homo sapien
gtggtattctagatggtatcctgcaacagaaac

SEQ ID NO: 984543 - DNA, 33 bp, Homo sapien
gttaacatagattgctcactgtcatgcaggtag

SEQ ID NO: 984544 - DNA, 33 bp, Homo sapien
gttaacatagattgcttactgtcatgcaggtag

SEQ ID NO: 984545 - DNA, 33 bp, Homo sapien
tatcttttattgcacaaaagtttaattctttag

SEQ ID NO: 984546 - DNA, 33 bp, Homo sapien
tatcttttattgcacagaagtttaattctttag

SEQ ID NO: 984547 - DNA, 33 bp, Homo sapien
agcctaggagtcagacagacttagaattacatg

SEQ ID NO: 984548 - DNA, 33 bp, Homo sapien
agcctaggagtcagacggacttagaattacatg

SEQ ID NO: 984549 - DNA, 33 bp, Homo sapien
tattgtctcaaggcataaacaagccataaactt

SEQ ID NO: 984550 - DNA, 33 bp, Homo sapien
tattgtctcaaggcatcaacaagccataaactt

SEQ ID NO: 984551 - DNA, 33 bp, Homo sapien
taagccttacatatagcaaagttgagaaccagt

SEQ ID NO: 984552 - DNA, 33 bp, Homo sapien
taagccttacatataggaaagttgagaaccagt

SEQ ID NO: 984553 - DNA, 33 bp, Homo sapien
attttttaaagcttcacaggtaagccttacata

SEQ ID NO: 984554 - DNA, 33 bp, Homo sapien
attttttaaagcttcataggtaagccttacata

SEQ ID NO: 984555 - DNA, 33 bp, Homo sapien
agcagaccattaaactcagtgcagggcccttct

SEQ ID NO: 984556 - DNA, 33 bp, Homo sapien
agcagaccattaaactgagtgcagggcccttct

SEQ ID NO: 984557 - DNA, 33 bp, Homo sapien
agaagaaggatactacgaatggaaacagattca

SEQ ID NO: 984558 - DNA, 33 bp, Homo sapien
agaagaaggatactactaatggaaacagattca

SEQ ID NO: 984559 - DNA, 33 bp, Homo sapien
tttctggtaattctgacgcacagtaaagtttga

SEQ ID NO: 984560 - DNA, 33 bp, Homo sapien
tttctggtaattctgatgcacagtaaagtttga

SEQ ID NO: 984561 - DNA, 33 bp, Homo sapien
aactgctagttaggtaaagctgagattctaatg

SEQ ID NO: 984562 - DNA, 33 bp, Homo sapien
aactgctagttaggtagagctgagattctaatg

SEQ ID NO: 984563 - DNA, 33 bp, Homo sapien
tactggggaaaagagcaccaacctaactggaaa

SEQ ID NO: 984564 - DNA, 33 bp, Homo sapien
tactggggaaaagagcgccaacctaactggaaa

SEQ ID NO: 984565 - DNA, 33 bp, Homo sapien
ggcaaactatacagcgcagaggaaaacttagtt

SEQ ID NO: 984566 - DNA, 33 bp, Homo sapien
ggcaaactatacagcgtagaggaaaacttagtt

SEQ ID NO: 984567 - DNA, 33 bp, Homo sapien
acccagacacaagtcaagaaaccatctcacagc

SEQ ID NO: 984568 - DNA, 33 bp, Homo sapien
acccagacacaagtcaggaaaccatctcacagc

SEQ ID NO: 984569 - DNA, 33 bp, Homo sapien
ttttcaaaggtagaaacggtggcttttaagctc

SEQ ID NO: 984570 - DNA, 33 bp, Homo sapien
ttttcaaaggtagaaatggtggcttttaagctc

SEQ ID NO: 984571 - DNA, 33 bp, Homo sapien
aactgaatgccaaacaatatggccactagcatt

SEQ ID NO: 984572 - DNA, 33 bp, Homo sapien
aactgaatgccaaacagtatggccactagcatt

SEQ ID NO: 984573 - DNA, 33 bp, Homo sapien
gtgactaaactcccatgagaagctggcattaat

SEQ ID NO: 984574 - DNA, 33 bp, Homo sapien
gtgactaaactcccattagaagctggcattaat

SEQ ID NO: 984575 - DNA, 33 bp, Homo sapien
attccattttctataaccaactgttctaaacca

SEQ ID NO: 984576 - DNA, 33 bp, Homo sapien
attccattttctataatcaactgttctaaacca

SEQ ID NO: 984577 - DNA, 33 bp, Homo sapien
attctgtaggtcaaaaatctggcaggcttagct

SEQ ID NO: 984578 - DNA, 33 bp, Homo sapien
attctgtaggtcaaaagtctggcaggcttagct

SEQ ID NO: 984579 - DNA, 33 bp, Homo sapien
ctcttcttctgggaccccggttacatatatatt

SEQ ID NO: 984580 - DNA, 33 bp, Homo sapien
ctcttcttctgggaccgcggttacatatatatt

SEQ ID NO: 984581 - DNA, 33 bp, Homo sapien
ctctcactaagatgacagattttatcccagttc

SEQ ID NO: 984582 - DNA, 33 bp, Homo sapien
ctctcactaagatgacggattttatcccagttc

SEQ ID NO: 984583 - DNA, 33 bp, Homo sapien
tagccttggcatattaccaaaatactaaggtag

SEQ ID NO: 984584 - DNA, 33 bp, Homo sapien
tagccttggcatattagcaaaatactaaggtag

SEQ ID NO: 984585 - DNA, 33 bp, Homo sapien
aaaagacagatgacaaggcagtcctggaagggc

SEQ ID NO: 984586 - DNA, 33 bp, Homo sapien
aaaagacagatgacaatgcagtcctggaagggc

SEQ ID NO: 984587 - DNA, 33 bp, Homo sapien
ggatccctggcctctaacatcagatggcaacaa

SEQ ID NO: 984588 - DNA, 33 bp, Homo sapien
ggatccctggcctctaccatcagatggcaacaa

SEQ ID NO: 984589 - DNA, 33 bp, Homo sapien
tggtagaagcattatgaaaattaatcctgcaga

SEQ ID NO: 984590 - DNA, 33 bp, Homo sapien
tggtagaagcattatggaaattaatcctgcaga

SEQ ID NO: 984591 - DNA, 33 bp, Homo sapien
tatatacctaggtgagaaattactgggttatat

SEQ ID NO: 984592 - DNA, 33 bp, Homo sapien
tatatacctaggtgaggaattactgggttatat

SEQ ID NO: 984593 - DNA, 33 bp, Homo sapien
tatatttgtagataaaagaaaaacactgaatgc

SEQ ID NO: 984594 - DNA, 33 bp, Homo sapien
tatatttgtagataaaggaaaaacactgaatgc

SEQ ID NO: 984595 - DNA, 33 bp, Homo sapien
tctctaggaaactgcaatctgacaaagggttta

SEQ ID NO: 984596 - DNA, 33 bp, Homo sapien
tctctaggaaactgcattctgacaaagggttta

SEQ ID NO: 984597 - DNA, 33 bp, Homo sapien
agaaacatctaagtcaaagtgaggggctcataa

SEQ ID NO: 984598 - DNA, 33 bp, Homo sapien
agaaacatctaagtcagagtgaggggctcataa

SEQ ID NO: 984599 - DNA, 33 bp, Homo sapien
atgaacagaggtaaataaagagaataagaggaa

SEQ ID NO: 984600 - DNA, 33 bp, Homo sapien
atgaacagaggtaaattaagagaataagaggaa

SEQ ID NO: 984601 - DNA, 33 bp, Homo sapien
gtctccacattggtagaaaaatcaagttagaag

SEQ ID NO: 984602 - DNA, 33 bp, Homo sapien
gtctccacattggtagcaaaatcaagttagaag

SEQ ID NO: 984603 - DNA, 33 bp, Homo sapien
ccctcacacactagatcagatgaagtctatgtt

SEQ ID NO: 984604 - DNA, 33 bp, Homo sapien
ccctcacacactagatgagatgaagtctatgtt

SEQ ID NO: 984605 - DNA, 33 bp, Homo sapien
ggttttctgttcctgcactaatctgcataggat

SEQ ID NO: 984606 - DNA, 33 bp, Homo sapien
ggttttctgttcctgcgctaatctgcataggat

SEQ ID NO: 984607 - DNA, 33 bp, Homo sapien
agataatctaacaaaaaacgaatcccacatgag

SEQ ID NO: 984608 - DNA, 33 bp, Homo sapien
agataatctaacaaaagacgaatcccacatgag

SEQ ID NO: 984609 - DNA, 33 bp, Homo sapien
ataacccacttaaagactaacagtataggtaaa

SEQ ID NO: 984610 - DNA, 33 bp, Homo sapien
ataacccacttaaagagtaacagtataggtaaa

SEQ ID NO: 984611 - DNA, 33 bp, Homo sapien
atatacgtttatatgccgagttttctccaacct

SEQ ID NO: 984612 - DNA, 33 bp, Homo sapien
atatacgtttatatgctgagttttctccaacct

SEQ ID NO: 984613 - DNA, 33 bp, Homo sapien
tcaactatatcccggaaaaaaaactcaagaaca

SEQ ID NO: 984614 - DNA, 33 bp, Homo sapien
tcaactatatcccggagaaaaaactcaagaaca

SEQ ID NO: 984615 - DNA, 33 bp, Homo sapien
tgtctgtttttactgaaaattgaggactttgta

SEQ ID NO: 984616 - DNA, 33 bp, Homo sapien
tgtctgtttttactgacaattgaggactttgta

SEQ ID NO: 984617 - DNA, 33 bp, Homo sapien
acacttgaaatgtatcaccccttcagttaatag

SEQ ID NO: 984618 - DNA, 33 bp, Homo sapien
acacttgaaatgtatctccccttcagttaatag

SEQ ID NO: 984619 - DNA, 33 bp, Homo sapien
attagaatgtcttagaaagaggcatatgaaggg

SEQ ID NO: 984620 - DNA, 33 bp, Homo sapien
attagaatgtcttagagagaggcatatgaaggg

SEQ ID NO: 984621 - DNA, 33 bp, Homo sapien
tagcctacctttttcacggtacttatcacctcc

SEQ ID NO: 984622 - DNA, 33 bp, Homo sapien
tagcctacctttttcatggtacttatcacctcc

SEQ ID NO: 984623 - DNA, 33 bp, Homo sapien
tagccaaattagacaccgaatgctgtagggaga

SEQ ID NO: 984624 - DNA, 33 bp, Homo sapien
tagccaaattagacacggaatgctgtagggaga

SEQ ID NO: 984625 - DNA, 33 bp, Homo sapien
ttgttcgcaccgtgaacgttgtttataatcgtg

SEQ ID NO: 984626 - DNA, 33 bp, Homo sapien
ttgttcgcaccgtgaatgttgtttataatcgtg

SEQ ID NO: 984627 - DNA, 33 bp, Homo sapien
caactgcaacaacaatcaggcttacttcttcct

SEQ ID NO: 984628 - DNA, 33 bp, Homo sapien
caactgcaacaacaattaggcttacttcttcct

SEQ ID NO: 984629 - DNA, 33 bp, Homo sapien
ttatatttttaaagcaactatactctgtaccat

SEQ ID NO: 984630 - DNA, 33 bp, Homo sapien
ttatatttttaaagcacctatactctgtaccat

SEQ ID NO: 984631 - DNA, 33 bp, Homo sapien
acgtaaccatcactccactgaagacatagaaca

SEQ ID NO: 984632 - DNA, 33 bp, Homo sapien
acgtaaccatcactccgctgaagacatagaaca

SEQ ID NO: 984633 - DNA, 33 bp, Homo sapien
agaaccaaatgttgacaataaacaaaacaaaga

SEQ ID NO: 984634 - DNA, 33 bp, Homo sapien
agaaccaaatgttgaccataaacaaaacaaaga

SEQ ID NO: 984635 - DNA, 33 bp, Homo sapien
attttttcccacaagaagaccatcaggggagct

SEQ ID NO: 984636 - DNA, 33 bp, Homo sapien
attttttcccacaagacgaccatcaggggagct

SEQ ID NO: 984637 - DNA, 33 bp, Homo sapien
aaaactcgctattaaaagctatcttgtgtaacg

SEQ ID NO: 984638 - DNA, 33 bp, Homo sapien
aaaactcgctattaaatgctatcttgtgtaacg

SEQ ID NO: 984639 - DNA, 33 bp, Homo sapien
tatgtggcttcagagcgacccacaaacaggtgc

SEQ ID NO: 984640 - DNA, 33 bp, Homo sapien
tatgtggcttcagagctacccacaaacaggtgc

SEQ ID NO: 984641 - DNA, 33 bp, Homo sapien
caacgagtttgctgtcaaaatcttctttaatat

SEQ ID NO: 984642 - DNA, 33 bp, Homo sapien
caacgagtttgctgtcgaaatcttctttaatat

SEQ ID NO: 984643 - DNA, 33 bp, Homo sapien
gggtgctttgatccagcagaatggtctgtcctt

SEQ ID NO: 984644 - DNA, 33 bp, Homo sapien
gggtgctttgatccaggagaatggtctgtcctt

SEQ ID NO: 984645 - DNA, 33 bp, Homo sapien
aaagaaagaaaagaacccaattcagtggaattc

SEQ ID NO: 984646 - DNA, 33 bp, Homo sapien
aaagaaagaaaagaactcaattcagtggaattc

SEQ ID NO: 984647 - DNA, 33 bp, Homo sapien
aaaaagctattaagcaccattaaaataataagc

SEQ ID NO: 984648 - DNA, 33 bp, Homo sapien
aaaaagctattaagcagcattaaaataataagc

SEQ ID NO: 984649 - DNA, 33 bp, Homo sapien
ggagcagacagtagtgaaaagttagaaaatcct

SEQ ID NO: 984650 - DNA, 33 bp, Homo sapien
ggagcagacagtagtgtaaagttagaaaatcct

SEQ ID NO: 984651 - DNA, 33 bp, Homo sapien
gggaatattgaaattgcatgtattatattggat

SEQ ID NO: 984652 - DNA, 33 bp, Homo sapien
gggaatattgaaattggatgtattatattggat

SEQ ID NO: 984653 - DNA, 33 bp, Homo sapien
gcactttggactcctacggctagttctatttgg

SEQ ID NO: 984654 - DNA, 33 bp, Homo sapien
gcactttggactcctatggctagttctatttgg

SEQ ID NO: 984655 - DNA, 33 bp, Homo sapien
ataagtaatagcagcactgaagaataagtatat

SEQ ID NO: 984656 - DNA, 33 bp, Homo sapien
ataagtaatagcagcattgaagaataagtatat

SEQ ID NO: 984657 - DNA, 33 bp, Homo sapien
gaaactgaactcagccaggatcattaaatttat

SEQ ID NO: 984658 - DNA, 33 bp, Homo sapien
gaaactgaactcagccgggatcattaaatttat

SEQ ID NO: 984659 - DNA, 33 bp, Homo sapien
ttacaaatatcggtcaatgaataagtttagcct

SEQ ID NO: 984660 - DNA, 33 bp, Homo sapien
ttacaaatatcggtcagtgaataagtttagcct

SEQ ID NO: 984661 - DNA, 33 bp, Homo sapien
tcatatcagaaaatgacgatgagtagcccatgt

SEQ ID NO: 984662 - DNA, 33 bp, Homo sapien
tcatatcagaaaatgatgatgagtagcccatgt

SEQ ID NO: 984663 - DNA, 33 bp, Homo sapien
gctgtaaaacccatgcacttaaccattatgcta

SEQ ID NO: 984664 - DNA, 33 bp, Homo sapien
gctgtaaaacccatgcgcttaaccattatgcta

SEQ ID NO: 984665 - DNA, 33 bp, Homo sapien
cctgtttagttggtataagattcttctgagatg

SEQ ID NO: 984666 - DNA, 33 bp, Homo sapien
cctgtttagttggtatgagattcttctgagatg

SEQ ID NO: 984667 - DNA, 33 bp, Homo sapien
agatggaggaatgcaactaccaaatccatatcc

SEQ ID NO: 984668 - DNA, 33 bp, Homo sapien
agatggaggaatgcaattaccaaatccatatcc

SEQ ID NO: 984669 - DNA, 33 bp, Homo sapien
tatcccccactgctaacctgcaaccatgccttt

SEQ ID NO: 984670 - DNA, 33 bp, Homo sapien
tatcccccactgctaagctgcaaccatgccttt

SEQ ID NO: 984671 - DNA, 33 bp, Homo sapien
atgccttgaggaatcaaatcactgagtttcttc

SEQ ID NO: 984672 - DNA, 33 bp, Homo sapien
atgccttgaggaatcagatcactgagtttcttc

SEQ ID NO: 984673 - DNA, 33 bp, Homo sapien
cagttggatctaaggactcagatgatatcttct

SEQ ID NO: 984674 - DNA, 33 bp, Homo sapien
cagttggatctaaggagtcagatgatatcttct

SEQ ID NO: 984675 - DNA, 33 bp, Homo sapien
ataaaggtgctagtaccaggaatgacaggcaga

SEQ ID NO: 984676 - DNA, 33 bp, Homo sapien
ataaaggtgctagtacgaggaatgacaggcaga

SEQ ID NO: 984677 - DNA, 33 bp, Homo sapien
cacaaatgtcagaaacccttggcatctgagtgc

SEQ ID NO: 984678 - DNA, 33 bp, Homo sapien
cacaaatgtcagaaacgcttggcatctgagtgc

SEQ ID NO: 984679 - DNA, 33 bp, Homo sapien
tatgtaactattctcacattaatctcttggtgg

SEQ ID NO: 984680 - DNA, 33 bp, Homo sapien
tatgtaactattctcatattaatctcttggtgg

SEQ ID NO: 984681 - DNA, 33 bp, Homo sapien
tcggagtacctggtaaatatttgctggattaat

SEQ ID NO: 984682 - DNA, 33 bp, Homo sapien
tcggagtacctggtaagtatttgctggattaat

SEQ ID NO: 984683 - DNA, 33 bp, Homo sapien
agaggacactttatacagaacagatgggctgat

SEQ ID NO: 984684 - DNA, 33 bp, Homo sapien
agaggacactttatacggaacagatgggctgat

SEQ ID NO: 984685 - DNA, 33 bp, Homo sapien
tcactggctcagatgtaaaaaacaatctgcaca

SEQ ID NO: 984686 - DNA, 33 bp, Homo sapien
tcactggctcagatgtgaaaaacaatctgcaca

SEQ ID NO: 984687 - DNA, 33 bp, Homo sapien
gtcagcttaagcaagaacttttgtatttatact

SEQ ID NO: 984688 - DNA, 33 bp, Homo sapien
gtcagcttaagcaagagcttttgtatttatact

SEQ ID NO: 984689 - DNA, 33 bp, Homo sapien
atagtagtaaagtccaccttcaaaggagtaatt

SEQ ID NO: 984690 - DNA, 33 bp, Homo sapien
atagtagtaaagtccatcttcaaaggagtaatt

SEQ ID NO: 984691 - DNA, 33 bp, Homo sapien
aagggcactgtgattacgtaagaaaatgtgctt

SEQ ID NO: 984692 - DNA, 33 bp, Homo sapien
aagggcactgtgattatgtaagaaaatgtgctt

SEQ ID NO: 984693 - DNA, 33 bp, Homo sapien
cctggatagaagacaaaagagggaactctagaa

SEQ ID NO: 984694 - DNA, 33 bp, Homo sapien
cctggatagaagacaacagagggaactctagaa

SEQ ID NO: 984695 - DNA, 33 bp, Homo sapien
taatgtaaagagtgagaccacctggatagaaga

SEQ ID NO: 984696 - DNA, 33 bp, Homo sapien
taatgtaaagagtgaggccacctggatagaaga

SEQ ID NO: 984697 - DNA, 33 bp, Homo sapien
ccttttgcaagccttcaccaaaacatgtttatt

SEQ ID NO: 984698 - DNA, 33 bp, Homo sapien
ccttttgcaagccttcgccaaaacatgtttatt

SEQ ID NO: 984699 - DNA, 33 bp, Homo sapien
taaaaatggacagatcactttggaaatagttct

SEQ ID NO: 984700 - DNA, 33 bp, Homo sapien
taaaaatggacagatcgctttggaaatagttct

SEQ ID NO: 984701 - DNA, 33 bp, Homo sapien
taaagttttgtgcataagaaaggtaggaatcat

SEQ ID NO: 984702 - DNA, 33 bp, Homo sapien
taaagttttgtgcatacgaaaggtaggaatcat

SEQ ID NO: 984703 - DNA, 33 bp, Homo sapien
acattcactcttcctcacatctcacctgtgtat

SEQ ID NO: 984704 - DNA, 33 bp, Homo sapien
acattcactcttcctcgcatctcacctgtgtat

SEQ ID NO: 984705 - DNA, 33 bp, Homo sapien
gctaacagaaggaatagggataattgatgttaa

SEQ ID NO: 984706 - DNA, 33 bp, Homo sapien
gctaacagaaggaatatggataattgatgttaa

SEQ ID NO: 984707 - DNA, 33 bp, Homo sapien
agattgaagttaatgtcaatagtgcaagaagaa

SEQ ID NO: 984708 - DNA, 33 bp, Homo sapien
agattgaagttaatgtgaatagtgcaagaagaa

SEQ ID NO: 984709 - DNA, 33 bp, Homo sapien
tgtttagtatgaaataacatcagaaacaataag

SEQ ID NO: 984710 - DNA, 33 bp, Homo sapien
tgtttagtatgaaatagcatcagaaacaataag

SEQ ID NO: 984711 - DNA, 33 bp, Homo sapien
gatgctttaccagctaaacttcaacacgttgat

SEQ ID NO: 984712 - DNA, 33 bp, Homo sapien
gatgctttaccagctacacttcaacacgttgat

SEQ ID NO: 984713 - DNA, 33 bp, Homo sapien
aaatgtatatacttgacagtttagcaataaata

SEQ ID NO: 984714 - DNA, 33 bp, Homo sapien
aaatgtatatacttgatagtttagcaataaata

SEQ ID NO: 984715 - DNA, 33 bp, Homo sapien
tttatattatctatatcaacattctttagtatc

SEQ ID NO: 984716 - DNA, 33 bp, Homo sapien
tttatattatctatatgaacattctttagtatc

SEQ ID NO: 984717 - DNA, 33 bp, Homo sapien
ttgcttttatcttccccagtgtccagcaggtag

SEQ ID NO: 984718 - DNA, 33 bp, Homo sapien
ttgcttttatcttcccgagtgtccagcaggtag

SEQ ID NO: 984719 - DNA, 33 bp, Homo sapien
acgacactgtctaagcacatctacattgtgaca

SEQ ID NO: 984720 - DNA, 33 bp, Homo sapien
acgacactgtctaagcgcatctacattgtgaca

SEQ ID NO: 984721 - DNA, 33 bp, Homo sapien
gagttaaagaaaagccacagctggccttctttt

SEQ ID NO: 984722 - DNA, 33 bp, Homo sapien
gagttaaagaaaagccgcagctggccttctttt

SEQ ID NO: 984723 - DNA, 33 bp, Homo sapien
aaaaatttttctgctacgaataatggctacttt

SEQ ID NO: 984724 - DNA, 33 bp, Homo sapien
aaaaatttttctgctatgaataatggctacttt

SEQ ID NO: 984725 - DNA, 33 bp, Homo sapien
tcagtgcaacaatttagaaagccttgcttgtgt

SEQ ID NO: 984726 - DNA, 33 bp, Homo sapien
tcagtgcaacaatttataaagccttgcttgtgt

SEQ ID NO: 984727 - DNA, 33 bp, Homo sapien
gtggaaaaatctgagacgtatttagaagataaa

SEQ ID NO: 984728 - DNA, 33 bp, Homo sapien
gtggaaaaatctgagatgtatttagaagataaa

SEQ ID NO: 984729 - DNA, 33 bp, Homo sapien
aaacattatcaaaaggaaagtagcagagtgaaa

SEQ ID NO: 984730 - DNA, 33 bp, Homo sapien
aaacattatcaaaaggcaagtagcagagtgaaa

SEQ ID NO: 984731 - DNA, 33 bp, Homo sapien
ctcttctttttcaacactcatgccacataaaga

SEQ ID NO: 984732 - DNA, 33 bp, Homo sapien
ctcttctttttcaacattcatgccacataaaga

SEQ ID NO: 984733 - DNA, 33 bp, Homo sapien
aagatggatatcaccaagacatgtagacatcag

SEQ ID NO: 984734 - DNA, 33 bp, Homo sapien
aagatggatatcaccaggacatgtagacatcag

SEQ ID NO: 984735 - DNA, 33 bp, Homo sapien
atattcaaataagcacaatcagaaatgaaaagg

SEQ ID NO: 984736 - DNA, 33 bp, Homo sapien
atattcaaataagcaccatcagaaatgaaaagg

SEQ ID NO: 984737 - DNA, 33 bp, Homo sapien
gattgaatctgtataaaaaatccatccccccaa

SEQ ID NO: 984738 - DNA, 33 bp, Homo sapien
gattgaatctgtataacaaatccatccccccaa

SEQ ID NO: 984739 - DNA, 33 bp, Homo sapien
ctactaatacacctggaacaaagactcccgcag

SEQ ID NO: 984740 - DNA, 33 bp, Homo sapien
ctactaatacacctgggacaaagactcccgcag

SEQ ID NO: 984741 - DNA, 33 bp, Homo sapien
tcctatacgtaagcaacgaccaaatctcgtaga

SEQ ID NO: 984742 - DNA, 33 bp, Homo sapien
tcctatacgtaagcaatgaccaaatctcgtaga

SEQ ID NO: 984743 - DNA, 33 bp, Homo sapien
ggacatgtttgcagacagatgcaatcagtgcct

SEQ ID NO: 984744 - DNA, 33 bp, Homo sapien
ggacatgtttgcagacggatgcaatcagtgcct

SEQ ID NO: 984745 - DNA, 33 bp, Homo sapien
atgcattcacccataaatgaattcgcccatcca

SEQ ID NO: 984746 - DNA, 33 bp, Homo sapien
atgcattcacccataactgaattcgcccatcca

SEQ ID NO: 984747 - DNA, 33 bp, Homo sapien
ttcatgacttattttacaaggttgcagtcttaa

SEQ ID NO: 984748 - DNA, 33 bp, Homo sapien
ttcatgacttattttataaggttgcagtcttaa

SEQ ID NO: 984749 - DNA, 33 bp, Homo sapien
ccctttgtacataacccgaccgttgtctctggc

SEQ ID NO: 984750 - DNA, 33 bp, Homo sapien
ccctttgtacataacctgaccgttgtctctggc

SEQ ID NO: 984751 - DNA, 33 bp, Homo sapien
aaattattttgaaaaacgcaaacagagttgtct

SEQ ID NO: 984752 - DNA, 33 bp, Homo sapien
aaattattttgaaaaatgcaaacagagttgtct

SEQ ID NO: 984753 - DNA, 33 bp, Homo sapien
gagctatcaagagccactggagtgtgttgagct

SEQ ID NO: 984754 - DNA, 33 bp, Homo sapien
gagctatcaagagccattggagtgtgttgagct

SEQ ID NO: 984755 - DNA, 33 bp, Homo sapien
gggctcatgaaatatacatcaaacaagttcttt

SEQ ID NO: 984756 - DNA, 33 bp, Homo sapien
gggctcatgaaatatatatcaaacaagttcttt

SEQ ID NO: 984757 - DNA, 33 bp, Homo sapien
cctcaaatcaaaaatacaggtgatgctacttat

SEQ ID NO: 984758 - DNA, 33 bp, Homo sapien
cctcaaatcaaaaatagaggtgatgctacttat

SEQ ID NO: 984759 - DNA, 33 bp, Homo sapien
atccaactctcttgccccaactttagcttattt

SEQ ID NO: 984760 - DNA, 33 bp, Homo sapien
atccaactctcttgcctcaactttagcttattt

SEQ ID NO: 984761 - DNA, 33 bp, Homo sapien
aaaaaggataagaggacaacgaatagtgaaaat

SEQ ID NO: 984762 - DNA, 33 bp, Homo sapien
aaaaaggataagaggagaacgaatagtgaaaat

SEQ ID NO: 984763 - DNA, 33 bp, Homo sapien
taaacgtggtgtgttacaatcagatggctttac

SEQ ID NO: 984764 - DNA, 33 bp, Homo sapien
taaacgtggtgtgttagaatcagatggctttac

SEQ ID NO: 984765 - DNA, 33 bp, Homo sapien
atcaagcttgaagtccacatttccaaacagaga

SEQ ID NO: 984766 - DNA, 33 bp, Homo sapien
atcaagcttgaagtccgcatttccaaacagaga

SEQ ID NO: 984767 - DNA, 33 bp, Homo sapien
aattctctaacttctgaatgtgcagtttatttc

SEQ ID NO: 984768 - DNA, 33 bp, Homo sapien
aattctctaacttctggatgtgcagtttatttc

SEQ ID NO: 984769 - DNA, 33 bp, Homo sapien
actctatgcgtagacactatatgcttttctcct

SEQ ID NO: 984770 - DNA, 33 bp, Homo sapien
actctatgcgtagacattatatgcttttctcct

SEQ ID NO: 984771 - DNA, 33 bp, Homo sapien
gatttccattttccagacactatttcgtgatac

SEQ ID NO: 984772 - DNA, 33 bp, Homo sapien
gatttccattttccaggcactatttcgtgatac

SEQ ID NO: 984773 - DNA, 33 bp, Homo sapien
ctgccaccacccacaaatgttatccaggagcct

SEQ ID NO: 984774 - DNA, 33 bp, Homo sapien
ctgccaccacccacaagtgttatccaggagcct

SEQ ID NO: 984775 - DNA, 33 bp, Homo sapien
gagttcaggcataaaactgaccaccattaacat

SEQ ID NO: 984776 - DNA, 33 bp, Homo sapien
gagttcaggcataaaattgaccaccattaacat

SEQ ID NO: 984777 - DNA, 33 bp, Homo sapien
agctactcatgttcaacctgtccaaagaaaaca

SEQ ID NO: 984778 - DNA, 33 bp, Homo sapien
agctactcatgttcaatctgtccaaagaaaaca

SEQ ID NO: 984779 - DNA, 33 bp, Homo sapien
cttattatggttacaacgcggatagcaatggtt

SEQ ID NO: 984780 - DNA, 33 bp, Homo sapien
cttattatggttacaatgcggatagcaatggtt

SEQ ID NO: 984781 - DNA, 33 bp, Homo sapien
aattactgtcaactaaaccctgctagtgtaagc

SEQ ID NO: 984782 - DNA, 33 bp, Homo sapien
aattactgtcaactaatccctgctagtgtaagc

SEQ ID NO: 984783 - DNA, 33 bp, Homo sapien
gaaagtttaaagcatacgttttcagataaatct

SEQ ID NO: 984784 - DNA, 33 bp, Homo sapien
gaaagtttaaagcatatgttttcagataaatct

SEQ ID NO: 984785 - DNA, 33 bp, Homo sapien
gaattcttattaggaggaacaatcccttgcata

SEQ ID NO: 984786 - DNA, 33 bp, Homo sapien
gaattcttattaggagtaacaatcccttgcata

SEQ ID NO: 984787 - DNA, 33 bp, Homo sapien
gctctaaattataagaatcattatcctgaatca

SEQ ID NO: 984788 - DNA, 33 bp, Homo sapien
gctctaaattataagagtcattatcctgaatca

SEQ ID NO: 984789 - DNA, 33 bp, Homo sapien
gcacttgactgtcactcagtagatgctaaatga

SEQ ID NO: 984790 - DNA, 33 bp, Homo sapien
gcacttgactgtcacttagtagatgctaaatga

SEQ ID NO: 984791 - DNA, 33 bp, Homo sapien
ggaattagttctaaagacttatgatggatggtt

SEQ ID NO: 984792 - DNA, 33 bp, Homo sapien
ggaattagttctaaaggcttatgatggatggtt

SEQ ID NO: 984793 - DNA, 33 bp, Homo sapien
ccttgcatttgtaagacaggcaaggacataggg

SEQ ID NO: 984794 - DNA, 33 bp, Homo sapien
ccttgcatttgtaagagaggcaaggacataggg

SEQ ID NO: 984795 - DNA, 33 bp, Homo sapien
tctcttcagtatccgacaagtgcttgccacata

SEQ ID NO: 984796 - DNA, 33 bp, Homo sapien
tctcttcagtatccgagaagtgcttgccacata

SEQ ID NO: 984797 - DNA, 33 bp, Homo sapien
aaattaaaaggcatcaatgaaatgtgaatacct

SEQ ID NO: 984798 - DNA, 33 bp, Homo sapien
aaattaaaaggcatcagtgaaatgtgaatacct

SEQ ID NO: 984799 - DNA, 33 bp, Homo sapien
agtcgcacctgcaacacccactttaaagggaat

SEQ ID NO: 984800 - DNA, 33 bp, Homo sapien
agtcgcacctgcaacatccactttaaagggaat

SEQ ID NO: 984801 - DNA, 33 bp, Homo sapien
ctctactagtgcagtacggagggaataggtggg

SEQ ID NO: 984802 - DNA, 33 bp, Homo sapien
ctctactagtgcagtatggagggaataggtggg

SEQ ID NO: 984803 - DNA, 33 bp, Homo sapien
ataaatccaccaaaccacaatgataaacaataa

SEQ ID NO: 984804 - DNA, 33 bp, Homo sapien
ataaatccaccaaaccgcaatgataaacaataa

SEQ ID NO: 984805 - DNA, 33 bp, Homo sapien
ttgagcttaattattacactttatggcacgtta

SEQ ID NO: 984806 - DNA, 33 bp, Homo sapien
ttgagcttaattattatactttatggcacgtta

SEQ ID NO: 984807 - DNA, 33 bp, Homo sapien
tgggttagttagtatacatgtattctggtgatg

SEQ ID NO: 984808 - DNA, 33 bp, Homo sapien
tgggttagttagtatatatgtattctggtgatg

SEQ ID NO: 984809 - DNA, 33 bp, Homo sapien
attatggcctgagaacagcaaagtatgtctctt

SEQ ID NO: 984810 - DNA, 33 bp, Homo sapien
attatggcctgagaacggcaaagtatgtctctt

SEQ ID NO: 984811 - DNA, 33 bp, Homo sapien
tcagtggagagtatcaaaaaatatgaattctat

SEQ ID NO: 984812 - DNA, 33 bp, Homo sapien
tcagtggagagtatcacaaaatatgaattctat

SEQ ID NO: 984813 - DNA, 33 bp, Homo sapien
tagatgtaaggattaagtcagcttaaaatctca

SEQ ID NO: 984814 - DNA, 33 bp, Homo sapien
tagatgtaaggattaattcagcttaaaatctca

SEQ ID NO: 984815 - DNA, 33 bp, Homo sapien
atttaataatgaggaaagatcagattggtaata

SEQ ID NO: 984816 - DNA, 33 bp, Homo sapien
atttaataatgaggaaggatcagattggtaata

SEQ ID NO: 984817 - DNA, 33 bp, Homo sapien
ttttttacaaagcataacgtttactgaaacttg

SEQ ID NO: 984818 - DNA, 33 bp, Homo sapien
ttttttacaaagcatagcgtttactgaaacttg

SEQ ID NO: 984819 - DNA, 33 bp, Homo sapien
atcttataattcaccaatgaaaaagtactctac

SEQ ID NO: 984820 - DNA, 33 bp, Homo sapien
atcttataattcaccagtgaaaaagtactctac

SEQ ID NO: 984821 - DNA, 33 bp, Homo sapien
cattcaatgaaagagtaaaccagagtaagaatg

SEQ ID NO: 984822 - DNA, 33 bp, Homo sapien
cattcaatgaaagagttaaccagagtaagaatg

SEQ ID NO: 984823 - DNA, 33 bp, Homo sapien
aaagtgattgaaaaaaatatcctaatgttctga

SEQ ID NO: 984824 - DNA, 33 bp, Homo sapien
aaagtgattgaaaaaagtatcctaatgttctga

SEQ ID NO: 984825 - DNA, 33 bp, Homo sapien
tgaacacttggacaaaagctcatctaattcacc

SEQ ID NO: 984826 - DNA, 33 bp, Homo sapien
tgaacacttggacaaaggctcatctaattcacc

SEQ ID NO: 984827 - DNA, 33 bp, Homo sapien
gaggagcttatacaggaagttacacgattcatc

SEQ ID NO: 984828 - DNA, 33 bp, Homo sapien
gaggagcttatacaggcagttacacgattcatc

SEQ ID NO: 984829 - DNA, 33 bp, Homo sapien
gctgccacaagttggactattttatcatttagc

SEQ ID NO: 984830 - DNA, 33 bp, Homo sapien
gctgccacaagttggattattttatcatttagc

SEQ ID NO: 984831 - DNA, 33 bp, Homo sapien
tgaggagctgaaaataagtgtaactgattgcat

SEQ ID NO: 984832 - DNA, 33 bp, Homo sapien
tgaggagctgaaaatatgtgtaactgattgcat

SEQ ID NO: 984833 - DNA, 33 bp, Homo sapien
cttaagatccactgtcggaaaatattctaagaa

SEQ ID NO: 984834 - DNA, 33 bp, Homo sapien
cttaagatccactgtctgaaaatattctaagaa

SEQ ID NO: 984835 - DNA, 33 bp, Homo sapien
ttttcttttctagccaatgaaatgtattgttct

SEQ ID NO: 984836 - DNA, 33 bp, Homo sapien
ttttcttttctagccagtgaaatgtattgttct

SEQ ID NO: 984837 - DNA, 33 bp, Homo sapien
caggatgattacctgacaccatttctgagatga

SEQ ID NO: 984838 - DNA, 33 bp, Homo sapien
caggatgattacctgataccatttctgagatga

SEQ ID NO: 984839 - DNA, 33 bp, Homo sapien
gaatattctgtctatgccaaatccttatcaaat

SEQ ID NO: 984840 - DNA, 33 bp, Homo sapien
gaatattctgtctatgtcaaatccttatcaaat

SEQ ID NO: 984841 - DNA, 33 bp, Homo sapien
gttcctctgtaactcacgatgttattttcccta

SEQ ID NO: 984842 - DNA, 33 bp, Homo sapien
gttcctctgtaactcaggatgttattttcccta

SEQ ID NO: 984843 - DNA, 33 bp, Homo sapien
ataagtttttctggaaagtagagtaaaaatact

SEQ ID NO: 984844 - DNA, 33 bp, Homo sapien
ataagtttttctggaaggtagagtaaaaatact

SEQ ID NO: 984845 - DNA, 33 bp, Homo sapien
tctgctgctatctcaaatcaggacattattttc

SEQ ID NO: 984846 - DNA, 33 bp, Homo sapien
tctgctgctatctcaattcaggacattattttc

SEQ ID NO: 984847 - DNA, 33 bp, Homo sapien
ctagtaagaaatgttacgcagctgttaaacgat

SEQ ID NO: 984848 - DNA, 33 bp, Homo sapien
ctagtaagaaatgttatgcagctgttaaacgat

SEQ ID NO: 984849 - DNA, 33 bp, Homo sapien
ctttaggcctctatgaactttttttagcaattg

SEQ ID NO: 984850 - DNA, 33 bp, Homo sapien
ctttaggcctctatgagctttttttagcaattg

SEQ ID NO: 984851 - DNA, 33 bp, Homo sapien
tatagaataatttaccaatgcagtagatacagg

SEQ ID NO: 984852 - DNA, 33 bp, Homo sapien
tatagaataatttacccatgcagtagatacagg

SEQ ID NO: 984853 - DNA, 33 bp, Homo sapien
gatgtttcggaaacgccacctagatttcacagg

SEQ ID NO: 984854 - DNA, 33 bp, Homo sapien
gatgtttcggaaacgctacctagatttcacagg

SEQ ID NO: 984855 - DNA, 33 bp, Homo sapien
atgaaaaggaattagactactgcagaatagaat

SEQ ID NO: 984856 - DNA, 33 bp, Homo sapien
atgaaaaggaattagattactgcagaatagaat

SEQ ID NO: 984857 - DNA, 33 bp, Homo sapien
ctaatgcaggaaatgacacaatccaatttgtat

SEQ ID NO: 984858 - DNA, 33 bp, Homo sapien
ctaatgcaggaaatgatacaatccaatttgtat

SEQ ID NO: 984859 - DNA, 33 bp, Homo sapien
catgtcctttgtagggacatgggtaaagctgga

SEQ ID NO: 984860 - DNA, 33 bp, Homo sapien
catgtcctttgtagggtcatgggtaaagctgga

SEQ ID NO: 984861 - DNA, 33 bp, Homo sapien
cttacattagattcagacacactccattgtcca

SEQ ID NO: 984862 - DNA, 33 bp, Homo sapien
cttacattagattcagtcacactccattgtcca

SEQ ID NO: 984863 - DNA, 33 bp, Homo sapien
atgctaattttcctcacgtctggggatattttt

SEQ ID NO: 984864 - DNA, 33 bp, Homo sapien
atgctaattttcctcatgtctggggatattttt

SEQ ID NO: 984865 - DNA, 33 bp, Homo sapien
ttaataatactatgtacgaatcaattgagatca

SEQ ID NO: 984866 - DNA, 33 bp, Homo sapien
ttaataatactatgtaggaatcaattgagatca

SEQ ID NO: 984867 - DNA, 33 bp, Homo sapien
tcctttatagacaagcaaacaatgagagatttt

SEQ ID NO: 984868 - DNA, 33 bp, Homo sapien
tcctttatagacaagcgaacaatgagagatttt

SEQ ID NO: 984869 - DNA, 33 bp, Homo sapien; identical to SEQ ID NO: 984867

SEQ ID NO: 984870 - DNA, 33 bp, Homo sapien; identical to SEQ ID NO: 984868

SEQ ID NO: 984871 - DNA, 33 bp, Homo sapien
tacaacttcatggaacacaaattggtctggtca

SEQ ID NO: 984872 - DNA, 33 bp, Homo sapien
tacaacttcatggaacgcaaattggtctggtca

SEQ ID NO: 984873 - DNA, 33 bp, Homo sapien
gttgaattaaaatggaagcatctttgttccagg

SEQ ID NO: 984874 - DNA, 33 bp, Homo sapien
gttgaattaaaatggatgcatctttgttccagg

SEQ ID NO: 984875 - DNA, 33 bp, Homo sapien
ctaagtctcataattgaagggccttttctactt

SEQ ID NO: 984876 - DNA, 33 bp, Homo sapien
ctaagtctcataattgtagggccttttctactt

SEQ ID NO: 984877 - DNA, 33 bp, Homo sapien
aatcacctgcaaataacagtattgatgaaataa

SEQ ID NO: 984878 - DNA, 33 bp, Homo sapien
aatcacctgcaaataatagtattgatgaaataa

SEQ ID NO: 984879 - DNA, 33 bp, Homo sapien
gtgtaatttagctcaaaagaagaaggaagagtt

SEQ ID NO: 984880 - DNA, 33 bp, Homo sapien
gtgtaatttagctcaagagaagaaggaagagtt

SEQ ID NO: 984881 - DNA, 33 bp, Homo sapien
cactacaagcaatttgaatcagtggatgattat

SEQ ID NO: 984882 - DNA, 33 bp, Homo sapien
cactacaagcaatttggatcagtggatgattat

SEQ ID NO: 984883 - DNA, 33 bp, Homo sapien
gatttggaatgtcaaggcctgttgatgaataac

SEQ ID NO: 984884 - DNA, 33 bp, Homo sapien
gatttggaatgtcaagtcctgttgatgaataac

SEQ ID NO: 984885 - DNA, 33 bp, Homo sapien
acctggacaatttcacagtattcttgggtatga

SEQ ID NO: 984886 - DNA, 33 bp, Homo sapien
acctggacaatttcactgtattcttgggtatga

SEQ ID NO: 984887 - DNA, 33 bp, Homo sapien
aaggagtcacaaagtacaaaacaacaatccaaa

SEQ ID NO: 984888 - DNA, 33 bp, Homo sapien
aaggagtcacaaagtataaaacaacaatccaaa

SEQ ID NO: 984889 - DNA, 33 bp, Homo sapien
ccaatgttctgggaaacggtttcttctcagtcc

SEQ ID NO: 984890 - DNA, 33 bp, Homo sapien
ccaatgttctgggaaatggtttcttctcagtcc

SEQ ID NO: 984891 - DNA, 33 bp, Homo sapien
tttatgctggacaaaaattctatagatttatgc

SEQ ID NO: 984892 - DNA, 33 bp, Homo sapien
tttatgctggacaaaatttctatagatttatgc

SEQ ID NO: 984893 - DNA, 33 bp, Homo sapien
catccaattactgaaacgagatcaatgttcatg

SEQ ID NO: 984894 - DNA, 33 bp, Homo sapien
catccaattactgaaatgagatcaatgttcatg

SEQ ID NO: 984895 - DNA, 33 bp, Homo sapien
ttcattcctacccttacgatagcccttgtctta

SEQ ID NO: 984896 - DNA, 33 bp, Homo sapien
ttcattcctacccttatgatagcccttgtctta

SEQ ID NO: 984897 - DNA, 33 bp, Homo sapien
cagctactggtactacaatactcttcaacaatt

SEQ ID NO: 984898 - DNA, 33 bp, Homo sapien
cagctactggtactaccatactcttcaacaatt

SEQ ID NO: 984899 - DNA, 33 bp, Homo sapien
aaacctcatttttggcaataaattgaagccagc

SEQ ID NO: 984900 - DNA, 33 bp, Homo sapien
aaacctcatttttggcgataaattgaagccagc

SEQ ID NO: 984901 - DNA, 33 bp, Homo sapien
ttcttgtaagcttcatcatgaaacagtttagtc

SEQ ID NO: 984902 - DNA, 33 bp, Homo sapien
ttcttgtaagcttcattatgaaacagtttagtc

SEQ ID NO: 984903 - DNA, 33 bp, Homo sapien
tcataattcctgttaaaactagtatcattgaag

SEQ ID NO: 984904 - DNA, 33 bp, Homo sapien
tcataattcctgttaagactagtatcattgaag

SEQ ID NO: 984905 - DNA, 33 bp, Homo sapien
ctgtacttttgaaacacgacagaaagcttgtgg

SEQ ID NO: 984906 - DNA, 33 bp, Homo sapien
ctgtacttttgaaacatgacagaaagcttgtgg

SEQ ID NO: 984907 - DNA, 33 bp, Homo sapien
ccccaaagtgacaaaacgtgcttttagagattc

SEQ ID NO: 984908 - DNA, 33 bp, Homo sapien
ccccaaagtgacaaaatgtgcttttagagattc

SEQ ID NO: 984909 - DNA, 33 bp, Homo sapien
acaagagggaaaggacaatagtgtgagtgtgag

SEQ ID NO: 984910 - DNA, 33 bp, Homo sapien
acaagagggaaaggacgatagtgtgagtgtgag

SEQ ID NO: 984911 - DNA, 33 bp, Homo sapien
ataatgtattttattacgtcatagctcttagta

SEQ ID NO: 984912 - DNA, 33 bp, Homo sapien
ataatgtattttattatgtcatagctcttagta

SEQ ID NO: 984913 - DNA, 33 bp, Homo sapien
tcaaacataatgaaaacgggaattgatgaatgg

SEQ ID NO: 984914 - DNA, 33 bp, Homo sapien
tcaaacataatgaaaatgggaattgatgaatgg

SEQ ID NO: 984915 - DNA, 33 bp, Homo sapien
aaacaaccaatcagaaagaaaagaatatgctat

SEQ ID NO: 984916 - DNA, 33 bp, Homo sapien
aaacaaccaatcagaaggaaaagaatatgctat

SEQ ID NO: 984917 - DNA, 33 bp, Homo sapien
gagttgtaagctagaaaatgatggaccacttga

SEQ ID NO: 984918 - DNA, 33 bp, Homo sapien
gagttgtaagctagaatatgatggaccacttga

SEQ ID NO: 984919 - DNA, 33 bp, Homo sapien
caccaagaaatgtgtaaagcgatgtattttgat

SEQ ID NO: 984920 - DNA, 33 bp, Homo sapien
caccaagaaatgtgtacagcgatgtattttgat

SEQ ID NO: 984921 - DNA, 33 bp, Homo sapien
attaatattcagagtaccatctagccagtctgt

SEQ ID NO: 984922 - DNA, 33 bp, Homo sapien
attaatattcagagtagcatctagccagtctgt

SEQ ID NO: 984923 - DNA, 33 bp, Homo sapien
aatcctaccaacacaacatgaacaatctaaaac

SEQ ID NO: 984924 - DNA, 33 bp, Homo sapien
aatcctaccaacacaatatgaacaatctaaaac

SEQ ID NO: 984925 - DNA, 33 bp, Homo sapien
catgtattaacttcgaccatatacacaaaatgc

SEQ ID NO: 984926 - DNA, 33 bp, Homo sapien
catgtattaacttcgatcatatacacaaaatgc

SEQ ID NO: 984927 - DNA, 33 bp, Homo sapien
gtagggagtaatgaaagtattgaggctgcaaga

SEQ ID NO: 984928 - DNA, 33 bp, Homo sapien
gtagggagtaatgaaattattgaggctgcaaga

SEQ ID NO: 984929 - DNA, 33 bp, Homo sapien
ttttcctctgaggttacgtatgtttatgctatg

SEQ ID NO: 984930 - DNA, 33 bp, Homo sapien
ttttcctctgaggttatgtatgtttatgctatg

SEQ ID NO: 984931 - DNA, 33 bp, Homo sapien
aattctcctctgtaaaatacctctctcatattt

SEQ ID NO: 984932 - DNA, 33 bp, Homo sapien
aattctcctctgtaaagtacctctctcatattt

SEQ ID NO: 984933 - DNA, 33 bp, Homo sapien
aacacaggaaatgaaaacaacctgtgagaaaca

SEQ ID NO: 984934 - DNA, 33 bp, Homo sapien
aacacaggaaatgaaagcaacctgtgagaaaca

SEQ ID NO: 984935 - DNA, 33 bp, Homo sapien
taagacacaaggaatcaaaacacaggaaatgaa

SEQ ID NO: 984936 - DNA, 33 bp, Homo sapien
taagacacaaggaatcgaaacacaggaaatgaa

SEQ ID NO: 984937 - DNA, 33 bp, Homo sapien
ttctgaaccagacacaaaatgggtattgaagtt

SEQ ID NO: 984938 - DNA, 33 bp, Homo sapien
ttctgaaccagacacagaatgggtattgaagtt

SEQ ID NO: 984939 - DNA, 33 bp, Homo sapien
gctaggcaaactataaaccaaaaggaaattgga

SEQ ID NO: 984940 - DNA, 33 bp, Homo sapien
gctaggcaaactataagccaaaaggaaattgga

SEQ ID NO: 984941 - DNA, 33 bp, Homo sapien
cttccataattcctgaagttatcaatttctgac

SEQ ID NO: 984942 - DNA, 33 bp, Homo sapien
cttccataattcctgatgttatcaatttctgac

SEQ ID NO: 984943 - DNA, 33 bp, Homo sapien
cccaatagcaaggtcactatgtaacaagatcga

SEQ ID NO: 984944 - DNA, 33 bp, Homo sapien
cccaatagcaaggtcattatgtaacaagatcga

SEQ ID NO: 984945 - DNA, 33 bp, Homo sapien
tgatggtagaatgttaaacaatgtgacacaaat

SEQ ID NO: 984946 - DNA, 33 bp, Homo sapien
tgatggtagaatgttatacaatgtgacacaaat

SEQ ID NO: 984947 - DNA, 33 bp, Homo sapien
ttaccatactgagtcaacagcatttcctagcta

SEQ ID NO: 984948 - DNA, 33 bp, Homo sapien
ttaccatactgagtcagcagcatttcctagcta

SEQ ID NO: 984949 - DNA, 33 bp, Homo sapien
cataatacctgtaaaacaactactgcaatatta

SEQ ID NO: 984950 - DNA, 33 bp, Homo sapien
cataatacctgtaaaataactactgcaatatta

SEQ ID NO: 984951 - DNA, 33 bp, Homo sapien
tcccttctgaagtatacgttagatgattcatga

SEQ ID NO: 984952 - DNA, 33 bp, Homo sapien
tcccttctgaagtatatgttagatgattcatga

SEQ ID NO: 984953 - DNA, 33 bp, Homo sapien
gtgtatgaaagcataactgatgaaagacctaac

SEQ ID NO: 984954 - DNA, 33 bp, Homo sapien
gtgtatgaaagcataattgatgaaagacctaac

SEQ ID NO: 984955 - DNA, 33 bp, Homo sapien
acaggtagactctgtcaattgtgaggtgataac

SEQ ID NO: 984956 - DNA, 33 bp, Homo sapien
acaggtagactctgtcgattgtgaggtgataac

SEQ ID NO: 984957 - DNA, 33 bp, Homo sapien
ctcaagaatgtttatacgttggaggcttagaag

SEQ ID NO: 984958 - DNA, 33 bp, Homo sapien
ctcaagaatgtttatatgttggaggcttagaag

SEQ ID NO: 984959 - DNA, 33 bp, Homo sapien
ataaaacatctacagcacctgtgttaatacaaa

SEQ ID NO: 984960 - DNA, 33 bp, Homo sapien
ataaaacatctacagcccctgtgttaatacaaa

SEQ ID NO: 984961 - DNA, 33 bp, Homo sapien
ccaaccagtcccttgcacttgccaaaatcagag

SEQ ID NO: 984962 - DNA, 33 bp, Homo sapien
ccaaccagtcccttgcgcttgccaaaatcagag

SEQ ID NO: 984963 - DNA, 33 bp, Homo sapien
ccacatcaaaaatacactggactgcagagctca

SEQ ID NO: 984964 - DNA, 33 bp, Homo sapien
ccacatcaaaaatacattggactgcagagctca

SEQ ID NO: 984965 - DNA, 33 bp, Homo sapien
tgcaatgttttgctcacctaaacacaatccatt

SEQ ID NO: 984966 - DNA, 33 bp, Homo sapien
tgcaatgttttgctcatctaaacacaatccatt

SEQ ID NO: 984967 - DNA, 33 bp, Homo sapien
attgaataaaaggtagaagtacttagccattta

SEQ ID NO: 984968 - DNA, 33 bp, Homo sapien
attgaataaaaggtagcagtacttagccattta

SEQ ID NO: 984969 - DNA, 33 bp, Homo sapien
aagtgaaaattcttcccacctaggattgtgcag

SEQ ID NO: 984970 - DNA, 33 bp, Homo sapien
aagtgaaaattcttcctacctaggattgtgcag

SEQ ID NO: 984971 - DNA, 33 bp, Homo sapien
aactgaaatccagttacgtatcttaactcagat

SEQ ID NO: 984972 - DNA, 33 bp, Homo sapien
aactgaaatccagttatgtatcttaactcagat

SEQ ID NO: 984973 - DNA, 33 bp, Homo sapien
caggctacaaagctgacgaggtatagaccaaat

SEQ ID NO: 984974 - DNA, 33 bp, Homo sapien
caggctacaaagctgatgaggtatagaccaaat

SEQ ID NO: 984975 - DNA, 33 bp, Homo sapien
attcaaaattttaatgccacttatgtacccaat

SEQ ID NO: 984976 - DNA, 33 bp, Homo sapien
attcaaaattttaatggcacttatgtacccaat

SEQ ID NO: 984977 - DNA, 33 bp, Homo sapien
agtctgagttttttaccggctgagaagggagga

SEQ ID NO: 984978 - DNA, 33 bp, Homo sapien
agtctgagttttttactggctgagaagggagga

SEQ ID NO: 984979 - DNA, 33 bp, Homo sapien
caaatctctacctttgcataccttatgtcacca

SEQ ID NO: 984980 - DNA, 33 bp, Homo sapien
caaatctctacctttggataccttatgtcacca

SEQ ID NO: 984981 - DNA, 33 bp, Homo sapien
acgaaaccaagcagtcacatcatctttaggata

SEQ ID NO: 984982 - DNA, 33 bp, Homo sapien
acgaaaccaagcagtcgcatcatctttaggata

SEQ ID NO: 984983 - DNA, 33 bp, Homo sapien
tcttgttaatctaatcaaggatggctgattaac

SEQ ID NO: 984984 - DNA, 33 bp, Homo sapien
tcttgttaatctaatcgaggatggctgattaac

SEQ ID NO: 984985 - DNA, 33 bp, Homo sapien
attcagtttgaaatatcaacattgtatcatgag

SEQ ID NO: 984986 - DNA, 33 bp, Homo sapien
attcagtttgaaatattaacattgtatcatgag

SEQ ID NO: 984987 - DNA, 33 bp, Homo sapien
tatatcttttatcaccacggtaagcctgacatt

SEQ ID NO: 984988 - DNA, 33 bp, Homo sapien
tatatcttttatcaccgcggtaagcctgacatt

SEQ ID NO: 984989 - DNA, 33 bp, Homo sapien
ttttcatcaaggtacaccaggataaattaataa

SEQ ID NO: 984990 - DNA, 33 bp, Homo sapien
ttttcatcaaggtacatcaggataaattaataa

SEQ ID NO: 984991 - DNA, 33 bp, Homo sapien
aaaaggcattgcaaagcagactatagaggtatt

SEQ ID NO: 984992 - DNA, 33 bp, Homo sapien
aaaaggcattgcaaaggagactatagaggtatt

SEQ ID NO: 984993 - DNA, 33 bp, Homo sapien
agaaggtagaatatgaaaagctgatgggacccc

SEQ ID NO: 984994 - DNA, 33 bp, Homo sapien
agaaggtagaatatgagaagctgatgggacccc

SEQ ID NO: 984995 - DNA, 33 bp, Homo sapien
tgcttgtgcccagagacgaagagttaagctgct

SEQ ID NO: 984996 - DNA, 33 bp, Homo sapien
tgcttgtgcccagagatgaagagttaagctgct

SEQ ID NO: 984997 - DNA, 33 bp, Homo sapien
gtgaagctgactatgtcaattatgttcttatag

SEQ ID NO: 984998 - DNA, 33 bp, Homo sapien
gtgaagctgactatgttaattatgttcttatag

SEQ ID NO: 984999 - DNA, 33 bp, Homo sapien
aacataccatgtgtgacaattctgtttccaaca

SEQ ID NO: 985000 - DNA, 33 bp, Homo sapien
aacataccatgtgtgataattctgtttccaaca

SEQ ID NO: 985001 - DNA, 33 bp, Homo sapien
ggaaagaggaagattacgtggttgatcataaaa

SEQ ID NO: 985002 - DNA, 33 bp, Homo sapien
ggaaagaggaagattatgtggttgatcataaaa

SEQ ID NO: 985003 - DNA, 33 bp, Homo sapien
ggaaggggaccaagaaatacatatatactggga

SEQ ID NO: 985004 - DNA, 33 bp, Homo sapien
ggaaggggaccaagaattacatatatactggga

SEQ ID NO: 985005 - DNA, 33 bp, Homo sapien
atatcaagtttcctcactgaagaactgagtgtc

SEQ ID NO: 985006 - DNA, 33 bp, Homo sapien
atatcaagtttcctcattgaagaactgagtgtc

SEQ ID NO: 985007 - DNA, 33 bp, Homo sapien
actggtctaatatccagggaagaggctaccact

SEQ ID NO: 985008 - DNA, 33 bp, Homo sapien
actggtctaatatccatggaagaggctaccact

SEQ ID NO: 985009 - DNA, 33 bp, Homo sapien
cctggaacatttcatgacatataagggcattac

SEQ ID NO: 985010 - DNA, 33 bp, Homo sapien
cctggaacatttcatggcatataagggcattac

SEQ ID NO: 985011 - DNA, 33 bp, Homo sapien
atatatattcctgtacaatcacattaaaaacca

SEQ ID NO: 985012 - DNA, 33 bp, Homo sapien
atatatattcctgtacgatcacattaaaaacca

SEQ ID NO: 985013 - DNA, 33 bp, Homo sapien
tagctactgggtcaaaagccttaatattcaaac

SEQ ID NO: 985014 - DNA, 33 bp, Homo sapien
tagctactgggtcaaatgccttaatattcaaac

SEQ ID NO: 985015 - DNA, 33 bp, Homo sapien
gtctgacaatacaaaagagagatcgggatgtgg

SEQ ID NO: 985016 - DNA, 33 bp, Homo sapien
gtctgacaatacaaaatagagatcgggatgtgg

SEQ ID NO: 985017 - DNA, 33 bp, Homo sapien
gaatgagaggagaataatataagccaattttgc

SEQ ID NO: 985018 - DNA, 33 bp, Homo sapien
gaatgagaggagaatagtataagccaattttgc

SEQ ID NO: 985019 - DNA, 33 bp, Homo sapien
atttgtttttcttctacgttcaccaagccaaat

SEQ ID NO: 985020 - DNA, 33 bp, Homo sapien
atttgtttttcttctatgttcaccaagccaaat

SEQ ID NO: 985021 - DNA, 33 bp, Homo sapien
taatataaggtcaaataagattctgcattggag

SEQ ID NO: 985022 - DNA, 33 bp, Homo sapien
taatataaggtcaaatcagattctgcattggag

SEQ ID NO: 985023 - DNA, 33 bp, Homo sapien
ctaaagcaaaagttgacgcttagtttttaggtg

SEQ ID NO: 985024 - DNA, 33 bp, Homo sapien
ctaaagcaaaagttgatgcttagtttttaggtg

SEQ ID NO: 985025 - DNA, 33 bp, Homo sapien
tgaactttgtaaaatacagcttaatcttatttt

SEQ ID NO: 985026 - DNA, 33 bp, Homo sapien
tgaactttgtaaaatagagcttaatcttatttt

SEQ ID NO: 985027 - DNA, 33 bp, Homo sapien
acttgcttatgtcagaaagataagtggaaaaat

SEQ ID NO: 985028 - DNA, 33 bp, Homo sapien
acttgcttatgtcagagagataagtggaaaaat

SEQ ID NO: 985029 - DNA, 33 bp, Homo sapien
caccgaatgttgacaacgatgctgaacaatagg

SEQ ID NO: 985030 - DNA, 33 bp, Homo sapien
caccgaatgttgacaaggatgctgaacaatagg

SEQ ID NO: 985031 - DNA, 33 bp, Homo sapien
aacagagattggtgacagagtctggagtatctg

SEQ ID NO: 985032 - DNA, 33 bp, Homo sapien
aacagagattggtgacggagtctggagtatctg

SEQ ID NO: 985033 - DNA, 33 bp, Homo sapien
tctgtcttttacaggacggatatgttttactat

SEQ ID NO: 985034 - DNA, 33 bp, Homo sapien
tctgtcttttacaggatggatatgttttactat

SEQ ID NO: 985035 - DNA, 33 bp, Homo sapien
taaaggtacaatttgacgataaatatttcaaaa

SEQ ID NO: 985036 - DNA, 33 bp, Homo sapien
taaaggtacaatttgatgataaatatttcaaaa

SEQ ID NO: 985037 - DNA, 33 bp, Homo sapien
agctttccataatccaacatctagcttaatctc

SEQ ID NO: 985038 - DNA, 33 bp, Homo sapien
agctttccataatccagcatctagcttaatctc

SEQ ID NO: 985039 - DNA, 33 bp, Homo sapien
gaaaataaagtgattaaagtatagtgtgagtac

SEQ ID NO: 985040 - DNA, 33 bp, Homo sapien
gaaaataaagtgattacagtatagtgtgagtac

SEQ ID NO: 985041 - DNA, 33 bp, Homo sapien
acatattctgagaaaggagaaactgacctcaac

SEQ ID NO: 985042 - DNA, 33 bp, Homo sapien
acatattctgagaaagtagaaactgacctcaac

SEQ ID NO: 985043 - DNA, 33 bp, Homo sapien
ggtttagataagacagcaattttctgaaagatg

SEQ ID NO: 985044 - DNA, 33 bp, Homo sapien
ggtttagataagacagtaattttctgaaagatg

SEQ ID NO: 985045 - DNA, 33 bp, Homo sapien
agacaggttgactgtgaatatggaagcaaaagg

SEQ ID NO: 985046 - DNA, 33 bp, Homo sapien
agacaggttgactgtggatatggaagcaaaagg

SEQ ID NO: 985047 - DNA, 33 bp, Homo sapien
agtgttctgtaaaaatcatccacaaagttctcc

SEQ ID NO: 985048 - DNA, 33 bp, Homo sapien
agtgttctgtaaaaattatccacaaagttctcc

SEQ ID NO: 985049 - DNA, 33 bp, Homo sapien
atgaagttttccaatgaaatctaaaattgtaaa

SEQ ID NO: 985050 - DNA, 33 bp, Homo sapien
atgaagttttccaatggaatctaaaattgtaaa

SEQ ID NO: 985051 - DNA, 33 bp, Homo sapien
ccatccatctgaccaaccaaaaaacagactgga

SEQ ID NO: 985052 - DNA, 33 bp, Homo sapien
ccatccatctgaccaagcaaaaaacagactgga

SEQ ID NO: 985053 - DNA, 33 bp, Homo sapien
aatattgactgtccaaccttctaattatataaa

SEQ ID NO: 985054 - DNA, 33 bp, Homo sapien
aatattgactgtccaatcttctaattatataaa

SEQ ID NO: 985055 - DNA, 33 bp, Homo sapien
cacacctttgtgcgtaataattttgcaacatct

SEQ ID NO: 985056 - DNA, 33 bp, Homo sapien
cacacctttgtgcgtagtaattttgcaacatct

SEQ ID NO: 985057 - DNA, 33 bp, Homo sapien
ctgtcaatccagaaacaaatatgagctatccaa

SEQ ID NO: 985058 - DNA, 33 bp, Homo sapien
ctgtcaatccagaaaccaatatgagctatccaa

SEQ ID NO: 985059 - DNA, 33 bp, Homo sapien
caaagcaagaaaaagaagtcctcagtcaaacct

SEQ ID NO: 985060 - DNA, 33 bp, Homo sapien
caaagcaagaaaaagaggtcctcagtcaaacct

SEQ ID NO: 985061 - DNA, 33 bp, Homo sapien
gaagatccacccatgacataccctgaggtatga

SEQ ID NO: 985062 - DNA, 33 bp, Homo sapien
gaagatccacccatgatataccctgaggtatga

SEQ ID NO: 985063 - DNA, 33 bp, Homo sapien
acccactcttacaatgaaaagttcaagacaggc

SEQ ID NO: 985064 - DNA, 33 bp, Homo sapien
acccactcttacaatgcaaagttcaagacaggc

SEQ ID NO: 985065 - DNA, 33 bp, Homo sapien
agaagagtgtagccagaattgttccctaattgg

SEQ ID NO: 985066 - DNA, 33 bp, Homo sapien
agaagagtgtagccaggattgttccctaattgg

SEQ ID NO: 985067 - DNA, 33 bp, Homo sapien
acagttcatcacaccacagttcacagtatagct

SEQ ID NO: 985068 - DNA, 33 bp, Homo sapien
acagttcatcacaccatagttcacagtatagct

SEQ ID NO: 985069 - DNA, 33 bp, Homo sapien
gagacattgttcatccagaggtttgttaagcag

SEQ ID NO: 985070 - DNA, 33 bp, Homo sapien
gagacattgttcatccggaggtttgttaagcag

SEQ ID NO: 985071 - DNA, 33 bp, Homo sapien
attcactttaatctacaggtagcgactatttga

SEQ ID NO: 985072 - DNA, 33 bp, Homo sapien
attcactttaatctacgggtagcgactatttga

SEQ ID NO: 985073 - DNA, 33 bp, Homo sapien
catcccacaggcacaccagtttagtaatataca

SEQ ID NO: 985074 - DNA, 33 bp, Homo sapien
catcccacaggcacacgagtttagtaatataca

SEQ ID NO: 985075 - DNA, 33 bp, Homo sapien
tggcaattttgttgcaccataatccttactttt

SEQ ID NO: 985076 - DNA, 33 bp, Homo sapien
tggcaattttgttgcatcataatccttactttt

SEQ ID NO: 985077 - DNA, 33 bp, Homo sapien
tgaatcagtgtctagacgcttttagagtgccaa

SEQ ID NO: 985078 - DNA, 33 bp, Homo sapien
tgaatcagtgtctagatgcttttagagtgccaa

SEQ ID NO: 985079 - DNA, 33 bp, Homo sapien
atgagagtttcttgccactgcatgtcaccattg

SEQ ID NO: 985080 - DNA, 33 bp, Homo sapien
atgagagtttcttgccgctgcatgtcaccattg

SEQ ID NO: 985081 - DNA, 33 bp, Homo sapien
cattcctggccctgaacagctcctaaagaagag

SEQ ID NO: 985082 - DNA, 33 bp, Homo sapien
cattcctggccctgaatagctcctaaagaagag

SEQ ID NO: 985083 - DNA, 33 bp, Homo sapien
ggcttagtacctagacaacaaaataatctgtac

SEQ ID NO: 985084 - DNA, 33 bp, Homo sapien
ggcttagtacctagacgacaaaataatctgtac

SEQ ID NO: 985085 - DNA, 33 bp, Homo sapien
ttttacaaatcaattcaacatacacattaaaat

SEQ ID NO: 985086 - DNA, 33 bp, Homo sapien
ttttacaaatcaattcgacatacacattaaaat

SEQ ID NO: 985087 - DNA, 33 bp, Homo sapien
ggcaactaccttgtggaatgggctaacccactc

SEQ ID NO: 985088 - DNA, 33 bp, Homo sapien
ggcaactaccttgtgggatgggctaacccactc

SEQ ID NO: 985089 - DNA, 33 bp, Homo sapien
gcacagtgtgtttaccaaagttgtgcacatgtt

SEQ ID NO: 985090 - DNA, 33 bp, Homo sapien
gcacagtgtgtttaccgaagttgtgcacatgtt

SEQ ID NO: 985091 - DNA, 33 bp, Homo sapien
ttaccatgctccaacaactgatacataacaact

SEQ ID NO: 985092 - DNA, 33 bp, Homo sapien
ttaccatgctccaacatctgatacataacaact

SEQ ID NO: 985093 - DNA, 33 bp, Homo sapien
gttcacgcatgatttcactctctgattgtctgt

SEQ ID NO: 985094 - DNA, 33 bp, Homo sapien
gttcacgcatgatttcgctctctgattgtctgt

SEQ ID NO: 985095 - DNA, 33 bp, Homo sapien
gtctcagctaccataactaaggcactagacatg

SEQ ID NO: 985096 - DNA, 33 bp, Homo sapien
gtctcagctaccataattaaggcactagacatg

SEQ ID NO: 985097 - DNA, 33 bp, Homo sapien
agtgtgtaccgtaaccactctgttatagataag

SEQ ID NO: 985098 - DNA, 33 bp, Homo sapien
agtgtgtaccgtaaccgctctgttatagataag

SEQ ID NO: 985099 - DNA, 33 bp, Homo sapien
tatagcagtctactgaagttatctacaaatttt

SEQ ID NO: 985100 - DNA, 33 bp, Homo sapien
tatagcagtctactgaggttatctacaaatttt

SEQ ID NO: 985101 - DNA, 33 bp, Homo sapien
ctctctacacaggcacacatatttttaagtagg

SEQ ID NO: 985102 - DNA, 33 bp, Homo sapien
ctctctacacaggcacgcatatttttaagtagg

SEQ ID NO: 985103 - DNA, 33 bp, Homo sapien
cctctgaattgcacaactattttaactatttga

SEQ ID NO: 985104 - DNA, 33 bp, Homo sapien
cctctgaattgcacaagtattttaactatttga

SEQ ID NO: 985105 - DNA, 33 bp, Homo sapien
atttaacaatggtttgcaactggcccaatgggt

SEQ ID NO: 985106 - DNA, 33 bp, Homo sapien
atttaacaatggtttgtaactggcccaatgggt

SEQ ID NO: 985107 - DNA, 33 bp, Homo sapien
atattccccttaaataagacatctcaatgggct

SEQ ID NO: 985108 - DNA, 33 bp, Homo sapien
atattccccttaaatacgacatctcaatgggct

SEQ ID NO: 985109 - DNA, 33 bp, Homo sapien
cattgttcagggaatacattgctttacatttgg

SEQ ID NO: 985110 - DNA, 33 bp, Homo sapien
cattgttcagggaatatattgctttacatttgg

SEQ ID NO: 985111 - DNA, 33 bp, Homo sapien
tgagaaatttctgtaacgtataaggctacaaaa

SEQ ID NO: 985112 - DNA, 33 bp, Homo sapien
tgagaaatttctgtaatgtataaggctacaaaa

SEQ ID NO: 985113 - DNA, 33 bp, Homo sapien
aagaacagcttagccgccacatttcttactttg

SEQ ID NO: 985114 - DNA, 33 bp, Homo sapien
aagaacagcttagccgtcacatttcttactttg

SEQ ID NO: 985115 - DNA, 33 bp, Homo sapien
attgatggacatcaagaataaaatacacttcat

SEQ ID NO: 985116 - DNA, 33 bp, Homo sapien
attgatggacatcaaggataaaatacacttcat

SEQ ID NO: 985117 - DNA, 33 bp, Homo sapien
aagaatgtggtaaaaagttactttggcatcacc

SEQ ID NO: 985118 - DNA, 33 bp, Homo sapien
aagaatgtggtaaaaatttactttggcatcacc

SEQ ID NO: 985119 - DNA, 33 bp, Homo sapien
tttgttaattccaataatacagttgacaagaca

SEQ ID NO: 985120 - DNA, 33 bp, Homo sapien
tttgttaattccaatactacagttgacaagaca

SEQ ID NO: 985121 - DNA, 33 bp, Homo sapien
gccctgcctctgagcaataggggcttggcattg

SEQ ID NO: 985122 - DNA, 33 bp, Homo sapien
gccctgcctctgagcagtaggggcttggcattg

SEQ ID NO: 985123 - DNA, 33 bp, Homo sapien
tatttacagttaatgacagtaatctacagcaca

SEQ ID NO: 985124 - DNA, 33 bp, Homo sapien
tatttacagttaatgagagtaatctacagcaca

SEQ ID NO: 985125 - DNA, 33 bp, Homo sapien
atagcatcaagtgctagattaagtacaatgtta

SEQ ID NO: 985126 - DNA, 33 bp, Homo sapien
atagcatcaagtgctatattaagtacaatgtta

SEQ ID NO: 985127 - DNA, 33 bp, Homo sapien
atgcacttgtatgaaagaatcttcaaaatctat

SEQ ID NO: 985128 - DNA, 33 bp, Homo sapien
atgcacttgtatgaaataatcttcaaaatctat

SEQ ID NO: 985129 - DNA, 33 bp, Homo sapien
catttaatttgcaaaaatgatcttggtcagtgg

SEQ ID NO: 985130 - DNA, 33 bp, Homo sapien
catttaatttgcaaaagtgatcttggtcagtgg

SEQ ID NO: 985131 - DNA, 33 bp, Homo sapien
tgtgagggttcctacaatcatggtaaggttcta

SEQ ID NO: 985132 - DNA, 33 bp, Homo sapien
tgtgagggttcctacagtcatggtaaggttcta

SEQ ID NO: 985133 - DNA, 33 bp, Homo sapien
ttgttgttttggcggacaataggatactctgct

SEQ ID NO: 985134 - DNA, 33 bp, Homo sapien
ttgttgttttggcggataataggatactctgct

SEQ ID NO: 985135 - DNA, 33 bp, Homo sapien
accagcttctattccagaaaacaacttgcagtg

SEQ ID NO: 985136 - DNA, 33 bp, Homo sapien
accagcttctattccataaaacaacttgcagtg

SEQ ID NO: 985137 - DNA, 33 bp, Homo sapien
ggttacactgactgtcacttggagtttttctat

SEQ ID NO: 985138 - DNA, 33 bp, Homo sapien
ggttacactgactgtcgcttggagtttttctat

SEQ ID NO: 985139 - DNA, 33 bp, Homo sapien
atgtcattacctatgcagacaaaattgagtctt

SEQ ID NO: 985140 - DNA, 33 bp, Homo sapien
atgtcattacctatgcggacaaaattgagtctt

SEQ ID NO: 985141 - DNA, 33 bp, Homo sapien
gcaggctgcttgtaaaagtgaggcagcaaagac

SEQ ID NO: 985142 - DNA, 33 bp, Homo sapien
gcaggctgcttgtaaaggtgaggcagcaaagac

SEQ ID NO: 985143 - DNA, 33 bp, Homo sapien
tagaaccactatacaacgcagaaatcccaatag

SEQ ID NO: 985144 - DNA, 33 bp, Homo sapien
tagaaccactatacaatgcagaaatcccaatag

SEQ ID NO: 985145 - DNA, 33 bp, Homo sapien
ccagaatgagagtgtaagccaatatatatttct

SEQ ID NO: 985146 - DNA, 33 bp, Homo sapien
ccagaatgagagtgtaggccaatatatatttct

SEQ ID NO: 985147 - DNA, 33 bp, Homo sapien
aataattagtattccaataacgcatttgtgatt

SEQ ID NO: 985148 - DNA, 33 bp, Homo sapien
aataattagtattccagtaacgcatttgtgatt

SEQ ID NO: 985149 - DNA, 33 bp, Homo sapien
gatagaagagtcttaccgggaacacacacgatt

SEQ ID NO: 985150 - DNA, 33 bp, Homo sapien
gatagaagagtcttactgggaacacacacgatt

SEQ ID NO: 985151 - DNA, 33 bp, Homo sapien
taaacactgacaccacaaaaatagagagtgcat

SEQ ID NO: 985152 - DNA, 33 bp, Homo sapien
taaacactgacaccacgaaaatagagagtgcat

SEQ ID NO: 985153 - DNA, 33 bp, Homo sapien
tgggagtggaaatatacaaaagatgcctcctct

SEQ ID NO: 985154 - DNA, 33 bp, Homo sapien
tgggagtggaaatatagaaaagatgcctcctct

SEQ ID NO: 985155 - DNA, 33 bp, Homo sapien
ttattttctctactcaatacaagttcattgtat

SEQ ID NO: 985156 - DNA, 33 bp, Homo sapien
ttattttctctactcagtacaagttcattgtat

SEQ ID NO: 985157 - DNA, 33 bp, Homo sapien
tatatcagaatagtaacgtgagacaaaatagtt

SEQ ID NO: 985158 - DNA, 33 bp, Homo sapien
tatatcagaatagtaatgtgagacaaaatagtt

SEQ ID NO: 985159 - DNA, 33 bp, Homo sapien
taacactaagaaagacacagaaaaacaatttta

SEQ ID NO: 985160 - DNA, 33 bp, Homo sapien
taacactaagaaagacgcagaaaaacaatttta

SEQ ID NO: 985161 - DNA, 33 bp, Homo sapien
ttctgatagggagaagaagaagtagtaatttca

SEQ ID NO: 985162 - DNA, 33 bp, Homo sapien
ttctgatagggagaagtagaagtagtaatttca

SEQ ID NO: 985163 - DNA, 33 bp, Homo sapien
aatatagaacaattcaaaatcaatcaaaagcct

SEQ ID NO: 985164 - DNA, 33 bp, Homo sapien
aatatagaacaattcagaatcaatcaaaagcct

SEQ ID NO: 985165 - DNA, 33 bp, Homo sapien
cttagttcctcatcaacaggacacagaggaaac

SEQ ID NO: 985166 - DNA, 33 bp, Homo sapien
cttagttcctcatcaataggacacagaggaaac

SEQ ID NO: 985167 - DNA, 33 bp, Homo sapien
tagttgaaaatgtattaaacagtcattaaacaa

SEQ ID NO: 985168 - DNA, 33 bp, Homo sapien
tagttgaaaatgtattgaacagtcattaaacaa

SEQ ID NO: 985169 - DNA, 33 bp, Homo sapien
gcacaaagttgaatccagactactgataagtct

SEQ ID NO: 985170 - DNA, 33 bp, Homo sapien
gcacaaagttgaatccggactactgataagtct

SEQ ID NO: 985171 - DNA, 33 bp, Homo sapien
ggtctccaaagtcaccaagacctagaaaggtga

SEQ ID NO: 985172 - DNA, 33 bp, Homo sapien
ggtctccaaagtcaccgagacctagaaaggtga

SEQ ID NO: 985173 - DNA, 33 bp, Homo sapien
cctctatatcataagcaactagaaaaggtcata

SEQ ID NO: 985174 - DNA, 33 bp, Homo sapien
cctctatatcataagcgactagaaaaggtcata

SEQ ID NO: 985175 - DNA, 33 bp, Homo sapien
cagtagttctgcattaagtttctgatggtggta

SEQ ID NO: 985176 - DNA, 33 bp, Homo sapien
cagtagttctgcattatgtttctgatggtggta

SEQ ID NO: 985177 - DNA, 33 bp, Homo sapien
ttggaaaagagtgtcaatattcccatcaagtat

SEQ ID NO: 985178 - DNA, 33 bp, Homo sapien
ttggaaaagagtgtcattattcccatcaagtat

SEQ ID NO: 985179 - DNA, 33 bp, Homo sapien
tacttttgtggatttccaaatatgcatatgcta

SEQ ID NO: 985180 - DNA, 33 bp, Homo sapien
tacttttgtggatttctaaatatgcatatgcta

SEQ ID NO: 985181 - DNA, 33 bp, Homo sapien
atttgcccttccatctgacaagcagcctctact

SEQ ID NO: 985182 - DNA, 33 bp, Homo sapien
atttgcccttccatcttacaagcagcctctact

SEQ ID NO: 985183 - DNA, 33 bp, Homo sapien
gatatgtgagctgatacacaaaatggccattat

SEQ ID NO: 985184 - DNA, 33 bp, Homo sapien
gatatgtgagctgatagacaaaatggccattat

SEQ ID NO: 985185 - DNA, 33 bp, Homo sapien
ttttatctcaaacccaagtattccagttagtgc

SEQ ID NO: 985186 - DNA, 33 bp, Homo sapien
ttttatctcaaacccaggtattccagttagtgc

SEQ ID NO: 985187 - DNA, 33 bp, Homo sapien
ttattgatactgcttgaaagagatattgatact

SEQ ID NO: 985188 - DNA, 33 bp, Homo sapien
ttattgatactgcttgcaagagatattgatact

SEQ ID NO: 985189 - DNA, 33 bp, Homo sapien
gatgttagtaaagagacggtattaaagaataaa

SEQ ID NO: 985190 - DNA, 33 bp, Homo sapien
gatgttagtaaagagatggtattaaagaataaa

SEQ ID NO: 985191 - DNA, 33 bp, Homo sapien
aaaatctgcttcaagaagtcaaatctggaaaaa

SEQ ID NO: 985192 - DNA, 33 bp, Homo sapien
aaaatctgcttcaagacgtcaaatctggaaaaa

SEQ ID NO: 985193 - DNA, 33 bp, Homo sapien
tactgaaagaattccaacattttgatgattgtg

SEQ ID NO: 985194 - DNA, 33 bp, Homo sapien
tactgaaagaattccagcattttgatgattgtg

SEQ ID NO: 985195 - DNA, 33 bp, Homo sapien
tgggagaatatctgggaatttgttccctgcttc

SEQ ID NO: 985196 - DNA, 33 bp, Homo sapien
tgggagaatatctgggtatttgttccctgcttc

SEQ ID NO: 985197 - DNA, 33 bp, Homo sapien
agattctttcaggaaaactaggtatatgcattc

SEQ ID NO: 985198 - DNA, 33 bp, Homo sapien
agattctttcaggaaagctaggtatatgcattc

SEQ ID NO: 985199 - DNA, 33 bp, Homo sapien
ttttcttctcacataccacctgtttgtttaatt

SEQ ID NO: 985200 - DNA, 33 bp, Homo sapien
ttttcttctcacatactacctgtttgtttaatt

SEQ ID NO: 985201 - DNA, 33 bp, Homo sapien
attggctatacttttgaaattctattaacgtgt

SEQ ID NO: 985202 - DNA, 33 bp, Homo sapien
attggctatacttttggaattctattaacgtgt

SEQ ID NO: 985203 - DNA, 33 bp, Homo sapien
ctattgggtattcttcaaaaaattactttacac

SEQ ID NO: 985204 - DNA, 33 bp, Homo sapien
ctattgggtattcttcgaaaaattactttacac

SEQ ID NO: 985205 - DNA, 33 bp, Homo sapien
ttgtcacaggtgtcagcagtagagaatataagt

SEQ ID NO: 985206 - DNA, 33 bp, Homo sapien
ttgtcacaggtgtcagtagtagagaatataagt

SEQ ID NO: 985207 - DNA, 33 bp, Homo sapien
tctggttcaaagtgacgactcctcaccacagtc

SEQ ID NO: 985208 - DNA, 33 bp, Homo sapien
tctggttcaaagtgactactcctcaccacagtc

SEQ ID NO: 985209 - DNA, 33 bp, Homo sapien
cagaaagattgttgcaccgaagaagaggaactc

SEQ ID NO: 985210 - DNA, 33 bp, Homo sapien
cagaaagattgttgcatcgaagaagaggaactc

SEQ ID NO: 985211 - DNA, 33 bp, Homo sapien
gaagccagccaagaaaagttatgtactctataa

SEQ ID NO: 985212 - DNA, 33 bp, Homo sapien
gaagccagccaagaaaggttatgtactctataa

SEQ ID NO: 985213 - DNA, 33 bp, Homo sapien
aagaaatggctgattgcatgactagggcagaaa

SEQ ID NO: 985214 - DNA, 33 bp, Homo sapien
aagaaatggctgattgtatgactagggcagaaa

SEQ ID NO: 985215 - DNA, 33 bp, Homo sapien
caagataaacctgaagcatattgtaagaccagg

SEQ ID NO: 985216 - DNA, 33 bp, Homo sapien
caagataaacctgaaggatattgtaagaccagg

SEQ ID NO: 985217 - DNA, 33 bp, Homo sapien
tgtatgtagaacaaaacaaggaaactacacaac

SEQ ID NO: 985218 - DNA, 33 bp, Homo sapien
tgtatgtagaacaaaataaggaaactacacaac

SEQ ID NO: 985219 - DNA, 33 bp, Homo sapien
agttcctcatgctaaaatcctgcattcatcttt

SEQ ID NO: 985220 - DNA, 33 bp, Homo sapien
agttcctcatgctaaagtcctgcattcatcttt

SEQ ID NO: 985221 - DNA, 33 bp, Homo sapien
ctagacatattcaaaacggtggttccgtcttcc

SEQ ID NO: 985222 - DNA, 33 bp, Homo sapien
ctagacatattcaaaatggtggttccgtcttcc

SEQ ID NO: 985223 - DNA, 33 bp, Homo sapien
ctttaatagccaaaggacacaacaagatactgt

SEQ ID NO: 985224 - DNA, 33 bp, Homo sapien
ctttaatagccaaaggccacaacaagatactgt

SEQ ID NO: 985225 - DNA, 33 bp, Homo sapien
gtgggctctaaatgcaatcataagtgttcttat

SEQ ID NO: 985226 - DNA, 33 bp, Homo sapien
gtgggctctaaatgcagtcataagtgttcttat

SEQ ID NO: 985227 - DNA, 33 bp, Homo sapien
aattgatatatttgtgaagcatatttggacaca

SEQ ID NO: 985228 - DNA, 33 bp, Homo sapien
aattgatatatttgtggagcatatttggacaca

SEQ ID NO: 985229 - DNA, 33 bp, Homo sapien
actgaaaaaaatgtcaatatggtgattttataa

SEQ ID NO: 985230 - DNA, 33 bp, Homo sapien
actgaaaaaaatgtcagtatggtgattttataa

SEQ ID NO: 985231 - DNA, 33 bp, Homo sapien
ctgttctgctaaataaatccagaaataaggcta

SEQ ID NO: 985232 - DNA, 33 bp, Homo sapien
ctgttctgctaaataagtccagaaataaggcta

SEQ ID NO: 985233 - DNA, 33 bp, Homo sapien
atctttcaagccttcccagatttctcttttcat

SEQ ID NO: 985234 - DNA, 33 bp, Homo sapien
atctttcaagccttcctagatttctcttttcat

SEQ ID NO: 985235 - DNA, 33 bp, Homo sapien
cgctaaaataactcacacaatctctaatgactc

SEQ ID NO: 985236 - DNA, 33 bp, Homo sapien
cgctaaaataactcacgcaatctctaatgactc

SEQ ID NO: 985237 - DNA, 33 bp, Homo sapien
attttatttagatgtacaacttaaaacaaaaca

SEQ ID NO: 985238 - DNA, 33 bp, Homo sapien
attttatttagatgtagaacttaaaacaaaaca

SEQ ID NO: 985239 - DNA, 33 bp, Homo sapien
attcactcattcatccaacagttagttgtcagg

SEQ ID NO: 985240 - DNA, 33 bp, Homo sapien
attcactcattcatcccacagttagttgtcagg

SEQ ID NO: 985241 - DNA, 33 bp, Homo sapien
ccattttacaggcccactcacttttctagttat

SEQ ID NO: 985242 - DNA, 33 bp, Homo sapien
ccattttacaggcccagtcacttttctagttat

SEQ ID NO: 985243 - DNA, 33 bp, Homo sapien
aaaaataaacacttagcaggtctcacataatta

SEQ ID NO: 985244 - DNA, 33 bp, Homo sapien
aaaaataaacacttagtaggtctcacataatta

SEQ ID NO: 985245 - DNA, 33 bp, Homo sapien
gaaaaggatagcaggcactgagtaacatgcaaa

SEQ ID NO: 985246 - DNA, 33 bp, Homo sapien
gaaaaggatagcaggcgctgagtaacatgcaaa

SEQ ID NO: 985247 - DNA, 33 bp, Homo sapien
atgctattttatggaaccctatatgcctttgga

SEQ ID NO: 985248 - DNA, 33 bp, Homo sapien
atgctattttatggaatcctatatgcctttgga

SEQ ID NO: 985249 - DNA, 33 bp, Homo sapien
agatactataattacacagttttgattgtttgg

SEQ ID NO: 985250 - DNA, 33 bp, Homo sapien
agatactataattacagagttttgattgtttgg

SEQ ID NO: 985251 - DNA, 33 bp, Homo sapien
acttatgcagttatccccgttggctaatgtaga

SEQ ID NO: 985252 - DNA, 33 bp, Homo sapien
acttatgcagttatcctcgttggctaatgtaga

SEQ ID NO: 985253 - DNA, 33 bp, Homo sapien
tccttttccatgatgagtatgcagacttacatt

SEQ ID NO: 985254 - DNA, 33 bp, Homo sapien
tccttttccatgatgattatgcagacttacatt

SEQ ID NO: 985255 - DNA, 33 bp, Homo sapien
gtactatgtaggtatcaaaagattccactagac

SEQ ID NO: 985256 - DNA, 33 bp, Homo sapien
gtactatgtaggtatcgaaagattccactagac

SEQ ID NO: 985257 - DNA, 33 bp, Homo sapien
agaagtaggctactaacaggacatttattacac

SEQ ID NO: 985258 - DNA, 33 bp, Homo sapien
agaagtaggctactaataggacatttattacac

SEQ ID NO: 985259 - DNA, 33 bp, Homo sapien
aaaaaaattcggtcacacttctcaaatttcttt

SEQ ID NO: 985260 - DNA, 33 bp, Homo sapien
aaaaaaattcggtcacgcttctcaaatttcttt

SEQ ID NO: 985261 - DNA, 33 bp, Homo sapien
aagtggatcatgtcagaaatttgacaatcactt

SEQ ID NO: 985262 - DNA, 33 bp, Homo sapien
aagtggatcatgtcaggaatttgacaatcactt

SEQ ID NO: 985263 - DNA, 33 bp, Homo sapien
cagttcaagcattctacactccatctatgtttt

SEQ ID NO: 985264 - DNA, 33 bp, Homo sapien
cagttcaagcattctatactccatctatgtttt

SEQ ID NO: 985265 - DNA, 33 bp, Homo sapien
agcacataaaaactgacgtggggtctttctaac

SEQ ID NO: 985266 - DNA, 33 bp, Homo sapien
agcacataaaaactgatgtggggtctttctaac

SEQ ID NO: 985267 - DNA, 33 bp, Homo sapien
tgacaaagtattccacagtataaagacaaacag

SEQ ID NO: 985268 - DNA, 33 bp, Homo sapien
tgacaaagtattccacggtataaagacaaacag

SEQ ID NO: 985269 - DNA, 33 bp, Homo sapien
ctgcttctcttaagcaacaaaatcaaaacagaa

SEQ ID NO: 985270 - DNA, 33 bp, Homo sapien
ctgcttctcttaagcagcaaaatcaaaacagaa

SEQ ID NO: 985271 - DNA, 33 bp, Homo sapien
tctgaagagcgtttagcaaatggtagaataatg

SEQ ID NO: 985272 - DNA, 33 bp, Homo sapien
tctgaagagcgtttaggaaatggtagaataatg

SEQ ID NO: 985273 - DNA, 33 bp, Homo sapien
aatatcaaactgaagaatataaagggatcactt

SEQ ID NO: 985274 - DNA, 33 bp, Homo sapien
aatatcaaactgaagagtataaagggatcactt

SEQ ID NO: 985275 - DNA, 33 bp, Homo sapien
agatatttttccaggacctgaagataccacagt

SEQ ID NO: 985276 - DNA, 33 bp, Homo sapien
agatatttttccaggagctgaagataccacagt

SEQ ID NO: 985277 - DNA, 33 bp, Homo sapien
taaatttcactcctaaatatatgttgtttttca

SEQ ID NO: 985278 - DNA, 33 bp, Homo sapien
taaatttcactcctaactatatgttgtttttca

SEQ ID NO: 985279 - DNA, 33 bp, Homo sapien
cttaggatataagatgacaggcagtttgatata

SEQ ID NO: 985280 - DNA, 33 bp, Homo sapien
cttaggatataagatggcaggcagtttgatata

SEQ ID NO: 985281 - DNA, 33 bp, Homo sapien
tttgcttccctgctaacgtgctttttcgaaagt

SEQ ID NO: 985282 - DNA, 33 bp, Homo sapien
tttgcttccctgctaatgtgctttttcgaaagt

SEQ ID NO: 985283 - DNA, 33 bp, Homo sapien
tacattatcaaaatacagcaattgccacatata

SEQ ID NO: 985284 - DNA, 33 bp, Homo sapien
tacattatcaaaatacggcaattgccacatata

SEQ ID NO: 985285 - DNA, 33 bp, Homo sapien
aacagaactataaacaataaccacacaatcatc

SEQ ID NO: 985286 - DNA, 33 bp, Homo sapien
aacagaactataaacagtaaccacacaatcatc

SEQ ID NO: 985287 - DNA, 33 bp, Homo sapien
ctaattcttatgctaacgtgaacatggactact

SEQ ID NO: 985288 - DNA, 33 bp, Homo sapien
ctaattcttatgctaatgtgaacatggactact

SEQ ID NO: 985289 - DNA, 33 bp, Homo sapien
ttaggttgtgtaattactaagaagcaattgctt

SEQ ID NO: 985290 - DNA, 33 bp, Homo sapien
ttaggttgtgtaattattaagaagcaattgctt

SEQ ID NO: 985291 - DNA, 33 bp, Homo sapien
atgttactgagcaatcagagattttggaattat

SEQ ID NO: 985292 - DNA, 33 bp, Homo sapien
atgttactgagcaatcggagattttggaattat

SEQ ID NO: 985293 - DNA, 33 bp, Homo sapien
gtgttccacaaaattaagttctcagccattatt

SEQ ID NO: 985294 - DNA, 33 bp, Homo sapien
gtgttccacaaaattaggttctcagccattatt

SEQ ID NO: 985295 - DNA, 33 bp, Homo sapien
aaacatctaagtctaacgctatttggattgtgg

SEQ ID NO: 985296 - DNA, 33 bp, Homo sapien
aaacatctaagtctaatgctatttggattgtgg

SEQ ID NO: 985297 - DNA, 33 bp, Homo sapien
cccagagagtacctgaaagcctactaagaaaaa

SEQ ID NO: 985298 - DNA, 33 bp, Homo sapien
cccagagagtacctgagagcctactaagaaaaa

SEQ ID NO: 985299 - DNA, 33 bp, Homo sapien
ttgtgctaggcaaacaactctatatcttctgct

SEQ ID NO: 985300 - DNA, 33 bp, Homo sapien
ttgtgctaggcaaacagctctatatcttctgct

SEQ ID NO: 985301 - DNA, 33 bp, Homo sapien
acacacagctggaaacaatctttgtgcctactt

SEQ ID NO: 985302 - DNA, 33 bp, Homo sapien
acacacagctggaaacgatctttgtgcctactt

SEQ ID NO: 985303 - DNA, 33 bp, Homo sapien
tgtgtgtgatatgagaagtgcttttttaataca

SEQ ID NO: 985304 - DNA, 33 bp, Homo sapien
tgtgtgtgatatgagacgtgcttttttaataca

SEQ ID NO: 985305 - DNA, 33 bp, Homo sapien
gctttatattctattccctcatcaaattttgaa

SEQ ID NO: 985306 - DNA, 33 bp, Homo sapien
gctttatattctattctctcatcaaattttgaa

SEQ ID NO: 985307 - DNA, 33 bp, Homo sapien
taagaagaaagttagaaagatggtagcttgaga

SEQ ID NO: 985308 - DNA, 33 bp, Homo sapien
taagaagaaagttagagagatggtagcttgaga

SEQ ID NO: 985309 - DNA, 33 bp, Homo sapien
cagtcattttagccaaattcttagtactgctgg

SEQ ID NO: 985310 - DNA, 33 bp, Homo sapien
cagtcattttagccaacttcttagtactgctgg

SEQ ID NO: 985311 - DNA, 33 bp, Homo sapien
gaagagataagaagacaacatagcgcataaagt

SEQ ID NO: 985312 - DNA, 33 bp, Homo sapien
gaagagataagaagacgacatagcgcataaagt

SEQ ID NO: 985313 - DNA, 33 bp, Homo sapien
ggatggcaaatttaaactgggcaatttaaatag

SEQ ID NO: 985314 - DNA, 33 bp, Homo sapien
ggatggcaaatttaaagtgggcaatttaaatag

SEQ ID NO: 985315 - DNA, 33 bp, Homo sapien
attctccagttataggaacatactacagatgct

SEQ ID NO: 985316 - DNA, 33 bp, Homo sapien
attctccagttataggtacatactacagatgct

SEQ ID NO: 985317 - DNA, 33 bp, Homo sapien
gaatatgaaggtgacacggtcccaattttggga

SEQ ID NO: 985318 - DNA, 33 bp, Homo sapien
gaatatgaaggtgacatggtcccaattttggga

SEQ ID NO: 985319 - DNA, 33 bp, Homo sapien
tgcaagatgttttcccggataactaccagttca

SEQ ID NO: 985320 - DNA, 33 bp, Homo sapien
tgcaagatgttttccctgataactaccagttca

SEQ ID NO: 985321 - DNA, 33 bp, Homo sapien
ttcacatgccacatacaatttgagctgtaattt

SEQ ID NO: 985322 - DNA, 33 bp, Homo sapien
ttcacatgccacatactatttgagctgtaattt

SEQ ID NO: 985323 - DNA, 33 bp, Homo sapien
gtttgaggacctgaataatcacagttgatacct

SEQ ID NO: 985324 - DNA, 33 bp, Homo sapien
gtttgaggacctgaatgatcacagttgatacct

SEQ ID NO: 985325 - DNA, 33 bp, Homo sapien
agggtagctgagatacagaacataggacaggaa

SEQ ID NO: 985326 - DNA, 33 bp, Homo sapien
agggtagctgagatacggaacataggacaggaa

SEQ ID NO: 985327 - DNA, 33 bp, Homo sapien
aataaaattatgagtcaaacacaaaaatgaaaa

SEQ ID NO: 985328 - DNA, 33 bp, Homo sapien
aataaaattatgagtcgaacacaaaaatgaaaa

SEQ ID NO: 985329 - DNA, 33 bp, Homo sapien
atggaaagcatagtagcattacatagactgcta

SEQ ID NO: 985330 - DNA, 33 bp, Homo sapien
atggaaagcatagtagtattacatagactgcta

SEQ ID NO: 985331 - DNA, 33 bp, Homo sapien
agtttaaagtgtgaaacgttaatgctaatttta

SEQ ID NO: 985332 - DNA, 33 bp, Homo sapien
agtttaaagtgtgaaatgttaatgctaatttta

SEQ ID NO: 985333 - DNA, 33 bp, Homo sapien
ccagatttatttatcacagtgctgattgtagat

SEQ ID NO: 985334 - DNA, 33 bp, Homo sapien
ccagatttatttatcatagtgctgattgtagat

SEQ ID NO: 985335 - DNA, 33 bp, Homo sapien
attttgtcagtgatgaacccacttaatagtgta

SEQ ID NO: 985336 - DNA, 33 bp, Homo sapien
attttgtcagtgatgatcccacttaatagtgta

SEQ ID NO: 985337 - DNA, 33 bp, Homo sapien
gtaactgaaaagttgccgaatctctacctaaaa

SEQ ID NO: 985338 - DNA, 33 bp, Homo sapien
gtaactgaaaagttgctgaatctctacctaaaa

SEQ ID NO: 985339 - DNA, 33 bp, Homo sapien
atattaaaatgaaatcagaaaccagagtaaagt

SEQ ID NO: 985340 - DNA, 33 bp, Homo sapien
atattaaaatgaaatcggaaaccagagtaaagt

SEQ ID NO: 985341 - DNA, 33 bp, Homo sapien
ggagtggtgaagtaccacagtgcttacgtaagt

SEQ ID NO: 985342 - DNA, 33 bp, Homo sapien
ggagtggtgaagtaccgcagtgcttacgtaagt

SEQ ID NO: 985343 - DNA, 33 bp, Homo sapien
agataccttaccgactaaactctgtcttctcag

SEQ ID NO: 985344 - DNA, 33 bp, Homo sapien
agataccttaccgactgaactctgtcttctcag

SEQ ID NO: 985345 - DNA, 33 bp, Homo sapien
tgtagggtgatttgagaatgaaagaatgaatag

SEQ ID NO: 985346 - DNA, 33 bp, Homo sapien
tgtagggtgatttgagtatgaaagaatgaatag

SEQ ID NO: 985347 - DNA, 33 bp, Homo sapien
taaaaaataattggcaagggaaagttgattacc

SEQ ID NO: 985348 - DNA, 33 bp, Homo sapien
taaaaaataattggcatgggaaagttgattacc

SEQ ID NO: 985349 - DNA, 33 bp, Homo sapien
taacttaaaatgaaacaaggtaagtgcgtcatc

SEQ ID NO: 985350 - DNA, 33 bp, Homo sapien
taacttaaaatgaaacgaggtaagtgcgtcatc

SEQ ID NO: 985351 - DNA, 33 bp, Homo sapien
aactactttgcctctgcaatattgacatttagg

SEQ ID NO: 985352 - DNA, 33 bp, Homo sapien
aactactttgcctctgtaatattgacatttagg

SEQ ID NO: 985353 - DNA, 33 bp, Homo sapien
aaccagcctgagtaggacccagcctgagaccac

SEQ ID NO: 985354 - DNA, 33 bp, Homo sapien
aaccagcctgagtaggtcccagcctgagaccac

SEQ ID NO: 985355 - DNA, 33 bp, Homo sapien
ttttaaaattcgtactcagcgcaatacttacaa

SEQ ID NO: 985356 - DNA, 33 bp, Homo sapien
ttttaaaattcgtacttagcgcaatacttacaa

SEQ ID NO: 985357 - DNA, 33 bp, Homo sapien
acttttagcttagaacagccatgagaatgtgct

SEQ ID NO: 985358 - DNA, 33 bp, Homo sapien
acttttagcttagaacggccatgagaatgtgct

SEQ ID NO: 985359 - DNA, 33 bp, Homo sapien
aaaaatgatggaaaagaccttgtactgtcttct

SEQ ID NO: 985360 - DNA, 33 bp, Homo sapien
aaaaatgatggaaaagtccttgtactgtcttct

SEQ ID NO: 985361 - DNA, 33 bp, Homo sapien
tattgattttggttgacacacacaaagaaacta

SEQ ID NO: 985362 - DNA, 33 bp, Homo sapien
tattgattttggttgagacacacaaagaaacta

SEQ ID NO: 985363 - DNA, 33 bp, Homo sapien
acctttgatcttttaaatcctgtgactgagtta

SEQ ID NO: 985364 - DNA, 33 bp, Homo sapien
acctttgatcttttaattcctgtgactgagtta

SEQ ID NO: 985365 - DNA, 33 bp, Homo sapien
ccaatatttgtcaagcagaatgtaccctccctc

SEQ ID NO: 985366 - DNA, 33 bp, Homo sapien
ccaatatttgtcaagcggaatgtaccctccctc

SEQ ID NO: 985367 - DNA, 33 bp, Homo sapien
aacaaatcaaagttagaaaatacctcattctgt

SEQ ID NO: 985368 - DNA, 33 bp, Homo sapien
aacaaatcaaagttagcaaatacctcattctgt

SEQ ID NO: 985369 - DNA, 33 bp, Homo sapien
tttgctgaggattttacgaactgtgttcatcag

SEQ ID NO: 985370 - DNA, 33 bp, Homo sapien
tttgctgaggattttaggaactgtgttcatcag

SEQ ID NO: 985371 - DNA, 33 bp, Homo sapien
gatagatgtggaatgtcaaatgataattttggt

SEQ ID NO: 985372 - DNA, 33 bp, Homo sapien
gatagatgtggaatgtgaaatgataattttggt

SEQ ID NO: 985373 - DNA, 33 bp, Homo sapien
attctgaggtaccttaagccagaaaaatatctg

SEQ ID NO: 985374 - DNA, 33 bp, Homo sapien
attctgaggtaccttatgccagaaaaatatctg

SEQ ID NO: 985375 - DNA, 33 bp, Homo sapien
tgtataagtaaatgaaaactcagtaatacacac

SEQ ID NO: 985376 - DNA, 33 bp, Homo sapien
tgtataagtaaatgaatactcagtaatacacac

SEQ ID NO: 985377 - DNA, 33 bp, Homo sapien
tcatgatataactagaaaaatgtatgaagacaa

SEQ ID NO: 985378 - DNA, 33 bp, Homo sapien
tcatgatataactagagaaatgtatgaagacaa

SEQ ID NO: 985379 - DNA, 33 bp, Homo sapien
ccctttgtgatgatgacgtagagatagttttag

SEQ ID NO: 985380 - DNA, 33 bp, Homo sapien
ccctttgtgatgatgatgtagagatagttttag

SEQ ID NO: 985381 - DNA, 33 bp, Homo sapien
aaatagcaaaagattcaattcagcataactgtt

SEQ ID NO: 985382 - DNA, 33 bp, Homo sapien
aaatagcaaaagattcgattcagcataactgtt

SEQ ID NO: 985383 - DNA, 33 bp, Homo sapien
aaatcctaggaaaaaccggaatatctgaaagca

SEQ ID NO: 985384 - DNA, 33 bp, Homo sapien
aaatcctaggaaaaactggaatatctgaaagca

SEQ ID NO: 985385 - DNA, 33 bp, Homo sapien
tgggtttatctcatcagctataaagggtagcat

SEQ ID NO: 985386 - DNA, 33 bp, Homo sapien
tgggtttatctcatcatctataaagggtagcat

SEQ ID NO: 985387 - DNA, 33 bp, Homo sapien
tttggccattgtgagaatcactttgggaccttg

SEQ ID NO: 985388 - DNA, 33 bp, Homo sapien
tttggccattgtgagagtcactttgggaccttg

SEQ ID NO: 985389 - DNA, 33 bp, Homo sapien
agggaacagctagagcaaataccacgaaacaga

SEQ ID NO: 985390 - DNA, 33 bp, Homo sapien
agggaacagctagagccaataccacgaaacaga

SEQ ID NO: 985391 - DNA, 33 bp, Homo sapien
ggtggtgcaggaataaaccttactggtaagtga

SEQ ID NO: 985392 - DNA, 33 bp, Homo sapien
ggtggtgcaggaataagccttactggtaagtga

SEQ ID NO: 985393 - DNA, 33 bp, Homo sapien
caatatacttttgcccccttggattttacattc

SEQ ID NO: 985394 - DNA, 33 bp, Homo sapien
caatatacttttgccctcttggattttacattc

SEQ ID NO: 985395 - DNA, 33 bp, Homo sapien
ttgagacaggtaaaaacgaaatgataccagaat

SEQ ID NO: 985396 - DNA, 33 bp, Homo sapien
ttgagacaggtaaaaaggaaatgataccagaat

SEQ ID NO: 985397 - DNA, 33 bp, Homo sapien
tcagtttacttctggaaacatgtgtctagtgta

SEQ ID NO: 985398 - DNA, 33 bp, Homo sapien
tcagtttacttctggatacatgtgtctagtgta

SEQ ID NO: 985399 - DNA, 33 bp, Homo sapien
gtctccaatctccttaactcttttgacactgtc

SEQ ID NO: 985400 - DNA, 33 bp, Homo sapien
gtctccaatctccttatctcttttgacactgtc

SEQ ID NO: 985401 - DNA, 33 bp, Homo sapien
caaatttgaagataacgaatcaatcctatctta

SEQ ID NO: 985402 - DNA, 33 bp, Homo sapien
caaatttgaagataactaatcaatcctatctta

SEQ ID NO: 985403 - DNA, 33 bp, Homo sapien
aaaattctcatgccatcaatagaatcaccttga

SEQ ID NO: 985404 - DNA, 33 bp, Homo sapien
aaaattctcatgccattaatagaatcaccttga

SEQ ID NO: 985405 - DNA, 33 bp, Homo sapien
gttactacattaatcaaataagtggcctcccta

SEQ ID NO: 985406 - DNA, 33 bp, Homo sapien
gttactacattaatcacataagtggcctcccta

SEQ ID NO: 985407 - DNA, 33 bp, Homo sapien
cgttaattattcctgcaagtaggttgggaggag

SEQ ID NO: 985408 - DNA, 33 bp, Homo sapien
cgttaattattcctgcgagtaggttgggaggag

SEQ ID NO: 985409 - DNA, 33 bp, Homo sapien
cgagcttgaaacattcactatttttgctctgaa

SEQ ID NO: 985410 - DNA, 33 bp, Homo sapien
cgagcttgaaacattcgctatttttgctctgaa

SEQ ID NO: 985411 - DNA, 33 bp, Homo sapien
atcttttccaaagtaggcactgaattctgagga

SEQ ID NO: 985412 - DNA, 33 bp, Homo sapien
atcttttccaaagtagtcactgaattctgagga

SEQ ID NO: 985413 - DNA, 33 bp, Homo sapien
gtgtgagccaccgtgacatacttttaaaataat

SEQ ID NO: 985414 - DNA, 33 bp, Homo sapien
gtgtgagccaccgtgatatacttttaaaataat

SEQ ID NO: 985415 - DNA, 33 bp, Homo sapien
catttctgttatttccaaaagtttcctgtgccc

SEQ ID NO: 985416 - DNA, 33 bp, Homo sapien
catttctgttatttccgaaagtttcctgtgccc

SEQ ID NO: 985417 - DNA, 33 bp, Homo sapien
agagtttgagtccctaaagaccagtacaaacct

SEQ ID NO: 985418 - DNA, 33 bp, Homo sapien
agagtttgagtccctacagaccagtacaaacct

SEQ ID NO: 985419 - DNA, 33 bp, Homo sapien
tggcatttagatagaaactgaagggcagtctgc

SEQ ID NO: 985420 - DNA, 33 bp, Homo sapien
tggcatttagatagaagctgaagggcagtctgc

SEQ ID NO: 985421 - DNA, 33 bp, Homo sapien
ttgttttgcttagataataacgtttcccataac

SEQ ID NO: 985422 - DNA, 33 bp, Homo sapien
ttgttttgcttagatactaacgtttcccataac

SEQ ID NO: 985423 - DNA, 33 bp, Homo sapien
gaataaaatatgtttcaaaaagtccaaagatag

SEQ ID NO: 985424 - DNA, 33 bp, Homo sapien
gaataaaatatgtttcgaaaagtccaaagatag

SEQ ID NO: 985425 - DNA, 33 bp, Homo sapien
aataaataaatcaaagcataatcaatgcctaag

SEQ ID NO: 985426 - DNA, 33 bp, Homo sapien
aataaataaatcaaagtataatcaatgcctaag

SEQ ID NO: 985427 - DNA, 33 bp, Homo sapien
aatgtgggtaagcatcaatcttgacacagtcct

SEQ ID NO: 985428 - DNA, 33 bp, Homo sapien
aatgtgggtaagcatcgatcttgacacagtcct

SEQ ID NO: 985429 - DNA, 33 bp, Homo sapien
ttttatggagaagtcactacatacagccttttt

SEQ ID NO: 985430 - DNA, 33 bp, Homo sapien
ttttatggagaagtcattacatacagccttttt

SEQ ID NO: 985431 - DNA, 33 bp, Homo sapien
ctgttagactatttcacagacaatatggcatat

SEQ ID NO: 985432 - DNA, 33 bp, Homo sapien
ctgttagactatttcagagacaatatggcatat

SEQ ID NO: 985433 - DNA, 33 bp, Homo sapien
ggcacaatgttcatgactaagttacagaactga

SEQ ID NO: 985434 - DNA, 33 bp, Homo sapien
ggcacaatgttcatgagtaagttacagaactga

SEQ ID NO: 985435 - DNA, 33 bp, Homo sapien
atcattaaactagagaatactgaccaccgtaca

SEQ ID NO: 985436 - DNA, 33 bp, Homo sapien
atcattaaactagagagtactgaccaccgtaca

SEQ ID NO: 985437 - DNA, 33 bp, Homo sapien
tttacgaacaatgaaccctctggcttattacac

SEQ ID NO: 985438 - DNA, 33 bp, Homo sapien
tttacgaacaatgaactctctggcttattacac

SEQ ID NO: 985439 - DNA, 33 bp, Homo sapien
ttgcttctcttggaacactgcgttggaaatcac

SEQ ID NO: 985440 - DNA, 33 bp, Homo sapien
ttgcttctcttggaactctgcgttggaaatcac

SEQ ID NO: 985441 - DNA, 33 bp, Homo sapien
cccacccactgtcttcacctattataccagtac

SEQ ID NO: 985442 - DNA, 33 bp, Homo sapien
cccacccactgtcttcgcctattataccagtac

SEQ ID NO: 985443 - DNA, 33 bp, Homo sapien
tttcatgggattttacaggtcaaactcgaatta

SEQ ID NO: 985444 - DNA, 33 bp, Homo sapien
tttcatgggattttacgggtcaaactcgaatta

SEQ ID NO: 985445 - DNA, 33 bp, Homo sapien
agtattctaagtccaactgcactgcaaccatct

SEQ ID NO: 985446 - DNA, 33 bp, Homo sapien
agtattctaagtccaattgcactgcaaccatct

SEQ ID NO: 985447 - DNA, 33 bp, Homo sapien
gcagagaaacagccaactaaccaagtaaccaac

SEQ ID NO: 985448 - DNA, 33 bp, Homo sapien
gcagagaaacagccaagtaaccaagtaaccaac

SEQ ID NO: 985449 - DNA, 33 bp, Homo sapien
ttgttgttattgttcacctaagaagcccatgaa

SEQ ID NO: 985450 - DNA, 33 bp, Homo sapien
ttgttgttattgttcatctaagaagcccatgaa

SEQ ID NO: 985451 - DNA, 33 bp, Homo sapien
ccccaagacctaatacagtatcaggcatatcca

SEQ ID NO: 985452 - DNA, 33 bp, Homo sapien
ccccaagacctaatacggtatcaggcatatcca

SEQ ID NO: 985453 - DNA, 33 bp, Homo sapien
tacatatcacatgaggaagaggacctatcccca

SEQ ID NO: 985454 - DNA, 33 bp, Homo sapien
tacatatcacatgagggagaggacctatcccca

SEQ ID NO: 985455 - DNA, 33 bp, Homo sapien
ggtttaaggagatagacattgcttctgatgaaa

SEQ ID NO: 985456 - DNA, 33 bp, Homo sapien
ggtttaaggagatagatattgcttctgatgaaa

SEQ ID NO: 985457 - DNA, 33 bp, Homo sapien
ggagtatagacacagaaaatgtggattggcaat

SEQ ID NO: 985458 - DNA, 33 bp, Homo sapien
ggagtatagacacagacaatgtggattggcaat

SEQ ID NO: 985459 - DNA, 33 bp, Homo sapien
ttggtggtcagttgatgaatttccatctgcaat

SEQ ID NO: 985460 - DNA, 33 bp, Homo sapien
ttggtggtcagttgattaatttccatctgcaat

SEQ ID NO: 985461 - DNA, 33 bp, Homo sapien
tcattcttttgcatacagaccaaattagaaggc

SEQ ID NO: 985462 - DNA, 33 bp, Homo sapien
tcattcttttgcatacggaccaaattagaaggc

SEQ ID NO: 985463 - DNA, 33 bp, Homo sapien
ttatactgagggaccaactggccttgagtttgg

SEQ ID NO: 985464 - DNA, 33 bp, Homo sapien
ttatactgagggaccatctggccttgagtttgg

SEQ ID NO: 985465 - DNA, 33 bp, Homo sapien
gaagttaattcagttacaccagattgccaaata

SEQ ID NO: 985466 - DNA, 33 bp, Homo sapien
gaagttaattcagttataccagattgccaaata

SEQ ID NO: 985467 - DNA, 33 bp, Homo sapien
tccattctcattgaaaagcatcatgtcatgtat

SEQ ID NO: 985468 - DNA, 33 bp, Homo sapien
tccattctcattgaaaggcatcatgtcatgtat

SEQ ID NO: 985469 - DNA, 33 bp, Homo sapien
ctgtcagacaatggtacgtcgaagaactgaaat

SEQ ID NO: 985470 - DNA, 33 bp, Homo sapien
ctgtcagacaatggtatgtcgaagaactgaaat

SEQ ID NO: 985471 - DNA, 33 bp, Homo sapien
tgattgaatatgcaaccctttgaaaaaagtatt

SEQ ID NO: 985472 - DNA, 33 bp, Homo sapien
tgattgaatatgcaactctttgaaaaaagtatt

SEQ ID NO: 985473 - DNA, 33 bp, Homo sapien
tgattttgagaatttaacttacgctttaatgaa

SEQ ID NO: 985474 - DNA, 33 bp, Homo sapien
tgattttgagaatttatcttacgctttaatgaa

SEQ ID NO: 985475 - DNA, 33 bp, Homo sapien
tggaaacgagaaatcaagtatagttattgcctt

SEQ ID NO: 985476 - DNA, 33 bp, Homo sapien
tggaaacgagaaatcaggtatagttattgcctt

SEQ ID NO: 985477 - DNA, 33 bp, Homo sapien
ggaggtcagagcatgagtaaacctagataacat

SEQ ID NO: 985478 - DNA, 33 bp, Homo sapien
ggaggtcagagcatgattaaacctagataacat

SEQ ID NO: 985479 - DNA, 33 bp, Homo sapien
ggtggaatgtcaaagacgcagctgttttaccga

SEQ ID NO: 985480 - DNA, 33 bp, Homo sapien
ggtggaatgtcaaagatgcagctgttttaccga

SEQ ID NO: 985481 - DNA, 33 bp, Homo sapien
gttaaagccattacaacgtataacttttcccag

SEQ ID NO: 985482 - DNA, 33 bp, Homo sapien
gttaaagccattacaatgtataacttttcccag

SEQ ID NO: 985483 - DNA, 33 bp, Homo sapien
gaaaataaatcgatgggcagtgttatgatcaaa

SEQ ID NO: 985484 - DNA, 33 bp, Homo sapien
gaaaataaatcgatggtcagtgttatgatcaaa

SEQ ID NO: 985485 - DNA, 33 bp, Homo sapien
cctcttcatgttgtcactaacaagtctctattc

SEQ ID NO: 985486 - DNA, 33 bp, Homo sapien
cctcttcatgttgtcattaacaagtctctattc

SEQ ID NO: 985487 - DNA, 33 bp, Homo sapien
catgttttagaacatcccattaaacttgcaaag

SEQ ID NO: 985488 - DNA, 33 bp, Homo sapien
catgttttagaacatctcattaaacttgcaaag

SEQ ID NO: 985489 - DNA, 33 bp, Homo sapien
taaatgtcttgcgtaaatgttttataattttca

SEQ ID NO: 985490 - DNA, 33 bp, Homo sapien
taaatgtcttgcgtaactgttttataattttca

SEQ ID NO: 985491 - DNA, 33 bp, Homo sapien
ctgtccttacagcaaacactaaatcagcaatgc

SEQ ID NO: 985492 - DNA, 33 bp, Homo sapien
ctgtccttacagcaaatactaaatcagcaatgc

SEQ ID NO: 985493 - DNA, 33 bp, Homo sapien
tatactggtagcagaaagtaatcctcatatttc

SEQ ID NO: 985494 - DNA, 33 bp, Homo sapien
tatactggtagcagaaggtaatcctcatatttc

SEQ ID NO: 985495 - DNA, 33 bp, Homo sapien
aatgttcaaatataaagtcactgccatccaaag

SEQ ID NO: 985496 - DNA, 33 bp, Homo sapien
aatgttcaaatataaattcactgccatccaaag

SEQ ID NO: 985497 - DNA, 33 bp, Homo sapien
tggctgctgtggggtccactcaattcaaaacta

SEQ ID NO: 985498 - DNA, 33 bp, Homo sapien
tggctgctgtggggtctactcaattcaaaacta

SEQ ID NO: 985499 - DNA, 33 bp, Homo sapien
agtcacttcctgctaaaatgagataaagtccta

SEQ ID NO: 985500 - DNA, 33 bp, Homo sapien
agtcacttcctgctaagatgagataaagtccta

SEQ ID NO: 985501 - DNA, 33 bp, Homo sapien
agagggaaaaatattccactccaagacacatct

SEQ ID NO: 985502 - DNA, 33 bp, Homo sapien
agagggaaaaatattctactccaagacacatct

SEQ ID NO: 985503 - DNA, 33 bp, Homo sapien
tgcaagatagagaaaaaggcagtaagaaaacat

SEQ ID NO: 985504 - DNA, 33 bp, Homo sapien
tgcaagatagagaaaacggcagtaagaaaacat

SEQ ID NO: 985505 - DNA, 33 bp, Homo sapien
taattggacatcatacaccatgctaaatttgcc

SEQ ID NO: 985506 - DNA, 33 bp, Homo sapien
taattggacatcatacgccatgctaaatttgcc

SEQ ID NO: 985507 - DNA, 33 bp, Homo sapien
aggaattcacagacaactaaagagattgctgaa

SEQ ID NO: 985508 - DNA, 33 bp, Homo sapien
aggaattcacagacaagtaaagagattgctgaa

SEQ ID NO: 985509 - DNA, 33 bp, Homo sapien
ccctagatcttcatagccatgtggcaaaaattg

SEQ ID NO: 985510 - DNA, 33 bp, Homo sapien
ccctagatcttcatagtcatgtggcaaaaattg

SEQ ID NO: 985511 - DNA, 33 bp, Homo sapien
tagagtcatgctttgaacaaaaaataatttata

SEQ ID NO: 985512 - DNA, 33 bp, Homo sapien
tagagtcatgctttgagcaaaaaataatttata

SEQ ID NO: 985513 - DNA, 33 bp, Homo sapien
tgtgtgtgtgtctgtaggtttgcatggtattca

SEQ ID NO: 985514 - DNA, 33 bp, Homo sapien
tgtgtgtgtgtctgtatgtttgcatggtattca

SEQ ID NO: 985515 - DNA, 33 bp, Homo sapien
aagttttacttctgtgaactatttcaataataa

SEQ ID NO: 985516 - DNA, 33 bp, Homo sapien
aagttttacttctgtggactatttcaataataa

SEQ ID NO: 985517 - DNA, 33 bp, Homo sapien
ttaggaatagttaaggcactgctatacagatat

SEQ ID NO: 985518 - DNA, 33 bp, Homo sapien
ttaggaatagttaaggtactgctatacagatat

SEQ ID NO: 985519 - DNA, 33 bp, Homo sapien
actaaataaaggatagaagcccaggaaactttg

SEQ ID NO: 985520 - DNA, 33 bp, Homo sapien
actaaataaaggataggagcccaggaaactttg

SEQ ID NO: 985521 - DNA, 33 bp, Homo sapien
ggtttcaagaacttgacaagtgatcacaaaaat

SEQ ID NO: 985522 - DNA, 33 bp, Homo sapien
ggtttcaagaacttgataagtgatcacaaaaat

SEQ ID NO: 985523 - DNA, 33 bp, Homo sapien
gaaaaatcatcatttccctcaaatcttcaaatt

SEQ ID NO: 985524 - DNA, 33 bp, Homo sapien
gaaaaatcatcatttctctcaaatcttcaaatt

SEQ ID NO: 985525 - DNA, 33 bp, Homo sapien
tagcaatagagaaacactgaaattaaagtcagc

SEQ ID NO: 985526 - DNA, 33 bp, Homo sapien
tagcaatagagaaacattgaaattaaagtcagc

SEQ ID NO: 985527 - DNA, 33 bp, Homo sapien
cttttaggaggtccataaactgattttcaaagt

SEQ ID NO: 985528 - DNA, 33 bp, Homo sapien
cttttaggaggtccatcaactgattttcaaagt

SEQ ID NO: 985529 - DNA, 33 bp, Homo sapien
aataatgatgtatggccgtgcaatgtgtttgca

SEQ ID NO: 985530 - DNA, 33 bp, Homo sapien
aataatgatgtatggctgtgcaatgtgtttgca

SEQ ID NO: 985531 - DNA, 33 bp, Homo sapien
aaaatggccgctctaggagtatctgccttatgc

SEQ ID NO: 985532 - DNA, 33 bp, Homo sapien
aaaatggccgctctagtagtatctgccttatgc

SEQ ID NO: 985533 - DNA, 33 bp, Homo sapien
ctacaacctgttcacaataattcttaacaattc

SEQ ID NO: 985534 - DNA, 33 bp, Homo sapien
ctacaacctgttcacagtaattcttaacaattc

SEQ ID NO: 985535 - DNA, 33 bp, Homo sapien
attggagtgcagaaaacagtaaatctacctaaa

SEQ ID NO: 985536 - DNA, 33 bp, Homo sapien
attggagtgcagaaaatagtaaatctacctaaa

SEQ ID NO: 985537 - DNA, 33 bp, Homo sapien
atcagaaatagggaagccttagcataaaactat

SEQ ID NO: 985538 - DNA, 33 bp, Homo sapien
atcagaaatagggaagtcttagcataaaactat

SEQ ID NO: 985539 - DNA, 33 bp, Homo sapien
taggaaattaaatctccatatatctgaccccag

SEQ ID NO: 985540 - DNA, 33 bp, Homo sapien
taggaaattaaatctctatatatctgaccccag

SEQ ID NO: 985541 - DNA, 33 bp, Homo sapien
tcagaagaagtgggtgaagtagatttagaaatt

SEQ ID NO: 985542 - DNA, 33 bp, Homo sapien
tcagaagaagtgggtggagtagatttagaaatt

SEQ ID NO: 985543 - DNA, 33 bp, Homo sapien
gtctttctttccctaacggcaaccacagtcatt

SEQ ID NO: 985544 - DNA, 33 bp, Homo sapien
gtctttctttccctaatggcaaccacagtcatt

SEQ ID NO: 985545 - DNA, 33 bp, Homo sapien
tctaataacattgccaagctgtctaaagcctaa

SEQ ID NO: 985546 - DNA, 33 bp, Homo sapien
tctaataacattgccaggctgtctaaagcctaa

SEQ ID NO: 985547 - DNA, 33 bp, Homo sapien
agaagtgaattgagggaacaacaatatgaggaa

SEQ ID NO: 985548 - DNA, 33 bp, Homo sapien
agaagtgaattgagggtacaacaatatgaggaa

SEQ ID NO: 985549 - DNA, 33 bp, Homo sapien
tttcaagtttgtcaaaagtatcaacatttcaac

SEQ ID NO: 985550 - DNA, 33 bp, Homo sapien
tttcaagtttgtcaaaggtatcaacatttcaac

SEQ ID NO: 985551 - DNA, 33 bp, Homo sapien
acatcatggcttcaaaatgatatgtttcaaata

SEQ ID NO: 985552 - DNA, 33 bp, Homo sapien
acatcatggcttcaaactgatatgtttcaaata

SEQ ID NO: 985553 - DNA, 33 bp, Homo sapien
atatttaaaattgtccccaatgagttttgtcca

SEQ ID NO: 985554 - DNA, 33 bp, Homo sapien
atatttaaaattgtcctcaatgagttttgtcca

SEQ ID NO: 985555 - DNA, 33 bp, Homo sapien
agagagtatcctgacaaagaatatttttccagt

SEQ ID NO: 985556 - DNA, 33 bp, Homo sapien
agagagtatcctgacagagaatatttttccagt

SEQ ID NO: 985557 - DNA, 33 bp, Homo sapien
gaagttaagaaccagagagtaactgattggaaa

SEQ ID NO: 985558 - DNA, 33 bp, Homo sapien
gaagttaagaaccagatagtaactgattggaaa

SEQ ID NO: 985559 - DNA, 33 bp, Homo sapien
gagatttgagcagtaagaagaactgtgttttag

SEQ ID NO: 985560 - DNA, 33 bp, Homo sapien
gagatttgagcagtaataagaactgtgttttag

SEQ ID NO: 985561 - DNA, 33 bp, Homo sapien
caatagtgatatgtgccactttctcaaaatcaa

SEQ ID NO: 985562 - DNA, 33 bp, Homo sapien
caatagtgatatgtgcgactttctcaaaatcaa

SEQ ID NO: 985563 - DNA, 33 bp, Homo sapien
taactttaattcacacaacgctagttttaacaa

SEQ ID NO: 985564 - DNA, 33 bp, Homo sapien
taactttaattcacacgacgctagttttaacaa

SEQ ID NO: 985565 - DNA, 33 bp, Homo sapien
agaggaagaaacatccaacacacagaaattact

SEQ ID NO: 985566 - DNA, 33 bp, Homo sapien
agaggaagaaacatccgacacacagaaattact

SEQ ID NO: 985567 - DNA, 33 bp, Homo sapien
ttgcacagtctcaaaacgatcttaacttctgtg

SEQ ID NO: 985568 - DNA, 33 bp, Homo sapien
ttgcacagtctcaaaatgatcttaacttctgtg

SEQ ID NO: 985569 - DNA, 33 bp, Homo sapien
acattacacaatcaacaaataacaatggctata

SEQ ID NO: 985570 - DNA, 33 bp, Homo sapien
acattacacaatcaaccaataacaatggctata

SEQ ID NO: 985571 - DNA, 33 bp, Homo sapien
ctggaattacactaacaaagttccatctacaat

SEQ ID NO: 985572 - DNA, 33 bp, Homo sapien
ctggaattacactaacgaagttccatctacaat

SEQ ID NO: 985573 - DNA, 33 bp, Homo sapien
tgaaaagtagcatcaccgtagtaaaatggaaaa

SEQ ID NO: 985574 - DNA, 33 bp, Homo sapien
tgaaaagtagcatcactgtagtaaaatggaaaa

SEQ ID NO: 985575 - DNA, 33 bp, Homo sapien
ttgtggttttcaagcactatgcgttttcggcac

SEQ ID NO: 985576 - DNA, 33 bp, Homo sapien
ttgtggttttcaagcattatgcgttttcggcac

SEQ ID NO: 985577 - DNA, 33 bp, Homo sapien
tttgttttgtgcaatacgatttcatggagctgg

SEQ ID NO: 985578 - DNA, 33 bp, Homo sapien
tttgttttgtgcaatatgatttcatggagctgg

SEQ ID NO: 985579 - DNA, 33 bp, Homo sapien
cattgactttatgctaaaatttgcttactctta

SEQ ID NO: 985580 - DNA, 33 bp, Homo sapien
cattgactttatgctagaatttgcttactctta

SEQ ID NO: 985581 - DNA, 33 bp, Homo sapien
tgatagctgttgatgaaactacaaaatttgaga

SEQ ID NO: 985582 - DNA, 33 bp, Homo sapien
tgatagctgttgatgatactacaaaatttgaga

SEQ ID NO: 985583 - DNA, 33 bp, Homo sapien
ctcctttgctttgtaaatactttgtaatatctt

SEQ ID NO: 985584 - DNA, 33 bp, Homo sapien
ctcctttgctttgtaactactttgtaatatctt

SEQ ID NO: 985585 - DNA, 33 bp, Homo sapien
tctggagagtgtgaaactagttaggatgctgtt

SEQ ID NO: 985586 - DNA, 33 bp, Homo sapien
tctggagagtgtgaaattagttaggatgctgtt

SEQ ID NO: 985587 - DNA, 33 bp, Homo sapien
tcttactcggaaaaatcagtggcaataaagtga

SEQ ID NO: 985588 - DNA, 33 bp, Homo sapien
tcttactcggaaaaatgagtggcaataaagtga

SEQ ID NO: 985589 - DNA, 33 bp, Homo sapien
gtaattgccaacaccaataatacccttgaaaaa

SEQ ID NO: 985590 - DNA, 33 bp, Homo sapien
gtaattgccaacaccagtaatacccttgaaaaa

SEQ ID NO: 985591 - DNA, 33 bp, Homo sapien
atatttattgatcttacatagcaagatgtccag

SEQ ID NO: 985592 - DNA, 33 bp, Homo sapien
atatttattgatcttatatagcaagatgtccag

SEQ ID NO: 985593 - DNA, 33 bp, Homo sapien
accaggtgtgcagaaacgagtcagctccatgaa

SEQ ID NO: 985594 - DNA, 33 bp, Homo sapien
accaggtgtgcagaaatgagtcagctccatgaa

SEQ ID NO: 985595 - DNA, 33 bp, Homo sapien
gtcttaaatccttgaaacagtcttgtcctccta

SEQ ID NO: 985596 - DNA, 33 bp, Homo sapien
gtcttaaatccttgaaccagtcttgtcctccta

SEQ ID NO: 985597 - DNA, 33 bp, Homo sapien
agtggcttccctgctaaaggaattgatgttctt

SEQ ID NO: 985598 - DNA, 33 bp, Homo sapien
agtggcttccctgctagaggaattgatgttctt

SEQ ID NO: 985599 - DNA, 33 bp, Homo sapien
cacttgatttatctgcaacatttgactttgttg

SEQ ID NO: 985600 - DNA, 33 bp, Homo sapien
cacttgatttatctgcgacatttgactttgttg

SEQ ID NO: 985601 - DNA, 33 bp, Homo sapien
ctccctaatcgattaccattaaactagcttacc

SEQ ID NO: 985602 - DNA, 33 bp, Homo sapien
ctccctaatcgattactattaaactagcttacc

SEQ ID NO: 985603 - DNA, 33 bp, Homo sapien
atgtcgactcttgtaccgagttctatgctcaac

SEQ ID NO: 985604 - DNA, 33 bp, Homo sapien
atgtcgactcttgtactgagttctatgctcaac

SEQ ID NO: 985605 - DNA, 33 bp, Homo sapien
gacttcggtctcatgactacttctcagtccaag

SEQ ID NO: 985606 - DNA, 33 bp, Homo sapien
gacttcggtctcatgattacttctcagtccaag

SEQ ID NO: 985607 - DNA, 33 bp, Homo sapien
tctccttttactgttaaccagccattgaaataa

SEQ ID NO: 985608 - DNA, 33 bp, Homo sapien
tctccttttactgttatccagccattgaaataa

SEQ ID NO: 985609 - DNA, 33 bp, Homo sapien
aaagagacaccttccactatgtttgtagagctt

SEQ ID NO: 985610 - DNA, 33 bp, Homo sapien
aaagagacaccttccagtatgtttgtagagctt

SEQ ID NO: 985611 - DNA, 33 bp, Homo sapien
ttgtttctttcatgacccatacaacaatttgca

SEQ ID NO: 985612 - DNA, 33 bp, Homo sapien
ttgtttctttcatgacgcatacaacaatttgca

SEQ ID NO: 985613 - DNA, 33 bp, Homo sapien
ggcttcacagctgttacaccttggagattctag

SEQ ID NO: 985614 - DNA, 33 bp, Homo sapien
ggcttcacagctgttataccttggagattctag

SEQ ID NO: 985615 - DNA, 33 bp, Homo sapien
ccaaatgcctatcaaagctgatactcaacaatg

SEQ ID NO: 985616 - DNA, 33 bp, Homo sapien
ccaaatgcctatcaaatctgatactcaacaatg

SEQ ID NO: 985617 - DNA, 33 bp, Homo sapien
tgtttagtcaaagtagaagcctttcaaacagga

SEQ ID NO: 985618 - DNA, 33 bp, Homo sapien
tgtttagtcaaagtagcagcctttcaaacagga

SEQ ID NO: 985619 - DNA, 33 bp, Homo sapien
tggtgatgaggtgacaatgactctatgtaaact

SEQ ID NO: 985620 - DNA, 33 bp, Homo sapien
tggtgatgaggtgacagtgactctatgtaaact

SEQ ID NO: 985621 - DNA, 33 bp, Homo sapien
tttttccattcatgtacataaggcaatcattaa

SEQ ID NO: 985622 - DNA, 33 bp, Homo sapien
tttttccattcatgtatataaggcaatcattaa

SEQ ID NO: 985623 - DNA, 33 bp, Homo sapien
aaaccacaaatattaaaatctgctatgactaat

SEQ ID NO: 985624 - DNA, 33 bp, Homo sapien
aaaccacaaatattaacatctgctatgactaat

SEQ ID NO: 985625 - DNA, 33 bp, Homo sapien
ctccttactcccagtcccagataggttacttgc

SEQ ID NO: 985626 - DNA, 33 bp, Homo sapien
ctccttactcccagtctcagataggttacttgc

SEQ ID NO: 985627 - DNA, 33 bp, Homo sapien
gctgaagacttgatccacagaggctttgcaact

SEQ ID NO: 985628 - DNA, 33 bp, Homo sapien
gctgaagacttgatccgcagaggctttgcaact

SEQ ID NO: 985629 - DNA, 33 bp, Homo sapien
actaaatatattgaaaatgtacttgtgaattat

SEQ ID NO: 985630 - DNA, 33 bp, Homo sapien
actaaatatattgaaactgtacttgtgaattat

SEQ ID NO: 985631 - DNA, 33 bp, Homo sapien
agaaatcatggacttaccatttcttatctatgt

SEQ ID NO: 985632 - DNA, 33 bp, Homo sapien
agaaatcatggacttatcatttcttatctatgt

SEQ ID NO: 985633 - DNA, 33 bp, Homo sapien
taaattggatgtggaaaatatgataggaatata

SEQ ID NO: 985634 - DNA, 33 bp, Homo sapien
taaattggatgtggaagatatgataggaatata

SEQ ID NO: 985635 - DNA, 33 bp, Homo sapien
accaatttggtttcaactgactatctcagagat

SEQ ID NO: 985636 - DNA, 33 bp, Homo sapien
accaatttggtttcaattgactatctcagagat

SEQ ID NO: 985637 - DNA, 33 bp, Homo sapien
atcagtgctgttttaccgaaagcaggctaatgg

SEQ ID NO: 985638 - DNA, 33 bp, Homo sapien
atcagtgctgttttactgaaagcaggctaatgg

SEQ ID NO: 985639 - DNA, 33 bp, Homo sapien
atatttattgtactacaagaaagcactaacaaa

SEQ ID NO: 985640 - DNA, 33 bp, Homo sapien
atatttattgtactaccagaaagcactaacaaa

SEQ ID NO: 985641 - DNA, 33 bp, Homo sapien
tcctgagttatataaacgtccatggattagaaa

SEQ ID NO: 985642 - DNA, 33 bp, Homo sapien
tcctgagttatataaatgtccatggattagaaa

SEQ ID NO: 985643 - DNA, 33 bp, Homo sapien
tttgcttctgacctagacatcctgtttctacca

SEQ ID NO: 985644 - DNA, 33 bp, Homo sapien
tttgcttctgacctagccatcctgtttctacca

SEQ ID NO: 985645 - DNA, 33 bp, Homo sapien
atattcataaggatgccaatacgtgaattaatt

SEQ ID NO: 985646 - DNA, 33 bp, Homo sapien
atattcataaggatgctaatacgtgaattaatt

SEQ ID NO: 985647 - DNA, 33 bp, Homo sapien
tagactccacattttacggttcaataagtgaaa

SEQ ID NO: 985648 - DNA, 33 bp, Homo sapien
tagactccacattttatggttcaataagtgaaa

SEQ ID NO: 985649 - DNA, 33 bp, Homo sapien
ttgattactctatcaaatggttttgcctgaatg

SEQ ID NO: 985650 - DNA, 33 bp, Homo sapien
ttgattactctatcaattggttttgcctgaatg

SEQ ID NO: 985651 - DNA, 33 bp, Homo sapien
tattttatttgcgtgacgagagaacttagctac

SEQ ID NO: 985652 - DNA, 33 bp, Homo sapien
tattttatttgcgtgatgagagaacttagctac

SEQ ID NO: 985653 - DNA, 33 bp, Homo sapien
ataaagaactaaaagccattgcctggtacttag

SEQ ID NO: 985654 - DNA, 33 bp, Homo sapien
ataaagaactaaaagctattgcctggtacttag

SEQ ID NO: 985655 - DNA, 33 bp, Homo sapien
tgcagtttccatttcacctatcatttatccact

SEQ ID NO: 985656 - DNA, 33 bp, Homo sapien
tgcagtttccatttcatctatcatttatccact

SEQ ID NO: 985657 - DNA, 33 bp, Homo sapien
acttagtgaagaaaaaattggtcagcttttttt

SEQ ID NO: 985658 - DNA, 33 bp, Homo sapien
acttagtgaagaaaaatttggtcagcttttttt

SEQ ID NO: 985659 - DNA, 33 bp, Homo sapien
gatgtttacacacacactgaggagagggtttta

SEQ ID NO: 985660 - DNA, 33 bp, Homo sapien
gatgtttacacacacattgaggagagggtttta

SEQ ID NO: 985661 - DNA, 33 bp, Homo sapien
gtttaactttgaacacaaatgctgaggagataa

SEQ ID NO: 985662 - DNA, 33 bp, Homo sapien
gtttaactttgaacaccaatgctgaggagataa

SEQ ID NO: 985663 - DNA, 33 bp, Homo sapien
aaaagtgaaatctagaaaactaacattacagtg

SEQ ID NO: 985664 - DNA, 33 bp, Homo sapien
aaaagtgaaatctagagaactaacattacagtg

SEQ ID NO: 985665 - DNA, 33 bp, Homo sapien
tgccactcggagaccaaatgcttttcagaatat

SEQ ID NO: 985666 - DNA, 33 bp, Homo sapien
tgccactcggagaccagatgcttttcagaatat

SEQ ID NO: 985667 - DNA, 33 bp, Homo sapien
tatctaattagctttcaaaatgttggttgccaa

SEQ ID NO: 985668 - DNA, 33 bp, Homo sapien
tatctaattagctttcgaaatgttggttgccaa

SEQ ID NO: 985669 - DNA, 33 bp, Homo sapien
ttataaaaatgctagactatacttgtacttgcc

SEQ ID NO: 985670 - DNA, 33 bp, Homo sapien
ttataaaaatgctagattatacttgtacttgcc

SEQ ID NO: 985671 - DNA, 33 bp, Homo sapien
gcctgatttggatggaacattgaaataaacatc

SEQ ID NO: 985672 - DNA, 33 bp, Homo sapien
gcctgatttggatggagcattgaaataaacatc

SEQ ID NO: 985673 - DNA, 33 bp, Homo sapien
aactctacagagtatacgtcctaatttaaacaa

SEQ ID NO: 985674 - DNA, 33 bp, Homo sapien
aactctacagagtatatgtcctaatttaaacaa

SEQ ID NO: 985675 - DNA, 33 bp, Homo sapien
atggagtttttgaaacacttgcagttctccact

SEQ ID NO: 985676 - DNA, 33 bp, Homo sapien
atggagtttttgaaacgcttgcagttctccact

SEQ ID NO: 985677 - DNA, 33 bp, Homo sapien
ttctaccaaactcctaggtagcaaaattagcat

SEQ ID NO: 985678 - DNA, 33 bp, Homo sapien
ttctaccaaactcctatgtagcaaaattagcat

SEQ ID NO: 985679 - DNA, 33 bp, Homo sapien
gcaacagcaatatcctctttcagaactagcgct

SEQ ID NO: 985680 - DNA, 33 bp, Homo sapien
gcaacagcaatatcctgtttcagaactagcgct

SEQ ID NO: 985681 - DNA, 33 bp, Homo sapien
aagctggccagggtaacgctgtggtgcacggga

SEQ ID NO: 985682 - DNA, 33 bp, Homo sapien
aagctggccagggtaatgctgtggtgcacggga

SEQ ID NO: 985683 - DNA, 33 bp, Homo sapien
caacttctctatcctactaccaacgcttgtcca

SEQ ID NO: 985684 - DNA, 33 bp, Homo sapien
caacttctctatcctattaccaacgcttgtcca

SEQ ID NO: 985685 - DNA, 33 bp, Homo sapien
tggcaattgcatcacacgtagggatcaggtagt

SEQ ID NO: 985686 - DNA, 33 bp, Homo sapien
tggcaattgcatcacatgtagggatcaggtagt

SEQ ID NO: 985687 - DNA, 33 bp, Homo sapien
gacataaaggcaaacaatgaagactggaataaa

SEQ ID NO: 985688 - DNA, 33 bp, Homo sapien
gacataaaggcaaacagtgaagactggaataaa

SEQ ID NO: 985689 - DNA, 33 bp, Homo sapien
cttcactactggttgactaaagtggctccaggc

SEQ ID NO: 985690 - DNA, 33 bp, Homo sapien
cttcactactggttgattaaagtggctccaggc

SEQ ID NO: 985691 - DNA, 33 bp, Homo sapien
gaaaaagaatcatgaagatatgtgtgtcccatg

SEQ ID NO: 985692 - DNA, 33 bp, Homo sapien
gaaaaagaatcatgaatatatgtgtgtcccatg

SEQ ID NO: 985693 - DNA, 33 bp, Homo sapien
gtactcactattttacacctagagacacactag

SEQ ID NO: 985694 - DNA, 33 bp, Homo sapien
gtactcactattttacgcctagagacacactag

SEQ ID NO: 985695 - DNA, 33 bp, Homo sapien
attctcctagattgcccattagaggacatgaca

SEQ ID NO: 985696 - DNA, 33 bp, Homo sapien
attctcctagattgcctattagaggacatgaca

SEQ ID NO: 985697 - DNA, 33 bp, Homo sapien
attgtggtcagatccccaacagcttggtggtgt

SEQ ID NO: 985698 - DNA, 33 bp, Homo sapien
attgtggtcagatccctaacagcttggtggtgt

SEQ ID NO: 985699 - DNA, 33 bp, Homo sapien
taattgaatatactgggaaccttggaaggatca

SEQ ID NO: 985700 - DNA, 33 bp, Homo sapien
taattgaatatactggtaaccttggaaggatca

SEQ ID NO: 985701 - DNA, 33 bp, Homo sapien
tcgcatagtaaatctgcagtttcctgagactca

SEQ ID NO: 985702 - DNA, 33 bp, Homo sapien
tcgcatagtaaatctgtagtttcctgagactca

SEQ ID NO: 985703 - DNA, 33 bp, Homo sapien
gaaaagagttacattaaatttcacatacaaagg

SEQ ID NO: 985704 - DNA, 33 bp, Homo sapien
gaaaagagttacattatatttcacatacaaagg

SEQ ID NO: 985705 - DNA, 33 bp, Homo sapien
gccactcacagtatccaccactgttgcctgctt

SEQ ID NO: 985706 - DNA, 33 bp, Homo sapien
gccactcacagtatccgccactgttgcctgctt

SEQ ID NO: 985707 - DNA, 33 bp, Homo sapien
ggcccagggaaaagtacaagttcccatctggtc

SEQ ID NO: 985708 - DNA, 33 bp, Homo sapien
ggcccagggaaaagtataagttcccatctggtc

SEQ ID NO: 985709 - DNA, 33 bp, Homo sapien
ggcaccagctatgaagaagagtgacccttctca

SEQ ID NO: 985710 - DNA, 33 bp, Homo sapien
ggcaccagctatgaagcagagtgacccttctca

SEQ ID NO: 985711 - DNA, 33 bp, Homo sapien
atgtctcaggctgatacgtattttatagagatt

SEQ ID NO: 985712 - DNA, 33 bp, Homo sapien
atgtctcaggctgatatgtattttatagagatt

SEQ ID NO: 985713 - DNA, 33 bp, Homo sapien
taaagccattgataaaacatctacatcttgaac

SEQ ID NO: 985714 - DNA, 33 bp, Homo sapien
taaagccattgataaagcatctacatcttgaac

SEQ ID NO: 985715 - DNA, 33 bp, Homo sapien
atactgaaagtagtgacggaaagtttaccctta

SEQ ID NO: 985716 - DNA, 33 bp, Homo sapien
atactgaaagtagtgatggaaagtttaccctta

SEQ ID NO: 985717 - DNA, 33 bp, Homo sapien
tctttctgtagattggaattttgacctgtatca

SEQ ID NO: 985718 - DNA, 33 bp, Homo sapien
tctttctgtagattgggattttgacctgtatca

SEQ ID NO: 985719 - DNA, 33 bp, Homo sapien
cgttagttggaattggaataggaccaataatta

SEQ ID NO: 985720 - DNA, 33 bp, Homo sapien
cgttagttggaattggcataggaccaataatta

SEQ ID NO: 985721 - DNA, 33 bp, Homo sapien
gtaaaaaggttcggaaagaatctcaatcccata

SEQ ID NO: 985722 - DNA, 33 bp, Homo sapien
gtaaaaaggttcggaaggaatctcaatcccata

SEQ ID NO: 985723 - DNA, 33 bp, Homo sapien
ccttattatagctttccaaagttgttgaatagg

SEQ ID NO: 985724 - DNA, 33 bp, Homo sapien
ccttattatagctttctaaagttgttgaatagg

SEQ ID NO: 985725 - DNA, 33 bp, Homo sapien
tatctttgaagagctacacctgctgcagatcaa

SEQ ID NO: 985726 - DNA, 33 bp, Homo sapien
tatctttgaagagctatacctgctgcagatcaa

SEQ ID NO: 985727 - DNA, 33 bp, Homo sapien
tcaaaggagaaccaaacgtgctatacacaggga

SEQ ID NO: 985728 - DNA, 33 bp, Homo sapien
tcaaaggagaaccaaatgtgctatacacaggga

SEQ ID NO: 985729 - DNA, 33 bp, Homo sapien
cttgacattacagttacggatgcttcaaattag

SEQ ID NO: 985730 - DNA, 33 bp, Homo sapien
cttgacattacagttatggatgcttcaaattag

SEQ ID NO: 985731 - DNA, 33 bp, Homo sapien
tatcctatctaatttgcaacgtccatcacccca

SEQ ID NO: 985732 - DNA, 33 bp, Homo sapien
tatcctatctaatttgtaacgtccatcacccca

SEQ ID NO: 985733 - DNA, 33 bp, Homo sapien
cttgacttagaatttcagaaaaagtgtttactt

SEQ ID NO: 985734 - DNA, 33 bp, Homo sapien
cttgacttagaatttcggaaaaagtgtttactt

SEQ ID NO: 985735 - DNA, 33 bp, Homo sapien
atgggtgaaaagtatacgaacacctcagagact

SEQ ID NO: 985736 - DNA, 33 bp, Homo sapien
atgggtgaaaagtatatgaacacctcagagact

SEQ ID NO: 985737 - DNA, 33 bp, Homo sapien
ctccaaggaaacatgagcatcacaagtaaaaca

SEQ ID NO: 985738 - DNA, 33 bp, Homo sapien
ctccaaggaaacatgatcatcacaagtaaaaca

SEQ ID NO: 985739 - DNA, 33 bp, Homo sapien
aagtcttactctgagaaattaaagaccttactg

SEQ ID NO: 985740 - DNA, 33 bp, Homo sapien
aagtcttactctgagacattaaagaccttactg

SEQ ID NO: 985741 - DNA, 33 bp, Homo sapien
gactaggtgagaagaaatgcaaggaaacaatga

SEQ ID NO: 985742 - DNA, 33 bp, Homo sapien
gactaggtgagaagaagtgcaaggaaacaatga

SEQ ID NO: 985743 - DNA, 33 bp, Homo sapien
ctgtggtatccctgaaaaaaactgaccaatcaa

SEQ ID NO: 985744 - DNA, 33 bp, Homo sapien
ctgtggtatccctgaacaaaactgaccaatcaa

SEQ ID NO: 985745 - DNA, 33 bp, Homo sapien
ctatgactctatagcccaaaatggcctagctac

SEQ ID NO: 985746 - DNA, 33 bp, Homo sapien
ctatgactctatagcctaaaatggcctagctac

SEQ ID NO: 985747 - DNA, 33 bp, Homo sapien
caagcccaaagacagacgcttatgtaacacaat

SEQ ID NO: 985748 - DNA, 33 bp, Homo sapien
caagcccaaagacagatgcttatgtaacacaat

SEQ ID NO: 985749 - DNA, 33 bp, Homo sapien
ttctatctttgatgagaaatgaagtacatagtt

SEQ ID NO: 985750 - DNA, 33 bp, Homo sapien
ttctatctttgatgaggaatgaagtacatagtt

SEQ ID NO: 985751 - DNA, 33 bp, Homo sapien
acataccaaaatatcacgcccagttagaagagc

SEQ ID NO: 985752 - DNA, 33 bp, Homo sapien
acataccaaaatatcatgcccagttagaagagc

SEQ ID NO: 985753 - DNA, 33 bp, Homo sapien
ctctagctgtgattaaaaggggccaaggtatag

SEQ ID NO: 985754 - DNA, 33 bp, Homo sapien
ctctagctgtgattaagaggggccaaggtatag

SEQ ID NO: 985755 - DNA, 33 bp, Homo sapien
gtggacaccggagagtaaatggagtaaaattaa

SEQ ID NO: 985756 - DNA, 33 bp, Homo sapien
gtggacaccggagagtcaatggagtaaaattaa

SEQ ID NO: 985757 - DNA, 33 bp, Homo sapien
accttttagatataggcaccaattagatatagg

SEQ ID NO: 985758 - DNA, 33 bp, Homo sapien
accttttagatatagggaccaattagatatagg

SEQ ID NO: 985759 - DNA, 33 bp, Homo sapien
agttctgcctttgaacactaagtaaaggggcta

SEQ ID NO: 985760 - DNA, 33 bp, Homo sapien
agttctgcctttgaactctaagtaaaggggcta

SEQ ID NO: 985761 - DNA, 33 bp, Homo sapien
atacagatataagtgaacaaaaatgtctcttca

SEQ ID NO: 985762 - DNA, 33 bp, Homo sapien
atacagatataagtgaccaaaaatgtctcttca

SEQ ID NO: 985763 - DNA, 33 bp, Homo sapien
ctgcctatcccactacagcgctttgttgtgagc

SEQ ID NO: 985764 - DNA, 33 bp, Homo sapien
ctgcctatcccactacggcgctttgttgtgagc

SEQ ID NO: 985765 - DNA, 33 bp, Homo sapien
gatggtttttgatataatagtgaccagttagac

SEQ ID NO: 985766 - DNA, 33 bp, Homo sapien
gatggtttttgatatactagtgaccagttagac

SEQ ID NO: 985767 - DNA, 33 bp, Homo sapien
tttctgtattaaaccaactgtccaaactcattt

SEQ ID NO: 985768 - DNA, 33 bp, Homo sapien
tttctgtattaaaccacctgtccaaactcattt

SEQ ID NO: 985769 - DNA, 33 bp, Homo sapien
agttatgttccacttggacctgtttctgagggc

SEQ ID NO: 985770 - DNA, 33 bp, Homo sapien
agttatgttccacttgtacctgtttctgagggc

SEQ ID NO: 985771 - DNA, 33 bp, Homo sapien
aattacaggtgtgaaccgtggcatccagcaaaa

SEQ ID NO: 985772 - DNA, 33 bp, Homo sapien
aattacaggtgtgaactgtggcatccagcaaaa

SEQ ID NO: 985773 - DNA, 33 bp, Homo sapien
aaagctttagctaaaactgatgagggcaggaag

SEQ ID NO: 985774 - DNA, 33 bp, Homo sapien
aaagctttagctaaaagtgatgagggcaggaag

SEQ ID NO: 985775 - DNA, 33 bp, Homo sapien
gacttcatagtgaaaacgttgacttgcacccta

SEQ ID NO: 985776 - DNA, 33 bp, Homo sapien
gacttcatagtgaaaatgttgacttgcacccta

SEQ ID NO: 985777 - DNA, 33 bp, Homo sapien
taattctgtgaaaaatcatcttggtagtttggt

SEQ ID NO: 985778 - DNA, 33 bp, Homo sapien
taattctgtgaaaaatgatcttggtagtttggt

SEQ ID NO: 985779 - DNA, 33 bp, Homo sapien
ttgtatatgacataagaaaggcaccctactttt

SEQ ID NO: 985780 - DNA, 33 bp, Homo sapien
ttgtatatgacataaggaaggcaccctactttt

SEQ ID NO: 985781 - DNA, 33 bp, Homo sapien
tatatagggatattgcacatttattcatatatt

SEQ ID NO: 985782 - DNA, 33 bp, Homo sapien
tatatagggatattgcgcatttattcatatatt

SEQ ID NO: 985783 - DNA, 33 bp, Homo sapien
ttttaataatagcaagactgattggtataagat

SEQ ID NO: 985784 - DNA, 33 bp, Homo sapien
ttttaataatagcaagcctgattggtataagat

SEQ ID NO: 985785 - DNA, 33 bp, Homo sapien
gttttaactcctttgagaaacatccaaactgct

SEQ ID NO: 985786 - DNA, 33 bp, Homo sapien
gttttaactcctttgataaacatccaaactgct

SEQ ID NO: 985787 - DNA, 33 bp, Homo sapien
tttgtcagtgtttgtacgtcaatcaagaagagg

SEQ ID NO: 985788 - DNA, 33 bp, Homo sapien
tttgtcagtgtttgtatgtcaatcaagaagagg

SEQ ID NO: 985789 - DNA, 33 bp, Homo sapien
tatttttcataaccaacaataagtttaagttat

SEQ ID NO: 985790 - DNA, 33 bp, Homo sapien
tatttttcataaccaagaataagtttaagttat

SEQ ID NO: 985791 - DNA, 33 bp, Homo sapien
aatgacactacacaacaacgtatatatttggag

SEQ ID NO: 985792 - DNA, 33 bp, Homo sapien
aatgacactacacaaccacgtatatatttggag

SEQ ID NO: 985793 - DNA, 33 bp, Homo sapien
tgttcctgtccccaaaacttctgctagtccttc

SEQ ID NO: 985794 - DNA, 33 bp, Homo sapien
tgttcctgtccccaaagcttctgctagtccttc

SEQ ID NO: 985795 - DNA, 33 bp, Homo sapien
ttagtaaatatttagcaatcatctcaattattg

SEQ ID NO: 985796 - DNA, 33 bp, Homo sapien
ttagtaaatatttagcgatcatctcaattattg

SEQ ID NO: 985797 - DNA, 33 bp, Homo sapien
gttgttttccatagtaccaacccaacaaaggga

SEQ ID NO: 985798 - DNA, 33 bp, Homo sapien
gttgttttccatagtatcaacccaacaaaggga

SEQ ID NO: 985799 - DNA, 33 bp, Homo sapien
taaaatatcaggagaaagcaataaatttctttt

SEQ ID NO: 985800 - DNA, 33 bp, Homo sapien
taaaatatcaggagaatgcaataaatttctttt

SEQ ID NO: 985801 - DNA, 33 bp, Homo sapien
cctagcttacacttgcaaagatacttctctaaa

SEQ ID NO: 985802 - DNA, 33 bp, Homo sapien
cctagcttacacttgcgaagatacttctctaaa

SEQ ID NO: 985803 - DNA, 33 bp, Homo sapien
ttgtcgttactattcaaattcaaattcaaatag

SEQ ID NO: 985804 - DNA, 33 bp, Homo sapien
ttgtcgttactattcagattcaaattcaaatag

SEQ ID NO: 985805 - DNA, 33 bp, Homo sapien
aaaatctcagctaatcacaacaggcaatatagt

SEQ ID NO: 985806 - DNA, 33 bp, Homo sapien
aaaatctcagctaatcgcaacaggcaatatagt

SEQ ID NO: 985807 - DNA, 33 bp, Homo sapien
gtgcagtgcagtgattaaaaaaaatggagtttt

SEQ ID NO: 985808 - DNA, 33 bp, Homo sapien
gtgcagtgcagtgatttaaaaaaatggagtttt

SEQ ID NO: 985809 - DNA, 33 bp, Homo sapien
ttttatttaaaggcagacattggtataaattat

SEQ ID NO: 985810 - DNA, 33 bp, Homo sapien
ttttatttaaaggcagccattggtataaattat

SEQ ID NO: 985811 - DNA, 33 bp, Homo sapien
gctgctggcaattctaacttttgtggattttca

SEQ ID NO: 985812 - DNA, 33 bp, Homo sapien
gctgctggcaattctagcttttgtggattttca

SEQ ID NO: 985813 - DNA, 33 bp, Homo sapien
tttgtggattttcaagaagtgcctacttttact

SEQ ID NO: 985814 - DNA, 33 bp, Homo sapien
tttgtggattttcaaggagtgcctacttttact

SEQ ID NO: 985815 - DNA, 33 bp, Homo sapien
aaactctgaacacttcgcaaaactctttaataa

SEQ ID NO: 985816 - DNA, 33 bp, Homo sapien
aaactctgaacacttctcaaaactctttaataa

SEQ ID NO: 985817 - DNA, 33 bp, Homo sapien
aaacatcacttacaacagttgccagatttcctg

SEQ ID NO: 985818 - DNA, 33 bp, Homo sapien
aaacatcacttacaacggttgccagatttcctg

SEQ ID NO: 985819 - DNA, 33 bp, Homo sapien
aagacaagtaaaggtaagcagaactaactggga

SEQ ID NO: 985820 - DNA, 33 bp, Homo sapien
aagacaagtaaaggtaggcagaactaactggga

SEQ ID NO: 985821 - DNA, 33 bp, Homo sapien
tctgtagtttcagtacaatctcaatgaagttac

SEQ ID NO: 985822 - DNA, 33 bp, Homo sapien
tctgtagtttcagtacgatctcaatgaagttac

SEQ ID NO: 985823 - DNA, 33 bp, Homo sapien
gaagagtggtctaattaaataacggaatagtaa

SEQ ID NO: 985824 - DNA, 33 bp, Homo sapien
gaagagtggtctaatttaataacggaatagtaa

SEQ ID NO: 985825 - DNA, 33 bp, Homo sapien
cataagcagggaaaaagcttcctctcttgaaca

SEQ ID NO: 985826 - DNA, 33 bp, Homo sapien
cataagcagggaaaaatcttcctctcttgaaca

SEQ ID NO: 985827 - DNA, 33 bp, Homo sapien
ccttctgagactacaaagcattggctgaatcct

SEQ ID NO: 985828 - DNA, 33 bp, Homo sapien
ccttctgagactacaacgcattggctgaatcct

SEQ ID NO: 985829 - DNA, 33 bp, Homo sapien
aagtggaatggaaatacagcaaagcgattttgc

SEQ ID NO: 985830 - DNA, 33 bp, Homo sapien
aagtggaatggaaatatagcaaagcgattttgc

SEQ ID NO: 985831 - DNA, 33 bp, Homo sapien
agaaacaaagatacacaaaaacctgttcatgaa

SEQ ID NO: 985832 - DNA, 33 bp, Homo sapien
agaaacaaagatacacgaaaacctgttcatgaa

SEQ ID NO: 985833 - DNA, 33 bp, Homo sapien
tgttgaatagttggaaagaaagtatatctataa

SEQ ID NO: 985834 - DNA, 33 bp, Homo sapien
tgttgaatagttggaaggaaagtatatctataa

SEQ ID NO: 985835 - DNA, 33 bp, Homo sapien
aatgctgctcaaaataccactctataagaaagg

SEQ ID NO: 985836 - DNA, 33 bp, Homo sapien
aatgctgctcaaaatatcactctataagaaagg

SEQ ID NO: 985837 - DNA, 33 bp, Homo sapien
ctaggtacacaaaacaacataggagcatggcac

SEQ ID NO: 985838 - DNA, 33 bp, Homo sapien
ctaggtacacaaaacatcataggagcatggcac

SEQ ID NO: 985839 - DNA, 33 bp, Homo sapien
ctattatctctaattcaacactgtattatctct

SEQ ID NO: 985840 - DNA, 33 bp, Homo sapien
ctattatctctaattcgacactgtattatctct

SEQ ID NO: 985841 - DNA, 33 bp, Homo sapien
gcttgatatggaaatcactatcatacaatggtg

SEQ ID NO: 985842 - DNA, 33 bp, Homo sapien
gcttgatatggaaatcgctatcatacaatggtg

SEQ ID NO: 985843 - DNA, 33 bp, Homo sapien
acttaaatgaacagaaattatgtgactaaattc

SEQ ID NO: 985844 - DNA, 33 bp, Homo sapien
acttaaatgaacagaagttatgtgactaaattc

SEQ ID NO: 985845 - DNA, 33 bp, Homo sapien
aacagatcaaaccatacgaatgttcttaaaagt

SEQ ID NO: 985846 - DNA, 33 bp, Homo sapien
aacagatcaaaccatatgaatgttcttaaaagt

SEQ ID NO: 985847 - DNA, 33 bp, Homo sapien
ggtgtgtgattgaaaaagtggtataaagttatc

SEQ ID NO: 985848 - DNA, 33 bp, Homo sapien
ggtgtgtgattgaaaaggtggtataaagttatc

SEQ ID NO: 985849 - DNA, 33 bp, Homo sapien
agacagtttagagagaagccttctgtcataata

SEQ ID NO: 985850 - DNA, 33 bp, Homo sapien
agacagtttagagagaggccttctgtcataata

SEQ ID NO: 985851 - DNA, 33 bp, Homo sapien
gggaatagtctttttaacaccatattatgacag

SEQ ID NO: 985852 - DNA, 33 bp, Homo sapien
gggaatagtctttttagcaccatattatgacag

SEQ ID NO: 985853 - DNA, 33 bp, Homo sapien
ttgactatgttctctggatcatcttgtcttttc

SEQ ID NO: 985854 - DNA, 33 bp, Homo sapien
ttgactatgttctctgtatcatcttgtcttttc

SEQ ID NO: 985855 - DNA, 33 bp, Homo sapien
caaagagatcaacatagagagtccatgtttact

SEQ ID NO: 985856 - DNA, 33 bp, Homo sapien
caaagagatcaacatatagagtccatgtttact

SEQ ID NO: 985857 - DNA, 33 bp, Homo sapien
tcctaaatgtctatccaggaccatattcattta

SEQ ID NO: 985858 - DNA, 33 bp, Homo sapien
tcctaaatgtctatccgggaccatattcattta

SEQ ID NO: 985859 - DNA, 33 bp, Homo sapien
atcaccataacagatacgatagtaacaataata

SEQ ID NO: 985860 - DNA, 33 bp, Homo sapien
atcaccataacagatatgatagtaacaataata

SEQ ID NO: 985861 - DNA, 33 bp, Homo sapien
cattgttctaaggtaagtaacacaggagtggaa

SEQ ID NO: 985862 - DNA, 33 bp, Homo sapien
cattgttctaaggtaattaacacaggagtggaa

SEQ ID NO: 985863 - DNA, 33 bp, Homo sapien
attttacatacctacaactagcaagccctaaaa

SEQ ID NO: 985864 - DNA, 33 bp, Homo sapien
attttacatacctacacctagcaagccctaaaa

SEQ ID NO: 985865 - DNA, 33 bp, Homo sapien
gaaaggaaacaatgaacaggcaaagaacagagg

SEQ ID NO: 985866 - DNA, 33 bp, Homo sapien
gaaaggaaacaatgaagaggcaaagaacagagg

SEQ ID NO: 985867 - DNA, 33 bp, Homo sapien
gtatattctgaaagcacaaaaattttgtatgac

SEQ ID NO: 985868 - DNA, 33 bp, Homo sapien
gtatattctgaaagcataaaaattttgtatgac

SEQ ID NO: 985869 - DNA, 33 bp, Homo sapien
tgattaataaagactgaagaatcgaaactagca

SEQ ID NO: 985870 - DNA, 33 bp, Homo sapien
tgattaataaagactgcagaatcgaaactagca

SEQ ID NO: 985871 - DNA, 33 bp, Homo sapien
aacagcatggtataggaacaaaaacagctaatg

SEQ ID NO: 985872 - DNA, 33 bp, Homo sapien
aacagcatggtataggtacaaaaacagctaatg

SEQ ID NO: 985873 - DNA, 33 bp, Homo sapien
tgaatgattaggtaagcctaagtactacacgag

SEQ ID NO: 985874 - DNA, 33 bp, Homo sapien
tgaatgattaggtaagtctaagtactacacgag

SEQ ID NO: 985875 - DNA, 33 bp, Homo sapien
aggaacatcaacatacagattttcatggaataa

SEQ ID NO: 985876 - DNA, 33 bp, Homo sapien
aggaacatcaacatacggattttcatggaataa

SEQ ID NO: 985877 - DNA, 33 bp, Homo sapien
agtgaaggttagaataaggcccaagggtgaatg

SEQ ID NO: 985878 - DNA, 33 bp, Homo sapien
agtgaaggttagaatatggcccaagggtgaatg

SEQ ID NO: 985879 - DNA, 33 bp, Homo sapien
tcaaacaaaatggtaaatgttacaaaaatactc

SEQ ID NO: 985880 - DNA, 33 bp, Homo sapien
tcaaacaaaatggtaagtgttacaaaaatactc

SEQ ID NO: 985881 - DNA, 33 bp, Homo sapien
ttgctaggtatgaggaaacaaagtgagtttgtt

SEQ ID NO: 985882 - DNA, 33 bp, Homo sapien
ttgctaggtatgaggacacaaagtgagtttgtt

SEQ ID NO: 985883 - DNA, 33 bp, Homo sapien
tcttctgactactgataatacacatttttatca

SEQ ID NO: 985884 - DNA, 33 bp, Homo sapien
tcttctgactactgattatacacatttttatca

SEQ ID NO: 985885 - DNA, 33 bp, Homo sapien
ccacagagccctgcaccgatcctcggctataaa

SEQ ID NO: 985886 - DNA, 33 bp, Homo sapien
ccacagagccctgcactgatcctcggctataaa

SEQ ID NO: 985887 - DNA, 33 bp, Homo sapien
ctaaattcaacacttacgatgtgtgttccctga

SEQ ID NO: 985888 - DNA, 33 bp, Homo sapien
ctaaattcaacacttatgatgtgtgttccctga

SEQ ID NO: 985889 - DNA, 33 bp, Homo sapien
tccaatggaggagttaagcttgttccttgtgga

SEQ ID NO: 985890 - DNA, 33 bp, Homo sapien
tccaatggaggagttaggcttgttccttgtgga

SEQ ID NO: 985891 - DNA, 33 bp, Homo sapien
catactacgaagaaacaaggaaaatgctggcac

SEQ ID NO: 985892 - DNA, 33 bp, Homo sapien
catactacgaagaaacgaggaaaatgctggcac

SEQ ID NO: 985893 - DNA, 33 bp, Homo sapien
acacacaggtgtcttaacatgtgtcttcaatgt

SEQ ID NO: 985894 - DNA, 33 bp, Homo sapien
acacacaggtgtcttaccatgtgtcttcaatgt

SEQ ID NO: 985895 - DNA, 33 bp, Homo sapien
gtggaaagtcatgtaacagggaagagatttcaa

SEQ ID NO: 985896 - DNA, 33 bp, Homo sapien
gtggaaagtcatgtaatagggaagagatttcaa

SEQ ID NO: 985897 - DNA, 33 bp, Homo sapien
aagcaatggttcgatacgaggaaaccgcatata

SEQ ID NO: 985898 - DNA, 33 bp, Homo sapien
aagcaatggttcgatatgaggaaaccgcatata

SEQ ID NO: 985899 - DNA, 33 bp, Homo sapien
tatggaggcagtacagcaataggagcaaaagtg

SEQ ID NO: 985900 - DNA, 33 bp, Homo sapien
tatggaggcagtacaggaataggagcaaaagtg

SEQ ID NO: 985901 - DNA, 33 bp, Homo sapien
taaatgcatgaattaccgaaactgatttaaaac

SEQ ID NO: 985902 - DNA, 33 bp, Homo sapien
taaatgcatgaattactgaaactgatttaaaac

SEQ ID NO: 985903 - DNA, 33 bp, Homo sapien
tattgtgatagttgagaaatggaaaaccgttca

SEQ ID NO: 985904 - DNA, 33 bp, Homo sapien
tattgtgatagttgagcaatggaaaaccgttca

SEQ ID NO: 985905 - DNA, 33 bp, Homo sapien
caagagcaattcaatacgggagatgatttcaat

SEQ ID NO: 985906 - DNA, 33 bp, Homo sapien
caagagcaattcaatatgggagatgatttcaat

SEQ ID NO: 985907 - DNA, 33 bp, Homo sapien
caacttttagtaattcaaaaaggcagtaattta

SEQ ID NO: 985908 - DNA, 33 bp, Homo sapien
caacttttagtaattcgaaaaggcagtaattta

SEQ ID NO: 985909 - DNA, 33 bp, Homo sapien
ccattgccaacaacagaaaattatcatcactag

SEQ ID NO: 985910 - DNA, 33 bp, Homo sapien
ccattgccaacaacaggaaattatcatcactag

SEQ ID NO: 985911 - DNA, 33 bp, Homo sapien
aaatacacctaacaaacatagcaagaataaaga

SEQ ID NO: 985912 - DNA, 33 bp, Homo sapien
aaatacacctaacaaatatagcaagaataaaga

SEQ ID NO: 985913 - DNA, 33 bp, Homo sapien
gcatattaaagacaaacgctaatgaacaacaac

SEQ ID NO: 985914 - DNA, 33 bp, Homo sapien
gcatattaaagacaaatgctaatgaacaacaac

SEQ ID NO: 985915 - DNA, 33 bp, Homo sapien
caagtctagaagaacactgggcatttacagaag

SEQ ID NO: 985916 - DNA, 33 bp, Homo sapien
caagtctagaagaacattgggcatttacagaag

SEQ ID NO: 985917 - DNA, 33 bp, Homo sapien
ttgttcaatttcattaaacttgccatgtaagga

SEQ ID NO: 985918 - DNA, 33 bp, Homo sapien
ttgttcaatttcattacacttgccatgtaagga

SEQ ID NO: 985919 - DNA, 33 bp, Homo sapien
aagataaagtattaaaatcagcttgtcattagg

SEQ ID NO: 985920 - DNA, 33 bp, Homo sapien
aagataaagtattaaagtcagcttgtcattagg

SEQ ID NO: 985921 - DNA, 33 bp, Homo sapien
accgcattagtgtatagccaaagtaatttatat

SEQ ID NO: 985922 - DNA, 33 bp, Homo sapien
accgcattagtgtatatccaaagtaatttatat

SEQ ID NO: 985923 - DNA, 33 bp, Homo sapien
aactgtatagttcaaaggttattcaattatttt

SEQ ID NO: 985924 - DNA, 33 bp, Homo sapien
aactgtatagttcaaatgttattcaattatttt

SEQ ID NO: 985925 - DNA, 33 bp, Homo sapien
taaattgtagaccaacagaacaaaaatattctg

SEQ ID NO: 985926 - DNA, 33 bp, Homo sapien
taaattgtagaccaactgaacaaaaatattctg

SEQ ID NO: 985927 - DNA, 33 bp, Homo sapien
aaaagtgcatagtgtacggtgacatttatataa

SEQ ID NO: 985928 - DNA, 33 bp, Homo sapien
aaaagtgcatagtgtatggtgacatttatataa

SEQ ID NO: 985929 - DNA, 33 bp, Homo sapien
agattgaggaacttccaaatgattcctagattg

SEQ ID NO: 985930 - DNA, 33 bp, Homo sapien
agattgaggaacttccgaatgattcctagattg

SEQ ID NO: 985931 - DNA, 33 bp, Homo sapien
aaactctgcactgtacaagttcatatcttgtcc

SEQ ID NO: 985932 - DNA, 33 bp, Homo sapien
aaactctgcactgtacgagttcatatcttgtcc

SEQ ID NO: 985933 - DNA, 33 bp, Homo sapien
tactgtgatggcataaacaggagtctaaaacca

SEQ ID NO: 985934 - DNA, 33 bp, Homo sapien
tactgtgatggcataagcaggagtctaaaacca

SEQ ID NO: 985935 - DNA, 33 bp, Homo sapien
gttgtaattcctgtgaagtcatgcacagcatct

SEQ ID NO: 985936 - DNA, 33 bp, Homo sapien
gttgtaattcctgtgaggtcatgcacagcatct

SEQ ID NO: 985937 - DNA, 33 bp, Homo sapien
ttatggaggtaattacaataaagggagatcaga

SEQ ID NO: 985938 - DNA, 33 bp, Homo sapien
ttatggaggtaattacgataaagggagatcaga

SEQ ID NO: 985939 - DNA, 33 bp, Homo sapien
ccaggcaggtccaaaagtaacttgagagagagc

SEQ ID NO: 985940 - DNA, 33 bp, Homo sapien
ccaggcaggtccaaaattaacttgagagagagc

SEQ ID NO: 985941 - DNA, 33 bp, Homo sapien
tactgtatacttgacaatgaatatataatagcc

SEQ ID NO: 985942 - DNA, 33 bp, Homo sapien
tactgtatacttgacattgaatatataatagcc

SEQ ID NO: 985943 - DNA, 33 bp, Homo sapien
atgtctgagtgaaatacataaaagatgatgtgc

SEQ ID NO: 985944 - DNA, 33 bp, Homo sapien
atgtctgagtgaaatagataaaagatgatgtgc

SEQ ID NO: 985945 - DNA, 33 bp, Homo sapien
tatttttctctcctaaaacatcttttcgatttc

SEQ ID NO: 985946 - DNA, 33 bp, Homo sapien
tatttttctctcctaagacatcttttcgatttc

SEQ ID NO: 985947 - DNA, 33 bp, Homo sapien
agagacaatctccggacgatccatggttattaa

SEQ ID NO: 985948 - DNA, 33 bp, Homo sapien
agagacaatctccggatgatccatggttattaa

SEQ ID NO: 985949 - DNA, 33 bp, Homo sapien
tatgtctgtaataagagaggtaaggattgataa

SEQ ID NO: 985950 - DNA, 33 bp, Homo sapien
tatgtctgtaataagataggtaaggattgataa

SEQ ID NO: 985951 - DNA, 33 bp, Homo sapien
tcaccttttacttaaaatatggcacattctttt

SEQ ID NO: 985952 - DNA, 33 bp, Homo sapien
tcaccttttacttaaagtatggcacattctttt

SEQ ID NO: 985953 - DNA, 33 bp, Homo sapien
ggcagaagcttagatgaagcgaaaaagtaccag

SEQ ID NO: 985954 - DNA, 33 bp, Homo sapien
ggcagaagcttagatgcagcgaaaaagtaccag

SEQ ID NO: 985955 - DNA, 33 bp, Homo sapien
ctaggaagccataaaaaacaataatattacgta

SEQ ID NO: 985956 - DNA, 33 bp, Homo sapien
ctaggaagccataaaacacaataatattacgta

SEQ ID NO: 985957 - DNA, 33 bp, Homo sapien
atatgcagaagaatgaaacgggaccccaacctt

SEQ ID NO: 985958 - DNA, 33 bp, Homo sapien
atatgcagaagaatgatacgggaccccaacctt

SEQ ID NO: 985959 - DNA, 33 bp, Homo sapien
tcatgtagctgttttacagagtctgtgggctgt

SEQ ID NO: 985960 - DNA, 33 bp, Homo sapien
tcatgtagctgttttatagagtctgtgggctgt

SEQ ID NO: 985961 - DNA, 33 bp, Homo sapien
aatatacaactcggcacaggcagaccctttctg

SEQ ID NO: 985962 - DNA, 33 bp, Homo sapien
aatatacaactcggcataggcagaccctttctg

SEQ ID NO: 985963 - DNA, 33 bp, Homo sapien
ctaagaaacaaagcaaccatcagaacagtattc

SEQ ID NO: 985964 - DNA, 33 bp, Homo sapien
ctaagaaacaaagcaatcatcagaacagtattc

SEQ ID NO: 985965 - DNA, 33 bp, Homo sapien
catatcatgctgaaccaatggagtcatcaaaat

SEQ ID NO: 985966 - DNA, 33 bp, Homo sapien
catatcatgctgaaccgatggagtcatcaaaat

SEQ ID NO: 985967 - DNA, 33 bp, Homo sapien
tattcatatgctctgacataaaaaaagaactgc

SEQ ID NO: 985968 - DNA, 33 bp, Homo sapien
tattcatatgctctgagataaaaaaagaactgc

SEQ ID NO: 985969 - DNA, 33 bp, Homo sapien
aataattctatcatggaacaaatatgagtcgaa

SEQ ID NO: 985970 - DNA, 33 bp, Homo sapien
aataattctatcatgggacaaatatgagtcgaa

SEQ ID NO: 985971 - DNA, 33 bp, Homo sapien
aggcaagaatatgtgacgcaagatggcaacaat

SEQ ID NO: 985972 - DNA, 33 bp, Homo sapien
aggcaagaatatgtgatgcaagatggcaacaat

SEQ ID NO: 985973 - DNA, 33 bp, Homo sapien
tcaaaaacttacatataatagtggttgatgaca

SEQ ID NO: 985974 - DNA, 33 bp, Homo sapien
tcaaaaacttacatatcatagtggttgatgaca

SEQ ID NO: 985975 - DNA, 33 bp, Homo sapien
tgctgaaataaactcccggaagatcttggttta

SEQ ID NO: 985976 - DNA, 33 bp, Homo sapien
tgctgaaataaactcctggaagatcttggttta

SEQ ID NO: 985977 - DNA, 33 bp, Homo sapien
tcttcatcatacactcactctaaaatccaaaag

SEQ ID NO: 985978 - DNA, 33 bp, Homo sapien
tcttcatcatacactcgctctaaaatccaaaag

SEQ ID NO: 985979 - DNA, 33 bp, Homo sapien
tttgccagctgcttgcaatcaaagaatatattt

SEQ ID NO: 985980 - DNA, 33 bp, Homo sapien
tttgccagctgcttgcgatcaaagaatatattt

SEQ ID NO: 985981 - DNA, 33 bp, Homo sapien
taaataaataatactcaagtgtagactgtgcat

SEQ ID NO: 985982 - DNA, 33 bp, Homo sapien
taaataaataatactccagtgtagactgtgcat

SEQ ID NO: 985983 - DNA, 33 bp, Homo sapien
aatacaagagtgaaaaacagattttacagataa

SEQ ID NO: 985984 - DNA, 33 bp, Homo sapien
aatacaagagtgaaaagcagattttacagataa

SEQ ID NO: 985985 - DNA, 33 bp, Homo sapien
gatttctagtgcaattaaaaatgctgaaaacat

SEQ ID NO: 985986 - DNA, 33 bp, Homo sapien
gatttctagtgcaattgaaaatgctgaaaacat

SEQ ID NO: 985987 - DNA, 33 bp, Homo sapien
ggttttgtttttagtacgcatggaactctcctt

SEQ ID NO: 985988 - DNA, 33 bp, Homo sapien
ggttttgtttttagtatgcatggaactctcctt

SEQ ID NO: 985989 - DNA, 33 bp, Homo sapien
accagcaaattggaaaacctagacaaaatcgat

SEQ ID NO: 985990 - DNA, 33 bp, Homo sapien
accagcaaattggaaagcctagacaaaatcgat

SEQ ID NO: 985991 - DNA, 33 bp, Homo sapien
cttctaagctatttacacgtcagagttgagctc

SEQ ID NO: 985992 - DNA, 33 bp, Homo sapien
cttctaagctatttacgcgtcagagttgagctc

SEQ ID NO: 985993 - DNA, 33 bp, Homo sapien
cacagtgagattgcaaaacattgtaaaatgggt

SEQ ID NO: 985994 - DNA, 33 bp, Homo sapien
cacagtgagattgcaagacattgtaaaatgggt

SEQ ID NO: 985995 - DNA, 33 bp, Homo sapien
agctattcaagattgacgaaagaggattccatc

SEQ ID NO: 985996 - DNA, 33 bp, Homo sapien
agctattcaagattgatgaaagaggattccatc

SEQ ID NO: 985997 - DNA, 33 bp, Homo sapien
gacattaggagatccaatagttatttgctactt

SEQ ID NO: 985998 - DNA, 33 bp, Homo sapien
gacattaggagatccagtagttatttgctactt

SEQ ID NO: 985999 - DNA, 33 bp, Homo sapien
cttactattgttaataagagcagagcaagatat

SEQ ID NO: 986000 - DNA, 33 bp, Homo sapien
cttactattgttaataggagcagagcaagatat

SEQ ID NO: 986001 - DNA, 33 bp, Homo sapien
taccaaattttcagacactgatggctcacatta

SEQ ID NO: 986002 - DNA, 33 bp, Homo sapien
taccaaattttcagactctgatggctcacatta

SEQ ID NO: 986003 - DNA, 33 bp, Homo sapien
catcagcaattctttcaaaaaaatcaagtggta

SEQ ID NO: 986004 - DNA, 33 bp, Homo sapien
catcagcaattctttcgaaaaaatcaagtggta

SEQ ID NO: 986005 - DNA, 33 bp, Homo sapien
gaagacagacttggacagtaatgaaataatatc

SEQ ID NO: 986006 - DNA, 33 bp, Homo sapien
gaagacagacttggactgtaatgaaataatatc

SEQ ID NO: 986007 - DNA, 33 bp, Homo sapien
tgtcaagggataaaaaatgttcatatattgcat

SEQ ID NO: 986008 - DNA, 33 bp, Homo sapien
tgtcaagggataaaaagtgttcatatattgcat

SEQ ID NO: 986009 - DNA, 33 bp, Homo sapien
ttctgtagttgtcaagaaaaaattatatgtatt

SEQ ID NO: 986010 - DNA, 33 bp, Homo sapien
ttctgtagttgtcaagtaaaaattatatgtatt

SEQ ID NO: 986011 - DNA, 33 bp, Homo sapien
gtaagaggaagccccaactttcccagtgtctga

SEQ ID NO: 986012 - DNA, 33 bp, Homo sapien
gtaagaggaagccccacctttcccagtgtctga

SEQ ID NO: 986013 - DNA, 33 bp, Homo sapien
tcctacaaatccaatgaatttctgatcagcatc

SEQ ID NO: 986014 - DNA, 33 bp, Homo sapien
tcctacaaatccaatgcatttctgatcagcatc

SEQ ID NO: 986015 - DNA, 33 bp, Homo sapien
agactatttgaaatacacaggcagaggagacaa

SEQ ID NO: 986016 - DNA, 33 bp, Homo sapien
agactatttgaaatacccaggcagaggagacaa

SEQ ID NO: 986017 - DNA, 33 bp, Homo sapien
agtctgtaagaagtgagatataagaagggtaaa

SEQ ID NO: 986018 - DNA, 33 bp, Homo sapien
agtctgtaagaagtgatatataagaagggtaaa

SEQ ID NO: 986019 - DNA, 33 bp, Homo sapien
tgaatgtacacaaatgaattacacagcagaatt

SEQ ID NO: 986020 - DNA, 33 bp, Homo sapien
tgaatgtacacaaatggattacacagcagaatt

SEQ ID NO: 986021 - DNA, 33 bp, Homo sapien
atctcagtggtcattcacacaaaagtcttatac

SEQ ID NO: 986022 - DNA, 33 bp, Homo sapien
atctcagtggtcattcgcacaaaagtcttatac

SEQ ID NO: 986023 - DNA, 33 bp, Homo sapien
tgatgctatgaaatcaatgatgctgtttcacat

SEQ ID NO: 986024 - DNA, 33 bp, Homo sapien
tgatgctatgaaatcagtgatgctgtttcacat

SEQ ID NO: 986025 - DNA, 33 bp, Homo sapien
ctacaagtacattaaaatatgcagcttcttatg

SEQ ID NO: 986026 - DNA, 33 bp, Homo sapien
ctacaagtacattaaactatgcagcttcttatg

SEQ ID NO: 986027 - DNA, 33 bp, Homo sapien
ttcacttgtccaagaacgctttggaaattctag

SEQ ID NO: 986028 - DNA, 33 bp, Homo sapien
ttcacttgtccaagaatgctttggaaattctag

SEQ ID NO: 986029 - DNA, 33 bp, Homo sapien
atctctgacattctctcacggttttctgtctca

SEQ ID NO: 986030 - DNA, 33 bp, Homo sapien
atctctgacattctcttacggttttctgtctca

SEQ ID NO: 986031 - DNA, 33 bp, Homo sapien
aaataatgtgaactaacggaaagaaacaaattc

SEQ ID NO: 986032 - DNA, 33 bp, Homo sapien
aaataatgtgaactaatggaaagaaacaaattc

SEQ ID NO: 986033 - DNA, 33 bp, Homo sapien
ggttgtgtacattaccagagagaaaaggagaaa

SEQ ID NO: 986034 - DNA, 33 bp, Homo sapien
ggttgtgtacattacctgagagaaaaggagaaa

SEQ ID NO: 986035 - DNA, 33 bp, Homo sapien
tattttccacagtaacaatatcaacatcacctt

SEQ ID NO: 986036 - DNA, 33 bp, Homo sapien
tattttccacagtaacgatatcaacatcacctt

SEQ ID NO: 986037 - DNA, 33 bp, Homo sapien
tagctgtggaaaatgacattagacaagtttatg

SEQ ID NO: 986038 - DNA, 33 bp, Homo sapien
tagctgtggaaaatgatattagacaagtttatg

SEQ ID NO: 986039 - DNA, 33 bp, Homo sapien
gtcaaaatttttaaaaggtctgagatcttgccc

SEQ ID NO: 986040 - DNA, 33 bp, Homo sapien
gtcaaaatttttaaaatgtctgagatcttgccc

SEQ ID NO: 986041 - DNA, 33 bp, Homo sapien
ttccttctctgctatacgaacatccttgaaaag

SEQ ID NO: 986042 - DNA, 33 bp, Homo sapien
ttccttctctgctatatgaacatccttgaaaag

SEQ ID NO: 986043 - DNA, 33 bp, Homo sapien
tacatcaacaacaatcacccagtctttctccct

SEQ ID NO: 986044 - DNA, 33 bp, Homo sapien
tacatcaacaacaatcgcccagtctttctccct

SEQ ID NO: 986045 - DNA, 33 bp, Homo sapien
ggcagacattaagaaaaagccagggtcacaaag

SEQ ID NO: 986046 - DNA, 33 bp, Homo sapien
ggcagacattaagaaagagccagggtcacaaag

SEQ ID NO: 986047 - DNA, 33 bp, Homo sapien
gtattacaatattggaagtgcctaattggcaaa

SEQ ID NO: 986048 - DNA, 33 bp, Homo sapien
gtattacaatattggatgtgcctaattggcaaa

SEQ ID NO: 986049 - DNA, 33 bp, Homo sapien
gaaatacaggtgctataacaatgaccaggcaga

SEQ ID NO: 986050 - DNA, 33 bp, Homo sapien
gaaatacaggtgctatgacaatgaccaggcaga

SEQ ID NO: 986051 - DNA, 33 bp, Homo sapien
taaactggtataagtcaccatacacttttccag

SEQ ID NO: 986052 - DNA, 33 bp, Homo sapien
taaactggtataagtcgccatacacttttccag

SEQ ID NO: 986053 - DNA, 33 bp, Homo sapien
ttttaatataacacaacctctcaggacttctgg

SEQ ID NO: 986054 - DNA, 33 bp, Homo sapien
ttttaatataacacaatctctcaggacttctgg

SEQ ID NO: 986055 - DNA, 33 bp, Homo sapien
ggaaggtcagctagaacgagaacagaaaagact

SEQ ID NO: 986056 - DNA, 33 bp, Homo sapien
ggaaggtcagctagaaggagaacagaaaagact

SEQ ID NO: 986057 - DNA, 33 bp, Homo sapien
cccagaactagtagaaataagttgcaattaaag

SEQ ID NO: 986058 - DNA, 33 bp, Homo sapien
cccagaactagtagaagtaagttgcaattaaag

SEQ ID NO: 986059 - DNA, 33 bp, Homo sapien
catgtagccctcgatcactctttaacattaata

SEQ ID NO: 986060 - DNA, 33 bp, Homo sapien
catgtagccctcgatcgctctttaacattaata

SEQ ID NO: 986061 - DNA, 33 bp, Homo sapien
aaagaatcagaaacaaatgcatatgtgccttga

SEQ ID NO: 986062 - DNA, 33 bp, Homo sapien
aaagaatcagaaacaagtgcatatgtgccttga

SEQ ID NO: 986063 - DNA, 33 bp, Homo sapien
catgacagtattcataaagtgaaatgtatttga

SEQ ID NO: 986064 - DNA, 33 bp, Homo sapien
catgacagtattcatacagtgaaatgtatttga

SEQ ID NO: 986065 - DNA, 33 bp, Homo sapien
tcttacccgcctctgacgccttagatgaccact

SEQ ID NO: 986066 - DNA, 33 bp, Homo sapien
tcttacccgcctctgatgccttagatgaccact

SEQ ID NO: 986067 - DNA, 33 bp, Homo sapien
agcaagtctcgtattaccttgtgctgatcacaa

SEQ ID NO: 986068 - DNA, 33 bp, Homo sapien
agcaagtctcgtattatcttgtgctgatcacaa

SEQ ID NO: 986069 - DNA, 33 bp, Homo sapien
tgggcaacttaatccacgaatgttgtctgtatt

SEQ ID NO: 986070 - DNA, 33 bp, Homo sapien
tgggcaacttaatccatgaatgttgtctgtatt

SEQ ID NO: 986071 - DNA, 33 bp, Homo sapien
ctctctttgacaactacatgatgaaccatgttt

SEQ ID NO: 986072 - DNA, 33 bp, Homo sapien
ctctctttgacaactatatgatgaaccatgttt

SEQ ID NO: 986073 - DNA, 33 bp, Homo sapien
cattttagtaggcaaaactctcagattaacagt

SEQ ID NO: 986074 - DNA, 33 bp, Homo sapien
cattttagtaggcaaacctctcagattaacagt

SEQ ID NO: 986075 - DNA, 33 bp, Homo sapien
tgtcctattttacatacccaatttaccagtggt

SEQ ID NO: 986076 - DNA, 33 bp, Homo sapien
tgtcctattttacatatccaatttaccagtggt

SEQ ID NO: 986077 - DNA, 33 bp, Homo sapien
cttctcatactcataacctcaccagtaatgaaa

SEQ ID NO: 986078 - DNA, 33 bp, Homo sapien
cttctcatactcataatctcaccagtaatgaaa

SEQ ID NO: 986079 - DNA, 33 bp, Homo sapien
aatccagggaaaccagaattatggcagccattc

SEQ ID NO: 986080 - DNA, 33 bp, Homo sapien
aatccagggaaaccagcattatggcagccattc

SEQ ID NO: 986081 - DNA, 33 bp, Homo sapien
aagtatttattgctataacttttcctcatagca

SEQ ID NO: 986082 - DNA, 33 bp, Homo sapien
aagtatttattgctattacttttcctcatagca

SEQ ID NO: 986083 - DNA, 33 bp, Homo sapien
gcattgctatagataaatacttgagactgagta

SEQ ID NO: 986084 - DNA, 33 bp, Homo sapien
gcattgctatagataactacttgagactgagta

SEQ ID NO: 986085 - DNA, 33 bp, Homo sapien
tactgaaggttagggacacaaagagtcacagca

SEQ ID NO: 986086 - DNA, 33 bp, Homo sapien
tactgaaggttagggagacaaagagtcacagca

SEQ ID NO: 986087 - DNA, 33 bp, Homo sapien
aatgtaaggagaaaaggatatggccagtgatct

SEQ ID NO: 986088 - DNA, 33 bp, Homo sapien
aatgtaaggagaaaagtatatggccagtgatct

SEQ ID NO: 986089 - DNA, 33 bp, Homo sapien
ctagatttatacttcccgaggcgtgaaaggaaa

SEQ ID NO: 986090 - DNA, 33 bp, Homo sapien
ctagatttatacttcctgaggcgtgaaaggaaa

SEQ ID NO: 986091 - DNA, 33 bp, Homo sapien
ctaaaccagtttaccaatacatgatggtcttat

SEQ ID NO: 986092 - DNA, 33 bp, Homo sapien
ctaaaccagtttaccagtacatgatggtcttat

SEQ ID NO: 986093 - DNA, 33 bp, Homo sapien
tgtggcatggtacgtacgctaaaatctcaagct

SEQ ID NO: 986094 - DNA, 33 bp, Homo sapien
tgtggcatggtacgtatgctaaaatctcaagct

SEQ ID NO: 986095 - DNA, 33 bp, Homo sapien
aacatttccaaattaaggaacctatcctgtcaa

SEQ ID NO: 986096 - DNA, 33 bp, Homo sapien
aacatttccaaattaatgaacctatcctgtcaa

SEQ ID NO: 986097 - DNA, 33 bp, Homo sapien
aagaaaaaggagagaaatgagtcgatccaaagc

SEQ ID NO: 986098 - DNA, 33 bp, Homo sapien
aagaaaaaggagagaactgagtcgatccaaagc

SEQ ID NO: 986099 - DNA, 33 bp, Homo sapien
ataaagcgactaaggacggcaaccgcaaaagca

SEQ ID NO: 986100 - DNA, 33 bp, Homo sapien
ataaagcgactaaggatggcaaccgcaaaagca

SEQ ID NO: 986101 - DNA, 33 bp, Homo sapien
cacagaaagcaaaaccgaatgggaattttattt

SEQ ID NO: 986102 - DNA, 33 bp, Homo sapien
cacagaaagcaaaacctaatgggaattttattt

SEQ ID NO: 986103 - DNA, 33 bp, Homo sapien
ttcaggcaggagaactcaggaaagaataaaaag

SEQ ID NO: 986104 - DNA, 33 bp, Homo sapien
ttcaggcaggagaactgaggaaagaataaaaag

SEQ ID NO: 986105 - DNA, 33 bp, Homo sapien
tcttgggcaccatccaatatgattaagataatg

SEQ ID NO: 986106 - DNA, 33 bp, Homo sapien
tcttgggcaccatccagtatgattaagataatg

SEQ ID NO: 986107 - DNA, 33 bp, Homo sapien
gtggtttggctggtcacgaagttttccttttcc

SEQ ID NO: 986108 - DNA, 33 bp, Homo sapien
gtggtttggctggtcatgaagttttccttttcc

SEQ ID NO: 986109 - DNA, 33 bp, Homo sapien
tagagagatagaattaaaagttgatgaagagga

SEQ ID NO: 986110 - DNA, 33 bp, Homo sapien
tagagagatagaattagaagttgatgaagagga

SEQ ID NO: 986111 - DNA, 33 bp, Homo sapien
tgccagatctctcagaatcctttggaatgctaa

SEQ ID NO: 986112 - DNA, 33 bp, Homo sapien
tgccagatctctcagagtcctttggaatgctaa

SEQ ID NO: 986113 - DNA, 33 bp, Homo sapien
tcagttacaactttcaccttatgtgtattaaaa

SEQ ID NO: 986114 - DNA, 33 bp, Homo sapien
tcagttacaactttcatcttatgtgtattaaaa

SEQ ID NO: 986115 - DNA, 33 bp, Homo sapien
gtaacatctttaatggaaagtgccatccatcag

SEQ ID NO: 986116 - DNA, 33 bp, Homo sapien
gtaacatctttaatgggaagtgccatccatcag

SEQ ID NO: 986117 - DNA, 33 bp, Homo sapien
taaaaattgcattaacaaaagatataccttctt

SEQ ID NO: 986118 - DNA, 33 bp, Homo sapien
taaaaattgcattaacgaaagatataccttctt

SEQ ID NO: 986119 - DNA, 33 bp, Homo sapien
aaatagggtgacaacaagagaacattaggttaa

SEQ ID NO: 986120 - DNA, 33 bp, Homo sapien
aaatagggtgacaacaggagaacattaggttaa

SEQ ID NO: 986121 - DNA, 33 bp, Homo sapien
ccacaaactttaatgacagaaaccggaggctgg

SEQ ID NO: 986122 - DNA, 33 bp, Homo sapien
ccacaaactttaatgatagaaaccggaggctgg

SEQ ID NO: 986123 - DNA, 33 bp, Homo sapien
aggtgggaatgcttagaaggtacaaataaatag

SEQ ID NO: 986124 - DNA, 33 bp, Homo sapien
aggtgggaatgcttagtaggtacaaataaatag

SEQ ID NO: 986125 - DNA, 33 bp, Homo sapien
gtatgcctcaaaaagaagttctaatatctgatg

SEQ ID NO: 986126 - DNA, 33 bp, Homo sapien
gtatgcctcaaaaagacgttctaatatctgatg

SEQ ID NO: 986127 - DNA, 33 bp, Homo sapien
cttaaattggaaagaacaagttaacacaaagaa

SEQ ID NO: 986128 - DNA, 33 bp, Homo sapien
cttaaattggaaagaataagttaacacaaagaa

SEQ ID NO: 986129 - DNA, 33 bp, Homo sapien
agtattttggtttttacgctaatgatccttaca

SEQ ID NO: 986130 - DNA, 33 bp, Homo sapien
agtattttggtttttatgctaatgatccttaca

SEQ ID NO: 986131 - DNA, 33 bp, Homo sapien
cctaaagtatgcaagaaggaaaaattcatagtg

SEQ ID NO: 986132 - DNA, 33 bp, Homo sapien
cctaaagtatgcaagatggaaaaattcatagtg

SEQ ID NO: 986133 - DNA, 33 bp, Homo sapien
aaaaacatttgattggcaaggtgtaagtgtgct

SEQ ID NO: 986134 - DNA, 33 bp, Homo sapien
aaaaacatttgattggtaaggtgtaagtgtgct

SEQ ID NO: 986135 - DNA, 33 bp, Homo sapien
tgactagagtcaataaagctaaatttgataaac

SEQ ID NO: 986136 - DNA, 33 bp, Homo sapien
tgactagagtcaataatgctaaatttgataaac

SEQ ID NO: 986137 - DNA, 33 bp, Homo sapien
attcaattcagtaagacgtagtggaattctgta

SEQ ID NO: 986138 - DNA, 33 bp, Homo sapien
attcaattcagtaagatgtagtggaattctgta

SEQ ID NO: 986139 - DNA, 33 bp, Homo sapien
ggagataggcaaaagacgaaatgataacttata

SEQ ID NO: 986140 - DNA, 33 bp, Homo sapien
ggagataggcaaaagatgaaatgataacttata

SEQ ID NO: 986141 - DNA, 33 bp, Homo sapien
ttcctagctttcagaactgcaagaaataaatgt

SEQ ID NO: 986142 - DNA, 33 bp, Homo sapien
ttcctagctttcagaagtgcaagaaataaatgt

SEQ ID NO: 986143 - DNA, 33 bp, Homo sapien
taaactaaactggtgcaataattagcaataact

SEQ ID NO: 986144 - DNA, 33 bp, Homo sapien
taaactaaactggtgcgataattagcaataact

SEQ ID NO: 986145 - DNA, 33 bp, Homo sapien
gtgttgatggtttttacaaaaggtagtgacgaa

SEQ ID NO: 986146 - DNA, 33 bp, Homo sapien
gtgttgatggtttttataaaaggtagtgacgaa

SEQ ID NO: 986147 - DNA, 33 bp, Homo sapien
ttaaaaggcaaataaaagacatggtacagcatg

SEQ ID NO: 986148 - DNA, 33 bp, Homo sapien
ttaaaaggcaaataaatgacatggtacagcatg

SEQ ID NO: 986149 - DNA, 33 bp, Homo sapien
tctgaactaatgcctacagcgtggaaccatttt

SEQ ID NO: 986150 - DNA, 33 bp, Homo sapien
tctgaactaatgcctagagcgtggaaccatttt

SEQ ID NO: 986151 - DNA, 33 bp, Homo sapien
ttttatactagttagcacttgataggacatctt

SEQ ID NO: 986152 - DNA, 33 bp, Homo sapien
ttttatactagttagctcttgataggacatctt

SEQ ID NO: 986153 - DNA, 33 bp, Homo sapien
atttaagctgactactaaaaatctcttcctatc

SEQ ID NO: 986154 - DNA, 33 bp, Homo sapien
atttaagctgactactgaaaatctcttcctatc

SEQ ID NO: 986155 - DNA, 33 bp, Homo sapien
atgtcaccaacagaaaatatgcataataagacc

SEQ ID NO: 986156 - DNA, 33 bp, Homo sapien
atgtcaccaacagaaagtatgcataataagacc

SEQ ID NO: 986157 - DNA, 33 bp, Homo sapien
ttgtcacattccatgacacctagctttatactt

SEQ ID NO: 986158 - DNA, 33 bp, Homo sapien
ttgtcacattccatgatacctagctttatactt

SEQ ID NO: 986159 - DNA, 33 bp, Homo sapien
ggaggaaaaagaggagaatttagtgtgtcctat

SEQ ID NO: 986160 - DNA, 33 bp, Homo sapien
ggaggaaaaagaggaggatttagtgtgtcctat

SEQ ID NO: 986161 - DNA, 33 bp, Homo sapien
cagattagttttcagcagcaaaattgatttatt

SEQ ID NO: 986162 - DNA, 33 bp, Homo sapien
cagattagttttcagcggcaaaattgatttatt

SEQ ID NO: 986163 - DNA, 33 bp, Homo sapien
tggtgatgaccttgacacccacgctggaaggtt

SEQ ID NO: 986164 - DNA, 33 bp, Homo sapien
tggtgatgaccttgacgcccacgctggaaggtt

SEQ ID NO: 986165 - DNA, 33 bp, Homo sapien
gttttcctctgttagagctgcataggactttag

SEQ ID NO: 986166 - DNA, 33 bp, Homo sapien
gttttcctctgttagatctgcataggactttag

SEQ ID NO: 986167 - DNA, 33 bp, Homo sapien
ccacaaattattatctaaagctagcatctcacc

SEQ ID NO: 986168 - DNA, 33 bp, Homo sapien
ccacaaattattatctgaagctagcatctcacc

SEQ ID NO: 986169 - DNA, 33 bp, Homo sapien
cttcctttaaatgttcaagaccatcagaatctt

SEQ ID NO: 986170 - DNA, 33 bp, Homo sapien
cttcctttaaatgttctagaccatcagaatctt

SEQ ID NO: 986171 - DNA, 33 bp, Homo sapien
aaggcccctgtggtaactgaattggagtcagaa

SEQ ID NO: 986172 - DNA, 33 bp, Homo sapien
aaggcccctgtggtaattgaattggagtcagaa

SEQ ID NO: 986173 - DNA, 33 bp, Homo sapien
atctttctgcacactaaatgaagtggaatttgc

SEQ ID NO: 986174 - DNA, 33 bp, Homo sapien
atctttctgcacactacatgaagtggaatttgc

SEQ ID NO: 986175 - DNA, 33 bp, Homo sapien
cacagaacctggataaccaagacactacttgga

SEQ ID NO: 986176 - DNA, 33 bp, Homo sapien
cacagaacctggataatcaagacactacttgga

SEQ ID NO: 986177 - DNA, 33 bp, Homo sapien
ttcatacaagctgaaaaatccagtgttccttta

SEQ ID NO: 986178 - DNA, 33 bp, Homo sapien
ttcatacaagctgaaagatccagtgttccttta

SEQ ID NO: 986179 - DNA, 33 bp, Homo sapien
aaattaggaaccagagccagaaaggacaagtga

SEQ ID NO: 986180 - DNA, 33 bp, Homo sapien
aaattaggaaccagagtcagaaaggacaagtga

SEQ ID NO: 986181 - DNA, 33 bp, Homo sapien
gtgattatttaatttacgatgatctggatagaa

SEQ ID NO: 986182 - DNA, 33 bp, Homo sapien
gtgattatttaatttaggatgatctggatagaa

SEQ ID NO: 986183 - DNA, 33 bp, Homo sapien
taaactaacagtttcacctttcatcaattaagt

SEQ ID NO: 986184 - DNA, 33 bp, Homo sapien
taaactaacagtttcatctttcatcaattaagt

SEQ ID NO: 986185 - DNA, 33 bp, Homo sapien
gactggagatcatcagaaaaagggaaagtcatc

SEQ ID NO: 986186 - DNA, 33 bp, Homo sapien
gactggagatcatcaggaaaagggaaagtcatc

SEQ ID NO: 986187 - DNA, 33 bp, Homo sapien
tgctcagtatacaatagctttggtaaataccac

SEQ ID NO: 986188 - DNA, 33 bp, Homo sapien
tgctcagtatacaatatctttggtaaataccac

SEQ ID NO: 986189 - DNA, 33 bp, Homo sapien
acagtttgacttaagacgcaacactcatgaggc

SEQ ID NO: 986190 - DNA, 33 bp, Homo sapien
acagtttgacttaagatgcaacactcatgaggc

SEQ ID NO: 986191 - DNA, 33 bp, Homo sapien
tttcaataggctcccaaatctctatgcatgatt

SEQ ID NO: 986192 - DNA, 33 bp, Homo sapien
tttcaataggctcccagatctctatgcatgatt

SEQ ID NO: 986193 - DNA, 33 bp, Homo sapien
ttcataattgccataaagtggatacaacccaaa

SEQ ID NO: 986194 - DNA, 33 bp, Homo sapien
ttcataattgccataatgtggatacaacccaaa

SEQ ID NO: 986195 - DNA, 33 bp, Homo sapien
agagttttcaccttacaggacaatgaaggcatc

SEQ ID NO: 986196 - DNA, 33 bp, Homo sapien
agagttttcaccttacgggacaatgaaggcatc

SEQ ID NO: 986197 - DNA, 33 bp, Homo sapien
acaatgaatgaaacaaaaaacactgggatctac

SEQ ID NO: 986198 - DNA, 33 bp, Homo sapien
acaatgaatgaaacaacaaacactgggatctac

SEQ ID NO: 986199 - DNA, 33 bp, Homo sapien
ctagcactcctctaaacgaaaagtttcaaagaa

SEQ ID NO: 986200 - DNA, 33 bp, Homo sapien
ctagcactcctctaaatgaaaagtttcaaagaa

SEQ ID NO: 986201 - DNA, 33 bp, Homo sapien
aatttgaagaactactaagattttcctgttgag

SEQ ID NO: 986202 - DNA, 33 bp, Homo sapien
aatttgaagaactactcagattttcctgttgag

SEQ ID NO: 986203 - DNA, 33 bp, Homo sapien
atgtaatggcatgaaacctcatatattaaaatc

SEQ ID NO: 986204 - DNA, 33 bp, Homo sapien
atgtaatggcatgaaagctcatatattaaaatc

SEQ ID NO: 986205 - DNA, 33 bp, Homo sapien
aatgagcttttagtaacgtggtgttaaggtgtg

SEQ ID NO: 986206 - DNA, 33 bp, Homo sapien
aatgagcttttagtaatgtggtgttaaggtgtg

SEQ ID NO: 986207 - DNA, 33 bp, Homo sapien
ccaaagactgagaaatgattagaagccactgga

SEQ ID NO: 986208 - DNA, 33 bp, Homo sapien
ccaaagactgagaaattattagaagccactgga

SEQ ID NO: 986209 - DNA, 33 bp, Homo sapien
agaatagtgtttacaactgatggaagatgctgg

SEQ ID NO: 986210 - DNA, 33 bp, Homo sapien
agaatagtgtttacaagtgatggaagatgctgg

SEQ ID NO: 986211 - DNA, 33 bp, Homo sapien
tcattattattaattaagcaaatagtgccatgt

SEQ ID NO: 986212 - DNA, 33 bp, Homo sapien
tcattattattaattaggcaaatagtgccatgt

SEQ ID NO: 986213 - DNA, 33 bp, Homo sapien
tgtattgctctgaactaagcactgagcatattg

SEQ ID NO: 986214 - DNA, 33 bp, Homo sapien
tgtattgctctgaactgagcactgagcatattg

SEQ ID NO: 986215 - DNA, 33 bp, Homo sapien
tctggcctatagtggacgatgactcattaggtt

SEQ ID NO: 986216 - DNA, 33 bp, Homo sapien
tctggcctatagtggaggatgactcattaggtt

SEQ ID NO: 986217 - DNA, 33 bp, Homo sapien
aggggaagaaacaggaagaggtcagaaaagttc

SEQ ID NO: 986218 - DNA, 33 bp, Homo sapien
aggggaagaaacaggaggaggtcagaaaagttc

SEQ ID NO: 986219 - DNA, 33 bp, Homo sapien
ttccatattaaatacaagtttcctttgttgggg

SEQ ID NO: 986220 - DNA, 33 bp, Homo sapien
ttccatattaaatacaggtttcctttgttgggg

SEQ ID NO: 986221 - DNA, 33 bp, Homo sapien
gttgacgagtagagaaaaagaagcgtgataatt

SEQ ID NO: 986222 - DNA, 33 bp, Homo sapien
gttgacgagtagagaagaagaagcgtgataatt

SEQ ID NO: 986223 - DNA, 33 bp, Homo sapien
gacacactagggtagcacctcattcttctgtct

SEQ ID NO: 986224 - DNA, 33 bp, Homo sapien
gacacactagggtagctcctcattcttctgtct

SEQ ID NO: 986225 - DNA, 33 bp, Homo sapien
tcagaacattgcttaacatgttggttgagtccg

SEQ ID NO: 986226 - DNA, 33 bp, Homo sapien
tcagaacattgcttaatatgttggttgagtccg

SEQ ID NO: 986227 - DNA, 33 bp, Homo sapien
ggaaatatggcttcccaactctttggcagactt

SEQ ID NO: 986228 - DNA, 33 bp, Homo sapien
ggaaatatggcttcccgactctttggcagactt

SEQ ID NO: 986229 - DNA, 33 bp, Homo sapien
gatggagaaggatgtacggccgagagagggatt

SEQ ID NO: 986230 - DNA, 33 bp, Homo sapien
gatggagaaggatgtatggccgagagagggatt

SEQ ID NO: 986231 - DNA, 33 bp, Homo sapien
tccagacaataaatgacggaggaggtaatttga

SEQ ID NO: 986232 - DNA, 33 bp, Homo sapien
tccagacaataaatgatggaggaggtaatttga

SEQ ID NO: 986233 - DNA, 33 bp, Homo sapien
agtcagtgtaaatctagatggtgctaatttgtc

SEQ ID NO: 986234 - DNA, 33 bp, Homo sapien
agtcagtgtaaatctatatggtgctaatttgtc

SEQ ID NO: 986235 - DNA, 33 bp, Homo sapien
ttgttccagtcaactcagaagaatcatgagcaa

SEQ ID NO: 986236 - DNA, 33 bp, Homo sapien
ttgttccagtcaactcggaagaatcatgagcaa

SEQ ID NO: 986237 - DNA, 33 bp, Homo sapien
tgaatgaaaactaagacggactaccactcttgt

SEQ ID NO: 986238 - DNA, 33 bp, Homo sapien
tgaatgaaaactaagatggactaccactcttgt

SEQ ID NO: 986239 - DNA, 33 bp, Homo sapien
tcttggggctcctttccctatgttcacactgaa

SEQ ID NO: 986240 - DNA, 33 bp, Homo sapien
tcttggggctcctttctctatgttcacactgaa

SEQ ID NO: 986241 - DNA, 33 bp, Homo sapien
aatcaaagtaacttcccgctgcttacagccctc

SEQ ID NO: 986242 - DNA, 33 bp, Homo sapien
aatcaaagtaacttcctgctgcttacagccctc

SEQ ID NO: 986243 - DNA, 33 bp, Homo sapien
atctttatggtggagacacaacattttggaagc

SEQ ID NO: 986244 - DNA, 33 bp, Homo sapien
atctttatggtggagatacaacattttggaagc

SEQ ID NO: 986245 - DNA, 33 bp, Homo sapien
tttctttttaagctataacagacattaaaattc

SEQ ID NO: 986246 - DNA, 33 bp, Homo sapien
tttctttttaagctatgacagacattaaaattc

SEQ ID NO: 986247 - DNA, 33 bp, Homo sapien
gccaccatatcttcccaacctttcacatcaaat

SEQ ID NO: 986248 - DNA, 33 bp, Homo sapien
gccaccatatcttccctacctttcacatcaaat

SEQ ID NO: 986249 - DNA, 33 bp, Homo sapien
ggtgaaatagaacgtcactacaaatacaggtca

SEQ ID NO: 986250 - DNA, 33 bp, Homo sapien
ggtgaaatagaacgtcgctacaaatacaggtca

SEQ ID NO: 986251 - DNA, 33 bp, Homo sapien
acttgtgatgtcagaaccggcagaaaaggagcc

SEQ ID NO: 986252 - DNA, 33 bp, Homo sapien
acttgtgatgtcagaatcggcagaaaaggagcc

SEQ ID NO: 986253 - DNA, 33 bp, Homo sapien
tgtgccaacagttgccaatacttcacaatattt

SEQ ID NO: 986254 - DNA, 33 bp, Homo sapien
tgtgccaacagttgccgatacttcacaatattt

SEQ ID NO: 986255 - DNA, 33 bp, Homo sapien
acattttgttagtagcccaagtggactaagaca

SEQ ID NO: 986256 - DNA, 33 bp, Homo sapien
acattttgttagtagctcaagtggactaagaca

SEQ ID NO: 986257 - DNA, 33 bp, Homo sapien
ttcagccaaagaagaaacacttcactttccaag

SEQ ID NO: 986258 - DNA, 33 bp, Homo sapien
ttcagccaaagaagaatcacttcactttccaag

SEQ ID NO: 986259 - DNA, 33 bp, Homo sapien
tcttattagcattaacacaatatccagattaat

SEQ ID NO: 986260 - DNA, 33 bp, Homo sapien
tcttattagcattaacgcaatatccagattaat

SEQ ID NO: 986261 - DNA, 33 bp, Homo sapien
cttttgcagaaacttcaaagcattgtgaccttc

SEQ ID NO: 986262 - DNA, 33 bp, Homo sapien
cttttgcagaaacttcgaagcattgtgaccttc

SEQ ID NO: 986263 - DNA, 33 bp, Homo sapien
attgatggagaaagacaatttcttctatgccac

SEQ ID NO: 986264 - DNA, 33 bp, Homo sapien
attgatggagaaagacgatttcttctatgccac

SEQ ID NO: 986265 - DNA, 33 bp, Homo sapien
acctgaattgcacataccctttttttgtcatca

SEQ ID NO: 986266 - DNA, 33 bp, Homo sapien
acctgaattgcacatatcctttttttgtcatca

SEQ ID NO: 986267 - DNA, 33 bp, Homo sapien
tagtttatagatgttaacaagtacggagtgggg

SEQ ID NO: 986268 - DNA, 33 bp, Homo sapien
tagtttatagatgttagcaagtacggagtgggg

SEQ ID NO: 986269 - DNA, 33 bp, Homo sapien
ctattgctcttcaacacgtagctctactatgag

SEQ ID NO: 986270 - DNA, 33 bp, Homo sapien
ctattgctcttcaacatgtagctctactatgag

SEQ ID NO: 986271 - DNA, 33 bp, Homo sapien
tcaaattgtactgaaaacagattaaaacacttc

SEQ ID NO: 986272 - DNA, 33 bp, Homo sapien
tcaaattgtactgaaagcagattaaaacacttc

SEQ ID NO: 986273 - DNA, 33 bp, Homo sapien
tagaggattacaaaggaaggaatgctttaaaac

SEQ ID NO: 986274 - DNA, 33 bp, Homo sapien
tagaggattacaaaggcaggaatgctttaaaac

SEQ ID NO: 986275 - DNA, 33 bp, Homo sapien
gtttaaatgcaaaatacgagagattgatgtgca

SEQ ID NO: 986276 - DNA, 33 bp, Homo sapien
gtttaaatgcaaaatatgagagattgatgtgca

SEQ ID NO: 986277 - DNA, 33 bp, Homo sapien
agtcccttctcagccacagtttgttaatgttga

SEQ ID NO: 986278 - DNA, 33 bp, Homo sapien
agtcccttctcagccatagtttgttaatgttga

SEQ ID NO: 986279 - DNA, 33 bp, Homo sapien
caaatgtatgtacttagaggaaaacacccttct

SEQ ID NO: 986280 - DNA, 33 bp, Homo sapien
caaatgtatgtacttataggaaaacacccttct

SEQ ID NO: 986281 - DNA, 33 bp, Homo sapien
gccataatattcatagacactctgctcctctgg

SEQ ID NO: 986282 - DNA, 33 bp, Homo sapien
gccataatattcatagtcactctgctcctctgg

SEQ ID NO: 986283 - DNA, 33 bp, Homo sapien
aatagacattgtggaccagcatagggtggagga

SEQ ID NO: 986284 - DNA, 33 bp, Homo sapien
aatagacattgtggactagcatagggtggagga

SEQ ID NO: 986285 - DNA, 33 bp, Homo sapien
aaggaaatttctgccaagatactagctgaacac

SEQ ID NO: 986286 - DNA, 33 bp, Homo sapien
aaggaaatttctgccaggatactagctgaacac

SEQ ID NO: 986287 - DNA, 33 bp, Homo sapien
ggaaatttatgaaaacactttgactctcatttg

SEQ ID NO: 986288 - DNA, 33 bp, Homo sapien
ggaaatttatgaaaactctttgactctcatttg

SEQ ID NO: 986289 - DNA, 33 bp, Homo sapien
gacctgcatttcataaagcttcagtgtgggtac

SEQ ID NO: 986290 - DNA, 33 bp, Homo sapien
gacctgcatttcataaggcttcagtgtgggtac

SEQ ID NO: 986291 - DNA, 33 bp, Homo sapien
acaggaggcagcgctaagaaggtaatgtgagca

SEQ ID NO: 986292 - DNA, 33 bp, Homo sapien
acaggaggcagcgctacgaaggtaatgtgagca

SEQ ID NO: 986293 - DNA, 33 bp, Homo sapien
atgtaagactgaaaaacccagatgtcataacag

SEQ ID NO: 986294 - DNA, 33 bp, Homo sapien
atgtaagactgaaaaatccagatgtcataacag

SEQ ID NO: 986295 - DNA, 33 bp, Homo sapien
actctgtagtcagctgaaacatgcttttctcca

SEQ ID NO: 986296 - DNA, 33 bp, Homo sapien
actctgtagtcagctggaacatgcttttctcca

SEQ ID NO: 986297 - DNA, 33 bp, Homo sapien
ccaaaactactctcatcaatatcactattgacc

SEQ ID NO: 986298 - DNA, 33 bp, Homo sapien
ccaaaactactctcattaatatcactattgacc

SEQ ID NO: 986299 - DNA, 33 bp, Homo sapien
gtctcctggtttcccacatttacaaatttggac

SEQ ID NO: 986300 - DNA, 33 bp, Homo sapien
gtctcctggtttcccagatttacaaatttggac

SEQ ID NO: 986301 - DNA, 33 bp, Homo sapien
tttagaaacactgtagaccactttaaagactat

SEQ ID NO: 986302 - DNA, 33 bp, Homo sapien
tttagaaacactgtaggccactttaaagactat

SEQ ID NO: 986303 - DNA, 33 bp, Homo sapien
ggtcaacagattttaactgagtatttactatgt

SEQ ID NO: 986304 - DNA, 33 bp, Homo sapien
ggtcaacagattttaattgagtatttactatgt

SEQ ID NO: 986305 - DNA, 33 bp, Homo sapien
tacgatgtgtaaaaacacctgcttatgaagttt

SEQ ID NO: 986306 - DNA, 33 bp, Homo sapien
tacgatgtgtaaaaactcctgcttatgaagttt

SEQ ID NO: 986307 - DNA, 33 bp, Homo sapien
ttttgtttagcttaaacgttacatgattggtat

SEQ ID NO: 986308 - DNA, 33 bp, Homo sapien
ttttgtttagcttaaatgttacatgattggtat

SEQ ID NO: 986309 - DNA, 33 bp, Homo sapien
tgtcagtttttgacacaaaatgtgaacataacc

SEQ ID NO: 986310 - DNA, 33 bp, Homo sapien
tgtcagtttttgacacgaaatgtgaacataacc

SEQ ID NO: 986311 - DNA, 33 bp, Homo sapien
taccatagctcttagcacaagccagtgaataca

SEQ ID NO: 986312 - DNA, 33 bp, Homo sapien
taccatagctcttagcgcaagccagtgaataca

SEQ ID NO: 986313 - DNA, 33 bp, Homo sapien
cttcagtgggtatttcaatgaggtatctgaagt

SEQ ID NO: 986314 - DNA, 33 bp, Homo sapien
cttcagtgggtatttcgatgaggtatctgaagt

SEQ ID NO: 986315 - DNA, 33 bp, Homo sapien
agtgggcacctcataaaggttctcattagtaat

SEQ ID NO: 986316 - DNA, 33 bp, Homo sapien
agtgggcacctcataagggttctcattagtaat

SEQ ID NO: 986317 - DNA, 33 bp, Homo sapien
actatactgctgaagactctgtttagaagaact

SEQ ID NO: 986318 - DNA, 33 bp, Homo sapien
actatactgctgaagagtctgtttagaagaact

SEQ ID NO: 986319 - DNA, 33 bp, Homo sapien
aacgctagcttgggaactggtcacaatgatgaa

SEQ ID NO: 986320 - DNA, 33 bp, Homo sapien
aacgctagcttgggaattggtcacaatgatgaa

SEQ ID NO: 986321 - DNA, 33 bp, Homo sapien
atttctgaaatggaacgatcataaccaatattt

SEQ ID NO: 986322 - DNA, 33 bp, Homo sapien
atttctgaaatggaactatcataaccaatattt

SEQ ID NO: 986323 - DNA, 33 bp, Homo sapien
gtaagatagtgcactgaaagctgtctttaaata

SEQ ID NO: 986324 - DNA, 33 bp, Homo sapien
gtaagatagtgcactgcaagctgtctttaaata

SEQ ID NO: 986325 - DNA, 33 bp, Homo sapien
atcagcatgttactcaaagccattcaacaagtc

SEQ ID NO: 986326 - DNA, 33 bp, Homo sapien
atcagcatgttactcacagccattcaacaagtc

SEQ ID NO: 986327 - DNA, 33 bp, Homo sapien
actgctgtaaagacaccgaaaaatgtggaagaa

SEQ ID NO: 986328 - DNA, 33 bp, Homo sapien
actgctgtaaagacactgaaaaatgtggaagaa

SEQ ID NO: 986329 - DNA, 33 bp, Homo sapien
aatgtttgggaattagaccagaatgttaatatt

SEQ ID NO: 986330 - DNA, 33 bp, Homo sapien
aatgtttgggaattagtccagaatgttaatatt

SEQ ID NO: 986331 - DNA, 33 bp, Homo sapien
tataatccacaccttaaaatccatacacaatct

SEQ ID NO: 986332 - DNA, 33 bp, Homo sapien
tataatccacaccttacaatccatacacaatct

SEQ ID NO: 986333 - DNA, 33 bp, Homo sapien
caagcatcaccctgctcaattgaactaaaaatt

SEQ ID NO: 986334 - DNA, 33 bp, Homo sapien
caagcatcaccctgctgaattgaactaaaaatt

SEQ ID NO: 986335 - DNA, 33 bp, Homo sapien
tttttgaagatgtctaataattcaagcatcacc

SEQ ID NO: 986336 - DNA, 33 bp, Homo sapien
tttttgaagatgtctagtaattcaagcatcacc

SEQ ID NO: 986337 - DNA, 33 bp, Homo sapien
gaataggcaggttcaacagtcttgttaagggaa

SEQ ID NO: 986338 - DNA, 33 bp, Homo sapien
gaataggcaggttcaatagtcttgttaagggaa

SEQ ID NO: 986339 - DNA, 33 bp, Homo sapien
aaagttgcgtgtagatcagtcgtttctgtgctt

SEQ ID NO: 986340 - DNA, 33 bp, Homo sapien
aaagttgcgtgtagatgagtcgtttctgtgctt

SEQ ID NO: 986341 - DNA, 33 bp, Homo sapien
actccaatatcaaagacggacgattagtagaaa

SEQ ID NO: 986342 - DNA, 33 bp, Homo sapien
actccaatatcaaagatggacgattagtagaaa

SEQ ID NO: 986343 - DNA, 33 bp, Homo sapien
cttttgacagctgaaaaggctatctatattcct

SEQ ID NO: 986344 - DNA, 33 bp, Homo sapien
cttttgacagctgaaagggctatctatattcct

SEQ ID NO: 986345 - DNA, 33 bp, Homo sapien
ctgcaaacatttgggcgaactacacaactcaag

SEQ ID NO: 986346 - DNA, 33 bp, Homo sapien
ctgcaaacatttgggctaactacacaactcaag

SEQ ID NO: 986347 - DNA, 33 bp, Homo sapien
accagactttcctctcaatggtgtaaactgcca

SEQ ID NO: 986348 - DNA, 33 bp, Homo sapien
accagactttcctctctatggtgtaaactgcca

SEQ ID NO: 986349 - DNA, 33 bp, Homo sapien
aagttccctggtaatacagaaaaatctgtcctc

SEQ ID NO: 986350 - DNA, 33 bp, Homo sapien
aagttccctggtaatatagaaaaatctgtcctc

SEQ ID NO: 986351 - DNA, 33 bp, Homo sapien
taaaacccttgactcaactctgcttaagaaaat

SEQ ID NO: 986352 - DNA, 33 bp, Homo sapien
taaaacccttgactcatctctgcttaagaaaat

SEQ ID NO: 986353 - DNA, 33 bp, Homo sapien
tgtagaaaccaaaaacagaagagaagatattag

SEQ ID NO: 986354 - DNA, 33 bp, Homo sapien
tgtagaaaccaaaaacggaagagaagatattag

SEQ ID NO: 986355 - DNA, 33 bp, Homo sapien
aagatatgtacacattaaaaatttcatatacag

SEQ ID NO: 986356 - DNA, 33 bp, Homo sapien
aagatatgtacacattgaaaatttcatatacag

SEQ ID NO: 986357 - DNA, 33 bp, Homo sapien
attgcatcattttaacagccttttcagttcctc

SEQ ID NO: 986358 - DNA, 33 bp, Homo sapien
attgcatcattttaaccgccttttcagttcctc

SEQ ID NO: 986359 - DNA, 33 bp, Homo sapien
gacatcttcatttgacaccatattgtttgactg

SEQ ID NO: 986360 - DNA, 33 bp, Homo sapien
gacatcttcatttgacgccatattgtttgactg

SEQ ID NO: 986361 - DNA, 33 bp, Homo sapien
cttatatctatatcaccggaacccctttccttc

SEQ ID NO: 986362 - DNA, 33 bp, Homo sapien
cttatatctatatcactggaacccctttccttc

SEQ ID NO: 986363 - DNA, 33 bp, Homo sapien
tgatatagatataaggcccccaaatataccata

SEQ ID NO: 986364 - DNA, 33 bp, Homo sapien
tgatatagatataaggtccccaaatataccata

SEQ ID NO: 986365 - DNA, 33 bp, Homo sapien
acccagtgcctggcaaagaaatattttgatgat

SEQ ID NO: 986366 - DNA, 33 bp, Homo sapien
acccagtgcctggcaaggaaatattttgatgat

SEQ ID NO: 986367 - DNA, 33 bp, Homo sapien
gttgacattcttcctcacacttattcctctaaa

SEQ ID NO: 986368 - DNA, 33 bp, Homo sapien
gttgacattcttcctctcacttattcctctaaa

SEQ ID NO: 986369 - DNA, 33 bp, Homo sapien
cacaagaaccatatcaagagacaactttatttt

SEQ ID NO: 986370 - DNA, 33 bp, Homo sapien
cacaagaaccatatcaggagacaactttatttt

SEQ ID NO: 986371 - DNA, 33 bp, Homo sapien
cttgcagaaacagtacagaatgtggattcacag

SEQ ID NO: 986372 - DNA, 33 bp, Homo sapien
cttgcagaaacagtacggaatgtggattcacag

SEQ ID NO: 986373 - DNA, 33 bp, Homo sapien
cgcagggaccagtacccataaactgtattacta

SEQ ID NO: 986374 - DNA, 33 bp, Homo sapien
cgcagggaccagtacctataaactgtattacta

SEQ ID NO: 986375 - DNA, 33 bp, Homo sapien
atgtttcaggtgtatacacagtatgcaggatac

SEQ ID NO: 986376 - DNA, 33 bp, Homo sapien
atgtttcaggtgtatatacagtatgcaggatac

SEQ ID NO: 986377 - DNA, 33 bp, Homo sapien
tattataagattcccaaatatgttcctggacac

SEQ ID NO: 986378 - DNA, 33 bp, Homo sapien
tattataagattcccagatatgttcctggacac

SEQ ID NO: 986379 - DNA, 33 bp, Homo sapien
agactctgtgaattcccaaactcctcactatgt

SEQ ID NO: 986380 - DNA, 33 bp, Homo sapien
agactctgtgaattccgaaactcctcactatgt

SEQ ID NO: 986381 - DNA, 33 bp, Homo sapien
atagcaaagcaatagaaggtaggccaattgcat

SEQ ID NO: 986382 - DNA, 33 bp, Homo sapien
atagcaaagcaatagagggtaggccaattgcat

SEQ ID NO: 986383 - DNA, 33 bp, Homo sapien
ttaacaaaggctggtcaaggactgggttccgtg

SEQ ID NO: 986384 - DNA, 33 bp, Homo sapien
ttaacaaaggctggtcgaggactgggttccgtg

SEQ ID NO: 986385 - DNA, 33 bp, Homo sapien
actggctttggatagacaagtgtacctttgctt

SEQ ID NO: 986386 - DNA, 33 bp, Homo sapien
actggctttggatagataagtgtacctttgctt

SEQ ID NO: 986387 - DNA, 33 bp, Homo sapien
gatctgtgcccatggacctagagctatgatatc

SEQ ID NO: 986388 - DNA, 33 bp, Homo sapien
gatctgtgcccatggatctagagctatgatatc

SEQ ID NO: 986389 - DNA, 33 bp, Homo sapien
tggttagaggtaaactcaagcgctgaaaactaa

SEQ ID NO: 986390 - DNA, 33 bp, Homo sapien
tggttagaggtaaactgaagcgctgaaaactaa

SEQ ID NO: 986391 - DNA, 33 bp, Homo sapien
ttgttccctacagagacgctgctgccccttttt

SEQ ID NO: 986392 - DNA, 33 bp, Homo sapien
ttgttccctacagagatgctgctgccccttttt

SEQ ID NO: 986393 - DNA, 33 bp, Homo sapien
atgtcgttgattttagaatgctaaagaaaatta

SEQ ID NO: 986394 - DNA, 33 bp, Homo sapien
atgtcgttgattttaggatgctaaagaaaatta

SEQ ID NO: 986395 - DNA, 33 bp, Homo sapien
caagttataatgttggcattaaggctctatttg

SEQ ID NO: 986396 - DNA, 33 bp, Homo sapien
caagttataatgttggtattaaggctctatttg

SEQ ID NO: 986397 - DNA, 33 bp, Homo sapien
acctaatgcaatgtaacctaactcatgtaactc

SEQ ID NO: 986398 - DNA, 33 bp, Homo sapien
acctaatgcaatgtaatctaactcatgtaactc

SEQ ID NO: 986399 - DNA, 33 bp, Homo sapien
tccactggatttggcaagcgttttagtttgaaa

SEQ ID NO: 986400 - DNA, 33 bp, Homo sapien
tccactggatttggcacgcgttttagtttgaaa

SEQ ID NO: 986401 - DNA, 33 bp, Homo sapien
tcacaaaggaaatgtgaagtaagaaacagatga

SEQ ID NO: 986402 - DNA, 33 bp, Homo sapien
tcacaaaggaaatgtggagtaagaaacagatga

SEQ ID NO: 986403 - DNA, 33 bp, Homo sapien
tacgctagttaaagccacaaagttaattcaata

SEQ ID NO: 986404 - DNA, 33 bp, Homo sapien
tacgctagttaaagccgcaaagttaattcaata

SEQ ID NO: 986405 - DNA, 33 bp, Homo sapien
gtttgtcaaaagcataagaacagctgtgaaaga

SEQ ID NO: 986406 - DNA, 33 bp, Homo sapien
gtttgtcaaaagcataggaacagctgtgaaaga

SEQ ID NO: 986407 - DNA, 33 bp, Homo sapien
atcatgcattctgaacagccgatgatacaagga

SEQ ID NO: 986408 - DNA, 33 bp, Homo sapien
atcatgcattctgaacggccgatgatacaagga

SEQ ID NO: 986409 - DNA, 33 bp, Homo sapien
cacagaactgaattgacctcttagccaaatcca

SEQ ID NO: 986410 - DNA, 33 bp, Homo sapien
cacagaactgaattgatctcttagccaaatcca

SEQ ID NO: 986411 - DNA, 33 bp, Homo sapien
ataaaatttagaagtaggtgcttttaacaagtg

SEQ ID NO: 986412 - DNA, 33 bp, Homo sapien
ataaaatttagaagtatgtgcttttaacaagtg

SEQ ID NO: 986413 - DNA, 33 bp, Homo sapien
ctgcaggaatggaggcaactatttttacaaacg

SEQ ID NO: 986414 - DNA, 33 bp, Homo sapien
ctgcaggaatggaggcgactatttttacaaacg

SEQ ID NO: 986415 - DNA, 33 bp, Homo sapien
ggtagccaacagagaggattctgtgttacgtac

SEQ ID NO: 986416 - DNA, 33 bp, Homo sapien
ggtagccaacagagagtattctgtgttacgtac

SEQ ID NO: 986417 - DNA, 33 bp, Homo sapien
tcttcccactcctccccgacattattgattcct

SEQ ID NO: 986418 - DNA, 33 bp, Homo sapien
tcttcccactcctccctgacattattgattcct

SEQ ID NO: 986419 - DNA, 33 bp, Homo sapien
agactcatacagtgtgcattcaattttacctgg

SEQ ID NO: 986420 - DNA, 33 bp, Homo sapien
agactcatacagtgtggattcaattttacctgg

SEQ ID NO: 986421 - DNA, 33 bp, Homo sapien
atactgcatttattacgctaggcttttaataaa

SEQ ID NO: 986422 - DNA, 33 bp, Homo sapien
atactgcatttattactctaggcttttaataaa

SEQ ID NO: 986423 - DNA, 33 bp, Homo sapien
tatccagggcttctgacagcaaagtaatttaca

SEQ ID NO: 986424 - DNA, 33 bp, Homo sapien
tatccagggcttctgatagcaaagtaatttaca

SEQ ID NO: 986425 - DNA, 33 bp, Homo sapien
acagtcgatactatgaccacctcaccttatcgc

SEQ ID NO: 986426 - DNA, 33 bp, Homo sapien
acagtcgatactatgatcacctcaccttatcgc

SEQ ID NO: 986427 - DNA, 33 bp, Homo sapien
attaaggcatcattaaatctgtaaatttgtaag

SEQ ID NO: 986428 - DNA, 33 bp, Homo sapien
attaaggcatcattaagtctgtaaatttgtaag

SEQ ID NO: 986429 - DNA, 33 bp, Homo sapien
gtggtctttctgtaccggctgatatgatcatgt

SEQ ID NO: 986430 - DNA, 33 bp, Homo sapien
gtggtctttctgtacctgctgatatgatcatgt

SEQ ID NO: 986431 - DNA, 33 bp, Homo sapien
tgttaaaaagtaaatcaagtacaggtatgaagg

SEQ ID NO: 986432 - DNA, 33 bp, Homo sapien
tgttaaaaagtaaatcgagtacaggtatgaagg

SEQ ID NO: 986433 - DNA, 33 bp, Homo sapien
tgccagagaatggcagccacacctacctatgag

SEQ ID NO: 986434 - DNA, 33 bp, Homo sapien
tgccagagaatggcagtcacacctacctatgag

SEQ ID NO: 986435 - DNA, 33 bp, Homo sapien
agaaatagactgactcactttgttgaagaaaag

SEQ ID NO: 986436 - DNA, 33 bp, Homo sapien
agaaatagactgactcgctttgttgaagaaaag

SEQ ID NO: 986437 - DNA, 33 bp, Homo sapien
ctgtaattttaagtgacgcacaggatcaaagga

SEQ ID NO: 986438 - DNA, 33 bp, Homo sapien
ctgtaattttaagtgatgcacaggatcaaagga

SEQ ID NO: 986439 - DNA, 33 bp, Homo sapien
ttcggttgtattgcgcgcttagtatcataaaca

SEQ ID NO: 986440 - DNA, 33 bp, Homo sapien
ttcggttgtattgcgctcttagtatcataaaca

SEQ ID NO: 986441 - DNA, 33 bp, Homo sapien
gcctctgcaacacgtacgtatggaactttagtg

SEQ ID NO: 986442 - DNA, 33 bp, Homo sapien
gcctctgcaacacgtatgtatggaactttagtg

SEQ ID NO: 986443 - DNA, 33 bp, Homo sapien
gtaatcgcatttgttacgtctttaaatcactta

SEQ ID NO: 986444 - DNA, 33 bp, Homo sapien
gtaatcgcatttgttatgtctttaaatcactta

SEQ ID NO: 986445 - DNA, 33 bp, Homo sapien
aaaacctatagaggcaatcacaaatgcccatgg

SEQ ID NO: 986446 - DNA, 33 bp, Homo sapien
aaaacctatagaggcactcacaaatgcccatgg

SEQ ID NO: 986447 - DNA, 33 bp, Homo sapien
aatatttgcattacaaaaggatacaacttcaca

SEQ ID NO: 986448 - DNA, 33 bp, Homo sapien
aatatttgcattacaagaggatacaacttcaca

SEQ ID NO: 986449 - DNA, 33 bp, Homo sapien
gatagtaggacccagacctgctaagagacatca

SEQ ID NO: 986450 - DNA, 33 bp, Homo sapien
gatagtaggacccagatctgctaagagacatca

SEQ ID NO: 986451 - DNA, 33 bp, Homo sapien
tcatttaatcttaaacagtaggaaggagccctt

SEQ ID NO: 986452 - DNA, 33 bp, Homo sapien
tcatttaatcttaaaccgtaggaaggagccctt

SEQ ID NO: 986453 - DNA, 33 bp, Homo sapien
aagaattgcttcctcaaatgacatcatcattta

SEQ ID NO: 986454 - DNA, 33 bp, Homo sapien
aagaattgcttcctcagatgacatcatcattta

SEQ ID NO: 986455 - DNA, 33 bp, Homo sapien
gtagctgagctgatgacggcatgaaatgaagaa

SEQ ID NO: 986456 - DNA, 33 bp, Homo sapien
gtagctgagctgatgatggcatgaaatgaagaa

SEQ ID NO: 986457 - DNA, 33 bp, Homo sapien
atgggaaccaagcctcagaatggtctgtaattg

SEQ ID NO: 986458 - DNA, 33 bp, Homo sapien
atgggaaccaagcctcggaatggtctgtaattg

SEQ ID NO: 986459 - DNA, 33 bp, Homo sapien
aatattcttcttcccaatagctagaagttttag

SEQ ID NO: 986460 - DNA, 33 bp, Homo sapien
aatattcttcttcccagtagctagaagttttag

SEQ ID NO: 986461 - DNA, 33 bp, Homo sapien
agattcttctgtggacactcataagaaggagaa

SEQ ID NO: 986462 - DNA, 33 bp, Homo sapien
agattcttctgtggaccctcataagaaggagaa

SEQ ID NO: 986463 - DNA, 33 bp, Homo sapien
agaacagattacaggcccataaattgtatccaa

SEQ ID NO: 986464 - DNA, 33 bp, Homo sapien
agaacagattacaggctcataaattgtatccaa

SEQ ID NO: 986465 - DNA, 33 bp, Homo sapien
agcaatctgtattgaaaatgaagagtgacttac

SEQ ID NO: 986466 - DNA, 33 bp, Homo sapien
agcaatctgtattgaagatgaagagtgacttac

SEQ ID NO: 986467 - DNA, 33 bp, Homo sapien
actctgtgagataccaccttatatttcctttcc

SEQ ID NO: 986468 - DNA, 33 bp, Homo sapien
actctgtgagataccatcttatatttcctttcc

SEQ ID NO: 986469 - DNA, 33 bp, Homo sapien
tttatattgatcagagcctatggcgtacaaaga

SEQ ID NO: 986470 - DNA, 33 bp, Homo sapien
tttatattgatcagagtctatggcgtacaaaga

SEQ ID NO: 986471 - DNA, 33 bp, Homo sapien
acttcaccatatatgaccccgtcctgtcctcta

SEQ ID NO: 986472 - DNA, 33 bp, Homo sapien
acttcaccatatatgagcccgtcctgtcctcta

SEQ ID NO: 986473 - DNA, 33 bp, Homo sapien
aaattggctttggaaagttggctagatagactt

SEQ ID NO: 986474 - DNA, 33 bp, Homo sapien
aaattggctttggaaatttggctagatagactt

SEQ ID NO: 986475 - DNA, 33 bp, Homo sapien
attttggaagtgataaactttgatgtagtcact

SEQ ID NO: 986476 - DNA, 33 bp, Homo sapien
attttggaagtgataagctttgatgtagtcact

SEQ ID NO: 986477 - DNA, 33 bp, Homo sapien
aactgctctgtcataaagtacgttccatgtttt

SEQ ID NO: 986478 - DNA, 33 bp, Homo sapien
aactgctctgtcataatgtacgttccatgtttt

SEQ ID NO: 986479 - DNA, 33 bp, Homo sapien
acgtgtcactcttaccagctttcaatgtatcag

SEQ ID NO: 986480 - DNA, 33 bp, Homo sapien
acgtgtcactcttaccggctttcaatgtatcag

SEQ ID NO: 986481 - DNA, 33 bp, Homo sapien
tttatgataacttgcccatccagaaatgctgag

SEQ ID NO: 986482 - DNA, 33 bp, Homo sapien
tttatgataacttgcctatccagaaatgctgag

SEQ ID NO: 986483 - DNA, 33 bp, Homo sapien
atgctaagtctgacaacgttagtgatgattctt

SEQ ID NO: 986484 - DNA, 33 bp, Homo sapien
atgctaagtctgacaatgttagtgatgattctt

SEQ ID NO: 986485 - DNA, 33 bp, Homo sapien
taagatcccacagtcactaggagcagaatcaat

SEQ ID NO: 986486 - DNA, 33 bp, Homo sapien
taagatcccacagtcattaggagcagaatcaat

SEQ ID NO: 986487 - DNA, 33 bp, Homo sapien
gcagaagctgttggcaaaaagagttataactgc

SEQ ID NO: 986488 - DNA, 33 bp, Homo sapien
gcagaagctgttggcagaaagagttataactgc

SEQ ID NO: 986489 - DNA, 33 bp, Homo sapien
aggtattagtagtcaacgataaatcaagctcag

SEQ ID NO: 986490 - DNA, 33 bp, Homo sapien
aggtattagtagtcaatgataaatcaagctcag

SEQ ID NO: 986491 - DNA, 33 bp, Homo sapien
aagccagaattgcaaaacagttgtccattttat

SEQ ID NO: 986492 - DNA, 33 bp, Homo sapien
aagccagaattgcaaagcagttgtccattttat

SEQ ID NO: 986493 - DNA, 33 bp, Homo sapien
aaatcttgttatgtagaatcgaatcatgtgaaa

SEQ ID NO: 986494 - DNA, 33 bp, Homo sapien
aaatcttgttatgtagtatcgaatcatgtgaaa

SEQ ID NO: 986495 - DNA, 33 bp, Homo sapien
ccaactgcctgagatagggttccagtatttcac

SEQ ID NO: 986496 - DNA, 33 bp, Homo sapien
ccaactgcctgagatatggttccagtatttcac

SEQ ID NO: 986497 - DNA, 33 bp, Homo sapien
acatcacagatatgaaaatggtattaaagaata

SEQ ID NO: 986498 - DNA, 33 bp, Homo sapien
acatcacagatatgaacatggtattaaagaata

SEQ ID NO: 986499 - DNA, 33 bp, Homo sapien
atgaatctcagtgatcgcttctggttgctgatc

SEQ ID NO: 986500 - DNA, 33 bp, Homo sapien
atgaatctcagtgatctcttctggttgctgatc

SEQ ID NO: 986501 - DNA, 33 bp, Homo sapien
agttaggattgtcttaacatttaaactggcagt

SEQ ID NO: 986502 - DNA, 33 bp, Homo sapien
agttaggattgtcttagcatttaaactggcagt

SEQ ID NO: 986503 - DNA, 33 bp, Homo sapien
acgtgaaatttttgtgcaccacttagaaaacaa

SEQ ID NO: 986504 - DNA, 33 bp, Homo sapien
acgtgaaatttttgtgtaccacttagaaaacaa

SEQ ID NO: 986505 - DNA, 33 bp, Homo sapien
tctattttgcatgaaaaaaaaagagtcgtagtt

SEQ ID NO: 986506 - DNA, 33 bp, Homo sapien
tctattttgcatgaaagaaaaagagtcgtagtt

SEQ ID NO: 986507 - DNA, 33 bp, Homo sapien
ctggaataattggaccagaagtcacatcgtctt

SEQ ID NO: 986508 - DNA, 33 bp, Homo sapien
ctggaataattggaccggaagtcacatcgtctt

SEQ ID NO: 986509 - DNA, 33 bp, Homo sapien
ccaattaaggtgatgcacatataattgattctc

SEQ ID NO: 986510 - DNA, 33 bp, Homo sapien
ccaattaaggtgatgcgcatataattgattctc

SEQ ID NO: 986511 - DNA, 33 bp, Homo sapien
atcatttttatatccccgctgcatcaactatac

SEQ ID NO: 986512 - DNA, 33 bp, Homo sapien
atcatttttatatccctgctgcatcaactatac

SEQ ID NO: 986513 - DNA, 33 bp, Homo sapien
agcttgtaaatgttacagggggaagcagttatg

SEQ ID NO: 986514 - DNA, 33 bp, Homo sapien
agcttgtaaatgttacggggggaagcagttatg

SEQ ID NO: 986515 - DNA, 33 bp, Homo sapien
tttccagtcttacttgcagtatgttcgagagag

SEQ ID NO: 986516 - DNA, 33 bp, Homo sapien
tttccagtcttacttggagtatgttcgagagag

SEQ ID NO: 986517 - DNA, 33 bp, Homo sapien
tataaggatagaaagacaggatgtaaactcaga

SEQ ID NO: 986518 - DNA, 33 bp, Homo sapien
tataaggatagaaagagaggatgtaaactcaga

SEQ ID NO: 986519 - DNA, 33 bp, Homo sapien
actgacaaaacatctaaaagatccactctggaa

SEQ ID NO: 986520 - DNA, 33 bp, Homo sapien
actgacaaaacatctacaagatccactctggaa

SEQ ID NO: 986521 - DNA, 33 bp, Homo sapien
gaatgaactcaaaatacattgtggacttatatg

SEQ ID NO: 986522 - DNA, 33 bp, Homo sapien
gaatgaactcaaaatagattgtggacttatatg

SEQ ID NO: 986523 - DNA, 33 bp, Homo sapien
ttaatgtactaaccaccggggaagtgcaaatta

SEQ ID NO: 986524 - DNA, 33 bp, Homo sapien
ttaatgtactaaccactggggaagtgcaaatta

SEQ ID NO: 986525 - DNA, 33 bp, Homo sapien
taaagaacttctagaaactgaaatgacaaaaaa

SEQ ID NO: 986526 - DNA, 33 bp, Homo sapien
taaagaacttctagaagctgaaatgacaaaaaa

SEQ ID NO: 986527 - DNA, 33 bp, Homo sapien
tgaaagagtgctctgacagattaggagtgcatc

SEQ ID NO: 986528 - DNA, 33 bp, Homo sapien
tgaaagagtgctctgagagattaggagtgcatc

SEQ ID NO: 986529 - DNA, 33 bp, Homo sapien
aggggtcttggtggaaacattaatccaggtgct

SEQ ID NO: 986530 - DNA, 33 bp, Homo sapien
aggggtcttggtggaaccattaatccaggtgct

SEQ ID NO: 986531 - DNA, 33 bp, Homo sapien
tttgtcaacaagtgcaagccaagagtctgccta

SEQ ID NO: 986532 - DNA, 33 bp, Homo sapien
tttgtcaacaagtgcaggccaagagtctgccta

SEQ ID NO: 986533 - DNA, 33 bp, Homo sapien
aaatagatgactctgaccacaatacaatcatga

SEQ ID NO: 986534 - DNA, 33 bp, Homo sapien
aaatagatgactctgatcacaatacaatcatga

SEQ ID NO: 986535 - DNA, 33 bp, Homo sapien
attgaagtaaatacaacggcctcaagtaagaaa

SEQ ID NO: 986536 - DNA, 33 bp, Homo sapien
attgaagtaaatacaatggcctcaagtaagaaa

SEQ ID NO: 986537 - DNA, 33 bp, Homo sapien
tgtggtttattaagaacgtaagcactttaaaag

SEQ ID NO: 986538 - DNA, 33 bp, Homo sapien
tgtggtttattaagaatgtaagcactttaaaag

SEQ ID NO: 986539 - DNA, 33 bp, Homo sapien
gtctttctgatgaccaaccttcatcttaaagct

SEQ ID NO: 986540 - DNA, 33 bp, Homo sapien
gtctttctgatgaccagccttcatcttaaagct

SEQ ID NO: 986541 - DNA, 33 bp, Homo sapien
gaactgggaatgggaaggctataaactgaccac

SEQ ID NO: 986542 - DNA, 33 bp, Homo sapien
gaactgggaatgggaatgctataaactgaccac

SEQ ID NO: 986543 - DNA, 33 bp, Homo sapien
tgagactgaaatactaaaaaggacagacaaaaa

SEQ ID NO: 986544 - DNA, 33 bp, Homo sapien
tgagactgaaatactacaaaggacagacaaaaa

SEQ ID NO: 986545 - DNA, 33 bp, Homo sapien
ggttagaaagagctaccagattcatccttagag

SEQ ID NO: 986546 - DNA, 33 bp, Homo sapien
ggttagaaagagctacgagattcatccttagag

SEQ ID NO: 986547 - DNA, 33 bp, Homo sapien
tgtataatcttcatgaaaaacaatgacagagtc

SEQ ID NO: 986548 - DNA, 33 bp, Homo sapien
tgtataatcttcatgagaaacaatgacagagtc

SEQ ID NO: 986549 - DNA, 33 bp, Homo sapien
tctcaaacaggtctcaatgaaatgaactttagg

SEQ ID NO: 986550 - DNA, 33 bp, Homo sapien
tctcaaacaggtctcagtgaaatgaactttagg

SEQ ID NO: 986551 - DNA, 33 bp, Homo sapien
ctgatgctatggttaagtgaaggttcaatcatt

SEQ ID NO: 986552 - DNA, 33 bp, Homo sapien
ctgatgctatggttaattgaaggttcaatcatt

SEQ ID NO: 986553 - DNA, 33 bp, Homo sapien
gctaaaaataattgacaaatgattgaaccttca

SEQ ID NO: 986554 - DNA, 33 bp, Homo sapien
gctaaaaataattgacgaatgattgaaccttca

SEQ ID NO: 986555 - DNA, 33 bp, Homo sapien
ggatgtaggttaagaacgtaaatattgacattc

SEQ ID NO: 986556 - DNA, 33 bp, Homo sapien
ggatgtaggttaagaatgtaaatattgacattc

SEQ ID NO: 986557 - DNA, 33 bp, Homo sapien
tagtttctgcctcagagatatgccatcttcttg

SEQ ID NO: 986558 - DNA, 33 bp, Homo sapien
tagtttctgcctcagatatatgccatcttcttg

SEQ ID NO: 986559 - DNA, 33 bp, Homo sapien
ggaggaggaagtaaagccttcatcaccactcag

SEQ ID NO: 986560 - DNA, 33 bp, Homo sapien
ggaggaggaagtaaagtcttcatcaccactcag

SEQ ID NO: 986561 - DNA, 33 bp, Homo sapien
cttgtgaataaaagaacagcaaaggaaatatct

SEQ ID NO: 986562 - DNA, 33 bp, Homo sapien
cttgtgaataaaagaagagcaaaggaaatatct

SEQ ID NO: 986563 - DNA, 33 bp, Homo sapien
tcctgtcacaggtaacaaaaatatcttgctcaa

SEQ ID NO: 986564 - DNA, 33 bp, Homo sapien
tcctgtcacaggtaaccaaaatatcttgctcaa

SEQ ID NO: 986565 - DNA, 33 bp, Homo sapien
gatagtacctgaaactcaaaatcaattaagagc

SEQ ID NO: 986566 - DNA, 33 bp, Homo sapien
gatagtacctgaaactgaaaatcaattaagagc

SEQ ID NO: 986567 - DNA, 33 bp, Homo sapien
tagtgctggaggtatacatggatgttgtgtgga

SEQ ID NO: 986568 - DNA, 33 bp, Homo sapien
tagtgctggaggtatatatggatgttgtgtgga

SEQ ID NO: 986569 - DNA, 33 bp, Homo sapien
ctgcttgcagggaaggcaaacttatatgcagaa

SEQ ID NO: 986570 - DNA, 33 bp, Homo sapien
ctgcttgcagggaaggtaaacttatatgcagaa

SEQ ID NO: 986571 - DNA, 33 bp, Homo sapien
gctagtacagtacagagataggattgaaatctg

SEQ ID NO: 986572 - DNA, 33 bp, Homo sapien
gctagtacagtacagatataggattgaaatctg

SEQ ID NO: 986573 - DNA, 33 bp, Homo sapien
cttcgtccacataataccttgatgtcttgactc

SEQ ID NO: 986574 - DNA, 33 bp, Homo sapien
cttcgtccacataatatcttgatgtcttgactc

SEQ ID NO: 986575 - DNA, 33 bp, Homo sapien
aaagtagtctaaaaacagatgaaaaatatgtgg

SEQ ID NO: 986576 - DNA, 33 bp, Homo sapien
aaagtagtctaaaaactgatgaaaaatatgtgg

SEQ ID NO: 986577 - DNA, 33 bp, Homo sapien
tgacttatgtacattggatactgaaactttgct

SEQ ID NO: 986578 - DNA, 33 bp, Homo sapien
tgacttatgtacattgtatactgaaactttgct

SEQ ID NO: 986579 - DNA, 33 bp, Homo sapien
cattcactacatattaagaacattgttttagca

SEQ ID NO: 986580 - DNA, 33 bp, Homo sapien
cattcactacatattacgaacattgttttagca

SEQ ID NO: 986581 - DNA, 33 bp, Homo sapien
tggagaaatatagcaaataattgtgtctcgtca

SEQ ID NO: 986582 - DNA, 33 bp, Homo sapien
tggagaaatatagcaagtaattgtgtctcgtca

SEQ ID NO: 986583 - DNA, 33 bp, Homo sapien
gcctgcattacacagccgaaattacctgccgtc

SEQ ID NO: 986584 - DNA, 33 bp, Homo sapien
gcctgcattacacagctgaaattacctgccgtc

SEQ ID NO: 986585 - DNA, 33 bp, Homo sapien
actcccacagcaagaccacacgaaaccagcatt

SEQ ID NO: 986586 - DNA, 33 bp, Homo sapien
actcccacagcaagacgacacgaaaccagcatt

SEQ ID NO: 986587 - DNA, 33 bp, Homo sapien
gaattactttggataaggaaaaacaaagggtgt

SEQ ID NO: 986588 - DNA, 33 bp, Homo sapien
gaattactttggataatgaaaaacaaagggtgt

SEQ ID NO: 986589 - DNA, 33 bp, Homo sapien
ttttgtgtaacctggaaaatggcaggaggtagg

SEQ ID NO: 986590 - DNA, 33 bp, Homo sapien
ttttgtgtaacctggacaatggcaggaggtagg

SEQ ID NO: 986591 - DNA, 33 bp, Homo sapien
ggctggctgacaagtaacaagtaaggagcaatg

SEQ ID NO: 986592 - DNA, 33 bp, Homo sapien
ggctggctgacaagtagcaagtaaggagcaatg

SEQ ID NO: 986593 - DNA, 33 bp, Homo sapien
tttggtcctttctatcacaaatcatgattttaa

SEQ ID NO: 986594 - DNA, 33 bp, Homo sapien
tttggtcctttctatcccaaatcatgattttaa

SEQ ID NO: 986595 - DNA, 33 bp, Homo sapien
cacagtagaaagaacacggttttaggatattat

SEQ ID NO: 986596 - DNA, 33 bp, Homo sapien
cacagtagaaagaacatggttttaggatattat

SEQ ID NO: 986597 - DNA, 33 bp, Homo sapien
attcgttaatagtttcgcaagttggtaaaattt

SEQ ID NO: 986598 - DNA, 33 bp, Homo sapien
attcgttaatagtttctcaagttggtaaaattt

SEQ ID NO: 986599 - DNA, 33 bp, Homo sapien
acaacaagatgcgtgacatagtgtctcctcctc

SEQ ID NO: 986600 - DNA, 33 bp, Homo sapien
acaacaagatgcgtgagatagtgtctcctcctc

SEQ ID NO: 986601 - DNA, 33 bp, Homo sapien
attccttggtgagcaaataaaacagaccacaga

SEQ ID NO: 986602 - DNA, 33 bp, Homo sapien
attccttggtgagcaagtaaaacagaccacaga

SEQ ID NO: 986603 - DNA, 33 bp, Homo sapien
ggagaaagaatgcttcccagagaattgtggaga

SEQ ID NO: 986604 - DNA, 33 bp, Homo sapien
ggagaaagaatgcttctcagagaattgtggaga

SEQ ID NO: 986605 - DNA, 33 bp, Homo sapien
gactggcaagactaaccctcatggaataattag

SEQ ID NO: 986606 - DNA, 33 bp, Homo sapien
gactggcaagactaactctcatggaataattag

SEQ ID NO: 986607 - DNA, 33 bp, Homo sapien
tttggattttgacctcaacttcaccatttcatc

SEQ ID NO: 986608 - DNA, 33 bp, Homo sapien
tttggattttgacctcgacttcaccatttcatc

SEQ ID NO: 986609 - DNA, 33 bp, Homo sapien
tacaaaacccattttaccatataacataacata

SEQ ID NO: 986610 - DNA, 33 bp, Homo sapien
tacaaaacccattttatcatataacataacata

SEQ ID NO: 986611 - DNA, 33 bp, Homo sapien
attctatctcagctaaaccttaaaagagagata

SEQ ID NO: 986612 - DNA, 33 bp, Homo sapien
attctatctcagctaagccttaaaagagagata

SEQ ID NO: 986613 - DNA, 33 bp, Homo sapien
aaggaaaacaaaatggaacattgtaagtaatta

SEQ ID NO: 986614 - DNA, 33 bp, Homo sapien
aaggaaaacaaaatgggacattgtaagtaatta

SEQ ID NO: 986615 - DNA, 33 bp, Homo sapien
gatctggcttcttgtccctggaagactggaaag

SEQ ID NO: 986616 - DNA, 33 bp, Homo sapien
gatctggcttcttgtctctggaagactggaaag

SEQ ID NO: 986617 - DNA, 33 bp, Homo sapien
tctatctgaaatactcaatatgcatttactctt

SEQ ID NO: 986618 - DNA, 33 bp, Homo sapien
tctatctgaaatactccatatgcatttactctt

SEQ ID NO: 986619 - DNA, 33 bp, Homo sapien
caaaactttagggtgacgctcagacactagaat

SEQ ID NO: 986620 - DNA, 33 bp, Homo sapien
caaaactttagggtgatgctcagacactagaat

SEQ ID NO: 986621 - DNA, 33 bp, Homo sapien
gattttagcttgacagaaaagagctaagggaga

SEQ ID NO: 986622 - DNA, 33 bp, Homo sapien
gattttagcttgacaggaaagagctaagggaga

SEQ ID NO: 986623 - DNA, 33 bp, Homo sapien
gactagctgaccaatcaagtctgtcagaagtga

SEQ ID NO: 986624 - DNA, 33 bp, Homo sapien
gactagctgaccaatcgagtctgtcagaagtga

SEQ ID NO: 986625 - DNA, 33 bp, Homo sapien
ctacctgttaaggcaacttgccactcaagcttc

SEQ ID NO: 986626 - DNA, 33 bp, Homo sapien
ctacctgttaaggcaatttgccactcaagcttc

SEQ ID NO: 986627 - DNA, 33 bp, Homo sapien
tggtatggccattgacaaggacataattcaatc

SEQ ID NO: 986628 - DNA, 33 bp, Homo sapien
tggtatggccattgacgaggacataattcaatc

SEQ ID NO: 986629 - DNA, 33 bp, Homo sapien
ggctgttgcaaagatacattcattcacaggctg

SEQ ID NO: 986630 - DNA, 33 bp, Homo sapien
ggctgttgcaaagatatattcattcacaggctg

SEQ ID NO: 986631 - DNA, 33 bp, Homo sapien
cttagatgtcacaacacactttgaagtgagtat

SEQ ID NO: 986632 - DNA, 33 bp, Homo sapien
cttagatgtcacaacatactttgaagtgagtat

SEQ ID NO: 986633 - DNA, 33 bp, Homo sapien
acattatctcttgtggaaataaagaaatcactt

SEQ ID NO: 986634 - DNA, 33 bp, Homo sapien
acattatctcttgtgggaataaagaaatcactt

SEQ ID NO: 986635 - DNA, 33 bp, Homo sapien
ctcaaccctggcttcaaattataatcacctggg

SEQ ID NO: 986636 - DNA, 33 bp, Homo sapien
ctcaaccctggcttcatattataatcacctggg

SEQ ID NO: 986637 - DNA, 33 bp, Homo sapien
caggttcattatcatcaatgtggctgccagtac

SEQ ID NO: 986638 - DNA, 33 bp, Homo sapien
caggttcattatcatcgatgtggctgccagtac

SEQ ID NO: 986639 - DNA, 33 bp, Homo sapien
tgagttcaagaaataaatgacctagatttcact

SEQ ID NO: 986640 - DNA, 33 bp, Homo sapien
tgagttcaagaaataagtgacctagatttcact

SEQ ID NO: 986641 - DNA, 33 bp, Homo sapien
ttttaccctcgaccccccattcttgttcaccat

SEQ ID NO: 986642 - DNA, 33 bp, Homo sapien
ttttaccctcgacccctcattcttgttcaccat

SEQ ID NO: 986643 - DNA, 33 bp, Homo sapien
gaagaacatttgaacaactatgagcatttagtg

SEQ ID NO: 986644 - DNA, 33 bp, Homo sapien
gaagaacatttgaacagctatgagcatttagtg

SEQ ID NO: 986645 - DNA, 33 bp, Homo sapien
ggtgcataagtggaaacaaagcttgctacagaa

SEQ ID NO: 986646 - DNA, 33 bp, Homo sapien
ggtgcataagtggaaataaagcttgctacagaa

SEQ ID NO: 986647 - DNA, 33 bp, Homo sapien
tggatagcatggtaaccgtagttaatgatgata

SEQ ID NO: 986648 - DNA, 33 bp, Homo sapien
tggatagcatggtaactgtagttaatgatgata

SEQ ID NO: 986649 - DNA, 33 bp, Homo sapien
gttaagtccttttatccctatgatcttatctct

SEQ ID NO: 986650 - DNA, 33 bp, Homo sapien
gttaagtccttttatctctatgatcttatctct

SEQ ID NO: 986651 - DNA, 33 bp, Homo sapien
gtgaacctggccctcaaatggaaaatatgagtt

SEQ ID NO: 986652 - DNA, 33 bp, Homo sapien
gtgaacctggccctcagatggaaaatatgagtt

SEQ ID NO: 986653 - DNA, 33 bp, Homo sapien
atcctgaactgaggtcaattctgctgctatttt

SEQ ID NO: 986654 - DNA, 33 bp, Homo sapien
atcctgaactgaggtcgattctgctgctatttt

SEQ ID NO: 986655 - DNA, 33 bp, Homo sapien
gccacaaacctgtagcaaagcttgagcttgcca

SEQ ID NO: 986656 - DNA, 33 bp, Homo sapien
gccacaaacctgtagcgaagcttgagcttgcca

SEQ ID NO: 986657 - DNA, 33 bp, Homo sapien
aagactgaatggcaacaaggagtcagaccaaga

SEQ ID NO: 986658 - DNA, 33 bp, Homo sapien
aagactgaatggcaacgaggagtcagaccaaga

SEQ ID NO: 986659 - DNA, 33 bp, Homo sapien
gaattctagtactgtcacttttctaaggaaaaa

SEQ ID NO: 986660 - DNA, 33 bp, Homo sapien
gaattctagtactgtctcttttctaaggaaaaa

SEQ ID NO: 986661 - DNA, 33 bp, Homo sapien
tgaagctgctccaaataaaatgtttcttgcaaa

SEQ ID NO: 986662 - DNA, 33 bp, Homo sapien
tgaagctgctccaaatgaaatgtttcttgcaaa

SEQ ID NO: 986663 - DNA, 33 bp, Homo sapien
ccttagcggacactcaatcagagcttgccgtta

SEQ ID NO: 986664 - DNA, 33 bp, Homo sapien
ccttagcggacactcagtcagagcttgccgtta

SEQ ID NO: 986665 - DNA, 33 bp, Homo sapien
acatcacttctgttgaaaattcactggacaaag

SEQ ID NO: 986666 - DNA, 33 bp, Homo sapien
acatcacttctgttgataattcactggacaaag

SEQ ID NO: 986667 - DNA, 33 bp, Homo sapien
agctatccctagaaaacagtgaatcaccagtaa

SEQ ID NO: 986668 - DNA, 33 bp, Homo sapien
agctatccctagaaaatagtgaatcaccagtaa

SEQ ID NO: 986669 - DNA, 33 bp, Homo sapien
tctctggtgccatttcgcttggtaaatctgttc

SEQ ID NO: 986670 - DNA, 33 bp, Homo sapien
tctctggtgccatttctcttggtaaatctgttc

SEQ ID NO: 986671 - DNA, 33 bp, Homo sapien
tttttaaatcgtaaccacctaatatctcagaat

SEQ ID NO: 986672 - DNA, 33 bp, Homo sapien
tttttaaatcgtaaccgcctaatatctcagaat

SEQ ID NO: 986673 - DNA, 33 bp, Homo sapien
ttgaacaaatattaaaattcttggacattcgat

SEQ ID NO: 986674 - DNA, 33 bp, Homo sapien
ttgaacaaatattaaagttcttggacattcgat

SEQ ID NO: 986675 - DNA, 33 bp, Homo sapien
ttccaataaaaagaagccacaacattttcctaa

SEQ ID NO: 986676 - DNA, 33 bp, Homo sapien
ttccaataaaaagaaggcacaacattttcctaa

SEQ ID NO: 986677 - DNA, 33 bp, Homo sapien
agtttgctagtgctgccataacagagtaacaca

SEQ ID NO: 986678 - DNA, 33 bp, Homo sapien
agtttgctagtgctgctataacagagtaacaca

SEQ ID NO: 986679 - DNA, 33 bp, Homo sapien
tcaagtaagactgtaaatgccactgaagcttga

SEQ ID NO: 986680 - DNA, 33 bp, Homo sapien
tcaagtaagactgtaactgccactgaagcttga

SEQ ID NO: 986681 - DNA, 33 bp, Homo sapien
caggaatgtttggcaacgaacccagttccatgc

SEQ ID NO: 986682 - DNA, 33 bp, Homo sapien
caggaatgtttggcaatgaacccagttccatgc

SEQ ID NO: 986683 - DNA, 33 bp, Homo sapien
tatccagctcatgacaacctttggagaatgtgc

SEQ ID NO: 986684 - DNA, 33 bp, Homo sapien
tatccagctcatgacatcctttggagaatgtgc

SEQ ID NO: 986685 - DNA, 33 bp, Homo sapien
ggagagacaaggggaaaatgcagagtctcacta

SEQ ID NO: 986686 - DNA, 33 bp, Homo sapien
ggagagacaaggggaagatgcagagtctcacta

SEQ ID NO: 986687 - DNA, 33 bp, Homo sapien
tgttgatcaagttaggaaagaggtgtgttagtt

SEQ ID NO: 986688 - DNA, 33 bp, Homo sapien
tgttgatcaagttagggaagaggtgtgttagtt

SEQ ID NO: 986689 - DNA, 33 bp, Homo sapien
tattttaagctattaaaggttgcagtaatttgt

SEQ ID NO: 986690 - DNA, 33 bp, Homo sapien
tattttaagctattaagggttgcagtaatttgt

SEQ ID NO: 986691 - DNA, 33 bp, Homo sapien
tgaactacctgaggataaaaaccacgtcctagt

SEQ ID NO: 986692 - DNA, 33 bp, Homo sapien
tgaactacctgaggatgaaaaccacgtcctagt

SEQ ID NO: 986693 - DNA, 33 bp, Homo sapien
aagtccactcatcgaacctgatagacatggacc

SEQ ID NO: 986694 - DNA, 33 bp, Homo sapien
aagtccactcatcgaatctgatagacatggacc

SEQ ID NO: 986695 - DNA, 33 bp, Homo sapien
aagtagcttgacacaaatagaaagggatgaagc

SEQ ID NO: 986696 - DNA, 33 bp, Homo sapien
aagtagcttgacacaactagaaagggatgaagc

SEQ ID NO: 986697 - DNA, 33 bp, Homo sapien
cataacctttaacagcgaatagtcttgaaactg

SEQ ID NO: 986698 - DNA, 33 bp, Homo sapien
cataacctttaacagctaatagtcttgaaactg

SEQ ID NO: 986699 - DNA, 33 bp, Homo sapien
gcgtcgtccatctcacagaagcaagaagcttta

SEQ ID NO: 986700 - DNA, 33 bp, Homo sapien
gcgtcgtccatctcacggaagcaagaagcttta

SEQ ID NO: 986701 - DNA, 33 bp, Homo sapien
tctcaaatgagaaggccatgtcgggcccagcca

SEQ ID NO: 986702 - DNA, 33 bp, Homo sapien
tctcaaatgagaaggctatgtcgggcccagcca

SEQ ID NO: 986703 - DNA, 33 bp, Homo sapien
tagatgtcagaggtacccctaggtctgaagagg

SEQ ID NO: 986704 - DNA, 33 bp, Homo sapien
tagatgtcagaggtactcctaggtctgaagagg

SEQ ID NO: 986705 - DNA, 33 bp, Homo sapien
actctggagctacttacagactgttggtgtttc

SEQ ID NO: 986706 - DNA, 33 bp, Homo sapien
actctggagctacttagagactgttggtgtttc

SEQ ID NO: 986707 - DNA, 33 bp, Homo sapien
aaaatgggaacttgccaattagtccctcactca

SEQ ID NO: 986708 - DNA, 33 bp, Homo sapien
aaaatgggaacttgccgattagtccctcactca

SEQ ID NO: 986709 - DNA, 33 bp, Homo sapien
gtgttccatggaggtcaatctctacaaatgcat

SEQ ID NO: 986710 - DNA, 33 bp, Homo sapien
gtgttccatggaggtcgatctctacaaatgcat

SEQ ID NO: 986711 - DNA, 33 bp, Homo sapien
ccttttaaattcaagaatctggggtttgtaaag

SEQ ID NO: 986712 - DNA, 33 bp, Homo sapien
ccttttaaattcaagagtctggggtttgtaaag

SEQ ID NO: 986713 - DNA, 33 bp, Homo sapien
cttaggtttaattggaatagtgggtcggagaag

SEQ ID NO: 986714 - DNA, 33 bp, Homo sapien
cttaggtttaattggagtagtgggtcggagaag

SEQ ID NO: 986715 - DNA, 33 bp, Homo sapien
taattttgaagcaaaacactcagtccaatgatg

SEQ ID NO: 986716 - DNA, 33 bp, Homo sapien
taattttgaagcaaaatactcagtccaatgatg

SEQ ID NO: 986717 - DNA, 33 bp, Homo sapien
gtttccaatacacacacagttaagacactggca

SEQ ID NO: 986718 - DNA, 33 bp, Homo sapien
gtttccaatacacacatagttaagacactggca

SEQ ID NO: 986719 - DNA, 33 bp, Homo sapien
catttactgtcagaaacggtaaacactgctgaa

SEQ ID NO: 986720 - DNA, 33 bp, Homo sapien
catttactgtcagaaatggtaaacactgctgaa

SEQ ID NO: 986721 - DNA, 33 bp, Homo sapien
ttttgctgtttgtgcaccaccaaaatcagtgag

SEQ ID NO: 986722 - DNA, 33 bp, Homo sapien
ttttgctgtttgtgcatcaccaaaatcagtgag

SEQ ID NO: 986723 - DNA, 33 bp, Homo sapien
attagctactggattcaaagaaataaatgattg

SEQ ID NO: 986724 - DNA, 33 bp, Homo sapien
attagctactggattcgaagaaataaatgattg

SEQ ID NO: 986725 - DNA, 33 bp, Homo sapien
aaaaattattccaagcaatctgtacctattaaa

SEQ ID NO: 986726 - DNA, 33 bp, Homo sapien
aaaaattattccaagcgatctgtacctattaaa

SEQ ID NO: 986727 - DNA, 33 bp, Homo sapien
cagtctcctacagtaacagaaatcaacggcaaa

SEQ ID NO: 986728 - DNA, 33 bp, Homo sapien
cagtctcctacagtaatagaaatcaacggcaaa

SEQ ID NO: 986729 - DNA, 33 bp, Homo sapien
ctggccagatgtatcacatttcaatcattctcc

SEQ ID NO: 986730 - DNA, 33 bp, Homo sapien
ctggccagatgtatcatatttcaatcattctcc

SEQ ID NO: 986731 - DNA, 33 bp, Homo sapien
ttgtagtaagcaaaataaaaaattggccactcc

SEQ ID NO: 986732 - DNA, 33 bp, Homo sapien
ttgtagtaagcaaaattaaaaattggccactcc

SEQ ID NO: 986733 - DNA, 33 bp, Homo sapien
atggatttggctctgacgcaaaataaagtaagc

SEQ ID NO: 986734 - DNA, 33 bp, Homo sapien
atggatttggctctgatgcaaaataaagtaagc

SEQ ID NO: 986735 - DNA, 33 bp, Homo sapien
gttttacacaaaaagcagatttcagatacggaa

SEQ ID NO: 986736 - DNA, 33 bp, Homo sapien
gttttacacaaaaagcggatttcagatacggaa

SEQ ID NO: 986737 - DNA, 33 bp, Homo sapien
gtttcacatggaataaaaagcacagattattat

SEQ ID NO: 986738 - DNA, 33 bp, Homo sapien
gtttcacatggaataagaagcacagattattat

SEQ ID NO: 986739 - DNA, 33 bp, Homo sapien
aaataaaacattggtcaattcaagtacttcaag

SEQ ID NO: 986740 - DNA, 33 bp, Homo sapien
aaataaaacattggtcgattcaagtacttcaag

SEQ ID NO: 986741 - DNA, 33 bp, Homo sapien
tattctaatactgccaaaaagaactacagagaa

SEQ ID NO: 986742 - DNA, 33 bp, Homo sapien
tattctaatactgccagaaagaactacagagaa

SEQ ID NO: 986743 - DNA, 33 bp, Homo sapien
caaaaaacaatcagtacgagtaagaatccacag

SEQ ID NO: 986744 - DNA, 33 bp, Homo sapien
caaaaaacaatcagtatgagtaagaatccacag

SEQ ID NO: 986745 - DNA, 33 bp, Homo sapien
tggctgagccacgaaaatagaaactgagacctt

SEQ ID NO: 986746 - DNA, 33 bp, Homo sapien
tggctgagccacgaaagtagaaactgagacctt

SEQ ID NO: 986747 - DNA, 33 bp, Homo sapien
cctttagaatgaaaccaaagctgatgcatttct

SEQ ID NO: 986748 - DNA, 33 bp, Homo sapien
cctttagaatgaaaccgaagctgatgcatttct

SEQ ID NO: 986749 - DNA, 33 bp, Homo sapien
ggcaatgggtattcaaaagaggcattcaagagc

SEQ ID NO: 986750 - DNA, 33 bp, Homo sapien
ggcaatgggtattcaagagaggcattcaagagc

SEQ ID NO: 986751 - DNA, 33 bp, Homo sapien
atgatgagagagaaaaacccagagctgtcgaaa

SEQ ID NO: 986752 - DNA, 33 bp, Homo sapien
atgatgagagagaaaatcccagagctgtcgaaa

SEQ ID NO: 986753 - DNA, 33 bp, Homo sapien
tgattggcccagcgtccgaaattgtttacttat

SEQ ID NO: 986754 - DNA, 33 bp, Homo sapien
tgattggcccagcgtctgaaattgtttacttat

SEQ ID NO: 986755 - DNA, 33 bp, Homo sapien
caaaacaaatgacagactaatcccacctgagat

SEQ ID NO: 986756 - DNA, 33 bp, Homo sapien
caaaacaaatgacagattaatcccacctgagat

SEQ ID NO: 986757 - DNA, 33 bp, Homo sapien
gcaagccaaatggactaagacaatacccaacat

SEQ ID NO: 986758 - DNA, 33 bp, Homo sapien
gcaagccaaatggactcagacaatacccaacat

SEQ ID NO: 986759 - DNA, 33 bp, Homo sapien
cctaagactgatttttaaaaaagcaacatcaac

SEQ ID NO: 986760 - DNA, 33 bp, Homo sapien
cctaagactgattttttaaaaagcaacatcaac

SEQ ID NO: 986761 - DNA, 33 bp, Homo sapien
tagtctaatttcaacacagcaagagaatgtcac

SEQ ID NO: 986762 - DNA, 33 bp, Homo sapien
tagtctaatttcaacatagcaagagaatgtcac

SEQ ID NO: 986763 - DNA, 33 bp, Homo sapien
ccctaatacatagcagaacataaaacccagcat

SEQ ID NO: 986764 - DNA, 33 bp, Homo sapien
ccctaatacatagcagtacataaaacccagcat

SEQ ID NO: 986765 - DNA, 33 bp, Homo sapien
atatgacccaggatcacataagtttcttggtga

SEQ ID NO: 986766 - DNA, 33 bp, Homo sapien
atatgacccaggatcatataagtttcttggtga

SEQ ID NO: 986767 - DNA, 33 bp, Homo sapien
aacaaagctcaaaagcaagacttgaaagaagca

SEQ ID NO: 986768 - DNA, 33 bp, Homo sapien
aacaaagctcaaaagcgagacttgaaagaagca

SEQ ID NO: 986769 - DNA, 33 bp, Homo sapien
catattttatttctccacttttgagatggaagt

SEQ ID NO: 986770 - DNA, 33 bp, Homo sapien
catattttatttctccgcttttgagatggaagt

SEQ ID NO: 986771 - DNA, 33 bp, Homo sapien
tatactctgatggaaaagagatgccactttctc

SEQ ID NO: 986772 - DNA, 33 bp, Homo sapien
tatactctgatggaaaggagatgccactttctc

SEQ ID NO: 986773 - DNA, 33 bp, Homo sapien
aagattgaaccttccagtgcctggatcttggac

SEQ ID NO: 986774 - DNA, 33 bp, Homo sapien
aagattgaaccttccattgcctggatcttggac

SEQ ID NO: 986775 - DNA, 33 bp, Homo sapien
aagtcttaaacaacaaactcaatgatccagaaa

SEQ ID NO: 986776 - DNA, 33 bp, Homo sapien
aagtcttaaacaacaacctcaatgatccagaaa

SEQ ID NO: 986777 - DNA, 33 bp, Homo sapien
tgagggaataatccagaaaaaagatggtttatg

SEQ ID NO: 986778 - DNA, 33 bp, Homo sapien
tgagggaataatccagcaaaaagatggtttatg

SEQ ID NO: 986779 - DNA, 33 bp, Homo sapien
tattatgcctttgatcccattactcaatactgg

SEQ ID NO: 986780 - DNA, 33 bp, Homo sapien
tattatgcctttgatctcattactcaatactgg

SEQ ID NO: 986781 - DNA, 33 bp, Homo sapien
gaccatgttgccaggaagcagtgatcgtggtgg

SEQ ID NO: 986782 - DNA, 33 bp, Homo sapien
gaccatgttgccaggacgcagtgatcgtggtgg

SEQ ID NO: 986783 - DNA, 33 bp, Homo sapien
taaatctggtctggcaaagagtgcaatggaagt

SEQ ID NO: 986784 - DNA, 33 bp, Homo sapien
taaatctggtctggcatagagtgcaatggaagt

SEQ ID NO: 986785 - DNA, 33 bp, Homo sapien
ggaagatcataacaaacttcagcatcctatggg

SEQ ID NO: 986786 - DNA, 33 bp, Homo sapien
ggaagatcataacaaatttcagcatcctatggg

SEQ ID NO: 986787 - DNA, 33 bp, Homo sapien
tttgtgctaccctagacgagggcccagatattt

SEQ ID NO: 986788 - DNA, 33 bp, Homo sapien
tttgtgctaccctagatgagggcccagatattt

SEQ ID NO: 986789 - DNA, 33 bp, Homo sapien
caggttgctggtacaaacatatttgaataatta

SEQ ID NO: 986790 - DNA, 33 bp, Homo sapien
caggttgctggtacaatcatatttgaataatta

SEQ ID NO: 986791 - DNA, 33 bp, Homo sapien
attttacggaaaagagaatggttagctcatctt

SEQ ID NO: 986792 - DNA, 33 bp, Homo sapien
attttacggaaaagaggatggttagctcatctt

SEQ ID NO: 986793 - DNA, 33 bp, Homo sapien
cagtagttatactagaagaattgtggaactgtg

SEQ ID NO: 986794 - DNA, 33 bp, Homo sapien
cagtagttatactagaggaattgtggaactgtg

SEQ ID NO: 986795 - DNA, 33 bp, Homo sapien
tctgtaggatcccaaaacattcactcactcagg

SEQ ID NO: 986796 - DNA, 33 bp, Homo sapien
tctgtaggatcccaaatcattcactcactcagg

SEQ ID NO: 986797 - DNA, 33 bp, Homo sapien
tttaaataggtgaaaacttgaagagatactaca

SEQ ID NO: 986798 - DNA, 33 bp, Homo sapien
tttaaataggtgaaaatttgaagagatactaca

SEQ ID NO: 986799 - DNA, 33 bp, Homo sapien
acatatacctggcatcgaatctataaactaaca

SEQ ID NO: 986800 - DNA, 33 bp, Homo sapien
acatatacctggcatctaatctataaactaaca

SEQ ID NO: 986801 - DNA, 33 bp, Homo sapien
aaaaatgatgtccttacatgaaggcaactgttt

SEQ ID NO: 986802 - DNA, 33 bp, Homo sapien
aaaaatgatgtccttatatgaaggcaactgttt

SEQ ID NO: 986803 - DNA, 33 bp, Homo sapien
gaattaaaactcatcaatacctcaagtttccaa

SEQ ID NO: 986804 - DNA, 33 bp, Homo sapien
gaattaaaactcatcagtacctcaagtttccaa

SEQ ID NO: 986805 - DNA, 33 bp, Homo sapien
cccttcaagtgagtgacgttttaagaggccaat

SEQ ID NO: 986806 - DNA, 33 bp, Homo sapien
cccttcaagtgagtgaggttttaagaggccaat

SEQ ID NO: 986807 - DNA, 33 bp, Homo sapien
aatatttacttatctacgcaaatgttcatagta

SEQ ID NO: 986808 - DNA, 33 bp, Homo sapien
aatatttacttatctaggcaaatgttcatagta

SEQ ID NO: 986809 - DNA, 33 bp, Homo sapien
tatgttaacaggcataacaagttaaaacagtgt

SEQ ID NO: 986810 - DNA, 33 bp, Homo sapien
tatgttaacaggcatagcaagttaaaacagtgt

SEQ ID NO: 986811 - DNA, 33 bp, Homo sapien
tcagtattagaacaccaaaatcagtctatctct

SEQ ID NO: 986812 - DNA, 33 bp, Homo sapien
tcagtattagaacaccgaaatcagtctatctct

SEQ ID NO: 986813 - DNA, 33 bp, Homo sapien
ttcccttaattcctgacagaaagggatggctat

SEQ ID NO: 986814 - DNA, 33 bp, Homo sapien
ttcccttaattcctgatagaaagggatggctat

SEQ ID NO: 986815 - DNA, 33 bp, Homo sapien
tatcattgtttacttaagtgtaatgtacatatg

SEQ ID NO: 986816 - DNA, 33 bp, Homo sapien
tatcattgtttacttacgtgtaatgtacatatg

SEQ ID NO: 986817 - DNA, 33 bp, Homo sapien
cttacacaatagtaggaaagagtccacatggag

SEQ ID NO: 986818 - DNA, 33 bp, Homo sapien
cttacacaatagtagggaagagtccacatggag

SEQ ID NO: 986819 - DNA, 33 bp, Homo sapien
ccatacatacacatagccacagttccctacagg

SEQ ID NO: 986820 - DNA, 33 bp, Homo sapien
ccatacatacacatagtcacagttccctacagg

SEQ ID NO: 986821 - DNA, 33 bp, Homo sapien
gtaataatttagaaaaatggaagtgataaggta

SEQ ID NO: 986822 - DNA, 33 bp, Homo sapien
gtaataatttagaaaactggaagtgataaggta

SEQ ID NO: 986823 - DNA, 33 bp, Homo sapien
catttgcacttctgagacagacaaacatcactt

SEQ ID NO: 986824 - DNA, 33 bp, Homo sapien
catttgcacttctgaggcagacaaacatcactt

SEQ ID NO: 986825 - DNA, 33 bp, Homo sapien
ataaaaaagaaagcaaataacatagaaaaagtg

SEQ ID NO: 986826 - DNA, 33 bp, Homo sapien
ataaaaaagaaagcaagtaacatagaaaaagtg

SEQ ID NO: 986827 - DNA, 33 bp, Homo sapien
gttaaacgtcttctcacgtgcttatttaccatc

SEQ ID NO: 986828 - DNA, 33 bp, Homo sapien
gttaaacgtcttctcatgtgcttatttaccatc

SEQ ID NO: 986829 - DNA, 33 bp, Homo sapien
ttcaacttgtgtgccaatgattctagtgtattg

SEQ ID NO: 986830 - DNA, 33 bp, Homo sapien
ttcaacttgtgtgccagtgattctagtgtattg

SEQ ID NO: 986831 - DNA, 33 bp, Homo sapien
accatcctgtaaaatccccggtaagcctttgtc

SEQ ID NO: 986832 - DNA, 33 bp, Homo sapien
accatcctgtaaaatctccggtaagcctttgtc

SEQ ID NO: 986833 - DNA, 33 bp, Homo sapien
tatttggaataaccaacgttagatctggaatac

SEQ ID NO: 986834 - DNA, 33 bp, Homo sapien
tatttggaataaccaatgttagatctggaatac

SEQ ID NO: 986835 - DNA, 33 bp, Homo sapien
ctcatcatttaaggcaaagatcaaatatcatcc

SEQ ID NO: 986836 - DNA, 33 bp, Homo sapien
ctcatcatttaaggcacagatcaaatatcatcc

SEQ ID NO: 986837 - DNA, 33 bp, Homo sapien
tcaagaactaggtgaacaaattgctctttgttt

SEQ ID NO: 986838 - DNA, 33 bp, Homo sapien
tcaagaactaggtgaagaaattgctctttgttt

SEQ ID NO: 986839 - DNA, 33 bp, Homo sapien
agagagaagggggataataccgggcataaggtt

SEQ ID NO: 986840 - DNA, 33 bp, Homo sapien
agagagaagggggatagtaccgggcataaggtt

SEQ ID NO: 986841 - DNA, 33 bp, Homo sapien
ataggttcccaggaaaatagtttgtggaagcta

SEQ ID NO: 986842 - DNA, 33 bp, Homo sapien
ataggttcccaggaaagtagtttgtggaagcta

SEQ ID NO: 986843 - DNA, 33 bp, Homo sapien
aaaaactctttgattcaatatcgacttctatta

SEQ ID NO: 986844 - DNA, 33 bp, Homo sapien
aaaaactctttgattcgatatcgacttctatta

SEQ ID NO: 986845 - DNA, 33 bp, Homo sapien
acagctgctagtttaggatccactttgggttcc

SEQ ID NO: 986846 - DNA, 33 bp, Homo sapien
acagctgctagtttagtatccactttgggttcc

SEQ ID NO: 986847 - DNA, 33 bp, Homo sapien
ttgttttcctgcttaaactaagtgacagaatga

SEQ ID NO: 986848 - DNA, 33 bp, Homo sapien
ttgttttcctgcttaagctaagtgacagaatga

SEQ ID NO: 986849 - DNA, 33 bp, Homo sapien
ttcttttaagaaagcacagggcagaatatatgt

SEQ ID NO: 986850 - DNA, 33 bp, Homo sapien
ttcttttaagaaagcatagggcagaatatatgt

SEQ ID NO: 986851 - DNA, 33 bp, Homo sapien
agcaagtatgcctggaagaaattcttgtgtaag

SEQ ID NO: 986852 - DNA, 33 bp, Homo sapien
agcaagtatgcctggacgaaattcttgtgtaag

SEQ ID NO: 986853 - DNA, 33 bp, Homo sapien
aaaagctcttagatgaagtatccaaagtttggt

SEQ ID NO: 986854 - DNA, 33 bp, Homo sapien
aaaagctcttagatgaggtatccaaagtttggt

SEQ ID NO: 986855 - DNA, 33 bp, Homo sapien
actttggttgtgaggaataaaagagatgtctga

SEQ ID NO: 986856 - DNA, 33 bp, Homo sapien
actttggttgtgaggagtaaaagagatgtctga

SEQ ID NO: 986857 - DNA, 33 bp, Homo sapien
gaggtatactgagaataaaaacatggtgtattt

SEQ ID NO: 986858 - DNA, 33 bp, Homo sapien
gaggtatactgagaatgaaaacatggtgtattt

SEQ ID NO: 986859 - DNA, 33 bp, Homo sapien
actaggagagagaactcaagcttttaataatgg

SEQ ID NO: 986860 - DNA, 33 bp, Homo sapien
actaggagagagaactgaagcttttaataatgg

SEQ ID NO: 986861 - DNA, 33 bp, Homo sapien
agaggctttatgaagtaaaactgatctgatact

SEQ ID NO: 986862 - DNA, 33 bp, Homo sapien
agaggctttatgaagtcaaactgatctgatact

SEQ ID NO: 986863 - DNA, 33 bp, Homo sapien
ttgggagcatacaaccgcaagataaatttgggg

SEQ ID NO: 986864 - DNA, 33 bp, Homo sapien
ttgggagcatacaacctcaagataaatttgggg

SEQ ID NO: 986865 - DNA, 33 bp, Homo sapien
tcatttctgacctggaactcaaataataaatga

SEQ ID NO: 986866 - DNA, 33 bp, Homo sapien
tcatttctgacctggatctcaaataataaatga

SEQ ID NO: 986867 - DNA, 33 bp, Homo sapien
ctaggacctaaagcaaccaatgtgtcaagtcct

SEQ ID NO: 986868 - DNA, 33 bp, Homo sapien
ctaggacctaaagcaatcaatgtgtcaagtcct

SEQ ID NO: 986869 - DNA, 33 bp, Homo sapien
ctggtgaggagaaagacggcaatattcttccct

SEQ ID NO: 986870 - DNA, 33 bp, Homo sapien
ctggtgaggagaaagatggcaatattcttccct

SEQ ID NO: 986871 - DNA, 33 bp, Homo sapien
tctatatggtctaagaagaagcatgaattatct

SEQ ID NO: 986872 - DNA, 33 bp, Homo sapien
tctatatggtctaagaggaagcatgaattatct

SEQ ID NO: 986873 - DNA, 33 bp, Homo sapien
ctttatgtacctatcacggtaagcaatttatgc

SEQ ID NO: 986874 - DNA, 33 bp, Homo sapien
ctttatgtacctatcatggtaagcaatttatgc

SEQ ID NO: 986875 - DNA, 33 bp, Homo sapien
tattctgataaagagacctatcatttcaggaag

SEQ ID NO: 986876 - DNA, 33 bp, Homo sapien
tattctgataaagagatctatcatttcaggaag

SEQ ID NO: 986877 - DNA, 33 bp, Homo sapien
gtgtcccatgcccccaaaaattaatatgctgaa

SEQ ID NO: 986878 - DNA, 33 bp, Homo sapien
gtgtcccatgcccccacaaattaatatgctgaa

SEQ ID NO: 986879 - DNA, 33 bp, Homo sapien
tttgtccaaatgtaaaatcctagcttaaaatgc

SEQ ID NO: 986880 - DNA, 33 bp, Homo sapien
tttgtccaaatgtaaactcctagcttaaaatgc

SEQ ID NO: 986881 - DNA, 33 bp, Homo sapien
gtattagatgaagtgaaggaagccctaaaggaa

SEQ ID NO: 986882 - DNA, 33 bp, Homo sapien
gtattagatgaagtgagggaagccctaaaggaa

SEQ ID NO: 986883 - DNA, 33 bp, Homo sapien
acacatgagaggccaactgaagtgctgagggaa

SEQ ID NO: 986884 - DNA, 33 bp, Homo sapien
acacatgagaggccaattgaagtgctgagggaa

SEQ ID NO: 986885 - DNA, 33 bp, Homo sapien
ggttgggtggtataaacaacaggtgtctataac

SEQ ID NO: 986886 - DNA, 33 bp, Homo sapien
ggttgggtggtataaataacaggtgtctataac

SEQ ID NO: 986887 - DNA, 33 bp, Homo sapien
atagtgaggcacagaacgaataacaaaagtgga

SEQ ID NO: 986888 - DNA, 33 bp, Homo sapien
atagtgaggcacagaatgaataacaaaagtgga

SEQ ID NO: 986889 - DNA, 33 bp, Homo sapien
ataactttgcagaactcaaaaacattccagtag

SEQ ID NO: 986890 - DNA, 33 bp, Homo sapien
ataactttgcagaactgaaaaacattccagtag

SEQ ID NO: 986891 - DNA, 33 bp, Homo sapien
accatttcatagagagccagaacttgatgccca

SEQ ID NO: 986892 - DNA, 33 bp, Homo sapien
accatttcatagagagtcagaacttgatgccca

SEQ ID NO: 986893 - DNA, 33 bp, Homo sapien
cttagtgcctgtttccaatattctctctccaga

SEQ ID NO: 986894 - DNA, 33 bp, Homo sapien
cttagtgcctgtttccgatattctctctccaga

SEQ ID NO: 986895 - DNA, 33 bp, Homo sapien
gacattgtagctgagacgtgagacctgaataac

SEQ ID NO: 986896 - DNA, 33 bp, Homo sapien
gacattgtagctgagatgtgagacctgaataac

SEQ ID NO: 986897 - DNA, 33 bp, Homo sapien
agatcctgttgctcaactctgaaatgctgctct

SEQ ID NO: 986898 - DNA, 33 bp, Homo sapien
agatcctgttgctcaattctgaaatgctgctct

SEQ ID NO: 986899 - DNA, 33 bp, Homo sapien
aggctaggagaaggaaagttagagccctgggat

SEQ ID NO: 986900 - DNA, 33 bp, Homo sapien
aggctaggagaaggaaggttagagccctgggat

SEQ ID NO: 986901 - DNA, 33 bp, Homo sapien
aatcctcacaatagccccgagagatgagacagg

SEQ ID NO: 986902 - DNA, 33 bp, Homo sapien
aatcctcacaatagccgcgagagatgagacagg

SEQ ID NO: 986903 - DNA, 33 bp, Homo sapien
gtgtcctcctctgtaaagcaagaaagaggatgg

SEQ ID NO: 986904 - DNA, 33 bp, Homo sapien
gtgtcctcctctgtaaggcaagaaagaggatgg

SEQ ID NO: 986905 - DNA, 33 bp, Homo sapien
actatgccatgttacccggctaccttttcatgg

SEQ ID NO: 986906 - DNA, 33 bp, Homo sapien
actatgccatgttacctggctaccttttcatgg

SEQ ID NO: 986907 - DNA, 33 bp, Homo sapien
gaagagataaaagcacggactaaaatagagtga

SEQ ID NO: 986908 - DNA, 33 bp, Homo sapien
gaagagataaaagcactgactaaaatagagtga

SEQ ID NO: 986909 - DNA, 33 bp, Homo sapien
taaattcactttttacacttagcttcttcctaa

SEQ ID NO: 986910 - DNA, 33 bp, Homo sapien
taaattcactttttacgcttagcttcttcctaa

SEQ ID NO: 986911 - DNA, 33 bp, Homo sapien
agagcagaatgtaaagaagctcaattctgggtc

SEQ ID NO: 986912 - DNA, 33 bp, Homo sapien
agagcagaatgtaaagcagctcaattctgggtc

SEQ ID NO: 986913 - DNA, 33 bp, Homo sapien
actgtgaataccttcaggttcttggattataag

SEQ ID NO: 986914 - DNA, 33 bp, Homo sapien
actgtgaataccttcatgttcttggattataag

SEQ ID NO: 986915 - DNA, 33 bp, Homo sapien
acagttttcaaatgaccgtcactagtgttcctg

SEQ ID NO: 986916 - DNA, 33 bp, Homo sapien
acagttttcaaatgactgtcactagtgttcctg

SEQ ID NO: 986917 - DNA, 33 bp, Homo sapien
ctatttcctgatcagtaaaacctccctattcaa

SEQ ID NO: 986918 - DNA, 33 bp, Homo sapien
ctatttcctgatcagtgaaacctccctattcaa

SEQ ID NO: 986919 - DNA, 33 bp, Homo sapien
aggtcctttgatatacaccagaacaatttttat

SEQ ID NO: 986920 - DNA, 33 bp, Homo sapien
aggtcctttgatataccccagaacaatttttat

SEQ ID NO: 986921 - DNA, 33 bp, Homo sapien
ttatttccaaacttcacgatcgggtagtattac

SEQ ID NO: 986922 - DNA, 33 bp, Homo sapien
ttatttccaaacttcatgatcgggtagtattac

SEQ ID NO: 986923 - DNA, 33 bp, Homo sapien
atagatgctgaagctacggctcagagggaaata

SEQ ID NO: 986924 - DNA, 33 bp, Homo sapien
atagatgctgaagctatggctcagagggaaata

SEQ ID NO: 986925 - DNA, 33 bp, Homo sapien
gaaaagaagggcagataaaaagtgaggacagat

SEQ ID NO: 986926 - DNA, 33 bp, Homo sapien
gaaaagaagggcagatgaaaagtgaggacagat

SEQ ID NO: 986927 - DNA, 33 bp, Homo sapien
cttctgtgactgcaagcaagtggctacctatcc

SEQ ID NO: 986928 - DNA, 33 bp, Homo sapien
cttctgtgactgcaaggaagtggctacctatcc

SEQ ID NO: 986929 - DNA, 33 bp, Homo sapien
gatcaaacttcttagcaaatttcaagtatacag

SEQ ID NO: 986930 - DNA, 33 bp, Homo sapien
gatcaaacttcttagccaatttcaagtatacag

SEQ ID NO: 986931 - DNA, 33 bp, Homo sapien
catccacaaatgaataccttgaaggtgtgctca

SEQ ID NO: 986932 - DNA, 33 bp, Homo sapien
catccacaaatgaatatcttgaaggtgtgctca

SEQ ID NO: 986933 - DNA, 33 bp, Homo sapien
caaaaccacctgtcaacacaggtttgccaatat

SEQ ID NO: 986934 - DNA, 33 bp, Homo sapien
caaaaccacctgtcaatacaggtttgccaatat

SEQ ID NO: 986935 - DNA, 33 bp, Homo sapien
actttccagaacaaaccccctttgtatgtgttg

SEQ ID NO: 986936 - DNA, 33 bp, Homo sapien
actttccagaacaaacgccctttgtatgtgttg

SEQ ID NO: 986937 - DNA, 33 bp, Homo sapien
ctgagagattatattcaccactggaaacagagt

SEQ ID NO: 986938 - DNA, 33 bp, Homo sapien
ctgagagattatattcgccactggaaacagagt

SEQ ID NO: 986939 - DNA, 33 bp, Homo sapien
atgattaatacgataacgtgattcagctcaatt

SEQ ID NO: 986940 - DNA, 33 bp, Homo sapien
atgattaatacgataatgtgattcagctcaatt

SEQ ID NO: 986941 - DNA, 33 bp, Homo sapien
ctaccccattctattacgcagttcttgggtcca

SEQ ID NO: 986942 - DNA, 33 bp, Homo sapien
ctaccccattctattatgcagttcttgggtcca

SEQ ID NO: 986943 - DNA, 33 bp, Homo sapien
tgtaaaacttgcaataaagggagcaaatgttat

SEQ ID NO: 986944 - DNA, 33 bp, Homo sapien
tgtaaaacttgcaatatagggagcaaatgttat

SEQ ID NO: 986945 - DNA, 33 bp, Homo sapien
tgagatcagaagggccaataggtgttgtgcaga

SEQ ID NO: 986946 - DNA, 33 bp, Homo sapien
tgagatcagaagggcccataggtgttgtgcaga

SEQ ID NO: 986947 - DNA, 33 bp, Homo sapien
aaatgcaaaatcacaactcgataacatctcaca

SEQ ID NO: 986948 - DNA, 33 bp, Homo sapien
aaatgcaaaatcacaattcgataacatctcaca

SEQ ID NO: 986949 - DNA, 33 bp, Homo sapien
tggccttgagagagccagatgaagttctaagtg

SEQ ID NO: 986950 - DNA, 33 bp, Homo sapien
tggccttgagagagccggatgaagttctaagtg

SEQ ID NO: 986951 - DNA, 33 bp, Homo sapien
caataaatgtgtgttacgccaaatcaaatctta

SEQ ID NO: 986952 - DNA, 33 bp, Homo sapien
caataaatgtgtgttatgccaaatcaaatctta

SEQ ID NO: 986953 - DNA, 33 bp, Homo sapien
tataggcacatgacacgcagtaagtgtaggtct

SEQ ID NO: 986954 - DNA, 33 bp, Homo sapien
tataggcacatgacactcagtaagtgtaggtct

SEQ ID NO: 986955 - DNA, 33 bp, Homo sapien
gctgctgcttaagtcacgtcagtaatcttctgg

SEQ ID NO: 986956 - DNA, 33 bp, Homo sapien
gctgctgcttaagtcatgtcagtaatcttctgg

SEQ ID NO: 986957 - DNA, 33 bp, Homo sapien
atgcatttgttcataacgagcttttagtatctc

SEQ ID NO: 986958 - DNA, 33 bp, Homo sapien
atgcatttgttcataatgagcttttagtatctc

SEQ ID NO: 986959 - DNA, 33 bp, Homo sapien
ttttaaagttatttaacatgggcgttaagtttg

SEQ ID NO: 986960 - DNA, 33 bp, Homo sapien
ttttaaagttatttaatatgggcgttaagtttg

SEQ ID NO: 986961 - DNA, 33 bp, Homo sapien
attgtgcacttcatacaacatccctgatagttg

SEQ ID NO: 986962 - DNA, 33 bp, Homo sapien
attgtgcacttcatacgacatccctgatagttg

SEQ ID NO: 986963 - DNA, 33 bp, Homo sapien
aaaataaagagttgaaacaccctgctagtttga

SEQ ID NO: 986964 - DNA, 33 bp, Homo sapien
aaaataaagagttgaaccaccctgctagtttga

SEQ ID NO: 986965 - DNA, 33 bp, Homo sapien
tagccaaaatgcaaaacgaaccatgagcctgac

SEQ ID NO: 986966 - DNA, 33 bp, Homo sapien
tagccaaaatgcaaaatgaaccatgagcctgac

SEQ ID NO: 986967 - DNA, 33 bp, Homo sapien
cagagaaaggctttcacagaatcaaatgacgag

SEQ ID NO: 986968 - DNA, 33 bp, Homo sapien
cagagaaaggctttcatagaatcaaatgacgag

SEQ ID NO: 986969 - DNA, 33 bp, Homo sapien
gctggaagctaagctggatttgctgactggaga

SEQ ID NO: 986970 - DNA, 33 bp, Homo sapien
gctggaagctaagctgtatttgctgactggaga

SEQ ID NO: 986971 - DNA, 33 bp, Homo sapien
tttcattgtcttggaaactgggcaaatctgaga

SEQ ID NO: 986972 - DNA, 33 bp, Homo sapien
tttcattgtcttggaagctgggcaaatctgaga

SEQ ID NO: 986973 - DNA, 33 bp, Homo sapien
tgactacacctttggacaggaaaagtcacaaaa

SEQ ID NO: 986974 - DNA, 33 bp, Homo sapien
tgactacacctttggataggaaaagtcacaaaa

SEQ ID NO: 986975 - DNA, 33 bp, Homo sapien
atcaaatattctataaagcctaacccagtcacc

SEQ ID NO: 986976 - DNA, 33 bp, Homo sapien
atcaaatattctataatgcctaacccagtcacc

SEQ ID NO: 986977 - DNA, 33 bp, Homo sapien
ttgcacattaaaaaaacttccatcagctgtttt

SEQ ID NO: 986978 - DNA, 33 bp, Homo sapien
ttgcacattaaaaaaatttccatcagctgtttt

SEQ ID NO: 986979 - DNA, 33 bp, Homo sapien
gaagaccactctcatcacagcaaaagccttcag

SEQ ID NO: 986980 - DNA, 33 bp, Homo sapien
gaagaccactctcatcgcagcaaaagccttcag

SEQ ID NO: 986981 - DNA, 33 bp, Homo sapien
atttctaactagctgagggacagattgtgaaaa

SEQ ID NO: 986982 - DNA, 33 bp, Homo sapien
atttctaactagctgatggacagattgtgaaaa

SEQ ID NO: 986983 - DNA, 33 bp, Homo sapien
tattcatttgcttcaccggactttgatttcctc

SEQ ID NO: 986984 - DNA, 33 bp, Homo sapien
tattcatttgcttcactggactttgatttcctc

SEQ ID NO: 986985 - DNA, 33 bp, Homo sapien
ggaacatagagagcctcacgctgcctttcctta

SEQ ID NO: 986986 - DNA, 33 bp, Homo sapien
ggaacatagagagccttacgctgcctttcctta

SEQ ID NO: 986987 - DNA, 33 bp, Homo sapien
gtcattttcaattcctgaaggcaggagatgaat

SEQ ID NO: 986988 - DNA, 33 bp, Homo sapien
gtcattttcaattccttaaggcaggagatgaat

SEQ ID NO: 986989 - DNA, 33 bp, Homo sapien
ctgcttcaggttaaaaatcaggttcatgtcagc

SEQ ID NO: 986990 - DNA, 33 bp, Homo sapien
ctgcttcaggttaaaagtcaggttcatgtcagc

SEQ ID NO: 986991 - DNA, 33 bp, Homo sapien
aatcctccaaaggtcccaaacctattgacccaa

SEQ ID NO: 986992 - DNA, 33 bp, Homo sapien
aatcctccaaaggtcctaaacctattgacccaa

SEQ ID NO: 986993 - DNA, 33 bp, Homo sapien
tggcttaaatcttaaactccaaacttagatgtg

SEQ ID NO: 986994 - DNA, 33 bp, Homo sapien
tggcttaaatcttaaattccaaacttagatgtg

SEQ ID NO: 986995 - DNA, 33 bp, Homo sapien
gctctctcttggtctacgtaagtgaggatctaa

SEQ ID NO: 986996 - DNA, 33 bp, Homo sapien
gctctctcttggtctatgtaagtgaggatctaa

SEQ ID NO: 986997 - DNA, 33 bp, Homo sapien
ggacttcagaatgtgcaataaaaatgcaatagt

SEQ ID NO: 986998 - DNA, 33 bp, Homo sapien
ggacttcagaatgtgcgataaaaatgcaatagt

SEQ ID NO: 986999 - DNA, 33 bp, Homo sapien
ctcattctcttgcataacctctttccaaatgtc

SEQ ID NO: 987000 - DNA, 33 bp, Homo sapien
ctcattctcttgcatagcctctttccaaatgtc

SEQ ID NO: 987001 - DNA, 33 bp, Homo sapien
tatatgtgaggaaagtaactaggactagaaaag

SEQ ID NO: 987002 - DNA, 33 bp, Homo sapien
tatatgtgaggaaagtcactaggactagaaaag

SEQ ID NO: 987003 - DNA, 33 bp, Homo sapien
agagtttctgataaaacgaggagactgctggga

SEQ ID NO: 987004 - DNA, 33 bp, Homo sapien
agagtttctgataaaaggaggagactgctggga

SEQ ID NO: 987005 - DNA, 33 bp, Homo sapien
gggcatcacttagtccagccaagttgacataga

SEQ ID NO: 987006 - DNA, 33 bp, Homo sapien
gggcatcacttagtcccgccaagttgacataga

SEQ ID NO: 987007 - DNA, 33 bp, Homo sapien
ctcctacaatgcttggacactcccaccacaaga

SEQ ID NO: 987008 - DNA, 33 bp, Homo sapien
ctcctacaatgcttgggcactcccaccacaaga

SEQ ID NO: 987009 - DNA, 33 bp, Homo sapien
acccaacataccaaaacttgagggataaagaaa

SEQ ID NO: 987010 - DNA, 33 bp, Homo sapien
acccaacataccaaaatttgagggataaagaaa

SEQ ID NO: 987011 - DNA, 33 bp, Homo sapien
tagcaatgtgtgaatccaatttgtgcaatacca

SEQ ID NO: 987012 - DNA, 33 bp, Homo sapien
tagcaatgtgtgaatctaatttgtgcaatacca

SEQ ID NO: 987013 - DNA, 33 bp, Homo sapien
aggtagtccagatttacggattttctcctaaat

SEQ ID NO: 987014 - DNA, 33 bp, Homo sapien
aggtagtccagatttatggattttctcctaaat

SEQ ID NO: 987015 - DNA, 33 bp, Homo sapien
tgacctctatctggaacctgtgtatccattttc

SEQ ID NO: 987016 - DNA, 33 bp, Homo sapien
tgacctctatctggaatctgtgtatccattttc

SEQ ID NO: 987017 - DNA, 33 bp, Homo sapien
aagtctagctaaaccaagataattcattgattt

SEQ ID NO: 987018 - DNA, 33 bp, Homo sapien
aagtctagctaaaccacgataattcattgattt

SEQ ID NO: 987019 - DNA, 33 bp, Homo sapien
agtaggtcatcagaagccttcctgaaatagctg

SEQ ID NO: 987020 - DNA, 33 bp, Homo sapien
agtaggtcatcagaaggcttcctgaaatagctg

SEQ ID NO: 987021 - DNA, 33 bp, Homo sapien
cctttttactctaactcaggataactctgagag

SEQ ID NO: 987022 - DNA, 33 bp, Homo sapien
cctttttactctaactgaggataactctgagag

SEQ ID NO: 987023 - DNA, 33 bp, Homo sapien
cagcagccttaaggataaagctattgtaacaag

SEQ ID NO: 987024 - DNA, 33 bp, Homo sapien
cagcagccttaaggatgaagctattgtaacaag

SEQ ID NO: 987025 - DNA, 33 bp, Homo sapien
acaagtggtaagattgaagcagcagccaagaag

SEQ ID NO: 987026 - DNA, 33 bp, Homo sapien
acaagtggtaagattggagcagcagccaagaag

SEQ ID NO: 987027 - DNA, 33 bp, Homo sapien
tccagggagtctgatgcaataatgtatggtctt

SEQ ID NO: 987028 - DNA, 33 bp, Homo sapien
tccagggagtctgatgtaataatgtatggtctt

SEQ ID NO: 987029 - DNA, 33 bp, Homo sapien
gagctcacaatctagacaggagtaaagagtagg

SEQ ID NO: 987030 - DNA, 33 bp, Homo sapien
gagctcacaatctagagaggagtaaagagtagg

SEQ ID NO: 987031 - DNA, 33 bp, Homo sapien
tgatgttaaccttgccagaatttgtaatcagga

SEQ ID NO: 987032 - DNA, 33 bp, Homo sapien
tgatgttaaccttgccggaatttgtaatcagga

SEQ ID NO: 987033 - DNA, 33 bp, Homo sapien
tcctcatgcacttctacctaaacatgacaaaat

SEQ ID NO: 987034 - DNA, 33 bp, Homo sapien
tcctcatgcacttctatctaaacatgacaaaat

SEQ ID NO: 987035 - DNA, 33 bp, Homo sapien
tttagaaaccatgagaagtgagcatcagtggag

SEQ ID NO: 987036 - DNA, 33 bp, Homo sapien
tttagaaaccatgagaggtgagcatcagtggag

SEQ ID NO: 987037 - DNA, 33 bp, Homo sapien
attcaatttgaattaacgtaaatccctcccttc

SEQ ID NO: 987038 - DNA, 33 bp, Homo sapien
attcaatttgaattaatgtaaatccctcccttc

SEQ ID NO: 987039 - DNA, 33 bp, Homo sapien
aaagagcctctaggccaatcttatctggagctt

SEQ ID NO: 987040 - DNA, 33 bp, Homo sapien
aaagagcctctaggccgatcttatctggagctt

SEQ ID NO: 987041 - DNA, 33 bp, Homo sapien
actaaaatatgatgacaaatcttcttcagccat

SEQ ID NO: 987042 - DNA, 33 bp, Homo sapien
actaaaatatgatgacgaatcttcttcagccat

SEQ ID NO: 987043 - DNA, 33 bp, Homo sapien
gaagattccaggccctcacaatttcatgagata

SEQ ID NO: 987044 - DNA, 33 bp, Homo sapien
gaagattccaggcccttacaatttcatgagata

SEQ ID NO: 987045 - DNA, 33 bp, Homo sapien
aagacttgtttataaaatggaccctttcctgtt

SEQ ID NO: 987046 - DNA, 33 bp, Homo sapien
aagacttgtttataaagtggaccctttcctgtt

SEQ ID NO: 987047 - DNA, 33 bp, Homo sapien
cagcagaaacatatccccaggcaaggcaatgca

SEQ ID NO: 987048 - DNA, 33 bp, Homo sapien
cagcagaaacatatcctcaggcaaggcaatgca

SEQ ID NO: 987049 - DNA, 33 bp, Homo sapien
taagatggctatagacaatgaaagctaacctaa

SEQ ID NO: 987050 - DNA, 33 bp, Homo sapien
taagatggctatagacgatgaaagctaacctaa

SEQ ID NO: 987051 - DNA, 33 bp, Homo sapien
ttatagagtctaggtgaaactgacattttaatt

SEQ ID NO: 987052 - DNA, 33 bp, Homo sapien
ttatagagtctaggtgcaactgacattttaatt

SEQ ID NO: 987053 - DNA, 33 bp, Homo sapien
tccaatttagaaaacaataacacagtgtgccaa

SEQ ID NO: 987054 - DNA, 33 bp, Homo sapien
tccaatttagaaaacagtaacacagtgtgccaa

SEQ ID NO: 987055 - DNA, 33 bp, Homo sapien
cccagtttttggactcaagccagttttcagact

SEQ ID NO: 987056 - DNA, 33 bp, Homo sapien
cccagtttttggactcgagccagttttcagact

SEQ ID NO: 987057 - DNA, 33 bp, Homo sapien
aagctgtggcccacaacgagtgaggctgaaata

SEQ ID NO: 987058 - DNA, 33 bp, Homo sapien
aagctgtggcccacaatgagtgaggctgaaata

SEQ ID NO: 987059 - DNA, 33 bp, Homo sapien
aaatacagttcaataaatatcttgtgatttaga

SEQ ID NO: 987060 - DNA, 33 bp, Homo sapien
aaatacagttcaataattatcttgtgatttaga

SEQ ID NO: 987061 - DNA, 33 bp, Homo sapien
ggcttcatttctgagacgaaagatttgttcaac

SEQ ID NO: 987062 - DNA, 33 bp, Homo sapien
ggcttcatttctgagatgaaagatttgttcaac

SEQ ID NO: 987063 - DNA, 33 bp, Homo sapien
gacttatttccaatgaatagaatacggcagaaa

SEQ ID NO: 987064 - DNA, 33 bp, Homo sapien
gacttatttccaatgagtagaatacggcagaaa

SEQ ID NO: 987065 - DNA, 33 bp, Homo sapien
agggcaagccaaaatgaagtgatttcagtgttg

SEQ ID NO: 987066 - DNA, 33 bp, Homo sapien
agggcaagccaaaatggagtgatttcagtgttg

SEQ ID NO: 987067 - DNA, 33 bp, Homo sapien
actgtccctaaattcaaactcacatacctaaaa

SEQ ID NO: 987068 - DNA, 33 bp, Homo sapien
actgtccctaaattcagactcacatacctaaaa

SEQ ID NO: 987069 - DNA, 33 bp, Homo sapien
ggaaactgaggcttaacgagagaaaaaataaat

SEQ ID NO: 987070 - DNA, 33 bp, Homo sapien
ggaaactgaggcttaatgagagaaaaaataaat

SEQ ID NO: 987071 - DNA, 33 bp, Homo sapien
cccgaatactagaaaacgtggtactgtgtaaat

SEQ ID NO: 987072 - DNA, 33 bp, Homo sapien
cccgaatactagaaaatgtggtactgtgtaaat

SEQ ID NO: 987073 - DNA, 33 bp, Homo sapien
ctttttgtactggctaaaacttctaaaataata

SEQ ID NO: 987074 - DNA, 33 bp, Homo sapien
ctttttgtactggctataacttctaaaataata

SEQ ID NO: 987075 - DNA, 33 bp, Homo sapien
ttttaatacagtaacaatccaaatcctaataag

SEQ ID NO: 987076 - DNA, 33 bp, Homo sapien
ttttaatacagtaacagtccaaatcctaataag

SEQ ID NO: 987077 - DNA, 33 bp, Homo sapien
ctaaatgcatggactcaatgccaaccttgtaaa

SEQ ID NO: 987078 - DNA, 33 bp, Homo sapien
ctaaatgcatggactcgatgccaaccttgtaaa

SEQ ID NO: 987079 - DNA, 33 bp, Homo sapien
atgctaactgataccacgtaatgtaatattcac

SEQ ID NO: 987080 - DNA, 33 bp, Homo sapien
atgctaactgataccatgtaatgtaatattcac

SEQ ID NO: 987081 - DNA, 33 bp, Homo sapien
aacttatgcagattcccacctagacagagtaca

SEQ ID NO: 987082 - DNA, 33 bp, Homo sapien
aacttatgcagattcctacctagacagagtaca

SEQ ID NO: 987083 - DNA, 33 bp, Homo sapien
tccaatctgaagccaaagtagaaaccgtagctc

SEQ ID NO: 987084 - DNA, 33 bp, Homo sapien
tccaatctgaagccaatgtagaaaccgtagctc

SEQ ID NO: 987085 - DNA, 33 bp, Homo sapien
cagctggtggggaaaaaataaatgtgtttctgt

SEQ ID NO: 987086 - DNA, 33 bp, Homo sapien
cagctggtggggaaaagataaatgtgtttctgt

SEQ ID NO: 987087 - DNA, 33 bp, Homo sapien
catttgcaaggatgaaatgagataaggagctag

SEQ ID NO: 987088 - DNA, 33 bp, Homo sapien
catttgcaaggatgaactgagataaggagctag

SEQ ID NO: 987089 - DNA, 33 bp, Homo sapien
ccattgatggtgaaaaaccttgagtttgcctgg

SEQ ID NO: 987090 - DNA, 33 bp, Homo sapien
ccattgatggtgaaaagccttgagtttgcctgg

SEQ ID NO: 987091 - DNA, 33 bp, Homo sapien
aacccttcaaggtggacgcagcattttgaacat

SEQ ID NO: 987092 - DNA, 33 bp, Homo sapien
aacccttcaaggtggatgcagcattttgaacat

SEQ ID NO: 987093 - DNA, 33 bp, Homo sapien
tagctgtaagggatgaagagaaagtgagtatat

SEQ ID NO: 987094 - DNA, 33 bp, Homo sapien
tagctgtaagggatgatgagaaagtgagtatat

SEQ ID NO: 987095 - DNA, 33 bp, Homo sapien
gttactgacataataaatctctcctctatttgt

SEQ ID NO: 987096 - DNA, 33 bp, Homo sapien
gttactgacataataagtctctcctctatttgt

SEQ ID NO: 987097 - DNA, 33 bp, Homo sapien
tgttatttcctaagacagattccttccagtgtc

SEQ ID NO: 987098 - DNA, 33 bp, Homo sapien
tgttatttcctaagacggattccttccagtgtc

SEQ ID NO: 987099 - DNA, 33 bp, Homo sapien
caatcagcacaatttaaaaaatcaatcaaacca

SEQ ID NO: 987100 - DNA, 33 bp, Homo sapien
caatcagcacaatttagaaaatcaatcaaacca

SEQ ID NO: 987101 - DNA, 33 bp, Homo sapien
aggtggcatcactcaaccaccaggaagaagatg

SEQ ID NO: 987102 - DNA, 33 bp, Homo sapien
aggtggcatcactcaatcaccaggaagaagatg

SEQ ID NO: 987103 - DNA, 33 bp, Homo sapien
aattcccatctaggtccctgaaagtgatggaga

SEQ ID NO: 987104 - DNA, 33 bp, Homo sapien
aattcccatctaggtctctgaaagtgatggaga

SEQ ID NO: 987105 - DNA, 33 bp, Homo sapien
caggtagaagatggcaaatctagcgtcatgttt

SEQ ID NO: 987106 - DNA, 33 bp, Homo sapien
caggtagaagatggcagatctagcgtcatgttt

SEQ ID NO: 987107 - DNA, 33 bp, Homo sapien
ggaaaagccaaccttacatccatggtggttatg

SEQ ID NO: 987108 - DNA, 33 bp, Homo sapien
ggaaaagccaaccttatatccatggtggttatg

SEQ ID NO: 987109 - DNA, 33 bp, Homo sapien
ataccttatatgccaacgatgagtaaatattta

SEQ ID NO: 987110 - DNA, 33 bp, Homo sapien
ataccttatatgccaatgatgagtaaatattta

SEQ ID NO: 987111 - DNA, 33 bp, Homo sapien
aaccaggaaccctttaagaccctgtgaactaca

SEQ ID NO: 987112 - DNA, 33 bp, Homo sapien
aaccaggaaccctttaggaccctgtgaactaca

SEQ ID NO: 987113 - DNA, 33 bp, Homo sapien
gagccttcatgcaacaatattcctggatcttac

SEQ ID NO: 987114 - DNA, 33 bp, Homo sapien
gagccttcatgcaacactattcctggatcttac

SEQ ID NO: 987115 - DNA, 33 bp, Homo sapien
acaccaaaagacaagaacgttctccagactgtg

SEQ ID NO: 987116 - DNA, 33 bp, Homo sapien
acaccaaaagacaagagcgttctccagactgtg

SEQ ID NO: 987117 - DNA, 33 bp, Homo sapien
taaaagtgcagaatgacgtaagttttcgggagt

SEQ ID NO: 987118 - DNA, 33 bp, Homo sapien
taaaagtgcagaatgatgtaagttttcgggagt

SEQ ID NO: 987119 - DNA, 33 bp, Homo sapien
aaaacttacatcaaacaaaattcatttgctttc

SEQ ID NO: 987120 - DNA, 33 bp, Homo sapien
aaaacttacatcaaaccaaattcatttgctttc

SEQ ID NO: 987121 - DNA, 33 bp, Homo sapien
ggcaagtgacttgtcccctctaaacttcagtgt

SEQ ID NO: 987122 - DNA, 33 bp, Homo sapien
ggcaagtgacttgtcctctctaaacttcagtgt

SEQ ID NO: 987123 - DNA, 33 bp, Homo sapien
acatgaatataaagaaatgttatgacccagtgt

SEQ ID NO: 987124 - DNA, 33 bp, Homo sapien
acatgaatataaagaagtgttatgacccagtgt

SEQ ID NO: 987125 - DNA, 33 bp, Homo sapien
gttatggccatgttacaatgctctgggacttat

SEQ ID NO: 987126 - DNA, 33 bp, Homo sapien
gttatggccatgttaccatgctctgggacttat

SEQ ID NO: 987127 - DNA, 33 bp, Homo sapien
ggacagttggagcctgaaataggcaatgatagc

SEQ ID NO: 987128 - DNA, 33 bp, Homo sapien
ggacagttggagcctggaataggcaatgatagc

SEQ ID NO: 987129 - DNA, 33 bp, Homo sapien
tctggatcctgagaagacagaccagttatttca

SEQ ID NO: 987130 - DNA, 33 bp, Homo sapien
tctggatcctgagaagtcagaccagttatttca

SEQ ID NO: 987131 - DNA, 33 bp, Homo sapien
ttttcaaggctgaacaatggacttgcttttgga

SEQ ID NO: 987132 - DNA, 33 bp, Homo sapien
ttttcaaggctgaacagtggacttgcttttgga

SEQ ID NO: 987133 - DNA, 33 bp, Homo sapien
cagcaatgagttaccaatatgtgaatttccagc

SEQ ID NO: 987134 - DNA, 33 bp, Homo sapien
cagcaatgagttaccagtatgtgaatttccagc

SEQ ID NO: 987135 - DNA, 33 bp, Homo sapien
cagcaaaccaaaaatacgttttattgcacccga

SEQ ID NO: 987136 - DNA, 33 bp, Homo sapien
cagcaaaccaaaaatatgttttattgcacccga

SEQ ID NO: 987137 - DNA, 33 bp, Homo sapien
gatattaataatagccactgacacttcctgaaa

SEQ ID NO: 987138 - DNA, 33 bp, Homo sapien
gatattaataatagccgctgacacttcctgaaa

SEQ ID NO: 987139 - DNA, 33 bp, Homo sapien
ttagtttggaagattaagttagtcatagaatta

SEQ ID NO: 987140 - DNA, 33 bp, Homo sapien
ttagtttggaagattaggttagtcatagaatta

SEQ ID NO: 987141 - DNA, 33 bp, Homo sapien
gtgtgatcagaagtaccctggagggagatagga

SEQ ID NO: 987142 - DNA, 33 bp, Homo sapien
gtgtgatcagaagtactctggagggagatagga

SEQ ID NO: 987143 - DNA, 33 bp, Homo sapien
taccaaatccagaaatcatttaacacagatgta

SEQ ID NO: 987144 - DNA, 33 bp, Homo sapien
taccaaatccagaaattatttaacacagatgta

SEQ ID NO: 987145 - DNA, 33 bp, Homo sapien
ggtcataagaagcatacaataagtgtttgtttt

SEQ ID NO: 987146 - DNA, 33 bp, Homo sapien
ggtcataagaagcatataataagtgtttgtttt

SEQ ID NO: 987147 - DNA, 33 bp, Homo sapien
gcattaggagatcttccaatatccaggcattgt

SEQ ID NO: 987148 - DNA, 33 bp, Homo sapien
gcattaggagatcttcgaatatccaggcattgt

SEQ ID NO: 987149 - DNA, 33 bp, Homo sapien
gagccaatcttgtcaacgaagctttccctgctg

SEQ ID NO: 987150 - DNA, 33 bp, Homo sapien
gagccaatcttgtcaatgaagctttccctgctg

SEQ ID NO: 987151 - DNA, 33 bp, Homo sapien
aaacatctgataaaaacgcctaaaacatggatc

SEQ ID NO: 987152 - DNA, 33 bp, Homo sapien
aaacatctgataaaaatgcctaaaacatggatc

SEQ ID NO: 987153 - DNA, 33 bp, Homo sapien
aagctgggaattgctcaagactaacctgcctcc

SEQ ID NO: 987154 - DNA, 33 bp, Homo sapien
aagctgggaattgctctagactaacctgcctcc

SEQ ID NO: 987155 - DNA, 33 bp, Homo sapien
gatggatgaatctcacagagagtattagacaaa

SEQ ID NO: 987156 - DNA, 33 bp, Homo sapien
gatggatgaatctcacggagagtattagacaaa

SEQ ID NO: 987157 - DNA, 33 bp, Homo sapien
caataatgtgaagtgacgtcagtgaatgcttgg

SEQ ID NO: 987158 - DNA, 33 bp, Homo sapien
caataatgtgaagtgatgtcagtgaatgcttgg

SEQ ID NO: 987159 - DNA, 33 bp, Homo sapien
tcacatggtcgcatctaactgcaagagaaattg

SEQ ID NO: 987160 - DNA, 33 bp, Homo sapien
tcacatggtcgcatctgactgcaagagaaattg

SEQ ID NO: 987161 - DNA, 33 bp, Homo sapien
taacaaatattattgagtatttaaagtgtgcca

SEQ ID NO: 987162 - DNA, 33 bp, Homo sapien
taacaaatattattgattatttaaagtgtgcca

SEQ ID NO: 987163 - DNA, 33 bp, Homo sapien
tgaactgagtagattacaaaaggaagagccaaa

SEQ ID NO: 987164 - DNA, 33 bp, Homo sapien
tgaactgagtagattataaaaggaagagccaaa

SEQ ID NO: 987165 - DNA, 33 bp, Homo sapien
aagcaatctatcttgagcacaaagcttgtcatg

SEQ ID NO: 987166 - DNA, 33 bp, Homo sapien
aagcaatctatcttgatcacaaagcttgtcatg

SEQ ID NO: 987167 - DNA, 33 bp, Homo sapien
cagtaaattatttcagaaagcagatactctgga

SEQ ID NO: 987168 - DNA, 33 bp, Homo sapien
cagtaaattatttcaggaagcagatactctgga

SEQ ID NO: 987169 - DNA, 33 bp, Homo sapien
ttgggttcaaaaaaacaggaccatatttcaatg

SEQ ID NO: 987170 - DNA, 33 bp, Homo sapien
ttgggttcaaaaaaacgggaccatatttcaatg

SEQ ID NO: 987171 - DNA, 33 bp, Homo sapien
ggtcctgaacctgagaacttcttcagcagtggg

SEQ ID NO: 987172 - DNA, 33 bp, Homo sapien
ggtcctgaacctgagaccttcttcagcagtggg

SEQ ID NO: 987173 - DNA, 33 bp, Homo sapien
aactgaaattgacaaaacaataggaattaagcc

SEQ ID NO: 987174 - DNA, 33 bp, Homo sapien
aactgaaattgacaaagcaataggaattaagcc

SEQ ID NO: 987175 - DNA, 33 bp, Homo sapien
gcctcatggattataaatgctcaacaaatgcta

SEQ ID NO: 987176 - DNA, 33 bp, Homo sapien
gcctcatggattataagtgctcaacaaatgcta

SEQ ID NO: 987177 - DNA, 33 bp, Homo sapien
tgggtcacaggtgcaaatcataggccagggagt

SEQ ID NO: 987178 - DNA, 33 bp, Homo sapien
tgggtcacaggtgcaagtcataggccagggagt

SEQ ID NO: 987179 - DNA, 33 bp, Homo sapien
attctgttccagcagtcaactaggacatgaaat

SEQ ID NO: 987180 - DNA, 33 bp, Homo sapien
attctgttccagcagttaactaggacatgaaat

SEQ ID NO: 987181 - DNA, 33 bp, Homo sapien
ttggtcaatacggagacgcttctcttctgaaag

SEQ ID NO: 987182 - DNA, 33 bp, Homo sapien
ttggtcaatacggagatgcttctcttctgaaag

SEQ ID NO: 987183 - DNA, 33 bp, Homo sapien
ccctgttggcacacaacgatagaaatgagagac

SEQ ID NO: 987184 - DNA, 33 bp, Homo sapien
ccctgttggcacacaatgatagaaatgagagac

SEQ ID NO: 987185 - DNA, 33 bp, Homo sapien
tagctagccttgtagacgcaggacctaggctga

SEQ ID NO: 987186 - DNA, 33 bp, Homo sapien
tagctagccttgtagatgcaggacctaggctga

SEQ ID NO: 987187 - DNA, 33 bp, Homo sapien
attagccttagcattccactgtaagcaagagcc

SEQ ID NO: 987188 - DNA, 33 bp, Homo sapien
attagccttagcattctactgtaagcaagagcc

SEQ ID NO: 987189 - DNA, 33 bp, Homo sapien
gtttcaatcttctatacatgactagcttgttat

SEQ ID NO: 987190 - DNA, 33 bp, Homo sapien
gtttcaatcttctatatatgactagcttgttat

SEQ ID NO: 987191 - DNA, 33 bp, Homo sapien
ttcatgcatttgctaacgttgtccctactgcct

SEQ ID NO: 987192 - DNA, 33 bp, Homo sapien
ttcatgcatttgctaatgttgtccctactgcct

SEQ ID NO: 987193 - DNA, 33 bp, Homo sapien
accatggaaggttttgcagattgctgaatcgag

SEQ ID NO: 987194 - DNA, 33 bp, Homo sapien
accatggaaggttttggagattgctgaatcgag

SEQ ID NO: 987195 - DNA, 33 bp, Homo sapien
gaagtcagccccagcacatcttacagccttgct

SEQ ID NO: 987196 - DNA, 33 bp, Homo sapien
gaagtcagccccagcatatcttacagccttgct

SEQ ID NO: 987197 - DNA, 33 bp, Homo sapien
acttgaaggacaggaaatcaagaggacatgtgc

SEQ ID NO: 987198 - DNA, 33 bp, Homo sapien
acttgaaggacaggaagtcaagaggacatgtgc

SEQ ID NO: 987199 - DNA, 33 bp, Homo sapien
tggaaccgacattaagaaagcttggtagggagc

SEQ ID NO: 987200 - DNA, 33 bp, Homo sapien
tggaaccgacattaagcaagcttggtagggagc

SEQ ID NO: 987201 - DNA, 33 bp, Homo sapien
tcacatggtagctaaacctttcttaaatgaact

SEQ ID NO: 987202 - DNA, 33 bp, Homo sapien
tcacatggtagctaaatctttcttaaatgaact

SEQ ID NO: 987203 - DNA, 33 bp, Homo sapien
tgtagtttaagatacacgtagaaagtcattgct

SEQ ID NO: 987204 - DNA, 33 bp, Homo sapien
tgtagtttaagatacatgtagaaagtcattgct

SEQ ID NO: 987205 - DNA, 33 bp, Homo sapien
aatgatgtacataaagaaaaaaagccagaaaca

SEQ ID NO: 987206 - DNA, 33 bp, Homo sapien
aatgatgtacataaaggaaaaaagccagaaaca

SEQ ID NO: 987207 - DNA, 33 bp, Homo sapien
tacttctgtctggcacgcagtttgtgatctcca

SEQ ID NO: 987208 - DNA, 33 bp, Homo sapien
tacttctgtctggcactcagtttgtgatctcca

SEQ ID NO: 987209 - DNA, 33 bp, Homo sapien
ttagaatgagaaatccaggagttggaacacagg

SEQ ID NO: 987210 - DNA, 33 bp, Homo sapien
ttagaatgagaaatccgggagttggaacacagg

SEQ ID NO: 987211 - DNA, 33 bp, Homo sapien
ctaaattctctggttcaaaacaaaacgtttttg

SEQ ID NO: 987212 - DNA, 33 bp, Homo sapien
ctaaattctctggttcgaaacaaaacgtttttg

SEQ ID NO: 987213 - DNA, 33 bp, Homo sapien
tacagctacaaagtccggctctcaatttcttga

SEQ ID NO: 987214 - DNA, 33 bp, Homo sapien
tacagctacaaagtcctgctctcaatttcttga

SEQ ID NO: 987215 - DNA, 33 bp, Homo sapien
taggcagcttgagagacatcctggagaagaatt

SEQ ID NO: 987216 - DNA, 33 bp, Homo sapien
taggcagcttgagagagatcctggagaagaatt

SEQ ID NO: 987217 - DNA, 33 bp, Homo sapien
ctacaattcattccaacctcttccataggcaac

SEQ ID NO: 987218 - DNA, 33 bp, Homo sapien
ctacaattcattccaatctcttccataggcaac

SEQ ID NO: 987219 - DNA, 33 bp, Homo sapien
gctcacagaatcatcgccaagaatggctaatca

SEQ ID NO: 987220 - DNA, 33 bp, Homo sapien
gctcacagaatcatcgtcaagaatggctaatca

SEQ ID NO: 987221 - DNA, 33 bp, Homo sapien
gactaatgccataagcacttttaattatctgtc

SEQ ID NO: 987222 - DNA, 33 bp, Homo sapien
gactaatgccataagcgcttttaattatctgtc

SEQ ID NO: 987223 - DNA, 33 bp, Homo sapien
cttagaaacttgaataccgtggaaatctaacaa

SEQ ID NO: 987224 - DNA, 33 bp, Homo sapien
cttagaaacttgaatatcgtggaaatctaacaa

SEQ ID NO: 987225 - DNA, 33 bp, Homo sapien
ttagtaaatagctactaaaacaaattgccacac

SEQ ID NO: 987226 - DNA, 33 bp, Homo sapien
ttagtaaatagctacttaaacaaattgccacac

SEQ ID NO: 987227 - DNA, 33 bp, Homo sapien
acagaaaactcaaggaaatagtggctcaaacaa

SEQ ID NO: 987228 - DNA, 33 bp, Homo sapien
acagaaaactcaaggagatagtggctcaaacaa

SEQ ID NO: 987229 - DNA, 33 bp, Homo sapien
ttgactaataggataacaaggtggcagtttaca

SEQ ID NO: 987230 - DNA, 33 bp, Homo sapien
ttgactaataggataataaggtggcagtttaca

SEQ ID NO: 987231 - DNA, 33 bp, Homo sapien
gacaagtccttaagcaacacttagcagtggcct

SEQ ID NO: 987232 - DNA, 33 bp, Homo sapien
gacaagtccttaagcatcacttagcagtggcct

SEQ ID NO: 987233 - DNA, 33 bp, Homo sapien
atctctcacaaggcaaatgctcaaatttaattt

SEQ ID NO: 987234 - DNA, 33 bp, Homo sapien
atctctcacaaggcaagtgctcaaatttaattt

SEQ ID NO: 987235 - DNA, 33 bp, Homo sapien
atccatctctgcagcccgacatctaacagattt

SEQ ID NO: 987236 - DNA, 33 bp, Homo sapien
atccatctctgcagcctgacatctaacagattt

SEQ ID NO: 987237 - DNA, 33 bp, Homo sapien
actgacctcacattgtcctccttggttacatca

SEQ ID NO: 987238 - DNA, 33 bp, Homo sapien
actgacctcacattgttctccttggttacatca

SEQ ID NO: 987239 - DNA, 33 bp, Homo sapien
ggttacatcatcgtgcaacttcagagaaaaata

SEQ ID NO: 987240 - DNA, 33 bp, Homo sapien
ggttacatcatcgtgcgacttcagagaaaaata

SEQ ID NO: 987241 - DNA, 33 bp, Homo sapien
acggagcaagtacttacgacaccgatgaaaaag

SEQ ID NO: 987242 - DNA, 33 bp, Homo sapien
acggagcaagtacttatgacaccgatgaaaaag

SEQ ID NO: 987243 - DNA, 33 bp, Homo sapien
tctgtaatgtgtctcacagaaaagtgtaagagc

SEQ ID NO: 987244 - DNA, 33 bp, Homo sapien
tctgtaatgtgtctcatagaaaagtgtaagagc

SEQ ID NO: 987245 - DNA, 33 bp, Homo sapien
ttattattgatctctgaaagactgataaccttg

SEQ ID NO: 987246 - DNA, 33 bp, Homo sapien
ttattattgatctctggaagactgataaccttg

SEQ ID NO: 987247 - DNA, 33 bp, Homo sapien
gaacacataaaaacacagctcctagtggcttcc

SEQ ID NO: 987248 - DNA, 33 bp, Homo sapien
gaacacataaaaacacggctcctagtggcttcc

SEQ ID NO: 987249 - DNA, 33 bp, Homo sapien
tcttggtgactcttaacacagtgctgtcgccaa

SEQ ID NO: 987250 - DNA, 33 bp, Homo sapien
tcttggtgactcttaatacagtgctgtcgccaa

SEQ ID NO: 987251 - DNA, 33 bp, Homo sapien
tcatttagcagaaatacggaatacaatactatt

SEQ ID NO: 987252 - DNA, 33 bp, Homo sapien
tcatttagcagaaatatggaatacaatactatt

SEQ ID NO: 987253 - DNA, 33 bp, Homo sapien
gttgaaaaactaatataagcgtcgagggtcaac

SEQ ID NO: 987254 - DNA, 33 bp, Homo sapien
gttgaaaaactaatatgagcgtcgagggtcaac

SEQ ID NO: 987255 - DNA, 33 bp, Homo sapien
agtgtttgtttccatcaaaatacatacatatga

SEQ ID NO: 987256 - DNA, 33 bp, Homo sapien
agtgtttgtttccatccaaatacatacatatga

SEQ ID NO: 987257 - DNA, 33 bp, Homo sapien
ccagaacatagactccacaaaggctagctttgg

SEQ ID NO: 987258 - DNA, 33 bp, Homo sapien
ccagaacatagactccgcaaaggctagctttgg

SEQ ID NO: 987259 - DNA, 33 bp, Homo sapien
ccgttcactctcagaacagtccagaaataaagt

SEQ ID NO: 987260 - DNA, 33 bp, Homo sapien
ccgttcactctcagaatagtccagaaataaagt

SEQ ID NO: 987261 - DNA, 33 bp, Homo sapien
tatgtctgctcccccaatatttctcccagagca

SEQ ID NO: 987262 - DNA, 33 bp, Homo sapien
tatgtctgctcccccagtatttctcccagagca

SEQ ID NO: 987263 - DNA, 33 bp, Homo sapien
tccagagtcacgaagaaaaactgagagagagtg

SEQ ID NO: 987264 - DNA, 33 bp, Homo sapien
tccagagtcacgaagacaaactgagagagagtg

SEQ ID NO: 987265 - DNA, 33 bp, Homo sapien
tttcctgagtttgtgacgtaagggaagctcaag

SEQ ID NO: 987266 - DNA, 33 bp, Homo sapien
tttcctgagtttgtgatgtaagggaagctcaag

SEQ ID NO: 987267 - DNA, 33 bp, Homo sapien
aacaaagtaccacaaaaggagtggctttattta

SEQ ID NO: 987268 - DNA, 33 bp, Homo sapien
aacaaagtaccacaaacggagtggctttattta

SEQ ID NO: 987269 - DNA, 33 bp, Homo sapien
gcccattgcaatgcgccaaatatgtgcccactc

SEQ ID NO: 987270 - DNA, 33 bp, Homo sapien
gcccattgcaatgcgctaaatatgtgcccactc

SEQ ID NO: 987271 - DNA, 33 bp, Homo sapien
tggttctaacttgcccaggcttgatattcaaaa

SEQ ID NO: 987272 - DNA, 33 bp, Homo sapien
tggttctaacttgcccgggcttgatattcaaaa

SEQ ID NO: 987273 - DNA, 33 bp, Homo sapien
agataagttatcatgcaatttactatcccaggc

SEQ ID NO: 987274 - DNA, 33 bp, Homo sapien
agataagttatcatgcgatttactatcccaggc

SEQ ID NO: 987275 - DNA, 33 bp, Homo sapien
aaaacactcgagagacaatgggaaagaaaattt

SEQ ID NO: 987276 - DNA, 33 bp, Homo sapien
aaaacactcgagagacgatgggaaagaaaattt

SEQ ID NO: 987277 - DNA, 33 bp, Homo sapien
ctcttatcatatggaccattcatttctggcata

SEQ ID NO: 987278 - DNA, 33 bp, Homo sapien
ctcttatcatatggactattcatttctggcata

SEQ ID NO: 987279 - DNA, 33 bp, Homo sapien
tttctggcatagaactcactatggtctgaaaca

SEQ ID NO: 987280 - DNA, 33 bp, Homo sapien
tttctggcatagaacttactatggtctgaaaca

SEQ ID NO: 987281 - DNA, 33 bp, Homo sapien
cattcatccttacaaacgtttattatgctgagt

SEQ ID NO: 987282 - DNA, 33 bp, Homo sapien
cattcatccttacaaatgtttattatgctgagt

SEQ ID NO: 987283 - DNA, 33 bp, Homo sapien
tttttaaaccctttcaccttcactcataattca

SEQ ID NO: 987284 - DNA, 33 bp, Homo sapien
tttttaaaccctttcatcttcactcataattca

SEQ ID NO: 987285 - DNA, 33 bp, Homo sapien
gaccaagttcgtacaacaccatgtccaaaacct

SEQ ID NO: 987286 - DNA, 33 bp, Homo sapien
gaccaagttcgtacaataccatgtccaaaacct

SEQ ID NO: 987287 - DNA, 33 bp, Homo sapien
tgctcatggatccaaaacatcaatagtaagtta

SEQ ID NO: 987288 - DNA, 33 bp, Homo sapien
tgctcatggatccaaaccatcaatagtaagtta

SEQ ID NO: 987289 - DNA, 33 bp, Homo sapien
aattaatcaatcaatacctagcatggtgatgca

SEQ ID NO: 987290 - DNA, 33 bp, Homo sapien
aattaatcaatcaatatctagcatggtgatgca

SEQ ID NO: 987291 - DNA, 33 bp, Homo sapien
taaggtggaataataacgtgtaatagttgcagc

SEQ ID NO: 987292 - DNA, 33 bp, Homo sapien
taaggtggaataataatgtgtaatagttgcagc

SEQ ID NO: 987293 - DNA, 33 bp, Homo sapien
gaagaaagaatgtataggttataggatgccatt

SEQ ID NO: 987294 - DNA, 33 bp, Homo sapien
gaagaaagaatgtatatgttataggatgccatt

SEQ ID NO: 987295 - DNA, 33 bp, Homo sapien
ttttcagagcatttgcaatattagtaacaaaac

SEQ ID NO: 987296 - DNA, 33 bp, Homo sapien
ttttcagagcatttgccatattagtaacaaaac

SEQ ID NO: 987297 - DNA, 33 bp, Homo sapien
ttacagggagatcacaccagtttttgtttgttt

SEQ ID NO: 987298 - DNA, 33 bp, Homo sapien
ttacagggagatcacatcagtttttgtttgttt

SEQ ID NO: 987299 - DNA, 33 bp, Homo sapien
cccaagccaatgcctacgacgttgctacaagta

SEQ ID NO: 987300 - DNA, 33 bp, Homo sapien
cccaagccaatgcctatgacgttgctacaagta

SEQ ID NO: 987301 - DNA, 33 bp, Homo sapien
tttttttttaatctaccactggacatcatggac

SEQ ID NO: 987302 - DNA, 33 bp, Homo sapien
tttttttttaatctactactggacatcatggac

SEQ ID NO: 987303 - DNA, 33 bp, Homo sapien
gattaagttggatgaacagaaaaaatgtgcagc

SEQ ID NO: 987304 - DNA, 33 bp, Homo sapien
gattaagttggatgaatagaaaaaatgtgcagc

SEQ ID NO: 987305 - DNA, 33 bp, Homo sapien
tccaagacacgaggagcacgattaccaaatttg

SEQ ID NO: 987306 - DNA, 33 bp, Homo sapien
tccaagacacgaggagtacgattaccaaatttg

SEQ ID NO: 987307 - DNA, 33 bp, Homo sapien
aacaaatgagttccaaacttacaggtaatgcaa

SEQ ID NO: 987308 - DNA, 33 bp, Homo sapien
aacaaatgagttccaatcttacaggtaatgcaa

SEQ ID NO: 987309 - DNA, 33 bp, Homo sapien
aaatggttttctcacaagtctttcctacccaca

SEQ ID NO: 987310 - DNA, 33 bp, Homo sapien
aaatggttttctcacacgtctttcctacccaca

SEQ ID NO: 987311 - DNA, 33 bp, Homo sapien
ttcactcaggcattgaatatgcgtttattaagt

SEQ ID NO: 987312 - DNA, 33 bp, Homo sapien
ttcactcaggcattgagtatgcgtttattaagt

SEQ ID NO: 987313 - DNA, 33 bp, Homo sapien
tgacaccacagaattacatccttgtgaatcctg

SEQ ID NO: 987314 - DNA, 33 bp, Homo sapien
tgacaccacagaattatatccttgtgaatcctg

SEQ ID NO: 987315 - DNA, 33 bp, Homo sapien
taatggaacagacagaataataatgacagtaac

SEQ ID NO: 987316 - DNA, 33 bp, Homo sapien
taatggaacagacagattaataatgacagtaac

SEQ ID NO: 987317 - DNA, 33 bp, Homo sapien
ccacagcaataacttacctctactttgatactt

SEQ ID NO: 987318 - DNA, 33 bp, Homo sapien
ccacagcaataacttatctctactttgatactt

SEQ ID NO: 987319 - DNA, 33 bp, Homo sapien
ctctgttgttgattagaaaatagcaggaagatg

SEQ ID NO: 987320 - DNA, 33 bp, Homo sapien
ctctgttgttgattaggaaatagcaggaagatg

SEQ ID NO: 987321 - DNA, 33 bp, Homo sapien
ctctctcaaaacacaacatagaacttcctgtcc

SEQ ID NO: 987322 - DNA, 33 bp, Homo sapien
ctctctcaaaacacaatatagaacttcctgtcc

SEQ ID NO: 987323 - DNA, 33 bp, Homo sapien
atagggagaggcttcacgaatgtatagtaatgt

SEQ ID NO: 987324 - DNA, 33 bp, Homo sapien
atagggagaggcttcaggaatgtatagtaatgt

SEQ ID NO: 987325 - DNA, 33 bp, Homo sapien
tagtaagctgagaccaaactgctgcacattcca

SEQ ID NO: 987326 - DNA, 33 bp, Homo sapien
tagtaagctgagaccacactgctgcacattcca

SEQ ID NO: 987327 - DNA, 33 bp, Homo sapien
actgtaaattgctctaaatgtgtaacaccatta

SEQ ID NO: 987328 - DNA, 33 bp, Homo sapien
actgtaaattgctctacatgtgtaacaccatta

SEQ ID NO: 987329 - DNA, 33 bp, Homo sapien
gggcttccttactgtgaaaagttaacaagcaaa

SEQ ID NO: 987330 - DNA, 33 bp, Homo sapien
gggcttccttactgtgcaaagttaacaagcaaa

SEQ ID NO: 987331 - DNA, 33 bp, Homo sapien
tggggatctaacatacagcatggtgactgtggt

SEQ ID NO: 987332 - DNA, 33 bp, Homo sapien
tggggatctaacatacggcatggtgactgtggt

SEQ ID NO: 987333 - DNA, 33 bp, Homo sapien
atgtcagtgagtgaatcaacaaatgaatcaagg

SEQ ID NO: 987334 - DNA, 33 bp, Homo sapien
atgtcagtgagtgaatgaacaaatgaatcaagg

SEQ ID NO: 987335 - DNA, 33 bp, Homo sapien
gggaatctcttgaaatcattcttccttgctctg

SEQ ID NO: 987336 - DNA, 33 bp, Homo sapien
gggaatctcttgaaattattcttccttgctctg

SEQ ID NO: 987337 - DNA, 33 bp, Homo sapien
atgcctgagacggccaacggagtcttttaaatg

SEQ ID NO: 987338 - DNA, 33 bp, Homo sapien
atgcctgagacggccagcggagtcttttaaatg

SEQ ID NO: 987339 - DNA, 33 bp, Homo sapien
agtgacttccagaaaaagcccctcatgggaaag

SEQ ID NO: 987340 - DNA, 33 bp, Homo sapien
agtgacttccagaaaaggcccctcatgggaaag

SEQ ID NO: 987341 - DNA, 33 bp, Homo sapien
gagtgagtgactcgaaacgggctgaatatccca

SEQ ID NO: 987342 - DNA, 33 bp, Homo sapien
gagtgagtgactcgaagcgggctgaatatccca

SEQ ID NO: 987343 - DNA, 33 bp, Homo sapien
ttcagtgaagtcagaccagagattggtgtcagg

SEQ ID NO: 987344 - DNA, 33 bp, Homo sapien
ttcagtgaagtcagacgagagattggtgtcagg

SEQ ID NO: 987345 - DNA, 33 bp, Homo sapien
agagaaactggcactcaacaactatttcatttg

SEQ ID NO: 987346 - DNA, 33 bp, Homo sapien
agagaaactggcactccacaactatttcatttg

SEQ ID NO: 987347 - DNA, 33 bp, Homo sapien
tcattgcagcatagctcagactatcttaactaa

SEQ ID NO: 987348 - DNA, 33 bp, Homo sapien
tcattgcagcatagcttagactatcttaactaa

SEQ ID NO: 987349 - DNA, 33 bp, Homo sapien
ccaagcttcctgctaacagtctgatatttgact

SEQ ID NO: 987350 - DNA, 33 bp, Homo sapien
ccaagcttcctgctaatagtctgatatttgact

SEQ ID NO: 987351 - DNA, 33 bp, Homo sapien
tctctgtgtttagatactagtgatccataggaa

SEQ ID NO: 987352 - DNA, 33 bp, Homo sapien
tctctgtgtttagatattagtgatccataggaa

SEQ ID NO: 987353 - DNA, 33 bp, Homo sapien
catatgacatgattgcactgtatggaatgtcca

SEQ ID NO: 987354 - DNA, 33 bp, Homo sapien
catatgacatgattgcgctgtatggaatgtcca

SEQ ID NO: 987355 - DNA, 33 bp, Homo sapien
cccattagcagttcataaggattccagtttttc

SEQ ID NO: 987356 - DNA, 33 bp, Homo sapien
cccattagcagttcatgaggattccagtttttc

SEQ ID NO: 987357 - DNA, 33 bp, Homo sapien
catgggcataaatgcaaaacttaaaactataaa

SEQ ID NO: 987358 - DNA, 33 bp, Homo sapien
catgggcataaatgcagaacttaaaactataaa

SEQ ID NO: 987359 - DNA, 33 bp, Homo sapien
cattatggtaaagtaaataaaaacggatcatgg

SEQ ID NO: 987360 - DNA, 33 bp, Homo sapien
cattatggtaaagtaactaaaaacggatcatgg

SEQ ID NO: 987361 - DNA, 33 bp, Homo sapien
aattttcaacaaaggaacaaaggtgattcagtt

SEQ ID NO: 987362 - DNA, 33 bp, Homo sapien
aattttcaacaaaggatcaaaggtgattcagtt

SEQ ID NO: 987363 - DNA, 33 bp, Homo sapien
tttctctctttgcagaaggaaatagattatacg

SEQ ID NO: 987364 - DNA, 33 bp, Homo sapien
tttctctctttgcagagggaaatagattatacg

SEQ ID NO: 987365 - DNA, 33 bp, Homo sapien
gggaaaggtaaagataccactctgacctagagt

SEQ ID NO: 987366 - DNA, 33 bp, Homo sapien
gggaaaggtaaagatatcactctgacctagagt

SEQ ID NO: 987367 - DNA, 33 bp, Homo sapien
gaaacaagaaggtagacaggtttttgcttttga

SEQ ID NO: 987368 - DNA, 33 bp, Homo sapien
gaaacaagaaggtagataggtttttgcttttga

SEQ ID NO: 987369 - DNA, 33 bp, Homo sapien
ttagtgactccaactccatgtaaatctcttcaa

SEQ ID NO: 987370 - DNA, 33 bp, Homo sapien
ttagtgactccaactctatgtaaatctcttcaa

SEQ ID NO: 987371 - DNA, 33 bp, Homo sapien
cctcctgattgtaacacgccaggcccaggagca

SEQ ID NO: 987372 - DNA, 33 bp, Homo sapien
cctcctgattgtaacaggccaggcccaggagca

SEQ ID NO: 987373 - DNA, 33 bp, Homo sapien
gcagtcttttctgacactgaagttctgtgaagg

SEQ ID NO: 987374 - DNA, 33 bp, Homo sapien
gcagtcttttctgacattgaagttctgtgaagg

SEQ ID NO: 987375 - DNA, 33 bp, Homo sapien
tcatgtcacattgttacgttcagttggatgtca

SEQ ID NO: 987376 - DNA, 33 bp, Homo sapien
tcatgtcacattgttatgttcagttggatgtca

SEQ ID NO: 987377 - DNA, 33 bp, Homo sapien
taaagatgtattcccacaggaacaaagaaatgt

SEQ ID NO: 987378 - DNA, 33 bp, Homo sapien
taaagatgtattcccagaggaacaaagaaatgt

SEQ ID NO: 987379 - DNA, 33 bp, Homo sapien
tagatattgcctaataacaaatgtaaaagtctt

SEQ ID NO: 987380 - DNA, 33 bp, Homo sapien
tagatattgcctaatagcaaatgtaaaagtctt

SEQ ID NO: 987381 - DNA, 33 bp, Homo sapien
tgtgtcaatactgtaccacttgtccaacaggaa

SEQ ID NO: 987382 - DNA, 33 bp, Homo sapien
tgtgtcaatactgtactacttgtccaacaggaa

SEQ ID NO: 987383 - DNA, 33 bp, Homo sapien
aatggtgctggcataaatataactggatagcca

SEQ ID NO: 987384 - DNA, 33 bp, Homo sapien
aatggtgctggcataagtataactggatagcca

SEQ ID NO: 987385 - DNA, 33 bp, Homo sapien
cctctgtgatctcccacggttaacttcaactgt

SEQ ID NO: 987386 - DNA, 33 bp, Homo sapien
cctctgtgatctcccatggttaacttcaactgt

SEQ ID NO: 987387 - DNA, 33 bp, Homo sapien
ggggatagtttggaaacatggtggcataaaatc

SEQ ID NO: 987388 - DNA, 33 bp, Homo sapien
ggggatagtttggaaatatggtggcataaaatc

SEQ ID NO: 987389 - DNA, 33 bp, Homo sapien
gtttttttaagtcaaacgaacgctgtgaaatta

SEQ ID NO: 987390 - DNA, 33 bp, Homo sapien
gtttttttaagtcaaaggaacgctgtgaaatta

SEQ ID NO: 987391 - DNA, 33 bp, Homo sapien
ttcttccctttggtgcgagaagtaaaccagttg

SEQ ID NO: 987392 - DNA, 33 bp, Homo sapien
ttcttccctttggtgctagaagtaaaccagttg

SEQ ID NO: 987393 - DNA, 33 bp, Homo sapien
ccagttgttcaataaaatatctggaggtgaagt

SEQ ID NO: 987394 - DNA, 33 bp, Homo sapien
ccagttgttcaataaagtatctggaggtgaagt

SEQ ID NO: 987395 - DNA, 33 bp, Homo sapien
ggcttgtggataaacacggaagcctactcagaa

SEQ ID NO: 987396 - DNA, 33 bp, Homo sapien
ggcttgtggataaacatggaagcctactcagaa

SEQ ID NO: 987397 - DNA, 33 bp, Homo sapien
atgcttttcctatgagccctttttaacaacaca

SEQ ID NO: 987398 - DNA, 33 bp, Homo sapien
atgcttttcctatgagtcctttttaacaacaca

SEQ ID NO: 987399 - DNA, 33 bp, Homo sapien
tatttactaaacaccacgcaaaatgcttttcct

SEQ ID NO: 987400 - DNA, 33 bp, Homo sapien
tatttactaaacaccatgcaaaatgcttttcct

SEQ ID NO: 987401 - DNA, 33 bp, Homo sapien
ctttcctaactccagcacacagggctgaaggat

SEQ ID NO: 987402 - DNA, 33 bp, Homo sapien
ctttcctaactccagcgcacagggctgaaggat

SEQ ID NO: 987403 - DNA, 33 bp, Homo sapien
ctgaagggaagacactaaacagcccttttaaag

SEQ ID NO: 987404 - DNA, 33 bp, Homo sapien
ctgaagggaagacactgaacagcccttttaaag

SEQ ID NO: 987405 - DNA, 33 bp, Homo sapien
gggtccatatcttctacctgaaagtgtctttcg

SEQ ID NO: 987406 - DNA, 33 bp, Homo sapien
gggtccatatcttctatctgaaagtgtctttcg

SEQ ID NO: 987407 - DNA, 33 bp, Homo sapien
ttcatagtcagatcaaagatcatagcctagcct

SEQ ID NO: 987408 - DNA, 33 bp, Homo sapien
ttcatagtcagatcaaggatcatagcctagcct

SEQ ID NO: 987409 - DNA, 33 bp, Homo sapien
agggtagggccgtgtaagacaaatttaatccat

SEQ ID NO: 987410 - DNA, 33 bp, Homo sapien
agggtagggccgtgtaggacaaatttaatccat

SEQ ID NO: 987411 - DNA, 33 bp, Homo sapien
acctatgactgagatcaatcaatccacagtgat

SEQ ID NO: 987412 - DNA, 33 bp, Homo sapien
acctatgactgagatcgatcaatccacagtgat

SEQ ID NO: 987413 - DNA, 33 bp, Homo sapien
ttaaatagtgctgcaaataaattctcctaacgt

SEQ ID NO: 987414 - DNA, 33 bp, Homo sapien
ttaaatagtgctgcaagtaaattctcctaacgt

SEQ ID NO: 987415 - DNA, 33 bp, Homo sapien
cacaccacattcatacacagctaatattttcat

SEQ ID NO: 987416 - DNA, 33 bp, Homo sapien
cacaccacattcatacgcagctaatattttcat

SEQ ID NO: 987417 - DNA, 33 bp, Homo sapien
gttatgcacacaaagtcacattagcagtttcct

SEQ ID NO: 987418 - DNA, 33 bp, Homo sapien
gttatgcacacaaagttacattagcagtttcct

SEQ ID NO: 987419 - DNA, 33 bp, Homo sapien
agcaagaaatcatacactcaataactcaggatt

SEQ ID NO: 987420 - DNA, 33 bp, Homo sapien
agcaagaaatcatacattcaataactcaggatt

SEQ ID NO: 987421 - DNA, 33 bp, Homo sapien
aaccttaagagaaagcaaagtgacccatgacta

SEQ ID NO: 987422 - DNA, 33 bp, Homo sapien
aaccttaagagaaagcgaagtgacccatgacta

SEQ ID NO: 987423 - DNA, 33 bp, Homo sapien
gaattcagtgaagtctaaatgtatttgtcttgt

SEQ ID NO: 987424 - DNA, 33 bp, Homo sapien
gaattcagtgaagtctcaatgtatttgtcttgt

SEQ ID NO: 987425 - DNA, 33 bp, Homo sapien
tataatccaaataaaccgtcaattctattgtca

SEQ ID NO: 987426 - DNA, 33 bp, Homo sapien
tataatccaaataaactgtcaattctattgtca

SEQ ID NO: 987427 - DNA, 33 bp, Homo sapien
tattgtaaagaaataacagatgctttttgtcta

SEQ ID NO: 987428 - DNA, 33 bp, Homo sapien
tattgtaaagaaataagagatgctttttgtcta

SEQ ID NO: 987429 - DNA, 33 bp, Homo sapien
aaactaaccaaaataccgataaggctattgtaa

SEQ ID NO: 987430 - DNA, 33 bp, Homo sapien
aaactaaccaaaatactgataaggctattgtaa

SEQ ID NO: 987431 - DNA, 33 bp, Homo sapien
tttacaatctaatgaacgataagattttaaaca

SEQ ID NO: 987432 - DNA, 33 bp, Homo sapien
tttacaatctaatgaatgataagattttaaaca

SEQ ID NO: 987433 - DNA, 33 bp, Homo sapien
tctgttcttcttggcccaatggttcattctatc

SEQ ID NO: 987434 - DNA, 33 bp, Homo sapien
tctgttcttcttggccgaatggttcattctatc

SEQ ID NO: 987435 - DNA, 33 bp, Homo sapien
ccattttaggcagaagcattcatttacaagaag

SEQ ID NO: 987436 - DNA, 33 bp, Homo sapien
ccattttaggcagaaggattcatttacaagaag

SEQ ID NO: 987437 - DNA, 33 bp, Homo sapien
gaacagaagtggaatactagtgttttgtataag

SEQ ID NO: 987438 - DNA, 33 bp, Homo sapien
gaacagaagtggaatagtagtgttttgtataag

SEQ ID NO: 987439 - DNA, 33 bp, Homo sapien
atttatgtgatttatggatttgcctttttttgt

SEQ ID NO: 987440 - DNA, 33 bp, Homo sapien
atttatgtgatttatgtatttgcctttttttgt

SEQ ID NO: 987441 - DNA, 33 bp, Homo sapien
tttagatcttattcctaacgtattaatggcacc

SEQ ID NO: 987442 - DNA, 33 bp, Homo sapien
tttagatcttattccttacgtattaatggcacc

SEQ ID NO: 987443 - DNA, 33 bp, Homo sapien
gttaagctgcttatgaaaataattaggccagtg

SEQ ID NO: 987444 - DNA, 33 bp, Homo sapien
gttaagctgcttatgagaataattaggccagtg

SEQ ID NO: 987445 - DNA, 33 bp, Homo sapien
cacacacacatattccagagaccttggatcaaa

SEQ ID NO: 987446 - DNA, 33 bp, Homo sapien
cacacacacatattccggagaccttggatcaaa

SEQ ID NO: 987447 - DNA, 33 bp, Homo sapien
aggcagtgttcacagactcatagaaaaaacaac

SEQ ID NO: 987448 - DNA, 33 bp, Homo sapien
aggcagtgttcacagattcatagaaaaaacaac

SEQ ID NO: 987449 - DNA, 33 bp, Homo sapien
aatatagatatattaaatatgaggcctgtctat

SEQ ID NO: 987450 - DNA, 33 bp, Homo sapien
aatatagatatattaactatgaggcctgtctat

SEQ ID NO: 987451 - DNA, 33 bp, Homo sapien
gtcagaaactctgggaagatcttattggcagaa

SEQ ID NO: 987452 - DNA, 33 bp, Homo sapien
gtcagaaactctgggatgatcttattggcagaa

SEQ ID NO: 987453 - DNA, 33 bp, Homo sapien
attgacacccacttgaataaagtataggtgaga

SEQ ID NO: 987454 - DNA, 33 bp, Homo sapien
attgacacccacttgagtaaagtataggtgaga

SEQ ID NO: 987455 - DNA, 33 bp, Homo sapien
aaaatgagactaattaccctgacttcatagagc

SEQ ID NO: 987456 - DNA, 33 bp, Homo sapien
aaaatgagactaattatcctgacttcatagagc

SEQ ID NO: 987457 - DNA, 33 bp, Homo sapien
gctcagaaagatttagcaaactgctcaaagcat

SEQ ID NO: 987458 - DNA, 33 bp, Homo sapien
gctcagaaagatttaggaaactgctcaaagcat

SEQ ID NO: 987459 - DNA, 33 bp, Homo sapien
aagcatctgatacagaacctagtagctgttatc

SEQ ID NO: 987460 - DNA, 33 bp, Homo sapien
aagcatctgatacagagcctagtagctgttatc

SEQ ID NO: 987461 - DNA, 33 bp, Homo sapien
gtgattgaaaacaagacataaattctgaggctc

SEQ ID NO: 987462 - DNA, 33 bp, Homo sapien
gtgattgaaaacaagatataaattctgaggctc

SEQ ID NO: 987463 - DNA, 33 bp, Homo sapien
acctttatgcatttcaacgttttttctttccat

SEQ ID NO: 987464 - DNA, 33 bp, Homo sapien
acctttatgcatttcagcgttttttctttccat

SEQ ID NO: 987465 - DNA, 33 bp, Homo sapien
agcatggtgttcatggaaccgcaagtgattcta

SEQ ID NO: 987466 - DNA, 33 bp, Homo sapien
agcatggtgttcatgggaccgcaagtgattcta

SEQ ID NO: 987467 - DNA, 33 bp, Homo sapien
atttctcttgtgatcaatctcttccaaagtata

SEQ ID NO: 987468 - DNA, 33 bp, Homo sapien
atttctcttgtgatcagtctcttccaaagtata

SEQ ID NO: 987469 - DNA, 33 bp, Homo sapien
gatacattgtcagagacggctaaatatgatcat

SEQ ID NO: 987470 - DNA, 33 bp, Homo sapien
gatacattgtcagagagggctaaatatgatcat

SEQ ID NO: 987471 - DNA, 33 bp, Homo sapien
ataaaaatcatagactcaaaagaagctttgaaa

SEQ ID NO: 987472 - DNA, 33 bp, Homo sapien
ataaaaatcatagactgaaaagaagctttgaaa

SEQ ID NO: 987473 - DNA, 33 bp, Homo sapien
agaattcaggaaggaagaaacctgagcttagaa

SEQ ID NO: 987474 - DNA, 33 bp, Homo sapien
agaattcaggaaggaataaacctgagcttagaa

SEQ ID NO: 987475 - DNA, 33 bp, Homo sapien
catgatatatataaacacccacctgcagctcag

SEQ ID NO: 987476 - DNA, 33 bp, Homo sapien
catgatatatataaacgcccacctgcagctcag

SEQ ID NO: 987477 - DNA, 33 bp, Homo sapien
gagtatcactaccatccgaaattggccgctggt

SEQ ID NO: 987478 - DNA, 33 bp, Homo sapien
gagtatcactaccatctgaaattggccgctggt

SEQ ID NO: 987479 - DNA, 33 bp, Homo sapien
tagactgtagggtctagacttatcctcaagaat

SEQ ID NO: 987480 - DNA, 33 bp, Homo sapien
tagactgtagggtctatacttatcctcaagaat

SEQ ID NO: 987481 - DNA, 33 bp, Homo sapien
caacaacaactgaattcaaaggactgaactggg

SEQ ID NO: 987482 - DNA, 33 bp, Homo sapien
caacaacaactgaattgaaaggactgaactggg

SEQ ID NO: 987483 - DNA, 33 bp, Homo sapien
ggcaaagatggagaccaaagaaccagaagttct

SEQ ID NO: 987484 - DNA, 33 bp, Homo sapien
ggcaaagatggagaccgaagaaccagaagttct

SEQ ID NO: 987485 - DNA, 33 bp, Homo sapien
gctgggctatactcgccatttcatgcttggcgt

SEQ ID NO: 987486 - DNA, 33 bp, Homo sapien
gctgggctatactcgctatttcatgcttggcgt

SEQ ID NO: 987487 - DNA, 33 bp, Homo sapien
ctcaccacctagtgacacttaataaacagagaa

SEQ ID NO: 987488 - DNA, 33 bp, Homo sapien
ctcaccacctagtgacgcttaataaacagagaa

SEQ ID NO: 987489 - DNA, 33 bp, Homo sapien
ggataattcgtgtcgaacacttatcacagtgcc

SEQ ID NO: 987490 - DNA, 33 bp, Homo sapien
ggataattcgtgtcgagcacttatcacagtgcc

SEQ ID NO: 987491 - DNA, 33 bp, Homo sapien
ttcctaatcctacatagccttaatggcctagct

SEQ ID NO: 987492 - DNA, 33 bp, Homo sapien
ttcctaatcctacatatccttaatggcctagct

SEQ ID NO: 987493 - DNA, 33 bp, Homo sapien
ttatttcaactagcaaagtgttatttcagatga

SEQ ID NO: 987494 - DNA, 33 bp, Homo sapien
ttatttcaactagcaaggtgttatttcagatga

SEQ ID NO: 987495 - DNA, 33 bp, Homo sapien
ccctgaaccccacttaaccttattcagtgcatc

SEQ ID NO: 987496 - DNA, 33 bp, Homo sapien
ccctgaaccccacttagccttattcagtgcatc

SEQ ID NO: 987497 - DNA, 33 bp, Homo sapien
gaaacactttgagaaacgaaaatgcaaaaagtt

SEQ ID NO: 987498 - DNA, 33 bp, Homo sapien
gaaacactttgagaaatgaaaatgcaaaaagtt

SEQ ID NO: 987499 - DNA, 33 bp, Homo sapien
tcaattaaatactcagcacattcacagttgact

SEQ ID NO: 987500 - DNA, 33 bp, Homo sapien
tcaattaaatactcaggacattcacagttgact

SEQ ID NO: 987501 - DNA, 33 bp, Homo sapien
cattagaattccttccaagggagcagtttcaaa

SEQ ID NO: 987502 - DNA, 33 bp, Homo sapien
cattagaattccttccgagggagcagtttcaaa

SEQ ID NO: 987503 - DNA, 33 bp, Homo sapien
tggagaagagagaggccgacagaaagaaaactt

SEQ ID NO: 987504 - DNA, 33 bp, Homo sapien
tggagaagagagaggctgacagaaagaaaactt

SEQ ID NO: 987505 - DNA, 33 bp, Homo sapien
gggtggcatctacagacgacagtgacagggcct

SEQ ID NO: 987506 - DNA, 33 bp, Homo sapien
gggtggcatctacagaggacagtgacagggcct

SEQ ID NO: 987507 - DNA, 33 bp, Homo sapien
ctagagatgagatactcaacccagatgaagaga

SEQ ID NO: 987508 - DNA, 33 bp, Homo sapien
ctagagatgagatacttaacccagatgaagaga

SEQ ID NO: 987509 - DNA, 33 bp, Homo sapien
agagtatgacatttgacaacccttgaaagtagt

SEQ ID NO: 987510 - DNA, 33 bp, Homo sapien
agagtatgacatttgagaacccttgaaagtagt

SEQ ID NO: 987511 - DNA, 33 bp, Homo sapien
ggacttccctgactaacgctcttggcctctctc

SEQ ID NO: 987512 - DNA, 33 bp, Homo sapien
ggacttccctgactaatgctcttggcctctctc

SEQ ID NO: 987513 - DNA, 33 bp, Homo sapien
taaatgatcacctacaaaatagatgtatgcctc

SEQ ID NO: 987514 - DNA, 33 bp, Homo sapien
taaatgatcacctacacaatagatgtatgcctc

SEQ ID NO: 987515 - DNA, 33 bp, Homo sapien
ggtacatggtagatggcccataaatacttccta

SEQ ID NO: 987516 - DNA, 33 bp, Homo sapien
ggtacatggtagatggtccataaatacttccta

SEQ ID NO: 987517 - DNA, 33 bp, Homo sapien
acactggctgaagtcccgaaagctattttctgg

SEQ ID NO: 987518 - DNA, 33 bp, Homo sapien
acactggctgaagtcctgaaagctattttctgg

SEQ ID NO: 987519 - DNA, 33 bp, Homo sapien
ctgctcttctccatacacataatttccttccac

SEQ ID NO: 987520 - DNA, 33 bp, Homo sapien
ctgctcttctccatacgcataatttccttccac

SEQ ID NO: 987521 - DNA, 33 bp, Homo sapien
caggtggagatttacccaaacacactaagttga

SEQ ID NO: 987522 - DNA, 33 bp, Homo sapien
caggtggagatttacctaaacacactaagttga

SEQ ID NO: 987523 - DNA, 33 bp, Homo sapien
ctctgagaatcccaaaagaagcagcagactggg

SEQ ID NO: 987524 - DNA, 33 bp, Homo sapien
ctctgagaatcccaaaggaagcagcagactggg

SEQ ID NO: 987525 - DNA, 33 bp, Homo sapien
taagatacactttcgggaaacattatatgtggg

SEQ ID NO: 987526 - DNA, 33 bp, Homo sapien
taagatacactttcggtaaacattatatgtggg

SEQ ID NO: 987527 - DNA, 33 bp, Homo sapien
tttttattgtagacaccctgatgcccagcagca

SEQ ID NO: 987528 - DNA, 33 bp, Homo sapien
tttttattgtagacacgctgatgcccagcagca

SEQ ID NO: 987529 - DNA, 33 bp, Homo sapien
ccctctgtgaatgttcaatgaatgaaagcatga

SEQ ID NO: 987530 - DNA, 33 bp, Homo sapien
ccctctgtgaatgttcgatgaatgaaagcatga

SEQ ID NO: 987531 - DNA, 33 bp, Homo sapien
ccaagcctcttggaaacatatctcagaaacctg

SEQ ID NO: 987532 - DNA, 33 bp, Homo sapien
ccaagcctcttggaaatatatctcagaaacctg

SEQ ID NO: 987533 - DNA, 33 bp, Homo sapien
gatgtctggaatggcaccagtatacttttaagc

SEQ ID NO: 987534 - DNA, 33 bp, Homo sapien
gatgtctggaatggcatcagtatacttttaagc

SEQ ID NO: 987535 - DNA, 33 bp, Homo sapien
agtgttgtgaagatcaaatcaaataatcaaaag

SEQ ID NO: 987536 - DNA, 33 bp, Homo sapien
agtgttgtgaagatcagatcaaataatcaaaag

SEQ ID NO: 987537 - DNA, 33 bp, Homo sapien
gtagtttcaagtcccactggctttaaatattgt

SEQ ID NO: 987538 - DNA, 33 bp, Homo sapien
gtagtttcaagtcccattggctttaaatattgt

SEQ ID NO: 987539 - DNA, 33 bp, Homo sapien
gagctatcaaatgggaaccatcaaatcctacac

SEQ ID NO: 987540 - DNA, 33 bp, Homo sapien
gagctatcaaatgggagccatcaaatcctacac

SEQ ID NO: 987541 - DNA, 33 bp, Homo sapien
agacaaggattcatccaggaatcacagagagca

SEQ ID NO: 987542 - DNA, 33 bp, Homo sapien
agacaaggattcatccgggaatcacagagagca

SEQ ID NO: 987543 - DNA, 33 bp, Homo sapien
gccgtgtttttaagtccagaaggagtgcacaga

SEQ ID NO: 987544 - DNA, 33 bp, Homo sapien
gccgtgtttttaagtctagaaggagtgcacaga

SEQ ID NO: 987545 - DNA, 33 bp, Homo sapien
tagagagtgtgccatgccagctgcacctcatag

SEQ ID NO: 987546 - DNA, 33 bp, Homo sapien
tagagagtgtgccatgtcagctgcacctcatag

SEQ ID NO: 987547 - DNA, 33 bp, Homo sapien
aggcctcattaaggggaaggatctgaagcatga

SEQ ID NO: 987548 - DNA, 33 bp, Homo sapien
aggcctcattaaggggcaggatctgaagcatga

SEQ ID NO: 987549 - DNA, 33 bp, Homo sapien
tcacatccaggcagtactactcctcaaagtatg

SEQ ID NO: 987550 - DNA, 33 bp, Homo sapien
tcacatccaggcagtattactcctcaaagtatg

SEQ ID NO: 987551 - DNA, 33 bp, Homo sapien
ttactactaaataaaacgtcgtaatgaaattca

SEQ ID NO: 987552 - DNA, 33 bp, Homo sapien
ttactactaaataaaatgtcgtaatgaaattca

SEQ ID NO: 987553 - DNA, 33 bp, Homo sapien
gaatctatctgggtgaccttctgcaggttaatc

SEQ ID NO: 987554 - DNA, 33 bp, Homo sapien
gaatctatctgggtgatcttctgcaggttaatc

SEQ ID NO: 987555 - DNA, 33 bp, Homo sapien
tgtgagagcaaagcacccaagagttgacagaaa

SEQ ID NO: 987556 - DNA, 33 bp, Homo sapien
tgtgagagcaaagcactcaagagttgacagaaa

SEQ ID NO: 987557 - DNA, 33 bp, Homo sapien
gctcaggattgctttagctacttaggccattat

SEQ ID NO: 987558 - DNA, 33 bp, Homo sapien
gctcaggattgctttatctacttaggccattat

SEQ ID NO: 987559 - DNA, 33 bp, Homo sapien
aatcttttcaatgaccaccaagtcacaggaaca

SEQ ID NO: 987560 - DNA, 33 bp, Homo sapien
aatcttttcaatgaccgccaagtcacaggaaca

SEQ ID NO: 987561 - DNA, 33 bp, Homo sapien
tcagagcagtgatttcccattctgatttggtga

SEQ ID NO: 987562 - DNA, 33 bp, Homo sapien
tcagagcagtgatttcgcattctgatttggtga

SEQ ID NO: 987563 - DNA, 33 bp, Homo sapien
cttccaggaaatttcacgataaggatttctccc

SEQ ID NO: 987564 - DNA, 33 bp, Homo sapien
cttccaggaaatttcaggataaggatttctccc

SEQ ID NO: 987565 - DNA, 33 bp, Homo sapien
gtgagtcagtcacgcactacatactctgggctt

SEQ ID NO: 987566 - DNA, 33 bp, Homo sapien
gtgagtcagtcacgcattacatactctgggctt

SEQ ID NO: 987567 - DNA, 33 bp, Homo sapien
ccaggcaattactgaaccttaagggaagaaggc

SEQ ID NO: 987568 - DNA, 33 bp, Homo sapien
ccaggcaattactgaatcttaagggaagaaggc

SEQ ID NO: 987569 - DNA, 33 bp, Homo sapien
actggttaacaaggtccctatcctatatggtaa

SEQ ID NO: 987570 - DNA, 33 bp, Homo sapien
actggttaacaaggtctctatcctatatggtaa

SEQ ID NO: 987571 - DNA, 33 bp, Homo sapien
caatgcaaagttgtggaaagatacagttctcac

SEQ ID NO: 987572 - DNA, 33 bp, Homo sapien
caatgcaaagttgtgggaagatacagttctcac

SEQ ID NO: 987573 - DNA, 33 bp, Homo sapien
tctttgggttttgatacgatttgatttaacatt

SEQ ID NO: 987574 - DNA, 33 bp, Homo sapien
tctttgggttttgatatgatttgatttaacatt

SEQ ID NO: 987575 - DNA, 33 bp, Homo sapien
ggtgagggcacagttaacagaaagtgcagagta

SEQ ID NO: 987576 - DNA, 33 bp, Homo sapien
ggtgagggcacagttatcagaaagtgcagagta

SEQ ID NO: 987577 - DNA, 33 bp, Homo sapien
tcaaatggagaaaacaaaggattcatgattaac

SEQ ID NO: 987578 - DNA, 33 bp, Homo sapien
tcaaatggagaaaacagaggattcatgattaac

SEQ ID NO: 987579 - DNA, 33 bp, Homo sapien
gtgattttcacatagccaacacacccctgtata

SEQ ID NO: 987580 - DNA, 33 bp, Homo sapien
gtgattttcacatagctaacacacccctgtata

SEQ ID NO: 987581 - DNA, 33 bp, Homo sapien
gtgtgtcccatcagaaaggaatgaagacaaaaa

SEQ ID NO: 987582 - DNA, 33 bp, Homo sapien
gtgtgtcccatcagaacggaatgaagacaaaaa

SEQ ID NO: 987583 - DNA, 33 bp, Homo sapien
ccgtcggctcttctccaaatggcaatactcatt

SEQ ID NO: 987584 - DNA, 33 bp, Homo sapien
ccgtcggctcttctcccaatggcaatactcatt

SEQ ID NO: 987585 - DNA, 33 bp, Homo sapien
catcatttgtgttctaagtatgtggtggcacaa

SEQ ID NO: 987586 - DNA, 33 bp, Homo sapien
catcatttgtgttctaggtatgtggtggcacaa

SEQ ID NO: 987587 - DNA, 33 bp, Homo sapien
agttaggctacacttacggggcagtaacaaaca

SEQ ID NO: 987588 - DNA, 33 bp, Homo sapien
agttaggctacacttatggggcagtaacaaaca

SEQ ID NO: 987589 - DNA, 33 bp, Homo sapien
tcacttataaactccaatgatcctaatgacatc

SEQ ID NO: 987590 - DNA, 33 bp, Homo sapien
tcacttataaactccagtgatcctaatgacatc

SEQ ID NO: 987591 - DNA, 33 bp, Homo sapien
ataacttctggacctcccaatgcaatgaaaatg

SEQ ID NO: 987592 - DNA, 33 bp, Homo sapien
ataacttctggacctctcaatgcaatgaaaatg

SEQ ID NO: 987593 - DNA, 33 bp, Homo sapien
cactgtgaaaacactcccagttgcccctcagaa

SEQ ID NO: 987594 - DNA, 33 bp, Homo sapien
cactgtgaaaacactcgcagttgcccctcagaa

SEQ ID NO: 987595 - DNA, 33 bp, Homo sapien
gttattatcagtaaacactgacatcagaggtaa

SEQ ID NO: 987596 - DNA, 33 bp, Homo sapien
gttattatcagtaaactctgacatcagaggtaa

SEQ ID NO: 987597 - DNA, 33 bp, Homo sapien
gtgggcagatttgtgacgacaatagcacgagtt

SEQ ID NO: 987598 - DNA, 33 bp, Homo sapien
gtgggcagatttgtgaggacaatagcacgagtt

SEQ ID NO: 987599 - DNA, 33 bp, Homo sapien
ccaattgacagagatgaaaacctggactcccta

SEQ ID NO: 987600 - DNA, 33 bp, Homo sapien
ccaattgacagagatggaaacctggactcccta

SEQ ID NO: 987601 - DNA, 33 bp, Homo sapien
gagccattgataagtacacgagttgctaaagac

SEQ ID NO: 987602 - DNA, 33 bp, Homo sapien
gagccattgataagtatacgagttgctaaagac

SEQ ID NO: 987603 - DNA, 33 bp, Homo sapien
agtggaaacctggacacgttgcatctctgctgc

SEQ ID NO: 987604 - DNA, 33 bp, Homo sapien
agtggaaacctggacatgttgcatctctgctgc

SEQ ID NO: 987605 - DNA, 33 bp, Homo sapien
actgcatgaattcctcagactcttactttctga

SEQ ID NO: 987606 - DNA, 33 bp, Homo sapien
actgcatgaattcctcggactcttactttctga

SEQ ID NO: 987607 - DNA, 33 bp, Homo sapien
aaacctgaagtcatgacctagggctcaatccta

SEQ ID NO: 987608 - DNA, 33 bp, Homo sapien
aaacctgaagtcatgatctagggctcaatccta

SEQ ID NO: 987609 - DNA, 33 bp, Homo sapien
cacgctcaggtggccagtacctccagggtaaat

SEQ ID NO: 987610 - DNA, 33 bp, Homo sapien
cacgctcaggtggccattacctccagggtaaat

SEQ ID NO: 987611 - DNA, 33 bp, Homo sapien
ttctggattgggtacacgctagacaatgaattc

SEQ ID NO: 987612 - DNA, 33 bp, Homo sapien
ttctggattgggtacatgctagacaatgaattc

SEQ ID NO: 987613 - DNA, 33 bp, Homo sapien
agccatacaatgttgccaatagaggtggtaaag

SEQ ID NO: 987614 - DNA, 33 bp, Homo sapien
agccatacaatgttgctaatagaggtggtaaag

SEQ ID NO: 987615 - DNA, 33 bp, Homo sapien
tcataatgaagttataataaggcatacagatga

SEQ ID NO: 987616 - DNA, 33 bp, Homo sapien
tcataatgaagttatagtaaggcatacagatga

SEQ ID NO: 987617 - DNA, 33 bp, Homo sapien
atctggcaggagtagaggaatgaccaagggatg

SEQ ID NO: 987618 - DNA, 33 bp, Homo sapien
atctggcaggagtagatgaatgaccaagggatg

SEQ ID NO: 987619 - DNA, 33 bp, Homo sapien
ctgcagcaggtccatgcagtgcaaagtgctttc

SEQ ID NO: 987620 - DNA, 33 bp, Homo sapien
ctgcagcaggtccatgtagtgcaaagtgctttc

SEQ ID NO: 987621 - DNA, 33 bp, Homo sapien
tcagctctattctctaagttctatgactaattg

SEQ ID NO: 987622 - DNA, 33 bp, Homo sapien
tcagctctattctctaggttctatgactaattg

SEQ ID NO: 987623 - DNA, 33 bp, Homo sapien
ggataccacagtcagacagcttgatctagggta

SEQ ID NO: 987624 - DNA, 33 bp, Homo sapien
ggataccacagtcagatagcttgatctagggta

SEQ ID NO: 987625 - DNA, 33 bp, Homo sapien
accattgttgttcctcaactggcgcaattcgtt

SEQ ID NO: 987626 - DNA, 33 bp, Homo sapien
accattgttgttcctcgactggcgcaattcgtt

SEQ ID NO: 987627 - DNA, 33 bp, Homo sapien
atatcgtttcaagggtcaagtggacgtggttga

SEQ ID NO: 987628 - DNA, 33 bp, Homo sapien
atatcgtttcaagggtgaagtggacgtggttga

SEQ ID NO: 987629 - DNA, 33 bp, Homo sapien
tacctttagcttataacatcaatcacagtgcaa

SEQ ID NO: 987630 - DNA, 33 bp, Homo sapien
tacctttagcttataatatcaatcacagtgcaa

SEQ ID NO: 987631 - DNA, 33 bp, Homo sapien
aacagagcactgataaagctttaagctgtggtt

SEQ ID NO: 987632 - DNA, 33 bp, Homo sapien
aacagagcactgataatgctttaagctgtggtt

SEQ ID NO: 987633 - DNA, 33 bp, Homo sapien
gtatggtcaatctaacactaagataagacacac

SEQ ID NO: 987634 - DNA, 33 bp, Homo sapien
gtatggtcaatctaacgctaagataagacacac

SEQ ID NO: 987635 - DNA, 33 bp, Homo sapien
ggctgtaactttcatgcaagcctgagcctacag

SEQ ID NO: 987636 - DNA, 33 bp, Homo sapien
ggctgtaactttcatggaagcctgagcctacag

SEQ ID NO: 987637 - DNA, 33 bp, Homo sapien
atcagagtttaatctgaaaagccactagtatgt

SEQ ID NO: 987638 - DNA, 33 bp, Homo sapien
atcagagtttaatctgcaaagccactagtatgt

SEQ ID NO: 987639 - DNA, 33 bp, Homo sapien
gtgtgtccgtagggcccaaaagcttagtatatg

SEQ ID NO: 987640 - DNA, 33 bp, Homo sapien
gtgtgtccgtagggcctaaaagcttagtatatg

SEQ ID NO: 987641 - DNA, 33 bp, Homo sapien
tatttggtgaattgatgaagggtgtgttctatc

SEQ ID NO: 987642 - DNA, 33 bp, Homo sapien
tatttggtgaattgattaagggtgtgttctatc

SEQ ID NO: 987643 - DNA, 33 bp, Homo sapien
acaaggtgtaacgtgacgtaaatgcagacctat

SEQ ID NO: 987644 - DNA, 33 bp, Homo sapien
acaaggtgtaacgtgatgtaaatgcagacctat

SEQ ID NO: 987645 - DNA, 33 bp, Homo sapien
tttatcacaatgaacaatctgcaggtacttcat

SEQ ID NO: 987646 - DNA, 33 bp, Homo sapien
tttatcacaatgaacagtctgcaggtacttcat

SEQ ID NO: 987647 - DNA, 33 bp, Homo sapien
ccagaagtccctcaccaagatgagaaccataag

SEQ ID NO: 987648 - DNA, 33 bp, Homo sapien
ccagaagtccctcaccgagatgagaaccataag

SEQ ID NO: 987649 - DNA, 33 bp, Homo sapien
tagtcacatggtgccacctaacttcaggaagcc

SEQ ID NO: 987650 - DNA, 33 bp, Homo sapien
tagtcacatggtgccatctaacttcaggaagcc

SEQ ID NO: 987651 - DNA, 33 bp, Homo sapien
agggctatggacttaaagtacccctggatacat

SEQ ID NO: 987652 - DNA, 33 bp, Homo sapien
agggctatggacttaacgtacccctggatacat

SEQ ID NO: 987653 - DNA, 33 bp, Homo sapien
aaaggctatcaactataaaaaatgtaaggaatt

SEQ ID NO: 987654 - DNA, 33 bp, Homo sapien
aaaggctatcaactatgaaaaatgtaaggaatt

SEQ ID NO: 987655 - DNA, 33 bp, Homo sapien
attagttctaaagcagaaggaagacttagagaa

SEQ ID NO: 987656 - DNA, 33 bp, Homo sapien
attagttctaaagcaggaggaagacttagagaa

SEQ ID NO: 987657 - DNA, 33 bp, Homo sapien
ttgaaagggactagaacgataccaaaaaaacaa

SEQ ID NO: 987658 - DNA, 33 bp, Homo sapien
ttgaaagggactagaatgataccaaaaaaacaa

SEQ ID NO: 987659 - DNA, 33 bp, Homo sapien
tcaataatattacaagaaaaaagccccatgcaa

SEQ ID NO: 987660 - DNA, 33 bp, Homo sapien
tcaataatattacaaggaaaaagccccatgcaa

SEQ ID NO: 987661 - DNA, 33 bp, Homo sapien
agcaaacatatgatcacctttttagagaccttt

SEQ ID NO: 987662 - DNA, 33 bp, Homo sapien
agcaaacatatgatcatctttttagagaccttt

SEQ ID NO: 987663 - DNA, 33 bp, Homo sapien
cactgacagtttgcataacatgcctggaacagc

SEQ ID NO: 987664 - DNA, 33 bp, Homo sapien
cactgacagtttgcatgacatgcctggaacagc

SEQ ID NO: 987665 - DNA, 33 bp, Homo sapien
tcagggaacaaatggccatacagattgacaatg

SEQ ID NO: 987666 - DNA, 33 bp, Homo sapien
tcagggaacaaatggctatacagattgacaatg

SEQ ID NO: 987667 - DNA, 33 bp, Homo sapien
tctcaaagtgtccatacccttagcatatttata

SEQ ID NO: 987668 - DNA, 33 bp, Homo sapien
tctcaaagtgtccatatccttagcatatttata

SEQ ID NO: 987669 - DNA, 33 bp, Homo sapien
cgagatttgaggaacccatcttgctgtctttaa

SEQ ID NO: 987670 - DNA, 33 bp, Homo sapien
cgagatttgaggaacctatcttgctgtctttaa

SEQ ID NO: 987671 - DNA, 33 bp, Homo sapien
atggctcatacagggacactcctaggacctgac

SEQ ID NO: 987672 - DNA, 33 bp, Homo sapien
atggctcatacagggatactcctaggacctgac

SEQ ID NO: 987673 - DNA, 33 bp, Homo sapien
tcccctaaacccacacggaaatcctgcagggca

SEQ ID NO: 987674 - DNA, 33 bp, Homo sapien
tcccctaaacccacactgaaatcctgcagggca

SEQ ID NO: 987675 - DNA, 33 bp, Homo sapien
ggtattatcatgtgaacattgtgaatgtgatac

SEQ ID NO: 987676 - DNA, 33 bp, Homo sapien
ggtattatcatgtgaatattgtgaatgtgatac

SEQ ID NO: 987677 - DNA, 33 bp, Homo sapien
tatattcctcacttctaaaacagctgactccta

SEQ ID NO: 987678 - DNA, 33 bp, Homo sapien
tatattcctcacttctcaaacagctgactccta

SEQ ID NO: 987679 - DNA, 33 bp, Homo sapien
tgggttctaactagggccaaaatgagaaatagt

SEQ ID NO: 987680 - DNA, 33 bp, Homo sapien
tgggttctaactagggtcaaaatgagaaatagt

SEQ ID NO: 987681 - DNA, 33 bp, Homo sapien
acaagaatgactttgacgtccactaaggttctg

SEQ ID NO: 987682 - DNA, 33 bp, Homo sapien
acaagaatgactttgatgtccactaaggttctg

SEQ ID NO: 987683 - DNA, 33 bp, Homo sapien
gctgctctgtttgcaagcaattagagatggcag

SEQ ID NO: 987684 - DNA, 33 bp, Homo sapien
gctgctctgtttgcaatcaattagagatggcag

SEQ ID NO: 987685 - DNA, 33 bp, Homo sapien
aaccattcttttccagacatagtacaaggcaaa

SEQ ID NO: 987686 - DNA, 33 bp, Homo sapien
aaccattcttttccaggcatagtacaaggcaaa

SEQ ID NO: 987687 - DNA, 33 bp, Homo sapien
ttattctttgaggacactcatgtttgtttccct

SEQ ID NO: 987688 - DNA, 33 bp, Homo sapien
ttattctttgaggacattcatgtttgtttccct

SEQ ID NO: 987689 - DNA, 33 bp, Homo sapien
caaagatgattctcaacaaaatgttgccacagg

SEQ ID NO: 987690 - DNA, 33 bp, Homo sapien
caaagatgattctcaagaaaatgttgccacagg

SEQ ID NO: 987691 - DNA, 33 bp, Homo sapien
aaatatttgactcttacgatttatgtcagaagt

SEQ ID NO: 987692 - DNA, 33 bp, Homo sapien
aaatatttgactcttatgatttatgtcagaagt

SEQ ID NO: 987693 - DNA, 33 bp, Homo sapien
cagatgggcccggacacagatattatgcattca

SEQ ID NO: 987694 - DNA, 33 bp, Homo sapien
cagatgggcccggacatagatattatgcattca

SEQ ID NO: 987695 - DNA, 33 bp, Homo sapien
aagccctgggatagcacggttaatttgtatcct

SEQ ID NO: 987696 - DNA, 33 bp, Homo sapien
aagccctgggatagcatggttaatttgtatcct

SEQ ID NO: 987697 - DNA, 33 bp, Homo sapien
taattccttgaacagaaactggattatgcactt

SEQ ID NO: 987698 - DNA, 33 bp, Homo sapien
taattccttgaacagagactggattatgcactt

SEQ ID NO: 987699 - DNA, 33 bp, Homo sapien
tgttttcagttgaatgacacagagtaaatgttt

SEQ ID NO: 987700 - DNA, 33 bp, Homo sapien
tgttttcagttgaatggcacagagtaaatgttt

SEQ ID NO: 987701 - DNA, 33 bp, Homo sapien
gctttggccattgaaagctcttttagggccagg

SEQ ID NO: 987702 - DNA, 33 bp, Homo sapien
gctttggccattgaaatctcttttagggccagg

SEQ ID NO: 987703 - DNA, 33 bp, Homo sapien
ctttgccagtaccaatcatctgtattagtctgt

SEQ ID NO: 987704 - DNA, 33 bp, Homo sapien
ctttgccagtaccaattatctgtattagtctgt

SEQ ID NO: 987705 - DNA, 33 bp, Homo sapien
tttaacatggagaagacaatattttgtgagttt

SEQ ID NO: 987706 - DNA, 33 bp, Homo sapien
tttaacatggagaagagaatattttgtgagttt

SEQ ID NO: 987707 - DNA, 33 bp, Homo sapien
tgggatttgccatcataagagggctgtgatgtc

SEQ ID NO: 987708 - DNA, 33 bp, Homo sapien
tgggatttgccatcatgagagggctgtgatgtc

SEQ ID NO: 987709 - DNA, 33 bp, Homo sapien
ttaatgttctataaccaggagatatgaatttag

SEQ ID NO: 987710 - DNA, 33 bp, Homo sapien
ttaatgttctataacctggagatatgaatttag

SEQ ID NO: 987711 - DNA, 33 bp, Homo sapien
acttacatagataaaactgaactctactcaaaa

SEQ ID NO: 987712 - DNA, 33 bp, Homo sapien
acttacatagataaaagtgaactctactcaaaa

SEQ ID NO: 987713 - DNA, 33 bp, Homo sapien
ttcctggcatgaaagcacagaatgatgaatgaa

SEQ ID NO: 987714 - DNA, 33 bp, Homo sapien
ttcctggcatgaaagcccagaatgatgaatgaa

SEQ ID NO: 987715 - DNA, 33 bp, Homo sapien
ttaacatacatacctcacaaacatccgccaagt

SEQ ID NO: 987716 - DNA, 33 bp, Homo sapien
ttaacatacatacctcgcaaacatccgccaagt

SEQ ID NO: 987717 - DNA, 33 bp, Homo sapien
gtctttgctactgtgaatatttctgtgattaat

SEQ ID NO: 987718 - DNA, 33 bp, Homo sapien
gtctttgctactgtgagtatttctgtgattaat

SEQ ID NO: 987719 - DNA, 33 bp, Homo sapien
tggagctggggagaaaactaagctcctgtctgg

SEQ ID NO: 987720 - DNA, 33 bp, Homo sapien
tggagctggggagaaagctaagctcctgtctgg

SEQ ID NO: 987721 - DNA, 33 bp, Homo sapien
gaagaaatgaggacagactgggttctattctca

SEQ ID NO: 987722 - DNA, 33 bp, Homo sapien
gaagaaatgaggacaggctgggttctattctca

SEQ ID NO: 987723 - DNA, 33 bp, Homo sapien
aaccaattgtggataaccaatgtaggatgatat

SEQ ID NO: 987724 - DNA, 33 bp, Homo sapien
aaccaattgtggataagcaatgtaggatgatat

SEQ ID NO: 987725 - DNA, 33 bp, Homo sapien
agttagaccatgtgtaaaacctcaaattctcta

SEQ ID NO: 987726 - DNA, 33 bp, Homo sapien
agttagaccatgtgtacaacctcaaattctcta

SEQ ID NO: 987727 - DNA, 33 bp, Homo sapien
cagaacactgagaatacggacatgaataaaata

SEQ ID NO: 987728 - DNA, 33 bp, Homo sapien
cagaacactgagaatatggacatgaataaaata

SEQ ID NO: 987729 - DNA, 33 bp, Homo sapien
ggaaaagtaaatcagaactcatctgccctgcat

SEQ ID NO: 987730 - DNA, 33 bp, Homo sapien
ggaaaagtaaatcagacctcatctgccctgcat

SEQ ID NO: 987731 - DNA, 33 bp, Homo sapien
tcaagaaattacaaaccggttcctaatcgaatt

SEQ ID NO: 987732 - DNA, 33 bp, Homo sapien
tcaagaaattacaaactggttcctaatcgaatt

SEQ ID NO: 987733 - DNA, 33 bp, Homo sapien
cctgttcatttttacagacttacttgtcatata

SEQ ID NO: 987734 - DNA, 33 bp, Homo sapien
cctgttcatttttacatacttacttgtcatata

SEQ ID NO: 987735 - DNA, 33 bp, Homo sapien
ttcagggctaattatacgttcaaagaatacttt

SEQ ID NO: 987736 - DNA, 33 bp, Homo sapien
ttcagggctaattatatgttcaaagaatacttt

SEQ ID NO: 987737 - DNA, 33 bp, Homo sapien
caggggtgagaacaaaaccttgtataactgttt

SEQ ID NO: 987738 - DNA, 33 bp, Homo sapien
caggggtgagaacaaagccttgtataactgttt

SEQ ID NO: 987739 - DNA, 33 bp, Homo sapien
accgaaaagattcctcaaatgtaaggttgatat

SEQ ID NO: 987740 - DNA, 33 bp, Homo sapien
accgaaaagattcctcgaatgtaaggttgatat

SEQ ID NO: 987741 - DNA, 33 bp, Homo sapien
atattaagtaaattaaatgaccacatctcttca

SEQ ID NO: 987742 - DNA, 33 bp, Homo sapien
atattaagtaaattaactgaccacatctcttca

SEQ ID NO: 987743 - DNA, 33 bp, Homo sapien
atacaagacagaatacccagttgaaactctcct

SEQ ID NO: 987744 - DNA, 33 bp, Homo sapien
atacaagacagaatactcagttgaaactctcct

SEQ ID NO: 987745 - DNA, 33 bp, Homo sapien
tagagaacagttaattcaactcacccaccatct

SEQ ID NO: 987746 - DNA, 33 bp, Homo sapien
tagagaacagttaattgaactcacccaccatct

SEQ ID NO: 987747 - DNA, 33 bp, Homo sapien
aattctctagtcaaatcagttgtgatctgataa

SEQ ID NO: 987748 - DNA, 33 bp, Homo sapien
aattctctagtcaaattagttgtgatctgataa

SEQ ID NO: 987749 - DNA, 33 bp, Homo sapien
acaaacatggtaagaaataagggtcagactatc

SEQ ID NO: 987750 - DNA, 33 bp, Homo sapien
acaaacatggtaagaagtaagggtcagactatc

SEQ ID NO: 987751 - DNA, 33 bp, Homo sapien
tacaaacgaagggtcaactggaagcaatgaaaa

SEQ ID NO: 987752 - DNA, 33 bp, Homo sapien
tacaaacgaagggtcagctggaagcaatgaaaa

SEQ ID NO: 987753 - DNA, 33 bp, Homo sapien
ctgatcattgagggtaagcaactgcaaagaaca

SEQ ID NO: 987754 - DNA, 33 bp, Homo sapien
ctgatcattgagggtatgcaactgcaaagaaca

SEQ ID NO: 987755 - DNA, 33 bp, Homo sapien
ttagtctctgagctccaatgggtgacaccactt

SEQ ID NO: 987756 - DNA, 33 bp, Homo sapien
ttagtctctgagctccgatgggtgacaccactt

SEQ ID NO: 987757 - DNA, 33 bp, Homo sapien
tgcactccaaatatcaatatatgaatctggtac

SEQ ID NO: 987758 - DNA, 33 bp, Homo sapien
tgcactccaaatatcagtatatgaatctggtac

SEQ ID NO: 987759 - DNA, 33 bp, Homo sapien
ctagggtgtccttttaagctgcaaagttcctgc

SEQ ID NO: 987760 - DNA, 33 bp, Homo sapien
ctagggtgtccttttacgctgcaaagttcctgc

SEQ ID NO: 987761 - DNA, 33 bp, Homo sapien
ctgccttgagatctgaactgttgagggtacata

SEQ ID NO: 987762 - DNA, 33 bp, Homo sapien
ctgccttgagatctgagctgttgagggtacata

SEQ ID NO: 987763 - DNA, 33 bp, Homo sapien
gtaaaatgagatttacaatggctcccttacaca

SEQ ID NO: 987764 - DNA, 33 bp, Homo sapien
gtaaaatgagatttacgatggctcccttacaca

SEQ ID NO: 987765 - DNA, 33 bp, Homo sapien
gtactctagattctctcaaaaatcccatggttc

SEQ ID NO: 987766 - DNA, 33 bp, Homo sapien
gtactctagattctctgaaaaatcccatggttc

SEQ ID NO: 987767 - DNA, 33 bp, Homo sapien
agctgtttctgtttcaggcaattcaaaccatta

SEQ ID NO: 987768 - DNA, 33 bp, Homo sapien
agctgtttctgtttcatgcaattcaaaccatta

SEQ ID NO: 987769 - DNA, 33 bp, Homo sapien
tggaattaggtatggaaggagagtgtaatatca

SEQ ID NO: 987770 - DNA, 33 bp, Homo sapien
tggaattaggtatggagggagagtgtaatatca

SEQ ID NO: 987771 - DNA, 33 bp, Homo sapien
gctggacatggagggaacaacgaaatggatatg

SEQ ID NO: 987772 - DNA, 33 bp, Homo sapien
gctggacatggagggagcaacgaaatggatatg

SEQ ID NO: 987773 - DNA, 33 bp, Homo sapien
aattttttaacgggaaaatgagtgataaaatag

SEQ ID NO: 987774 - DNA, 33 bp, Homo sapien
aattttttaacgggaacatgagtgataaaatag

SEQ ID NO: 987775 - DNA, 33 bp, Homo sapien
aaagatggtagtggagcagttgcctcttctggt

SEQ ID NO: 987776 - DNA, 33 bp, Homo sapien
aaagatggtagtggagtagttgcctcttctggt

SEQ ID NO: 987777 - DNA, 33 bp, Homo sapien
gtggtctagacataaaattcaaggctcagattt

SEQ ID NO: 987778 - DNA, 33 bp, Homo sapien
gtggtctagacataaagttcaaggctcagattt

SEQ ID NO: 987779 - DNA, 33 bp, Homo sapien
agcatggtttttgcaaatatttcttctgctcca

SEQ ID NO: 987780 - DNA, 33 bp, Homo sapien
agcatggtttttgcaagtatttcttctgctcca

SEQ ID NO: 987781 - DNA, 33 bp, Homo sapien
aacaccaagcaggattaaaaaaaaagacagaca

SEQ ID NO: 987782 - DNA, 33 bp, Homo sapien
aacaccaagcaggatttaaaaaaaagacagaca

SEQ ID NO: 987783 - DNA, 33 bp, Homo sapien
tcgaatgagatacgacaaggaaatttctcacaa

SEQ ID NO: 987784 - DNA, 33 bp, Homo sapien
tcgaatgagatacgaccaggaaatttctcacaa

SEQ ID NO: 987785 - DNA, 33 bp, Homo sapien
atgttcaacatatgatcaatcaagacctgggtt

SEQ ID NO: 987786 - DNA, 33 bp, Homo sapien
atgttcaacatatgatgaatcaagacctgggtt

SEQ ID NO: 987787 - DNA, 33 bp, Homo sapien
tgcaatcaccctcagcagattcaatattttcac

SEQ ID NO: 987788 - DNA, 33 bp, Homo sapien
tgcaatcaccctcagcggattcaatattttcac

SEQ ID NO: 987789 - DNA, 33 bp, Homo sapien
agtaggataatctaggccaaattttctgaatga

SEQ ID NO: 987790 - DNA, 33 bp, Homo sapien
agtaggataatctaggtcaaattttctgaatga

SEQ ID NO: 987791 - DNA, 33 bp, Homo sapien
tgactcttcctccaaaatagctttcaagagatt

SEQ ID NO: 987792 - DNA, 33 bp, Homo sapien
tgactcttcctccaaagtagctttcaagagatt

SEQ ID NO: 987793 - DNA, 33 bp, Homo sapien
gtaaaccttttgagccactgttcctcccatata

SEQ ID NO: 987794 - DNA, 33 bp, Homo sapien
gtaaaccttttgagccgctgttcctcccatata

SEQ ID NO: 987795 - DNA, 33 bp, Homo sapien
ccaggctatgaataagccctgtgtgatcataga

SEQ ID NO: 987796 - DNA, 33 bp, Homo sapien
ccaggctatgaataagtcctgtgtgatcataga

SEQ ID NO: 987797 - DNA, 33 bp, Homo sapien
gtgatccagtaagcaacattttaaggagcaaac

SEQ ID NO: 987798 - DNA, 33 bp, Homo sapien
gtgatccagtaagcaagattttaaggagcaaac

SEQ ID NO: 987799 - DNA, 33 bp, Homo sapien
ataaatggagctaacactatagatttaaattga

SEQ ID NO: 987800 - DNA, 33 bp, Homo sapien
ataaatggagctaacattatagatttaaattga

SEQ ID NO: 987801 - DNA, 33 bp, Homo sapien
gacattgaaccatagaagaacattcctctattt

SEQ ID NO: 987802 - DNA, 33 bp, Homo sapien
gacattgaaccatagatgaacattcctctattt

SEQ ID NO: 987803 - DNA, 33 bp, Homo sapien
atatgctcctctgtacaatgcagccaacatcat

SEQ ID NO: 987804 - DNA, 33 bp, Homo sapien
atatgctcctctgtaccatgcagccaacatcat

SEQ ID NO: 987805 - DNA, 33 bp, Homo sapien
ggagtggaaacacaaaatttaaggcactttttc

SEQ ID NO: 987806 - DNA, 33 bp, Homo sapien
ggagtggaaacacaaagtttaaggcactttttc

SEQ ID NO: 987807 - DNA, 33 bp, Homo sapien
atgggtaccattcataaaacattccttgaggcc

SEQ ID NO: 987808 - DNA, 33 bp, Homo sapien
atgggtaccattcatagaacattccttgaggcc

SEQ ID NO: 987809 - DNA, 33 bp, Homo sapien
acacctgggaaaataaaatggtgcatggagata

SEQ ID NO: 987810 - DNA, 33 bp, Homo sapien
acacctgggaaaataagatggtgcatggagata

SEQ ID NO: 987811 - DNA, 33 bp, Homo sapien
cataatctatgtgaaggctgtttcaaaggttaa

SEQ ID NO: 987812 - DNA, 33 bp, Homo sapien
cataatctatgtgaagtctgtttcaaaggttaa

SEQ ID NO: 987813 - DNA, 33 bp, Homo sapien
aaggtcacctggagagaagcagtagctgtaggt

SEQ ID NO: 987814 - DNA, 33 bp, Homo sapien
aaggtcacctggagaggagcagtagctgtaggt

SEQ ID NO: 987815 - DNA, 33 bp, Homo sapien
aaatcagaatgatagaaataatctctgtgttgg

SEQ ID NO: 987816 - DNA, 33 bp, Homo sapien
aaatcagaatgatagacataatctctgtgttgg

SEQ ID NO: 987817 - DNA, 33 bp, Homo sapien
ttagatctggttgacactcattctataaaagca

SEQ ID NO: 987818 - DNA, 33 bp, Homo sapien
ttagatctggttgacattcattctataaaagca

SEQ ID NO: 987819 - DNA, 33 bp, Homo sapien
agaagaatggggagcaaagtaaatgcatatcaa

SEQ ID NO: 987820 - DNA, 33 bp, Homo sapien
agaagaatggggagcagagtaaatgcatatcaa

SEQ ID NO: 987821 - DNA, 33 bp, Homo sapien
atggtaatgtaactaacacctgtgaatctatca

SEQ ID NO: 987822 - DNA, 33 bp, Homo sapien
atggtaatgtaactaatacctgtgaatctatca

SEQ ID NO: 987823 - DNA, 33 bp, Homo sapien
ctatgccaaaggagcaaacaaatccttgtctaa

SEQ ID NO: 987824 - DNA, 33 bp, Homo sapien
ctatgccaaaggagcacacaaatccttgtctaa

SEQ ID NO: 987825 - DNA, 33 bp, Homo sapien
tgtagacactaagaaacaatagcaggaagccag

SEQ ID NO: 987826 - DNA, 33 bp, Homo sapien
tgtagacactaagaaataatagcaggaagccag

SEQ ID NO: 987827 - DNA, 33 bp, Homo sapien
atcttaagattgtttcgagctctatatgccctg

SEQ ID NO: 987828 - DNA, 33 bp, Homo sapien
atcttaagattgtttctagctctatatgccctg

SEQ ID NO: 987829 - DNA, 33 bp, Homo sapien
ataaaactgcaattctcaccaactgccatgagg

SEQ ID NO: 987830 - DNA, 33 bp, Homo sapien
ataaaactgcaattcttaccaactgccatgagg

SEQ ID NO: 987831 - DNA, 33 bp, Homo sapien
aagtatgaggccttcacgtatggaaaaaactcc

SEQ ID NO: 987832 - DNA, 33 bp, Homo sapien
aagtatgaggccttcatgtatggaaaaaactcc

SEQ ID NO: 987833 - DNA, 33 bp, Homo sapien
caatccattcatgtatcaaaattgcaaatgtac

SEQ ID NO: 987834 - DNA, 33 bp, Homo sapien
caatccattcatgtattaaaattgcaaatgtac

SEQ ID NO: 987835 - DNA, 33 bp, Homo sapien
atacaaattatttcccaaaatcctgcttttaaa

SEQ ID NO: 987836 - DNA, 33 bp, Homo sapien
atacaaattatttccccaaatcctgcttttaaa

SEQ ID NO: 987837 - DNA, 33 bp, Homo sapien
gcctattaaattgtcacctcaagtactcagcag

SEQ ID NO: 987838 - DNA, 33 bp, Homo sapien
gcctattaaattgtcagctcaagtactcagcag

SEQ ID NO: 987839 - DNA, 33 bp, Homo sapien
agccatcaagagccaacgtcctgagtcaggaag

SEQ ID NO: 987840 - DNA, 33 bp, Homo sapien
agccatcaagagccaaggtcctgagtcaggaag

SEQ ID NO: 987841 - DNA, 33 bp, Homo sapien
cagttcttggaagcatcagtttaggtctcttgt

SEQ ID NO: 987842 - DNA, 33 bp, Homo sapien
cagttcttggaagcatgagtttaggtctcttgt

SEQ ID NO: 987843 - DNA, 33 bp, Homo sapien
actgtgtggtcaaatcacatgcaagagcagtag

SEQ ID NO: 987844 - DNA, 33 bp, Homo sapien
actgtgtggtcaaatcgcatgcaagagcagtag

SEQ ID NO: 987845 - DNA, 33 bp, Homo sapien
tgatatctctttttaccatcacccttccctctc

SEQ ID NO: 987846 - DNA, 33 bp, Homo sapien
tgatatctctttttactatcacccttccctctc

SEQ ID NO: 987847 - DNA, 33 bp, Homo sapien
tttagtagtcaaatgaagattccacaacatgta

SEQ ID NO: 987848 - DNA, 33 bp, Homo sapien
tttagtagtcaaatgaggattccacaacatgta

SEQ ID NO: 987849 - DNA, 33 bp, Homo sapien
aattgatctgataacacctactggagtgggctt

SEQ ID NO: 987850 - DNA, 33 bp, Homo sapien
aattgatctgataacatctactggagtgggctt

SEQ ID NO: 987851 - DNA, 33 bp, Homo sapien
gatgaagagagtaacacagatatgattaggaag

SEQ ID NO: 987852 - DNA, 33 bp, Homo sapien
gatgaagagagtaacagagatatgattaggaag

SEQ ID NO: 987853 - DNA, 33 bp, Homo sapien
ttaatccgagtgagacagaacattgcatctcca

SEQ ID NO: 987854 - DNA, 33 bp, Homo sapien
ttaatccgagtgagacggaacattgcatctcca

SEQ ID NO: 987855 - DNA, 33 bp, Homo sapien
tctgtaataactgtctaaaagttgaattagagg

SEQ ID NO: 987856 - DNA, 33 bp, Homo sapien
tctgtaataactgtctgaaagttgaattagagg

SEQ ID NO: 987857 - DNA, 33 bp, Homo sapien
tcctcctgcacatgtaaactgtattctggactt

SEQ ID NO: 987858 - DNA, 33 bp, Homo sapien
tcctcctgcacatgtacactgtattctggactt

SEQ ID NO: 987859 - DNA, 33 bp, Homo sapien
ataatacaaagtcatgccaaatatattatactg

SEQ ID NO: 987860 - DNA, 33 bp, Homo sapien
ataatacaaagtcatgtcaaatatattatactg

SEQ ID NO: 987861 - DNA, 33 bp, Homo sapien
tgcagggagagaaaaaggagtatcattacgtat

SEQ ID NO: 987862 - DNA, 33 bp, Homo sapien
tgcagggagagaaaaatgagtatcattacgtat

SEQ ID NO: 987863 - DNA, 33 bp, Homo sapien
gttattgggtcaataacataccatgtgtgaaaa

SEQ ID NO: 987864 - DNA, 33 bp, Homo sapien
gttattgggtcaataatataccatgtgtgaaaa

SEQ ID NO: 987865 - DNA, 33 bp, Homo sapien
cttttagaatcccagaaaaaggacttgaggtcc

SEQ ID NO: 987866 - DNA, 33 bp, Homo sapien
cttttagaatcccagacaaaggacttgaggtcc

SEQ ID NO: 987867 - DNA, 33 bp, Homo sapien
ctaaattttggctccacgtaccagcaaccactc

SEQ ID NO: 987868 - DNA, 33 bp, Homo sapien
ctaaattttggctccatgtaccagcaaccactc

SEQ ID NO: 987869 - DNA, 33 bp, Homo sapien
gttcaacacgttcttccacgcggctgtgatgag

SEQ ID NO: 987870 - DNA, 33 bp, Homo sapien
gttcaacacgttcttctacgcggctgtgatgag

SEQ ID NO: 987871 - DNA, 33 bp, Homo sapien
aaaaggagcatactaccctcagagcctccagaa

SEQ ID NO: 987872 - DNA, 33 bp, Homo sapien
aaaaggagcatactacgctcagagcctccagaa

SEQ ID NO: 987873 - DNA, 33 bp, Homo sapien
cactaatctcctcagaaaaagacccggaaaggg

SEQ ID NO: 987874 - DNA, 33 bp, Homo sapien
cactaatctcctcagacaaagacccggaaaggg

SEQ ID NO: 987875 - DNA, 33 bp, Homo sapien
aggagggagaagataccggaatttagaaacagt

SEQ ID NO: 987876 - DNA, 33 bp, Homo sapien
aggagggagaagatactggaatttagaaacagt

SEQ ID NO: 987877 - DNA, 33 bp, Homo sapien
tccagcactggaaactaagttgacctgaggctg

SEQ ID NO: 987878 - DNA, 33 bp, Homo sapien
tccagcactggaaactgagttgacctgaggctg

SEQ ID NO: 987879 - DNA, 33 bp, Homo sapien
atactgccgaggtagaatacagtgaactttttt

SEQ ID NO: 987880 - DNA, 33 bp, Homo sapien
atactgccgaggtagactacagtgaactttttt

SEQ ID NO: 987881 - DNA, 33 bp, Homo sapien
agcatatcctggagcaatagtaacttccaaata

SEQ ID NO: 987882 - DNA, 33 bp, Homo sapien
agcatatcctggagcagtagtaacttccaaata

SEQ ID NO: 987883 - DNA, 33 bp, Homo sapien
acttcctggaagaagcaacttccaaacttggat

SEQ ID NO: 987884 - DNA, 33 bp, Homo sapien
acttcctggaagaagcgacttccaaacttggat

SEQ ID NO: 987885 - DNA, 33 bp, Homo sapien
cagcagaagaacttacgattctccaggaacacg

SEQ ID NO: 987886 - DNA, 33 bp, Homo sapien
cagcagaagaacttactattctccaggaacacg

SEQ ID NO: 987887 - DNA, 33 bp, Homo sapien
ctcagtaaaacacctcaaggtatgcctgtgtta

SEQ ID NO: 987888 - DNA, 33 bp, Homo sapien
ctcagtaaaacacctcgaggtatgcctgtgtta

SEQ ID NO: 987889 - DNA, 33 bp, Homo sapien
acaggaaaaatatggccaagagatttcaaaatt

SEQ ID NO: 987890 - DNA, 33 bp, Homo sapien
acaggaaaaatatggctaagagatttcaaaatt

SEQ ID NO: 987891 - DNA, 33 bp, Homo sapien
aatagctgacaccgaccctaaaatggaaagctc

SEQ ID NO: 987892 - DNA, 33 bp, Homo sapien
aatagctgacaccgacgctaaaatggaaagctc

SEQ ID NO: 987893 - DNA, 33 bp, Homo sapien
gtataaaatagccaaaggcacctcaatttgaaa

SEQ ID NO: 987894 - DNA, 33 bp, Homo sapien
gtataaaatagccaaatgcacctcaatttgaaa

SEQ ID NO: 987895 - DNA, 33 bp, Homo sapien
atgtgctggtggggaacggagagaactgtactg

SEQ ID NO: 987896 - DNA, 33 bp, Homo sapien
atgtgctggtggggaatggagagaactgtactg

SEQ ID NO: 987897 - DNA, 33 bp, Homo sapien
ggaactaaacattgtcacatcttgaaattttcc

SEQ ID NO: 987898 - DNA, 33 bp, Homo sapien
ggaactaaacattgtcgcatcttgaaattttcc

SEQ ID NO: 987899 - DNA, 33 bp, Homo sapien
aaacccagaatgatacactctacaaagtcttga

SEQ ID NO: 987900 - DNA, 33 bp, Homo sapien
aaacccagaatgatacgctctacaaagtcttga

SEQ ID NO: 987901 - DNA, 33 bp, Homo sapien
gtttttttctccttcacgtgggcataaggaaac

SEQ ID NO: 987902 - DNA, 33 bp, Homo sapien
gtttttttctccttcaggtgggcataaggaaac

SEQ ID NO: 987903 - DNA, 33 bp, Homo sapien
gtcagccttttcccaaattatccagccttccag

SEQ ID NO: 987904 - DNA, 33 bp, Homo sapien
gtcagccttttcccaagttatccagccttccag

SEQ ID NO: 987905 - DNA, 33 bp, Homo sapien
aaaaggacgttagttacacttttattaggctgt

SEQ ID NO: 987906 - DNA, 33 bp, Homo sapien
aaaaggacgttagttatacttttattaggctgt

SEQ ID NO: 987907 - DNA, 33 bp, Homo sapien
ggatactggacccttaccagatgtatttgcaaa

SEQ ID NO: 987908 - DNA, 33 bp, Homo sapien
ggatactggacccttatcagatgtatttgcaaa

SEQ ID NO: 987909 - DNA, 33 bp, Homo sapien
aagtaggaatcaggagccatttccagaactggg

SEQ ID NO: 987910 - DNA, 33 bp, Homo sapien
aagtaggaatcaggaggcatttccagaactggg

SEQ ID NO: 987911 - DNA, 33 bp, Homo sapien
ctcaagagacacttaaagacaaccttccagaag

SEQ ID NO: 987912 - DNA, 33 bp, Homo sapien
ctcaagagacacttaacgacaaccttccagaag

SEQ ID NO: 987913 - DNA, 33 bp, Homo sapien
agcttaccacaccactaaagtgaaatcaccaga

SEQ ID NO: 987914 - DNA, 33 bp, Homo sapien
agcttaccacaccactgaagtgaaatcaccaga

SEQ ID NO: 987915 - DNA, 33 bp, Homo sapien
gttattaataacaacacgggcttaaggccatca

SEQ ID NO: 987916 - DNA, 33 bp, Homo sapien
gttattaataacaacatgggcttaaggccatca

SEQ ID NO: 987917 - DNA, 33 bp, Homo sapien
gaataatttattgcaaagaacttggttatagcc

SEQ ID NO: 987918 - DNA, 33 bp, Homo sapien
gaataatttattgcaaggaacttggttatagcc

SEQ ID NO: 987919 - DNA, 33 bp, Homo sapien
atttattttttcagtaggaatgattggcatctg

SEQ ID NO: 987920 - DNA, 33 bp, Homo sapien
atttattttttcagtatgaatgattggcatctg

SEQ ID NO: 987921 - DNA, 33 bp, Homo sapien
taatgggattattcaaagctgcaatgtgtagga

SEQ ID NO: 987922 - DNA, 33 bp, Homo sapien
taatgggattattcaaggctgcaatgtgtagga

SEQ ID NO: 987923 - DNA, 33 bp, Homo sapien
ttataatagaattataaacagagtgctataggt

SEQ ID NO: 987924 - DNA, 33 bp, Homo sapien
ttataatagaattatacacagagtgctataggt

SEQ ID NO: 987925 - DNA, 33 bp, Homo sapien
actccattatttgataatatactccaggtcacc

SEQ ID NO: 987926 - DNA, 33 bp, Homo sapien
actccattatttgatactatactccaggtcacc

SEQ ID NO: 987927 - DNA, 33 bp, Homo sapien
tgctgtagttttctacgctacgtaaaagacacc

SEQ ID NO: 987928 - DNA, 33 bp, Homo sapien
tgctgtagttttctactctacgtaaaagacacc

SEQ ID NO: 987929 - DNA, 33 bp, Homo sapien
gctggtttaagtttcaaattagccaaatggatt

SEQ ID NO: 987930 - DNA, 33 bp, Homo sapien
gctggtttaagtttcacattagccaaatggatt

SEQ ID NO: 987931 - DNA, 33 bp, Homo sapien
tggtaactagggttggcactttggacaaatcct

SEQ ID NO: 987932 - DNA, 33 bp, Homo sapien
tggtaactagggttggtactttggacaaatcct

SEQ ID NO: 987933 - DNA, 33 bp, Homo sapien
acttttggggataaaaaagtagagacagaagct

SEQ ID NO: 987934 - DNA, 33 bp, Homo sapien
acttttggggataaaagagtagagacagaagct

SEQ ID NO: 987935 - DNA, 33 bp, Homo sapien
ttggttggtagactatgaattattgcctcaatt

SEQ ID NO: 987936 - DNA, 33 bp, Homo sapien
ttggttggtagactattaattattgcctcaatt

SEQ ID NO: 987937 - DNA, 33 bp, Homo sapien
aaaagggaacaaactacgccactaccttatcag

SEQ ID NO: 987938 - DNA, 33 bp, Homo sapien
aaaagggaacaaactatgccactaccttatcag

SEQ ID NO: 987939 - DNA, 33 bp, Homo sapien
tctctccagctagactcagaagcactgttgtaa

SEQ ID NO: 987940 - DNA, 33 bp, Homo sapien
tctctccagctagacttagaagcactgttgtaa

SEQ ID NO: 987941 - DNA, 33 bp, Homo sapien
ccacacaattcaacagaccttttatgtttggag

SEQ ID NO: 987942 - DNA, 33 bp, Homo sapien
ccacacaattcaacaggccttttatgtttggag

SEQ ID NO: 987943 - DNA, 33 bp, Homo sapien
gtgtcaatggtggaaacgttgcagtatagaggt

SEQ ID NO: 987944 - DNA, 33 bp, Homo sapien
gtgtcaatggtggaaatgttgcagtatagaggt

SEQ ID NO: 987945 - DNA, 33 bp, Homo sapien
caaataggcccagcagcaatccatgttaaggtt

SEQ ID NO: 987946 - DNA, 33 bp, Homo sapien
caaataggcccagcaggaatccatgttaaggtt

SEQ ID NO: 987947 - DNA, 33 bp, Homo sapien
ctccatatccttgccacatttgtgttgtcagtt

SEQ ID NO: 987948 - DNA, 33 bp, Homo sapien
ctccatatccttgccatatttgtgttgtcagtt

SEQ ID NO: 987949 - DNA, 33 bp, Homo sapien
atgttaaagcacctaaatcagtgtttactatat

SEQ ID NO: 987950 - DNA, 33 bp, Homo sapien
atgttaaagcacctaagtcagtgtttactatat

SEQ ID NO: 987951 - DNA, 33 bp, Homo sapien
tgtccttcattctatacggtccagtcatcttca

SEQ ID NO: 987952 - DNA, 33 bp, Homo sapien
tgtccttcattctatatggtccagtcatcttca

SEQ ID NO: 987953 - DNA, 33 bp, Homo sapien
gaaataacctcaaaaaatctctcctttctcttc

SEQ ID NO: 987954 - DNA, 33 bp, Homo sapien
gaaataacctcaaaaagtctctcctttctcttc

SEQ ID NO: 987955 - DNA, 33 bp, Homo sapien
atcatacatctttaaagacatagagtgagtacc

SEQ ID NO: 987956 - DNA, 33 bp, Homo sapien
atcatacatctttaaatacatagagtgagtacc

SEQ ID NO: 987957 - DNA, 33 bp, Homo sapien
cttaacaattgggataagcataaatgaaattgg

SEQ ID NO: 987958 - DNA, 33 bp, Homo sapien
cttaacaattgggataggcataaatgaaattgg

SEQ ID NO: 987959 - DNA, 33 bp, Homo sapien
tagactttcacatcgaagtttctctagggattg

SEQ ID NO: 987960 - DNA, 33 bp, Homo sapien
tagactttcacatcgaggtttctctagggattg

SEQ ID NO: 987961 - DNA, 33 bp, Homo sapien
tcacttggtagaattacaaacatcaaaactaga

SEQ ID NO: 987962 - DNA, 33 bp, Homo sapien
tcacttggtagaattataaacatcaaaactaga

SEQ ID NO: 987963 - DNA, 33 bp, Homo sapien
actcaaaaaataattaagtcatctcttcataaa

SEQ ID NO: 987964 - DNA, 33 bp, Homo sapien
actcaaaaaataattatgtcatctcttcataaa

SEQ ID NO: 987965 - DNA, 33 bp, Homo sapien
cccttctccttccacacactcacagtaatttgg

SEQ ID NO: 987966 - DNA, 33 bp, Homo sapien
cccttctccttccacatactcacagtaatttgg

SEQ ID NO: 987967 - DNA, 33 bp, Homo sapien
atcctgatttatattcaatgagagttataaaag

SEQ ID NO: 987968 - DNA, 33 bp, Homo sapien
atcctgatttatattcgatgagagttataaaag

SEQ ID NO: 987969 - DNA, 33 bp, Homo sapien
aattaagaagctatagcagcaacccaggataaa

SEQ ID NO: 987970 - DNA, 33 bp, Homo sapien
aattaagaagctatagtagcaacccaggataaa

SEQ ID NO: 987971 - DNA, 33 bp, Homo sapien
gtataaagcatagaacaaagattactcttatta

SEQ ID NO: 987972 - DNA, 33 bp, Homo sapien
gtataaagcatagaacgaagattactcttatta

SEQ ID NO: 987973 - DNA, 33 bp, Homo sapien
gaattatgactcataaaatcaatttctgtccac

SEQ ID NO: 987974 - DNA, 33 bp, Homo sapien
gaattatgactcataagatcaatttctgtccac

SEQ ID NO: 987975 - DNA, 33 bp, Homo sapien
atgctttggctgcttacatgtggtgttaggcct

SEQ ID NO: 987976 - DNA, 33 bp, Homo sapien
atgctttggctgcttatatgtggtgttaggcct

SEQ ID NO: 987977 - DNA, 33 bp, Homo sapien
accttaacatattatcaactggacacagtggct

SEQ ID NO: 987978 - DNA, 33 bp, Homo sapien
accttaacatattatcgactggacacagtggct

SEQ ID NO: 987979 - DNA, 33 bp, Homo sapien
tcctagcaaattgctaacttgaatgacttttta

SEQ ID NO: 987980 - DNA, 33 bp, Homo sapien
tcctagcaaattgctagcttgaatgacttttta

SEQ ID NO: 987981 - DNA, 33 bp, Homo sapien
ggccaggcctaagtgacgtccagttatatggct

SEQ ID NO: 987982 - DNA, 33 bp, Homo sapien
ggccaggcctaagtgatgtccagttatatggct

SEQ ID NO: 987983 - DNA, 33 bp, Homo sapien
caagcatgaatagactcagatagaacaaggaga

SEQ ID NO: 987984 - DNA, 33 bp, Homo sapien
caagcatgaatagactgagatagaacaaggaga

SEQ ID NO: 987985 - DNA, 33 bp, Homo sapien
gtggtttcaggctgccaagagaattatctagaa

SEQ ID NO: 987986 - DNA, 33 bp, Homo sapien
gtggtttcaggctgccgagagaattatctagaa

SEQ ID NO: 987987 - DNA, 33 bp, Homo sapien
ctctcaccgggcatccactttcaagaaatgatt

SEQ ID NO: 987988 - DNA, 33 bp, Homo sapien
ctctcaccgggcatccgctttcaagaaatgatt

SEQ ID NO: 987989 - DNA, 33 bp, Homo sapien
acaaagaaatcttggcagaagaaagccttgaag

SEQ ID NO: 987990 - DNA, 33 bp, Homo sapien
acaaagaaatcttggcggaagaaagccttgaag

SEQ ID NO: 987991 - DNA, 33 bp, Homo sapien
atccaggcttctaaaacgtaatcagtcggggat

SEQ ID NO: 987992 - DNA, 33 bp, Homo sapien
atccaggcttctaaaatgtaatcagtcggggat

SEQ ID NO: 987993 - DNA, 33 bp, Homo sapien
gttactagaatgttccaaaatttgcaaatattt

SEQ ID NO: 987994 - DNA, 33 bp, Homo sapien
gttactagaatgttccgaaatttgcaaatattt

SEQ ID NO: 987995 - DNA, 33 bp, Homo sapien
taaacctagaaaagaaagtgcttttattagtca

SEQ ID NO: 987996 - DNA, 33 bp, Homo sapien
taaacctagaaaagaacgtgcttttattagtca

SEQ ID NO: 987997 - DNA, 33 bp, Homo sapien
ccacctgtactaattagaacccacatttaaaat

SEQ ID NO: 987998 - DNA, 33 bp, Homo sapien
ccacctgtactaattataacccacatttaaaat

SEQ ID NO: 987999 - DNA, 33 bp, Homo sapien
agacttgggctctagacagtggccagataaaaa

SEQ ID NO: 988000 - DNA, 33 bp, Homo sapien
agacttgggctctagatagtggccagataaaaa

SEQ ID NO: 988001 - DNA, 33 bp, Homo sapien
ttgtgttggaaatggaggttacagtagatttta

SEQ ID NO: 988002 - DNA, 33 bp, Homo sapien
ttgtgttggaaatggatgttacagtagatttta

SEQ ID NO: 988003 - DNA, 33 bp, Homo sapien
cttcttgacagtccaaatcactggttctcccaa

SEQ ID NO: 988004 - DNA, 33 bp, Homo sapien
cttcttgacagtccaactcactggttctcccaa

SEQ ID NO: 988005 - DNA, 33 bp, Homo sapien
attcctgaattcaagtaaaccattttgtatgtt

SEQ ID NO: 988006 - DNA, 33 bp, Homo sapien
attcctgaattcaagtcaaccattttgtatgtt

SEQ ID NO: 988007 - DNA, 33 bp, Homo sapien
atcattctgttgctaaatccaacagacaaatat

SEQ ID NO: 988008 - DNA, 33 bp, Homo sapien
atcattctgttgctaattccaacagacaaatat

SEQ ID NO: 988009 - DNA, 33 bp, Homo sapien
acattgatggtgctccaaaaaaaggcaagtgat

SEQ ID NO: 988010 - DNA, 33 bp, Homo sapien
acattgatggtgctccgaaaaaaggcaagtgat

SEQ ID NO: 988011 - DNA, 33 bp, Homo sapien
tagcagaatgttcaaggccctttatgatctggt

SEQ ID NO: 988012 - DNA, 33 bp, Homo sapien
tagcagaatgttcaagtccctttatgatctggt

SEQ ID NO: 988013 - DNA, 33 bp, Homo sapien
gaaactgatctttaaacttgatcttttctccaa

SEQ ID NO: 988014 - DNA, 33 bp, Homo sapien
gaaactgatctttaaatttgatcttttctccaa

SEQ ID NO: 988015 - DNA, 33 bp, Homo sapien
tgtctcatatacattcaacaatattaagtgtct

SEQ ID NO: 988016 - DNA, 33 bp, Homo sapien
tgtctcatatacattcgacaatattaagtgtct

SEQ ID NO: 988017 - DNA, 33 bp, Homo sapien
ccccaaaatcattgacacttacacttccacatt

SEQ ID NO: 988018 - DNA, 33 bp, Homo sapien
ccccaaaatcattgactcttacacttccacatt

SEQ ID NO: 988019 - DNA, 33 bp, Homo sapien
acaattgcctctcaagaaccctctgttgcattt

SEQ ID NO: 988020 - DNA, 33 bp, Homo sapien
acaattgcctctcaaggaccctctgttgcattt

SEQ ID NO: 988021 - DNA, 33 bp, Homo sapien
tagtgtttctccacgacactacaattgcctctc

SEQ ID NO: 988022 - DNA, 33 bp, Homo sapien
tagtgtttctccacgatactacaattgcctctc

SEQ ID NO: 988023 - DNA, 33 bp, Homo sapien
gtctaattccttgctacaatttttccagtatct

SEQ ID NO: 988024 - DNA, 33 bp, Homo sapien
gtctaattccttgctataatttttccagtatct

SEQ ID NO: 988025 - DNA, 33 bp, Homo sapien
aaatcaccttagtgaaagtgccctacttagaag

SEQ ID NO: 988026 - DNA, 33 bp, Homo sapien
aaatcaccttagtgaatgtgccctacttagaag

SEQ ID NO: 988027 - DNA, 33 bp, Homo sapien
aactaaatcgttaggaactagcctagtttcaca

SEQ ID NO: 988028 - DNA, 33 bp, Homo sapien
aactaaatcgttaggacctagcctagtttcaca

SEQ ID NO: 988029 - DNA, 33 bp, Homo sapien
aatccaggtcgaccaaactcaatcatgatgctg

SEQ ID NO: 988030 - DNA, 33 bp, Homo sapien
aatccaggtcgaccaacctcaatcatgatgctg

SEQ ID NO: 988031 - DNA, 33 bp, Homo sapien
actcagataggatataagactggtacggtcacc

SEQ ID NO: 988032 - DNA, 33 bp, Homo sapien
actcagataggatataggactggtacggtcacc

SEQ ID NO: 988033 - DNA, 33 bp, Homo sapien
ttctgcttcctgtcagcatagaccaacaatggg

SEQ ID NO: 988034 - DNA, 33 bp, Homo sapien
ttctgcttcctgtcaggatagaccaacaatggg

SEQ ID NO: 988035 - DNA, 33 bp, Homo sapien
ataaggataattcagaagcctttaatttggact

SEQ ID NO: 988036 - DNA, 33 bp, Homo sapien
ataaggataattcagaggcctttaatttggact

SEQ ID NO: 988037 - DNA, 33 bp, Homo sapien
ggcatacagacaagccaaaaaatagcatccata

SEQ ID NO: 988038 - DNA, 33 bp, Homo sapien
ggcatacagacaagccgaaaaatagcatccata

SEQ ID NO: 988039 - DNA, 33 bp, Homo sapien
tcctaggtcttggctaaaaagtcacctatgaag

SEQ ID NO: 988040 - DNA, 33 bp, Homo sapien
tcctaggtcttggctagaaagtcacctatgaag

SEQ ID NO: 988041 - DNA, 33 bp, Homo sapien
taagacagtgggatgaaatatggatataaacat

SEQ ID NO: 988042 - DNA, 33 bp, Homo sapien
taagacagtgggatgagatatggatataaacat

SEQ ID NO: 988043 - DNA, 33 bp, Homo sapien
atttttgagatgcaaaaaactgcttcccctgaa

SEQ ID NO: 988044 - DNA, 33 bp, Homo sapien
atttttgagatgcaaagaactgcttcccctgaa

SEQ ID NO: 988045 - DNA, 33 bp, Homo sapien
ttggactgactgaccactgaaaaatcaaacaaa

SEQ ID NO: 988046 - DNA, 33 bp, Homo sapien
ttggactgactgaccattgaaaaatcaaacaaa

SEQ ID NO: 988047 - DNA, 33 bp, Homo sapien
aaagcagagccaaaaacgttgctcttccaacta

SEQ ID NO: 988048 - DNA, 33 bp, Homo sapien
aaagcagagccaaaaatgttgctcttccaacta

SEQ ID NO: 988049 - DNA, 33 bp, Homo sapien
tgaattaagttttgccagaatattagaaatgag

SEQ ID NO: 988050 - DNA, 33 bp, Homo sapien
tgaattaagttttgcctgaatattagaaatgag

SEQ ID NO: 988051 - DNA, 33 bp, Homo sapien
acaagagtgtgttagacagagtcactattccta

SEQ ID NO: 988052 - DNA, 33 bp, Homo sapien
acaagagtgtgttagatagagtcactattccta

SEQ ID NO: 988053 - DNA, 33 bp, Homo sapien
ttgattttagaagtaacggtctatgcttttgtt

SEQ ID NO: 988054 - DNA, 33 bp, Homo sapien
ttgattttagaagtaatggtctatgcttttgtt

SEQ ID NO: 988055 - DNA, 33 bp, Homo sapien
agatcttgggacttaaaaatcacacactgagta

SEQ ID NO: 988056 - DNA, 33 bp, Homo sapien
agatcttgggacttaagaatcacacactgagta

SEQ ID NO: 988057 - DNA, 33 bp, Homo sapien
aactccatttctttccaaagcatatttcttcac

SEQ ID NO: 988058 - DNA, 33 bp, Homo sapien
aactccatttctttccgaagcatatttcttcac

SEQ ID NO: 988059 - DNA, 33 bp, Homo sapien
taagacaaaattctgtcaagcaaggaatcattg

SEQ ID NO: 988060 - DNA, 33 bp, Homo sapien
taagacaaaattctgttaagcaaggaatcattg

SEQ ID NO: 988061 - DNA, 33 bp, Homo sapien
tggcaactaaatatctaaaaaacttgaatcatg

SEQ ID NO: 988062 - DNA, 33 bp, Homo sapien
tggcaactaaatatctgaaaaacttgaatcatg

SEQ ID NO: 988063 - DNA, 33 bp, Homo sapien
cagtaaataatgaggaacaataacacaatctac

SEQ ID NO: 988064 - DNA, 33 bp, Homo sapien
cagtaaataatgaggagcaataacacaatctac

SEQ ID NO: 988065 - DNA, 33 bp, Homo sapien
ctcaacaatgcaagataagttaaatttaaaaga

SEQ ID NO: 988066 - DNA, 33 bp, Homo sapien
ctcaacaatgcaagatgagttaaatttaaaaga

SEQ ID NO: 988067 - DNA, 33 bp, Homo sapien
aattaatttcagtcacatcccaattaatttacc

SEQ ID NO: 988068 - DNA, 33 bp, Homo sapien
aattaatttcagtcacgtcccaattaatttacc

SEQ ID NO: 988069 - DNA, 33 bp, Homo sapien
ctaactctaagtacacactggaaaattacagca

SEQ ID NO: 988070 - DNA, 33 bp, Homo sapien
ctaactctaagtacaccctggaaaattacagca

SEQ ID NO: 988071 - DNA, 33 bp, Homo sapien
tgggtactagtttgcaagagaaagaagataaca

SEQ ID NO: 988072 - DNA, 33 bp, Homo sapien
tgggtactagtttgcaggagaaagaagataaca

SEQ ID NO: 988073 - DNA, 33 bp, Homo sapien
caaagagacaccacaacgctgagacccagaaca

SEQ ID NO: 988074 - DNA, 33 bp, Homo sapien
caaagagacaccacaatgctgagacccagaaca

SEQ ID NO: 988075 - DNA, 33 bp, Homo sapien
ttcagtgatgactaagaatgataaaatatttcc

SEQ ID NO: 988076 - DNA, 33 bp, Homo sapien
ttcagtgatgactaaggatgataaaatatttcc

SEQ ID NO: 988077 - DNA, 33 bp, Homo sapien
tttaacatttcagtcactgacatgcagctaagc

SEQ ID NO: 988078 - DNA, 33 bp, Homo sapien
tttaacatttcagtcattgacatgcagctaagc

SEQ ID NO: 988079 - DNA, 33 bp, Homo sapien
ctgtatataccaagacaaaaaagagatgacttt

SEQ ID NO: 988080 - DNA, 33 bp, Homo sapien
ctgtatataccaagacgaaaaagagatgacttt

SEQ ID NO: 988081 - DNA, 33 bp, Homo sapien
gcgtcagttggagggtaaataattcggaagagt

SEQ ID NO: 988082 - DNA, 33 bp, Homo sapien
gcgtcagttggagggtgaataattcggaagagt

SEQ ID NO: 988083 - DNA, 33 bp, Homo sapien
gttatcttgagggtcaaggatccgagtacaggt

SEQ ID NO: 988084 - DNA, 33 bp, Homo sapien
gttatcttgagggtcagggatccgagtacaggt

SEQ ID NO: 988085 - DNA, 33 bp, Homo sapien
tcaggcttgagtttgcagaaatgaaacctaaca

SEQ ID NO: 988086 - DNA, 33 bp, Homo sapien
tcaggcttgagtttgcggaaatgaaacctaaca

SEQ ID NO: 988087 - DNA, 33 bp, Homo sapien
ttttactacaaatgaaatgaaaacagatggtgg

SEQ ID NO: 988088 - DNA, 33 bp, Homo sapien
ttttactacaaatgaagtgaaaacagatggtgg

SEQ ID NO: 988089 - DNA, 33 bp, Homo sapien
aaagctaacagcaaagaacactgtacagcttgg

SEQ ID NO: 988090 - DNA, 33 bp, Homo sapien
aaagctaacagcaaaggacactgtacagcttgg

SEQ ID NO: 988091 - DNA, 33 bp, Homo sapien
ttctgcctctaaataacggtatgactttagaaa

SEQ ID NO: 988092 - DNA, 33 bp, Homo sapien
ttctgcctctaaataatggtatgactttagaaa

SEQ ID NO: 988093 - DNA, 33 bp, Homo sapien
gactttagaaacactacctaacctgaaacttta

SEQ ID NO: 988094 - DNA, 33 bp, Homo sapien
gactttagaaacactatctaacctgaaacttta

SEQ ID NO: 988095 - DNA, 33 bp, Homo sapien
ccaccactgattgatgcagaatttgtcatgaga

SEQ ID NO: 988096 - DNA, 33 bp, Homo sapien
ccaccactgattgatggagaatttgtcatgaga

SEQ ID NO: 988097 - DNA, 33 bp, Homo sapien
ggatgagaatcaacgtaaacaatcatacataat

SEQ ID NO: 988098 - DNA, 33 bp, Homo sapien
ggatgagaatcaacgtgaacaatcatacataat

SEQ ID NO: 988099 - DNA, 33 bp, Homo sapien
tcagattacatggtgaataaaagccacttcttg

SEQ ID NO: 988100 - DNA, 33 bp, Homo sapien
tcagattacatggtgagtaaaagccacttcttg

SEQ ID NO: 988101 - DNA, 33 bp, Homo sapien
attaatataaaagaccaactagtgaaagcttaa

SEQ ID NO: 988102 - DNA, 33 bp, Homo sapien
attaatataaaagacccactagtgaaagcttaa

SEQ ID NO: 988103 - DNA, 33 bp, Homo sapien
taaaagcatcatattccacaatcaaccagacaa

SEQ ID NO: 988104 - DNA, 33 bp, Homo sapien
taaaagcatcatattctacaatcaaccagacaa

SEQ ID NO: 988105 - DNA, 33 bp, Homo sapien
cagccatcttctttcacgacaagctctagtccc

SEQ ID NO: 988106 - DNA, 33 bp, Homo sapien
cagccatcttctttcatgacaagctctagtccc

SEQ ID NO: 988107 - DNA, 33 bp, Homo sapien
atgtaagcacttcagacgtgtaacttattgaga

SEQ ID NO: 988108 - DNA, 33 bp, Homo sapien
atgtaagcacttcagatgtgtaacttattgaga

SEQ ID NO: 988109 - DNA, 33 bp, Homo sapien
aatcttgaaaaacaaacgttcatagctttatat

SEQ ID NO: 988110 - DNA, 33 bp, Homo sapien
aatcttgaaaaacaaatgttcatagctttatat

SEQ ID NO: 988111 - DNA, 33 bp, Homo sapien
taatgttttggccataacttttgtcatcggtta

SEQ ID NO: 988112 - DNA, 33 bp, Homo sapien
taatgttttggccatagcttttgtcatcggtta

SEQ ID NO: 988113 - DNA, 33 bp, Homo sapien
aaagataagtgatagaaggttgtcgttcttgct

SEQ ID NO: 988114 - DNA, 33 bp, Homo sapien
aaagataagtgatagagggttgtcgttcttgct

SEQ ID NO: 988115 - DNA, 33 bp, Homo sapien
agaagggctgagtcgccagcaggcttgtaaacc

SEQ ID NO: 988116 - DNA, 33 bp, Homo sapien
agaagggctgagtcgctagcaggcttgtaaacc

SEQ ID NO: 988117 - DNA, 33 bp, Homo sapien
gccttgatcatctgaccagattaggagataaag

SEQ ID NO: 988118 - DNA, 33 bp, Homo sapien
gccttgatcatctgacgagattaggagataaag

SEQ ID NO: 988119 - DNA, 33 bp, Homo sapien
gcccctcctttttagacgatagctaggagagat

SEQ ID NO: 988120 - DNA, 33 bp, Homo sapien
gcccctcctttttagatgatagctaggagagat

SEQ ID NO: 988121 - DNA, 33 bp, Homo sapien
gaagatatacaaaaggccaacaggtacaggaaa

SEQ ID NO: 988122 - DNA, 33 bp, Homo sapien
gaagatatacaaaaggtcaacaggtacaggaaa

SEQ ID NO: 988123 - DNA, 33 bp, Homo sapien
taaagttgatggaaagcatctaattcttcctac

SEQ ID NO: 988124 - DNA, 33 bp, Homo sapien
taaagttgatggaaaggatctaattcttcctac

SEQ ID NO: 988125 - DNA, 33 bp, Homo sapien
ccagggcctgtaaaaacttaactcggtgcaatt

SEQ ID NO: 988126 - DNA, 33 bp, Homo sapien
ccagggcctgtaaaaatttaactcggtgcaatt

SEQ ID NO: 988127 - DNA, 33 bp, Homo sapien
cccacatcctcttggaataggttaggtgcctca

SEQ ID NO: 988128 - DNA, 33 bp, Homo sapien
cccacatcctcttggagtaggttaggtgcctca

SEQ ID NO: 988129 - DNA, 33 bp, Homo sapien
tggaactgtggatttacgatgtgaaagttgatt

SEQ ID NO: 988130 - DNA, 33 bp, Homo sapien
tggaactgtggatttatgatgtgaaagttgatt

SEQ ID NO: 988131 - DNA, 33 bp, Homo sapien
ttgggtgtgaccaggaagacccaatttgcataa

SEQ ID NO: 988132 - DNA, 33 bp, Homo sapien
ttgggtgtgaccaggatgacccaatttgcataa

SEQ ID NO: 988133 - DNA, 33 bp, Homo sapien
caaaagtggcatataaaatttctgggaagtatt

SEQ ID NO: 988134 - DNA, 33 bp, Homo sapien
caaaagtggcatataacatttctgggaagtatt

SEQ ID NO: 988135 - DNA, 33 bp, Homo sapien
gacttaagcccactctaaagtttgtcccatctg

SEQ ID NO: 988136 - DNA, 33 bp, Homo sapien
gacttaagcccactctgaagtttgtcccatctg

SEQ ID NO: 988137 - DNA, 33 bp, Homo sapien
tgagaataagcatggacggctgaatggctgtca

SEQ ID NO: 988138 - DNA, 33 bp, Homo sapien
tgagaataagcatggatggctgaatggctgtca

SEQ ID NO: 988139 - DNA, 33 bp, Homo sapien
cctctgcctcttgggaacaccaatttactgaga

SEQ ID NO: 988140 - DNA, 33 bp, Homo sapien
cctctgcctcttgggatcaccaatttactgaga

SEQ ID NO: 988141 - DNA, 33 bp, Homo sapien
acctgaggaaaagatcaacttcctttaaaaaca

SEQ ID NO: 988142 - DNA, 33 bp, Homo sapien
acctgaggaaaagatcgacttcctttaaaaaca

SEQ ID NO: 988143 - DNA, 33 bp, Homo sapien
gtgctggacactctaacaaagagaagggcatca

SEQ ID NO: 988144 - DNA, 33 bp, Homo sapien
gtgctggacactctaataaagagaagggcatca

SEQ ID NO: 988145 - DNA, 33 bp, Homo sapien
tttttctggttctctcccataaatatggcctat

SEQ ID NO: 988146 - DNA, 33 bp, Homo sapien
tttttctggttctctctcataaatatggcctat

SEQ ID NO: 988147 - DNA, 33 bp, Homo sapien
cgaacttctgatctaccctaatacgtaacaaaa

SEQ ID NO: 988148 - DNA, 33 bp, Homo sapien
cgaacttctgatctacgctaatacgtaacaaaa

SEQ ID NO: 988149 - DNA, 33 bp, Homo sapien
gtacatgcttattaaaatgttaagacctttccc

SEQ ID NO: 988150 - DNA, 33 bp, Homo sapien
gtacatgcttattaaactgttaagacctttccc

SEQ ID NO: 988151 - DNA, 33 bp, Homo sapien
tgtgttctatgcccaactccgtgagcactcagt

SEQ ID NO: 988152 - DNA, 33 bp, Homo sapien
tgtgttctatgcccaagtccgtgagcactcagt

SEQ ID NO: 988153 - DNA, 33 bp, Homo sapien
gtaggaatctttgaaagactgttgtctattttg

SEQ ID NO: 988154 - DNA, 33 bp, Homo sapien
gtaggaatctttgaaatactgttgtctattttg

SEQ ID NO: 988155 - DNA, 33 bp, Homo sapien
ttatcagtagctagaacagcatgtttatgggta

SEQ ID NO: 988156 - DNA, 33 bp, Homo sapien
ttatcagtagctagaatagcatgtttatgggta

SEQ ID NO: 988157 - DNA, 33 bp, Homo sapien
agtgctgataagaaaccgtgaataacctgctaa

SEQ ID NO: 988158 - DNA, 33 bp, Homo sapien
agtgctgataagaaactgtgaataacctgctaa

SEQ ID NO: 988159 - DNA, 33 bp, Homo sapien
ttttccaaactagccaacaaaagctttacaact

SEQ ID NO: 988160 - DNA, 33 bp, Homo sapien
ttttccaaactagccagcaaaagctttacaact

SEQ ID NO: 988161 - DNA, 33 bp, Homo sapien
cacacgcaacagactgaattataaaactcaaag

SEQ ID NO: 988162 - DNA, 33 bp, Homo sapien
cacacgcaacagactgcattataaaactcaaag

SEQ ID NO: 988163 - DNA, 33 bp, Homo sapien
ttgtaatagagtcacaagccatataaaagacat

SEQ ID NO: 988164 - DNA, 33 bp, Homo sapien
ttgtaatagagtcacatgccatataaaagacat

SEQ ID NO: 988165 - DNA, 33 bp, Homo sapien
agaatcagaagatatacgcaggtgtgtgcacat

SEQ ID NO: 988166 - DNA, 33 bp, Homo sapien
agaatcagaagatatatgcaggtgtgtgcacat

SEQ ID NO: 988167 - DNA, 33 bp, Homo sapien
tacagtgagctgcccgaagactgtagagacgct

SEQ ID NO: 988168 - DNA, 33 bp, Homo sapien
tacagtgagctgcccggagactgtagagacgct

SEQ ID NO: 988169 - DNA, 33 bp, Homo sapien
ttacaccatcaaggacacaacctgatagggaaa

SEQ ID NO: 988170 - DNA, 33 bp, Homo sapien
ttacaccatcaaggacccaacctgatagggaaa

SEQ ID NO: 988171 - DNA, 33 bp, Homo sapien
ttaacttgtatccgcacattagtcagtttttat

SEQ ID NO: 988172 - DNA, 33 bp, Homo sapien
ttaacttgtatccgcatattagtcagtttttat

SEQ ID NO: 988173 - DNA, 33 bp, Homo sapien
gacagttttgtgtcaaaccacttcctgtccctc

SEQ ID NO: 988174 - DNA, 33 bp, Homo sapien
gacagttttgtgtcaacccacttcctgtccctc

SEQ ID NO: 988175 - DNA, 33 bp, Homo sapien
acagagacaaaatcccaaatagctacatacata

SEQ ID NO: 988176 - DNA, 33 bp, Homo sapien
acagagacaaaatccctaatagctacatacata

SEQ ID NO: 988177 - DNA, 33 bp, Homo sapien
gttctttcactcatcacccttctgattttgatt

SEQ ID NO: 988178 - DNA, 33 bp, Homo sapien
gttctttcactcatcagccttctgattttgatt

SEQ ID NO: 988179 - DNA, 33 bp, Homo sapien
tattctgttagtgtgagagatgacagttcagcc

SEQ ID NO: 988180 - DNA, 33 bp, Homo sapien
tattctgttagtgtgatagatgacagttcagcc

SEQ ID NO: 988181 - DNA, 33 bp, Homo sapien
ttggttgagatgaaaaactagtgctcctaacat

SEQ ID NO: 988182 - DNA, 33 bp, Homo sapien
ttggttgagatgaaaagctagtgctcctaacat

SEQ ID NO: 988183 - DNA, 33 bp, Homo sapien
tctcaaccaaagacaacagtggatgcgttgggg

SEQ ID NO: 988184 - DNA, 33 bp, Homo sapien
tctcaaccaaagacaatagtggatgcgttgggg

SEQ ID NO: 988185 - DNA, 33 bp, Homo sapien
tctaccctactcaataccctacgagttgcatta

SEQ ID NO: 988186 - DNA, 33 bp, Homo sapien
tctaccctactcaatatcctacgagttgcatta

SEQ ID NO: 988187 - DNA, 33 bp, Homo sapien
caacagttcatctttccatactcagcagctaaa

SEQ ID NO: 988188 - DNA, 33 bp, Homo sapien
caacagttcatctttctatactcagcagctaaa

SEQ ID NO: 988189 - DNA, 33 bp, Homo sapien
gcatttctatactcataaagaagtccagctcac

SEQ ID NO: 988190 - DNA, 33 bp, Homo sapien
gcatttctatactcatgaagaagtccagctcac

SEQ ID NO: 988191 - DNA, 33 bp, Homo sapien
gtgtgcagtcattagcactatccatctctagaa

SEQ ID NO: 988192 - DNA, 33 bp, Homo sapien
gtgtgcagtcattagcgctatccatctctagaa

SEQ ID NO: 988193 - DNA, 33 bp, Homo sapien
agatatacaaatcgtcaataagcccatgaaaag

SEQ ID NO: 988194 - DNA, 33 bp, Homo sapien
agatatacaaatcgtcgataagcccatgaaaag

SEQ ID NO: 988195 - DNA, 33 bp, Homo sapien
aaaacccaatgtacagacaataacttcaaatga

SEQ ID NO: 988196 - DNA, 33 bp, Homo sapien
aaaacccaatgtacaggcaataacttcaaatga

SEQ ID NO: 988197 - DNA, 33 bp, Homo sapien
ctgaaagcacttattacaggtgggaactattaa

SEQ ID NO: 988198 - DNA, 33 bp, Homo sapien
ctgaaagcacttattagaggtgggaactattaa

SEQ ID NO: 988199 - DNA, 33 bp, Homo sapien
aagtttccaagatccacgtcagtaacacaaatt

SEQ ID NO: 988200 - DNA, 33 bp, Homo sapien
aagtttccaagatccatgtcagtaacacaaatt

SEQ ID NO: 988201 - DNA, 33 bp, Homo sapien
ggttttgtgaggataaagtgtttggcacaatgt

SEQ ID NO: 988202 - DNA, 33 bp, Homo sapien
ggttttgtgaggataaggtgtttggcacaatgt

SEQ ID NO: 988203 - DNA, 33 bp, Homo sapien
aaaaaaagaagaagaacgatgggtaataatgga

SEQ ID NO: 988204 - DNA, 33 bp, Homo sapien
aaaaaaagaagaagaaggatgggtaataatgga

SEQ ID NO: 988205 - DNA, 33 bp, Homo sapien
agtcatataccactacagggaataaaccccact

SEQ ID NO: 988206 - DNA, 33 bp, Homo sapien
agtcatataccactaccgggaataaaccccact

SEQ ID NO: 988207 - DNA, 33 bp, Homo sapien
ttgttacatactataccgaactttctatgaaag

SEQ ID NO: 988208 - DNA, 33 bp, Homo sapien
ttgttacatactatactgaactttctatgaaag

SEQ ID NO: 988209 - DNA, 33 bp, Homo sapien
tcttgctgatcctttgcatttatgcgtgcccag

SEQ ID NO: 988210 - DNA, 33 bp, Homo sapien
tcttgctgatcctttggatttatgcgtgcccag

SEQ ID NO: 988211 - DNA, 33 bp, Homo sapien
tctcatgcttatactacagcagagggatagggt

SEQ ID NO: 988212 - DNA, 33 bp, Homo sapien
tctcatgcttatactatagcagagggatagggt

SEQ ID NO: 988213 - DNA, 33 bp, Homo sapien
ctctgttgttgaagcacgaaagtagttgtagac

SEQ ID NO: 988214 - DNA, 33 bp, Homo sapien
ctctgttgttgaagcatgaaagtagttgtagac

SEQ ID NO: 988215 - DNA, 33 bp, Homo sapien
ttaattttctcccatcgcttttggtgaaccctc

SEQ ID NO: 988216 - DNA, 33 bp, Homo sapien
ttaattttctcccatctcttttggtgaaccctc

SEQ ID NO: 988217 - DNA, 33 bp, Homo sapien
atcagctgattctgaaatgggagtttgtgtttg

SEQ ID NO: 988218 - DNA, 33 bp, Homo sapien
atcagctgattctgaagtgggagtttgtgtttg

SEQ ID NO: 988219 - DNA, 33 bp, Homo sapien
tcctgtctcaacttcccaaataactgggattac

SEQ ID NO: 988220 - DNA, 33 bp, Homo sapien
tcctgtctcaacttcctaaataactgggattac

SEQ ID NO: 988221 - DNA, 33 bp, Homo sapien
tgcctactacttgcaactggtatctggagtggg

SEQ ID NO: 988222 - DNA, 33 bp, Homo sapien
tgcctactacttgcaattggtatctggagtggg

SEQ ID NO: 988223 - DNA, 33 bp, Homo sapien
gatcaggttgggagaactcaagcattttcttga

SEQ ID NO: 988224 - DNA, 33 bp, Homo sapien
gatcaggttgggagaattcaagcattttcttga

SEQ ID NO: 988225 - DNA, 33 bp, Homo sapien
ttaaagctgggttaaccggcaatgaactgatca

SEQ ID NO: 988226 - DNA, 33 bp, Homo sapien
ttaaagctgggttaactggcaatgaactgatca

SEQ ID NO: 988227 - DNA, 33 bp, Homo sapien
accctgaccctagatcacctcttgagcttcctt

SEQ ID NO: 988228 - DNA, 33 bp, Homo sapien
accctgaccctagatcgcctcttgagcttcctt

SEQ ID NO: 988229 - DNA, 33 bp, Homo sapien
tgtcttggttattatacgagtgcacatggcttg

SEQ ID NO: 988230 - DNA, 33 bp, Homo sapien
tgtcttggttattataggagtgcacatggcttg

SEQ ID NO: 988231 - DNA, 33 bp, Homo sapien
aaatacagcagatagaagttaatagatgtggag

SEQ ID NO: 988232 - DNA, 33 bp, Homo sapien
aaatacagcagatagaggttaatagatgtggag

SEQ ID NO: 988233 - DNA, 33 bp, Homo sapien
agagattacaaacaaccctatttgagcacctga

SEQ ID NO: 988234 - DNA, 33 bp, Homo sapien
agagattacaaacaactctatttgagcacctga

SEQ ID NO: 988235 - DNA, 33 bp, Homo sapien
tcaggctcaggctgcacgaagaaaaggttatta

SEQ ID NO: 988236 - DNA, 33 bp, Homo sapien
tcaggctcaggctgcatgaagaaaaggttatta

SEQ ID NO: 988237 - DNA, 33 bp, Homo sapien
taagtggagacctgaaaaatgaatcgaaattgg

SEQ ID NO: 988238 - DNA, 33 bp, Homo sapien
taagtggagacctgaagaatgaatcgaaattgg

SEQ ID NO: 988239 - DNA, 33 bp, Homo sapien
ctctgtagccttatcacaccatatttcaattac

SEQ ID NO: 988240 - DNA, 33 bp, Homo sapien
ctctgtagccttatcataccatatttcaattac

SEQ ID NO: 988241 - DNA, 33 bp, Homo sapien
catattacttgagccaccttcacaattaactgg

SEQ ID NO: 988242 - DNA, 33 bp, Homo sapien
catattacttgagccatcttcacaattaactgg

SEQ ID NO: 988243 - DNA, 33 bp, Homo sapien
gggtttatcctaccaacgagcagactgagaaac

SEQ ID NO: 988244 - DNA, 33 bp, Homo sapien
gggtttatcctaccaatgagcagactgagaaac

SEQ ID NO: 988245 - DNA, 33 bp, Homo sapien
gtcaggatggtcagtaactccatttactagata

SEQ ID NO: 988246 - DNA, 33 bp, Homo sapien
gtcaggatggtcagtatctccatttactagata

SEQ ID NO: 988247 - DNA, 33 bp, Homo sapien
tttaaatcaagtcacgaccggacgcggtggctc

SEQ ID NO: 988248 - DNA, 33 bp, Homo sapien
tttaaatcaagtcacggccggacgcggtggctc

SEQ ID NO: 988249 - DNA, 33 bp, Homo sapien
agtccagtctaccattcaaatagcaatatattt

SEQ ID NO: 988250 - DNA, 33 bp, Homo sapien
agtccagtctaccattgaaatagcaatatattt

SEQ ID NO: 988251 - DNA, 33 bp, Homo sapien
gatcaaggagcaagtacaaatgcatggtgcaaa

SEQ ID NO: 988252 - DNA, 33 bp, Homo sapien
gatcaaggagcaagtagaaatgcatggtgcaaa

SEQ ID NO: 988253 - DNA, 33 bp, Homo sapien
tctcccaggatatgcagaaatgaaaagacgtgg

SEQ ID NO: 988254 - DNA, 33 bp, Homo sapien
tctcccaggatatgcataaatgaaaagacgtgg

SEQ ID NO: 988255 - DNA, 33 bp, Homo sapien
actgatgaaactgaaaatgtggtgtatgcatac

SEQ ID NO: 988256 - DNA, 33 bp, Homo sapien
actgatgaaactgaaagtgtggtgtatgcatac

SEQ ID NO: 988257 - DNA, 33 bp, Homo sapien
cagttttctggttttacatatcactttctctaa

SEQ ID NO: 988258 - DNA, 33 bp, Homo sapien
cagttttctggttttagatatcactttctctaa

SEQ ID NO: 988259 - DNA, 33 bp, Homo sapien
cacgtaaacaacttaggagactgaaaacagact

SEQ ID NO: 988260 - DNA, 33 bp, Homo sapien
cacgtaaacaacttagtagactgaaaacagact

SEQ ID NO: 988261 - DNA, 33 bp, Homo sapien
taggaagaaaagcagacgtagccagaaagctag

SEQ ID NO: 988262 - DNA, 33 bp, Homo sapien
taggaagaaaagcagatgtagccagaaagctag

SEQ ID NO: 988263 - DNA, 33 bp, Homo sapien
aattggatgagtaacaaattgtcagttttcaat

SEQ ID NO: 988264 - DNA, 33 bp, Homo sapien
aattggatgagtaacatattgtcagttttcaat

SEQ ID NO: 988265 - DNA, 33 bp, Homo sapien
aagttggcctcaaagacaagtatagttaattca

SEQ ID NO: 988266 - DNA, 33 bp, Homo sapien
aagttggcctcaaagataagtatagttaattca

SEQ ID NO: 988267 - DNA, 33 bp, Homo sapien
ctctgcaaactggtcaccatcatgcggaagtct

SEQ ID NO: 988268 - DNA, 33 bp, Homo sapien
ctctgcaaactggtcagcatcatgcggaagtct

SEQ ID NO: 988269 - DNA, 33 bp, Homo sapien
gctcttggggtccacacgtgttgaatggaaggg

SEQ ID NO: 988270 - DNA, 33 bp, Homo sapien
gctcttggggtccacatgtgttgaatggaaggg

SEQ ID NO: 988271 - DNA, 33 bp, Homo sapien
cttctggagtgttagcagcaggaataaatgtaa

SEQ ID NO: 988272 - DNA, 33 bp, Homo sapien
cttctggagtgttagccgcaggaataaatgtaa

SEQ ID NO: 988273 - DNA, 33 bp, Homo sapien
gcatggcccagagtaaatgtggcacagtagctg

SEQ ID NO: 988274 - DNA, 33 bp, Homo sapien
gcatggcccagagtaagtgtggcacagtagctg

SEQ ID NO: 988275 - DNA, 33 bp, Homo sapien
ttataaaatggggataacaatgatcctaactca

SEQ ID NO: 988276 - DNA, 33 bp, Homo sapien
ttataaaatggggatagcaatgatcctaactca

SEQ ID NO: 988277 - DNA, 33 bp, Homo sapien
agctgaatggagacagaaaatagcagcaaacat

SEQ ID NO: 988278 - DNA, 33 bp, Homo sapien
agctgaatggagacagtaaatagcagcaaacat

SEQ ID NO: 988279 - DNA, 33 bp, Homo sapien
cagtttcctttctctaccttaacactcccctaa

SEQ ID NO: 988280 - DNA, 33 bp, Homo sapien
cagtttcctttctctagcttaacactcccctaa

SEQ ID NO: 988281 - DNA, 33 bp, Homo sapien
atttgaagaaatccaacgtaggcattaggaacc

SEQ ID NO: 988282 - DNA, 33 bp, Homo sapien
atttgaagaaatccaatgtaggcattaggaacc

SEQ ID NO: 988283 - DNA, 33 bp, Homo sapien
aatgccactaaagttaaaagatgaaggaggaga

SEQ ID NO: 988284 - DNA, 33 bp, Homo sapien
aatgccactaaagttagaagatgaaggaggaga

SEQ ID NO: 988285 - DNA, 33 bp, Homo sapien
tggtggaaattttccaacattctgaccacatgc

SEQ ID NO: 988286 - DNA, 33 bp, Homo sapien
tggtggaaattttccagcattctgaccacatgc

SEQ ID NO: 988287 - DNA, 33 bp, Homo sapien
ataaaggtatgataagcagggcccggattataa

SEQ ID NO: 988288 - DNA, 33 bp, Homo sapien
ataaaggtatgataagtagggcccggattataa

SEQ ID NO: 988289 - DNA, 33 bp, Homo sapien
caagatgtttaaaaaaatttccatgtatctgct

SEQ ID NO: 988290 - DNA, 33 bp, Homo sapien
caagatgtttaaaaaagtttccatgtatctgct

SEQ ID NO: 988291 - DNA, 33 bp, Homo sapien
agtttctgtcattgaccggaaaaaaatgtacaa

SEQ ID NO: 988292 - DNA, 33 bp, Homo sapien
agtttctgtcattgactggaaaaaaatgtacaa

SEQ ID NO: 988293 - DNA, 33 bp, Homo sapien
aatctgtgtggattaacgtagcttgtaattaaa

SEQ ID NO: 988294 - DNA, 33 bp, Homo sapien
aatctgtgtggattaatgtagcttgtaattaaa

SEQ ID NO: 988295 - DNA, 33 bp, Homo sapien
agtaaggcccatttaacaccctgctctgtgaac

SEQ ID NO: 988296 - DNA, 33 bp, Homo sapien
agtaaggcccatttaataccctgctctgtgaac

SEQ ID NO: 988297 - DNA, 33 bp, Homo sapien
acacagatgagggtccaccatagtatttggcct

SEQ ID NO: 988298 - DNA, 33 bp, Homo sapien
acacagatgagggtccgccatagtatttggcct

SEQ ID NO: 988299 - DNA, 33 bp, Homo sapien
gtctgttctccgcagacacatcacagcccagga

SEQ ID NO: 988300 - DNA, 33 bp, Homo sapien
gtctgttctccgcagatacatcacagcccagga

SEQ ID NO: 988301 - DNA, 33 bp, Homo sapien
caatatcagaaataacagaagaggaaggacatt

SEQ ID NO: 988302 - DNA, 33 bp, Homo sapien
caatatcagaaataacggaagaggaaggacatt

SEQ ID NO: 988303 - DNA, 33 bp, Homo sapien
cttctcttttactggaggactctcacattcatt

SEQ ID NO: 988304 - DNA, 33 bp, Homo sapien
cttctcttttactggatgactctcacattcatt

SEQ ID NO: 988305 - DNA, 33 bp, Homo sapien
gctgaaaagaaggcaaaatttacacactataac

SEQ ID NO: 988306 - DNA, 33 bp, Homo sapien
gctgaaaagaaggcaacatttacacactataac

SEQ ID NO: 988307 - DNA, 33 bp, Homo sapien
tagaccctagacttggaaatttcaaatcccttg

SEQ ID NO: 988308 - DNA, 33 bp, Homo sapien
tagaccctagacttgggaatttcaaatcccttg

SEQ ID NO: 988309 - DNA, 33 bp, Homo sapien
aaatggaaagcgggcaatagtacacagactgct

SEQ ID NO: 988310 - DNA, 33 bp, Homo sapien
aaatggaaagcgggcagtagtacacagactgct

SEQ ID NO: 988311 - DNA, 33 bp, Homo sapien
tacacactgtctttataaaagctttgtgcaaaa

SEQ ID NO: 988312 - DNA, 33 bp, Homo sapien
tacacactgtctttattaaagctttgtgcaaaa

SEQ ID NO: 988313 - DNA, 33 bp, Homo sapien
gactaccggaccgtgaacaatctgattctgacg

SEQ ID NO: 988314 - DNA, 33 bp, Homo sapien
gactaccggaccgtgagcaatctgattctgacg

SEQ ID NO: 988315 - DNA, 33 bp, Homo sapien
gtctttttattttttccagatagtgtcttgctc

SEQ ID NO: 988316 - DNA, 33 bp, Homo sapien
gtctttttattttttcgagatagtgtcttgctc

SEQ ID NO: 988317 - DNA, 33 bp, Homo sapien
agatcttcagaaaataaccgtcatttagtagac

SEQ ID NO: 988318 - DNA, 33 bp, Homo sapien
agatcttcagaaaatatccgtcatttagtagac

SEQ ID NO: 988319 - DNA, 33 bp, Homo sapien
tggttattattgagtgcagtctgaataacctct

SEQ ID NO: 988320 - DNA, 33 bp, Homo sapien
tggttattattgagtgtagtctgaataacctct

SEQ ID NO: 988321 - DNA, 33 bp, Homo sapien
cgtttatatcttcaccagcaatatgcattttag

SEQ ID NO: 988322 - DNA, 33 bp, Homo sapien
cgtttatatcttcaccggcaatatgcattttag

SEQ ID NO: 988323 - DNA, 33 bp, Homo sapien
gctgaataaggatccaatgcaaaattatttttg

SEQ ID NO: 988324 - DNA, 33 bp, Homo sapien
gctgaataaggatccagtgcaaaattatttttg

SEQ ID NO: 988325 - DNA, 33 bp, Homo sapien
agttttgatgacaaaggaggttcttttcctgaa

SEQ ID NO: 988326 - DNA, 33 bp, Homo sapien
agttttgatgacaaagtaggttcttttcctgaa

SEQ ID NO: 988327 - DNA, 33 bp, Homo sapien
taagatagggagtcccaagaggcaaagagaaaa

SEQ ID NO: 988328 - DNA, 33 bp, Homo sapien
taagatagggagtcccgagaggcaaagagaaaa

SEQ ID NO: 988329 - DNA, 33 bp, Homo sapien
gcccagggcctaaaacagtcagcacaaagcctc

SEQ ID NO: 988330 - DNA, 33 bp, Homo sapien
gcccagggcctaaaacggtcagcacaaagcctc

SEQ ID NO: 988331 - DNA, 33 bp, Homo sapien
tgggaaaggattgaaccatgacccttgagacct

SEQ ID NO: 988332 - DNA, 33 bp, Homo sapien
tgggaaaggattgaacgatgacccttgagacct

SEQ ID NO: 988333 - DNA, 33 bp, Homo sapien
tgcgagacaatgtccaagttacgcaagacaggc

SEQ ID NO: 988334 - DNA, 33 bp, Homo sapien
tgcgagacaatgtccaggttacgcaagacaggc

SEQ ID NO: 988335 - DNA, 33 bp, Homo sapien
cagatggtgttccaaacttctgcgtcccaagac

SEQ ID NO: 988336 - DNA, 33 bp, Homo sapien
cagatggtgttccaaatttctgcgtcccaagac

SEQ ID NO: 988337 - DNA, 33 bp, Homo sapien
gccaggtttactttgacgtggccattgcctagt

SEQ ID NO: 988338 - DNA, 33 bp, Homo sapien
gccaggtttactttgaggtggccattgcctagt

SEQ ID NO: 988339 - DNA, 33 bp, Homo sapien
aatcttcaacatcaaggaggccttaaggaaatg

SEQ ID NO: 988340 - DNA, 33 bp, Homo sapien
aatcttcaacatcaagtaggccttaaggaaatg

SEQ ID NO: 988341 - DNA, 33 bp, Homo sapien
ggggcagcatttcataacattacaaataaatgc

SEQ ID NO: 988342 - DNA, 33 bp, Homo sapien
ggggcagcatttcatagcattacaaataaatgc

SEQ ID NO: 988343 - DNA, 33 bp, Homo sapien
gcaagtccatgttccaagtccaggaatgattct

SEQ ID NO: 988344 - DNA, 33 bp, Homo sapien
gcaagtccatgttccacgtccaggaatgattct

SEQ ID NO: 988345 - DNA, 33 bp, Homo sapien
ccattcattccaagtcaaagagttctatctctg

SEQ ID NO: 988346 - DNA, 33 bp, Homo sapien
ccattcattccaagtccaagagttctatctctg

SEQ ID NO: 988347 - DNA, 33 bp, Homo sapien
atctcggagtagcctacggaagagagaatggtg

SEQ ID NO: 988348 - DNA, 33 bp, Homo sapien
atctcggagtagcctatggaagagagaatggtg

SEQ ID NO: 988349 - DNA, 33 bp, Homo sapien
tcctctttgtcttctccatcccaagaatcttcc

SEQ ID NO: 988350 - DNA, 33 bp, Homo sapien
tcctctttgtcttctctatcccaagaatcttcc

SEQ ID NO: 988351 - DNA, 33 bp, Homo sapien
aggcagactgaattgacgtttaggcagcaagcc

SEQ ID NO: 988352 - DNA, 33 bp, Homo sapien
aggcagactgaattgatgtttaggcagcaagcc

SEQ ID NO: 988353 - DNA, 33 bp, Homo sapien
ataaaatttaatcaccacatcatgctaaaatta

SEQ ID NO: 988354 - DNA, 33 bp, Homo sapien
ataaaatttaatcaccgcatcatgctaaaatta

SEQ ID NO: 988355 - DNA, 33 bp, Homo sapien
agaggagctcactttaaacataggccttgaaca

SEQ ID NO: 988356 - DNA, 33 bp, Homo sapien
agaggagctcactttagacataggccttgaaca

SEQ ID NO: 988357 - DNA, 33 bp, Homo sapien
ccttacagaaagctggcaacgtaaacagttgta

SEQ ID NO: 988358 - DNA, 33 bp, Homo sapien
ccttacagaaagctggtaacgtaaacagttgta

SEQ ID NO: 988359 - DNA, 33 bp, Homo sapien
atggtagttatagttacctcttatcgtgtttag

SEQ ID NO: 988360 - DNA, 33 bp, Homo sapien
atggtagttatagttatctcttatcgtgtttag

SEQ ID NO: 988361 - DNA, 33 bp, Homo sapien
cattctaatgagtctacggataatatttcttaa

SEQ ID NO: 988362 - DNA, 33 bp, Homo sapien
cattctaatgagtctatggataatatttcttaa

SEQ ID NO: 988363 - DNA, 33 bp, Homo sapien
caactaagggcatagacccacaaccacttaaaa

SEQ ID NO: 988364 - DNA, 33 bp, Homo sapien
caactaagggcatagatccacaaccacttaaaa

SEQ ID NO: 988365 - DNA, 33 bp, Homo sapien
ttaacccaggaacttgcaatttattcttaatcc

SEQ ID NO: 988366 - DNA, 33 bp, Homo sapien
ttaacccaggaacttggaatttattcttaatcc

SEQ ID NO: 988367 - DNA, 33 bp, Homo sapien
tgaaatctttagggtcaaaaaaatggtgaatct

SEQ ID NO: 988368 - DNA, 33 bp, Homo sapien
tgaaatctttagggtcgaaaaaatggtgaatct

SEQ ID NO: 988369 - DNA, 33 bp, Homo sapien
aacttcaagacagatcaatggttatcgaattgt

SEQ ID NO: 988370 - DNA, 33 bp, Homo sapien
aacttcaagacagatccatggttatcgaattgt

SEQ ID NO: 988371 - DNA, 33 bp, Homo sapien
taatgataagtgacaacggacagtgagtttcaa

SEQ ID NO: 988372 - DNA, 33 bp, Homo sapien
taatgataagtgacaatggacagtgagtttcaa

SEQ ID NO: 988373 - DNA, 33 bp, Homo sapien
agtgtttaagagcataagatttagagcctgaaa

SEQ ID NO: 988374 - DNA, 33 bp, Homo sapien
agtgtttaagagcataggatttagagcctgaaa

SEQ ID NO: 988375 - DNA, 33 bp, Homo sapien
caccctcaaggcaagaaaaagaacagatgcagc

SEQ ID NO: 988376 - DNA, 33 bp, Homo sapien
caccctcaaggcaagagaaagaacagatgcagc

SEQ ID NO: 988377 - DNA, 33 bp, Homo sapien
catgtacaacttgctccaagttaataacctctg

SEQ ID NO: 988378 - DNA, 33 bp, Homo sapien
catgtacaacttgctctaagttaataacctctg

SEQ ID NO: 988379 - DNA, 33 bp, Homo sapien
gaagcaatatttgaaaaaatgttcagaggttat

SEQ ID NO: 988380 - DNA, 33 bp, Homo sapien
gaagcaatatttgaaacaatgttcagaggttat

SEQ ID NO: 988381 - DNA, 33 bp, Homo sapien
caggctagtgcacccacgttctagtcttactgt

SEQ ID NO: 988382 - DNA, 33 bp, Homo sapien
caggctagtgcacccatgttctagtcttactgt

SEQ ID NO: 988383 - DNA, 33 bp, Homo sapien
aaacaaattaagcaaggctgtcttacaaattaa

SEQ ID NO: 988384 - DNA, 33 bp, Homo sapien
aaacaaattaagcaagtctgtcttacaaattaa

SEQ ID NO: 988385 - DNA, 33 bp, Homo sapien
tgctcttattccaaggaccttgattagctagca

SEQ ID NO: 988386 - DNA, 33 bp, Homo sapien
tgctcttattccaaggcccttgattagctagca

SEQ ID NO: 988387 - DNA, 33 bp, Homo sapien
caactgaaaagcagtcaagtgaatacaatttga

SEQ ID NO: 988388 - DNA, 33 bp, Homo sapien
caactgaaaagcagtcgagtgaatacaatttga

SEQ ID NO: 988389 - DNA, 33 bp, Homo sapien
tagataaacttaagccaaagggtcaatttattg

SEQ ID NO: 988390 - DNA, 33 bp, Homo sapien
tagataaacttaagccgaagggtcaatttattg

SEQ ID NO: 988391 - DNA, 33 bp, Homo sapien
atctagatcggactcactatttaaccagtgtca

SEQ ID NO: 988392 - DNA, 33 bp, Homo sapien
atctagatcggactcattatttaaccagtgtca

SEQ ID NO: 988393 - DNA, 33 bp, Homo sapien
catgctaatctctcccagaaaatctgcttcctg

SEQ ID NO: 988394 - DNA, 33 bp, Homo sapien
catgctaatctctcccggaaaatctgcttcctg

SEQ ID NO: 988395 - DNA, 33 bp, Homo sapien
agactgggtgggatcaactagaaaatgagtcta

SEQ ID NO: 988396 - DNA, 33 bp, Homo sapien
agactgggtgggatcatctagaaaatgagtcta

SEQ ID NO: 988397 - DNA, 33 bp, Homo sapien
cataccgttttgattaacatagccctatagtat

SEQ ID NO: 988398 - DNA, 33 bp, Homo sapien
cataccgttttgattaccatagccctatagtat

SEQ ID NO: 988399 - DNA, 33 bp, Homo sapien
aggaaactgacattccaaaaggctagatgattt

SEQ ID NO: 988400 - DNA, 33 bp, Homo sapien
aggaaactgacattccgaaaggctagatgattt

SEQ ID NO: 988401 - DNA, 33 bp, Homo sapien
ctttccacaaaaacaccgagactcaggagactc

SEQ ID NO: 988402 - DNA, 33 bp, Homo sapien
ctttccacaaaaacactgagactcaggagactc

SEQ ID NO: 988403 - DNA, 33 bp, Homo sapien
aaaaaaagaaggcacaccggtctcaacttccta

SEQ ID NO: 988404 - DNA, 33 bp, Homo sapien
aaaaaaagaaggcacatcggtctcaacttccta

SEQ ID NO: 988405 - DNA, 33 bp, Homo sapien
ctgaatgagttctgtaaaagttttgagttttgt

SEQ ID NO: 988406 - DNA, 33 bp, Homo sapien
ctgaatgagttctgtagaagttttgagttttgt

SEQ ID NO: 988407 - DNA, 33 bp, Homo sapien
tgcctctccttatctacggggattactttgtac

SEQ ID NO: 988408 - DNA, 33 bp, Homo sapien
tgcctctccttatctatggggattactttgtac

SEQ ID NO: 988409 - DNA, 33 bp, Homo sapien
cctgttactgaataccacaggcaattgtaacac

SEQ ID NO: 988410 - DNA, 33 bp, Homo sapien
cctgttactgaataccgcaggcaattgtaacac

SEQ ID NO: 988411 - DNA, 33 bp, Homo sapien
atgtgactcaatatacacaaagcagttcttagt

SEQ ID NO: 988412 - DNA, 33 bp, Homo sapien
atgtgactcaatatacgcaaagcagttcttagt

SEQ ID NO: 988413 - DNA, 33 bp, Homo sapien
tgaactggttgaaatacgtaggaaagttggaaa

SEQ ID NO: 988414 - DNA, 33 bp, Homo sapien
tgaactggttgaaataggtaggaaagttggaaa

SEQ ID NO: 988415 - DNA, 33 bp, Homo sapien
catttataaaaatacaccttcaagatacacatg

SEQ ID NO: 988416 - DNA, 33 bp, Homo sapien
catttataaaaatacatcttcaagatacacatg

SEQ ID NO: 988417 - DNA, 33 bp, Homo sapien
gaaaaatttctagtaactagtgtaacaaaactt

SEQ ID NO: 988418 - DNA, 33 bp, Homo sapien
gaaaaatttctagtaattagtgtaacaaaactt

SEQ ID NO: 988419 - DNA, 33 bp, Homo sapien
gttctactgatctcacaagaagtcattgatgtg

SEQ ID NO: 988420 - DNA, 33 bp, Homo sapien
gttctactgatctcacgagaagtcattgatgtg

SEQ ID NO: 988421 - DNA, 33 bp, Homo sapien
ctccttctgccttttgaagaaatttcatatata

SEQ ID NO: 988422 - DNA, 33 bp, Homo sapien
ctccttctgccttttgtagaaatttcatatata

SEQ ID NO: 988423 - DNA, 33 bp, Homo sapien
tggccacaaaaatgaaacaaatttaaatggatg

SEQ ID NO: 988424 - DNA, 33 bp, Homo sapien
tggccacaaaaatgaatcaaatttaaatggatg

SEQ ID NO: 988425 - DNA, 33 bp, Homo sapien
ctgacaccaagatgacacttcttagctgtctca

SEQ ID NO: 988426 - DNA, 33 bp, Homo sapien
ctgacaccaagatgacgcttcttagctgtctca

SEQ ID NO: 988427 - DNA, 33 bp, Homo sapien
tgtccaataattagcaatcttaagggaggactg

SEQ ID NO: 988428 - DNA, 33 bp, Homo sapien
tgtccaataattagcagtcttaagggaggactg

SEQ ID NO: 988429 - DNA, 33 bp, Homo sapien
cttttatgaactcatgacatgaagctgtgcaga

SEQ ID NO: 988430 - DNA, 33 bp, Homo sapien
cttttatgaactcatggcatgaagctgtgcaga

SEQ ID NO: 988431 - DNA, 33 bp, Homo sapien
gtatgtctatggaagacggtctgaaaggctata

SEQ ID NO: 988432 - DNA, 33 bp, Homo sapien
gtatgtctatggaagatggtctgaaaggctata

SEQ ID NO: 988433 - DNA, 33 bp, Homo sapien
gtaatgtaatggatcacggtcctgaagctcaga

SEQ ID NO: 988434 - DNA, 33 bp, Homo sapien
gtaatgtaatggatcatggtcctgaagctcaga

SEQ ID NO: 988435 - DNA, 33 bp, Homo sapien
gtgtggaaaggcttgaacatgaatattttatgt

SEQ ID NO: 988436 - DNA, 33 bp, Homo sapien
gtgtggaaaggcttgagcatgaatattttatgt

SEQ ID NO: 988437 - DNA, 33 bp, Homo sapien
gatatttttccaagagaaagacttatacaagta

SEQ ID NO: 988438 - DNA, 33 bp, Homo sapien
gatatttttccaagaggaagacttatacaagta

SEQ ID NO: 988439 - DNA, 33 bp, Homo sapien
agagttatccctacccaatggtcatgaaatatt

SEQ ID NO: 988440 - DNA, 33 bp, Homo sapien
agagttatccctacccgatggtcatgaaatatt

SEQ ID NO: 988441 - DNA, 33 bp, Homo sapien
aaataagaaagccctacggagacaagaggcagg

SEQ ID NO: 988442 - DNA, 33 bp, Homo sapien
aaataagaaagccctatggagacaagaggcagg

SEQ ID NO: 988443 - DNA, 33 bp, Homo sapien
tgataacagaaaagccacaggaacctctctttt

SEQ ID NO: 988444 - DNA, 33 bp, Homo sapien
tgataacagaaaagccgcaggaacctctctttt

SEQ ID NO: 988445 - DNA, 33 bp, Homo sapien
taggaggagtaggtaaaaatgtccatttctcaa

SEQ ID NO: 988446 - DNA, 33 bp, Homo sapien
taggaggagtaggtaagaatgtccatttctcaa

SEQ ID NO: 988447 - DNA, 33 bp, Homo sapien
atgtttggccataaatgatcattaatctatgtg

SEQ ID NO: 988448 - DNA, 33 bp, Homo sapien
atgtttggccataaattatcattaatctatgtg

SEQ ID NO: 988449 - DNA, 33 bp, Homo sapien
aaacttatcgaaactacatttaatgcccagagt

SEQ ID NO: 988450 - DNA, 33 bp, Homo sapien
aaacttatcgaaactagatttaatgcccagagt

SEQ ID NO: 988451 - DNA, 33 bp, Homo sapien
aatggtctcagctttcaccttaacaaactagaa

SEQ ID NO: 988452 - DNA, 33 bp, Homo sapien
aatggtctcagctttcgccttaacaaactagaa

SEQ ID NO: 988453 - DNA, 33 bp, Homo sapien
ttgcaagtttctaaaacagtgaagccaatgtaa

SEQ ID NO: 988454 - DNA, 33 bp, Homo sapien
ttgcaagtttctaaaagagtgaagccaatgtaa

SEQ ID NO: 988455 - DNA, 33 bp, Homo sapien
gaaattttgagaaatacccttgaaatacattac

SEQ ID NO: 988456 - DNA, 33 bp, Homo sapien
gaaattttgagaaatatccttgaaatacattac

SEQ ID NO: 988457 - DNA, 33 bp, Homo sapien
agaaacctataatgaaaacaggagaagcaaaga

SEQ ID NO: 988458 - DNA, 33 bp, Homo sapien
agaaacctataatgaacacaggagaagcaaaga

SEQ ID NO: 988459 - DNA, 33 bp, Homo sapien
gcagaagtaggtaccacacaaaacatataccct

SEQ ID NO: 988460 - DNA, 33 bp, Homo sapien
gcagaagtaggtaccagacaaaacatataccct

SEQ ID NO: 988461 - DNA, 33 bp, Homo sapien
gaagtaaattgttagaagtgaaatatgaaaaga

SEQ ID NO: 988462 - DNA, 33 bp, Homo sapien
gaagtaaattgttagatgtgaaatatgaaaaga

SEQ ID NO: 988463 - DNA, 33 bp, Homo sapien
agaaatatatcataaacggtggtaactgttggt

SEQ ID NO: 988464 - DNA, 33 bp, Homo sapien
agaaatatatcataaatggtggtaactgttggt

SEQ ID NO: 988465 - DNA, 33 bp, Homo sapien
caaaacatttaacaaccggcacagactcccact

SEQ ID NO: 988466 - DNA, 33 bp, Homo sapien
caaaacatttaacaactggcacagactcccact

SEQ ID NO: 988467 - DNA, 33 bp, Homo sapien
ccagtaggcttttggaaacatgtgaggctcaaa

SEQ ID NO: 988468 - DNA, 33 bp, Homo sapien
ccagtaggcttttggagacatgtgaggctcaaa

SEQ ID NO: 988469 - DNA, 33 bp, Homo sapien
gcactaagactgaacgaattatccaagttaacc

SEQ ID NO: 988470 - DNA, 33 bp, Homo sapien
gcactaagactgaacggattatccaagttaacc

SEQ ID NO: 988471 - DNA, 33 bp, Homo sapien
aagtgtaacatacagacggaaaagttcacaaat

SEQ ID NO: 988472 - DNA, 33 bp, Homo sapien
aagtgtaacatacagatggaaaagttcacaaat

SEQ ID NO: 988473 - DNA, 33 bp, Homo sapien
aagtctgagattgtaaaaagacatccaaatgaa

SEQ ID NO: 988474 - DNA, 33 bp, Homo sapien
aagtctgagattgtaacaagacatccaaatgaa

SEQ ID NO: 988475 - DNA, 33 bp, Homo sapien
ttttgttttaatgcaaccaatatctttccaata

SEQ ID NO: 988476 - DNA, 33 bp, Homo sapien
ttttgttttaatgcaatcaatatctttccaata

SEQ ID NO: 988477 - DNA, 33 bp, Homo sapien
gccaggaatatagagaacctttgggactgattc

SEQ ID NO: 988478 - DNA, 33 bp, Homo sapien
gccaggaatatagagaccctttgggactgattc

SEQ ID NO: 988479 - DNA, 33 bp, Homo sapien
gtgccaaccagtcataatagagcaagaggccct

SEQ ID NO: 988480 - DNA, 33 bp, Homo sapien
gtgccaaccagtcatagtagagcaagaggccct

SEQ ID NO: 988481 - DNA, 33 bp, Homo sapien
acaatgattgcctcggccagtataacagtttgc

SEQ ID NO: 988482 - DNA, 33 bp, Homo sapien
acaatgattgcctcggtcagtataacagtttgc

SEQ ID NO: 988483 - DNA, 33 bp, Homo sapien
gctatgagctttgccaacttgagtctcaatgcc

SEQ ID NO: 988484 - DNA, 33 bp, Homo sapien
gctatgagctttgccagcttgagtctcaatgcc

SEQ ID NO: 988485 - DNA, 33 bp, Homo sapien
caaaatgcagtcgtacgctaagtctcaatttag

SEQ ID NO: 988486 - DNA, 33 bp, Homo sapien
caaaatgcagtcgtactctaagtctcaatttag

SEQ ID NO: 988487 - DNA, 33 bp, Homo sapien
gaaattttcccaagctcacatagttggcaggtg

SEQ ID NO: 988488 - DNA, 33 bp, Homo sapien
gaaattttcccaagcttacatagttggcaggtg

SEQ ID NO: 988489 - DNA, 33 bp, Homo sapien
gtccgtggcactactgaatggctcttttttgag

SEQ ID NO: 988490 - DNA, 33 bp, Homo sapien
gtccgtggcactactgtatggctcttttttgag

SEQ ID NO: 988491 - DNA, 33 bp, Homo sapien
tctctgaaaaatctaccctaaatcctcctctta

SEQ ID NO: 988492 - DNA, 33 bp, Homo sapien
tctctgaaaaatctacgctaaatcctcctctta

SEQ ID NO: 988493 - DNA, 33 bp, Homo sapien
ccaagcactgtgggaccgaagttctgttcctgc

SEQ ID NO: 988494 - DNA, 33 bp, Homo sapien
ccaagcactgtgggactgaagttctgttcctgc

SEQ ID NO: 988495 - DNA, 33 bp, Homo sapien
aaggcataagataagacacatgtgtggatccac

SEQ ID NO: 988496 - DNA, 33 bp, Homo sapien
aaggcataagataagatacatgtgtggatccac

SEQ ID NO: 988497 - DNA, 33 bp, Homo sapien
ggcaaagcaagtgggtaaacactgctggcagag

SEQ ID NO: 988498 - DNA, 33 bp, Homo sapien
ggcaaagcaagtgggtgaacactgctggcagag

SEQ ID NO: 988499 - DNA, 33 bp, Homo sapien
taaagagaagaacaagaaaagtcctagaagctg

SEQ ID NO: 988500 - DNA, 33 bp, Homo sapien
taaagagaagaacaaggaaagtcctagaagctg

SEQ ID NO: 988501 - DNA, 33 bp, Homo sapien
agagctgggcaatggcaaaggttgttcagatta

SEQ ID NO: 988502 - DNA, 33 bp, Homo sapien
agagctgggcaatggcgaaggttgttcagatta

SEQ ID NO: 988503 - DNA, 33 bp, Homo sapien
tttttcgaatgtaataatagctaacacatgcaa

SEQ ID NO: 988504 - DNA, 33 bp, Homo sapien
tttttcgaatgtaatagtagctaacacatgcaa

SEQ ID NO: 988505 - DNA, 33 bp, Homo sapien
taaacaggtatcaaccaacactttctgagcata

SEQ ID NO: 988506 - DNA, 33 bp, Homo sapien
taaacaggtatcaacccacactttctgagcata

SEQ ID NO: 988507 - DNA, 33 bp, Homo sapien
acttctgttggagtaacaagcctgacctctcat

SEQ ID NO: 988508 - DNA, 33 bp, Homo sapien
acttctgttggagtaataagcctgacctctcat

SEQ ID NO: 988509 - DNA, 33 bp, Homo sapien
tgcttacatatggagggaagagagtgacgcgag

SEQ ID NO: 988510 - DNA, 33 bp, Homo sapien
tgcttacatatggaggtaagagagtgacgcgag

SEQ ID NO: 988511 - DNA, 33 bp, Homo sapien
ggagtcccagcagagacgtgaaatataatggca

SEQ ID NO: 988512 - DNA, 33 bp, Homo sapien
ggagtcccagcagagatgtgaaatataatggca

SEQ ID NO: 988513 - DNA, 33 bp, Homo sapien
tgcaccaagattgaaagatgagtaggagttctc

SEQ ID NO: 988514 - DNA, 33 bp, Homo sapien
tgcaccaagattgaaatatgagtaggagttctc

SEQ ID NO: 988515 - DNA, 33 bp, Homo sapien
gcaactagtgaattgcacatgtatcgggccatc

SEQ ID NO: 988516 - DNA, 33 bp, Homo sapien
gcaactagtgaattgcgcatgtatcgggccatc

SEQ ID NO: 988517 - DNA, 33 bp, Homo sapien
atcgtcaaatagacaaactgaaactctcctaac

SEQ ID NO: 988518 - DNA, 33 bp, Homo sapien
atcgtcaaatagacaacctgaaactctcctaac

SEQ ID NO: 988519 - DNA, 33 bp, Homo sapien
gagagtaaatcccaaactgaggaagacagagct

SEQ ID NO: 988520 - DNA, 33 bp, Homo sapien
gagagtaaatcccaaagtgaggaagacagagct

SEQ ID NO: 988521 - DNA, 33 bp, Homo sapien
agagggctattcaacagtcggtcattcaacaaa

SEQ ID NO: 988522 - DNA, 33 bp, Homo sapien
agagggctattcaacattcggtcattcaacaaa

SEQ ID NO: 988523 - DNA, 33 bp, Homo sapien
cacatagtgtggctgacgagatgtaactggata

SEQ ID NO: 988524 - DNA, 33 bp, Homo sapien
cacatagtgtggctgaggagatgtaactggata

SEQ ID NO: 988525 - DNA, 33 bp, Homo sapien
ttaattttcaaaatggaatcattgaatcatgtg

SEQ ID NO: 988526 - DNA, 33 bp, Homo sapien
ttaattttcaaaatgggatcattgaatcatgtg

SEQ ID NO: 988527 - DNA, 33 bp, Homo sapien
ttctgaattgaaaagacccatagggcaacaaat

SEQ ID NO: 988528 - DNA, 33 bp, Homo sapien
ttctgaattgaaaagatccatagggcaacaaat

SEQ ID NO: 988529 - DNA, 33 bp, Homo sapien
tgcagtggcccagaaaaggcaacagtcacacat

SEQ ID NO: 988530 - DNA, 33 bp, Homo sapien
tgcagtggcccagaaacggcaacagtcacacat

SEQ ID NO: 988531 - DNA, 33 bp, Homo sapien
attgcaccttgatataactggtaacatttttga

SEQ ID NO: 988532 - DNA, 33 bp, Homo sapien
attgcaccttgatatagctggtaacatttttga

SEQ ID NO: 988533 - DNA, 33 bp, Homo sapien
tcttctcttcactgagaccatttcctccttgga

SEQ ID NO: 988534 - DNA, 33 bp, Homo sapien
tcttctcttcactgaggccatttcctccttgga

SEQ ID NO: 988535 - DNA, 33 bp, Homo sapien
tacgttttagaccacccaatgacttagagacag

SEQ ID NO: 988536 - DNA, 33 bp, Homo sapien
tacgttttagaccacctaatgacttagagacag

SEQ ID NO: 988537 - DNA, 33 bp, Homo sapien
cccaactcaaagcacacggtggcagaaccattc

SEQ ID NO: 988538 - DNA, 33 bp, Homo sapien
cccaactcaaagcacatggtggcagaaccattc

SEQ ID NO: 988539 - DNA, 33 bp, Homo sapien
gcttctctcttgagacaagatgccacacaatgt

SEQ ID NO: 988540 - DNA, 33 bp, Homo sapien
gcttctctcttgagacgagatgccacacaatgt

SEQ ID NO: 988541 - DNA, 33 bp, Homo sapien
gagtaatactgagccacattttaagaggaagac

SEQ ID NO: 988542 - DNA, 33 bp, Homo sapien
gagtaatactgagccatattttaagaggaagac

SEQ ID NO: 988543 - DNA, 33 bp, Homo sapien
agtagctaccagtatacaacacatgtcttccaa

SEQ ID NO: 988544 - DNA, 33 bp, Homo sapien
agtagctaccagtatagaacacatgtcttccaa

SEQ ID NO: 988545 - DNA, 33 bp, Homo sapien
tttgcatcctggcgaacagtatagattctgtag

SEQ ID NO: 988546 - DNA, 33 bp, Homo sapien
tttgcatcctggcgaagagtatagattctgtag

SEQ ID NO: 988547 - DNA, 33 bp, Homo sapien
cttccaaacccagaatgaatgaatgagcaagat

SEQ ID NO: 988548 - DNA, 33 bp, Homo sapien
cttccaaacccagaattaatgaatgagcaagat

SEQ ID NO: 988549 - DNA, 33 bp, Homo sapien
ccttggcctcctccacactgtacgttttacctt

SEQ ID NO: 988550 - DNA, 33 bp, Homo sapien
ccttggcctcctccacgctgtacgttttacctt

SEQ ID NO: 988551 - DNA, 33 bp, Homo sapien
gaactgtgtttataaacggtcgccagactaaaa

SEQ ID NO: 988552 - DNA, 33 bp, Homo sapien
gaactgtgtttataaatggtcgccagactaaaa

SEQ ID NO: 988553 - DNA, 33 bp, Homo sapien
tctggccctaaatcaaactgaatcaagtgccaa

SEQ ID NO: 988554 - DNA, 33 bp, Homo sapien
tctggccctaaatcaagctgaatcaagtgccaa

SEQ ID NO: 988555 - DNA, 33 bp, Homo sapien
taagattactacatgaactaaccattccattcc

SEQ ID NO: 988556 - DNA, 33 bp, Homo sapien
taagattactacatgacctaaccattccattcc

SEQ ID NO: 988557 - DNA, 33 bp, Homo sapien
gatctgagactcttaacatgtattcatctggcc

SEQ ID NO: 988558 - DNA, 33 bp, Homo sapien
gatctgagactcttaatatgtattcatctggcc

SEQ ID NO: 988559 - DNA, 33 bp, Homo sapien
aattttcatctccataactaaaagggaaactca

SEQ ID NO: 988560 - DNA, 33 bp, Homo sapien
aattttcatctccatagctaaaagggaaactca

SEQ ID NO: 988561 - DNA, 33 bp, Homo sapien
ctttaccgggtttctacgcatccttaatccagt

SEQ ID NO: 988562 - DNA, 33 bp, Homo sapien
ctttaccgggtttctatgcatccttaatccagt

SEQ ID NO: 988563 - DNA, 33 bp, Homo sapien
aacaagcacagaccacgctaacatgttcaagtc

SEQ ID NO: 988564 - DNA, 33 bp, Homo sapien
aacaagcacagaccactctaacatgttcaagtc

SEQ ID NO: 988565 - DNA, 33 bp, Homo sapien
tttgaaaaagaaaggaaaattgccaggaattta

SEQ ID NO: 988566 - DNA, 33 bp, Homo sapien
tttgaaaaagaaaggagaattgccaggaattta

SEQ ID NO: 988567 - DNA, 33 bp, Homo sapien
cagttccaggattttccacaaaccacatttact

SEQ ID NO: 988568 - DNA, 33 bp, Homo sapien
cagttccaggattttctacaaaccacatttact

SEQ ID NO: 988569 - DNA, 33 bp, Homo sapien
tgttttttttctagaccaagttgccccacagag

SEQ ID NO: 988570 - DNA, 33 bp, Homo sapien
tgttttttttctagactaagttgccccacagag

SEQ ID NO: 988571 - DNA, 33 bp, Homo sapien
actattcactgtcatccgaacttcccactcaat

SEQ ID NO: 988572 - DNA, 33 bp, Homo sapien
actattcactgtcatctgaacttcccactcaat

SEQ ID NO: 988573 - DNA, 33 bp, Homo sapien
aaaccgattcggtcaacggtcagtcctggccag

SEQ ID NO: 988574 - DNA, 33 bp, Homo sapien
aaaccgattcggtcaagggtcagtcctggccag

SEQ ID NO: 988575 - DNA, 33 bp, Homo sapien
ggccacagtgattggcaccgggatggacaagtt

SEQ ID NO: 988576 - DNA, 33 bp, Homo sapien
ggccacagtgattggcgccgggatggacaagtt

SEQ ID NO: 988577 - DNA, 33 bp, Homo sapien
aaaaagtaccattagcagacagattgtacaaca

SEQ ID NO: 988578 - DNA, 33 bp, Homo sapien
aaaaagtaccattagcggacagattgtacaaca

SEQ ID NO: 988579 - DNA, 33 bp, Homo sapien
tatatacaccctgtcactgaaatcttcaaaata

SEQ ID NO: 988580 - DNA, 33 bp, Homo sapien
tatatacaccctgtcattgaaatcttcaaaata

SEQ ID NO: 988581 - DNA, 33 bp, Homo sapien
cagagagaatgacttgaagccaagtagattaga

SEQ ID NO: 988582 - DNA, 33 bp, Homo sapien
cagagagaatgacttggagccaagtagattaga

SEQ ID NO: 988583 - DNA, 33 bp, Homo sapien
tcttaccccttacaaacaaatgctaagacaatg

SEQ ID NO: 988584 - DNA, 33 bp, Homo sapien
tcttaccccttacaaataaatgctaagacaatg

SEQ ID NO: 988585 - DNA, 33 bp, Homo sapien
tgcattggtaaactgaacaatgaagatcttcct

SEQ ID NO: 988586 - DNA, 33 bp, Homo sapien
tgcattggtaaactgagcaatgaagatcttcct

SEQ ID NO: 988587 - DNA, 33 bp, Homo sapien
ggaaagagctgcaaaaatagtgtggccattttt

SEQ ID NO: 988588 - DNA, 33 bp, Homo sapien
ggaaagagctgcaaaagtagtgtggccattttt

SEQ ID NO: 988589 - DNA, 33 bp, Homo sapien
gggcagaattccaagacgacaaaaacatatgct

SEQ ID NO: 988590 - DNA, 33 bp, Homo sapien
gggcagaattccaagatgacaaaaacatatgct

SEQ ID NO: 988591 - DNA, 33 bp, Homo sapien
gatttgacattatggcacaggaacagtgatttt

SEQ ID NO: 988592 - DNA, 33 bp, Homo sapien
gatttgacattatggcgcaggaacagtgatttt

SEQ ID NO: 988593 - DNA, 33 bp, Homo sapien
tgagatagggcaattaaagaagtgacaaaatta

SEQ ID NO: 988594 - DNA, 33 bp, Homo sapien
tgagatagggcaattacagaagtgacaaaatta

SEQ ID NO: 988595 - DNA, 33 bp, Homo sapien
agaggaggtgatagcaagattagaggaagatag

SEQ ID NO: 988596 - DNA, 33 bp, Homo sapien
agaggaggtgatagcaggattagaggaagatag

SEQ ID NO: 988597 - DNA, 33 bp, Homo sapien
tttcttccaagaccaaatccattattttaaaag

SEQ ID NO: 988598 - DNA, 33 bp, Homo sapien
tttcttccaagaccaactccattattttaaaag

SEQ ID NO: 988599 - DNA, 33 bp, Homo sapien
ggatattgggcttccactaaagacttgttttcc

SEQ ID NO: 988600 - DNA, 33 bp, Homo sapien
ggatattgggcttccattaaagacttgttttcc

SEQ ID NO: 988601 - DNA, 33 bp, Homo sapien
gtattctctaaatactcagaggtctcctcaccc

SEQ ID NO: 988602 - DNA, 33 bp, Homo sapien
gtattctctaaatactgagaggtctcctcaccc

SEQ ID NO: 988603 - DNA, 33 bp, Homo sapien
atttgatcttcctcaaagtcctaggtcatgaac

SEQ ID NO: 988604 - DNA, 33 bp, Homo sapien
atttgatcttcctcaaggtcctaggtcatgaac

SEQ ID NO: 988605 - DNA, 33 bp, Homo sapien
ttaagacctaatggtaagctcttctgatcactc

SEQ ID NO: 988606 - DNA, 33 bp, Homo sapien
ttaagacctaatggtaggctcttctgatcactc

SEQ ID NO: 988607 - DNA, 33 bp, Homo sapien
aagtgccgggatcacaagtatgagataatcttt

SEQ ID NO: 988608 - DNA, 33 bp, Homo sapien
aagtgccgggatcacaggtatgagataatcttt

SEQ ID NO: 988609 - DNA, 33 bp, Homo sapien
aaaaacaatgaatctgaaaagtattacgttaaa

SEQ ID NO: 988610 - DNA, 33 bp, Homo sapien
aaaaacaatgaatctggaaagtattacgttaaa

SEQ ID NO: 988611 - DNA, 33 bp, Homo sapien
cttgaaaaagacattaaactgcagctgcagggg

SEQ ID NO: 988612 - DNA, 33 bp, Homo sapien
cttgaaaaagacattacactgcagctgcagggg

SEQ ID NO: 988613 - DNA, 33 bp, Homo sapien
tttcttaagacttccaacaaataaaatcagctt

SEQ ID NO: 988614 - DNA, 33 bp, Homo sapien
tttcttaagacttccagcaaataaaatcagctt

SEQ ID NO: 988615 - DNA, 33 bp, Homo sapien
caatattgagatatgcaaagtgcttattatcag

SEQ ID NO: 988616 - DNA, 33 bp, Homo sapien
caatattgagatatgcgaagtgcttattatcag

SEQ ID NO: 988617 - DNA, 33 bp, Homo sapien
aagccctggtcttcttcaaaaagctgtccagaa

SEQ ID NO: 988618 - DNA, 33 bp, Homo sapien
aagccctggtcttctttaaaaagctgtccagaa

SEQ ID NO: 988619 - DNA, 33 bp, Homo sapien
ttgtcaattatatgtaaagatggatagaggatg

SEQ ID NO: 988620 - DNA, 33 bp, Homo sapien
ttgtcaattatatgtagagatggatagaggatg

SEQ ID NO: 988621 - DNA, 33 bp, Homo sapien
atgttgagcagagctacaagaaactaatcttca

SEQ ID NO: 988622 - DNA, 33 bp, Homo sapien
atgttgagcagagctataagaaactaatcttca

SEQ ID NO: 988623 - DNA, 33 bp, Homo sapien
gtgatgaaacaacatacacaacaaatccctgtg

SEQ ID NO: 988624 - DNA, 33 bp, Homo sapien
gtgatgaaacaacatatacaacaaatccctgtg

SEQ ID NO: 988625 - DNA, 33 bp, Homo sapien
caggtactctaatatgccacttgtaacatctgt

SEQ ID NO: 988626 - DNA, 33 bp, Homo sapien
caggtactctaatatggcacttgtaacatctgt

SEQ ID NO: 988627 - DNA, 33 bp, Homo sapien
gatggagataactgcaatgaaaaccaatctgac

SEQ ID NO: 988628 - DNA, 33 bp, Homo sapien
gatggagataactgcattgaaaaccaatctgac

SEQ ID NO: 988629 - DNA, 33 bp, Homo sapien
caaaacttttgtggccagaataaatacaaattc

SEQ ID NO: 988630 - DNA, 33 bp, Homo sapien
caaaacttttgtggcctgaataaatacaaattc

SEQ ID NO: 988631 - DNA, 33 bp, Homo sapien
gagaataaataacaggacaatgaaaatggaaag

SEQ ID NO: 988632 - DNA, 33 bp, Homo sapien
gagaataaataacagggcaatgaaaatggaaag

SEQ ID NO: 988633 - DNA, 33 bp, Homo sapien
ggcaataataacggtgcaagcaaatactagaga

SEQ ID NO: 988634 - DNA, 33 bp, Homo sapien
ggcaataataacggtgtaagcaaatactagaga

SEQ ID NO: 988635 - DNA, 33 bp, Homo sapien
gcttcaattccttcataaaattttccctgatct

SEQ ID NO: 988636 - DNA, 33 bp, Homo sapien
gcttcaattccttcatgaaattttccctgatct

SEQ ID NO: 988637 - DNA, 33 bp, Homo sapien
taaggtgtaagcaacaatggtgtcatagatgat

SEQ ID NO: 988638 - DNA, 33 bp, Homo sapien
taaggtgtaagcaacagtggtgtcatagatgat

SEQ ID NO: 988639 - DNA, 33 bp, Homo sapien
ccactctgctggtaccaatttactggattagtc

SEQ ID NO: 988640 - DNA, 33 bp, Homo sapien
ccactctgctggtaccgatttactggattagtc

SEQ ID NO: 988641 - DNA, 33 bp, Homo sapien; identical to SEQ ID NO: 988639

SEQ ID NO: 988642 - DNA, 33 bp, Homo sapien; identical to SEQ ID NO: 988640

SEQ ID NO: 988643 - DNA, 33 bp, Homo sapien
atcactcagtgcaaaaatccaagtccaagtcat

SEQ ID NO: 988644 - DNA, 33 bp, Homo sapien
atcactcagtgcaaaagtccaagtccaagtcat

SEQ ID NO: 988645 - DNA, 33 bp, Homo sapien
gtatcaaatggataaacgaattggataggctga

SEQ ID NO: 988646 - DNA, 33 bp, Homo sapien
gtatcaaatggataaatgaattggataggctga

SEQ ID NO: 988647 - DNA, 33 bp, Homo sapien
acccagaatatagattaaaactcacatgatgtt

SEQ ID NO: 988648 - DNA, 33 bp, Homo sapien
acccagaatatagattgaaactcacatgatgtt

SEQ ID NO: 988649 - DNA, 33 bp, Homo sapien
tgtcaattacttagaccctgaatttcaatttcc

SEQ ID NO: 988650 - DNA, 33 bp, Homo sapien
tgtcaattacttagactctgaatttcaatttcc

SEQ ID NO: 988651 - DNA, 33 bp, Homo sapien
ggagttgaggaaattaacacatacattttaaat

SEQ ID NO: 988652 - DNA, 33 bp, Homo sapien
ggagttgaggaaattaccacatacattttaaat

SEQ ID NO: 988653 - DNA, 33 bp, Homo sapien
tgtgatgactgaggtaaagataaaagtgacatg

SEQ ID NO: 988654 - DNA, 33 bp, Homo sapien
tgtgatgactgaggtagagataaaagtgacatg

SEQ ID NO: 988655 - DNA, 33 bp, Homo sapien
aatgctgagtctttggaaagttaataacccagt

SEQ ID NO: 988656 - DNA, 33 bp, Homo sapien
aatgctgagtctttgggaagttaataacccagt

SEQ ID NO: 988657 - DNA, 33 bp, Homo sapien
caactagaagattgctaactgtattaaaagaga

SEQ ID NO: 988658 - DNA, 33 bp, Homo sapien
caactagaagattgctgactgtattaaaagaga

SEQ ID NO: 988659 - DNA, 33 bp, Homo sapien
agcccaagtttgtagagccatctatagacaatt

SEQ ID NO: 988660 - DNA, 33 bp, Homo sapien
agcccaagtttgtagatccatctatagacaatt

SEQ ID NO: 988661 - DNA, 33 bp, Homo sapien
agaatcattaactctacggtagttccctctgtc

SEQ ID NO: 988662 - DNA, 33 bp, Homo sapien
agaatcattaactctatggtagttccctctgtc

SEQ ID NO: 988663 - DNA, 33 bp, Homo sapien
agtcttatggtccaataaacttctctgtcaaga

SEQ ID NO: 988664 - DNA, 33 bp, Homo sapien
agtcttatggtccaatgaacttctctgtcaaga

SEQ ID NO: 988665 - DNA, 33 bp, Homo sapien
agttcaatccttgctacagttcaaactctttta

SEQ ID NO: 988666 - DNA, 33 bp, Homo sapien
agttcaatccttgctatagttcaaactctttta

SEQ ID NO: 988667 - DNA, 33 bp, Homo sapien
atttggacataagcaaccaattaagttgacttg

SEQ ID NO: 988668 - DNA, 33 bp, Homo sapien
atttggacataagcaatcaattaagttgacttg

SEQ ID NO: 988669 - DNA, 33 bp, Homo sapien
ttaccagaaacaagtccgaaaaataattaggat

SEQ ID NO: 988670 - DNA, 33 bp, Homo sapien
ttaccagaaacaagtctgaaaaataattaggat

SEQ ID NO: 988671 - DNA, 33 bp, Homo sapien
ttgccagaacatgagcaaagctgtatcataaaa

SEQ ID NO: 988672 - DNA, 33 bp, Homo sapien
ttgccagaacatgagcgaagctgtatcataaaa

SEQ ID NO: 988673 - DNA, 33 bp, Homo sapien
ccatttgtcatggagactcaggttattagtcac

SEQ ID NO: 988674 - DNA, 33 bp, Homo sapien
ccatttgtcatggagattcaggttattagtcac

SEQ ID NO: 988675 - DNA, 33 bp, Homo sapien
tctgcagattgaaatacagtttccaagccaaac

SEQ ID NO: 988676 - DNA, 33 bp, Homo sapien
tctgcagattgaaatagagtttccaagccaaac

SEQ ID NO: 988677 - DNA, 33 bp, Homo sapien
taagaaatcacttggaaagcaaaccaactgagc

SEQ ID NO: 988678 - DNA, 33 bp, Homo sapien
taagaaatcacttggagagcaaaccaactgagc

SEQ ID NO: 988679 - DNA, 33 bp, Homo sapien
cagttaaagtatttcactatgcagcaaagttca

SEQ ID NO: 988680 - DNA, 33 bp, Homo sapien
cagttaaagtatttcattatgcagcaaagttca

SEQ ID NO: 988681 - DNA, 33 bp, Homo sapien
ccgtcgttaatttgaaagaagaaacatgggtaa

SEQ ID NO: 988682 - DNA, 33 bp, Homo sapien
ccgtcgttaatttgaaggaagaaacatgggtaa

SEQ ID NO: 988683 - DNA, 33 bp, Homo sapien
gggacatagaatcatacatggttgctgacttgg

SEQ ID NO: 988684 - DNA, 33 bp, Homo sapien
gggacatagaatcatatatggttgctgacttgg

SEQ ID NO: 988685 - DNA, 33 bp, Homo sapien
aattaccaagagatgcccaaatggatcacccga

SEQ ID NO: 988686 - DNA, 33 bp, Homo sapien
aattaccaagagatgctcaaatggatcacccga

SEQ ID NO: 988687 - DNA, 33 bp, Homo sapien
aacaatcttaccagaagttatgtaccaaatcaa

SEQ ID NO: 988688 - DNA, 33 bp, Homo sapien
aacaatcttaccagaatttatgtaccaaatcaa

SEQ ID NO: 988689 - DNA, 33 bp, Homo sapien
tgtacaataggttataccaacttcccctgattc

SEQ ID NO: 988690 - DNA, 33 bp, Homo sapien
tgtacaataggttatatcaacttcccctgattc

SEQ ID NO: 988691 - DNA, 33 bp, Homo sapien
atacgctagaagactgaaggtctaagatgcaga

SEQ ID NO: 988692 - DNA, 33 bp, Homo sapien
atacgctagaagactggaggtctaagatgcaga

SEQ ID NO: 988693 - DNA, 33 bp, Homo sapien
cttggtaaaatggaaaattacctatacaaagaa

SEQ ID NO: 988694 - DNA, 33 bp, Homo sapien
cttggtaaaatggaaacttacctatacaaagaa

SEQ ID NO: 988695 - DNA, 33 bp, Homo sapien
gatttttagatcagaccctgagcaaggcttaat

SEQ ID NO: 988696 - DNA, 33 bp, Homo sapien
gatttttagatcagactctgagcaaggcttaat

SEQ ID NO: 988697 - DNA, 33 bp, Homo sapien
agaaaagtagcacttaccgagagcccacattgg

SEQ ID NO: 988698 - DNA, 33 bp, Homo sapien
agaaaagtagcacttatcgagagcccacattgg

SEQ ID NO: 988699 - DNA, 33 bp, Homo sapien
actcactgtttttctaaggagctgtaaaaggca

SEQ ID NO: 988700 - DNA, 33 bp, Homo sapien
actcactgtttttctagggagctgtaaaaggca

SEQ ID NO: 988701 - DNA, 33 bp, Homo sapien
tcagagaatgaatagacgcaaaataacaaaagc

SEQ ID NO: 988702 - DNA, 33 bp, Homo sapien
tcagagaatgaatagatgcaaaataacaaaagc

SEQ ID NO: 988703 - DNA, 33 bp, Homo sapien
attccttgaacaagctcactgccggttagttta

SEQ ID NO: 988704 - DNA, 33 bp, Homo sapien
attccttgaacaagcttactgccggttagttta

SEQ ID NO: 988705 - DNA, 33 bp, Homo sapien
gggcttgcgctctagcagaggtcattattggca

SEQ ID NO: 988706 - DNA, 33 bp, Homo sapien
gggcttgcgctctagcggaggtcattattggca

SEQ ID NO: 988707 - DNA, 33 bp, Homo sapien
aagcctaagcctcttcaatggccagagacagga

SEQ ID NO: 988708 - DNA, 33 bp, Homo sapien
aagcctaagcctcttcgatggccagagacagga

SEQ ID NO: 988709 - DNA, 33 bp, Homo sapien
cagggatcctatatgccgaatgaatggggctag

SEQ ID NO: 988710 - DNA, 33 bp, Homo sapien
cagggatcctatatgctgaatgaatggggctag

SEQ ID NO: 988711 - DNA, 33 bp, Homo sapien
tggccagacactaccccccttcatttccaagca

SEQ ID NO: 988712 - DNA, 33 bp, Homo sapien
tggccagacactacccgccttcatttccaagca

SEQ ID NO: 988713 - DNA, 33 bp, Homo sapien
gaaggccagcagacaaagttggaatataaccat

SEQ ID NO: 988714 - DNA, 33 bp, Homo sapien
gaaggccagcagacaaggttggaatataaccat

SEQ ID NO: 988715 - DNA, 33 bp, Homo sapien
ctaattcttgactcaaaggtcttaaaatctgcc

SEQ ID NO: 988716 - DNA, 33 bp, Homo sapien
ctaattcttgactcaagggtcttaaaatctgcc

SEQ ID NO: 988717 - DNA, 33 bp, Homo sapien
tacaaatgcttattctaacattcaagctgtgga

SEQ ID NO: 988718 - DNA, 33 bp, Homo sapien
tacaaatgcttattctgacattcaagctgtgga

SEQ ID NO: 988719 - DNA, 33 bp, Homo sapien
ataaggaaatgctacgaaagaaattagacatga

SEQ ID NO: 988720 - DNA, 33 bp, Homo sapien
ataaggaaatgctacgcaagaaattagacatga

SEQ ID NO: 988721 - DNA, 33 bp, Homo sapien
gtcaagtgtttgcaaccctgatataaattcctt

SEQ ID NO: 988722 - DNA, 33 bp, Homo sapien
gtcaagtgtttgcaactctgatataaattcctt

SEQ ID NO: 988723 - DNA, 33 bp, Homo sapien
acctctacacaaaataatacacatggaagtggt

SEQ ID NO: 988724 - DNA, 33 bp, Homo sapien
acctctacacaaaatagtacacatggaagtggt

SEQ ID NO: 988725 - DNA, 33 bp, Homo sapien
aactgaaaaagaggcaaaagcatctgtgaggct

SEQ ID NO: 988726 - DNA, 33 bp, Homo sapien
aactgaaaaagaggcagaagcatctgtgaggct

SEQ ID NO: 988727 - DNA, 33 bp, Homo sapien
catctgtgaggctcaaagatagatgtttgaggt

SEQ ID NO: 988728 - DNA, 33 bp, Homo sapien
catctgtgaggctcaacgatagatgtttgaggt

SEQ ID NO: 988729 - DNA, 33 bp, Homo sapien
atttactgttccatgacatagtgactattcaat

SEQ ID NO: 988730 - DNA, 33 bp, Homo sapien
atttactgttccatgatatagtgactattcaat

SEQ ID NO: 988731 - DNA, 33 bp, Homo sapien
tcagaagagatccaaaatttctagggggtgtct

SEQ ID NO: 988732 - DNA, 33 bp, Homo sapien
tcagaagagatccaaattttctagggggtgtct

SEQ ID NO: 988733 - DNA, 33 bp, Homo sapien
gaggaactgatagtatcacaacaagaaagcaga

SEQ ID NO: 988734 - DNA, 33 bp, Homo sapien
gaggaactgatagtattacaacaagaaagcaga

SEQ ID NO: 988735 - DNA, 33 bp, Homo sapien
cttaatactgttacaacggcaattacatttaaa

SEQ ID NO: 988736 - DNA, 33 bp, Homo sapien
cttaatactgttacaatggcaattacatttaaa

SEQ ID NO: 988737 - DNA, 33 bp, Homo sapien
aatgaggaaggggtggaatgaatgcaagggggc

SEQ ID NO: 988738 - DNA, 33 bp, Homo sapien
aatgaggaaggggtggcatgaatgcaagggggc

SEQ ID NO: 988739 - DNA, 33 bp, Homo sapien
catcaggatgaagctaagcattctattacttga

SEQ ID NO: 988740 - DNA, 33 bp, Homo sapien
catcaggatgaagctaggcattctattacttga

SEQ ID NO: 988741 - DNA, 33 bp, Homo sapien
ggctgcctccatcaagacatatttaggggttct

SEQ ID NO: 988742 - DNA, 33 bp, Homo sapien
ggctgcctccatcaaggcatatttaggggttct

SEQ ID NO: 988743 - DNA, 33 bp, Homo sapien
agtgatcattttgaaaacacatacatcatgact

SEQ ID NO: 988744 - DNA, 33 bp, Homo sapien
agtgatcattttgaaaccacatacatcatgact

SEQ ID NO: 988745 - DNA, 33 bp, Homo sapien
ggactacaaagctatcactatacttccaaaaaa

SEQ ID NO: 988746 - DNA, 33 bp, Homo sapien
ggactacaaagctatcgctatacttccaaaaaa

SEQ ID NO: 988747 - DNA, 33 bp, Homo sapien
tatctttcataatccaactctaaactattttta

SEQ ID NO: 988748 - DNA, 33 bp, Homo sapien
tatctttcataatccagctctaaactattttta

SEQ ID NO: 988749 - DNA, 33 bp, Homo sapien
aagagtgttgatagagaatttagatgtgacagc

SEQ ID NO: 988750 - DNA, 33 bp, Homo sapien
aagagtgttgatagagtatttagatgtgacagc

SEQ ID NO: 988751 - DNA, 33 bp, Homo sapien
tttatttatttctgcaatatgttcatttgaatg

SEQ ID NO: 988752 - DNA, 33 bp, Homo sapien
tttatttatttctgcagtatgttcatttgaatg

SEQ ID NO: 988753 - DNA, 33 bp, Homo sapien
aaccaggtactagtagaaggaacgagatatcac

SEQ ID NO: 988754 - DNA, 33 bp, Homo sapien
aaccaggtactagtaggaggaacgagatatcac

SEQ ID NO: 988755 - DNA, 33 bp, Homo sapien
ttgaggtggacctctaccttaactcactttttt

SEQ ID NO: 988756 - DNA, 33 bp, Homo sapien
ttgaggtggacctctatcttaactcactttttt

SEQ ID NO: 988757 - DNA, 33 bp, Homo sapien
catgccattttttcacagtaaatccaagagtaa

SEQ ID NO: 988758 - DNA, 33 bp, Homo sapien
catgccattttttcactgtaaatccaagagtaa

SEQ ID NO: 988759 - DNA, 33 bp, Homo sapien
cactcttatacactaaagatgagtctggcaatt

SEQ ID NO: 988760 - DNA, 33 bp, Homo sapien
cactcttatacactaatgatgagtctggcaatt

SEQ ID NO: 988761 - DNA, 33 bp, Homo sapien
ttaacacaaaatgcccacgagattgtgaggaaa

SEQ ID NO: 988762 - DNA, 33 bp, Homo sapien
ttaacacaaaatgcccgcgagattgtgaggaaa

SEQ ID NO: 988763 - DNA, 33 bp, Homo sapien
gtcacatacagttaccaatacagtagccaggtg

SEQ ID NO: 988764 - DNA, 33 bp, Homo sapien
gtcacatacagttaccgatacagtagccaggtg

SEQ ID NO: 988765 - DNA, 33 bp, Homo sapien
cccttgtattctcccactgaatgtgccttcaca

SEQ ID NO: 988766 - DNA, 33 bp, Homo sapien
cccttgtattctcccattgaatgtgccttcaca

SEQ ID NO: 988767 - DNA, 33 bp, Homo sapien
atagtatatttttcggacaatctgaccatgaga

SEQ ID NO: 988768 - DNA, 33 bp, Homo sapien
atagtatatttttcgggcaatctgaccatgaga

SEQ ID NO: 988769 - DNA, 33 bp, Homo sapien
gccttgtcatcgttcacagcaggtactcgagct

SEQ ID NO: 988770 - DNA, 33 bp, Homo sapien
gccttgtcatcgttcatagcaggtactcgagct

SEQ ID NO: 988771 - DNA, 33 bp, Homo sapien
tgtgtgtttgcacgtaaatacttaattaaatga

SEQ ID NO: 988772 - DNA, 33 bp, Homo sapien
tgtgtgtttgcacgtatatacttaattaaatga

SEQ ID NO: 988773 - DNA, 33 bp, Homo sapien
acacattatactaatacaggtacttttgagttc

SEQ ID NO: 988774 - DNA, 33 bp, Homo sapien
acacattatactaatagaggtacttttgagttc

SEQ ID NO: 988775 - DNA, 33 bp, Homo sapien
tctactgacctcacagactatctcccgtctcca

SEQ ID NO: 988776 - DNA, 33 bp, Homo sapien
tctactgacctcacaggctatctcccgtctcca

SEQ ID NO: 988777 - DNA, 33 bp, Homo sapien
tgtctggcttatacaacgtggctattcctcatc

SEQ ID NO: 988778 - DNA, 33 bp, Homo sapien
tgtctggcttatacaatgtggctattcctcatc

SEQ ID NO: 988779 - DNA, 33 bp, Homo sapien
cattttgtagggaaaaaaaaacatccagtactt

SEQ ID NO: 988780 - DNA, 33 bp, Homo sapien
cattttgtagggaaaagaaaacatccagtactt

SEQ ID NO: 988781 - DNA, 33 bp, Homo sapien
ccgtcactagtgactaacgacttcatgagaatt

SEQ ID NO: 988782 - DNA, 33 bp, Homo sapien
ccgtcactagtgactaccgacttcatgagaatt

SEQ ID NO: 988783 - DNA, 33 bp, Homo sapien
agtacctgccttatcacgtcgttctgaaaatca

SEQ ID NO: 988784 - DNA, 33 bp, Homo sapien
agtacctgccttatcatgtcgttctgaaaatca

SEQ ID NO: 988785 - DNA, 33 bp, Homo sapien
ttaacatggaatgagaagttattatttgtacaa

SEQ ID NO: 988786 - DNA, 33 bp, Homo sapien
ttaacatggaatgagatgttattatttgtacaa

SEQ ID NO: 988787 - DNA, 33 bp, Homo sapien
atctctctaatcaataagcaactccactgacca

SEQ ID NO: 988788 - DNA, 33 bp, Homo sapien
atctctctaatcaataggcaactccactgacca

SEQ ID NO: 988789 - DNA, 33 bp, Homo sapien
atttgaaactgttgacagctatgagctccctgg

SEQ ID NO: 988790 - DNA, 33 bp, Homo sapien
atttgaaactgttgacggctatgagctccctgg

SEQ ID NO: 988791 - DNA, 33 bp, Homo sapien
aaactcattgtaagcaacctcttctacagaata

SEQ ID NO: 988792 - DNA, 33 bp, Homo sapien
aaactcattgtaagcatcctcttctacagaata

SEQ ID NO: 988793 - DNA, 33 bp, Homo sapien
agagttcatgcagcaacagtctttgtggaagat

SEQ ID NO: 988794 - DNA, 33 bp, Homo sapien
agagttcatgcagcaatagtctttgtggaagat

SEQ ID NO: 988795 - DNA, 33 bp, Homo sapien
ctccctaagtgtgttaccatgggcgagttgctt

SEQ ID NO: 988796 - DNA, 33 bp, Homo sapien
ctccctaagtgtgttatcatgggcgagttgctt

SEQ ID NO: 988797 - DNA, 33 bp, Homo sapien
gattaatgaatgtaaaaatacaacagtatagac

SEQ ID NO: 988798 - DNA, 33 bp, Homo sapien
gattaatgaatgtaaagatacaacagtatagac

SEQ ID NO: 988799 - DNA, 33 bp, Homo sapien
caatgaattccaatcacaagaaacgtgaagaaa

SEQ ID NO: 988800 - DNA, 33 bp, Homo sapien
caatgaattccaatcataagaaacgtgaagaaa

SEQ ID NO: 988801 - DNA, 33 bp, Homo sapien
agatcctacaacagaacggtggtggcatggaat

SEQ ID NO: 988802 - DNA, 33 bp, Homo sapien
agatcctacaacagaatggtggtggcatggaat

SEQ ID NO: 988803 - DNA, 33 bp, Homo sapien
ttcaaagggacatttaccaatcattgttagtca

SEQ ID NO: 988804 - DNA, 33 bp, Homo sapien
ttcaaagggacatttatcaatcattgttagtca

SEQ ID NO: 988805 - DNA, 33 bp, Homo sapien
taagaatcaaattataagaatgctgttataaga

SEQ ID NO: 988806 - DNA, 33 bp, Homo sapien
taagaatcaaattataggaatgctgttataaga

SEQ ID NO: 988807 - DNA, 33 bp, Homo sapien
aacagcaaaatatgaacaggtgttactctgaaa

SEQ ID NO: 988808 - DNA, 33 bp, Homo sapien
aacagcaaaatatgaataggtgttactctgaaa

SEQ ID NO: 988809 - DNA, 33 bp, Homo sapien
aatgttgttagaatagccatatgtggaagaata

SEQ ID NO: 988810 - DNA, 33 bp, Homo sapien
aatgttgttagaatagtcatatgtggaagaata

SEQ ID NO: 988811 - DNA, 33 bp, Homo sapien
agaacagtgagctacacagtaagactcaataat

SEQ ID NO: 988812 - DNA, 33 bp, Homo sapien
agaacagtgagctacatagtaagactcaataat

SEQ ID NO: 988813 - DNA, 33 bp, Homo sapien
accaggcatctgtaagaagtttttggtccttcc

SEQ ID NO: 988814 - DNA, 33 bp, Homo sapien
accaggcatctgtaaggagtttttggtccttcc

SEQ ID NO: 988815 - DNA, 33 bp, Homo sapien
caataagatgccaagaacatacattggagaaag

SEQ ID NO: 988816 - DNA, 33 bp, Homo sapien
caataagatgccaagagcatacattggagaaag

SEQ ID NO: 988817 - DNA, 33 bp, Homo sapien
ttcaaaaatccagtgaaagagtcatttaactgc

SEQ ID NO: 988818 - DNA, 33 bp, Homo sapien
ttcaaaaatccagtgagagagtcatttaactgc

SEQ ID NO: 988819 - DNA, 33 bp, Homo sapien
gaaataatttaaaacaaagtcaatggagctgga

SEQ ID NO: 988820 - DNA, 33 bp, Homo sapien
gaaataatttaaaacagagtcaatggagctgga

SEQ ID NO: 988821 - DNA, 33 bp, Homo sapien
cttaactgctctcctcacctgtggacttaccct

SEQ ID NO: 988822 - DNA, 33 bp, Homo sapien
cttaactgctctcctcgcctgtggacttaccct

SEQ ID NO: 988823 - DNA, 33 bp, Homo sapien
acaacatttccaaacacgacagctagggatttt

SEQ ID NO: 988824 - DNA, 33 bp, Homo sapien
acaacatttccaaacatgacagctagggatttt

SEQ ID NO: 988825 - DNA, 33 bp, Homo sapien
gggcacagcacagaagaagtgttccttttaatt

SEQ ID NO: 988826 - DNA, 33 bp, Homo sapien
gggcacagcacagaaggagtgttccttttaatt

SEQ ID NO: 988827 - DNA, 33 bp, Homo sapien
ctatctgtccctatgcaatgagaaagcaggaag

SEQ ID NO: 988828 - DNA, 33 bp, Homo sapien
ctatctgtccctatgcgatgagaaagcaggaag

SEQ ID NO: 988829 - DNA, 33 bp, Homo sapien
gggagttccagaagaaattacttgaaagttagc

SEQ ID NO: 988830 - DNA, 33 bp, Homo sapien
gggagttccagaagaagttacttgaaagttagc

SEQ ID NO: 988831 - DNA, 33 bp, Homo sapien
aaagattgtgttcaataataaagctgtcaaggt

SEQ ID NO: 988832 - DNA, 33 bp, Homo sapien
aaagattgtgttcaatgataaagctgtcaaggt

SEQ ID NO: 988833 - DNA, 33 bp, Homo sapien
gacaatttcttttcacacctcctggagtcttat

SEQ ID NO: 988834 - DNA, 33 bp, Homo sapien
gacaatttcttttcacgcctcctggagtcttat

SEQ ID NO: 988835 - DNA, 33 bp, Homo sapien
ttattttaagccaccaagtgtgcagtcatatgt

SEQ ID NO: 988836 - DNA, 33 bp, Homo sapien
ttattttaagccaccaggtgtgcagtcatatgt

SEQ ID NO: 988837 - DNA, 33 bp, Homo sapien
ggtacctcagagaaaccgtatgaaatagtcatt

SEQ ID NO: 988838 - DNA, 33 bp, Homo sapien
ggtacctcagagaaactgtatgaaatagtcatt

SEQ ID NO: 988839 - DNA, 33 bp, Homo sapien
aagaaggtggttccataaacagctggttgaact

SEQ ID NO: 988840 - DNA, 33 bp, Homo sapien
aagaaggtggttccatgaacagctggttgaact

SEQ ID NO: 988841 - DNA, 33 bp, Homo sapien
aaccattagccattggcagttttgcttgtgact

SEQ ID NO: 988842 - DNA, 33 bp, Homo sapien
aaccattagccattggtagttttgcttgtgact

SEQ ID NO: 988843 - DNA, 33 bp, Homo sapien
tatacctgctacctcaaactttagtcccagctt

SEQ ID NO: 988844 - DNA, 33 bp, Homo sapien
tatacctgctacctcagactttagtcccagctt

SEQ ID NO: 988845 - DNA, 33 bp, Homo sapien
aagttgctggatatcccgaatctcaatttctcc

SEQ ID NO: 988846 - DNA, 33 bp, Homo sapien
aagttgctggatatcctgaatctcaatttctcc

SEQ ID NO: 988847 - DNA, 33 bp, Homo sapien
tcacccctctttgaaacagtagctttaaattta

SEQ ID NO: 988848 - DNA, 33 bp, Homo sapien
tcacccctctttgaaatagtagctttaaattta

SEQ ID NO: 988849 - DNA, 33 bp, Homo sapien
gaccatgtctcaggcccacaaaacagcttggca

SEQ ID NO: 988850 - DNA, 33 bp, Homo sapien
gaccatgtctcaggcctacaaaacagcttggca

SEQ ID NO: 988851 - DNA, 33 bp, Homo sapien
tgctgtaaggagtagaattaacagaagacagag

SEQ ID NO: 988852 - DNA, 33 bp, Homo sapien
tgctgtaaggagtagagttaacagaagacagag

SEQ ID NO: 988853 - DNA, 33 bp, Homo sapien
gtgacatctagaaagccaattccctctgtcttc

SEQ ID NO: 988854 - DNA, 33 bp, Homo sapien
gtgacatctagaaagctaattccctctgtcttc

SEQ ID NO: 988855 - DNA, 33 bp, Homo sapien
tgatgttgcaagcactcactgaagcaacagttt

SEQ ID NO: 988856 - DNA, 33 bp, Homo sapien
tgatgttgcaagcactgactgaagcaacagttt

SEQ ID NO: 988857 - DNA, 33 bp, Homo sapien
attctgtttaaaggacaacatattaaaagcaca

SEQ ID NO: 988858 - DNA, 33 bp, Homo sapien
attctgtttaaaggaccacatattaaaagcaca

SEQ ID NO: 988859 - DNA, 33 bp, Homo sapien
aaaaaagttcctgtcacgggcaagaaatgaagt

SEQ ID NO: 988860 - DNA, 33 bp, Homo sapien
aaaaaagttcctgtcatgggcaagaaatgaagt

SEQ ID NO: 988861 - DNA, 33 bp, Homo sapien
tatcttcgaaatgatacgcggtttgaagggaac

SEQ ID NO: 988862 - DNA, 33 bp, Homo sapien
tatcttcgaaatgatatgcggtttgaagggaac

SEQ ID NO: 988863 - DNA, 33 bp, Homo sapien
ctgccggacagtggataaaatactgagtagcat

SEQ ID NO: 988864 - DNA, 33 bp, Homo sapien
ctgccggacagtggatgaaatactgagtagcat

SEQ ID NO: 988865 - DNA, 33 bp, Homo sapien
aatttcacgaatgtcaactatttagccctggat

SEQ ID NO: 988866 - DNA, 33 bp, Homo sapien
aatttcacgaatgtcagctatttagccctggat

SEQ ID NO: 988867 - DNA, 33 bp, Homo sapien
ggtttcaacgaattacactgatacacttagtgt

SEQ ID NO: 988868 - DNA, 33 bp, Homo sapien
ggtttcaacgaattacgctgatacacttagtgt

SEQ ID NO: 988869 - DNA, 33 bp, Homo sapien
atgtagaatgctgtgagattaaatcaatagtga

SEQ ID NO: 988870 - DNA, 33 bp, Homo sapien
atgtagaatgctgtgatattaaatcaatagtga

SEQ ID NO: 988871 - DNA, 33 bp, Homo sapien
tagtgacatttcctccgataatcttccagctta

SEQ ID NO: 988872 - DNA, 33 bp, Homo sapien
tagtgacatttcctcctataatcttccagctta

SEQ ID NO: 988873 - DNA, 33 bp, Homo sapien
tttataatcatctctcaatagtcctttccacag

SEQ ID NO: 988874 - DNA, 33 bp, Homo sapien
tttataatcatctctcgatagtcctttccacag

SEQ ID NO: 988875 - DNA, 33 bp, Homo sapien
atacaatagcaggaagcctaccagaatagaaga

SEQ ID NO: 988876 - DNA, 33 bp, Homo sapien
atacaatagcaggaagtctaccagaatagaaga

SEQ ID NO: 988877 - DNA, 33 bp, Homo sapien
ctattgtatacttctacattatgctcagaattc

SEQ ID NO: 988878 - DNA, 33 bp, Homo sapien
ctattgtatacttctatattatgctcagaattc

SEQ ID NO: 988879 - DNA, 33 bp, Homo sapien
tttctctttattacaccacctgaactaaactgg

SEQ ID NO: 988880 - DNA, 33 bp, Homo sapien
tttctctttattacactacctgaactaaactgg

SEQ ID NO: 988881 - DNA, 33 bp, Homo sapien
gtttctcatggtaagaagaaataagaatcagat

SEQ ID NO: 988882 - DNA, 33 bp, Homo sapien
gtttctcatggtaagatgaaataagaatcagat

SEQ ID NO: 988883 - DNA, 33 bp, Homo sapien
gatttctaatccaacagccttgtgttacagatg

SEQ ID NO: 988884 - DNA, 33 bp, Homo sapien
gatttctaatccaacatccttgtgttacagatg

SEQ ID NO: 988885 - DNA, 33 bp, Homo sapien
tcttctgtttcctacaagactaaacacctcaat

SEQ ID NO: 988886 - DNA, 33 bp, Homo sapien
tcttctgtttcctacaggactaaacacctcaat

SEQ ID NO: 988887 - DNA, 33 bp, Homo sapien
tttatgtaggtagaaacagtgactcaggtttgc

SEQ ID NO: 988888 - DNA, 33 bp, Homo sapien
tttatgtaggtagaaatagtgactcaggtttgc

SEQ ID NO: 988889 - DNA, 33 bp, Homo sapien
aacattcggtgttacaaatgatgacattcctgt

SEQ ID NO: 988890 - DNA, 33 bp, Homo sapien
aacattcggtgttacagatgatgacattcctgt

SEQ ID NO: 988891 - DNA, 33 bp, Homo sapien
tctgatagggcatctccactaagttctcaggaa

SEQ ID NO: 988892 - DNA, 33 bp, Homo sapien
tctgatagggcatctctactaagttctcaggaa

SEQ ID NO: 988893 - DNA, 33 bp, Homo sapien
tgaggattgaactttacgcttggtggtcagtaa

SEQ ID NO: 988894 - DNA, 33 bp, Homo sapien
tgaggattgaactttatgcttggtggtcagtaa

SEQ ID NO: 988895 - DNA, 33 bp, Homo sapien
tatccagaatgtataaatgacttgtaacccagt

SEQ ID NO: 988896 - DNA, 33 bp, Homo sapien
tatccagaatgtataagtgacttgtaacccagt

SEQ ID NO: 988897 - DNA, 33 bp, Homo sapien
aaaccatgcttactaaaaaggtcaaattgaagg

SEQ ID NO: 988898 - DNA, 33 bp, Homo sapien
aaaccatgcttactaagaaggtcaaattgaagg

SEQ ID NO: 988899 - DNA, 33 bp, Homo sapien
tagtataaaacaatcaatagtcctgtgactgct

SEQ ID NO: 988900 - DNA, 33 bp, Homo sapien
tagtataaaacaatcactagtcctgtgactgct

SEQ ID NO: 988901 - DNA, 33 bp, Homo sapien
ctttccatttctaatagcagctagagagattca

SEQ ID NO: 988902 - DNA, 33 bp, Homo sapien
ctttccatttctaatatcagctagagagattca

SEQ ID NO: 988903 - DNA, 33 bp, Homo sapien
cctctgcttactaagacggcaacttcagacaag

SEQ ID NO: 988904 - DNA, 33 bp, Homo sapien
cctctgcttactaagatggcaacttcagacaag

SEQ ID NO: 988905 - DNA, 33 bp, Homo sapien
tgaaaatccatgaatacaccttttaattaatct

SEQ ID NO: 988906 - DNA, 33 bp, Homo sapien
tgaaaatccatgaatagaccttttaattaatct

SEQ ID NO: 988907 - DNA, 33 bp, Homo sapien
attttgaaagaactatcacaaacaaagtttaag

SEQ ID NO: 988908 - DNA, 33 bp, Homo sapien
attttgaaagaactatgacaaacaaagtttaag

SEQ ID NO: 988909 - DNA, 33 bp, Homo sapien
tcaaggctcttcatagaacaatggcagtcttac

SEQ ID NO: 988910 - DNA, 33 bp, Homo sapien
tcaaggctcttcataggacaatggcagtcttac

SEQ ID NO: 988911 - DNA, 33 bp, Homo sapien
agagattgtgagcctgcaattagatcatcaaga

SEQ ID NO: 988912 - DNA, 33 bp, Homo sapien
agagattgtgagcctgtaattagatcatcaaga

SEQ ID NO: 988913 - DNA, 33 bp, Homo sapien
ggatattttaagaagcaaatacgataactcagg

SEQ ID NO: 988914 - DNA, 33 bp, Homo sapien
ggatattttaagaagccaatacgataactcagg

SEQ ID NO: 988915 - DNA, 33 bp, Homo sapien
taggtgaaagagcttacaggagagagatatctt

SEQ ID NO: 988916 - DNA, 33 bp, Homo sapien
taggtgaaagagcttagaggagagagatatctt

SEQ ID NO: 988917 - DNA, 33 bp, Homo sapien
aacaaaagaaatcccactcaactctgtttctag

SEQ ID NO: 988918 - DNA, 33 bp, Homo sapien
aacaaaagaaatcccattcaactctgtttctag

SEQ ID NO: 988919 - DNA, 33 bp, Homo sapien
actacaaagcaactccagatgcacctgtggctg

SEQ ID NO: 988920 - DNA, 33 bp, Homo sapien
actacaaagcaactccggatgcacctgtggctg

SEQ ID NO: 988921 - DNA, 33 bp, Homo sapien
ctaaaattgctcatggcccatagatggaagctt

SEQ ID NO: 988922 - DNA, 33 bp, Homo sapien
ctaaaattgctcatggtccatagatggaagctt

SEQ ID NO: 988923 - DNA, 33 bp, Homo sapien
gaccttcaaagcactaccttcatctggaacagg

SEQ ID NO: 988924 - DNA, 33 bp, Homo sapien
gaccttcaaagcactatcttcatctggaacagg

SEQ ID NO: 988925 - DNA, 33 bp, Homo sapien
acctagttccatcaataagttaaggaaaataag

SEQ ID NO: 988926 - DNA, 33 bp, Homo sapien
acctagttccatcaatgagttaaggaaaataag

SEQ ID NO: 988927 - DNA, 33 bp, Homo sapien
gctcaatattactggtaacagaggtcaatggaa

SEQ ID NO: 988928 - DNA, 33 bp, Homo sapien
gctcaatattactggtgacagaggtcaatggaa

SEQ ID NO: 988929 - DNA, 33 bp, Homo sapien
aatgggaggttcaataccagtgaagatttgttc

SEQ ID NO: 988930 - DNA, 33 bp, Homo sapien
aatgggaggttcaatatcagtgaagatttgttc

SEQ ID NO: 988931 - DNA, 33 bp, Homo sapien
tatatttctagaaagcagcaagttggggtctag

SEQ ID NO: 988932 - DNA, 33 bp, Homo sapien
tatatttctagaaagctgcaagttggggtctag

SEQ ID NO: 988933 - DNA, 33 bp, Homo sapien
taaaatgacagggataaataatgtttctttagc

SEQ ID NO: 988934 - DNA, 33 bp, Homo sapien
taaaatgacagggatagataatgtttctttagc

SEQ ID NO: 988935 - DNA, 33 bp, Homo sapien
cttctcttaagttctgaagaattctggtacaaa

SEQ ID NO: 988936 - DNA, 33 bp, Homo sapien
cttctcttaagttctgcagaattctggtacaaa

SEQ ID NO: 988937 - DNA, 33 bp, Homo sapien
tggctgttatgcatacacatctctatggctttg

SEQ ID NO: 988938 - DNA, 33 bp, Homo sapien
tggctgttatgcatacgcatctctatggctttg

SEQ ID NO: 988939 - DNA, 33 bp, Homo sapien
tacaacctaatctcaaaggacatatatcaactg

SEQ ID NO: 988940 - DNA, 33 bp, Homo sapien
tacaacctaatctcaagggacatatatcaactg

SEQ ID NO: 988941 - DNA, 33 bp, Homo sapien
caaaaaatttaatgccaggatctagatgtgtgc

SEQ ID NO: 988942 - DNA, 33 bp, Homo sapien
caaaaaatttaatgcccggatctagatgtgtgc

SEQ ID NO: 988943 - DNA, 33 bp, Homo sapien
acagtgtttagactaccggacttgtactttgtt

SEQ ID NO: 988944 - DNA, 33 bp, Homo sapien
acagtgtttagactactggacttgtactttgtt

SEQ ID NO: 988945 - DNA, 33 bp, Homo sapien
tagcaaataaatgcccagagttgattttatact

SEQ ID NO: 988946 - DNA, 33 bp, Homo sapien
tagcaaataaatgcccggagttgattttatact

SEQ ID NO: 988947 - DNA, 33 bp, Homo sapien
cactatttttgcttggaattgtctgatttcagg

SEQ ID NO: 988948 - DNA, 33 bp, Homo sapien
cactatttttgcttgggattgtctgatttcagg

SEQ ID NO: 988949 - DNA, 33 bp, Homo sapien
atcaacatcaattcaccgactgtaatattgtgg

SEQ ID NO: 988950 - DNA, 33 bp, Homo sapien
atcaacatcaattcactgactgtaatattgtgg

SEQ ID NO: 988951 - DNA, 33 bp, Homo sapien
cattcttctaattactcaaaaaccctgggcaat

SEQ ID NO: 988952 - DNA, 33 bp, Homo sapien
cattcttctaattactgaaaaaccctgggcaat

SEQ ID NO: 988953 - DNA, 33 bp, Homo sapien
tagaaatgacaataaccacaaactaatgaagtt

SEQ ID NO: 988954 - DNA, 33 bp, Homo sapien
tagaaatgacaataactacaaactaatgaagtt

SEQ ID NO: 988955 - DNA, 33 bp, Homo sapien
ctttagcgttaacatcaacacaggcctttaagt

SEQ ID NO: 988956 - DNA, 33 bp, Homo sapien
ctttagcgttaacatcgacacaggcctttaagt

SEQ ID NO: 988957 - DNA, 33 bp, Homo sapien
tattgcagcaggtgaactgagagctaataatag

SEQ ID NO: 988958 - DNA, 33 bp, Homo sapien
tattgcagcaggtgaattgagagctaataatag

SEQ ID NO: 988959 - DNA, 33 bp, Homo sapien
aacacggaattgatgacgtgagtgaaggaatgc

SEQ ID NO: 988960 - DNA, 33 bp, Homo sapien
aacacggaattgatgatgtgagtgaaggaatgc

SEQ ID NO: 988961 - DNA, 33 bp, Homo sapien
aacctgatgatttaggacatgaaaaagactcct

SEQ ID NO: 988962 - DNA, 33 bp, Homo sapien
aacctgatgatttaggtcatgaaaaagactcct

SEQ ID NO: 988963 - DNA, 33 bp, Homo sapien
agctgataatcacctaaaaaaggtacttaacag

SEQ ID NO: 988964 - DNA, 33 bp, Homo sapien
agctgataatcacctagaaaaggtacttaacag

SEQ ID NO: 988965 - DNA, 33 bp, Homo sapien
gccccaagtccagaaacagagaaatggttttga

SEQ ID NO: 988966 - DNA, 33 bp, Homo sapien
gccccaagtccagaaagagagaaatggttttga

SEQ ID NO: 988967 - DNA, 33 bp, Homo sapien
tgggcaaagcagggtaacaaaaatagtcatttt

SEQ ID NO: 988968 - DNA, 33 bp, Homo sapien
tgggcaaagcagggtagcaaaaatagtcatttt

SEQ ID NO: 988969 - DNA, 33 bp, Homo sapien
gcatccagtgcttagcaagtgctcagaaaattg

SEQ ID NO: 988970 - DNA, 33 bp, Homo sapien
gcatccagtgcttagccagtgctcagaaaattg

SEQ ID NO: 988971 - DNA, 33 bp, Homo sapien
cacctgacccatatgacaccaaagtggagtagg

SEQ ID NO: 988972 - DNA, 33 bp, Homo sapien
cacctgacccatatgataccaaagtggagtagg

SEQ ID NO: 988973 - DNA, 33 bp, Homo sapien
tcacagacatggctgaacttcttgaaggacccc

SEQ ID NO: 988974 - DNA, 33 bp, Homo sapien
tcacagacatggctgagcttcttgaaggacccc

SEQ ID NO: 988975 - DNA, 33 bp, Homo sapien
ttacattatgaattaaatagctctcacatcctg

SEQ ID NO: 988976 - DNA, 33 bp, Homo sapien
ttacattatgaattaagtagctctcacatcctg

SEQ ID NO: 988977 - DNA, 33 bp, Homo sapien
tcatatacgttattaactagacacaaagacctt

SEQ ID NO: 988978 - DNA, 33 bp, Homo sapien
tcatatacgttattaagtagacacaaagacctt

SEQ ID NO: 988979 - DNA, 33 bp, Homo sapien
acaggatggtaatgttaagacacaaattaacaa

SEQ ID NO: 988980 - DNA, 33 bp, Homo sapien
acaggatggtaatgttgagacacaaattaacaa

SEQ ID NO: 988981 - DNA, 33 bp, Homo sapien
acttggaaagcactccaaatcttgagaaggatg

SEQ ID NO: 988982 - DNA, 33 bp, Homo sapien
acttggaaagcactccgaatcttgagaaggatg

SEQ ID NO: 988983 - DNA, 33 bp, Homo sapien
tagtgaaacagaattacgtgagttttgaaatat

SEQ ID NO: 988984 - DNA, 33 bp, Homo sapien
tagtgaaacagaattatgtgagttttgaaatat

SEQ ID NO: 988985 - DNA, 33 bp, Homo sapien
ccggttagtgcatacccgacttactggccttcc

SEQ ID NO: 988986 - DNA, 33 bp, Homo sapien
ccggttagtgcataccggacttactggccttcc

SEQ ID NO: 988987 - DNA, 33 bp, Homo sapien
ataacacaaatctacactgacaatttaattgtg

SEQ ID NO: 988988 - DNA, 33 bp, Homo sapien
ataacacaaatctacattgacaatttaattgtg

SEQ ID NO: 988989 - DNA, 33 bp, Homo sapien
gggtctagggttatgccgaattagaatgaagcc

SEQ ID NO: 988990 - DNA, 33 bp, Homo sapien
gggtctagggttatgctgaattagaatgaagcc

SEQ ID NO: 988991 - DNA, 33 bp, Homo sapien
ttaatggttaactggaaatggcttgtaccggct

SEQ ID NO: 988992 - DNA, 33 bp, Homo sapien
ttaatggttaactggagatggcttgtaccggct

SEQ ID NO: 988993 - DNA, 33 bp, Homo sapien
agaatttcttgtaccacgttctagtaagccagg

SEQ ID NO: 988994 - DNA, 33 bp, Homo sapien
agaatttcttgtaccatgttctagtaagccagg

SEQ ID NO: 988995 - DNA, 33 bp, Homo sapien
ggatttgcctctttaacatggatgcaaggctat

SEQ ID NO: 988996 - DNA, 33 bp, Homo sapien
ggatttgcctctttaatatggatgcaaggctat

SEQ ID NO: 988997 - DNA, 33 bp, Homo sapien
tagaactgaaagctaacaaatgggtgtgtgata

SEQ ID NO: 988998 - DNA, 33 bp, Homo sapien
tagaactgaaagctaataaatgggtgtgtgata

SEQ ID NO: 988999 - DNA, 33 bp, Homo sapien
agtctctttaatgcaacgtaatggagtgtaaaa

SEQ ID NO: 989000 - DNA, 33 bp, Homo sapien
agtctctttaatgcaatgtaatggagtgtaaaa

SEQ ID NO: 989001 - DNA, 33 bp, Homo sapien
acagttaagtaagtaactgacagctcacagtaa

SEQ ID NO: 989002 - DNA, 33 bp, Homo sapien
acagttaagtaagtaattgacagctcacagtaa

SEQ ID NO: 989003 - DNA, 33 bp, Homo sapien
tattggcaggtgaaataaaggcattaccatact

SEQ ID NO: 989004 - DNA, 33 bp, Homo sapien
tattggcaggtgaaattaaggcattaccatact

SEQ ID NO: 989005 - DNA, 33 bp, Homo sapien
tggataaaaatggggaaggaagatcaacgtaaa

SEQ ID NO: 989006 - DNA, 33 bp, Homo sapien
tggataaaaatggggacggaagatcaacgtaaa

SEQ ID NO: 989007 - DNA, 33 bp, Homo sapien
attaagacaggtgggaccaagctcaattttatc

SEQ ID NO: 989008 - DNA, 33 bp, Homo sapien
attaagacaggtgggatcaagctcaattttatc

SEQ ID NO: 989009 - DNA, 33 bp, Homo sapien
agtgagccacgtggtcagaacctaaccttagtc

SEQ ID NO: 989010 - DNA, 33 bp, Homo sapien
agtgagccacgtggtcggaacctaaccttagtc

SEQ ID NO: 989011 - DNA, 33 bp, Homo sapien
cttaactcctggtgtgaaaatgtgcttcaaagc

SEQ ID NO: 989012 - DNA, 33 bp, Homo sapien
cttaactcctggtgtggaaatgtgcttcaaagc

SEQ ID NO: 989013 - DNA, 33 bp, Homo sapien
aatacttctatacatacgtctgaggctgtttgc

SEQ ID NO: 989014 - DNA, 33 bp, Homo sapien
aatacttctatacatatgtctgaggctgtttgc

SEQ ID NO: 989015 - DNA, 33 bp, Homo sapien
ttgtgaaccaattgtaacctaacttaataggta

SEQ ID NO: 989016 - DNA, 33 bp, Homo sapien
ttgtgaaccaattgtaccctaacttaataggta

SEQ ID NO: 989017 - DNA, 33 bp, Homo sapien
tacatactccattgaactgtgaagagatctgag

SEQ ID NO: 989018 - DNA, 33 bp, Homo sapien
tacatactccattgaattgtgaagagatctgag

SEQ ID NO: 989019 - DNA, 33 bp, Homo sapien
agttgctttgtatatacgtaaaatagatatctc

SEQ ID NO: 989020 - DNA, 33 bp, Homo sapien
agttgctttgtatataggtaaaatagatatctc

SEQ ID NO: 989021 - DNA, 33 bp, Homo sapien
attatagttatctcacaggttcaaatcagagaa

SEQ ID NO: 989022 - DNA, 33 bp, Homo sapien
attatagttatctcactggttcaaatcagagaa

SEQ ID NO: 989023 - DNA, 33 bp, Homo sapien
ggggctctacatctgaaagaaatgattttttat

SEQ ID NO: 989024 - DNA, 33 bp, Homo sapien
ggggctctacatctgagagaaatgattttttat

SEQ ID NO: 989025 - DNA, 33 bp, Homo sapien
aattttttagccatccccaaaatagtaaataaa

SEQ ID NO: 989026 - DNA, 33 bp, Homo sapien
aattttttagccatcctcaaaatagtaaataaa

SEQ ID NO: 989027 - DNA, 33 bp, Homo sapien
tgctaggttttggaatcaagataacactggcct

SEQ ID NO: 989028 - DNA, 33 bp, Homo sapien
tgctaggttttggaatgaagataacactggcct

SEQ ID NO: 989029 - DNA, 33 bp, Homo sapien
tttttgagattaagataacttacgtatgctcat

SEQ ID NO: 989030 - DNA, 33 bp, Homo sapien
tttttgagattaagatgacttacgtatgctcat

SEQ ID NO: 989031 - DNA, 33 bp, Homo sapien
caaataggcattatacacataggaaggctgaga

SEQ ID NO: 989032 - DNA, 33 bp, Homo sapien
caaataggcattatactcataggaaggctgaga

SEQ ID NO: 989033 - DNA, 33 bp, Homo sapien
aggaagtttaaaagaacgaggcctctatggggc

SEQ ID NO: 989034 - DNA, 33 bp, Homo sapien
aggaagtttaaaagaatgaggcctctatggggc

SEQ ID NO: 989035 - DNA, 33 bp, Homo sapien
tatttaacagagtagacgctttgctgaaccaca

SEQ ID NO: 989036 - DNA, 33 bp, Homo sapien
tatttaacagagtagatgctttgctgaaccaca

SEQ ID NO: 989037 - DNA, 33 bp, Homo sapien
catttcctgacaccagaatgaagatactggagg

SEQ ID NO: 989038 - DNA, 33 bp, Homo sapien
catttcctgacaccaggatgaagatactggagg

SEQ ID NO: 989039 - DNA, 33 bp, Homo sapien
gacaaaaagaaaaaaaatcctctccatattgag

SEQ ID NO: 989040 - DNA, 33 bp, Homo sapien
gacaaaaagaaaaaaattcctctccatattgag

SEQ ID NO: 989041 - DNA, 33 bp, Homo sapien
tcttgatactgtcctgaactagccacaggaaaa

SEQ ID NO: 989042 - DNA, 33 bp, Homo sapien
tcttgatactgtcctggactagccacaggaaaa

SEQ ID NO: 989043 - DNA, 33 bp, Homo sapien
tttcccctttcctatgcagtctgaagcctgaat

SEQ ID NO: 989044 - DNA, 33 bp, Homo sapien
tttcccctttcctatgtagtctgaagcctgaat

SEQ ID NO: 989045 - DNA, 33 bp, Homo sapien
agtcctgcattaggtgaaataatcaaagtggcc

SEQ ID NO: 989046 - DNA, 33 bp, Homo sapien
agtcctgcattaggtgtaataatcaaagtggcc

SEQ ID NO: 989047 - DNA, 33 bp, Homo sapien
atattacccaaatgtaaccctggctgtttagtt

SEQ ID NO: 989048 - DNA, 33 bp, Homo sapien
atattacccaaatgtacccctggctgtttagtt

SEQ ID NO: 989049 - DNA, 33 bp, Homo sapien
tgtatggatgtgacaaataaagctatcaaggta

SEQ ID NO: 989050 - DNA, 33 bp, Homo sapien
tgtatggatgtgacaattaaagctatcaaggta

SEQ ID NO: 989051 - DNA, 33 bp, Homo sapien
cgtggtcaaaaaaaagaacattatcttgaacat

SEQ ID NO: 989052 - DNA, 33 bp, Homo sapien
cgtggtcaaaaaaaaggacattatcttgaacat

SEQ ID NO: 989053 - DNA, 33 bp, Homo sapien
aatgtttcttgactccaagcctaaatattaagg

SEQ ID NO: 989054 - DNA, 33 bp, Homo sapien
aatgtttcttgactcccagcctaaatattaagg

SEQ ID NO: 989055 - DNA, 33 bp, Homo sapien
agaactgtggtttatacggactatcaatctaga

SEQ ID NO: 989056 - DNA, 33 bp, Homo sapien
agaactgtggtttatatggactatcaatctaga

SEQ ID NO: 989057 - DNA, 33 bp, Homo sapien
ggtagtggttgatcaacgtttttcatacaaata

SEQ ID NO: 989058 - DNA, 33 bp, Homo sapien
ggtagtggttgatcaatgtttttcatacaaata

SEQ ID NO: 989059 - DNA, 33 bp, Homo sapien
attgttaacactgttcaaaaccactgaagtgag

SEQ ID NO: 989060 - DNA, 33 bp, Homo sapien
attgttaacactgttccaaaccactgaagtgag

SEQ ID NO: 989061 - DNA, 33 bp, Homo sapien
cacctctatcttgcaaccttacagtgcatggct

SEQ ID NO: 989062 - DNA, 33 bp, Homo sapien
cacctctatcttgcaagcttacagtgcatggct

SEQ ID NO: 989063 - DNA, 33 bp, Homo sapien
aaatccaactctataccacttacaacataaaca

SEQ ID NO: 989064 - DNA, 33 bp, Homo sapien
aaatccaactctatactacttacaacataaaca

SEQ ID NO: 989065 - DNA, 33 bp, Homo sapien
ctcaataatgggaacagtaccaacactccaggg

SEQ ID NO: 989066 - DNA, 33 bp, Homo sapien
ctcaataatgggaacattaccaacactccaggg

SEQ ID NO: 989067 - DNA, 33 bp, Homo sapien
agatagctcttctctaatacagatgttatacta

SEQ ID NO: 989068 - DNA, 33 bp, Homo sapien
agatagctcttctctagtacagatgttatacta

SEQ ID NO: 989069 - DNA, 33 bp, Homo sapien
ggaggaagaggaggcactctgatgtctgttttt

SEQ ID NO: 989070 - DNA, 33 bp, Homo sapien
ggaggaagaggaggcattctgatgtctgttttt

SEQ ID NO: 989071 - DNA, 33 bp, Homo sapien
tgaacaggctctgtgcaatgtcacctacctctc

SEQ ID NO: 989072 - DNA, 33 bp, Homo sapien
tgaacaggctctgtgctatgtcacctacctctc

SEQ ID NO: 989073 - DNA, 33 bp, Homo sapien
gaatctatttcaagagcaacacagactaagtca

SEQ ID NO: 989074 - DNA, 33 bp, Homo sapien
gaatctatttcaagaggaacacagactaagtca

SEQ ID NO: 989075 - DNA, 33 bp, Homo sapien
ttgtgtgttcaggatacaaatgacttgaattgt

SEQ ID NO: 989076 - DNA, 33 bp, Homo sapien
ttgtgtgttcaggatataaatgacttgaattgt

SEQ ID NO: 989077 - DNA, 33 bp, Homo sapien
cacaattaagaggcaacagcaatatctgatact

SEQ ID NO: 989078 - DNA, 33 bp, Homo sapien
cacaattaagaggcaagagcaatatctgatact

SEQ ID NO: 989079 - DNA, 33 bp, Homo sapien
aataaaagccaaacgaaattgaggaaattaatt

SEQ ID NO: 989080 - DNA, 33 bp, Homo sapien
aataaaagccaaacgacattgaggaaattaatt

SEQ ID NO: 989081 - DNA, 33 bp, Homo sapien
cagactcaaggtagtactaaagcaacaaacttg

SEQ ID NO: 989082 - DNA, 33 bp, Homo sapien
cagactcaaggtagtattaaagcaacaaacttg

SEQ ID NO: 989083 - DNA, 33 bp, Homo sapien
ccgcagaaggatcaaaacagtggagcatctctg

SEQ ID NO: 989084 - DNA, 33 bp, Homo sapien
ccgcagaaggatcaaaccagtggagcatctctg

SEQ ID NO: 989085 - DNA, 33 bp, Homo sapien
aaggtacttagtgagaatatcagaacatttagg

SEQ ID NO: 989086 - DNA, 33 bp, Homo sapien
aaggtacttagtgagagtatcagaacatttagg

SEQ ID NO: 989087 - DNA, 33 bp, Homo sapien
gagatctctgactttacggcctgtcccatattt

SEQ ID NO: 989088 - DNA, 33 bp, Homo sapien
gagatctctgactttatggcctgtcccatattt

SEQ ID NO: 989089 - DNA, 33 bp, Homo sapien
gatgaattgaaattgggcaggaaaacctataat

SEQ ID NO: 989090 - DNA, 33 bp, Homo sapien
gatgaattgaaattggtcaggaaaacctataat

SEQ ID NO: 989091 - DNA, 33 bp, Homo sapien
gtccattgacttaacccagatcttgataacata

SEQ ID NO: 989092 - DNA, 33 bp, Homo sapien
gtccattgacttaaccgagatcttgataacata

SEQ ID NO: 989093 - DNA, 33 bp, Homo sapien
attgagtcaatgtgcaagaaatgatccttttat

SEQ ID NO: 989094 - DNA, 33 bp, Homo sapien
attgagtcaatgtgcaggaaatgatccttttat

SEQ ID NO: 989095 - DNA, 33 bp, Homo sapien
actcctacgataacccacaacctcatcagccaa

SEQ ID NO: 989096 - DNA, 33 bp, Homo sapien
actcctacgataaccctcaacctcatcagccaa

SEQ ID NO: 989097 - DNA, 33 bp, Homo sapien
acaggaagtccacaaaaactattttataagacc

SEQ ID NO: 989098 - DNA, 33 bp, Homo sapien
acaggaagtccacaaagactattttataagacc

SEQ ID NO: 989099 - DNA, 33 bp, Homo sapien
aaaattctttcatttacgtatcagcaaagattt

SEQ ID NO: 989100 - DNA, 33 bp, Homo sapien
aaaattctttcatttatgtatcagcaaagattt

SEQ ID NO: 989101 - DNA, 33 bp, Homo sapien
aaaatctaaaaactcaatgaaaggcattctgta

SEQ ID NO: 989102 - DNA, 33 bp, Homo sapien
aaaatctaaaaactcagtgaaaggcattctgta

SEQ ID NO: 989103 - DNA, 33 bp, Homo sapien
agggatgcaggtttaaacagtcactaaatttga

SEQ ID NO: 989104 - DNA, 33 bp, Homo sapien
agggatgcaggtttaatcagtcactaaatttga

SEQ ID NO: 989105 - DNA, 33 bp, Homo sapien
gattcagaaatcaatcccgtgagtctatattgt

SEQ ID NO: 989106 - DNA, 33 bp, Homo sapien
gattcagaaatcaatctcgtgagtctatattgt

SEQ ID NO: 989107 - DNA, 33 bp, Homo sapien
gtttctcttaaatcaaaagtatgtacctgacat

SEQ ID NO: 989108 - DNA, 33 bp, Homo sapien
gtttctcttaaatcaagagtatgtacctgacat

SEQ ID NO: 989109 - DNA, 33 bp, Homo sapien
agaagttgtgaagaaaagagaaggcttatgtat

SEQ ID NO: 989110 - DNA, 33 bp, Homo sapien
agaagttgtgaagaaaggagaaggcttatgtat

SEQ ID NO: 989111 - DNA, 33 bp, Homo sapien
taagatgatttgaaggacatttcaatgtgtaga

SEQ ID NO: 989112 - DNA, 33 bp, Homo sapien
taagatgatttgaagggcatttcaatgtgtaga

SEQ ID NO: 989113 - DNA, 33 bp, Homo sapien
gctaagtgggagcaagaaagtaaatacatttta

SEQ ID NO: 989114 - DNA, 33 bp, Homo sapien
gctaagtgggagcaaggaagtaaatacatttta

SEQ ID NO: 989115 - DNA, 33 bp, Homo sapien
tcagacgttgaacttgccaaaggtcaaagagct

SEQ ID NO: 989116 - DNA, 33 bp, Homo sapien
tcagacgttgaacttgtcaaaggtcaaagagct

SEQ ID NO: 989117 - DNA, 33 bp, Homo sapien
taacaagcagtgtggcaattatgttgttttcct

SEQ ID NO: 989118 - DNA, 33 bp, Homo sapien
taacaagcagtgtggcgattatgttgttttcct

SEQ ID NO: 989119 - DNA, 33 bp, Homo sapien
gggtatctactacataccagaaaagtcagacac

SEQ ID NO: 989120 - DNA, 33 bp, Homo sapien
gggtatctactacatatcagaaaagtcagacac

SEQ ID NO: 989121 - DNA, 33 bp, Homo sapien
ggatgacagagtaaaaagtcaagaatcacaaag

SEQ ID NO: 989122 - DNA, 33 bp, Homo sapien
ggatgacagagtaaaaggtcaagaatcacaaag

SEQ ID NO: 989123 - DNA, 33 bp, Homo sapien
aaatgcacatcaatggaagagcgcataaagaaa

SEQ ID NO: 989124 - DNA, 33 bp, Homo sapien
aaatgcacatcaatggtagagcgcataaagaaa

SEQ ID NO: 989125 - DNA, 33 bp, Homo sapien
ggcaagtacaagtatacggcagaacttagataa

SEQ ID NO: 989126 - DNA, 33 bp, Homo sapien
ggcaagtacaagtatatggcagaacttagataa

SEQ ID NO: 989127 - DNA, 33 bp, Homo sapien
aaaactctgtaattaacgtatcgtcagctccaa

SEQ ID NO: 989128 - DNA, 33 bp, Homo sapien
aaaactctgtaattaatgtatcgtcagctccaa

SEQ ID NO: 989129 - DNA, 33 bp, Homo sapien
tcaattaaatgggttgcattaatagattgaaag

SEQ ID NO: 989130 - DNA, 33 bp, Homo sapien
tcaattaaatgggttgtattaatagattgaaag

SEQ ID NO: 989131 - DNA, 33 bp, Homo sapien
cctgagaggagtcaataagccctaacatggcat

SEQ ID NO: 989132 - DNA, 33 bp, Homo sapien
cctgagaggagtcaatgagccctaacatggcat

SEQ ID NO: 989133 - DNA, 33 bp, Homo sapien
cccgactatttatggacgacatttctacaaacg

SEQ ID NO: 989134 - DNA, 33 bp, Homo sapien
cccgactatttatggatgacatttctacaaacg

SEQ ID NO: 989135 - DNA, 33 bp, Homo sapien
aaatgtgcattgtttaaaatattgccttcttag

SEQ ID NO: 989136 - DNA, 33 bp, Homo sapien
aaatgtgcattgtttagaatattgccttcttag

SEQ ID NO: 989137 - DNA, 33 bp, Homo sapien
tatttactggtctaaaagttgctgctgttctgc

SEQ ID NO: 989138 - DNA, 33 bp, Homo sapien
tatttactggtctaaaggttgctgctgttctgc

SEQ ID NO: 989139 - DNA, 33 bp, Homo sapien
agatctgcatataaaacgttcataagcaggtca

SEQ ID NO: 989140 - DNA, 33 bp, Homo sapien
agatctgcatataaaatgttcataagcaggtca

SEQ ID NO: 989141 - DNA, 33 bp, Homo sapien
catatttctgctttcacgtgaagttagacaagt

SEQ ID NO: 989142 - DNA, 33 bp, Homo sapien
catatttctgctttcatgtgaagttagacaagt

SEQ ID NO: 989143 - DNA, 33 bp, Homo sapien
attacattcacagcttaaaacgggctatggtgg

SEQ ID NO: 989144 - DNA, 33 bp, Homo sapien
attacattcacagcttgaaacgggctatggtgg

SEQ ID NO: 989145 - DNA, 33 bp, Homo sapien
aagatgatttctgcatcaggaggtggtaagcag

SEQ ID NO: 989146 - DNA, 33 bp, Homo sapien
aagatgatttctgcattaggaggtggtaagcag

SEQ ID NO: 989147 - DNA, 33 bp, Homo sapien
cggttttcatggttccaacccgacctcatataa

SEQ ID NO: 989148 - DNA, 33 bp, Homo sapien
cggttttcatggttcccacccgacctcatataa

SEQ ID NO: 989149 - DNA, 33 bp, Homo sapien
agcagtgtttcactgacgatgatgattagtttt

SEQ ID NO: 989150 - DNA, 33 bp, Homo sapien
agcagtgtttcactgatgatgatgattagtttt

SEQ ID NO: 989151 - DNA, 33 bp, Homo sapien
taaatctcaattatgacgacaatgtggagtaga

SEQ ID NO: 989152 - DNA, 33 bp, Homo sapien
taaatctcaattatgatgacaatgtggagtaga

SEQ ID NO: 989153 - DNA, 33 bp, Homo sapien
tcttgtcttgttttgcccttaataggaatctct

SEQ ID NO: 989154 - DNA, 33 bp, Homo sapien
tcttgtcttgttttgctcttaataggaatctct

SEQ ID NO: 989155 - DNA, 33 bp, Homo sapien
tagaggttttctctgacctttttataaggcaac

SEQ ID NO: 989156 - DNA, 33 bp, Homo sapien
tagaggttttctctgagctttttataaggcaac

SEQ ID NO: 989157 - DNA, 33 bp, Homo sapien
aaatcaaggcatcaccaagaccaacatcaagaa

SEQ ID NO: 989158 - DNA, 33 bp, Homo sapien
aaatcaaggcatcaccgagaccaacatcaagaa

SEQ ID NO: 989159 - DNA, 33 bp, Homo sapien
tgaataaagaaagtaacgagttgtacattgttt

SEQ ID NO: 989160 - DNA, 33 bp, Homo sapien
tgaataaagaaagtaatgagttgtacattgttt

SEQ ID NO: 989161 - DNA, 33 bp, Homo sapien
aaatcttacatcaaaaattgacatgctccgtct

SEQ ID NO: 989162 - DNA, 33 bp, Homo sapien
aaatcttacatcaaaagttgacatgctccgtct

SEQ ID NO: 989163 - DNA, 33 bp, Homo sapien
acacaatgtgagtcacaaatacaaatcacatgt

SEQ ID NO: 989164 - DNA, 33 bp, Homo sapien
acacaatgtgagtcacgaatacaaatcacatgt

SEQ ID NO: 989165 - DNA, 33 bp, Homo sapien
ttctctggcttcagcactccatagtacttcatc

SEQ ID NO: 989166 - DNA, 33 bp, Homo sapien
ttctctggcttcagcagtccatagtacttcatc

SEQ ID NO: 989167 - DNA, 33 bp, Homo sapien
cttgtagctgtgtcccaaaccagcaagatttat

SEQ ID NO: 989168 - DNA, 33 bp, Homo sapien
cttgtagctgtgtcccgaaccagcaagatttat

SEQ ID NO: 989169 - DNA, 33 bp, Homo sapien
gtggccaaaagagtccaacaaggaaaagacaca

SEQ ID NO: 989170 - DNA, 33 bp, Homo sapien
gtggccaaaagagtccgacaaggaaaagacaca

SEQ ID NO: 989171 - DNA, 33 bp, Homo sapien
cacaagtaggaacttaaatgatcaggacttttt

SEQ ID NO: 989172 - DNA, 33 bp, Homo sapien
cacaagtaggaacttatatgatcaggacttttt

SEQ ID NO: 989173 - DNA, 33 bp, Homo sapien
gccaagacagacccagccaatagcaagcaagaa

SEQ ID NO: 989174 - DNA, 33 bp, Homo sapien
gccaagacagacccaggcaatagcaagcaagaa

SEQ ID NO: 989175 - DNA, 33 bp, Homo sapien
tgaatgtttataattccactccccctccattca

SEQ ID NO: 989176 - DNA, 33 bp, Homo sapien
tgaatgtttataattctactccccctccattca

SEQ ID NO: 989177 - DNA, 33 bp, Homo sapien
tcaaactacagcggaggccttgtggtatagaaa

SEQ ID NO: 989178 - DNA, 33 bp, Homo sapien
tcaaactacagcggagtccttgtggtatagaaa

SEQ ID NO: 989179 - DNA, 33 bp, Homo sapien
attccttaccagccaaaagaaattcagtcccct

SEQ ID NO: 989180 - DNA, 33 bp, Homo sapien
attccttaccagccaagagaaattcagtcccct

SEQ ID NO: 989181 - DNA, 33 bp, Homo sapien
aagtatttcaagtatcaacctgactgggccatg

SEQ ID NO: 989182 - DNA, 33 bp, Homo sapien
aagtatttcaagtatcgacctgactgggccatg

SEQ ID NO: 989183 - DNA, 33 bp, Homo sapien
gagggaacaaatctccacatgcacaccccaccc

SEQ ID NO: 989184 - DNA, 33 bp, Homo sapien
gagggaacaaatctccgcatgcacaccccaccc

SEQ ID NO: 989185 - DNA, 33 bp, Homo sapien
tgatttccttaaccccaaccacatggctatggg

SEQ ID NO: 989186 - DNA, 33 bp, Homo sapien
tgatttccttaaccccgaccacatggctatggg

SEQ ID NO: 989187 - DNA, 33 bp, Homo sapien
aattttctcatttctaaactgatttacagacaa

SEQ ID NO: 989188 - DNA, 33 bp, Homo sapien
aattttctcatttctatactgatttacagacaa

SEQ ID NO: 989189 - DNA, 33 bp, Homo sapien
agttacctatggacaaactttacatattttttc

SEQ ID NO: 989190 - DNA, 33 bp, Homo sapien
agttacctatggacaatctttacatattttttc

SEQ ID NO: 989191 - DNA, 33 bp, Homo sapien
ctcctggactctaagagtaaggaatagcccaca

SEQ ID NO: 989192 - DNA, 33 bp, Homo sapien
ctcctggactctaagattaaggaatagcccaca

SEQ ID NO: 989193 - DNA, 33 bp, Homo sapien
gatatgcaatagatacagcatgggtcccgggaa

SEQ ID NO: 989194 - DNA, 33 bp, Homo sapien
gatatgcaatagatacggcatgggtcccgggaa

SEQ ID NO: 989195 - DNA, 33 bp, Homo sapien
attggccttctgggcccgaatgagcctgccact

SEQ ID NO: 989196 - DNA, 33 bp, Homo sapien
attggccttctgggcctgaatgagcctgccact

SEQ ID NO: 989197 - DNA, 33 bp, Homo sapien
cagctaagctacaggacggttcccatttatgct

SEQ ID NO: 989198 - DNA, 33 bp, Homo sapien
cagctaagctacaggatggttcccatttatgct

SEQ ID NO: 989199 - DNA, 33 bp, Homo sapien
tcttgtttgggctttacaattttgataggatct

SEQ ID NO: 989200 - DNA, 33 bp, Homo sapien
tcttgtttgggctttataattttgataggatct

SEQ ID NO: 989201 - DNA, 33 bp, Homo sapien
catgagctgactaagacggagggaaaaatactt

SEQ ID NO: 989202 - DNA, 33 bp, Homo sapien
catgagctgactaagatggagggaaaaatactt

SEQ ID NO: 989203 - DNA, 33 bp, Homo sapien
taaaaacagtttaaagcctcccatatctttatt

SEQ ID NO: 989204 - DNA, 33 bp, Homo sapien
taaaaacagtttaaaggctcccatatctttatt

SEQ ID NO: 989205 - DNA, 33 bp, Homo sapien
actctgggaagaccaaaccgtcctctccagggt

SEQ ID NO: 989206 - DNA, 33 bp, Homo sapien
actctgggaagaccaacccgtcctctccagggt

SEQ ID NO: 989207 - DNA, 33 bp, Homo sapien
ttgtaatggttgtttcccattccggttgtttat

SEQ ID NO: 989208 - DNA, 33 bp, Homo sapien
ttgtaatggttgtttctcattccggttgtttat

SEQ ID NO: 989209 - DNA, 33 bp, Homo sapien
acagcatctttttccaatagaataaggctgtct

SEQ ID NO: 989210 - DNA, 33 bp, Homo sapien
acagcatctttttccagtagaataaggctgtct

SEQ ID NO: 989211 - DNA, 33 bp, Homo sapien
gcatccaatagcaggaacagagacaggatttcc

SEQ ID NO: 989212 - DNA, 33 bp, Homo sapien
gcatccaatagcaggaccagagacaggatttcc

SEQ ID NO: 989213 - DNA, 33 bp, Homo sapien
aatatctcgcacaatgccagatgtatacagact

SEQ ID NO: 989214 - DNA, 33 bp, Homo sapien
aatatctcgcacaatgtcagatgtatacagact

SEQ ID NO: 989215 - DNA, 33 bp, Homo sapien
cagccctaggataaaaggggcagaatggattat

SEQ ID NO: 989216 - DNA, 33 bp, Homo sapien
cagccctaggataaaatgggcagaatggattat

SEQ ID NO: 989217 - DNA, 33 bp, Homo sapien
ttgactgaatacttagccactgcataaaaaatg

SEQ ID NO: 989218 - DNA, 33 bp, Homo sapien
ttgactgaatacttagtcactgcataaaaaatg

SEQ ID NO: 989219 - DNA, 33 bp, Homo sapien
gatattgatattaacactgattttgttgttgat

SEQ ID NO: 989220 - DNA, 33 bp, Homo sapien
gatattgatattaacattgattttgttgttgat

SEQ ID NO: 989221 - DNA, 33 bp, Homo sapien
ttttgttgttgatatacagatgttaatattaca

SEQ ID NO: 989222 - DNA, 33 bp, Homo sapien
ttttgttgttgatatatagatgttaatattaca

SEQ ID NO: 989223 - DNA, 33 bp, Homo sapien
catatttctcatttctaaagcacagatggctgt

SEQ ID NO: 989224 - DNA, 33 bp, Homo sapien
catatttctcatttcttaagcacagatggctgt

SEQ ID NO: 989225 - DNA, 33 bp, Homo sapien
aagttgccttcaaacaatctgttggttggatct

SEQ ID NO: 989226 - DNA, 33 bp, Homo sapien
aagttgccttcaaacagtctgttggttggatct

SEQ ID NO: 989227 - DNA, 33 bp, Homo sapien
ccagtcttcttgtagcacggctgattaaaattt

SEQ ID NO: 989228 - DNA, 33 bp, Homo sapien
ccagtcttcttgtagcgcggctgattaaaattt

SEQ ID NO: 989229 - DNA, 33 bp, Homo sapien
taatcttatggtatcaagtccaagcttatcagc

SEQ ID NO: 989230 - DNA, 33 bp, Homo sapien
taatcttatggtatcaggtccaagcttatcagc

SEQ ID NO: 989231 - DNA, 33 bp, Homo sapien
gactcctggtagaaaccctcacattattgtcaa

SEQ ID NO: 989232 - DNA, 33 bp, Homo sapien
gactcctggtagaaactctcacattattgtcaa

SEQ ID NO: 989233 - DNA, 33 bp, Homo sapien
aatgattctaaatcaacactgttaatactgact

SEQ ID NO: 989234 - DNA, 33 bp, Homo sapien
aatgattctaaatcaatactgttaatactgact

SEQ ID NO: 989235 - DNA, 33 bp, Homo sapien
aataaatgagatgataaatgccaagcacctggc

SEQ ID NO: 989236 - DNA, 33 bp, Homo sapien
aataaatgagatgatatatgccaagcacctggc

SEQ ID NO: 989237 - DNA, 33 bp, Homo sapien
tttctaggtagaggccaaaaggtaagagagaac

SEQ ID NO: 989238 - DNA, 33 bp, Homo sapien
tttctaggtagaggccgaaaggtaagagagaac

SEQ ID NO: 989239 - DNA, 33 bp, Homo sapien
ccaggcctcacttgtacgcaatctcatctcaaa

SEQ ID NO: 989240 - DNA, 33 bp, Homo sapien
ccaggcctcacttgtaggcaatctcatctcaaa

SEQ ID NO: 989241 - DNA, 33 bp, Homo sapien
catctgcatagttcaaaaaatctctcgatactt

SEQ ID NO: 989242 - DNA, 33 bp, Homo sapien
catctgcatagttcaacaaatctctcgatactt

SEQ ID NO: 989243 - DNA, 33 bp, Homo sapien
agtcatgtcatgtaacagtccctagagaaagcc

SEQ ID NO: 989244 - DNA, 33 bp, Homo sapien
agtcatgtcatgtaacggtccctagagaaagcc

SEQ ID NO: 989245 - DNA, 33 bp, Homo sapien
gacttcaccaaaatataagtctgcatctccagt

SEQ ID NO: 989246 - DNA, 33 bp, Homo sapien
gacttcaccaaaatatgagtctgcatctccagt

SEQ ID NO: 989247 - DNA, 33 bp, Homo sapien
ctgggccttttattgccacagacacaaagatga

SEQ ID NO: 989248 - DNA, 33 bp, Homo sapien
ctgggccttttattgctacagacacaaagatga

SEQ ID NO: 989249 - DNA, 33 bp, Homo sapien
caccacaagtactataacaatgctacacacctc

SEQ ID NO: 989250 - DNA, 33 bp, Homo sapien
caccacaagtactatagcaatgctacacacctc

SEQ ID NO: 989251 - DNA, 33 bp, Homo sapien
gtgcagcctggccaacactttgactgtagcctt

SEQ ID NO: 989252 - DNA, 33 bp, Homo sapien
gtgcagcctggccaacgctttgactgtagcctt

SEQ ID NO: 989253 - DNA, 33 bp, Homo sapien
ctttccagagcgttgaaacatccttctgggtgg

SEQ ID NO: 989254 - DNA, 33 bp, Homo sapien
ctttccagagcgttgagacatccttctgggtgg

SEQ ID NO: 989255 - DNA, 33 bp, Homo sapien
tctagtgaaaagagcacgggttctacagttggt

SEQ ID NO: 989256 - DNA, 33 bp, Homo sapien
tctagtgaaaagagcatgggttctacagttggt

SEQ ID NO: 989257 - DNA, 33 bp, Homo sapien
ggctagcttccagcacagtcttcagtgggattt

SEQ ID NO: 989258 - DNA, 33 bp, Homo sapien
ggctagcttccagcacggtcttcagtgggattt

SEQ ID NO: 989259 - DNA, 33 bp, Homo sapien
agctttctgtgacccacctcctccggctgcatt

SEQ ID NO: 989260 - DNA, 33 bp, Homo sapien
agctttctgtgacccatctcctccggctgcatt

SEQ ID NO: 989261 - DNA, 33 bp, Homo sapien
tataaatgcaacaacaataagtatgaacagtca

SEQ ID NO: 989262 - DNA, 33 bp, Homo sapien
tataaatgcaacaacagtaagtatgaacagtca

SEQ ID NO: 989263 - DNA, 33 bp, Homo sapien
ggggcaagttctacgaagtcttttgtcgccctt

SEQ ID NO: 989264 - DNA, 33 bp, Homo sapien
ggggcaagttctacgacgtcttttgtcgccctt

SEQ ID NO: 989265 - DNA, 33 bp, Homo sapien
tgtttcgagatcctgcacctctttgatgataga

SEQ ID NO: 989266 - DNA, 33 bp, Homo sapien
tgtttcgagatcctgcgcctctttgatgataga

SEQ ID NO: 989267 - DNA, 33 bp, Homo sapien
gaataacacttgtgtcaacgcatcttttcctga

SEQ ID NO: 989268 - DNA, 33 bp, Homo sapien
gaataacacttgtgtcgacgcatcttttcctga

SEQ ID NO: 989269 - DNA, 33 bp, Homo sapien
caagtaaatcgaacaacgaaatgctagctctca

SEQ ID NO: 989270 - DNA, 33 bp, Homo sapien
caagtaaatcgaacaatgaaatgctagctctca

SEQ ID NO: 989271 - DNA, 33 bp, Homo sapien
gctttgtggacacatcacaaacataactatgac

SEQ ID NO: 989272 - DNA, 33 bp, Homo sapien
gctttgtggacacatcgcaaacataactatgac

SEQ ID NO: 989273 - DNA, 33 bp, Homo sapien
acctcttctctttctacgtaaatcttggatatt

SEQ ID NO: 989274 - DNA, 33 bp, Homo sapien
acctcttctctttctatgtaaatcttggatatt

SEQ ID NO: 989275 - DNA, 33 bp, Homo sapien
actacctacacccacccggacagttccaaggat

SEQ ID NO: 989276 - DNA, 33 bp, Homo sapien
actacctacacccacctggacagttccaaggat

SEQ ID NO: 989277 - DNA, 33 bp, Homo sapien
agaacagcacttcacccctacttctcctactgt

SEQ ID NO: 989278 - DNA, 33 bp, Homo sapien
agaacagcacttcacctctacttctcctactgt

SEQ ID NO: 989279 - DNA, 33 bp, Homo sapien
tttatggaactcaaacaaagacgtatgggaaca

SEQ ID NO: 989280 - DNA, 33 bp, Homo sapien
tttatggaactcaaacgaagacgtatgggaaca

SEQ ID NO: 989281 - DNA, 33 bp, Homo sapien
gtgggaggaggcagaaatgtaagcaaataagtg

SEQ ID NO: 989282 - DNA, 33 bp, Homo sapien
gtgggaggaggcagaattgtaagcaaataagtg

SEQ ID NO: 989283 - DNA, 33 bp, Homo sapien
tactataatacaacaacgtacaaagtgccagga

SEQ ID NO: 989284 - DNA, 33 bp, Homo sapien
tactataatacaacaatgtacaaagtgccagga

SEQ ID NO: 989285 - DNA, 33 bp, Homo sapien
aattgtcatctggaaccagtctatgtcccctgg

SEQ ID NO: 989286 - DNA, 33 bp, Homo sapien
aattgtcatctggaacgagtctatgtcccctgg

SEQ ID NO: 989287 - DNA, 33 bp, Homo sapien
aatgggtaagtgttcacggagggatctaagtcc

SEQ ID NO: 989288 - DNA, 33 bp, Homo sapien
aatgggtaagtgttcatggagggatctaagtcc

SEQ ID NO: 989289 - DNA, 33 bp, Homo sapien
atcataaagagtcccaaaatggtagaatggcag

SEQ ID NO: 989290 - DNA, 33 bp, Homo sapien
atcataaagagtcccagaatggtagaatggcag

SEQ ID NO: 989291 - DNA, 33 bp, Homo sapien
atcaagagctcctaaacttaaccaccgggcttt

SEQ ID NO: 989292 - DNA, 33 bp, Homo sapien
atcaagagctcctaaatttaaccaccgggcttt

SEQ ID NO: 989293 - DNA, 33 bp, Homo sapien
atgactcgcagtcttcacttctccctgagggct

SEQ ID NO: 989294 - DNA, 33 bp, Homo sapien
atgactcgcagtcttcgcttctccctgagggct

SEQ ID NO: 989295 - DNA, 33 bp, Homo sapien
tgcccctgcaatttaactctccaaaaaccccat

SEQ ID NO: 989296 - DNA, 33 bp, Homo sapien
tgcccctgcaatttaattctccaaaaaccccat

SEQ ID NO: 989297 - DNA, 33 bp, Homo sapien
cccttattcctaaacactgtggagcaaacattt

SEQ ID NO: 989298 - DNA, 33 bp, Homo sapien
cccttattcctaaacattgtggagcaaacattt

SEQ ID NO: 989299 - DNA, 33 bp, Homo sapien
agtgagtccatttggagcaaagtcttcagtaaa

SEQ ID NO: 989300 - DNA, 33 bp, Homo sapien
agtgagtccatttggatcaaagtcttcagtaaa

SEQ ID NO: 989301 - DNA, 33 bp, Homo sapien
ccgtttttccacctcaaactcaggaaagacaag

SEQ ID NO: 989302 - DNA, 33 bp, Homo sapien
ccgtttttccacctcatactcaggaaagacaag

SEQ ID NO: 989303 - DNA, 33 bp, Homo sapien
atcggtggaataaaacccccttgatcatgtata

SEQ ID NO: 989304 - DNA, 33 bp, Homo sapien
atcggtggaataaaactcccttgatcatgtata

SEQ ID NO: 989305 - DNA, 33 bp, Homo sapien
cccaccagacaagggaacgatgaaccctccaga

SEQ ID NO: 989306 - DNA, 33 bp, Homo sapien
cccaccagacaagggagcgatgaaccctccaga

SEQ ID NO: 989307 - DNA, 33 bp, Homo sapien
ccatataaagagaaaaaaatgaggaataagaca

SEQ ID NO: 989308 - DNA, 33 bp, Homo sapien
ccatataaagagaaaacaatgaggaataagaca

SEQ ID NO: 989309 - DNA, 33 bp, Homo sapien
gaaaacacctgctggacgatacttggggcagcc

SEQ ID NO: 989310 - DNA, 33 bp, Homo sapien
gaaaacacctgctggatgatacttggggcagcc

SEQ ID NO: 989311 - DNA, 33 bp, Homo sapien
caccaacccacatgtacgatgactggtggatag

SEQ ID NO: 989312 - DNA, 33 bp, Homo sapien
caccaacccacatgtatgatgactggtggatag

SEQ ID NO: 989313 - DNA, 33 bp, Homo sapien
actgcacaaaagtgaacggaaactcttccagag

SEQ ID NO: 989314 - DNA, 33 bp, Homo sapien
actgcacaaaagtgaatggaaactcttccagag

SEQ ID NO: 989315 - DNA, 33 bp, Homo sapien
cagcaagtggtcactaccatttcactgtggtca

SEQ ID NO: 989316 - DNA, 33 bp, Homo sapien
cagcaagtggtcactatcatttcactgtggtca

SEQ ID NO: 989317 - DNA, 33 bp, Homo sapien
aggtccagagcgtttacgtaaagaccctttctc

SEQ ID NO: 989318 - DNA, 33 bp, Homo sapien
aggtccagagcgtttatgtaaagaccctttctc

SEQ ID NO: 989319 - DNA, 33 bp, Homo sapien
gcctgagaagagaaccaggtacaaaacaggtga

SEQ ID NO: 989320 - DNA, 33 bp, Homo sapien
gcctgagaagagaaccgggtacaaaacaggtga

SEQ ID NO: 989321 - DNA, 33 bp, Homo sapien
tctctgctccagaaataaacttcttttgaagga

SEQ ID NO: 989322 - DNA, 33 bp, Homo sapien
tctctgctccagaaatgaacttcttttgaagga

SEQ ID NO: 989323 - DNA, 33 bp, Homo sapien
gggaatgcatcagagccgcctttcagtttccta

SEQ ID NO: 989324 - DNA, 33 bp, Homo sapien
gggaatgcatcagagctgcctttcagtttccta

SEQ ID NO: 989325 - DNA, 33 bp, Homo sapien
gaaatcctgagtggagcattccattttttggat

SEQ ID NO: 989326 - DNA, 33 bp, Homo sapien
gaaatcctgagtggagtattccattttttggat

SEQ ID NO: 989327 - DNA, 33 bp, Homo sapien
tcctatggggtccaggaatcttcttttgagaag

SEQ ID NO: 989328 - DNA, 33 bp, Homo sapien
tcctatggggtccagggatcttcttttgagaag

SEQ ID NO: 989329 - DNA, 33 bp, Homo sapien
ggatgcaggcaacacacagatgtgaggtgagag

SEQ ID NO: 989330 - DNA, 33 bp, Homo sapien
ggatgcaggcaacacagagatgtgaggtgagag

SEQ ID NO: 989331 - DNA, 33 bp, Homo sapien
aggtgagagcgggtagacattagaacttgacac

SEQ ID NO: 989332 - DNA, 33 bp, Homo sapien
aggtgagagcgggtaggcattagaacttgacac

SEQ ID NO: 989333 - DNA, 33 bp, Homo sapien
aaaagatgactggtgaaaagaaggtgacgagag

SEQ ID NO: 989334 - DNA, 33 bp, Homo sapien
aaaagatgactggtgacaagaaggtgacgagag

SEQ ID NO: 989335 - DNA, 33 bp, Homo sapien
tctcacagctgaaatcagatgaggtacattatg

SEQ ID NO: 989336 - DNA, 33 bp, Homo sapien
tctcacagctgaaatcggatgaggtacattatg

SEQ ID NO: 989337 - DNA, 33 bp, Homo sapien
cgatacaagaaccttaagtcaggtgccaaaacc

SEQ ID NO: 989338 - DNA, 33 bp, Homo sapien
cgatacaagaaccttatgtcaggtgccaaaacc

SEQ ID NO: 989339 - DNA, 33 bp, Homo sapien
ctgtattccttctgccaccagggaaccagggag

SEQ ID NO: 989340 - DNA, 33 bp, Homo sapien
ctgtattccttctgccgccagggaaccagggag

SEQ ID NO: 989341 - DNA, 33 bp, Homo sapien
gcagccacgagcatgtaaactacaataatagca

SEQ ID NO: 989342 - DNA, 33 bp, Homo sapien
gcagccacgagcatgtgaactacaataatagca

SEQ ID NO: 989343 - DNA, 33 bp, Homo sapien
gaaggccatgtttggaaccatcttcagagttgt

SEQ ID NO: 989344 - DNA, 33 bp, Homo sapien
gaaggccatgtttggagccatcttcagagttgt

SEQ ID NO: 989345 - DNA, 33 bp, Homo sapien
catgtttcgcatggaactccaagggtgccattc

SEQ ID NO: 989346 - DNA, 33 bp, Homo sapien
catgtttcgcatggaagtccaagggtgccattc

SEQ ID NO: 989347 - DNA, 33 bp, Homo sapien
tggggctgtgtggcctaaagcacctcacctcat

SEQ ID NO: 989348 - DNA, 33 bp, Homo sapien
tggggctgtgtggcctcaagcacctcacctcat

SEQ ID NO: 989349 - DNA, 33 bp, Homo sapien
acatcatctttgacaacgggtgtgtctgcctcc

SEQ ID NO: 989350 - DNA, 33 bp, Homo sapien
acatcatctttgacaatgggtgtgtctgcctcc

SEQ ID NO: 989351 - DNA, 33 bp, Homo sapien
aacatggcctttgcacaaatatcagggagaagt

SEQ ID NO: 989352 - DNA, 33 bp, Homo sapien
aacatggcctttgcacgaatatcagggagaagt

SEQ ID NO: 989353 - DNA, 33 bp, Homo sapien
ctccttgtccctctgacataaaacaagattgct

SEQ ID NO: 989354 - DNA, 33 bp, Homo sapien
ctccttgtccctctgatataaaacaagattgct

SEQ ID NO: 989355 - DNA, 33 bp, Homo sapien
aaatagttcagaactaagtttcccctgagtttc

SEQ ID NO: 989356 - DNA, 33 bp, Homo sapien
aaatagttcagaactaggtttcccctgagtttc

SEQ ID NO: 989357 - DNA, 33 bp, Homo sapien
ccaggtgtggttgacactactgcctgtgttctt

SEQ ID NO: 989358 - DNA, 33 bp, Homo sapien
ccaggtgtggttgacagtactgcctgtgttctt

SEQ ID NO: 989359 - DNA, 33 bp, Homo sapien
ttctgagcttctggagaacatcttgccttcatg

SEQ ID NO: 989360 - DNA, 33 bp, Homo sapien
ttctgagcttctggaggacatcttgccttcatg

SEQ ID NO: 989361 - DNA, 33 bp, Homo sapien
aggtacattctgaaccacagggcagcactcaag

SEQ ID NO: 989362 - DNA, 33 bp, Homo sapien
aggtacattctgaacctcagggcagcactcaag

SEQ ID NO: 989363 - DNA, 33 bp, Homo sapien
catttgcttgtgcccaactttatcagtgagaaa

SEQ ID NO: 989364 - DNA, 33 bp, Homo sapien
catttgcttgtgcccagctttatcagtgagaaa

SEQ ID NO: 989365 - DNA, 33 bp, Homo sapien
gtagaacctgagtgcaaaagctgcagcaactcc

SEQ ID NO: 989366 - DNA, 33 bp, Homo sapien
gtagaacctgagtgcagaagctgcagcaactcc

SEQ ID NO: 989367 - DNA, 33 bp, Homo sapien
tgcagcaactcccgcaagtatcgtgggcgtccg

SEQ ID NO: 989368 - DNA, 33 bp, Homo sapien
tgcagcaactcccgcatgtatcgtgggcgtccg

SEQ ID NO: 989369 - DNA, 33 bp, Homo sapien
agacctcacttacgaagcacaaattcaaacaaa

SEQ ID NO: 989370 - DNA, 33 bp, Homo sapien
agacctcacttacgaatcacaaattcaaacaaa

SEQ ID NO: 989371 - DNA, 33 bp, Homo sapien
ttgaccacagagcacacgtttcacgttacttat

SEQ ID NO: 989372 - DNA, 33 bp, Homo sapien
ttgaccacagagcacatgtttcacgttacttat

SEQ ID NO: 989373 - DNA, 33 bp, Homo sapien
ttgcttcccagaaaacaagaactttaatcctgg

SEQ ID NO: 989374 - DNA, 33 bp, Homo sapien
ttgcttcccagaaaacgagaactttaatcctgg

SEQ ID NO: 989375 - DNA, 33 bp, Homo sapien
ggtccatccaccaagacgtcacaccaggaaggt

SEQ ID NO: 989376 - DNA, 33 bp, Homo sapien
ggtccatccaccaagatgtcacaccaggaaggt

SEQ ID NO: 989377 - DNA, 33 bp, Homo sapien
cacccaaatgccatgaagggagaagctaatgga

SEQ ID NO: 989378 - DNA, 33 bp, Homo sapien
cacccaaatgccatgatgggagaagctaatgga

SEQ ID NO: 989379 - DNA, 33 bp, Homo sapien
tcccctcaccactcacactagcttactaatcaa

SEQ ID NO: 989380 - DNA, 33 bp, Homo sapien
tcccctcaccactcacgctagcttactaatcaa

SEQ ID NO: 989381 - DNA, 33 bp, Homo sapien
gttaattcaccatggccaacctcagttcctgca

SEQ ID NO: 989382 - DNA, 33 bp, Homo sapien
gttaattcaccatggctaacctcagttcctgca

SEQ ID NO: 989383 - DNA, 33 bp, Homo sapien
ctaatttatagacacaatatcaggaaatagaat

SEQ ID NO: 989384 - DNA, 33 bp, Homo sapien
ctaatttatagacacagtatcaggaaatagaat

SEQ ID NO: 989385 - DNA, 33 bp, Homo sapien
aggatgggctgcgtcacctttgtgggggccaac

SEQ ID NO: 989386 - DNA, 33 bp, Homo sapien
aggatgggctgcgtcatctttgtgggggccaac

SEQ ID NO: 989387 - DNA, 33 bp, Homo sapien
cagagctaggtagcaactgaagagagcatggtg

SEQ ID NO: 989388 - DNA, 33 bp, Homo sapien
cagagctaggtagcaattgaagagagcatggtg

SEQ ID NO: 989389 - DNA, 33 bp, Homo sapien
tggagccttttccaaacgtggtaggatatagaa

SEQ ID NO: 989390 - DNA, 33 bp, Homo sapien
tggagccttttccaaatgtggtaggatatagaa

SEQ ID NO: 989391 - DNA, 33 bp, Homo sapien
aactttgctgagtggtaaagagaattagcggaa

SEQ ID NO: 989392 - DNA, 33 bp, Homo sapien
aactttgctgagtggtgaagagaattagcggaa

SEQ ID NO: 989393 - DNA, 33 bp, Homo sapien
catcaattttgagcaacgagttttggaaaacaa

SEQ ID NO: 989394 - DNA, 33 bp, Homo sapien
catcaattttgagcaatgagttttggaaaacaa

SEQ ID NO: 989395 - DNA, 33 bp, Homo sapien
aatattaataagatcccgcactcctccagatag

SEQ ID NO: 989396 - DNA, 33 bp, Homo sapien
aatattaataagatcctgcactcctccagatag

SEQ ID NO: 989397 - DNA, 33 bp, Homo sapien
gttccacaagtttcacaattctcattcaagtcc

SEQ ID NO: 989398 - DNA, 33 bp, Homo sapien
gttccacaagtttcacgattctcattcaagtcc

SEQ ID NO: 989399 - DNA, 33 bp, Homo sapien
taaagcagcttggaacacatctctttgattttt

SEQ ID NO: 989400 - DNA, 33 bp, Homo sapien
taaagcagcttggaacgcatctctttgattttt

SEQ ID NO: 989401 - DNA, 33 bp, Homo sapien
aatcctagctcagtcaatacattgttgcatgat

SEQ ID NO: 989402 - DNA, 33 bp, Homo sapien
aatcctagctcagtcactacattgttgcatgat

SEQ ID NO: 989403 - DNA, 33 bp, Homo sapien
ttaataacttgttaaagaacgtagatatcaatg

SEQ ID NO: 989404 - DNA, 33 bp, Homo sapien
ttaataacttgttaaataacgtagatatcaatg

SEQ ID NO: 989405 - DNA, 33 bp, Homo sapien
ttcaggtactcttttcaataatcacatcaccac

SEQ ID NO: 989406 - DNA, 33 bp, Homo sapien
ttcaggtactcttttcgataatcacatcaccac

SEQ ID NO: 989407 - DNA, 33 bp, Homo sapien
attcattagggatttaagccaaatgtcttttct

SEQ ID NO: 989408 - DNA, 33 bp, Homo sapien
attcattagggatttaggccaaatgtcttttct

SEQ ID NO: 989409 - DNA, 33 bp, Homo sapien
tttatgtttctcaagagatgacactatctaaat

SEQ ID NO: 989410 - DNA, 33 bp, Homo sapien
tttatgtttctcaagatatgacactatctaaat

SEQ ID NO: 989411 - DNA, 33 bp, Homo sapien
agccactaaagtagcactagttaagaaatgatg

SEQ ID NO: 989412 - DNA, 33 bp, Homo sapien
agccactaaagtagcattagttaagaaatgatg

SEQ ID NO: 989413 - DNA, 33 bp, Homo sapien
acaccatccatttcacgaaaatgcatgcctcac

SEQ ID NO: 989414 - DNA, 33 bp, Homo sapien
acaccatccatttcactaaaatgcatgcctcac

SEQ ID NO: 989415 - DNA, 33 bp, Homo sapien
ttattatgttcttcaaaaggattcagcagaaat

SEQ ID NO: 989416 - DNA, 33 bp, Homo sapien
ttattatgttcttcaagaggattcagcagaaat

SEQ ID NO: 989417 - DNA, 33 bp, Homo sapien
tcataagactattgggaaagttagatgagaatc

SEQ ID NO: 989418 - DNA, 33 bp, Homo sapien
tcataagactattgggcaagttagatgagaatc

SEQ ID NO: 989419 - DNA, 33 bp, Homo sapien
tatctattaaaagtaacaatgttgtaactatct

SEQ ID NO: 989420 - DNA, 33 bp, Homo sapien
tatctattaaaagtaataatgttgtaactatct

SEQ ID NO: 989421 - DNA, 33 bp, Homo sapien
ttatcaagggtctcaaagtagttttactcaata

SEQ ID NO: 989422 - DNA, 33 bp, Homo sapien
ttatcaagggtctcaaggtagttttactcaata

SEQ ID NO: 989423 - DNA, 33 bp, Homo sapien
ggtgatgaacaaagcaagagtcaggagccagaa

SEQ ID NO: 989424 - DNA, 33 bp, Homo sapien
ggtgatgaacaaagcaggagtcaggagccagaa

SEQ ID NO: 989425 - DNA, 33 bp, Homo sapien
tattaagcgaagaagaaaagcagaacatagaat

SEQ ID NO: 989426 - DNA, 33 bp, Homo sapien
tattaagcgaagaagacaagcagaacatagaat

SEQ ID NO: 989427 - DNA, 33 bp, Homo sapien
atctccaaagaaaatacaaaatggccaataaac

SEQ ID NO: 989428 - DNA, 33 bp, Homo sapien
atctccaaagaaaatataaaatggccaataaac

SEQ ID NO: 989429 - DNA, 33 bp, Homo sapien
tctagaaagtataaaccgcctagctgagtgata

SEQ ID NO: 989430 - DNA, 33 bp, Homo sapien
tctagaaagtataaactgcctagctgagtgata

SEQ ID NO: 989431 - DNA, 33 bp, Homo sapien
ccagtgattggtttaactggcttgtggcagggc

SEQ ID NO: 989432 - DNA, 33 bp, Homo sapien
ccagtgattggtttaattggcttgtggcagggc

SEQ ID NO: 989433 - DNA, 33 bp, Homo sapien
ttcaagtcactattccagattcattttcctcct

SEQ ID NO: 989434 - DNA, 33 bp, Homo sapien
ttcaagtcactattccggattcattttcctcct

SEQ ID NO: 989435 - DNA, 33 bp, Homo sapien
tagttaccttctgagcgaattttaagattatta

SEQ ID NO: 989436 - DNA, 33 bp, Homo sapien
tagttaccttctgagctaattttaagattatta

SEQ ID NO: 989437 - DNA, 33 bp, Homo sapien
aaatgtgatcagcaaggcttccctggaaactat

SEQ ID NO: 989438 - DNA, 33 bp, Homo sapien
aaatgtgatcagcaagtcttccctggaaactat

SEQ ID NO: 989439 - DNA, 33 bp, Homo sapien
ccactttcaatggtataagcgtggcagttatca

SEQ ID NO: 989440 - DNA, 33 bp, Homo sapien
ccactttcaatggtatgagcgtggcagttatca

SEQ ID NO: 989441 - DNA, 33 bp, Homo sapien
gacttcagggaataaccgtggaagtggtgagtt

SEQ ID NO: 989442 - DNA, 33 bp, Homo sapien
gacttcagggaataactgtggaagtggtgagtt

SEQ ID NO: 989443 - DNA, 33 bp, Homo sapien
gttacaagtaatgaaccggtgttgatgctttaa

SEQ ID NO: 989444 - DNA, 33 bp, Homo sapien
gttacaagtaatgaactggtgttgatgctttaa

SEQ ID NO: 989445 - DNA, 33 bp, Homo sapien
aaaatgtcacagaacaataagtaccatatgatc

SEQ ID NO: 989446 - DNA, 33 bp, Homo sapien
aaaatgtcacagaacagtaagtaccatatgatc

SEQ ID NO: 989447 - DNA, 33 bp, Homo sapien
gtgtgcctggctcctgaagataagaaccatgag

SEQ ID NO: 989448 - DNA, 33 bp, Homo sapien
gtgtgcctggctcctggagataagaaccatgag

SEQ ID NO: 989449 - DNA, 33 bp, Homo sapien
atatcacgaaaatctacccctgagcctatatct

SEQ ID NO: 989450 - DNA, 33 bp, Homo sapien
atatcacgaaaatctatccctgagcctatatct

SEQ ID NO: 989451 - DNA, 33 bp, Homo sapien
gagtgtggaatgaatgaatgatataagtttata

SEQ ID NO: 989452 - DNA, 33 bp, Homo sapien
gagtgtggaatgaatgcatgatataagtttata

SEQ ID NO: 989453 - DNA, 33 bp, Homo sapien
ccctctttggctctagccacttgcaaattgtaa

SEQ ID NO: 989454 - DNA, 33 bp, Homo sapien
ccctctttggctctagtcacttgcaaattgtaa

SEQ ID NO: 989455 - DNA, 33 bp, Homo sapien
tgtcccaagggagaacagaataccagcttcagc

SEQ ID NO: 989456 - DNA, 33 bp, Homo sapien
tgtcccaagggagaacggaataccagcttcagc

SEQ ID NO: 989457 - DNA, 33 bp, Homo sapien
ccattccattgctcagaatttccgacatgcata

SEQ ID NO: 989458 - DNA, 33 bp, Homo sapien
ccattccattgctcaggatttccgacatgcata

SEQ ID NO: 989459 - DNA, 33 bp, Homo sapien
aagatggaatcgctgaagacaaccctgcagaga

SEQ ID NO: 989460 - DNA, 33 bp, Homo sapien
aagatggaatcgctgaggacaaccctgcagaga

SEQ ID NO: 989461 - DNA, 33 bp, Homo sapien
tgtgtgaagaccaagaactgggaacagaagcag

SEQ ID NO: 989462 - DNA, 33 bp, Homo sapien
tgtgtgaagaccaagagctgggaacagaagcag

SEQ ID NO: 989463 - DNA, 33 bp, Homo sapien
atattcaggaaccaataagaggatctgtaatgc

SEQ ID NO: 989464 - DNA, 33 bp, Homo sapien
atattcaggaaccaatcagaggatctgtaatgc

SEQ ID NO: 989465 - DNA, 33 bp, Homo sapien
catcgaaggaatccaactcacaatcttgagcaa

SEQ ID NO: 989466 - DNA, 33 bp, Homo sapien
catcgaaggaatccaattcacaatcttgagcaa

SEQ ID NO: 989467 - DNA, 33 bp, Homo sapien
tttcctgctgggtttcacaactctccctcaggc

SEQ ID NO: 989468 - DNA, 33 bp, Homo sapien
tttcctgctgggtttcgcaactctccctcaggc

SEQ ID NO: 989469 - DNA, 33 bp, Homo sapien
atgtgataaagggtgaagacaggaatagaggct

SEQ ID NO: 989470 - DNA, 33 bp, Homo sapien
atgtgataaagggtgaggacaggaatagaggct

SEQ ID NO: 989471 - DNA, 33 bp, Homo sapien
actcccacactttacccactcttccatttctcc

SEQ ID NO: 989472 - DNA, 33 bp, Homo sapien
actcccacactttacctactcttccatttctcc

SEQ ID NO: 989473 - DNA, 33 bp, Homo sapien
caggagagagaaccagaaaaagtagctaaacaa

SEQ ID NO: 989474 - DNA, 33 bp, Homo sapien
caggagagagaaccaggaaaagtagctaaacaa

SEQ ID NO: 989475 - DNA, 33 bp, Homo sapien
tcagatttaacttatacaatccatgaggcagga

SEQ ID NO: 989476 - DNA, 33 bp, Homo sapien
tcagatttaacttatataatccatgaggcagga

SEQ ID NO: 989477 - DNA, 33 bp, Homo sapien
ctataacgtttgaggacggaatgacatatttta

SEQ ID NO: 989478 - DNA, 33 bp, Homo sapien
ctataacgtttgaggatggaatgacatatttta

SEQ ID NO: 989479 - DNA, 33 bp, Homo sapien
aacttcagtagatcaaagtttggatgtttttta

SEQ ID NO: 989480 - DNA, 33 bp, Homo sapien
aacttcagtagatcaaggtttggatgtttttta

SEQ ID NO: 989481 - DNA, 33 bp, Homo sapien
acttgtaacgggatagcagaaatccaaataaag

SEQ ID NO: 989482 - DNA, 33 bp, Homo sapien
acttgtaacgggataggagaaatccaaataaag

SEQ ID NO: 989483 - DNA, 33 bp, Homo sapien
ttgaatgaaagccttcacagttgataactagca

SEQ ID NO: 989484 - DNA, 33 bp, Homo sapien
ttgaatgaaagccttcgcagttgataactagca

SEQ ID NO: 989485 - DNA, 33 bp, Homo sapien
cattgtctggtggtaaaagcagcattggtggta

SEQ ID NO: 989486 - DNA, 33 bp, Homo sapien
cattgtctggtggtaagagcagcattggtggta

SEQ ID NO: 989487 - DNA, 33 bp, Homo sapien
aacaggaggaaggaaactgaggttagactaggt

SEQ ID NO: 989488 - DNA, 33 bp, Homo sapien
aacaggaggaaggaaagtgaggttagactaggt

SEQ ID NO: 989489 - DNA, 33 bp, Homo sapien
atgtgaacaaagatgaaatgagagtatgtaaaa

SEQ ID NO: 989490 - DNA, 33 bp, Homo sapien
atgtgaacaaagatgagatgagagtatgtaaaa

SEQ ID NO: 989491 - DNA, 33 bp, Homo sapien
cttctaaaatcttgtcaacagtgttttgcagga

SEQ ID NO: 989492 - DNA, 33 bp, Homo sapien
cttctaaaatcttgtccacagtgttttgcagga

SEQ ID NO: 989493 - DNA, 33 bp, Homo sapien
tctttaaatccagatcaaaagcatttattttat

SEQ ID NO: 989494 - DNA, 33 bp, Homo sapien
tctttaaatccagatcgaaagcatttattttat

SEQ ID NO: 989495 - DNA, 33 bp, Homo sapien
agccgttcactatgcaaatcaaagattctctta

SEQ ID NO: 989496 - DNA, 33 bp, Homo sapien
agccgttcactatgcacatcaaagattctctta

SEQ ID NO: 989497 - DNA, 33 bp, Homo sapien
caccctcaatctgggccgacatggtacgcttct

SEQ ID NO: 989498 - DNA, 33 bp, Homo sapien
caccctcaatctgggctgacatggtacgcttct

SEQ ID NO: 989499 - DNA, 33 bp, Homo sapien
gccactagtccaggccaccatcttctctcacca

SEQ ID NO: 989500 - DNA, 33 bp, Homo sapien
gccactagtccaggccgccatcttctctcacca

SEQ ID NO: 989501 - DNA, 33 bp, Homo sapien
caatttaagtaagctcacatttgcaacattcct

SEQ ID NO: 989502 - DNA, 33 bp, Homo sapien
caatttaagtaagctcgcatttgcaacattcct

SEQ ID NO: 989503 - DNA, 33 bp, Homo sapien
cacaggtaatgcactaccgaccctatgattccg

SEQ ID NO: 989504 - DNA, 33 bp, Homo sapien
cacaggtaatgcactatcgaccctatgattccg

SEQ ID NO: 989505 - DNA, 33 bp, Homo sapien
gaggagtaggtttagacagcactgaggtttcct

SEQ ID NO: 989506 - DNA, 33 bp, Homo sapien
gaggagtaggtttagatagcactgaggtttcct

SEQ ID NO: 989507 - DNA, 33 bp, Homo sapien
cacttatacgcaagaacattcagtgtttgcttt

SEQ ID NO: 989508 - DNA, 33 bp, Homo sapien
cacttatacgcaagaatattcagtgtttgcttt

SEQ ID NO: 989509 - DNA, 33 bp, Homo sapien
acttgaaacagaactacgatgcgacctagcaat

SEQ ID NO: 989510 - DNA, 33 bp, Homo sapien
acttgaaacagaactatgatgcgacctagcaat

SEQ ID NO: 989511 - DNA, 33 bp, Homo sapien
tgtcatattacgtcacaataaaatttccttaat

SEQ ID NO: 989512 - DNA, 33 bp, Homo sapien
tgtcatattacgtcacgataaaatttccttaat

SEQ ID NO: 989513 - DNA, 33 bp, Homo sapien
agggactttggcaatacgtagtctggctacaca

SEQ ID NO: 989514 - DNA, 33 bp, Homo sapien
agggactttggcaatatgtagtctggctacaca

SEQ ID NO: 989515 - DNA, 33 bp, Homo sapien
tggtctaagatagaagcactataggcatgtttt

SEQ ID NO: 989516 - DNA, 33 bp, Homo sapien
tggtctaagatagaaggactataggcatgtttt

SEQ ID NO: 989517 - DNA, 33 bp, Homo sapien
caggttgttctttgaagaaaactccatgagtga

SEQ ID NO: 989518 - DNA, 33 bp, Homo sapien
caggttgttctttgaataaaactccatgagtga

SEQ ID NO: 989519 - DNA, 33 bp, Homo sapien
ttgatgcctaaaagcaaataaatgagacaagtg

SEQ ID NO: 989520 - DNA, 33 bp, Homo sapien
ttgatgcctaaaagcacataaatgagacaagtg

SEQ ID NO: 989521 - DNA, 33 bp, Homo sapien
agttccacatcttgagaccaagttcagcagttt

SEQ ID NO: 989522 - DNA, 33 bp, Homo sapien
agttccacatcttgaggccaagttcagcagttt

SEQ ID NO: 989523 - DNA, 33 bp, Homo sapien
gtggaaatctgagtgaatacaaatataaatgaa

SEQ ID NO: 989524 - DNA, 33 bp, Homo sapien
gtggaaatctgagtgagtacaaatataaatgaa

SEQ ID NO: 989525 - DNA, 33 bp, Homo sapien
atatcttagcaagtacacactttatcaagtttc

SEQ ID NO: 989526 - DNA, 33 bp, Homo sapien
atatcttagcaagtacgcactttatcaagtttc

SEQ ID NO: 989527 - DNA, 33 bp, Homo sapien
agacacaaaacatccaaaacagacatgaggggc

SEQ ID NO: 989528 - DNA, 33 bp, Homo sapien
agacacaaaacatccagaacagacatgaggggc

SEQ ID NO: 989529 - DNA, 33 bp, Homo sapien
tgtctctccagctacactgtaagttccttgagg

SEQ ID NO: 989530 - DNA, 33 bp, Homo sapien
tgtctctccagctacattgtaagttccttgagg

SEQ ID NO: 989531 - DNA, 33 bp, Homo sapien
tgtgaaggagtgggcacgagtttcacaggtcag

SEQ ID NO: 989532 - DNA, 33 bp, Homo sapien
tgtgaaggagtgggcaggagtttcacaggtcag

SEQ ID NO: 989533 - DNA, 33 bp, Homo sapien
tatttttagctgggtcagaaataagaatttgtg

SEQ ID NO: 989534 - DNA, 33 bp, Homo sapien
tatttttagctgggtcggaaataagaatttgtg

SEQ ID NO: 989535 - DNA, 33 bp, Homo sapien
acgggacaagcctataaacgtctgaaccctaaa

SEQ ID NO: 989536 - DNA, 33 bp, Homo sapien
acgggacaagcctatacacgtctgaaccctaaa

SEQ ID NO: 989537 - DNA, 33 bp, Homo sapien
cctggtgacgtatctaaagctgactgccccagt

SEQ ID NO: 989538 - DNA, 33 bp, Homo sapien
cctggtgacgtatctagagctgactgccccagt

SEQ ID NO: 989539 - DNA, 33 bp, Homo sapien
ctggcctattagaccacaaactcataaaaagca

SEQ ID NO: 989540 - DNA, 33 bp, Homo sapien
ctggcctattagaccataaactcataaaaagca

SEQ ID NO: 989541 - DNA, 33 bp, Homo sapien
taaagtgttttcataaaataattcttgcattaa

SEQ ID NO: 989542 - DNA, 33 bp, Homo sapien
taaagtgttttcataatataattcttgcattaa

SEQ ID NO: 989543 - DNA, 33 bp, Homo sapien
tggattccatggtgtaggtaaatttgtagggct

SEQ ID NO: 989544 - DNA, 33 bp, Homo sapien
tggattccatggtgtatgtaaatttgtagggct

SEQ ID NO: 989545 - DNA, 33 bp, Homo sapien
gtctgtgagtctatgcagaatctcgtcttccgt

SEQ ID NO: 989546 - DNA, 33 bp, Homo sapien
gtctgtgagtctatgcggaatctcgtcttccgt

SEQ ID NO: 989547 - DNA, 33 bp, Homo sapien
cctttgatcaggataaagctattaacaactcct

SEQ ID NO: 989548 - DNA, 33 bp, Homo sapien
cctttgatcaggataatgctattaacaactcct

SEQ ID NO: 989549 - DNA, 33 bp, Homo sapien
tggggaagagcttgacaagttcgaggagctgga

SEQ ID NO: 989550 - DNA, 33 bp, Homo sapien
tggggaagagcttgacgagttcgaggagctgga

SEQ ID NO: 989551 - DNA, 33 bp, Homo sapien
tacctaaggaaagaaaaatgatatgcagaattt

SEQ ID NO: 989552 - DNA, 33 bp, Homo sapien
tacctaaggaaagaaagatgatatgcagaattt

SEQ ID NO: 989553 - DNA, 33 bp, Homo sapien
tgttccagaaaactaacagaagctcaaatgaac

SEQ ID NO: 989554 - DNA, 33 bp, Homo sapien
tgttccagaaaactaagagaagctcaaatgaac

SEQ ID NO: 989555 - DNA, 33 bp, Homo sapien
tatctttaagagctgacctttgggtgacctgga

SEQ ID NO: 989556 - DNA, 33 bp, Homo sapien
tatctttaagagctgagctttgggtgacctgga

SEQ ID NO: 989557 - DNA, 33 bp, Homo sapien
atgaaatctactttcacagctcccacatacgag

SEQ ID NO: 989558 - DNA, 33 bp, Homo sapien
atgaaatctactttcatagctcccacatacgag

SEQ ID NO: 989559 - DNA, 33 bp, Homo sapien
caaaagccaagtttccagctttcccataatagt

SEQ ID NO: 989560 - DNA, 33 bp, Homo sapien
caaaagccaagtttccggctttcccataatagt

SEQ ID NO: 989561 - DNA, 33 bp, Homo sapien
agttgccaggcttagaatacagagatatttttc

SEQ ID NO: 989562 - DNA, 33 bp, Homo sapien
agttgccaggcttagagtacagagatatttttc

SEQ ID NO: 989563 - DNA, 33 bp, Homo sapien
atggttaaatggagaacctatctcactgggttg

SEQ ID NO: 989564 - DNA, 33 bp, Homo sapien
atggttaaatggagaagctatctcactgggttg

SEQ ID NO: 989565 - DNA, 33 bp, Homo sapien
cttgcccttctggaaaatgtttgagatatgttt

SEQ ID NO: 989566 - DNA, 33 bp, Homo sapien
cttgcccttctggaaagtgtttgagatatgttt

SEQ ID NO: 989567 - DNA, 33 bp, Homo sapien
gcatgtggagacctagaaggaggatgccatcaa

SEQ ID NO: 989568 - DNA, 33 bp, Homo sapien
gcatgtggagacctagcaggaggatgccatcaa

SEQ ID NO: 989569 - DNA, 33 bp, Homo sapien
tccccaacgtacttcaagttcttaagtgagtcc

SEQ ID NO: 989570 - DNA, 33 bp, Homo sapien
tccccaacgtacttcaggttcttaagtgagtcc

SEQ ID NO: 989571 - DNA, 33 bp, Homo sapien
taaatggtattaagcacggccttatgaaggaag

SEQ ID NO: 989572 - DNA, 33 bp, Homo sapien
taaatggtattaagcatggccttatgaaggaag

SEQ ID NO: 989573 - DNA, 33 bp, Homo sapien
ttaaggaacagaaagcagaaggactagagacaa

SEQ ID NO: 989574 - DNA, 33 bp, Homo sapien
ttaaggaacagaaagcggaaggactagagacaa

SEQ ID NO: 989575 - DNA, 33 bp, Homo sapien
attagcagaggttttacggcataccacttttag

SEQ ID NO: 989576 - DNA, 33 bp, Homo sapien
attagcagaggttttatggcataccacttttag

SEQ ID NO: 989577 - DNA, 33 bp, Homo sapien
cctctcaaagatttcacgaggtcaacaggggag

SEQ ID NO: 989578 - DNA, 33 bp, Homo sapien
cctctcaaagatttcatgaggtcaacaggggag

SEQ ID NO: 989579 - DNA, 33 bp, Homo sapien
gataagaaaaataaagcagcacttgacattgat

SEQ ID NO: 989580 - DNA, 33 bp, Homo sapien
gataagaaaaataaaggagcacttgacattgat

SEQ ID NO: 989581 - DNA, 33 bp, Homo sapien
tttacagtagtctggaagataatgtgaaaaagc

SEQ ID NO: 989582 - DNA, 33 bp, Homo sapien
tttacagtagtctggaggataatgtgaaaaagc

SEQ ID NO: 989583 - DNA, 33 bp, Homo sapien
ggggtctccctagatcaattccagtaaagactt

SEQ ID NO: 989584 - DNA, 33 bp, Homo sapien
ggggtctccctagatcgattccagtaaagactt

SEQ ID NO: 989585 - DNA, 33 bp, Homo sapien
tcaccattcagaaaagccccctggtgttgaacc

SEQ ID NO: 989586 - DNA, 33 bp, Homo sapien
tcaccattcagaaaagtcccctggtgttgaacc

SEQ ID NO: 989587 - DNA, 33 bp, Homo sapien
tcccagattctccaaccaagctatggtttcaga

SEQ ID NO: 989588 - DNA, 33 bp, Homo sapien
tcccagattctccaactaagctatggtttcaga

SEQ ID NO: 989589 - DNA, 33 bp, Homo sapien
agaagatgaaagtcaccgggcttgagaggtagc

SEQ ID NO: 989590 - DNA, 33 bp, Homo sapien
agaagatgaaagtcactgggcttgagaggtagc

SEQ ID NO: 989591 - DNA, 33 bp, Homo sapien
agtatgacactgactcactgtatgacctcaagt

SEQ ID NO: 989592 - DNA, 33 bp, Homo sapien
agtatgacactgactctctgtatgacctcaagt

SEQ ID NO: 989593 - DNA, 33 bp, Homo sapien
cccacataagttcaagaaacaatgaattgaacc

SEQ ID NO: 989594 - DNA, 33 bp, Homo sapien
cccacataagttcaagcaacaatgaattgaacc

SEQ ID NO: 989595 - DNA, 33 bp, Homo sapien
actacatgaacaatggaaacttcccacataagt

SEQ ID NO: 989596 - DNA, 33 bp, Homo sapien
actacatgaacaatgggaacttcccacataagt

SEQ ID NO: 989597 - DNA, 33 bp, Homo sapien
taaactgaaaattccaagtagcttacattaagt

SEQ ID NO: 989598 - DNA, 33 bp, Homo sapien
taaactgaaaattccaggtagcttacattaagt

SEQ ID NO: 989599 - DNA, 33 bp, Homo sapien
gctacatagagttccaaaataactttcctctgc

SEQ ID NO: 989600 - DNA, 33 bp, Homo sapien
gctacatagagttccacaataactttcctctgc

SEQ ID NO: 989601 - DNA, 33 bp, Homo sapien
ccaacacattgaatgcccaggtattgatcttac

SEQ ID NO: 989602 - DNA, 33 bp, Homo sapien
ccaacacattgaatgctcaggtattgatcttac

SEQ ID NO: 989603 - DNA, 33 bp, Homo sapien
tcttggggcagtttttaaaaaaccgtgctatct

SEQ ID NO: 989604 - DNA, 33 bp, Homo sapien
tcttggggcagttttttaaaaaccgtgctatct

SEQ ID NO: 989605 - DNA, 33 bp, Homo sapien
cactttacaggcaaaacctcatgtactccttac

SEQ ID NO: 989606 - DNA, 33 bp, Homo sapien
cactttacaggcaaaatctcatgtactccttac

SEQ ID NO: 989607 - DNA, 33 bp, Homo sapien
ggctccctgaaaacacactcttgttctggagtc

SEQ ID NO: 989608 - DNA, 33 bp, Homo sapien
ggctccctgaaaacacgctcttgttctggagtc

SEQ ID NO: 989609 - DNA, 33 bp, Homo sapien
gaacgaagctgcaaccaggaatgaaacaactga

SEQ ID NO: 989610 - DNA, 33 bp, Homo sapien
gaacgaagctgcaaccgggaatgaaacaactga

SEQ ID NO: 989611 - DNA, 33 bp, Homo sapien
aaaatatagatgccaaaagcccttgtgagtaag

SEQ ID NO: 989612 - DNA, 33 bp, Homo sapien
aaaatatagatgccaagagcccttgtgagtaag

SEQ ID NO: 989613 - DNA, 33 bp, Homo sapien
ggcaagacagaatgacaaccaagtgaaaagggt

SEQ ID NO: 989614 - DNA, 33 bp, Homo sapien
ggcaagacagaatgacgaccaagtgaaaagggt

SEQ ID NO: 989615 - DNA, 33 bp, Homo sapien
ccatttgcttactctaggtctcccagaattaag

SEQ ID NO: 989616 - DNA, 33 bp, Homo sapien
ccatttgcttactctatgtctcccagaattaag

SEQ ID NO: 989617 - DNA, 33 bp, Homo sapien
atcttctagactaaccaaggccatgtagaccca

SEQ ID NO: 989618 - DNA, 33 bp, Homo sapien
atcttctagactaaccgaggccatgtagaccca

SEQ ID NO: 989619 - DNA, 33 bp, Homo sapien
caataggtgtgtgatacgagtgaaaaatcaacc

SEQ ID NO: 989620 - DNA, 33 bp, Homo sapien
caataggtgtgtgatatgagtgaaaaatcaacc

SEQ ID NO: 989621 - DNA, 33 bp, Homo sapien
tagaaccaagggcctgaaattcattccttgatg

SEQ ID NO: 989622 - DNA, 33 bp, Homo sapien
tagaaccaagggcctgcaattcattccttgatg

SEQ ID NO: 989623 - DNA, 33 bp, Homo sapien
aactgagatgtagtaacgaacccaaactgaagc

SEQ ID NO: 989624 - DNA, 33 bp, Homo sapien
aactgagatgtagtaatgaacccaaactgaagc

SEQ ID NO: 989625 - DNA, 33 bp, Homo sapien
ccttctgtgtgaccgacgggcatccctaagaat

SEQ ID NO: 989626 - DNA, 33 bp, Homo sapien
ccttctgtgtgaccgatgggcatccctaagaat

SEQ ID NO: 989627 - DNA, 33 bp, Homo sapien
aaagtgagaatagtcaaaattgagctgcagggt

SEQ ID NO: 989628 - DNA, 33 bp, Homo sapien
aaagtgagaatagtcagaattgagctgcagggt

SEQ ID NO: 989629 - DNA, 33 bp, Homo sapien
cgagaggccagatgaccacgtatatgcctaaga

SEQ ID NO: 989630 - DNA, 33 bp, Homo sapien
cgagaggccagatgacgacgtatatgcctaaga

SEQ ID NO: 989631 - DNA, 33 bp, Homo sapien
tacaaatcctccaagcactgtttatgttttgac

SEQ ID NO: 989632 - DNA, 33 bp, Homo sapien
tacaaatcctccaagcgctgtttatgttttgac

SEQ ID NO: 989633 - DNA, 33 bp, Homo sapien
atgccatatgcccatgcagtagagctgagaaaa

SEQ ID NO: 989634 - DNA, 33 bp, Homo sapien
atgccatatgcccatgtagtagagctgagaaaa

SEQ ID NO: 989635 - DNA, 33 bp, Homo sapien
gtaaaatgtataacgacggcagcagaaaggatg

SEQ ID NO: 989636 - DNA, 33 bp, Homo sapien
gtaaaatgtataacgatggcagcagaaaggatg

SEQ ID NO: 989637 - DNA, 33 bp, Homo sapien
catctgagatgagccactggagtcttgccattg

SEQ ID NO: 989638 - DNA, 33 bp, Homo sapien
catctgagatgagccattggagtcttgccattg

SEQ ID NO: 989639 - DNA, 33 bp, Homo sapien
ttaatgtgatgtctgacgcataggagtctatgg

SEQ ID NO: 989640 - DNA, 33 bp, Homo sapien
ttaatgtgatgtctgatgcataggagtctatgg

SEQ ID NO: 989641 - DNA, 33 bp, Homo sapien
acctctgaatttgtgaaggagatctcagagacg

SEQ ID NO: 989642 - DNA, 33 bp, Homo sapien
acctctgaatttgtgatggagatctcagagacg

SEQ ID NO: 989643 - DNA, 33 bp, Homo sapien
tttgatctctgttttcacctctagacttcttat

SEQ ID NO: 989644 - DNA, 33 bp, Homo sapien
tttgatctctgttttcccctctagacttcttat

SEQ ID NO: 989645 - DNA, 33 bp, Homo sapien
acagaagtagtaattaagagggtgaactaggag

SEQ ID NO: 989646 - DNA, 33 bp, Homo sapien
acagaagtagtaattacgagggtgaactaggag

SEQ ID NO: 989647 - DNA, 33 bp, Homo sapien
atttttttgtgcaaaaataatacataacaaagg

SEQ ID NO: 989648 - DNA, 33 bp, Homo sapien
atttttttgtgcaaaagtaatacataacaaagg

SEQ ID NO: 989649 - DNA, 33 bp, Homo sapien
atttatacatatgcacaaacacaaatacgtaca

SEQ ID NO: 989650 - DNA, 33 bp, Homo sapien
atttatacatatgcacgaacacaaatacgtaca

SEQ ID NO: 989651 - DNA, 33 bp, Homo sapien
gctgtcagctcagggaagagtctggtcagtcac

SEQ ID NO: 989652 - DNA, 33 bp, Homo sapien
gctgtcagctcagggaggagtctggtcagtcac

SEQ ID NO: 989653 - DNA, 33 bp, Homo sapien
gtacagcaaacagaccagccaatggcagagcct

SEQ ID NO: 989654 - DNA, 33 bp, Homo sapien
gtacagcaaacagaccggccaatggcagagcct

SEQ ID NO: 989655 - DNA, 33 bp, Homo sapien
actggctctgcaagtacgaggagcaggcctcaa

SEQ ID NO: 989656 - DNA, 33 bp, Homo sapien
actggctctgcaagtatgaggagcaggcctcaa

SEQ ID NO: 989657 - DNA, 33 bp, Homo sapien
gtcagcaagagtcaaacctttctcagctgcatg

SEQ ID NO: 989658 - DNA, 33 bp, Homo sapien
gtcagcaagagtcaaatctttctcagctgcatg

SEQ ID NO: 989659 - DNA, 33 bp, Homo sapien
caacctgtttacagacagctagaattcccaagc

SEQ ID NO: 989660 - DNA, 33 bp, Homo sapien
caacctgtttacagacggctagaattcccaagc

SEQ ID NO: 989661 - DNA, 33 bp, Homo sapien
ctgtaagtgtctcatgaagctagattaccacac

SEQ ID NO: 989662 - DNA, 33 bp, Homo sapien
ctgtaagtgtctcatggagctagattaccacac

SEQ ID NO: 989663 - DNA, 33 bp, Homo sapien
ttgtggggaaatgtcaagagagaaaggcctaat

SEQ ID NO: 989664 - DNA, 33 bp, Homo sapien
ttgtggggaaatgtcaggagagaaaggcctaat

SEQ ID NO: 989665 - DNA, 33 bp, Homo sapien
caggagaaccaatggacggtctatggacagaac

SEQ ID NO: 989666 - DNA, 33 bp, Homo sapien
caggagaaccaatggatggtctatggacagaac

SEQ ID NO: 989667 - DNA, 33 bp, Homo sapien
tggagggttgaagtgactaggggtatccatgga

SEQ ID NO: 989668 - DNA, 33 bp, Homo sapien
tggagggttgaagtgattaggggtatccatgga

SEQ ID NO: 989669 - DNA, 33 bp, Homo sapien
ataatcagccaatgaaggataactatgattatt

SEQ ID NO: 989670 - DNA, 33 bp, Homo sapien
ataatcagccaatgaatgataactatgattatt

SEQ ID NO: 989671 - DNA, 33 bp, Homo sapien
taaaatatgtcaggcactaatgctcagtattga

SEQ ID NO: 989672 - DNA, 33 bp, Homo sapien
taaaatatgtcaggcagtaatgctcagtattga

SEQ ID NO: 989673 - DNA, 33 bp, Homo sapien
aactgagactgccaaacagataatctagaatcc

SEQ ID NO: 989674 - DNA, 33 bp, Homo sapien
aactgagactgccaaagagataatctagaatcc

SEQ ID NO: 989675 - DNA, 33 bp, Homo sapien
attaatggagttcagaaaaactgaaattgcttt

SEQ ID NO: 989676 - DNA, 33 bp, Homo sapien
attaatggagttcagagaaactgaaattgcttt

SEQ ID NO: 989677 - DNA, 33 bp, Homo sapien
ggacccttagctttgaggccttgtgctgaaaac

SEQ ID NO: 989678 - DNA, 33 bp, Homo sapien
ggacccttagctttgatgccttgtgctgaaaac

SEQ ID NO: 989679 - DNA, 33 bp, Homo sapien
gcatctgtgagtataacaaaaactgttgaattg

SEQ ID NO: 989680 - DNA, 33 bp, Homo sapien
gcatctgtgagtataataaaaactgttgaattg

SEQ ID NO: 989681 - DNA, 33 bp, Homo sapien
tggcatcgagacttcccgcagtttggtgtcatg

SEQ ID NO: 989682 - DNA, 33 bp, Homo sapien
tggcatcgagacttcctgcagtttggtgtcatg

SEQ ID NO: 989683 - DNA, 33 bp, Homo sapien
cagaattctaggaggagctcacttgcaaaaata

SEQ ID NO: 989684 - DNA, 33 bp, Homo sapien
cagaattctaggaggatctcacttgcaaaaata

SEQ ID NO: 989685 - DNA, 33 bp, Homo sapien
ttttcatagcctcccccgacgtccaggttgttg

SEQ ID NO: 989686 - DNA, 33 bp, Homo sapien
ttttcatagcctcccctgacgtccaggttgttg

SEQ ID NO: 989687 - DNA, 33 bp, Homo sapien
gtggtggcttgaaataacccttgagtagcagag

SEQ ID NO: 989688 - DNA, 33 bp, Homo sapien
gtggtggcttgaaatagcccttgagtagcagag

SEQ ID NO: 989689 - DNA, 33 bp, Homo sapien
gccactcatgacacaaagtctagtcccagaagc

SEQ ID NO: 989690 - DNA, 33 bp, Homo sapien
gccactcatgacacaaggtctagtcccagaagc

SEQ ID NO: 989691 - DNA, 33 bp, Homo sapien
gccatgcactgaccctaaggatgtaaacagctt

SEQ ID NO: 989692 - DNA, 33 bp, Homo sapien
gccatgcactgacccttaggatgtaaacagctt

SEQ ID NO: 989693 - DNA, 33 bp, Homo sapien
tcaagttcaaattaaacgtcacaatatccaact

SEQ ID NO: 989694 - DNA, 33 bp, Homo sapien
tcaagttcaaattaaatgtcacaatatccaact

SEQ ID NO: 989695 - DNA, 33 bp, Homo sapien
ttcatatcctttggcacccagtggaagtgaaca

SEQ ID NO: 989696 - DNA, 33 bp, Homo sapien
ttcatatcctttggcatccagtggaagtgaaca

SEQ ID NO: 989697 - DNA, 33 bp, Homo sapien
tgcccttggtcaccaacgtaggcacgtgtcctg

SEQ ID NO: 989698 - DNA, 33 bp, Homo sapien
tgcccttggtcaccaatgtaggcacgtgtcctg

SEQ ID NO: 989699 - DNA, 33 bp, Homo sapien
cagatcatgtgtcccaaaaaattctctgcactg

SEQ ID NO: 989700 - DNA, 33 bp, Homo sapien
cagatcatgtgtcccacaaaattctctgcactg

SEQ ID NO: 989701 - DNA, 33 bp, Homo sapien
ggtagtgcttaacataaaatagattttcagtac

SEQ ID NO: 989702 - DNA, 33 bp, Homo sapien
ggtagtgcttaacatacaatagattttcagtac

SEQ ID NO: 989703 - DNA, 33 bp, Homo sapien
tttgataatactttcacagtttacaaatgaccc

SEQ ID NO: 989704 - DNA, 33 bp, Homo sapien
tttgataatactttcagagtttacaaatgaccc

SEQ ID NO: 989705 - DNA, 33 bp, Homo sapien
aagaggccaacacataaaaagaagagagagaga

SEQ ID NO: 989706 - DNA, 33 bp, Homo sapien
aagaggccaacacatagaaagaagagagagaga

SEQ ID NO: 989707 - DNA, 33 bp, Homo sapien
ggagggagacctagtacagccattgataaatgt

SEQ ID NO: 989708 - DNA, 33 bp, Homo sapien
ggagggagacctagtagagccattgataaatgt

SEQ ID NO: 989709 - DNA, 33 bp, Homo sapien
ctctgtgtacactctacctgcaaagctcactgg

SEQ ID NO: 989710 - DNA, 33 bp, Homo sapien
ctctgtgtacactctatctgcaaagctcactgg

SEQ ID NO: 989711 - DNA, 33 bp, Homo sapien
atcattagcctgcaataattgaagtatggctgt

SEQ ID NO: 989712 - DNA, 33 bp, Homo sapien
atcattagcctgcaattattgaagtatggctgt

SEQ ID NO: 989713 - DNA, 33 bp, Homo sapien
cccaacaatgtattcaaattcagtgccaaaagt

SEQ ID NO: 989714 - DNA, 33 bp, Homo sapien
cccaacaatgtattcacattcagtgccaaaagt

SEQ ID NO: 989715 - DNA, 33 bp, Homo sapien
actctactatccaacactgaatttattccttcc

SEQ ID NO: 989716 - DNA, 33 bp, Homo sapien
actctactatccaacattgaatttattccttcc

SEQ ID NO: 989717 - DNA, 33 bp, Homo sapien
ttcggaacatcctgcaatatagaatctcatccc

SEQ ID NO: 989718 - DNA, 33 bp, Homo sapien
ttcggaacatcctgcagtatagaatctcatccc

SEQ ID NO: 989719 - DNA, 33 bp, Homo sapien
ttctccttaccacctccaaatgcactttccaag

SEQ ID NO: 989720 - DNA, 33 bp, Homo sapien
ttctccttaccacctctaaatgcactttccaag

SEQ ID NO: 989721 - DNA, 33 bp, Homo sapien
cacaagatgaaacaaaatcaccaccaaatacta

SEQ ID NO: 989722 - DNA, 33 bp, Homo sapien
cacaagatgaaacaaagtcaccaccaaatacta

SEQ ID NO: 989723 - DNA, 33 bp, Homo sapien
agggatgggaaacaaacgaatacgatacaggat

SEQ ID NO: 989724 - DNA, 33 bp, Homo sapien
agggatgggaaacaaatgaatacgatacaggat

SEQ ID NO: 989725 - DNA, 33 bp, Homo sapien
aatggaatacctgtagaatatagaaatagtctg

SEQ ID NO: 989726 - DNA, 33 bp, Homo sapien
aatggaatacctgtaggatatagaaatagtctg

SEQ ID NO: 989727 - DNA, 33 bp, Homo sapien
ttaatgttgtcaaagacgggatttctaaaatat

SEQ ID NO: 989728 - DNA, 33 bp, Homo sapien
ttaatgttgtcaaagatgggatttctaaaatat

SEQ ID NO: 989729 - DNA, 33 bp, Homo sapien
tgtgtgtgtgcttgatcataactcaggttttcc

SEQ ID NO: 989730 - DNA, 33 bp, Homo sapien
tgtgtgtgtgcttgatgataactcaggttttcc

SEQ ID NO: 989731 - DNA, 33 bp, Homo sapien
cttccagttccaagtacctgctttctgtcttcg

SEQ ID NO: 989732 - DNA, 33 bp, Homo sapien
cttccagttccaagtatctgctttctgtcttcg

SEQ ID NO: 989733 - DNA, 33 bp, Homo sapien
ggtgggggaaatagtaccgttgtgtgtgtgtgt

SEQ ID NO: 989734 - DNA, 33 bp, Homo sapien
ggtgggggaaatagtatcgttgtgtgtgtgtgt

SEQ ID NO: 989735 - DNA, 33 bp, Homo sapien
tctggtcattggtgagcagaagtaacagtgtca

SEQ ID NO: 989736 - DNA, 33 bp, Homo sapien
tctggtcattggtgagtagaagtaacagtgtca

SEQ ID NO: 989737 - DNA, 33 bp, Homo sapien
aggtagcttggaatataaagagaagcataaaga

SEQ ID NO: 989738 - DNA, 33 bp, Homo sapien
aggtagcttggaatatgaagagaagcataaaga

SEQ ID NO: 989739 - DNA, 33 bp, Homo sapien
ggtgtgtagaactttaaaagagtgattaatagc

SEQ ID NO: 989740 - DNA, 33 bp, Homo sapien
ggtgtgtagaactttacaagagtgattaatagc

SEQ ID NO: 989741 - DNA, 33 bp, Homo sapien
ttctcagatgtcctcacgaaattggaagaatca

SEQ ID NO: 989742 - DNA, 33 bp, Homo sapien
ttctcagatgtcctcatgaaattggaagaatca

SEQ ID NO: 989743 - DNA, 33 bp, Homo sapien
tcatataaatggaatcaaaggttgcccagggga

SEQ ID NO: 989744 - DNA, 33 bp, Homo sapien
tcatataaatggaatcgaaggttgcccagggga

SEQ ID NO: 989745 - DNA, 33 bp, Homo sapien
ttaaataagaaaaaaaatgccatccatcttcat

SEQ ID NO: 989746 - DNA, 33 bp, Homo sapien
ttaaataagaaaaaaagtgccatccatcttcat

SEQ ID NO: 989747 - DNA, 33 bp, Homo sapien
tctaccctctgaaacccatatgtattaggctgt

SEQ ID NO: 989748 - DNA, 33 bp, Homo sapien
tctaccctctgaaacctatatgtattaggctgt

SEQ ID NO: 989749 - DNA, 33 bp, Homo sapien
tccactagagagggaacatttgatgattcagga

SEQ ID NO: 989750 - DNA, 33 bp, Homo sapien
tccactagagagggaatatttgatgattcagga

SEQ ID NO: 989751 - DNA, 33 bp, Homo sapien
agtcttgagagacgtaaattcaagcaagatgag

SEQ ID NO: 989752 - DNA, 33 bp, Homo sapien
agtcttgagagacgtagattcaagcaagatgag

SEQ ID NO: 989753 - DNA, 33 bp, Homo sapien
agagaaggaagtggggacaaaaaagcattggca

SEQ ID NO: 989754 - DNA, 33 bp, Homo sapien
agagaaggaagtgggggcaaaaaagcattggca

SEQ ID NO: 989755 - DNA, 33 bp, Homo sapien
gttgacgtctgttcagaaccttttatgctattc

SEQ ID NO: 989756 - DNA, 33 bp, Homo sapien
gttgacgtctgttcaggaccttttatgctattc

SEQ ID NO: 989757 - DNA, 33 bp, Homo sapien
atgtgttgaataaataagccttagccttctcat

SEQ ID NO: 989758 - DNA, 33 bp, Homo sapien
atgtgttgaataaataggccttagccttctcat

SEQ ID NO: 989759 - DNA, 33 bp, Homo sapien
tgcataaatacctgacactggtaggaccaccat

SEQ ID NO: 989760 - DNA, 33 bp, Homo sapien
tgcataaatacctgacgctggtaggaccaccat

SEQ ID NO: 989761 - DNA, 33 bp, Homo sapien
aaaagaaaagaatcaaaggtgaccaaataaaga

SEQ ID NO: 989762 - DNA, 33 bp, Homo sapien
aaaagaaaagaatcaagggtgaccaaataaaga

SEQ ID NO: 989763 - DNA, 33 bp, Homo sapien
ctgacaaaggactaataatatccagaatctaca

SEQ ID NO: 989764 - DNA, 33 bp, Homo sapien
ctgacaaaggactaatgatatccagaatctaca

SEQ ID NO: 989765 - DNA, 33 bp, Homo sapien
agtcttttcacatgacagcataccctagaccac

SEQ ID NO: 989766 - DNA, 33 bp, Homo sapien
agtcttttcacatgacggcataccctagaccac

SEQ ID NO: 989767 - DNA, 33 bp, Homo sapien
gaatgttaagttatcacaggatgtggccacaca

SEQ ID NO: 989768 - DNA, 33 bp, Homo sapien
gaatgttaagttatcataggatgtggccacaca

SEQ ID NO: 989769 - DNA, 33 bp, Homo sapien
gagttaatgcatgaaactgatggtcaggtggaa

SEQ ID NO: 989770 - DNA, 33 bp, Homo sapien
gagttaatgcatgaaattgatggtcaggtggaa

SEQ ID NO: 989771 - DNA, 33 bp, Homo sapien
gtacactgtgagttcaaacaagggacagaatca

SEQ ID NO: 989772 - DNA, 33 bp, Homo sapien
gtacactgtgagttcagacaagggacagaatca

SEQ ID NO: 989773 - DNA, 33 bp, Homo sapien
gtatttgagaatgacaagttcagtaaagtatac

SEQ ID NO: 989774 - DNA, 33 bp, Homo sapien
gtatttgagaatgacaggttcagtaaagtatac

SEQ ID NO: 989775 - DNA, 33 bp, Homo sapien
agatcaacacaggctcaccttgaagcaaacatt

SEQ ID NO: 989776 - DNA, 33 bp, Homo sapien
agatcaacacaggctcgccttgaagcaaacatt

SEQ ID NO: 989777 - DNA, 33 bp, Homo sapien
gtgacagaaggtaacacctgtggctggagagat

SEQ ID NO: 989778 - DNA, 33 bp, Homo sapien
gtgacagaaggtaacatctgtggctggagagat

SEQ ID NO: 989779 - DNA, 33 bp, Homo sapien
aatgacagagtcagcggagagtagtagaattgg

SEQ ID NO: 989780 - DNA, 33 bp, Homo sapien
aatgacagagtcagcgtagagtagtagaattgg

SEQ ID NO: 989781 - DNA, 33 bp, Homo sapien
aaagggtcaactatcaaagaacaggatgtggct

SEQ ID NO: 989782 - DNA, 33 bp, Homo sapien
aaagggtcaactatcagagaacaggatgtggct

SEQ ID NO: 989783 - DNA, 33 bp, Homo sapien
ggccctggttctgccactaatgacctgatttta

SEQ ID NO: 989784 - DNA, 33 bp, Homo sapien
ggccctggttctgccattaatgacctgatttta

SEQ ID NO: 989785 - DNA, 33 bp, Homo sapien
tcttcctcagaaaaagaaaccctcggacacacc

SEQ ID NO: 989786 - DNA, 33 bp, Homo sapien
tcttcctcagaaaaagtaaccctcggacacacc

SEQ ID NO: 989787 - DNA, 33 bp, Homo sapien
tttctgaggaagaggaacatctttcagcaaatg

SEQ ID NO: 989788 - DNA, 33 bp, Homo sapien
tttctgaggaagaggagcatctttcagcaaatg

SEQ ID NO: 989789 - DNA, 33 bp, Homo sapien
gttgctcaataagaaactgatattctaaaatct

SEQ ID NO: 989790 - DNA, 33 bp, Homo sapien
gttgctcaataagaaagtgatattctaaaatct

SEQ ID NO: 989791 - DNA, 33 bp, Homo sapien
gaaatgcttctgcagactctcaaaataaataga

SEQ ID NO: 989792 - DNA, 33 bp, Homo sapien
gaaatgcttctgcagattctcaaaataaataga

SEQ ID NO: 989793 - DNA, 33 bp, Homo sapien
tcctggaccaaagacacaaattcccttacccat

SEQ ID NO: 989794 - DNA, 33 bp, Homo sapien
tcctggaccaaagacataaattcccttacccat

SEQ ID NO: 989795 - DNA, 33 bp, Homo sapien
aatataaattgagaaaaaagtctgctaaaatct

SEQ ID NO: 989796 - DNA, 33 bp, Homo sapien
aatataaattgagaaagaagtctgctaaaatct

SEQ ID NO: 989797 - DNA, 33 bp, Homo sapien
ggagatgcaaaagctcaaaatgtgtgaagctta

SEQ ID NO: 989798 - DNA, 33 bp, Homo sapien
ggagatgcaaaagctcgaaatgtgtgaagctta

SEQ ID NO: 989799 - DNA, 33 bp, Homo sapien
cattttctaaaaatacaaacaaagctttaatat

SEQ ID NO: 989800 - DNA, 33 bp, Homo sapien
cattttctaaaaatacgaacaaagctttaatat

SEQ ID NO: 989801 - DNA, 33 bp, Homo sapien
gagtctcactttgtcacgcaagctggaatgcag

SEQ ID NO: 989802 - DNA, 33 bp, Homo sapien
gagtctcactttgtcatgcaagctggaatgcag

SEQ ID NO: 989803 - DNA, 33 bp, Homo sapien
ggggagctcaaaaaccaccgagcctttgtccca

SEQ ID NO: 989804 - DNA, 33 bp, Homo sapien
ggggagctcaaaaaccgccgagcctttgtccca

SEQ ID NO: 989805 - DNA, 33 bp, Homo sapien
acagccagagttgccacgtgttctcccacttgt

SEQ ID NO: 989806 - DNA, 33 bp, Homo sapien
acagccagagttgccatgtgttctcccacttgt

SEQ ID NO: 989807 - DNA, 33 bp, Homo sapien
ctttgtaaaacgtcctcaaatcaccttactctg

SEQ ID NO: 989808 - DNA, 33 bp, Homo sapien
ctttgtaaaacgtccttaaatcaccttactctg

SEQ ID NO: 989809 - DNA, 33 bp, Homo sapien
atctggaatgttgctgaatgttgagattgttga

SEQ ID NO: 989810 - DNA, 33 bp, Homo sapien
atctggaatgttgctggatgttgagattgttga

SEQ ID NO: 989811 - DNA, 33 bp, Homo sapien
gtcatgacttgaaacacgtcttttgttaactta

SEQ ID NO: 989812 - DNA, 33 bp, Homo sapien
gtcatgacttgaaacatgtcttttgttaactta

SEQ ID NO: 989813 - DNA, 33 bp, Homo sapien
ggaatgatttcttcaacagtcagctgtaatcag

SEQ ID NO: 989814 - DNA, 33 bp, Homo sapien
ggaatgatttcttcaatagtcagctgtaatcag

SEQ ID NO: 989815 - DNA, 33 bp, Homo sapien
ctgacacccatggaaaatttaggttagggagag

SEQ ID NO: 989816 - DNA, 33 bp, Homo sapien
ctgacacccatggaaagtttaggttagggagag

SEQ ID NO: 989817 - DNA, 33 bp, Homo sapien
cctaaaccacaatccacgcatagctcctttcca

SEQ ID NO: 989818 - DNA, 33 bp, Homo sapien
cctaaaccacaatccatgcatagctcctttcca

SEQ ID NO: 989819 - DNA, 33 bp, Homo sapien
attgaactctgcagaaacagccataaggacaat

SEQ ID NO: 989820 - DNA, 33 bp, Homo sapien
attgaactctgcagaagcagccataaggacaat

SEQ ID NO: 989821 - DNA, 33 bp, Homo sapien
gctggaacttaggatgaatgatttgcttctggc

SEQ ID NO: 989822 - DNA, 33 bp, Homo sapien
gctggaacttaggatggatgatttgcttctggc

SEQ ID NO: 989823 - DNA, 33 bp, Homo sapien
gaggtaaggagttgggaaaagtcacagaaagag

SEQ ID NO: 989824 - DNA, 33 bp, Homo sapien
gaggtaaggagttggggaaagtcacagaaagag

SEQ ID NO: 989825 - DNA, 33 bp, Homo sapien
cctgcttggctaaaaagggcaagaggaggatag

SEQ ID NO: 989826 - DNA, 33 bp, Homo sapien
cctgcttggctaaaaatggcaagaggaggatag

SEQ ID NO: 989827 - DNA, 33 bp, Homo sapien
tttgcttgatggcataaatgtttcagtgcctag

SEQ ID NO: 989828 - DNA, 33 bp, Homo sapien
tttgcttgatggcatagatgtttcagtgcctag

SEQ ID NO: 989829 - DNA, 33 bp, Homo sapien
attatatctgcattgaccctatttccaaataag

SEQ ID NO: 989830 - DNA, 33 bp, Homo sapien
attatatctgcattgatcctatttccaaataag

SEQ ID NO: 989831 - DNA, 33 bp, Homo sapien
cagacaactcgctggacatgagggggacaaaat

SEQ ID NO: 989832 - DNA, 33 bp, Homo sapien
cagacaactcgctggatatgagggggacaaaat

SEQ ID NO: 989833 - DNA, 33 bp, Homo sapien
taggtcctcagtgatacgactacagctgtctgt

SEQ ID NO: 989834 - DNA, 33 bp, Homo sapien
taggtcctcagtgatatgactacagctgtctgt

SEQ ID NO: 989835 - DNA, 33 bp, Homo sapien
tccatccattttgccacgtgtacctctaattcg

SEQ ID NO: 989836 - DNA, 33 bp, Homo sapien
tccatccattttgccatgtgtacctctaattcg

SEQ ID NO: 989837 - DNA, 33 bp, Homo sapien
atttttcctcatctataaagtggagagcatgct

SEQ ID NO: 989838 - DNA, 33 bp, Homo sapien
atttttcctcatctatgaagtggagagcatgct

SEQ ID NO: 989839 - DNA, 33 bp, Homo sapien
atgtatccacagacagacaaaaggagaccacca

SEQ ID NO: 989840 - DNA, 33 bp, Homo sapien
atgtatccacagacaggcaaaaggagaccacca

SEQ ID NO: 989841 - DNA, 33 bp, Homo sapien
agtctactctatcatccaggtcatgggctttgc

SEQ ID NO: 989842 - DNA, 33 bp, Homo sapien
agtctactctatcatcgaggtcatgggctttgc

SEQ ID NO: 989843 - DNA, 33 bp, Homo sapien
ggagacacctcagaagaaaggtgacttcatcct

SEQ ID NO: 989844 - DNA, 33 bp, Homo sapien
ggagacacctcagaaggaaggtgacttcatcct

SEQ ID NO: 989845 - DNA, 33 bp, Homo sapien
ttccagggccttagtgaagtacaggatttggac

SEQ ID NO: 989846 - DNA, 33 bp, Homo sapien
ttccagggccttagtgcagtacaggatttggac

SEQ ID NO: 989847 - DNA, 33 bp, Homo sapien
ttaagagtctcccaacaggcctttctgcttctc

SEQ ID NO: 989848 - DNA, 33 bp, Homo sapien
ttaagagtctcccaacgggcctttctgcttctc

SEQ ID NO: 989849 - DNA, 33 bp, Homo sapien
gagtgttctaagtatgaagaatggaaaagaagg

SEQ ID NO: 989850 - DNA, 33 bp, Homo sapien
gagtgttctaagtatggagaatggaaaagaagg

SEQ ID NO: 989851 - DNA, 33 bp, Homo sapien
gaactttaaagtaacaatgcttaatctgttcag

SEQ ID NO: 989852 - DNA, 33 bp, Homo sapien
gaactttaaagtaacagtgcttaatctgttcag

SEQ ID NO: 989853 - DNA, 33 bp, Homo sapien
tgttggcagataatgacaaaataaagaggtctg

SEQ ID NO: 989854 - DNA, 33 bp, Homo sapien
tgttggcagataatgagaaaataaagaggtctg

SEQ ID NO: 989855 - DNA, 33 bp, Homo sapien
ttctttggctcccacactcttactttgactcac

SEQ ID NO: 989856 - DNA, 33 bp, Homo sapien
ttctttggctcccacattcttactttgactcac

SEQ ID NO: 989857 - DNA, 33 bp, Homo sapien
tcctctcatattagacccattgactacctcaac

SEQ ID NO: 989858 - DNA, 33 bp, Homo sapien
tcctctcatattagactcattgactacctcaac

SEQ ID NO: 989859 - DNA, 33 bp, Homo sapien
ctctatgtggagaaaaatgcagctgaatctcca

SEQ ID NO: 989860 - DNA, 33 bp, Homo sapien
ctctatgtggagaaaactgcagctgaatctcca

SEQ ID NO: 989861 - DNA, 33 bp, Homo sapien
gtgctttcatttcagagatttcagattcgctaa

SEQ ID NO: 989862 - DNA, 33 bp, Homo sapien
gtgctttcatttcagatatttcagattcgctaa

SEQ ID NO: 989863 - DNA, 33 bp, Homo sapien
tggagaattagacacaatcctactctggataca

SEQ ID NO: 989864 - DNA, 33 bp, Homo sapien
tggagaattagacacagtcctactctggataca

SEQ ID NO: 989865 - DNA, 33 bp, Homo sapien
attcaagccaacagtaagtctcagcctaaatac

SEQ ID NO: 989866 - DNA, 33 bp, Homo sapien
attcaagccaacagtaggtctcagcctaaatac

SEQ ID NO: 989867 - DNA, 33 bp, Homo sapien
tggcttaaatgcacatcaaagtttacttctcta

SEQ ID NO: 989868 - DNA, 33 bp, Homo sapien
tggcttaaatgcacattaaagtttacttctcta

SEQ ID NO: 989869 - DNA, 33 bp, Homo sapien
tatcttcttaattcccacatcactctcaactag

SEQ ID NO: 989870 - DNA, 33 bp, Homo sapien
tatcttcttaattcccgcatcactctcaactag

SEQ ID NO: 989871 - DNA, 33 bp, Homo sapien
acaaacatacacgcaccatccccacagaaacac

SEQ ID NO: 989872 - DNA, 33 bp, Homo sapien
acaaacatacacgcactatccccacagaaacac

SEQ ID NO: 989873 - DNA, 33 bp, Homo sapien
gctcactgatcctccaatatgatgtgctaagca

SEQ ID NO: 989874 - DNA, 33 bp, Homo sapien
gctcactgatcctccagtatgatgtgctaagca

SEQ ID NO: 989875 - DNA, 33 bp, Homo sapien
ctgataattgacttaacatttatgcatcaaggt

SEQ ID NO: 989876 - DNA, 33 bp, Homo sapien
ctgataattgacttaatatttatgcatcaaggt

SEQ ID NO: 989877 - DNA, 33 bp, Homo sapien
gaatggcagatgagagcacatttcctgtgggtg

SEQ ID NO: 989878 - DNA, 33 bp, Homo sapien
gaatggcagatgagaggacatttcctgtgggtg

SEQ ID NO: 989879 - DNA, 33 bp, Homo sapien
aaacatgagcttttcaaaacacaatctgatcat

SEQ ID NO: 989880 - DNA, 33 bp, Homo sapien
aaacatgagcttttcacaacacaatctgatcat

SEQ ID NO: 989881 - DNA, 33 bp, Homo sapien
atccagacctgctaccagaaaaatcctgtccta

SEQ ID NO: 989882 - DNA, 33 bp, Homo sapien
atccagacctgctaccggaaaaatcctgtccta

SEQ ID NO: 989883 - DNA, 33 bp, Homo sapien
ttcctgagcacagtacaaggttgacaaatgggg

SEQ ID NO: 989884 - DNA, 33 bp, Homo sapien
ttcctgagcacagtacgaggttgacaaatgggg

SEQ ID NO: 989885 - DNA, 33 bp, Homo sapien
caggaaacctctgtgaagaacgatacccagagc

SEQ ID NO: 989886 - DNA, 33 bp, Homo sapien
caggaaacctctgtgaggaacgatacccagagc

SEQ ID NO: 989887 - DNA, 33 bp, Homo sapien
catcacaaagactagcacaggcagaaaattgga

SEQ ID NO: 989888 - DNA, 33 bp, Homo sapien
catcacaaagactagcgcaggcagaaaattgga

SEQ ID NO: 989889 - DNA, 33 bp, Homo sapien
cagtctctgcctcttacctactattttgactca

SEQ ID NO: 989890 - DNA, 33 bp, Homo sapien
cagtctctgcctcttatctactattttgactca

SEQ ID NO: 989891 - DNA, 33 bp, Homo sapien
gtccagatgcaatcaacggcttggccaggtttt

SEQ ID NO: 989892 - DNA, 33 bp, Homo sapien
gtccagatgcaatcaatggcttggccaggtttt

SEQ ID NO: 989893 - DNA, 33 bp, Homo sapien
aacacatcgtcaacagaagttgtattggttctc

SEQ ID NO: 989894 - DNA, 33 bp, Homo sapien
aacacatcgtcaacaggagttgtattggttctc

SEQ ID NO: 989895 - DNA, 33 bp, Homo sapien
tcttcatatttttgcagtcatggaacatactgg

SEQ ID NO: 989896 - DNA, 33 bp, Homo sapien
tcttcatatttttgcattcatggaacatactgg

SEQ ID NO: 989897 - DNA, 33 bp, Homo sapien
ctttcatgttttccaactaacagtcttgaatat

SEQ ID NO: 989898 - DNA, 33 bp, Homo sapien
ctttcatgttttccaattaacagtcttgaatat

SEQ ID NO: 989899 - DNA, 33 bp, Homo sapien
caaccaccaaaatggaactcaacacatctcaaa

SEQ ID NO: 989900 - DNA, 33 bp, Homo sapien
caaccaccaaaatggatctcaacacatctcaaa

SEQ ID NO: 989901 - DNA, 33 bp, Homo sapien
tgctcttttgtgcctgcattttatcactcaaag

SEQ ID NO: 989902 - DNA, 33 bp, Homo sapien
tgctcttttgtgcctggattttatcactcaaag

SEQ ID NO: 989903 - DNA, 33 bp, Homo sapien
gaatcaaaaagcatgaaccttccaggaaacctg

SEQ ID NO: 989904 - DNA, 33 bp, Homo sapien
gaatcaaaaagcatgatccttccaggaaacctg

SEQ ID NO: 989905 - DNA, 33 bp, Homo sapien
aactataatgagctcaagtcacagttgggctgc

SEQ ID NO: 989906 - DNA, 33 bp, Homo sapien
aactataatgagctcaggtcacagttgggctgc

SEQ ID NO: 989907 - DNA, 33 bp, Homo sapien
aattcagtaaagcctacgctaaatcattgtagg

SEQ ID NO: 989908 - DNA, 33 bp, Homo sapien
aattcagtaaagcctatgctaaatcattgtagg

SEQ ID NO: 989909 - DNA, 33 bp, Homo sapien
gaattgaatctttcaaatgtcagtggcaagtgg

SEQ ID NO: 989910 - DNA, 33 bp, Homo sapien
gaattgaatctttcaagtgtcagtggcaagtgg

SEQ ID NO: 989911 - DNA, 33 bp, Homo sapien
acacttcaataacacactagtggcgaaaatttt

SEQ ID NO: 989912 - DNA, 33 bp, Homo sapien
acacttcaataacacattagtggcgaaaatttt

SEQ ID NO: 989913 - DNA, 33 bp, Homo sapien
gcttttaaggacttagccacaaattatttccca

SEQ ID NO: 989914 - DNA, 33 bp, Homo sapien
gcttttaaggacttaggcacaaattatttccca

SEQ ID NO: 989915 - DNA, 33 bp, Homo sapien
tatgggcaaaatttcacacctataaggcccatt

SEQ ID NO: 989916 - DNA, 33 bp, Homo sapien
tatgggcaaaatttcagacctataaggcccatt

SEQ ID NO: 989917 - DNA, 33 bp, Homo sapien
tgattctccaatcacaacagtgtttctcagtgg

SEQ ID NO: 989918 - DNA, 33 bp, Homo sapien
tgattctccaatcacagcagtgtttctcagtgg

SEQ ID NO: 989919 - DNA, 33 bp, Homo sapien
ttggatgagatgttctcacggctatgcagtgtg

SEQ ID NO: 989920 - DNA, 33 bp, Homo sapien
ttggatgagatgttcttacggctatgcagtgtg

SEQ ID NO: 989921 - DNA, 33 bp, Homo sapien
tctttttacaaattcaactcaaaccatgaatcg

SEQ ID NO: 989922 - DNA, 33 bp, Homo sapien
tctttttacaaattcacctcaaaccatgaatcg

SEQ ID NO: 989923 - DNA, 33 bp, Homo sapien
cctcaagtgacatcagaaataggggggtgtccg

SEQ ID NO: 989924 - DNA, 33 bp, Homo sapien
cctcaagtgacatcagcaataggggggtgtccg

SEQ ID NO: 989925 - DNA, 33 bp, Homo sapien
acccttcaggctcacacgtcattctctctgttg

SEQ ID NO: 989926 - DNA, 33 bp, Homo sapien
acccttcaggctcacatgtcattctctctgttg

SEQ ID NO: 989927 - DNA, 33 bp, Homo sapien
gtaaagtctttttaacccggctcaagcgttatt

SEQ ID NO: 989928 - DNA, 33 bp, Homo sapien
gtaaagtctttttaactcggctcaagcgttatt

SEQ ID NO: 989929 - DNA, 33 bp, Homo sapien
cgcccggcttgaaacccactttcataataacac

SEQ ID NO: 989930 - DNA, 33 bp, Homo sapien
cgcccggcttgaaacctactttcataataacac

SEQ ID NO: 989931 - DNA, 33 bp, Homo sapien
acatggttttgaataaaattggaattatatgtg

SEQ ID NO: 989932 - DNA, 33 bp, Homo sapien
acatggttttgaataagattggaattatatgtg

SEQ ID NO: 989933 - DNA, 33 bp, Homo sapien
tattttattgtacttgccaaacttctggaataa

SEQ ID NO: 989934 - DNA, 33 bp, Homo sapien
tattttattgtacttgtcaaacttctggaataa

SEQ ID NO: 989935 - DNA, 33 bp, Homo sapien
gtgcaggagccagagaacataaaaagcatggcc

SEQ ID NO: 989936 - DNA, 33 bp, Homo sapien
gtgcaggagccagagagcataaaaagcatggcc

SEQ ID NO: 989937 - DNA, 33 bp, Homo sapien
tactatctgacccaacaaagggtagtgtccttt

SEQ ID NO: 989938 - DNA, 33 bp, Homo sapien
tactatctgacccaacgaagggtagtgtccttt

SEQ ID NO: 989939 - DNA, 33 bp, Homo sapien
tgtctctccagcggtacggcaaatgctggctgg

SEQ ID NO: 989940 - DNA, 33 bp, Homo sapien
tgtctctccagcggtatggcaaatgctggctgg

SEQ ID NO: 989941 - DNA, 33 bp, Homo sapien
tagagtgtaagttaaacagcaagtagctcctcc

SEQ ID NO: 989942 - DNA, 33 bp, Homo sapien
tagagtgtaagttaaagagcaagtagctcctcc

SEQ ID NO: 989943 - DNA, 33 bp, Homo sapien
agaggccaaagggcacccaaagagaagtaagaa

SEQ ID NO: 989944 - DNA, 33 bp, Homo sapien
agaggccaaagggcactcaaagagaagtaagaa

SEQ ID NO: 989945 - DNA, 33 bp, Homo sapien
agcacacaccacactacggagacttagttcctg

SEQ ID NO: 989946 - DNA, 33 bp, Homo sapien
agcacacaccacactatggagacttagttcctg

SEQ ID NO: 989947 - DNA, 33 bp, Homo sapien
gcttcagagtctgttacgccttcctgtacagct

SEQ ID NO: 989948 - DNA, 33 bp, Homo sapien
gcttcagagtctgttatgccttcctgtacagct

SEQ ID NO: 989949 - DNA, 33 bp, Homo sapien
cttctgtaattgttcacacaagttatgcatcaa

SEQ ID NO: 989950 - DNA, 33 bp, Homo sapien
cttctgtaattgttcagacaagttatgcatcaa

SEQ ID NO: 989951 - DNA, 33 bp, Homo sapien
tcttgcaaaggaagaaatctgaagcagggtgtt

SEQ ID NO: 989952 - DNA, 33 bp, Homo sapien
tcttgcaaaggaagaagtctgaagcagggtgtt

SEQ ID NO: 989953 - DNA, 33 bp, Homo sapien
gcaagatggttagaaagcgttaatgagtaccca

SEQ ID NO: 989954 - DNA, 33 bp, Homo sapien
gcaagatggttagaaatcgttaatgagtaccca

SEQ ID NO: 989955 - DNA, 33 bp, Homo sapien
ttctgaagggttaaaaacaatgacagacactct

SEQ ID NO: 989956 - DNA, 33 bp, Homo sapien
ttctgaagggttaaaaccaatgacagacactct

SEQ ID NO: 989957 - DNA, 33 bp, Homo sapien
taaagcaatggaggatgagcaaagacactgaga

SEQ ID NO: 989958 - DNA, 33 bp, Homo sapien
taaagcaatggaggattagcaaagacactgaga

SEQ ID NO: 989959 - DNA, 33 bp, Homo sapien
gtaaacaaggaggagcacattgaacaaaccaac

SEQ ID NO: 989960 - DNA, 33 bp, Homo sapien
gtaaacaaggaggagcgcattgaacaaaccaac

SEQ ID NO: 989961 - DNA, 33 bp, Homo sapien
acatctcagcatagggaagttgtgaagagtaac

SEQ ID NO: 989962 - DNA, 33 bp, Homo sapien
acatctcagcatagggcagttgtgaagagtaac

SEQ ID NO: 989963 - DNA, 33 bp, Homo sapien
gactttatttccccaacgtggctctggaaaagt

SEQ ID NO: 989964 - DNA, 33 bp, Homo sapien
gactttatttccccaatgtggctctggaaaagt

SEQ ID NO: 989965 - DNA, 33 bp, Homo sapien
tataagagaggaggaaagacacagggtccatat

SEQ ID NO: 989966 - DNA, 33 bp, Homo sapien
tataagagaggaggaacgacacagggtccatat

SEQ ID NO: 989967 - DNA, 33 bp, Homo sapien
gtgcatggaacaatgtaaagagcacacactagg

SEQ ID NO: 989968 - DNA, 33 bp, Homo sapien
gtgcatggaacaatgtgaagagcacacactagg

SEQ ID NO: 989969 - DNA, 33 bp, Homo sapien
ctctggatgttcgtaactgcacagtagggataa

SEQ ID NO: 989970 - DNA, 33 bp, Homo sapien
ctctggatgttcgtaattgcacagtagggataa

SEQ ID NO: 989971 - DNA, 33 bp, Homo sapien
tacatttcgtttctcaatgaaaagtaaaagctg

SEQ ID NO: 989972 - DNA, 33 bp, Homo sapien
tacatttcgtttctcactgaaaagtaaaagctg

SEQ ID NO: 989973 - DNA, 33 bp, Homo sapien
tccatctctgtaaacaggtgaggcagctggaga

SEQ ID NO: 989974 - DNA, 33 bp, Homo sapien
tccatctctgtaaacatgtgaggcagctggaga

SEQ ID NO: 989975 - DNA, 33 bp, Homo sapien
taattttgcatggggcaatgacatggttatatt

SEQ ID NO: 989976 - DNA, 33 bp, Homo sapien
taattttgcatggggcgatgacatggttatatt

SEQ ID NO: 989977 - DNA, 33 bp, Homo sapien
tgcagatatgctttcccccaggaaggtgtctta

SEQ ID NO: 989978 - DNA, 33 bp, Homo sapien
tgcagatatgctttcctccaggaaggtgtctta

SEQ ID NO: 989979 - DNA, 33 bp, Homo sapien
tctctaactttgtggaaaatgctaagacagtta

SEQ ID NO: 989980 - DNA, 33 bp, Homo sapien
tctctaactttgtggagaatgctaagacagtta

SEQ ID NO: 989981 - DNA, 33 bp, Homo sapien
aaattatgatgtcatacgtggccttggaacaga

SEQ ID NO: 989982 - DNA, 33 bp, Homo sapien
aaattatgatgtcatatgtggccttggaacaga

SEQ ID NO: 989983 - DNA, 33 bp, Homo sapien
taacagagtaatttacaaatggacagactcaaa

SEQ ID NO: 989984 - DNA, 33 bp, Homo sapien
taacagagtaatttaccaatggacagactcaaa

SEQ ID NO: 989985 - DNA, 33 bp, Homo sapien
ggcacacaaacggtataaattcaagttgatgaa

SEQ ID NO: 989986 - DNA, 33 bp, Homo sapien
ggcacacaaacggtatgaattcaagttgatgaa

SEQ ID NO: 989987 - DNA, 33 bp, Homo sapien
ttgtctggacttagaaactggttagcctatctt

SEQ ID NO: 989988 - DNA, 33 bp, Homo sapien
ttgtctggacttagaagctggttagcctatctt

SEQ ID NO: 989989 - DNA, 33 bp, Homo sapien
agggaaggtgaacttaaggatataaatgaagaa

SEQ ID NO: 989990 - DNA, 33 bp, Homo sapien
agggaaggtgaacttatggatataaatgaagaa

SEQ ID NO: 989991 - DNA, 33 bp, Homo sapien
gtggttggttattagtcacatggataaatggta

SEQ ID NO: 989992 - DNA, 33 bp, Homo sapien
gtggttggttattagttacatggataaatggta

SEQ ID NO: 989993 - DNA, 33 bp, Homo sapien
aaagccatcatacaaacactgtctataacaaag

SEQ ID NO: 989994 - DNA, 33 bp, Homo sapien
aaagccatcatacaaagactgtctataacaaag

SEQ ID NO: 989995 - DNA, 33 bp, Homo sapien
cctgactgctgggataaagccagagacttttcc

SEQ ID NO: 989996 - DNA, 33 bp, Homo sapien
cctgactgctgggatacagccagagacttttcc

SEQ ID NO: 989997 - DNA, 33 bp, Homo sapien
cttccacaagcataaaaccatcttcaaaacaaa

SEQ ID NO: 989998 - DNA, 33 bp, Homo sapien
cttccacaagcataaagccatcttcaaaacaaa

SEQ ID NO: 989999 - DNA, 33 bp, Homo sapien
ttaagatttaataacactacacaggtctggaaa

SEQ ID NO: 990000 - DNA, 33 bp, Homo sapien
ttaagatttaataacagtacacaggtctggaaa

SEQ ID NO: 990001 - DNA, 33 bp, Homo sapien
attagatgtttactgactatagaatggaatcaa

SEQ ID NO: 990002 - DNA, 33 bp, Homo sapien
attagatgtttactgattatagaatggaatcaa

SEQ ID NO: 990003 - DNA, 33 bp, Homo sapien
agataaataggaaataagacaatatggcctgga

SEQ ID NO: 990004 - DNA, 33 bp, Homo sapien
agataaataggaaatatgacaatatggcctgga

SEQ ID NO: 990005 - DNA, 33 bp, Homo sapien
tggacacattgttcccgctgcctaaatgaccat

SEQ ID NO: 990006 - DNA, 33 bp, Homo sapien
tggacacattgttccctctgcctaaatgaccat

SEQ ID NO: 990007 - DNA, 33 bp, Homo sapien
cttgggtgattccaggaattagatttttaagca

SEQ ID NO: 990008 - DNA, 33 bp, Homo sapien
cttgggtgattccaggtattagatttttaagca

SEQ ID NO: 990009 - DNA, 33 bp, Homo sapien
ggccagaagacctctgcactagaaagagcattt

SEQ ID NO: 990010 - DNA, 33 bp, Homo sapien
ggccagaagacctctggactagaaagagcattt

SEQ ID NO: 990011 - DNA, 33 bp, Homo sapien
tgtcccttgtttctcaaccacataaaggaagaa

SEQ ID NO: 990012 - DNA, 33 bp, Homo sapien
tgtcccttgtttctcagccacataaaggaagaa

SEQ ID NO: 990013 - DNA, 33 bp, Homo sapien
taattgctgccaggctaaatctttcacattgga

SEQ ID NO: 990014 - DNA, 33 bp, Homo sapien
taattgctgccaggcttaatctttcacattgga

SEQ ID NO: 990015 - DNA, 33 bp, Homo sapien
tgccaccagggaagcacaccaagctgtgtaggc

SEQ ID NO: 990016 - DNA, 33 bp, Homo sapien
tgccaccagggaagcataccaagctgtgtaggc

SEQ ID NO: 990017 - DNA, 33 bp, Homo sapien
actttctttccacacaaagttgatgaccaggaa

SEQ ID NO: 990018 - DNA, 33 bp, Homo sapien
actttctttccacacacagttgatgaccaggaa

SEQ ID NO: 990019 - DNA, 33 bp, Homo sapien
atcattccatcagaccagcattttctcggttat

SEQ ID NO: 990020 - DNA, 33 bp, Homo sapien
atcattccatcagacccgcattttctcggttat

SEQ ID NO: 990021 - DNA, 33 bp, Homo sapien
ggatataataaaacttcaagatggaagattcag

SEQ ID NO: 990022 - DNA, 33 bp, Homo sapien
ggatataataaaactttaagatggaagattcag

SEQ ID NO: 990023 - DNA, 33 bp, Homo sapien
atttgtttaacttatgcaaacctcactacatgc

SEQ ID NO: 990024 - DNA, 33 bp, Homo sapien
atttgtttaacttatggaaacctcactacatgc

SEQ ID NO: 990025 - DNA, 33 bp, Homo sapien
gagggaatgataggaacaaaaacaaggcaaagt

SEQ ID NO: 990026 - DNA, 33 bp, Homo sapien
gagggaatgataggaagaaaaacaaggcaaagt

SEQ ID NO: 990027 - DNA, 33 bp, Homo sapien
atctaacaagcaattcaaactacagctctagag

SEQ ID NO: 990028 - DNA, 33 bp, Homo sapien
atctaacaagcaattcgaactacagctctagag

SEQ ID NO: 990029 - DNA, 33 bp, Homo sapien
tggttcattccaccccacaatggccaccagaaa

SEQ ID NO: 990030 - DNA, 33 bp, Homo sapien
tggttcattccaccccgcaatggccaccagaaa

SEQ ID NO: 990031 - DNA, 33 bp, Homo sapien
ctggggttccatcagaccagtgtaaagcgatgg

SEQ ID NO: 990032 - DNA, 33 bp, Homo sapien
ctggggttccatcagatcagtgtaaagcgatgg

SEQ ID NO: 990033 - DNA, 33 bp, Homo sapien
aaggaacagagatttcactttcctgtcctgtaa

SEQ ID NO: 990034 - DNA, 33 bp, Homo sapien
aaggaacagagatttcgctttcctgtcctgtaa

SEQ ID NO: 990035 - DNA, 33 bp, Homo sapien
ggatggtatcggaagcactattcaaccatagaa

SEQ ID NO: 990036 - DNA, 33 bp, Homo sapien
ggatggtatcggaagcgctattcaaccatagaa

SEQ ID NO: 990037 - DNA, 33 bp, Homo sapien
tgagttgatttgctgacgttcttgacagcgggc

SEQ ID NO: 990038 - DNA, 33 bp, Homo sapien
tgagttgatttgctgatgttcttgacagcgggc

SEQ ID NO: 990039 - DNA, 33 bp, Homo sapien
gcaacggagacagatacagaaataatggtgaaa

SEQ ID NO: 990040 - DNA, 33 bp, Homo sapien
gcaacggagacagatatagaaataatggtgaaa

SEQ ID NO: 990041 - DNA, 33 bp, Homo sapien
gaactgatgaatcacacgctggcttttgtgctt

SEQ ID NO: 990042 - DNA, 33 bp, Homo sapien
gaactgatgaatcacatgctggcttttgtgctt

SEQ ID NO: 990043 - DNA, 33 bp, Homo sapien
caacttggttcaaataccagttccactacctgc

SEQ ID NO: 990044 - DNA, 33 bp, Homo sapien
caacttggttcaaatatcagttccactacctgc

SEQ ID NO: 990045 - DNA, 33 bp, Homo sapien
cttgttttatagagaaggatgcagaggcactga

SEQ ID NO: 990046 - DNA, 33 bp, Homo sapien
cttgttttatagagaatgatgcagaggcactga

SEQ ID NO: 990047 - DNA, 33 bp, Homo sapien
tccaagtcgtgtcatccattgaagctaagcaac

SEQ ID NO: 990048 - DNA, 33 bp, Homo sapien
tccaagtcgtgtcatctattgaagctaagcaac

SEQ ID NO: 990049 - DNA, 33 bp, Homo sapien
acgggccgggctagaacgatccatggaaaagtt

SEQ ID NO: 990050 - DNA, 33 bp, Homo sapien
acgggccgggctagaatgatccatggaaaagtt

SEQ ID NO: 990051 - DNA, 33 bp, Homo sapien
ctgaaagtggggtctacgcggagcctggcccat

SEQ ID NO: 990052 - DNA, 33 bp, Homo sapien
ctgaaagtggggtctatgcggagcctggcccat

SEQ ID NO: 990053 - DNA, 33 bp, Homo sapien
aacgcgtggtgcgtcaaaaggaactgctaacac

SEQ ID NO: 990054 - DNA, 33 bp, Homo sapien
aacgcgtggtgcgtcagaaggaactgctaacac

SEQ ID NO: 990055 - DNA, 33 bp, Homo sapien
attttcttaggctcacaggatttatccatctgt

SEQ ID NO: 990056 - DNA, 33 bp, Homo sapien
attttcttaggctcacgggatttatccatctgt

SEQ ID NO: 990057 - DNA, 33 bp, Homo sapien
gtcttatgtagaacttcaacaaaccattttgat

SEQ ID NO: 990058 - DNA, 33 bp, Homo sapien
gtcttatgtagaactttaacaaaccattttgat

SEQ ID NO: 990059 - DNA, 33 bp, Homo sapien
ccctccaaagaagtgaaaatcatcatggcaggt

SEQ ID NO: 990060 - DNA, 33 bp, Homo sapien
ccctccaaagaagtgagaatcatcatggcaggt

SEQ ID NO: 990061 - DNA, 33 bp, Homo sapien
ctcactctccaatttcacagcccctcttcttgc

SEQ ID NO: 990062 - DNA, 33 bp, Homo sapien
ctcactctccaatttcgcagcccctcttcttgc

SEQ ID NO: 990063 - DNA, 33 bp, Homo sapien
agcgtgtagaccaataagtttggtgtacattgt

SEQ ID NO: 990064 - DNA, 33 bp, Homo sapien
agcgtgtagaccaataggtttggtgtacattgt

SEQ ID NO: 990065 - DNA, 33 bp, Homo sapien
atagtagcttagcaagaatggagcgcaatccct

SEQ ID NO: 990066 - DNA, 33 bp, Homo sapien
atagtagcttagcaaggatggagcgcaatccct

SEQ ID NO: 990067 - DNA, 33 bp, Homo sapien
atgtgcagcttaaagaacaaggatgagtttccc

SEQ ID NO: 990068 - DNA, 33 bp, Homo sapien
atgtgcagcttaaagagcaaggatgagtttccc

SEQ ID NO: 990069 - DNA, 33 bp, Homo sapien
catcacatttttggaacacaccattgtgcccac

SEQ ID NO: 990070 - DNA, 33 bp, Homo sapien
catcacatttttggaagacaccattgtgcccac

SEQ ID NO: 990071 - DNA, 33 bp, Homo sapien
tgcctcctgctaagacaggttgcggaggggagt

SEQ ID NO: 990072 - DNA, 33 bp, Homo sapien
tgcctcctgctaagacgggttgcggaggggagt

SEQ ID NO: 990073 - DNA, 33 bp, Homo sapien
agacattactagctgaactagccaatccatttt

SEQ ID NO: 990074 - DNA, 33 bp, Homo sapien
agacattactagctgatctagccaatccatttt

SEQ ID NO: 990075 - DNA, 33 bp, Homo sapien
ttgaaaatgattaagacggtatatgttatatta

SEQ ID NO: 990076 - DNA, 33 bp, Homo sapien
ttgaaaatgattaagatggtatatgttatatta

SEQ ID NO: 990077 - DNA, 33 bp, Homo sapien
gccctgaatttggcatcatgaacttgcactctt

SEQ ID NO: 990078 - DNA, 33 bp, Homo sapien
gccctgaatttggcattatgaacttgcactctt

SEQ ID NO: 990079 - DNA, 33 bp, Homo sapien
aacaaactgcaaaggacagcctatgtttatttg

SEQ ID NO: 990080 - DNA, 33 bp, Homo sapien
aacaaactgcaaaggagagcctatgtttatttg

SEQ ID NO: 990081 - DNA, 33 bp, Homo sapien
tgaaattctggtgaaaacctccttgcatgaata

SEQ ID NO: 990082 - DNA, 33 bp, Homo sapien
tgaaattctggtgaaatcctccttgcatgaata

SEQ ID NO: 990083 - DNA, 33 bp, Homo sapien
atagagcgaatgaaacagtatcgtgaatggctg

SEQ ID NO: 990084 - DNA, 33 bp, Homo sapien
atagagcgaatgaaacggtatcgtgaatggctg

SEQ ID NO: 990085 - DNA, 33 bp, Homo sapien
cagagtcatggcgatcacagtattgtcattgtt

SEQ ID NO: 990086 - DNA, 33 bp, Homo sapien
cagagtcatggcgatcgcagtattgtcattgtt

SEQ ID NO: 990087 - DNA, 33 bp, Homo sapien
atgtaggtgaaaggacacagagaggcagatatg

SEQ ID NO: 990088 - DNA, 33 bp, Homo sapien
atgtaggtgaaaggacgcagagaggcagatatg

SEQ ID NO: 990089 - DNA, 33 bp, Homo sapien
ctgagctatctaaaaaactggaatcatcttaca

SEQ ID NO: 990090 - DNA, 33 bp, Homo sapien
ctgagctatctaaaaatctggaatcatcttaca

SEQ ID NO: 990091 - DNA, 33 bp, Homo sapien
cctcaccgtgcaccagaccttaactcctggtca

SEQ ID NO: 990092 - DNA, 33 bp, Homo sapien
cctcaccgtgcaccaggccttaactcctggtca

SEQ ID NO: 990093 - DNA, 33 bp, Homo sapien
gggcttcctttgaagcaccacttatcaacatta

SEQ ID NO: 990094 - DNA, 33 bp, Homo sapien
gggcttcctttgaagcgccacttatcaacatta

SEQ ID NO: 990095 - DNA, 33 bp, Homo sapien
tgttatgaaatgctaaatacttgaaaccaaaac

SEQ ID NO: 990096 - DNA, 33 bp, Homo sapien
tgttatgaaatgctaagtacttgaaaccaaaac

SEQ ID NO: 990097 - DNA, 33 bp, Homo sapien
tggagacttatgtcccaggaaaaccgaaataac

SEQ ID NO: 990098 - DNA, 33 bp, Homo sapien
tggagacttatgtcccgggaaaaccgaaataac

SEQ ID NO: 990099 - DNA, 33 bp, Homo sapien
accaggatgtctaaccacttcctgatgggcatg

SEQ ID NO: 990100 - DNA, 33 bp, Homo sapien
accaggatgtctaaccgcttcctgatgggcatg

SEQ ID NO: 990101 - DNA, 33 bp, Homo sapien
taattcatttagcaaagattctaaccttcagga

SEQ ID NO: 990102 - DNA, 33 bp, Homo sapien
taattcatttagcaaatattctaaccttcagga

SEQ ID NO: 990103 - DNA, 33 bp, Homo sapien
aaacaattccctggcacgcaaagcatcacagaa

SEQ ID NO: 990104 - DNA, 33 bp, Homo sapien
aaacaattccctggcaggcaaagcatcacagaa

SEQ ID NO: 990105 - DNA, 33 bp, Homo sapien
ggaccaggctgcttagcatagaggagaaccaga

SEQ ID NO: 990106 - DNA, 33 bp, Homo sapien
ggaccaggctgcttagtatagaggagaaccaga

SEQ ID NO: 990107 - DNA, 33 bp, Homo sapien
acttaaaaagcatctgcagttggcaaggtcaca

SEQ ID NO: 990108 - DNA, 33 bp, Homo sapien
acttaaaaagcatctgtagttggcaaggtcaca

SEQ ID NO: 990109 - DNA, 33 bp, Homo sapien
ccatcccaggatcacaatatttgctgttccctc

SEQ ID NO: 990110 - DNA, 33 bp, Homo sapien
ccatcccaggatcacagtatttgctgttccctc

SEQ ID NO: 990111 - DNA, 33 bp, Homo sapien
tggttaaagaggaaaactccagagaccgcagat

SEQ ID NO: 990112 - DNA, 33 bp, Homo sapien
tggttaaagaggaaaagtccagagaccgcagat

SEQ ID NO: 990113 - DNA, 33 bp, Homo sapien
cttcaggatgccctaacacaaggcaagagaaac

SEQ ID NO: 990114 - DNA, 33 bp, Homo sapien
cttcaggatgccctaagacaaggcaagagaaac

SEQ ID NO: 990115 - DNA, 33 bp, Homo sapien
ggaactgtggtgtgtcaagcagaggaaagcact

SEQ ID NO: 990116 - DNA, 33 bp, Homo sapien
ggaactgtggtgtgtcgagcagaggaaagcact

SEQ ID NO: 990117 - DNA, 33 bp, Homo sapien
gttccatgaaatatggccacgttggtgaaatac

SEQ ID NO: 990118 - DNA, 33 bp, Homo sapien
gttccatgaaatatgggcacgttggtgaaatac

SEQ ID NO: 990119 - DNA, 33 bp, Homo sapien
accagggaacaggtaacgtacagtacagtgcta

SEQ ID NO: 990120 - DNA, 33 bp, Homo sapien
accagggaacaggtaatgtacagtacagtgcta

SEQ ID NO: 990121 - DNA, 33 bp, Homo sapien
agcagttgcccacttccagctaacagagccacc

SEQ ID NO: 990122 - DNA, 33 bp, Homo sapien
agcagttgcccacttctagctaacagagccacc

SEQ ID NO: 990123 - DNA, 33 bp, Homo sapien
gtcttcctggaatgacacttgaaagggcagtca

SEQ ID NO: 990124 - DNA, 33 bp, Homo sapien
gtcttcctggaatgacgcttgaaagggcagtca

SEQ ID NO: 990125 - DNA, 33 bp, Homo sapien
ctcaacacaaagtctgaagtttcatagaaagca

SEQ ID NO: 990126 - DNA, 33 bp, Homo sapien
ctcaacacaaagtctggagtttcatagaaagca

SEQ ID NO: 990127 - DNA, 33 bp, Homo sapien
gatacagctcttaaacccctgggagacaagcag

SEQ ID NO: 990128 - DNA, 33 bp, Homo sapien
gatacagctcttaaactcctgggagacaagcag

SEQ ID NO: 990129 - DNA, 33 bp, Homo sapien
ttctaggacaggcatcaaaggctggtccatcag

SEQ ID NO: 990130 - DNA, 33 bp, Homo sapien
ttctaggacaggcatcgaaggctggtccatcag

SEQ ID NO: 990131 - DNA, 33 bp, Homo sapien
caggcttacaggcgtacgaattttattccccat

SEQ ID NO: 990132 - DNA, 33 bp, Homo sapien
caggcttacaggcgtatgaattttattccccat

SEQ ID NO: 990133 - DNA, 33 bp, Homo sapien
ggttgttcaaaaccataaaagtaattacagagg

SEQ ID NO: 990134 - DNA, 33 bp, Homo sapien
ggttgttcaaaaccatgaaagtaattacagagg

SEQ ID NO: 990135 - DNA, 33 bp, Homo sapien
aactctgttagagtcacggcctacaccaaccct

SEQ ID NO: 990136 - DNA, 33 bp, Homo sapien
aactctgttagagtcatggcctacaccaaccct

SEQ ID NO: 990137 - DNA, 33 bp, Homo sapien
aatgataatctgtaaaaagtgcttcaagctgtt

SEQ ID NO: 990138 - DNA, 33 bp, Homo sapien
aatgataatctgtaaagagtgcttcaagctgtt

SEQ ID NO: 990139 - DNA, 33 bp, Homo sapien
ccttttggagtcctacaagtgatctatttttaa

SEQ ID NO: 990140 - DNA, 33 bp, Homo sapien
ccttttggagtcctaccagtgatctatttttaa

SEQ ID NO: 990141 - DNA, 33 bp, Homo sapien
tggattttaaacagaaagtatcctggcatcact

SEQ ID NO: 990142 - DNA, 33 bp, Homo sapien
tggattttaaacagaacgtatcctggcatcact

SEQ ID NO: 990143 - DNA, 33 bp, Homo sapien
agaaaatacaaccgtaaagaagaacttaatatg

SEQ ID NO: 990144 - DNA, 33 bp, Homo sapien
agaaaatacaaccgtagagaagaacttaatatg

SEQ ID NO: 990145 - DNA, 33 bp, Homo sapien
caccaagctgacatacaggatgaagaaaccatg

SEQ ID NO: 990146 - DNA, 33 bp, Homo sapien
caccaagctgacatactggatgaagaaaccatg

SEQ ID NO: 990147 - DNA, 33 bp, Homo sapien
gtcaaatatgagggacacataaatagatacaac

SEQ ID NO: 990148 - DNA, 33 bp, Homo sapien
gtcaaatatgagggacgcataaatagatacaac

SEQ ID NO: 990149 - DNA, 33 bp, Homo sapien
taatgaatttgctaggaagagacattccttatg

SEQ ID NO: 990150 - DNA, 33 bp, Homo sapien
taatgaatttgctagggagagacattccttatg

SEQ ID NO: 990151 - DNA, 33 bp, Homo sapien
ggttcataacatttacactctgttctgcaaaaa

SEQ ID NO: 990152 - DNA, 33 bp, Homo sapien
ggttcataacatttacgctctgttctgcaaaaa

SEQ ID NO: 990153 - DNA, 33 bp, Homo sapien
gtcctaatggtacaaacagagcgatcaaggaca

SEQ ID NO: 990154 - DNA, 33 bp, Homo sapien
gtcctaatggtacaaatagagcgatcaaggaca

SEQ ID NO: 990155 - DNA, 33 bp, Homo sapien
cccctgagttcattacaaaggtcagctggccca

SEQ ID NO: 990156 - DNA, 33 bp, Homo sapien
cccctgagttcattacgaaggtcagctggccca

SEQ ID NO: 990157 - DNA, 33 bp, Homo sapien
tgttggaggattctgaagtgaaacattgcttgt

SEQ ID NO: 990158 - DNA, 33 bp, Homo sapien
tgttggaggattctgaggtgaaacattgcttgt

SEQ ID NO: 990159 - DNA, 33 bp, Homo sapien
tgttccgtacggtagccactagccatacacggc

SEQ ID NO: 990160 - DNA, 33 bp, Homo sapien
tgttccgtacggtagctactagccatacacggc

SEQ ID NO: 990161 - DNA, 33 bp, Homo sapien
ctagaagttccaaaaaatttgactaaatagtaa

SEQ ID NO: 990162 - DNA, 33 bp, Homo sapien
ctagaagttccaaaaagtttgactaaatagtaa

SEQ ID NO: 990163 - DNA, 33 bp, Homo sapien
ggttaagtaacatacccaaaggcatacagttag

SEQ ID NO: 990164 - DNA, 33 bp, Homo sapien
ggttaagtaacatacctaaaggcatacagttag

SEQ ID NO: 990165 - DNA, 33 bp, Homo sapien
atcgaatgattacttacgagatgccaggtacca

SEQ ID NO: 990166 - DNA, 33 bp, Homo sapien
atcgaatgattacttatgagatgccaggtacca

SEQ ID NO: 990167 - DNA, 33 bp, Homo sapien
ttgtttaagcaatgaagcttagaaggcagggtt

SEQ ID NO: 990168 - DNA, 33 bp, Homo sapien
ttgtttaagcaatgaatcttagaaggcagggtt

SEQ ID NO: 990169 - DNA, 33 bp, Homo sapien
atactgactttttagcaagttggaagtgaagga

SEQ ID NO: 990170 - DNA, 33 bp, Homo sapien
atactgactttttagcgagttggaagtgaagga

SEQ ID NO: 990171 - DNA, 33 bp, Homo sapien
ctacagtattgtgtgacgagtggaactgttcca

SEQ ID NO: 990172 - DNA, 33 bp, Homo sapien
ctacagtattgtgtgatgagtggaactgttcca

SEQ ID NO: 990173 - DNA, 33 bp, Homo sapien
ccctacaaaccatccaatgagaagtgtcagaag

SEQ ID NO: 990174 - DNA, 33 bp, Homo sapien
ccctacaaaccatccagtgagaagtgtcagaag

SEQ ID NO: 990175 - DNA, 33 bp, Homo sapien
acgtgcacctgagaagcctcgcaagctgtgact

SEQ ID NO: 990176 - DNA, 33 bp, Homo sapien
acgtgcacctgagaaggctcgcaagctgtgact

SEQ ID NO: 990177 - DNA, 33 bp, Homo sapien
tagcccccagggtttcaccagccttcctcagtt

SEQ ID NO: 990178 - DNA, 33 bp, Homo sapien
tagcccccagggtttcgccagccttcctcagtt

SEQ ID NO: 990179 - DNA, 33 bp, Homo sapien
agcacacattctgcccggctcctccatacgtta

SEQ ID NO: 990180 - DNA, 33 bp, Homo sapien
agcacacattctgccctgctcctccatacgtta

SEQ ID NO: 990181 - DNA, 33 bp, Homo sapien
atattctatatcttacaagggtactgacacggt

SEQ ID NO: 990182 - DNA, 33 bp, Homo sapien
atattctatatcttacgagggtactgacacggt

SEQ ID NO: 990183 - DNA, 33 bp, Homo sapien
ggaaagcacccaatgacggtgaggtgccctgga

SEQ ID NO: 990184 - DNA, 33 bp, Homo sapien
ggaaagcacccaatgatggtgaggtgccctgga

SEQ ID NO: 990185 - DNA, 33 bp, Homo sapien
taagtttcttgtgcaaaggtgcccatattaggc

SEQ ID NO: 990186 - DNA, 33 bp, Homo sapien
taagtttcttgtgcaagggtgcccatattaggc

SEQ ID NO: 990187 - DNA, 33 bp, Homo sapien
acatacttggtgtgcacgagttataaccagaca

SEQ ID NO: 990188 - DNA, 33 bp, Homo sapien
acatacttggtgtgcatgagttataaccagaca

SEQ ID NO: 990189 - DNA, 33 bp, Homo sapien
ttaagtgtgaagtggacgtaggtagatggtaag

SEQ ID NO: 990190 - DNA, 33 bp, Homo sapien
ttaagtgtgaagtggatgtaggtagatggtaag

SEQ ID NO: 990191 - DNA, 33 bp, Homo sapien
agttccacttgatcccccaaggagttctggaac

SEQ ID NO: 990192 - DNA, 33 bp, Homo sapien
agttccacttgatcccgcaaggagttctggaac

SEQ ID NO: 990193 - DNA, 33 bp, Homo sapien
acacagctctggactacccattttgcagggtgt

SEQ ID NO: 990194 - DNA, 33 bp, Homo sapien
acacagctctggactatccattttgcagggtgt

SEQ ID NO: 990195 - DNA, 33 bp, Homo sapien
tccattctgtaaccaactctaactttccttggg

SEQ ID NO: 990196 - DNA, 33 bp, Homo sapien
tccattctgtaaccaattctaactttccttggg

SEQ ID NO: 990197 - DNA, 33 bp, Homo sapien
aatatgtaacttttgaaattggcttttttcacc

SEQ ID NO: 990198 - DNA, 33 bp, Homo sapien
aatatgtaacttttgagattggcttttttcacc

SEQ ID NO: 990199 - DNA, 33 bp, Homo sapien
tgggctcaactaatgcagagaattgtaggacat

SEQ ID NO: 990200 - DNA, 33 bp, Homo sapien
tgggctcaactaatgcggagaattgtaggacat

SEQ ID NO: 990201 - DNA, 33 bp, Homo sapien
cctcagaaggaaacagacctaccgacaccttga

SEQ ID NO: 990202 - DNA, 33 bp, Homo sapien
cctcagaaggaaacagccctaccgacaccttga

SEQ ID NO: 990203 - DNA, 33 bp, Homo sapien
aacaactcaccaaccactcctgacccggcttct

SEQ ID NO: 990204 - DNA, 33 bp, Homo sapien
aacaactcaccaaccattcctgacccggcttct

SEQ ID NO: 990205 - DNA, 33 bp, Homo sapien
aaggttctattacctgaaatgaagatctgcaat

SEQ ID NO: 990206 - DNA, 33 bp, Homo sapien
aaggttctattacctgcaatgaagatctgcaat

SEQ ID NO: 990207 - DNA, 33 bp, Homo sapien
aacccatgaagtcaaactcaagtggcgtcaggg

SEQ ID NO: 990208 - DNA, 33 bp, Homo sapien
aacccatgaagtcaaattcaagtggcgtcaggg

SEQ ID NO: 990209 - DNA, 33 bp, Homo sapien
aagactggctgagtaaccttgttcctttacatt

SEQ ID NO: 990210 - DNA, 33 bp, Homo sapien
aagactggctgagtaagcttgttcctttacatt

SEQ ID NO: 990211 - DNA, 33 bp, Homo sapien
ttgcacctgggggggacgccaatctgtaaagca

SEQ ID NO: 990212 - DNA, 33 bp, Homo sapien
ttgcacctgggggggatgccaatctgtaaagca

SEQ ID NO: 990213 - DNA, 33 bp, Homo sapien
agctctgttattatccaccatttttgatcatgg

SEQ ID NO: 990214 - DNA, 33 bp, Homo sapien
agctctgttattatcctccatttttgatcatgg

SEQ ID NO: 990215 - DNA, 33 bp, Homo sapien
atttgactctactatacccttttgtactactct

SEQ ID NO: 990216 - DNA, 33 bp, Homo sapien
atttgactctactatatccttttgtactactct

SEQ ID NO: 990217 - DNA, 33 bp, Homo sapien
cacagtgaaaaggacaaatgactcgctcattaa

SEQ ID NO: 990218 - DNA, 33 bp, Homo sapien
cacagtgaaaaggacagatgactcgctcattaa

SEQ ID NO: 990219 - DNA, 33 bp, Homo sapien
ctctaagctctcaaacacttcctgctctgagtg

SEQ ID NO: 990220 - DNA, 33 bp, Homo sapien
ctctaagctctcaaacccttcctgctctgagtg

SEQ ID NO: 990221 - DNA, 33 bp, Homo sapien
taggaaagacaaacaaataaactctgcggtggg

SEQ ID NO: 990222 - DNA, 33 bp, Homo sapien
taggaaagacaaacaagtaaactctgcggtggg

SEQ ID NO: 990223 - DNA, 33 bp, Homo sapien
taacccccagtagctcagaatgtgcctttattt

SEQ ID NO: 990224 - DNA, 33 bp, Homo sapien
taacccccagtagctcggaatgtgcctttattt

SEQ ID NO: 990225 - DNA, 33 bp, Homo sapien
ctgacgttctgagcaagaaagtttgaagaaatg

SEQ ID NO: 990226 - DNA, 33 bp, Homo sapien
ctgacgttctgagcaataaagtttgaagaaatg

SEQ ID NO: 990227 - DNA, 33 bp, Homo sapien
aattttaaacacagagaaattagataaaggaaa

SEQ ID NO: 990228 - DNA, 33 bp, Homo sapien
aattttaaacacagaggaattagataaaggaaa

SEQ ID NO: 990229 - DNA, 33 bp, Homo sapien
ctgcaaatacaaagcaaagtaaggcacgatcct

SEQ ID NO: 990230 - DNA, 33 bp, Homo sapien
ctgcaaatacaaagcacagtaaggcacgatcct

SEQ ID NO: 990231 - DNA, 33 bp, Homo sapien
cagacagttgtgagaccgagcaaaacatacagt

SEQ ID NO: 990232 - DNA, 33 bp, Homo sapien
cagacagttgtgagactgagcaaaacatacagt

SEQ ID NO: 990233 - DNA, 33 bp, Homo sapien
aagggctaatctccaacccagccccatgaaatg

SEQ ID NO: 990234 - DNA, 33 bp, Homo sapien
aagggctaatctccaatccagccccatgaaatg

SEQ ID NO: 990235 - DNA, 33 bp, Homo sapien
gcggtattattttccaacttgtacacagcaccc

SEQ ID NO: 990236 - DNA, 33 bp, Homo sapien
gcggtattattttccagcttgtacacagcaccc

SEQ ID NO: 990237 - DNA, 33 bp, Homo sapien
cacgtacacaagatgcagattgaggaggatgtc

SEQ ID NO: 990238 - DNA, 33 bp, Homo sapien
cacgtacacaagatgcggattgaggaggatgtc

SEQ ID NO: 990239 - DNA, 33 bp, Homo sapien
acaatgaagccagcgcagagaaacggggtgctg

SEQ ID NO: 990240 - DNA, 33 bp, Homo sapien
acaatgaagccagcgcggagaaacggggtgctg

SEQ ID NO: 990241 - DNA, 33 bp, Homo sapien
cgggtgggggcgcttacacctgtctagcagcgg

SEQ ID NO: 990242 - DNA, 33 bp, Homo sapien
cgggtgggggcgcttatacctgtctagcagcgg

SEQ ID NO: 990243 - DNA, 33 bp, Homo sapien
tcattcttctttcttacagagaccaaaaagatg

SEQ ID NO: 990244 - DNA, 33 bp, Homo sapien
tcattcttctttcttatagagaccaaaaagatg

SEQ ID NO: 990245 - DNA, 33 bp, Homo sapien
ttaaaggcctaaaagcacgattcttgaccatga

SEQ ID NO: 990246 - DNA, 33 bp, Homo sapien
ttaaaggcctaaaagcgcgattcttgaccatga

SEQ ID NO: 990247 - DNA, 33 bp, Homo sapien
gaaattgccacctccccacagccaacatggtta

SEQ ID NO: 990248 - DNA, 33 bp, Homo sapien
gaaattgccacctcccgacagccaacatggtta

SEQ ID NO: 990249 - DNA, 33 bp, Homo sapien
tgggtaagaccaagagaaagctcttgaaattgc

SEQ ID NO: 990250 - DNA, 33 bp, Homo sapien
tgggtaagaccaagaggaagctcttgaaattgc

SEQ ID NO: 990251 - DNA, 33 bp, Homo sapien
tttgtgaagtaagagcaagtgtagtgggtaaga

SEQ ID NO: 990252 - DNA, 33 bp, Homo sapien
tttgtgaagtaagagcgagtgtagtgggtaaga

SEQ ID NO: 990253 - DNA, 33 bp, Homo sapien
ttttcagaactaagcccatattcaaactcagaa

SEQ ID NO: 990254 - DNA, 33 bp, Homo sapien
ttttcagaactaagcctatattcaaactcagaa

SEQ ID NO: 990255 - DNA, 33 bp, Homo sapien
tttattttaaaacggaagaaatcacatgattgt

SEQ ID NO: 990256 - DNA, 33 bp, Homo sapien
tttattttaaaacggacgaaatcacatgattgt

SEQ ID NO: 990257 - DNA, 33 bp, Homo sapien
cacatgattgttcacccggattttctgtgagtg

SEQ ID NO: 990258 - DNA, 33 bp, Homo sapien
cacatgattgttcacctggattttctgtgagtg

SEQ ID NO: 990259 - DNA, 33 bp, Homo sapien
ttccttaattacccaaaaaaattctaggctact

SEQ ID NO: 990260 - DNA, 33 bp, Homo sapien
ttccttaattacccaacaaaattctaggctact

SEQ ID NO: 990261 - DNA, 33 bp, Homo sapien
gctcctcacccatcccagaacctggtgcaggga

SEQ ID NO: 990262 - DNA, 33 bp, Homo sapien
gctcctcacccatcccggaacctggtgcaggga

SEQ ID NO: 990263 - DNA, 33 bp, Homo sapien
cattacactgtcatgtcaatgtttactctcatc

SEQ ID NO: 990264 - DNA, 33 bp, Homo sapien
cattacactgtcatgtgaatgtttactctcatc

SEQ ID NO: 990265 - DNA, 33 bp, Homo sapien
acagtggctaataggaaacttcactgctttagc

SEQ ID NO: 990266 - DNA, 33 bp, Homo sapien
acagtggctaataggagacttcactgctttagc

SEQ ID NO: 990267 - DNA, 33 bp, Homo sapien
tttatccgcaatcacacgttttcactacattgt

SEQ ID NO: 990268 - DNA, 33 bp, Homo sapien
tttatccgcaatcacatgttttcactacattgt

SEQ ID NO: 990269 - DNA, 33 bp, Homo sapien
actcaagctagaagagaaaggagctgctaccca

SEQ ID NO: 990270 - DNA, 33 bp, Homo sapien
actcaagctagaagaggaaggagctgctaccca

SEQ ID NO: 990271 - DNA, 33 bp, Homo sapien
atgtcaagtgtaggaacgctttgcctagccctg

SEQ ID NO: 990272 - DNA, 33 bp, Homo sapien
atgtcaagtgtaggaatgctttgcctagccctg

SEQ ID NO: 990273 - DNA, 33 bp, Homo sapien
cactgttagatgtcacacagtgctagttcctcc

SEQ ID NO: 990274 - DNA, 33 bp, Homo sapien
cactgttagatgtcactcagtgctagttcctcc

SEQ ID NO: 990275 - DNA, 33 bp, Homo sapien
tttcccagacagagtcactgaatttacaaaagc

SEQ ID NO: 990276 - DNA, 33 bp, Homo sapien
tttcccagacagagtcgctgaatttacaaaagc

SEQ ID NO: 990277 - DNA, 33 bp, Homo sapien
aatgattgaattcaaccccttctccgcatggat

SEQ ID NO: 990278 - DNA, 33 bp, Homo sapien
aatgattgaattcaactccttctccgcatggat

SEQ ID NO: 990279 - DNA, 33 bp, Homo sapien
tcttcgaagcttccacgggtcatgctgcatatg

SEQ ID NO: 990280 - DNA, 33 bp, Homo sapien
tcttcgaagcttccactggtcatgctgcatatg

SEQ ID NO: 990281 - DNA, 33 bp, Homo sapien
tgtaagatgttgtgctaacctgttttttcccct

SEQ ID NO: 990282 - DNA, 33 bp, Homo sapien
tgtaagatgttgtgcttacctgttttttcccct

SEQ ID NO: 990283 - DNA, 33 bp, Homo sapien
cattgtcttactctgacacaactttgctctcac

SEQ ID NO: 990284 - DNA, 33 bp, Homo sapien
cattgtcttactctgatacaactttgctctcac

SEQ ID NO: 990285 - DNA, 33 bp, Homo sapien
cagagtaagacaatgacaccaagccagatggtt

SEQ ID NO: 990286 - DNA, 33 bp, Homo sapien
cagagtaagacaatgataccaagccagatggtt

SEQ ID NO: 990287 - DNA, 33 bp, Homo sapien
ttccacagggcattcaatagagtacacagaagg

SEQ ID NO: 990288 - DNA, 33 bp, Homo sapien
ttccacagggcattcagtagagtacacagaagg

SEQ ID NO: 990289 - DNA, 33 bp, Homo sapien
caccagtgcagtaaaaacaatgtcccatcacag

SEQ ID NO: 990290 - DNA, 33 bp, Homo sapien
caccagtgcagtaaaagcaatgtcccatcacag

SEQ ID NO: 990291 - DNA, 33 bp, Homo sapien
gatgatggatgagaaggacgtacagcttccttc

SEQ ID NO: 990292 - DNA, 33 bp, Homo sapien
gatgatggatgagaagtacgtacagcttccttc

SEQ ID NO: 990293 - DNA, 33 bp, Homo sapien
agtagttggaactacaagagtgagccactatgc

SEQ ID NO: 990294 - DNA, 33 bp, Homo sapien
agtagttggaactacaggagtgagccactatgc

SEQ ID NO: 990295 - DNA, 33 bp, Homo sapien
agcagagttgcagttacgatattaaacacatta

SEQ ID NO: 990296 - DNA, 33 bp, Homo sapien
agcagagttgcagttatgatattaaacacatta

SEQ ID NO: 990297 - DNA, 33 bp, Homo sapien
cagcctacaaagatcaacttccttgggcataga

SEQ ID NO: 990298 - DNA, 33 bp, Homo sapien
cagcctacaaagatcagcttccttgggcataga

SEQ ID NO: 990299 - DNA, 33 bp, Homo sapien
tcattcctatgggaataatgctttggaaattat

SEQ ID NO: 990300 - DNA, 33 bp, Homo sapien
tcattcctatgggaatgatgctttggaaattat

SEQ ID NO: 990301 - DNA, 33 bp, Homo sapien
agattaaagtgggttaagtttgctctgtgaaaa

SEQ ID NO: 990302 - DNA, 33 bp, Homo sapien
agattaaagtgggttatgtttgctctgtgaaaa

SEQ ID NO: 990303 - DNA, 33 bp, Homo sapien
atctcacatccagaaacggtggcgcaaaaattt

SEQ ID NO: 990304 - DNA, 33 bp, Homo sapien
atctcacatccagaaatggtggcgcaaaaattt

SEQ ID NO: 990305 - DNA, 33 bp, Homo sapien
taacattgagtgtatacaagtattgtgctagtc

SEQ ID NO: 990306 - DNA, 33 bp, Homo sapien
taacattgagtgtatagaagtattgtgctagtc

SEQ ID NO: 990307 - DNA, 33 bp, Homo sapien
gttcatgaggtggacactaagatgaggaacttc

SEQ ID NO: 990308 - DNA, 33 bp, Homo sapien
gttcatgaggtggacagtaagatgaggaacttc

SEQ ID NO: 990309 - DNA, 33 bp, Homo sapien
tttaatcttacagacaatggaaagtcatttgaa

SEQ ID NO: 990310 - DNA, 33 bp, Homo sapien
tttaatcttacagacagtggaaagtcatttgaa

SEQ ID NO: 990311 - DNA, 33 bp, Homo sapien
taaagcaaaaatacacagcatagattgcaacag

SEQ ID NO: 990312 - DNA, 33 bp, Homo sapien
taaagcaaaaatacacggcatagattgcaacag

SEQ ID NO: 990313 - DNA, 33 bp, Homo sapien
aggagtcgtccgcccacgggagtctcctcttct

SEQ ID NO: 990314 - DNA, 33 bp, Homo sapien
aggagtcgtccgcccatgggagtctcctcttct

SEQ ID NO: 990315 - DNA, 33 bp, Homo sapien
atcatgtaaacagaggaagatgagtctggatag

SEQ ID NO: 990316 - DNA, 33 bp, Homo sapien
atcatgtaaacagagggagatgagtctggatag

SEQ ID NO: 990317 - DNA, 33 bp, Homo sapien
tttgcaatgagtaacaataccaacagattaaca

SEQ ID NO: 990318 - DNA, 33 bp, Homo sapien
tttgcaatgagtaacagtaccaacagattaaca

SEQ ID NO: 990319 - DNA, 33 bp, Homo sapien
ggatggaacccattaagtgcctttatgaccttt

SEQ ID NO: 990320 - DNA, 33 bp, Homo sapien
ggatggaacccattaattgcctttatgaccttt

SEQ ID NO: 990321 - DNA, 33 bp, Homo sapien
ggtaaatgaacaaagaatctactcagtgtcttc

SEQ ID NO: 990322 - DNA, 33 bp, Homo sapien
ggtaaatgaacaaagagtctactcagtgtcttc

SEQ ID NO: 990323 - DNA, 33 bp, Homo sapien
ttgttcaccaatattccctgttactgtagatat

SEQ ID NO: 990324 - DNA, 33 bp, Homo sapien
ttgttcaccaatattctctgttactgtagatat

SEQ ID NO: 990325 - DNA, 33 bp, Homo sapien
cttcctaaaaggataaaatcctgggctgaatta

SEQ ID NO: 990326 - DNA, 33 bp, Homo sapien
cttcctaaaaggataagatcctgggctgaatta

SEQ ID NO: 990327 - DNA, 33 bp, Homo sapien
acagctacaggaattcaaggatttcagtatttt

SEQ ID NO: 990328 - DNA, 33 bp, Homo sapien
acagctacaggaattcgaggatttcagtatttt

SEQ ID NO: 990329 - DNA, 33 bp, Homo sapien
cctagtgttaggcccacggttaaagctctgaag

SEQ ID NO: 990330 - DNA, 33 bp, Homo sapien
cctagtgttaggcccatggttaaagctctgaag

SEQ ID NO: 990331 - DNA, 33 bp, Homo sapien
aggaaaagtaaagatcagatcatcggagagatg

SEQ ID NO: 990332 - DNA, 33 bp, Homo sapien
aggaaaagtaaagatcggatcatcggagagatg

SEQ ID NO: 990333 - DNA, 33 bp, Homo sapien
aagagcatatcttggaaggcaaagaagagacca

SEQ ID NO: 990334 - DNA, 33 bp, Homo sapien
aagagcatatcttggagggcaaagaagagacca

SEQ ID NO: 990335 - DNA, 33 bp, Homo sapien
taaggatgagaaaaaactgtgaaagtatgtcct

SEQ ID NO: 990336 - DNA, 33 bp, Homo sapien
taaggatgagaaaaaattgtgaaagtatgtcct

SEQ ID NO: 990337 - DNA, 33 bp, Homo sapien
attctaggcagctaaccgggtcagattgttaca

SEQ ID NO: 990338 - DNA, 33 bp, Homo sapien
attctaggcagctaactgggtcagattgttaca

SEQ ID NO: 990339 - DNA, 33 bp, Homo sapien
tattcctgtcctttaactataagaactatctca

SEQ ID NO: 990340 - DNA, 33 bp, Homo sapien
tattcctgtcctttaagtataagaactatctca

SEQ ID NO: 990341 - DNA, 33 bp, Homo sapien
actatctcaacagctcaaatctgtaccttgaat

SEQ ID NO: 990342 - DNA, 33 bp, Homo sapien
actatctcaacagctcgaatctgtaccttgaat

SEQ ID NO: 990343 - DNA, 33 bp, Homo sapien
caaattgtgcagtatccaacagcagctggaaga

SEQ ID NO: 990344 - DNA, 33 bp, Homo sapien
caaattgtgcagtatctaacagcagctggaaga

SEQ ID NO: 990345 - DNA, 33 bp, Homo sapien
ggtcacaggctagaaacaggaaaagtgttacct

SEQ ID NO: 990346 - DNA, 33 bp, Homo sapien
ggtcacaggctagaaataggaaaagtgttacct

SEQ ID NO: 990347 - DNA, 33 bp, Homo sapien
tagcaactgtctaaaacgaatgggcagagcctc

SEQ ID NO: 990348 - DNA, 33 bp, Homo sapien
tagcaactgtctaaaatgaatgggcagagcctc

SEQ ID NO: 990349 - DNA, 33 bp, Homo sapien
ctctggcctctacaagaagcaggatggccagag

SEQ ID NO: 990350 - DNA, 33 bp, Homo sapien
ctctggcctctacaaggagcaggatggccagag

SEQ ID NO: 990351 - DNA, 33 bp, Homo sapien
agggtcaatatatgccagataggcagaagggca

SEQ ID NO: 990352 - DNA, 33 bp, Homo sapien
agggtcaatatatgccggataggcagaagggca

SEQ ID NO: 990353 - DNA, 33 bp, Homo sapien
aaacttcctgaagaacccactagtctttttcta

SEQ ID NO: 990354 - DNA, 33 bp, Homo sapien
aaacttcctgaagaacgcactagtctttttcta

SEQ ID NO: 990355 - DNA, 33 bp, Homo sapien
tttgcttgtggtagctcaaggtgatatgtgctt

SEQ ID NO: 990356 - DNA, 33 bp, Homo sapien
tttgcttgtggtagctgaaggtgatatgtgctt

SEQ ID NO: 990357 - DNA, 33 bp, Homo sapien
agagaaaaggtgggccaacacatcaaggggaga

SEQ ID NO: 990358 - DNA, 33 bp, Homo sapien
agagaaaaggtgggccgacacatcaaggggaga

SEQ ID NO: 990359 - DNA, 33 bp, Homo sapien
atgttgctgttgagaaaaataagacttggagag

SEQ ID NO: 990360 - DNA, 33 bp, Homo sapien
atgttgctgttgagaagaataagacttggagag

SEQ ID NO: 990361 - DNA, 33 bp, Homo sapien
gtgagcatattgtaggaatataacaattacata

SEQ ID NO: 990362 - DNA, 33 bp, Homo sapien
gtgagcatattgtaggtatataacaattacata

SEQ ID NO: 990363 - DNA, 33 bp, Homo sapien
gtaaactagtttcttacgatattgggcaagcca

SEQ ID NO: 990364 - DNA, 33 bp, Homo sapien
gtaaactagtttcttatgatattgggcaagcca

SEQ ID NO: 990365 - DNA, 33 bp, Homo sapien
tagatattggaacttacgcacaccttgcccagc

SEQ ID NO: 990366 - DNA, 33 bp, Homo sapien
tagatattggaacttatgcacaccttgcccagc

SEQ ID NO: 990367 - DNA, 33 bp, Homo sapien
aattaaacccatcgataagtgatttcaaaaatt

SEQ ID NO: 990368 - DNA, 33 bp, Homo sapien
aattaaacccatcgattagtgatttcaaaaatt

SEQ ID NO: 990369 - DNA, 33 bp, Homo sapien
tataaattttcaaatacgcagaaaggttgaagg

SEQ ID NO: 990370 - DNA, 33 bp, Homo sapien
tataaattttcaaatatgcagaaaggttgaagg

SEQ ID NO: 990371 - DNA, 33 bp, Homo sapien
ctctatcctgggctaccagaaaacaggtcataa

SEQ ID NO: 990372 - DNA, 33 bp, Homo sapien
ctctatcctgggctactagaaaacaggtcataa

SEQ ID NO: 990373 - DNA, 33 bp, Homo sapien
ccagactattgtgggaacctcttgaacaacaag

SEQ ID NO: 990374 - DNA, 33 bp, Homo sapien
ccagactattgtgggagcctcttgaacaacaag

SEQ ID NO: 990375 - DNA, 33 bp, Homo sapien
aacttgttctggcaaccctctgcctcatctttt

SEQ ID NO: 990376 - DNA, 33 bp, Homo sapien
aacttgttctggcaacgctctgcctcatctttt

SEQ ID NO: 990377 - DNA, 33 bp, Homo sapien
gggaagaaaagcaatacggcagcaacagacagc

SEQ ID NO: 990378 - DNA, 33 bp, Homo sapien
gggaagaaaagcaatatggcagcaacagacagc

SEQ ID NO: 990379 - DNA, 33 bp, Homo sapien
ctctttttgctgactacactctcctgggcaatc

SEQ ID NO: 990380 - DNA, 33 bp, Homo sapien
ctctttttgctgactatactctcctgggcaatc

SEQ ID NO: 990381 - DNA, 33 bp, Homo sapien
acttatacaagttaaacgtatgctttcattcta

SEQ ID NO: 990382 - DNA, 33 bp, Homo sapien
acttatacaagttaaaggtatgctttcattcta

SEQ ID NO: 990383 - DNA, 33 bp, Homo sapien
gtaatccttcatgtccaagataaccaaaggctg

SEQ ID NO: 990384 - DNA, 33 bp, Homo sapien
gtaatccttcatgtccgagataaccaaaggctg

SEQ ID NO: 990385 - DNA, 33 bp, Homo sapien
atccttttcctgtccacaggagaatgtctttct

SEQ ID NO: 990386 - DNA, 33 bp, Homo sapien
atccttttcctgtccataggagaatgtctttct

SEQ ID NO: 990387 - DNA, 33 bp, Homo sapien
tgagagggctagaagacgggatgaagtgtgagg

SEQ ID NO: 990388 - DNA, 33 bp, Homo sapien
tgagagggctagaagatgggatgaagtgtgagg

SEQ ID NO: 990389 - DNA, 33 bp, Homo sapien
caaacatttaataagcagagccatgtcagacac

SEQ ID NO: 990390 - DNA, 33 bp, Homo sapien
caaacatttaataagcggagccatgtcagacac

SEQ ID NO: 990391 - DNA, 33 bp, Homo sapien
gtcctactcaagaaagaaaacctaagctttaaa

SEQ ID NO: 990392 - DNA, 33 bp, Homo sapien
gtcctactcaagaaaggaaacctaagctttaaa

SEQ ID NO: 990393 - DNA, 33 bp, Homo sapien
gatcagctagtgtgatgaacaactgctaactgg

SEQ ID NO: 990394 - DNA, 33 bp, Homo sapien
gatcagctagtgtgattaacaactgctaactgg

SEQ ID NO: 990395 - DNA, 33 bp, Homo sapien
gtctttgatgttctgcccttgaatggaaatgag

SEQ ID NO: 990396 - DNA, 33 bp, Homo sapien
gtctttgatgttctgctcttgaatggaaatgag

SEQ ID NO: 990397 - DNA, 33 bp, Homo sapien
gatcagatgatacaccaggatgtgttttcagtg

SEQ ID NO: 990398 - DNA, 33 bp, Homo sapien
gatcagatgatacaccgggatgtgttttcagtg

SEQ ID NO: 990399 - DNA, 33 bp, Homo sapien
tgtgttttcagtgtgagggaaagattgtttcca

SEQ ID NO: 990400 - DNA, 33 bp, Homo sapien
tgtgttttcagtgtgatggaaagattgtttcca

SEQ ID NO: 990401 - DNA, 33 bp, Homo sapien
tgttaattattgtttacgagatctggcttgctt

SEQ ID NO: 990402 - DNA, 33 bp, Homo sapien
tgttaattattgtttaggagatctggcttgctt

SEQ ID NO: 990403 - DNA, 33 bp, Homo sapien
caattaaattgttacaatcacttcactgggcca

SEQ ID NO: 990404 - DNA, 33 bp, Homo sapien
caattaaattgttacagtcacttcactgggcca

SEQ ID NO: 990405 - DNA, 33 bp, Homo sapien
aaggtagcacatttcaggaatagttgatgctag

SEQ ID NO: 990406 - DNA, 33 bp, Homo sapien
aaggtagcacatttcatgaatagttgatgctag

SEQ ID NO: 990407 - DNA, 33 bp, Homo sapien
acttactgagataccacaactttttaatctctg

SEQ ID NO: 990408 - DNA, 33 bp, Homo sapien
acttactgagataccataactttttaatctctg

SEQ ID NO: 990409 - DNA, 33 bp, Homo sapien
cttgtcactcctggaacgtgtgccaggccaact

SEQ ID NO: 990410 - DNA, 33 bp, Homo sapien
cttgtcactcctggaatgtgtgccaggccaact

SEQ ID NO: 990411 - DNA, 33 bp, Homo sapien
acagcaccctaaaataacatttagcctgtacta

SEQ ID NO: 990412 - DNA, 33 bp, Homo sapien
acagcaccctaaaataccatttagcctgtacta

SEQ ID NO: 990413 - DNA, 33 bp, Homo sapien
tcatggaaatttgaacaattaatacattttttt

SEQ ID NO: 990414 - DNA, 33 bp, Homo sapien
tcatggaaatttgaactattaatacattttttt

SEQ ID NO: 990415 - DNA, 33 bp, Homo sapien
catattgcacaacataccacgaataaagcatgg

SEQ ID NO: 990416 - DNA, 33 bp, Homo sapien
catattgcacaacatatcacgaataaagcatgg

SEQ ID NO: 990417 - DNA, 33 bp, Homo sapien
tttatgtggaaggtgacaacaaaagagctaagc

SEQ ID NO: 990418 - DNA, 33 bp, Homo sapien
tttatgtggaaggtgagaacaaaagagctaagc

SEQ ID NO: 990419 - DNA, 33 bp, Homo sapien
actcaattcagaacaactcaccttctatatata

SEQ ID NO: 990420 - DNA, 33 bp, Homo sapien
actcaattcagaacaattcaccttctatatata

SEQ ID NO: 990421 - DNA, 33 bp, Homo sapien
tttgtcccagtatatcagaacaagctagacagg

SEQ ID NO: 990422 - DNA, 33 bp, Homo sapien
tttgtcccagtatatcggaacaagctagacagg

SEQ ID NO: 990423 - DNA, 33 bp, Homo sapien
cctctgagctctaaccacctcatttcaagacat

SEQ ID NO: 990424 - DNA, 33 bp, Homo sapien
cctctgagctctaaccgcctcatttcaagacat

SEQ ID NO: 990425 - DNA, 33 bp, Homo sapien
ggcagactatgtgtacaaaggattgggccaaaa

SEQ ID NO: 990426 - DNA, 33 bp, Homo sapien
ggcagactatgtgtacgaaggattgggccaaaa

SEQ ID NO: 990427 - DNA, 33 bp, Homo sapien
cctcaattttctctccccagcttacagttctcc

SEQ ID NO: 990428 - DNA, 33 bp, Homo sapien
cctcaattttctctcctcagcttacagttctcc

SEQ ID NO: 990429 - DNA, 33 bp, Homo sapien
ctagtgtatcataatgaacataatgaggcattt

SEQ ID NO: 990430 - DNA, 33 bp, Homo sapien
ctagtgtatcataatggacataatgaggcattt

SEQ ID NO: 990431 - DNA, 33 bp, Homo sapien
catagtttcaagagaaaagtgcttttaggaaaa

SEQ ID NO: 990432 - DNA, 33 bp, Homo sapien
catagtttcaagagaagagtgcttttaggaaaa

SEQ ID NO: 990433 - DNA, 33 bp, Homo sapien
cagattgaatgcatacacagatatccaaatcca

SEQ ID NO: 990434 - DNA, 33 bp, Homo sapien
cagattgaatgcatacgcagatatccaaatcca

SEQ ID NO: 990435 - DNA, 33 bp, Homo sapien
tttactgtggtttgcacatttgttgtttttggt

SEQ ID NO: 990436 - DNA, 33 bp, Homo sapien
tttactgtggtttgcatatttgttgtttttggt

SEQ ID NO: 990437 - DNA, 33 bp, Homo sapien
catgtttgaagttttacataaggtgagacagaa

SEQ ID NO: 990438 - DNA, 33 bp, Homo sapien
catgtttgaagttttatataaggtgagacagaa

SEQ ID NO: 990439 - DNA, 33 bp, Homo sapien
agtgagtaaattatcaaccgagcagcccctttg

SEQ ID NO: 990440 - DNA, 33 bp, Homo sapien
agtgagtaaattatcagccgagcagcccctttg

SEQ ID NO: 990441 - DNA, 33 bp, Homo sapien
atccataacttaatcacatccacaaagatcctt

SEQ ID NO: 990442 - DNA, 33 bp, Homo sapien
atccataacttaatcagatccacaaagatcctt

SEQ ID NO: 990443 - DNA, 33 bp, Homo sapien
gggtgtcactggatatcagagcttccccaccac

SEQ ID NO: 990444 - DNA, 33 bp, Homo sapien
gggtgtcactggatattagagcttccccaccac

SEQ ID NO: 990445 - DNA, 33 bp, Homo sapien
atgacatttgagtagcaacctgaggaaagtgag

SEQ ID NO: 990446 - DNA, 33 bp, Homo sapien
atgacatttgagtagcgacctgaggaaagtgag

SEQ ID NO: 990447 - DNA, 33 bp, Homo sapien
ctcctcttgcgtaagccgcagattaggaaagca

SEQ ID NO: 990448 - DNA, 33 bp, Homo sapien
ctcctcttgcgtaagctgcagattaggaaagca

SEQ ID NO: 990449 - DNA, 33 bp, Homo sapien
acactatattctacccactgggcaggatgaggg

SEQ ID NO: 990450 - DNA, 33 bp, Homo sapien
acactatattctaccccctgggcaggatgaggg

SEQ ID NO: 990451 - DNA, 33 bp, Homo sapien
gtaattgagtacaagacgaaaagtagaaactga

SEQ ID NO: 990452 - DNA, 33 bp, Homo sapien
gtaattgagtacaagatgaaaagtagaaactga

SEQ ID NO: 990453 - DNA, 33 bp, Homo sapien
caagagtttaacacataaaagatttcacctctc

SEQ ID NO: 990454 - DNA, 33 bp, Homo sapien
caagagtttaacacatcaaagatttcacctctc

SEQ ID NO: 990455 - DNA, 33 bp, Homo sapien
ctggaaggttggatgacatgatacacataaggc

SEQ ID NO: 990456 - DNA, 33 bp, Homo sapien
ctggaaggttggatgagatgatacacataaggc

SEQ ID NO: 990457 - DNA, 33 bp, Homo sapien
tttcacaatagccctgcaagtgcaaaaatctta

SEQ ID NO: 990458 - DNA, 33 bp, Homo sapien
tttcacaatagccctgtaagtgcaaaaatctta

SEQ ID NO: 990459 - DNA, 33 bp, Homo sapien
caaggaaaattcagaacgctttactgagactgg

SEQ ID NO: 990460 - DNA, 33 bp, Homo sapien
caaggaaaattcagaaggctttactgagactgg

SEQ ID NO: 990461 - DNA, 33 bp, Homo sapien
cagacctctggaccaacagttgacaaatttcat

SEQ ID NO: 990462 - DNA, 33 bp, Homo sapien
cagacctctggaccaagagttgacaaatttcat

SEQ ID NO: 990463 - DNA, 33 bp, Homo sapien
gaataatggagccaaacgctgaagctgccacac

SEQ ID NO: 990464 - DNA, 33 bp, Homo sapien
gaataatggagccaaatgctgaagctgccacac

SEQ ID NO: 990465 - DNA, 33 bp, Homo sapien
tatgggttagtaactcccttcacctccccaacg

SEQ ID NO: 990466 - DNA, 33 bp, Homo sapien
tatgggttagtaactctcttcacctccccaacg

SEQ ID NO: 990467 - DNA, 33 bp, Homo sapien
acctgagatcagggtaaggtggtgaattgactg

SEQ ID NO: 990468 - DNA, 33 bp, Homo sapien
acctgagatcagggtagggtggtgaattgactg

SEQ ID NO: 990469 - DNA, 33 bp, Homo sapien
tcatccacctgcatcaacgtggctttgttctcc

SEQ ID NO: 990470 - DNA, 33 bp, Homo sapien
tcatccacctgcatcagcgtggctttgttctcc

SEQ ID NO: 990471 - DNA, 33 bp, Homo sapien
gtgacagagcccagcactgaagatgaggtgaca

SEQ ID NO: 990472 - DNA, 33 bp, Homo sapien
gtgacagagcccagcattgaagatgaggtgaca

SEQ ID NO: 990473 - DNA, 33 bp, Homo sapien
ctgtaacaaatagacccgaaatgtgtcatggtt

SEQ ID NO: 990474 - DNA, 33 bp, Homo sapien
ctgtaacaaatagacctgaaatgtgtcatggtt

SEQ ID NO: 990475 - DNA, 33 bp, Homo sapien
tctgccccacctccaaattagaactaccttaga

SEQ ID NO: 990476 - DNA, 33 bp, Homo sapien
tctgccccacctccaacttagaactaccttaga

SEQ ID NO: 990477 - DNA, 33 bp, Homo sapien
taggacctcttcgtcacagcagctgagtcttaa

SEQ ID NO: 990478 - DNA, 33 bp, Homo sapien
taggacctcttcgtcagagcagctgagtcttaa

SEQ ID NO: 990479 - DNA, 33 bp, Homo sapien
ttaggtagaccaattaggtgaataacttaattg

SEQ ID NO: 990480 - DNA, 33 bp, Homo sapien
ttaggtagaccaattatgtgaataacttaattg

SEQ ID NO: 990481 - DNA, 33 bp, Homo sapien
tgtgcaggagatagcccaggtatgaagaggacg

SEQ ID NO: 990482 - DNA, 33 bp, Homo sapien
tgtgcaggagatagcctaggtatgaagaggacg

SEQ ID NO: 990483 - DNA, 33 bp, Homo sapien
tgctcttgttagtacacgaagttgttctctgag

SEQ ID NO: 990484 - DNA, 33 bp, Homo sapien
tgctcttgttagtacatgaagttgttctctgag

SEQ ID NO: 990485 - DNA, 33 bp, Homo sapien
agagatgatatcagacacaggtcgtggattgcc

SEQ ID NO: 990486 - DNA, 33 bp, Homo sapien
agagatgatatcagacccaggtcgtggattgcc

SEQ ID NO: 990487 - DNA, 33 bp, Homo sapien
tgtcaagacagattgccagagtttgaatgcctg

SEQ ID NO: 990488 - DNA, 33 bp, Homo sapien
tgtcaagacagattgctagagtttgaatgcctg

SEQ ID NO: 990489 - DNA, 33 bp, Homo sapien
aactcattcagaaatcccaagaagtcctggaat

SEQ ID NO: 990490 - DNA, 33 bp, Homo sapien
aactcattcagaaatctcaagaagtcctggaat

SEQ ID NO: 990491 - DNA, 33 bp, Homo sapien
accagcccagccaatacgatgcaaccccgtctc

SEQ ID NO: 990492 - DNA, 33 bp, Homo sapien
accagcccagccaatatgatgcaaccccgtctc

SEQ ID NO: 990493 - DNA, 33 bp, Homo sapien; identical to SEQ ID NO: 990491

SEQ ID NO: 990494 - DNA, 33 bp, Homo sapien; identical to SEQ ID NO: 990492

SEQ ID NO: 990495 - DNA, 33 bp, Homo sapien
gtttaagctcttctggccatctgttcaggcagg

SEQ ID NO: 990496 - DNA, 33 bp, Homo sapien
gtttaagctcttctgggcatctgttcaggcagg

SEQ ID NO: 990497 - DNA, 33 bp, Homo sapien
gtggaaagcactaggaagaagctgcaaatgaag

SEQ ID NO: 990498 - DNA, 33 bp, Homo sapien
gtggaaagcactaggaggaagctgcaaatgaag

SEQ ID NO: 990499 - DNA, 33 bp, Homo sapien
ccaccatcttggccaaagtcttagccgcaaagt

SEQ ID NO: 990500 - DNA, 33 bp, Homo sapien
ccaccatcttggccaaggtcttagccgcaaagt

SEQ ID NO: 990501 - DNA, 33 bp, Homo sapien
gcaacattatgaaggaaacccaaagtctgacat

SEQ ID NO: 990502 - DNA, 33 bp, Homo sapien
gcaacattatgaaggagacccaaagtctgacat

SEQ ID NO: 990503 - DNA, 33 bp, Homo sapien
tgggcaatcctaaaggccattccatctttgcag

SEQ ID NO: 990504 - DNA, 33 bp, Homo sapien
tgggcaatcctaaaggtcattccatctttgcag

SEQ ID NO: 990505 - DNA, 33 bp, Homo sapien
aactgagactctcagcagaaggaatgaggatcc

SEQ ID NO: 990506 - DNA, 33 bp, Homo sapien
aactgagactctcagcggaaggaatgaggatcc

SEQ ID NO: 990507 - DNA, 33 bp, Homo sapien
acacaccatagctccacgcaagaagggaggaca

SEQ ID NO: 990508 - DNA, 33 bp, Homo sapien
acacaccatagctccatgcaagaagggaggaca

SEQ ID NO: 990509 - DNA, 33 bp, Homo sapien
tcccctgcctcagttacaatcgtatcagcactt

SEQ ID NO: 990510 - DNA, 33 bp, Homo sapien
tcccctgcctcagttataatcgtatcagcactt

SEQ ID NO: 990511 - DNA, 33 bp, Homo sapien
tttctcctcacttcagaaagatgctctggtgga

SEQ ID NO: 990512 - DNA, 33 bp, Homo sapien
tttctcctcacttcaggaagatgctctggtgga

SEQ ID NO: 990513 - DNA, 33 bp, Homo sapien
tgcagtgaaggttgagacccacatactatccca

SEQ ID NO: 990514 - DNA, 33 bp, Homo sapien
tgcagtgaaggttgagccccacatactatccca

SEQ ID NO: 990515 - DNA, 33 bp, Homo sapien
tgcctccaaagaagaactgatggctgtgatcag

SEQ ID NO: 990516 - DNA, 33 bp, Homo sapien
tgcctccaaagaagaattgatggctgtgatcag

SEQ ID NO: 990517 - DNA, 33 bp, Homo sapien
tacagagcaattgaccaaatgccagttgattca

SEQ ID NO: 990518 - DNA, 33 bp, Homo sapien
tacagagcaattgacccaatgccagttgattca

SEQ ID NO: 990519 - DNA, 33 bp, Homo sapien
gaccttgggtgaataacctgtttctccctgggc

SEQ ID NO: 990520 - DNA, 33 bp, Homo sapien
gaccttgggtgaataagctgtttctccctgggc

SEQ ID NO: 990521 - DNA, 33 bp, Homo sapien
cattcctcttttccatcaacacaatgatagcca

SEQ ID NO: 990522 - DNA, 33 bp, Homo sapien
cattcctcttttccattaacacaatgatagcca

SEQ ID NO: 990523 - DNA, 33 bp, Homo sapien
gaaatcagacctacttaaacacattcctctttt

SEQ ID NO: 990524 - DNA, 33 bp, Homo sapien
gaaatcagacctactttaacacattcctctttt

SEQ ID NO: 990525 - DNA, 33 bp, Homo sapien
catgatcaaaacaacacgggcagaactggcttc

SEQ ID NO: 990526 - DNA, 33 bp, Homo sapien
catgatcaaaacaacatgggcagaactggcttc

SEQ ID NO: 990527 - DNA, 33 bp, Homo sapien
atttccagaatccagacgacataggtatttctt

SEQ ID NO: 990528 - DNA, 33 bp, Homo sapien
atttccagaatccagatgacataggtatttctt

SEQ ID NO: 990529 - DNA, 33 bp, Homo sapien
aaatgtcattgttttcaagattctccaactgcc

SEQ ID NO: 990530 - DNA, 33 bp, Homo sapien
aaatgtcattgttttcgagattctccaactgcc

SEQ ID NO: 990531 - DNA, 33 bp, Homo sapien
ggttcctttcagacataagagttactgagtccc

SEQ ID NO: 990532 - DNA, 33 bp, Homo sapien
ggttcctttcagacatgagagttactgagtccc

SEQ ID NO: 990533 - DNA, 33 bp, Homo sapien
tacgaagatgagagaccgcatgaggaagagagg

SEQ ID NO: 990534 - DNA, 33 bp, Homo sapien
tacgaagatgagagactgcatgaggaagagagg

SEQ ID NO: 990535 - DNA, 33 bp, Homo sapien
cgtggaggagaacagcacccagtaagagaaggg

SEQ ID NO: 990536 - DNA, 33 bp, Homo sapien
cgtggaggagaacagcgcccagtaagagaaggg

SEQ ID NO: 990537 - DNA, 33 bp, Homo sapien
gccttatctatccttcaattacgtgcatgaata

SEQ ID NO: 990538 - DNA, 33 bp, Homo sapien
gccttatctatccttcgattacgtgcatgaata

SEQ ID NO: 990539 - DNA, 33 bp, Homo sapien
aaaattaatcataggaaatgaataccgaacaca

SEQ ID NO: 990540 - DNA, 33 bp, Homo sapien
aaaattaatcataggagatgaataccgaacaca

SEQ ID NO: 990541 - DNA, 33 bp, Homo sapien
aggggtaggattagccagagggttagagatgga

SEQ ID NO: 990542 - DNA, 33 bp, Homo sapien
aggggtaggattagccggagggttagagatgga

SEQ ID NO: 990543 - DNA, 33 bp, Homo sapien
caattctagccacaagaaagtctggcaaatatt

SEQ ID NO: 990544 - DNA, 33 bp, Homo sapien
caattctagccacaagtaagtctggcaaatatt

SEQ ID NO: 990545 - DNA, 33 bp, Homo sapien
aggtgactccagaaagcagcagtgacagtgaaa

SEQ ID NO: 990546 - DNA, 33 bp, Homo sapien
aggtgactccagaaagtagcagtgacagtgaaa

SEQ ID NO: 990547 - DNA, 33 bp, Homo sapien
gaatcctggatgatgacgtgatcccttggtctg

SEQ ID NO: 990548 - DNA, 33 bp, Homo sapien
gaatcctggatgatgatgtgatcccttggtctg

SEQ ID NO: 990549 - DNA, 33 bp, Homo sapien
ttcatagactggatcaccctttctttacccttc

SEQ ID NO: 990550 - DNA, 33 bp, Homo sapien
ttcatagactggatcatcctttctttacccttc

SEQ ID NO: 990551 - DNA, 33 bp, Homo sapien
tttgtgcttctttttaaggcagagactacacac

SEQ ID NO: 990552 - DNA, 33 bp, Homo sapien
tttgtgcttctttttagggcagagactacacac

SEQ ID NO: 990553 - DNA, 33 bp, Homo sapien
aagacactgggtatgccaaaaggaggaagggag

SEQ ID NO: 990554 - DNA, 33 bp, Homo sapien
aagacactgggtatgctaaaaggaggaagggag

SEQ ID NO: 990555 - DNA, 33 bp, Homo sapien
acttgggatactggcaaatcaacttccccttct

SEQ ID NO: 990556 - DNA, 33 bp, Homo sapien
acttgggatactggcagatcaacttccccttct

SEQ ID NO: 990557 - DNA, 33 bp, Homo sapien
tgcaaatgcctgctggaatggggcagagaaaga

SEQ ID NO: 990558 - DNA, 33 bp, Homo sapien
tgcaaatgcctgctgggatggggcagagaaaga

SEQ ID NO: 990559 - DNA, 33 bp, Homo sapien
gtttactagtgttccactcagacagttcagggc

SEQ ID NO: 990560 - DNA, 33 bp, Homo sapien
gtttactagtgttccattcagacagttcagggc

SEQ ID NO: 990561 - DNA, 33 bp, Homo sapien
aaaacataaatcaatacgtgtgagttatatgtt

SEQ ID NO: 990562 - DNA, 33 bp, Homo sapien
aaaacataaatcaatatgtgtgagttatatgtt

SEQ ID NO: 990563 - DNA, 33 bp, Homo sapien
cccccgttatcttaaccccaagcatttcttctg

SEQ ID NO: 990564 - DNA, 33 bp, Homo sapien
cccccgttatcttaacgccaagcatttcttctg

SEQ ID NO: 990565 - DNA, 33 bp, Homo sapien
ttcctcttcaccatctaacaacaaatgcttttg

SEQ ID NO: 990566 - DNA, 33 bp, Homo sapien
ttcctcttcaccatctcacaacaaatgcttttg

SEQ ID NO: 990567 - DNA, 33 bp, Homo sapien
cacttgcctagctaaacggcaaaacagaggcct

SEQ ID NO: 990568 - DNA, 33 bp, Homo sapien
cacttgcctagctaaatggcaaaacagaggcct

SEQ ID NO: 990569 - DNA, 33 bp, Homo sapien
tatatttatgctgagaaggatttatttttgttt

SEQ ID NO: 990570 - DNA, 33 bp, Homo sapien
tatatttatgctgagagggatttatttttgttt

SEQ ID NO: 990571 - DNA, 33 bp, Homo sapien
tacagatgatgaaacaagacacagagaggttat

SEQ ID NO: 990572 - DNA, 33 bp, Homo sapien
tacagatgatgaaacaggacacagagaggttat

SEQ ID NO: 990573 - DNA, 33 bp, Homo sapien
ctcaccttagccacaaaggaacataaaacacag

SEQ ID NO: 990574 - DNA, 33 bp, Homo sapien
ctcaccttagccacaacggaacataaaacacag

SEQ ID NO: 990575 - DNA, 33 bp, Homo sapien
gtctgactcaagaaacgacagaatcaattgcca

SEQ ID NO: 990576 - DNA, 33 bp, Homo sapien
gtctgactcaagaaactacagaatcaattgcca

SEQ ID NO: 990577 - DNA, 33 bp, Homo sapien
tcttgaagtgagaagactatcctgatgggctcg

SEQ ID NO: 990578 - DNA, 33 bp, Homo sapien
tcttgaagtgagaagattatcctgatgggctcg

SEQ ID NO: 990579 - DNA, 33 bp, Homo sapien
gtcacacagagaacgtaacgaggcattcctggg

SEQ ID NO: 990580 - DNA, 33 bp, Homo sapien
gtcacacagagaacgtgacgaggcattcctggg

SEQ ID NO: 990581 - DNA, 33 bp, Homo sapien
gtgagagcctagagggccccctgaatatgtcct

SEQ ID NO: 990582 - DNA, 33 bp, Homo sapien
gtgagagcctagagggtcccctgaatatgtcct

SEQ ID NO: 990583 - DNA, 33 bp, Homo sapien
ctcagcctacagcttactaactgacatatacac

SEQ ID NO: 990584 - DNA, 33 bp, Homo sapien
ctcagcctacagcttattaactgacatatacac

SEQ ID NO: 990585 - DNA, 33 bp, Homo sapien
caataacctaggactaacatcaccaagtgcaag

SEQ ID NO: 990586 - DNA, 33 bp, Homo sapien
caataacctaggactatcatcaccaagtgcaag

SEQ ID NO: 990587 - DNA, 33 bp, Homo sapien
cttcgtaaaactgtgacacgttgagcaaatcac

SEQ ID NO: 990588 - DNA, 33 bp, Homo sapien
cttcgtaaaactgtgatacgttgagcaaatcac

SEQ ID NO: 990589 - DNA, 33 bp, Homo sapien
atatgctaatgaggaccggctaataatcccaaa

SEQ ID NO: 990590 - DNA, 33 bp, Homo sapien
atatgctaatgaggactggctaataatcccaaa

SEQ ID NO: 990591 - DNA, 33 bp, Homo sapien
gcactttcacttttcacgatttaatgccctctc

SEQ ID NO: 990592 - DNA, 33 bp, Homo sapien
gcactttcacttttcatgatttaatgccctctc

SEQ ID NO: 990593 - DNA, 33 bp, Homo sapien
tagaccttcacccttcaactttcaagcagttcc

SEQ ID NO: 990594 - DNA, 33 bp, Homo sapien
tagaccttcacccttcgactttcaagcagttcc

SEQ ID NO: 990595 - DNA, 33 bp, Homo sapien
aagtcaattgtaaaaaaaactgtatgagaagat

SEQ ID NO: 990596 - DNA, 33 bp, Homo sapien
aagtcaattgtaaaaagaactgtatgagaagat

SEQ ID NO: 990597 - DNA, 33 bp, Homo sapien
tattccatttcctaataagagctagcaatcatt

SEQ ID NO: 990598 - DNA, 33 bp, Homo sapien
tattccatttcctaatgagagctagcaatcatt

SEQ ID NO: 990599 - DNA, 33 bp, Homo sapien
tcctgatctgaaaaaacggggaaaataatatcc

SEQ ID NO: 990600 - DNA, 33 bp, Homo sapien
tcctgatctgaaaaaatggggaaaataatatcc

SEQ ID NO: 990601 - DNA, 33 bp, Homo sapien
gagagttttaaacagcagagtgttatgctctgt

SEQ ID NO: 990602 - DNA, 33 bp, Homo sapien
gagagttttaaacagcggagtgttatgctctgt

SEQ ID NO: 990603 - DNA, 33 bp, Homo sapien
aaaaaaaaaatcctggaagccagataattcagg

SEQ ID NO: 990604 - DNA, 33 bp, Homo sapien
aaaaaaaaaatcctggcagccagataattcagg

SEQ ID NO: 990605 - DNA, 33 bp, Homo sapien
taagtgactgtgaagaataaggtatagcaggta

SEQ ID NO: 990606 - DNA, 33 bp, Homo sapien
taagtgactgtgaagagtaaggtatagcaggta

SEQ ID NO: 990607 - DNA, 33 bp, Homo sapien
accgtagcatattcagaatttatggaatcctcc

SEQ ID NO: 990608 - DNA, 33 bp, Homo sapien
accgtagcatattcagcatttatggaatcctcc

SEQ ID NO: 990609 - DNA, 33 bp, Homo sapien
tcatcattaacagcaaaacacaataaggggtat

SEQ ID NO: 990610 - DNA, 33 bp, Homo sapien
tcatcattaacagcaatacacaataaggggtat

SEQ ID NO: 990611 - DNA, 33 bp, Homo sapien
atcatttggccaagaacggaaaccagtggccct

SEQ ID NO: 990612 - DNA, 33 bp, Homo sapien
atcatttggccaagaagggaaaccagtggccct

SEQ ID NO: 990613 - DNA, 33 bp, Homo sapien
catgcacatagtggtaactgctcgtggaaaaaa

SEQ ID NO: 990614 - DNA, 33 bp, Homo sapien
catgcacatagtggtacctgctcgtggaaaaaa

SEQ ID NO: 990615 - DNA, 33 bp, Homo sapien
aagaaggggaccaaagccattcctttatcaaga

SEQ ID NO: 990616 - DNA, 33 bp, Homo sapien
aagaaggggaccaaagtcattcctttatcaaga

SEQ ID NO: 990617 - DNA, 33 bp, Homo sapien
cgtgagagctgagatacggtcctgctctcaagt

SEQ ID NO: 990618 - DNA, 33 bp, Homo sapien
cgtgagagctgagatatggtcctgctctcaagt

SEQ ID NO: 990619 - DNA, 33 bp, Homo sapien
gaaccagttggatgaaaagtttttgccttctta

SEQ ID NO: 990620 - DNA, 33 bp, Homo sapien
gaaccagttggatgaacagtttttgccttctta

SEQ ID NO: 990621 - DNA, 33 bp, Homo sapien
agcagacacttttccccatgatactaggatgct

SEQ ID NO: 990622 - DNA, 33 bp, Homo sapien
agcagacacttttcccgatgatactaggatgct

SEQ ID NO: 990623 - DNA, 33 bp, Homo sapien
gtggagaatcaggcccaagagtttaaataataa

SEQ ID NO: 990624 - DNA, 33 bp, Homo sapien
gtggagaatcaggcccgagagtttaaataataa

SEQ ID NO: 990625 - DNA, 33 bp, Homo sapien
caagtagttggtactcaaatgctcgctgtccca

SEQ ID NO: 990626 - DNA, 33 bp, Homo sapien
caagtagttggtactccaatgctcgctgtccca

SEQ ID NO: 990627 - DNA, 33 bp, Homo sapien
ctagtccaaatgctcacgtgtactcttgccacc

SEQ ID NO: 990628 - DNA, 33 bp, Homo sapien
ctagtccaaatgctcatgtgtactcttgccacc

SEQ ID NO: 990629 - DNA, 33 bp, Homo sapien
gtcaaaaggatattgagatacctgtccaatcag

SEQ ID NO: 990630 - DNA, 33 bp, Homo sapien
gtcaaaaggatattgatatacctgtccaatcag

SEQ ID NO: 990631 - DNA, 33 bp, Homo sapien
agggtgtcaatgattacactagactgcactgga

SEQ ID NO: 990632 - DNA, 33 bp, Homo sapien
agggtgtcaatgattatactagactgcactgga

SEQ ID NO: 990633 - DNA, 33 bp, Homo sapien
attattagtcttagtcaaaatatcgtggagttc

SEQ ID NO: 990634 - DNA, 33 bp, Homo sapien
attattagtcttagtctaaatatcgtggagttc

SEQ ID NO: 990635 - DNA, 33 bp, Homo sapien
tgctgtcagttcagacaaaataccacatacaca

SEQ ID NO: 990636 - DNA, 33 bp, Homo sapien
tgctgtcagttcagacgaaataccacatacaca

SEQ ID NO: 990637 - DNA, 33 bp, Homo sapien
tggtcactggtcataactaattctaccagccag

SEQ ID NO: 990638 - DNA, 33 bp, Homo sapien
tggtcactggtcataattaattctaccagccag

SEQ ID NO: 990639 - DNA, 33 bp, Homo sapien
gtgttttgctacatcaactgctaagtaacacac

SEQ ID NO: 990640 - DNA, 33 bp, Homo sapien
gtgttttgctacatcacctgctaagtaacacac

SEQ ID NO: 990641 - DNA, 33 bp, Homo sapien
atctatggaaacacgacgtaatattccccaacc

SEQ ID NO: 990642 - DNA, 33 bp, Homo sapien
atctatggaaacacgatgtaatattccccaacc

SEQ ID NO: 990643 - DNA, 33 bp, Homo sapien
cagaacaacaagcctgcatttaatatgcataag

SEQ ID NO: 990644 - DNA, 33 bp, Homo sapien
cagaacaacaagcctgtatttaatatgcataag

SEQ ID NO: 990645 - DNA, 33 bp, Homo sapien
ggacacaggatatataacacatgattccagctc

SEQ ID NO: 990646 - DNA, 33 bp, Homo sapien
ggacacaggatatataccacatgattccagctc

SEQ ID NO: 990647 - DNA, 33 bp, Homo sapien
atactaattcttctccccctgaaagctaaagat

SEQ ID NO: 990648 - DNA, 33 bp, Homo sapien
atactaattcttctcctcctgaaagctaaagat

SEQ ID NO: 990649 - DNA, 33 bp, Homo sapien
gcctccaagaactgtacagatctgaaatggacc

SEQ ID NO: 990650 - DNA, 33 bp, Homo sapien
gcctccaagaactgtatagatctgaaatggacc

SEQ ID NO: 990651 - DNA, 33 bp, Homo sapien
gacctcatcttctccccctccaactcagctatg

SEQ ID NO: 990652 - DNA, 33 bp, Homo sapien
gacctcatcttctccctctccaactcagctatg

SEQ ID NO: 990653 - DNA, 33 bp, Homo sapien
taaagaggacctaaaccgagactggagaagtca

SEQ ID NO: 990654 - DNA, 33 bp, Homo sapien
taaagaggacctaaactgagactggagaagtca

SEQ ID NO: 990655 - DNA, 33 bp, Homo sapien
aatatcattttgtataagacactttccatgctc

SEQ ID NO: 990656 - DNA, 33 bp, Homo sapien
aatatcattttgtatacgacactttccatgctc

SEQ ID NO: 990657 - DNA, 33 bp, Homo sapien
ggcttggctaagaagaagactaagacttaacaa

SEQ ID NO: 990658 - DNA, 33 bp, Homo sapien
ggcttggctaagaagacgactaagacttaacaa

SEQ ID NO: 990659 - DNA, 33 bp, Homo sapien
acccagattcataaaacatttgggagctgctag

SEQ ID NO: 990660 - DNA, 33 bp, Homo sapien
acccagattcataaaatatttgggagctgctag

SEQ ID NO: 990661 - DNA, 33 bp, Homo sapien
gcagaagtccatataacacttgagtcctcggct

SEQ ID NO: 990662 - DNA, 33 bp, Homo sapien
gcagaagtccatataatacttgagtcctcggct

SEQ ID NO: 990663 - DNA, 33 bp, Homo sapien
tcccttaaataaacagaaagttcgtgactcgaa

SEQ ID NO: 990664 - DNA, 33 bp, Homo sapien
tcccttaaataaacagtaagttcgtgactcgaa

SEQ ID NO: 990665 - DNA, 33 bp, Homo sapien
ttccttcacctgtataatagtatgccttgggtc

SEQ ID NO: 990666 - DNA, 33 bp, Homo sapien
ttccttcacctgtatattagtatgccttgggtc

SEQ ID NO: 990667 - DNA, 33 bp, Homo sapien
catctcaaattatgcccaggtctatcgtattga

SEQ ID NO: 990668 - DNA, 33 bp, Homo sapien
catctcaaattatgccgaggtctatcgtattga

SEQ ID NO: 990669 - DNA, 33 bp, Homo sapien
ggggagtgtgagcaaactagcatggggtccagc

SEQ ID NO: 990670 - DNA, 33 bp, Homo sapien
ggggagtgtgagcaaagtagcatggggtccagc

SEQ ID NO: 990671 - DNA, 33 bp, Homo sapien
atactagttatgtttacgccagaaattggaaaa

SEQ ID NO: 990672 - DNA, 33 bp, Homo sapien
atactagttatgtttaggccagaaattggaaaa

SEQ ID NO: 990673 - DNA, 33 bp, Homo sapien
acatatacatacagaaacaaaatggttattgga

SEQ ID NO: 990674 - DNA, 33 bp, Homo sapien
acatatacatacagaagcaaaatggttattgga

SEQ ID NO: 990675 - DNA, 33 bp, Homo sapien
gtttgttgacattatcaaacacttacaaccctt

SEQ ID NO: 990676 - DNA, 33 bp, Homo sapien
gtttgttgacattatcgaacacttacaaccctt

SEQ ID NO: 990677 - DNA, 33 bp, Homo sapien
ctccatggagggcaaccgtagactcctctctac

SEQ ID NO: 990678 - DNA, 33 bp, Homo sapien
ctccatggagggcaactgtagactcctctctac

SEQ ID NO: 990679 - DNA, 33 bp, Homo sapien
ctgaatatggaagaacagttctgagcaaagaga

SEQ ID NO: 990680 - DNA, 33 bp, Homo sapien
ctgaatatggaagaaccgttctgagcaaagaga

SEQ ID NO: 990681 - DNA, 33 bp, Homo sapien
tcagcaaaaacatcacaagcttgtactgaaata

SEQ ID NO: 990682 - DNA, 33 bp, Homo sapien
tcagcaaaaacatcaccagcttgtactgaaata

SEQ ID NO: 990683 - DNA, 33 bp, Homo sapien
cactaacctctcccaaactgagatgtgcctggt

SEQ ID NO: 990684 - DNA, 33 bp, Homo sapien
cactaacctctcccaacctgagatgtgcctggt

SEQ ID NO: 990685 - DNA, 33 bp, Homo sapien
atggtctaggtaggaaaccacattcagctacaa

SEQ ID NO: 990686 - DNA, 33 bp, Homo sapien
atggtctaggtaggaatccacattcagctacaa

SEQ ID NO: 990687 - DNA, 33 bp, Homo sapien
gtaatcttcatagaaactctcttagcagataca

SEQ ID NO: 990688 - DNA, 33 bp, Homo sapien
gtaatcttcatagaaattctcttagcagataca

SEQ ID NO: 990689 - DNA, 33 bp, Homo sapien
aatctgcattttaaagaagccctctggtgactg

SEQ ID NO: 990690 - DNA, 33 bp, Homo sapien
aatctgcattttaaaggagccctctggtgactg

SEQ ID NO: 990691 - DNA, 33 bp, Homo sapien
ctggtgcatcaatagcacatccctctgctttct

SEQ ID NO: 990692 - DNA, 33 bp, Homo sapien
ctggtgcatcaatagcgcatccctctgctttct

SEQ ID NO: 990693 - DNA, 33 bp, Homo sapien
atgttccaaacacaaaaaagaagtaacaaatgt

SEQ ID NO: 990694 - DNA, 33 bp, Homo sapien
atgttccaaacacaaagaagaagtaacaaatgt

SEQ ID NO: 990695 - DNA, 33 bp, Homo sapien
tatttcacttcacataaatttgtccagttctat

SEQ ID NO: 990696 - DNA, 33 bp, Homo sapien
tatttcacttcacatagatttgtccagttctat

SEQ ID NO: 990697 - DNA, 33 bp, Homo sapien
atcagtgtaacaaaaggatatctgcattcctat

SEQ ID NO: 990698 - DNA, 33 bp, Homo sapien
atcagtgtaacaaaagtatatctgcattcctat

SEQ ID NO: 990699 - DNA, 33 bp, Homo sapien
gaccacagagtaaataactggctggtctcctga

SEQ ID NO: 990700 - DNA, 33 bp, Homo sapien
gaccacagagtaaatacctggctggtctcctga

SEQ ID NO: 990701 - DNA, 33 bp, Homo sapien
ttaattaatctttttacataggacgtggccatg

SEQ ID NO: 990702 - DNA, 33 bp, Homo sapien
ttaattaatctttttatataggacgtggccatg

SEQ ID NO: 990703 - DNA, 33 bp, Homo sapien
tgtttttcatggaatgcattcggtatttcctat

SEQ ID NO: 990704 - DNA, 33 bp, Homo sapien
tgtttttcatggaatgtattcggtatttcctat

SEQ ID NO: 990705 - DNA, 33 bp, Homo sapien
agcaacatgacccataaagaacagagaagagca

SEQ ID NO: 990706 - DNA, 33 bp, Homo sapien
agcaacatgacccatagagaacagagaagagca

SEQ ID NO: 990707 - DNA, 33 bp, Homo sapien
cactagctctgacaataagagaggccaggttcc

SEQ ID NO: 990708 - DNA, 33 bp, Homo sapien
cactagctctgacaatgagagaggccaggttcc

SEQ ID NO: 990709 - DNA, 33 bp, Homo sapien
tttgagctgtggcccagtaggtggcacttaagc

SEQ ID NO: 990710 - DNA, 33 bp, Homo sapien
tttgagctgtggcccattaggtggcacttaagc

SEQ ID NO: 990711 - DNA, 33 bp, Homo sapien
tcattcggttgttgcaagactggctctagaatg

SEQ ID NO: 990712 - DNA, 33 bp, Homo sapien
tcattcggttgttgcatgactggctctagaatg

SEQ ID NO: 990713 - DNA, 33 bp, Homo sapien
acgagatatggaattagagagcattttagtcat

SEQ ID NO: 990714 - DNA, 33 bp, Homo sapien
acgagatatggaattatagagcattttagtcat

SEQ ID NO: 990715 - DNA, 33 bp, Homo sapien
cacaggcaaactaggaacaagcaattaaacagc

SEQ ID NO: 990716 - DNA, 33 bp, Homo sapien
cacaggcaaactaggagcaagcaattaaacagc

SEQ ID NO: 990717 - DNA, 33 bp, Homo sapien
ttatgtgaggatgacactatcagaagtttttag

SEQ ID NO: 990718 - DNA, 33 bp, Homo sapien
ttatgtgaggatgacattatcagaagtttttag

SEQ ID NO: 990719 - DNA, 33 bp, Homo sapien
actacatcatcctgaaacttgagtttgttgcct

SEQ ID NO: 990720 - DNA, 33 bp, Homo sapien
actacatcatcctgaagcttgagtttgttgcct

SEQ ID NO: 990721 - DNA, 33 bp, Homo sapien
caggagacacaaagggaaagatcctagttctct

SEQ ID NO: 990722 - DNA, 33 bp, Homo sapien
caggagacacaaagggcaagatcctagttctct

SEQ ID NO: 990723 - DNA, 33 bp, Homo sapien
cagttactgtccatgacgcttttgtctagttag

SEQ ID NO: 990724 - DNA, 33 bp, Homo sapien
cagttactgtccatgatgcttttgtctagttag

SEQ ID NO: 990725 - DNA, 33 bp, Homo sapien
aatctgcctgaatttcgactttcagtactcccc

SEQ ID NO: 990726 - DNA, 33 bp, Homo sapien
aatctgcctgaatttctactttcagtactcccc

SEQ ID NO: 990727 - DNA, 33 bp, Homo sapien
atttttgatttggcaagccattcctccttttca

SEQ ID NO: 990728 - DNA, 33 bp, Homo sapien
atttttgatttggcaatccattcctccttttca

SEQ ID NO: 990729 - DNA, 33 bp, Homo sapien
tttccaaggtagcaacacttcagtaatagtgtt

SEQ ID NO: 990730 - DNA, 33 bp, Homo sapien
tttccaaggtagcaactcttcagtaatagtgtt

SEQ ID NO: 990731 - DNA, 33 bp, Homo sapien
caaaaggaggatcgcaatcttgatggatatcca

SEQ ID NO: 990732 - DNA, 33 bp, Homo sapien
caaaaggaggatcgcagtcttgatggatatcca

SEQ ID NO: 990733 - DNA, 33 bp, Homo sapien
tgttaagaaaggacataagtgtaaattagctgg

SEQ ID NO: 990734 - DNA, 33 bp, Homo sapien
tgttaagaaaggacatcagtgtaaattagctgg

SEQ ID NO: 990735 - DNA, 33 bp, Homo sapien
cagataacaaatagagcctaggattttttgatc

SEQ ID NO: 990736 - DNA, 33 bp, Homo sapien
cagataacaaatagagtctaggattttttgatc

SEQ ID NO: 990737 - DNA, 33 bp, Homo sapien
aattcccatcacctacgacaaacatgataagtg

SEQ ID NO: 990738 - DNA, 33 bp, Homo sapien
aattcccatcacctactacaaacatgataagtg

SEQ ID NO: 990739 - DNA, 33 bp, Homo sapien
ctggtgaaggtgtcaaagttgaagatgtaaata

SEQ ID NO: 990740 - DNA, 33 bp, Homo sapien
ctggtgaaggtgtcaaggttgaagatgtaaata

SEQ ID NO: 990741 - DNA, 33 bp, Homo sapien
tccatcttctagcattaaactttcactgtttta

SEQ ID NO: 990742 - DNA, 33 bp, Homo sapien
tccatcttctagcatttaactttcactgtttta

SEQ ID NO: 990743 - DNA, 33 bp, Homo sapien
cagaatgcgattcaggacagataagaggcataa

SEQ ID NO: 990744 - DNA, 33 bp, Homo sapien
cagaatgcgattcaggccagataagaggcataa

SEQ ID NO: 990745 - DNA, 33 bp, Homo sapien
cttggtttttttaatcccaaatgtatcgtctgc

SEQ ID NO: 990746 - DNA, 33 bp, Homo sapien
cttggtttttttaatctcaaatgtatcgtctgc

SEQ ID NO: 990747 - DNA, 33 bp, Homo sapien
atgcaaataaccaggccgaatctcatgagacca

SEQ ID NO: 990748 - DNA, 33 bp, Homo sapien
atgcaaataaccaggctgaatctcatgagacca

SEQ ID NO: 990749 - DNA, 33 bp, Homo sapien
acagattggggaaggacgactgtctttgaaaga

SEQ ID NO: 990750 - DNA, 33 bp, Homo sapien
acagattggggaaggatgactgtctttgaaaga

SEQ ID NO: 990751 - DNA, 33 bp, Homo sapien
acttgattgtatcatcccctatttccttgagca

SEQ ID NO: 990752 - DNA, 33 bp, Homo sapien
acttgattgtatcatctcctatttccttgagca

SEQ ID NO: 990753 - DNA, 33 bp, Homo sapien
gaagagcattctcctccagggccacaaaaatgc

SEQ ID NO: 990754 - DNA, 33 bp, Homo sapien
gaagagcattctcctctagggccacaaaaatgc

SEQ ID NO: 990755 - DNA, 33 bp, Homo sapien
attgtaccttccaaacaggaacccacactgaga

SEQ ID NO: 990756 - DNA, 33 bp, Homo sapien
attgtaccttccaaacgggaacccacactgaga

SEQ ID NO: 990757 - DNA, 33 bp, Homo sapien
atatagatggataggaaaaagaggaatcaagaa

SEQ ID NO: 990758 - DNA, 33 bp, Homo sapien
atatagatggataggagaaagaggaatcaagaa

SEQ ID NO: 990759 - DNA, 33 bp, Homo sapien
tgcctcataatacctaccaacttgaatcattat

SEQ ID NO: 990760 - DNA, 33 bp, Homo sapien
tgcctcataatacctatcaacttgaatcattat

SEQ ID NO: 990761 - DNA, 33 bp, Homo sapien
cttgtgataagagatgaatgaagaggagtcact

SEQ ID NO: 990762 - DNA, 33 bp, Homo sapien
cttgtgataagagatggatgaagaggagtcact

SEQ ID NO: 990763 - DNA, 33 bp, Homo sapien
catgagcatctgacaacgtgtctttcaacagat

SEQ ID NO: 990764 - DNA, 33 bp, Homo sapien
catgagcatctgacaatgtgtctttcaacagat

SEQ ID NO: 990765 - DNA, 33 bp, Homo sapien
acattgtgtatctaaagctttctgtgtcctctc

SEQ ID NO: 990766 - DNA, 33 bp, Homo sapien
acattgtgtatctaaatctttctgtgtcctctc

SEQ ID NO: 990767 - DNA, 33 bp, Homo sapien
ctgaattcgtggaaaaatgctcaatatgtttgg

SEQ ID NO: 990768 - DNA, 33 bp, Homo sapien
ctgaattcgtggaaaagtgctcaatatgtttgg

SEQ ID NO: 990769 - DNA, 33 bp, Homo sapien
tttatcagtcacttgacctgagtgtaatgcgtc

SEQ ID NO: 990770 - DNA, 33 bp, Homo sapien
tttatcagtcacttgatctgagtgtaatgcgtc

SEQ ID NO: 990771 - DNA, 33 bp, Homo sapien
agaaatgggtgaatggaaagtgtatagatcacc

SEQ ID NO: 990772 - DNA, 33 bp, Homo sapien
agaaatgggtgaatgggaagtgtatagatcacc

SEQ ID NO: 990773 - DNA, 33 bp, Homo sapien
agtaaactgaatttaagtgtggatattactaaa

SEQ ID NO: 990774 - DNA, 33 bp, Homo sapien
agtaaactgaatttaattgtggatattactaaa

SEQ ID NO: 990775 - DNA, 33 bp, Homo sapien
caattcagttatacaacctacgggagcattaca

SEQ ID NO: 990776 - DNA, 33 bp, Homo sapien
caattcagttatacaatctacgggagcattaca

SEQ ID NO: 990777 - DNA, 33 bp, Homo sapien
aaaactttggcattcaaagaaatacaacttctg

SEQ ID NO: 990778 - DNA, 33 bp, Homo sapien
aaaactttggcattcagagaaatacaacttctg

SEQ ID NO: 990779 - DNA, 33 bp, Homo sapien
gtcatcactttggagaagccttctatgaccatc

SEQ ID NO: 990780 - DNA, 33 bp, Homo sapien
gtcatcactttggagaggccttctatgaccatc

SEQ ID NO: 990781 - DNA, 33 bp, Homo sapien
tgcattatgcacaccactacctagaattttaaa

SEQ ID NO: 990782 - DNA, 33 bp, Homo sapien
tgcattatgcacaccattacctagaattttaaa

SEQ ID NO: 990783 - DNA, 33 bp, Homo sapien
tttttcattcactaggaaatgaggaaaaatgaa

SEQ ID NO: 990784 - DNA, 33 bp, Homo sapien
tttttcattcactaggcaatgaggaaaaatgaa

SEQ ID NO: 990785 - DNA, 33 bp, Homo sapien
gaggaaataattcaagaaaatttgctagagaag

SEQ ID NO: 990786 - DNA, 33 bp, Homo sapien
gaggaaataattcaaggaaatttgctagagaag

SEQ ID NO: 990787 - DNA, 33 bp, Homo sapien
atgggaaaagctgaagacattgcttttctcaga

SEQ ID NO: 990788 - DNA, 33 bp, Homo sapien
atgggaaaagctgaagtcattgcttttctcaga

SEQ ID NO: 990789 - DNA, 33 bp, Homo sapien
cctttcacttacctgcaccaatacatgcttttg

SEQ ID NO: 990790 - DNA, 33 bp, Homo sapien
cctttcacttacctgcgccaatacatgcttttg

SEQ ID NO: 990791 - DNA, 33 bp, Homo sapien
cacagagatttgcatgaaagaacagttatagtt

SEQ ID NO: 990792 - DNA, 33 bp, Homo sapien
cacagagatttgcatggaagaacagttatagtt

SEQ ID NO: 990793 - DNA, 33 bp, Homo sapien
aaggaatgagtcagaaagaggcaacacaggggt

SEQ ID NO: 990794 - DNA, 33 bp, Homo sapien
aaggaatgagtcagaaggaggcaacacaggggt

SEQ ID NO: 990795 - DNA, 33 bp, Homo sapien
gatgaggggtggataaggttgatatgttaggca

SEQ ID NO: 990796 - DNA, 33 bp, Homo sapien
gatgaggggtggataatgttgatatgttaggca

SEQ ID NO: 990797 - DNA, 33 bp, Homo sapien
aattatttctaacaacgaagcaaagtaactgct

SEQ ID NO: 990798 - DNA, 33 bp, Homo sapien
aattatttctaacaactaagcaaagtaactgct

SEQ ID NO: 990799 - DNA, 33 bp, Homo sapien
tctgtctttaactgaccacatgatctgggggat

SEQ ID NO: 990800 - DNA, 33 bp, Homo sapien
tctgtctttaactgactacatgatctgggggat

SEQ ID NO: 990801 - DNA, 33 bp, Homo sapien
tttaggcactggttaagatttgcatgaagtctg

SEQ ID NO: 990802 - DNA, 33 bp, Homo sapien
tttaggcactggttaatatttgcatgaagtctg

SEQ ID NO: 990803 - DNA, 33 bp, Homo sapien
tatatcattaggagacccaagatcagcagattc

SEQ ID NO: 990804 - DNA, 33 bp, Homo sapien
tatatcattaggagactcaagatcagcagattc

SEQ ID NO: 990805 - DNA, 33 bp, Homo sapien
agacagaagaagctaaccatgtacaagcctctc

SEQ ID NO: 990806 - DNA, 33 bp, Homo sapien
agacagaagaagctaagcatgtacaagcctctc

SEQ ID NO: 990807 - DNA, 33 bp, Homo sapien
agggtgctctgtggcacaaattacacatcaaag

SEQ ID NO: 990808 - DNA, 33 bp, Homo sapien
agggtgctctgtggcataaattacacatcaaag

SEQ ID NO: 990809 - DNA, 33 bp, Homo sapien
cttcattcaggaaaaaatgttggttggacaacg

SEQ ID NO: 990810 - DNA, 33 bp, Homo sapien
cttcattcaggaaaaattgttggttggacaacg

SEQ ID NO: 990811 - DNA, 33 bp, Homo sapien
gaaagagaactaagacaattgttgcaagtgagt

SEQ ID NO: 990812 - DNA, 33 bp, Homo sapien
gaaagagaactaagacgattgttgcaagtgagt

SEQ ID NO: 990813 - DNA, 33 bp, Homo sapien
ggaactaagttatagacagtaaagcaagagacc

SEQ ID NO: 990814 - DNA, 33 bp, Homo sapien
ggaactaagttatagagagtaaagcaagagacc

SEQ ID NO: 990815 - DNA, 33 bp, Homo sapien
ctaagatattaaagtacggtaaggacagcaaat

SEQ ID NO: 990816 - DNA, 33 bp, Homo sapien
ctaagatattaaagtatggtaaggacagcaaat

SEQ ID NO: 990817 - DNA, 33 bp, Homo sapien
aaacaagtctcagcacaggatttaaattccaca

SEQ ID NO: 990818 - DNA, 33 bp, Homo sapien
aaacaagtctcagcacgggatttaaattccaca

SEQ ID NO: 990819 - DNA, 33 bp, Homo sapien
tacttacttctccaaaagtgcctctatctttgt

SEQ ID NO: 990820 - DNA, 33 bp, Homo sapien
tacttacttctccaaacgtgcctctatctttgt

SEQ ID NO: 990821 - DNA, 33 bp, Homo sapien
ttgtggggatatatcacgaaagaagaccatgta

SEQ ID NO: 990822 - DNA, 33 bp, Homo sapien
ttgtggggatatatcaggaaagaagaccatgta

SEQ ID NO: 990823 - DNA, 33 bp, Homo sapien
taagaaaagttaaccacgaataagccaggtatg

SEQ ID NO: 990824 - DNA, 33 bp, Homo sapien
taagaaaagttaaccatgaataagccaggtatg

SEQ ID NO: 990825 - DNA, 33 bp, Homo sapien
cttaggtctttggctcagagcagatctcttaaa

SEQ ID NO: 990826 - DNA, 33 bp, Homo sapien
cttaggtctttggctcggagcagatctcttaaa

SEQ ID NO: 990827 - DNA, 33 bp, Homo sapien
catctactattttccaatcactgaacagatgct

SEQ ID NO: 990828 - DNA, 33 bp, Homo sapien
catctactattttccagtcactgaacagatgct

SEQ ID NO: 990829 - DNA, 33 bp, Homo sapien
cttacaggtttctataaaagtctttcacctgta

SEQ ID NO: 990830 - DNA, 33 bp, Homo sapien
cttacaggtttctatacaagtctttcacctgta

SEQ ID NO: 990831 - DNA, 33 bp, Homo sapien
gtacccagacaattgacgtttgttgttgttttg

SEQ ID NO: 990832 - DNA, 33 bp, Homo sapien
gtacccagacaattgatgtttgttgttgttttg

SEQ ID NO: 990833 - DNA, 33 bp, Homo sapien
tttgtaagcagagaaaatatgactgtaaactac

SEQ ID NO: 990834 - DNA, 33 bp, Homo sapien
tttgtaagcagagaaagtatgactgtaaactac

SEQ ID NO: 990835 - DNA, 33 bp, Homo sapien
tgggtttcctctaaatcattctgtagcctgaaa

SEQ ID NO: 990836 - DNA, 33 bp, Homo sapien
tgggtttcctctaaattattctgtagcctgaaa

SEQ ID NO: 990837 - DNA, 33 bp, Homo sapien
agcccagatacaaaaaccagagttgaacctctc

SEQ ID NO: 990838 - DNA, 33 bp, Homo sapien
agcccagatacaaaaagcagagttgaacctctc

SEQ ID NO: 990839 - DNA, 33 bp, Homo sapien
atctgtgacgaactccaagtacagaaaagctaa

SEQ ID NO: 990840 - DNA, 33 bp, Homo sapien
atctgtgacgaactccgagtacagaaaagctaa

SEQ ID NO: 990841 - DNA, 33 bp, Homo sapien
ttaagaaacagttgcaacaatctatactgcctc

SEQ ID NO: 990842 - DNA, 33 bp, Homo sapien
ttaagaaacagttgcagcaatctatactgcctc

SEQ ID NO: 990843 - DNA, 33 bp, Homo sapien
gtgatacaacatacataaagttcctagttctga

SEQ ID NO: 990844 - DNA, 33 bp, Homo sapien
gtgatacaacatacatgaagttcctagttctga

SEQ ID NO: 990845 - DNA, 33 bp, Homo sapien
tgtatgcaggtgaaaaaagaggtgaagggaata

SEQ ID NO: 990846 - DNA, 33 bp, Homo sapien
tgtatgcaggtgaaaagagaggtgaagggaata

SEQ ID NO: 990847 - DNA, 33 bp, Homo sapien
gctatttcttaaactccatgtggcttataatag

SEQ ID NO: 990848 - DNA, 33 bp, Homo sapien
gctatttcttaaactctatgtggcttataatag

SEQ ID NO: 990849 - DNA, 33 bp, Homo sapien
actcttctttttctgcaactacttcactagcca

SEQ ID NO: 990850 - DNA, 33 bp, Homo sapien
actcttctttttctgcgactacttcactagcca

SEQ ID NO: 990851 - DNA, 33 bp, Homo sapien
aatcttcacaacttgaactttgcttggataatt

SEQ ID NO: 990852 - DNA, 33 bp, Homo sapien
aatcttcacaacttgacctttgcttggataatt

SEQ ID NO: 990853 - DNA, 33 bp, Homo sapien
ttctctgcaaccttgcaaacacctattttctga

SEQ ID NO: 990854 - DNA, 33 bp, Homo sapien
ttctctgcaaccttgcgaacacctattttctga

SEQ ID NO: 990855 - DNA, 33 bp, Homo sapien
acttatactcttggcactaaattctagtctcat

SEQ ID NO: 990856 - DNA, 33 bp, Homo sapien
acttatactcttggcattaaattctagtctcat

SEQ ID NO: 990857 - DNA, 33 bp, Homo sapien
ctaacaaagatgcaaacccacaggagctctggc

SEQ ID NO: 990858 - DNA, 33 bp, Homo sapien
ctaacaaagatgcaaatccacaggagctctggc

SEQ ID NO: 990859 - DNA, 33 bp, Homo sapien
aggctcactgagtggccaattttaagtgagatt

SEQ ID NO: 990860 - DNA, 33 bp, Homo sapien
aggctcactgagtggctaattttaagtgagatt

SEQ ID NO: 990861 - DNA, 33 bp, Homo sapien
gtttaatcaaaataaccgagaagcataatcatg

SEQ ID NO: 990862 - DNA, 33 bp, Homo sapien
gtttaatcaaaataactgagaagcataatcatg

SEQ ID NO: 990863 - DNA, 33 bp, Homo sapien
tctcttcctccctctaactttttggaatgctca

SEQ ID NO: 990864 - DNA, 33 bp, Homo sapien
tctcttcctccctctagctttttggaatgctca

SEQ ID NO: 990865 - DNA, 33 bp, Homo sapien
agcaagttaaagtcaactgaagaaacatccttt

SEQ ID NO: 990866 - DNA, 33 bp, Homo sapien
agcaagttaaagtcaattgaagaaacatccttt

SEQ ID NO: 990867 - DNA, 33 bp, Homo sapien
taagctttctataggacctttggaccaacagaa

SEQ ID NO: 990868 - DNA, 33 bp, Homo sapien
taagctttctataggatctttggaccaacagaa

SEQ ID NO: 990869 - DNA, 33 bp, Homo sapien
gaaaatgctgctgaccaatttctcttctcccag

SEQ ID NO: 990870 - DNA, 33 bp, Homo sapien
gaaaatgctgctgaccgatttctcttctcccag

SEQ ID NO: 990871 - DNA, 33 bp, Homo sapien
ctctgctgtcatttcaacatatattcagatatc

SEQ ID NO: 990872 - DNA, 33 bp, Homo sapien
ctctgctgtcatttcatcatatattcagatatc

SEQ ID NO: 990873 - DNA, 33 bp, Homo sapien
tcaacatctctccagtcaaattcattcttatgg

SEQ ID NO: 990874 - DNA, 33 bp, Homo sapien
tcaacatctctccagtgaaattcattcttatgg

SEQ ID NO: 990875 - DNA, 33 bp, Homo sapien
tatttaacataggtataacttgctgtcacattt

SEQ ID NO: 990876 - DNA, 33 bp, Homo sapien
tatttaacataggtatcacttgctgtcacattt

SEQ ID NO: 990877 - DNA, 33 bp, Homo sapien
tataatctagcctcgaaaggaccaaaacatcac

SEQ ID NO: 990878 - DNA, 33 bp, Homo sapien
tataatctagcctcgagaggaccaaaacatcac

SEQ ID NO: 990879 - DNA, 33 bp, Homo sapien
atggtacagatagggaggttggtgaaaaagcat

SEQ ID NO: 990880 - DNA, 33 bp, Homo sapien
atggtacagatagggatgttggtgaaaaagcat

SEQ ID NO: 990881 - DNA, 33 bp, Homo sapien
aaatttttatgtaagaccaatgagtacaatgtt

SEQ ID NO: 990882 - DNA, 33 bp, Homo sapien
aaatttttatgtaagatcaatgagtacaatgtt

SEQ ID NO: 990883 - DNA, 33 bp, Homo sapien
agaactaaaggaaataagtgtctattgaatcaa

SEQ ID NO: 990884 - DNA, 33 bp, Homo sapien
agaactaaaggaaataggtgtctattgaatcaa

SEQ ID NO: 990885 - DNA, 33 bp, Homo sapien
tagattaattcacccaatcatcacaatgcccat

SEQ ID NO: 990886 - DNA, 33 bp, Homo sapien
tagattaattcacccagtcatcacaatgcccat

SEQ ID NO: 990887 - DNA, 33 bp, Homo sapien
gaacttgccaacaaaaccgcttgtggagatgac

SEQ ID NO: 990888 - DNA, 33 bp, Homo sapien
gaacttgccaacaaaatcgcttgtggagatgac

SEQ ID NO: 990889 - DNA, 33 bp, Homo sapien
atgcagtaaagctcttcaaatacagtctttatc

SEQ ID NO: 990890 - DNA, 33 bp, Homo sapien
atgcagtaaagctctttaaatacagtctttatc

SEQ ID NO: 990891 - DNA, 33 bp, Homo sapien
taggatatcagccccacgagagtgagagttatt

SEQ ID NO: 990892 - DNA, 33 bp, Homo sapien
taggatatcagccccatgagagtgagagttatt

SEQ ID NO: 990893 - DNA, 33 bp, Homo sapien
cttttcattcttgaacacatctagcccaaacag

SEQ ID NO: 990894 - DNA, 33 bp, Homo sapien
cttttcattcttgaacgcatctagcccaaacag

SEQ ID NO: 990895 - DNA, 33 bp, Homo sapien
gtaatatgcataagttaaaccatcgtgatcacc

SEQ ID NO: 990896 - DNA, 33 bp, Homo sapien
gtaatatgcataagtttaaccatcgtgatcacc

SEQ ID NO: 990897 - DNA, 33 bp, Homo sapien
aatgagaacaacgatcaatataactactacaaa

SEQ ID NO: 990898 - DNA, 33 bp, Homo sapien
aatgagaacaacgatcgatataactactacaaa

SEQ ID NO: 990899 - DNA, 33 bp, Homo sapien
aatgtggcgataacaacgcaaaggctctccttc

SEQ ID NO: 990900 - DNA, 33 bp, Homo sapien
aatgtggcgataacaatgcaaaggctctccttc

SEQ ID NO: 990901 - DNA, 33 bp, Homo sapien
atcctattgtggcagcgctctttaaagaagatt

SEQ ID NO: 990902 - DNA, 33 bp, Homo sapien
atcctattgtggcagctctctttaaagaagatt

SEQ ID NO: 990903 - DNA, 33 bp, Homo sapien
ataacaacagtgacacaggaaagtgtatgatgt

SEQ ID NO: 990904 - DNA, 33 bp, Homo sapien
ataacaacagtgacacgggaaagtgtatgatgt

SEQ ID NO: 990905 - DNA, 33 bp, Homo sapien
ttcattaagcaggtggcattatcctcatcacaa

SEQ ID NO: 990906 - DNA, 33 bp, Homo sapien
ttcattaagcaggtggtattatcctcatcacaa

SEQ ID NO: 990907 - DNA, 33 bp, Homo sapien
ctagaggcagcaatgccctcccatgcaggtatt

SEQ ID NO: 990908 - DNA, 33 bp, Homo sapien
ctagaggcagcaatgctctcccatgcaggtatt

SEQ ID NO: 990909 - DNA, 33 bp, Homo sapien
tcccaaccatgagtaacattgcttattgaaagc

SEQ ID NO: 990910 - DNA, 33 bp, Homo sapien
tcccaaccatgagtaagattgcttattgaaagc

SEQ ID NO: 990911 - DNA, 33 bp, Homo sapien
gtcatatctcattctaagaagagcccacatcca

SEQ ID NO: 990912 - DNA, 33 bp, Homo sapien
gtcatatctcattctaggaagagcccacatcca

SEQ ID NO: 990913 - DNA, 33 bp, Homo sapien
gagggagattacacaaagatatgggtcattggt

SEQ ID NO: 990914 - DNA, 33 bp, Homo sapien
gagggagattacacaaggatatgggtcattggt

SEQ ID NO: 990915 - DNA, 33 bp, Homo sapien
cagttaagaccattcaacatatggcccatagat

SEQ ID NO: 990916 - DNA, 33 bp, Homo sapien
cagttaagaccattcagcatatggcccatagat

SEQ ID NO: 990917 - DNA, 33 bp, Homo sapien
tgaggctcttgaggaacctttgagcttaaaggc

SEQ ID NO: 990918 - DNA, 33 bp, Homo sapien
tgaggctcttgaggaatctttgagcttaaaggc

SEQ ID NO: 990919 - DNA, 33 bp, Homo sapien
cttgttcccatcctcaacaatttcaaactcaca

SEQ ID NO: 990920 - DNA, 33 bp, Homo sapien
cttgttcccatcctcaccaatttcaaactcaca

SEQ ID NO: 990921 - DNA, 33 bp, Homo sapien
tataatatggagctgccattatggagggaaaca

SEQ ID NO: 990922 - DNA, 33 bp, Homo sapien
tataatatggagctgctattatggagggaaaca

SEQ ID NO: 990923 - DNA, 33 bp, Homo sapien
gccctgctgtcccagactctgactttcctgatt

SEQ ID NO: 990924 - DNA, 33 bp, Homo sapien
gccctgctgtcccagagtctgactttcctgatt

SEQ ID NO: 990925 - DNA, 33 bp, Homo sapien
cagatagaattcaacaaacattttctaagtact

SEQ ID NO: 990926 - DNA, 33 bp, Homo sapien
cagatagaattcaacatacattttctaagtact

SEQ ID NO: 990927 - DNA, 33 bp, Homo sapien
tttttctttctaagccaacatattttgattcaa

SEQ ID NO: 990928 - DNA, 33 bp, Homo sapien
tttttctttctaagccgacatattttgattcaa

SEQ ID NO: 990929 - DNA, 33 bp, Homo sapien
acaacaccctgtcagaaggatattttgtcccca

SEQ ID NO: 990930 - DNA, 33 bp, Homo sapien
acaacaccctgtcagagggatattttgtcccca

SEQ ID NO: 990931 - DNA, 33 bp, Homo sapien
tgataggttccacttacagcagtgcttgcctta

SEQ ID NO: 990932 - DNA, 33 bp, Homo sapien
tgataggttccacttagagcagtgcttgcctta

SEQ ID NO: 990933 - DNA, 33 bp, Homo sapien
cggtgagtggttaaataaactgtgatacatcca

SEQ ID NO: 990934 - DNA, 33 bp, Homo sapien
cggtgagtggttaaatcaactgtgatacatcca

SEQ ID NO: 990935 - DNA, 33 bp, Homo sapien
atacgtttggcataaactgataattggcagagt

SEQ ID NO: 990936 - DNA, 33 bp, Homo sapien
atacgtttggcataaattgataattggcagagt

SEQ ID NO: 990937 - DNA, 33 bp, Homo sapien
gtgaagtgtcatctagaacgaggtagtgcctgt

SEQ ID NO: 990938 - DNA, 33 bp, Homo sapien
gtgaagtgtcatctaggacgaggtagtgcctgt

SEQ ID NO: 990939 - DNA, 33 bp, Homo sapien
tagtccctttaacataaccattgcctcactatc

SEQ ID NO: 990940 - DNA, 33 bp, Homo sapien
tagtccctttaacatagccattgcctcactatc

SEQ ID NO: 990941 - DNA, 33 bp, Homo sapien
tctgcagaaatgagagaacggtccattaaatta

SEQ ID NO: 990942 - DNA, 33 bp, Homo sapien
tctgcagaaatgagagtacggtccattaaatta

SEQ ID NO: 990943 - DNA, 33 bp, Homo sapien
gaggttgtctggagccagagtgtagaggagaca

SEQ ID NO: 990944 - DNA, 33 bp, Homo sapien
gaggttgtctggagccggagtgtagaggagaca

SEQ ID NO: 990945 - DNA, 33 bp, Homo sapien
actccttcataacacactatttggaatacagta

SEQ ID NO: 990946 - DNA, 33 bp, Homo sapien
actccttcataacacattatttggaatacagta

SEQ ID NO: 990947 - DNA, 33 bp, Homo sapien
ataggctgtgggagcaaaggagaaaatgaacag

SEQ ID NO: 990948 - DNA, 33 bp, Homo sapien
ataggctgtgggagcagaggagaaaatgaacag

SEQ ID NO: 990949 - DNA, 33 bp, Homo sapien
ccctgtctcctcctcactctagctcaggccaga

SEQ ID NO: 990950 - DNA, 33 bp, Homo sapien
ccctgtctcctcctcagtctagctcaggccaga

SEQ ID NO: 990951 - DNA, 33 bp, Homo sapien
gcatctcattctgaaaacatgagaatttaatca

SEQ ID NO: 990952 - DNA, 33 bp, Homo sapien
gcatctcattctgaaagcatgagaatttaatca

SEQ ID NO: 990953 - DNA, 33 bp, Homo sapien
aaattaagctagtataccattttttctctttct

SEQ ID NO: 990954 - DNA, 33 bp, Homo sapien
aaattaagctagtatatcattttttctctttct

SEQ ID NO: 990955 - DNA, 33 bp, Homo sapien
tgcagacttgataaccactgggagatacacctg

SEQ ID NO: 990956 - DNA, 33 bp, Homo sapien
tgcagacttgataaccgctgggagatacacctg

SEQ ID NO: 990957 - DNA, 33 bp, Homo sapien
gaagaatagaattgccaggaatctaggtaagct

SEQ ID NO: 990958 - DNA, 33 bp, Homo sapien
gaagaatagaattgccgggaatctaggtaagct

SEQ ID NO: 990959 - DNA, 33 bp, Homo sapien
cataggagctgcctcacggaaaggattctaaac

SEQ ID NO: 990960 - DNA, 33 bp, Homo sapien
cataggagctgcctcatggaaaggattctaaac

SEQ ID NO: 990961 - DNA, 33 bp, Homo sapien
ttctagaatccctaaggcaatcagtatactaaa

SEQ ID NO: 990962 - DNA, 33 bp, Homo sapien
ttctagaatccctaagtcaatcagtatactaaa

SEQ ID NO: 990963 - DNA, 33 bp, Homo sapien
tagaagtaacataacagagctgtgaatcccaga

SEQ ID NO: 990964 - DNA, 33 bp, Homo sapien
tagaagtaacataacatagctgtgaatcccaga

SEQ ID NO: 990965 - DNA, 33 bp, Homo sapien
gataggaatgagggaagtgattttcttagtcgc

SEQ ID NO: 990966 - DNA, 33 bp, Homo sapien
gataggaatgagggaattgattttcttagtcgc

SEQ ID NO: 990967 - DNA, 33 bp, Homo sapien
tacccataaaacatgcaaataatgcttcattca

SEQ ID NO: 990968 - DNA, 33 bp, Homo sapien
tacccataaaacatgcgaataatgcttcattca

SEQ ID NO: 990969 - DNA, 33 bp, Homo sapien
tggattgctaactgacgccaatgcaaatgtctc

SEQ ID NO: 990970 - DNA, 33 bp, Homo sapien
tggattgctaactgactccaatgcaaatgtctc

SEQ ID NO: 990971 - DNA, 33 bp, Homo sapien
taaaacacaatgtacaatctctaatgttgacac

SEQ ID NO: 990972 - DNA, 33 bp, Homo sapien
taaaacacaatgtacagtctctaatgttgacac

SEQ ID NO: 990973 - DNA, 33 bp, Homo sapien
gacatggggctagtaacctgcatcctgtttggt

SEQ ID NO: 990974 - DNA, 33 bp, Homo sapien
gacatggggctagtaatctgcatcctgtttggt

SEQ ID NO: 990975 - DNA, 33 bp, Homo sapien
ccagaaaagaaaaatgcactgaaaacagcaggt

SEQ ID NO: 990976 - DNA, 33 bp, Homo sapien
ccagaaaagaaaaatgtactgaaaacagcaggt

SEQ ID NO: 990977 - DNA, 33 bp, Homo sapien
atgtgtttggaaactcagaattgtcgtatttta

SEQ ID NO: 990978 - DNA, 33 bp, Homo sapien
atgtgtttggaaactcggaattgtcgtatttta

SEQ ID NO: 990979 - DNA, 33 bp, Homo sapien
gctaaaattgaatctccactgctatttcatacc

SEQ ID NO: 990980 - DNA, 33 bp, Homo sapien
gctaaaattgaatctctactgctatttcatacc

SEQ ID NO: 990981 - DNA, 33 bp, Homo sapien
tctagtgtttgttgctcaaagtcttcctgttgc

SEQ ID NO: 990982 - DNA, 33 bp, Homo sapien
tctagtgtttgttgcttaaagtcttcctgttgc

SEQ ID NO: 990983 - DNA, 33 bp, Homo sapien
gggggaataatatggaatcataagcaaaactca

SEQ ID NO: 990984 - DNA, 33 bp, Homo sapien
gggggaataatatggagtcataagcaaaactca

SEQ ID NO: 990985 - DNA, 33 bp, Homo sapien
acccctttccagtaacaccactagtgagaatgc

SEQ ID NO: 990986 - DNA, 33 bp, Homo sapien
acccctttccagtaactccactagtgagaatgc

SEQ ID NO: 990987 - DNA, 33 bp, Homo sapien
aaggagcaagctctacactgcaggataatgtga

SEQ ID NO: 990988 - DNA, 33 bp, Homo sapien
aaggagcaagctctacgctgcaggataatgtga

SEQ ID NO: 990989 - DNA, 33 bp, Homo sapien
agcaaaagataaatacggaaatgtcaagggcat

SEQ ID NO: 990990 - DNA, 33 bp, Homo sapien
agcaaaagataaatactgaaatgtcaagggcat

SEQ ID NO: 990991 - DNA, 33 bp, Homo sapien
attttgaaaacaggtaacaaactaggtagcatc

SEQ ID NO: 990992 - DNA, 33 bp, Homo sapien
attttgaaaacaggtagcaaactaggtagcatc

SEQ ID NO: 990993 - DNA, 33 bp, Homo sapien
gccaagaatgggaataaaaataaatgagctgtg

SEQ ID NO: 990994 - DNA, 33 bp, Homo sapien
gccaagaatgggaatagaaataaatgagctgtg

SEQ ID NO: 990995 - DNA, 33 bp, Homo sapien
attcacattcgaggggacccagaaatatgtgaa

SEQ ID NO: 990996 - DNA, 33 bp, Homo sapien
attcacattcgaggggtcccagaaatatgtgaa

SEQ ID NO: 990997 - DNA, 33 bp, Homo sapien
cccctgagacacagataaaatagttttaatgat

SEQ ID NO: 990998 - DNA, 33 bp, Homo sapien
cccctgagacacagatgaaatagttttaatgat

SEQ ID NO: 990999 - DNA, 33 bp, Homo sapien
cagcttctaggatcagcatttcagaagccttta

SEQ ID NO: 991000 - DNA, 33 bp, Homo sapien
cagcttctaggatcagtatttcagaagccttta

SEQ ID NO: 991001 - DNA, 33 bp, Homo sapien
cttcgctcgtgtagccccttctatttggatggc

SEQ ID NO: 991002 - DNA, 33 bp, Homo sapien
cttcgctcgtgtagcctcttctatttggatggc

SEQ ID NO: 991003 - DNA, 33 bp, Homo sapien
ccctagagcacgggacaaagctcatgtgccagg

SEQ ID NO: 991004 - DNA, 33 bp, Homo sapien
ccctagagcacgggaccaagctcatgtgccagg

SEQ ID NO: 991005 - DNA, 33 bp, Homo sapien
ggaatcctttccataccgcctcacatcctttgt

SEQ ID NO: 991006 - DNA, 33 bp, Homo sapien
ggaatcctttccatactgcctcacatcctttgt

SEQ ID NO: 991007 - DNA, 33 bp, Homo sapien
ccctgttcagctttctaaaacataaatctgatt

SEQ ID NO: 991008 - DNA, 33 bp, Homo sapien
ccctgttcagctttctgaaacataaatctgatt

SEQ ID NO: 991009 - DNA, 33 bp, Homo sapien
agtatggtacatctggcattcattccttcattc

SEQ ID NO: 991010 - DNA, 33 bp, Homo sapien
agtatggtacatctggtattcattccttcattc

SEQ ID NO: 991011 - DNA, 33 bp, Homo sapien
aagcacacaacaaatcaacctgggtagcaattt

SEQ ID NO: 991012 - DNA, 33 bp, Homo sapien
aagcacacaacaaatcgacctgggtagcaattt

SEQ ID NO: 991013 - DNA, 33 bp, Homo sapien
ttcagagtacagaaaaagaaggagtcctgaaat

SEQ ID NO: 991014 - DNA, 33 bp, Homo sapien
ttcagagtacagaaaaggaaggagtcctgaaat

SEQ ID NO: 991015 - DNA, 33 bp, Homo sapien
gtgatcttctgagacagaaagactccaaaatat

SEQ ID NO: 991016 - DNA, 33 bp, Homo sapien
gtgatcttctgagacataaagactccaaaatat

SEQ ID NO: 991017 - DNA, 33 bp, Homo sapien
acatgctgaaaagaaacgaagccacacataata

SEQ ID NO: 991018 - DNA, 33 bp, Homo sapien
acatgctgaaaagaaatgaagccacacataata

SEQ ID NO: 991019 - DNA, 33 bp, Homo sapien
aattagcatgactatcccacctttcatgaggct

SEQ ID NO: 991020 - DNA, 33 bp, Homo sapien
aattagcatgactatcgcacctttcatgaggct

SEQ ID NO: 991021 - DNA, 33 bp, Homo sapien
cagattatctggctctaaatccagttctctttc

SEQ ID NO: 991022 - DNA, 33 bp, Homo sapien
cagattatctggctctgaatccagttctctttc

SEQ ID NO: 991023 - DNA, 33 bp, Homo sapien
agatcaatctcctgcccaaggtcatagaggcaa

SEQ ID NO: 991024 - DNA, 33 bp, Homo sapien
agatcaatctcctgcctaaggtcatagaggcaa

SEQ ID NO: 991025 - DNA, 33 bp, Homo sapien
ctgtgctattggcctccatatcctccttggacc

SEQ ID NO: 991026 - DNA, 33 bp, Homo sapien
ctgtgctattggcctctatatcctccttggacc

SEQ ID NO: 991027 - DNA, 33 bp, Homo sapien
tttcagatgaggaaaccgcatcttcaaaagtta

SEQ ID NO: 991028 - DNA, 33 bp, Homo sapien
tttcagatgaggaaactgcatcttcaaaagtta

SEQ ID NO: 991029 - DNA, 33 bp, Homo sapien
tatggcccagcaaggccgcatttatggccattt

SEQ ID NO: 991030 - DNA, 33 bp, Homo sapien
tatggcccagcaaggctgcatttatggccattt

SEQ ID NO: 991031 - DNA, 33 bp, Homo sapien
caatgttctccagacgcagcaactgtggtgacc

SEQ ID NO: 991032 - DNA, 33 bp, Homo sapien
caatgttctccagacgtagcaactgtggtgacc

SEQ ID NO: 991033 - DNA, 33 bp, Homo sapien
tgctttgcaggcttaaatcattacatttgagtt

SEQ ID NO: 991034 - DNA, 33 bp, Homo sapien
tgctttgcaggcttaagtcattacatttgagtt

SEQ ID NO: 991035 - DNA, 33 bp, Homo sapien
agccccatcggatgaacattgccattgcccaaa

SEQ ID NO: 991036 - DNA, 33 bp, Homo sapien
agccccatcggatgaagattgccattgcccaaa

SEQ ID NO: 991037 - DNA, 33 bp, Homo sapien
actgctaaaatcatgaagaaatgcaacctatag

SEQ ID NO: 991038 - DNA, 33 bp, Homo sapien
actgctaaaatcatgaggaaatgcaacctatag

SEQ ID NO: 991039 - DNA, 33 bp, Homo sapien
tgagagatacagagagcagagaaaactgccact

SEQ ID NO: 991040 - DNA, 33 bp, Homo sapien
tgagagatacagagaggagagaaaactgccact

SEQ ID NO: 991041 - DNA, 33 bp, Homo sapien
aagaacccaagaagaactcactaaccccttgaa

SEQ ID NO: 991042 - DNA, 33 bp, Homo sapien
aagaacccaagaagaattcactaaccccttgaa

SEQ ID NO: 991043 - DNA, 33 bp, Homo sapien
ccatctgccttataaaaaggttgacaggtgggc

SEQ ID NO: 991044 - DNA, 33 bp, Homo sapien
ccatctgccttataaagaggttgacaggtgggc

SEQ ID NO: 991045 - DNA, 33 bp, Homo sapien
gggagcaggtgatacaatctgtacagagcagcc

SEQ ID NO: 991046 - DNA, 33 bp, Homo sapien
gggagcaggtgatacagtctgtacagagcagcc

SEQ ID NO: 991047 - DNA, 33 bp, Homo sapien
gacaggtgggaaggcaccttttcagagagagga

SEQ ID NO: 991048 - DNA, 33 bp, Homo sapien
gacaggtgggaaggcagcttttcagagagagga

SEQ ID NO: 991049 - DNA, 33 bp, Homo sapien
ctggctttctcttatacctcttcaaatttgtta

SEQ ID NO: 991050 - DNA, 33 bp, Homo sapien
ctggctttctcttatatctcttcaaatttgtta

SEQ ID NO: 991051 - DNA, 33 bp, Homo sapien
gcagggttgctaaggacggtcacagctcacagc

SEQ ID NO: 991052 - DNA, 33 bp, Homo sapien
gcagggttgctaaggatggtcacagctcacagc

SEQ ID NO: 991053 - DNA, 33 bp, Homo sapien
ggcccagtattcttgccaggcctttactacaga

SEQ ID NO: 991054 - DNA, 33 bp, Homo sapien
ggcccagtattcttgcgaggcctttactacaga

SEQ ID NO: 991055 - DNA, 33 bp, Homo sapien
ggagatgcttgggacaaaatttcaaggcaaacc

SEQ ID NO: 991056 - DNA, 33 bp, Homo sapien
ggagatgcttgggacacaatttcaaggcaaacc

SEQ ID NO: 991057 - DNA, 33 bp, Homo sapien
agatatatcttggagccagagcttatctagggt

SEQ ID NO: 991058 - DNA, 33 bp, Homo sapien
agatatatcttggagcgagagcttatctagggt

SEQ ID NO: 991059 - DNA, 33 bp, Homo sapien
gctactgtgtgttgaaaggacactcatttgaag

SEQ ID NO: 991060 - DNA, 33 bp, Homo sapien
gctactgtgtgttgaagggacactcatttgaag

SEQ ID NO: 991061 - DNA, 33 bp, Homo sapien
tcttgatgagctcaagcctaagtgctctctccc

SEQ ID NO: 991062 - DNA, 33 bp, Homo sapien
tcttgatgagctcaaggctaagtgctctctccc

SEQ ID NO: 991063 - DNA, 33 bp, Homo sapien
tcttccttgggtaacaaagaactccttcaatta

SEQ ID NO: 991064 - DNA, 33 bp, Homo sapien
tcttccttgggtaacatagaactccttcaatta

SEQ ID NO: 991065 - DNA, 33 bp, Homo sapien
ataaatagatgccacaatctgagagatcaggaa

SEQ ID NO: 991066 - DNA, 33 bp, Homo sapien
ataaatagatgccacagtctgagagatcaggaa

SEQ ID NO: 991067 - DNA, 33 bp, Homo sapien
tcaggcagcaccaagaacagttcagggtgtgag

SEQ ID NO: 991068 - DNA, 33 bp, Homo sapien
tcaggcagcaccaagagcagttcagggtgtgag

SEQ ID NO: 991069 - DNA, 33 bp, Homo sapien
cttttcctcatattccactcgaccttctgaccc

SEQ ID NO: 991070 - DNA, 33 bp, Homo sapien
cttttcctcatattccgctcgaccttctgaccc

SEQ ID NO: 991071 - DNA, 33 bp, Homo sapien
tccctaattcctcaaaacccagtaaatgtcctt

SEQ ID NO: 991072 - DNA, 33 bp, Homo sapien
tccctaattcctcaaatcccagtaaatgtcctt

SEQ ID NO: 991073 - DNA, 33 bp, Homo sapien
aatgtttcgcttctggcagagaaacataaacaa

SEQ ID NO: 991074 - DNA, 33 bp, Homo sapien
aatgtttcgcttctggtagagaaacataaacaa

SEQ ID NO: 991075 - DNA, 33 bp, Homo sapien
tcagtaggtgtttccaaagtgttaacggttgag

SEQ ID NO: 991076 - DNA, 33 bp, Homo sapien
tcagtaggtgtttccagagtgttaacggttgag

SEQ ID NO: 991077 - DNA, 33 bp, Homo sapien
ctcacacagtttttcacgagcagtagaattaga

SEQ ID NO: 991078 - DNA, 33 bp, Homo sapien
ctcacacagtttttcatgagcagtagaattaga

SEQ ID NO: 991079 - DNA, 33 bp, Homo sapien
gtgctggagtaataggccaaatgtatcatggcc

SEQ ID NO: 991080 - DNA, 33 bp, Homo sapien
gtgctggagtaataggtcaaatgtatcatggcc

SEQ ID NO: 991081 - DNA, 33 bp, Homo sapien
ctacactgactcttagcacttctttcagcagct

SEQ ID NO: 991082 - DNA, 33 bp, Homo sapien
ctacactgactcttaggacttctttcagcagct

SEQ ID NO: 991083 - DNA, 33 bp, Homo sapien
tacaggtaagcacacaatcgtaacgaacttccc

SEQ ID NO: 991084 - DNA, 33 bp, Homo sapien
tacaggtaagcacacagtcgtaacgaacttccc

SEQ ID NO: 991085 - DNA, 33 bp, Homo sapien
gagcatgactagaatcaagaaagaaaaccgagc

SEQ ID NO: 991086 - DNA, 33 bp, Homo sapien
gagcatgactagaatccagaaagaaaaccgagc

SEQ ID NO: 991087 - DNA, 33 bp, Homo sapien
aggggtatagggcctgccaatatgtcatgtcag

SEQ ID NO: 991088 - DNA, 33 bp, Homo sapien
aggggtatagggcctgtcaatatgtcatgtcag

SEQ ID NO: 991089 - DNA, 33 bp, Homo sapien
gaagctggacaagatgacataatgcagtttcac

SEQ ID NO: 991090 - DNA, 33 bp, Homo sapien
gaagctggacaagatgccataatgcagtttcac

SEQ ID NO: 991091 - DNA, 33 bp, Homo sapien
gactgagatttaaagccgaacttagactgaaac

SEQ ID NO: 991092 - DNA, 33 bp, Homo sapien
gactgagatttaaagctgaacttagactgaaac

SEQ ID NO: 991093 - DNA, 33 bp, Homo sapien
gaataataaaatcaagcccaaaaggtcatgaaa

SEQ ID NO: 991094 - DNA, 33 bp, Homo sapien
gaataataaaatcaagtccaaaaggtcatgaaa

SEQ ID NO: 991095 - DNA, 33 bp, Homo sapien
ctgtgtctagagctagaacaagacaccagcaac

SEQ ID NO: 991096 - DNA, 33 bp, Homo sapien
ctgtgtctagagctaggacaagacaccagcaac

SEQ ID NO: 991097 - DNA, 33 bp, Homo sapien
ccttctctcttcaacacccattcactccaagcc

SEQ ID NO: 991098 - DNA, 33 bp, Homo sapien
ccttctctcttcaacatccattcactccaagcc

SEQ ID NO: 991099 - DNA, 33 bp, Homo sapien
aagatgtactgtcataacatttggagatcacca

SEQ ID NO: 991100 - DNA, 33 bp, Homo sapien
aagatgtactgtcatagcatttggagatcacca

SEQ ID NO: 991101 - DNA, 33 bp, Homo sapien
ttcttaatggtgttcccatctttggtacaaggg

SEQ ID NO: 991102 - DNA, 33 bp, Homo sapien
ttcttaatggtgttcctatctttggtacaaggg

SEQ ID NO: 991103 - DNA, 33 bp, Homo sapien
attttctttggagtaaggtctattgaaatagtt

SEQ ID NO: 991104 - DNA, 33 bp, Homo sapien
attttctttggagtaatgtctattgaaatagtt

SEQ ID NO: 991105 - DNA, 33 bp, Homo sapien
gggcaggcaaaacaaccgatgtgggcttcaagt

SEQ ID NO: 991106 - DNA, 33 bp, Homo sapien
gggcaggcaaaacaactgatgtgggcttcaagt

SEQ ID NO: 991107 - DNA, 33 bp, Homo sapien
ttaagtagtgcaattacggttatgtttttttct

SEQ ID NO: 991108 - DNA, 33 bp, Homo sapien
ttaagtagtgcaattatggttatgtttttttct

SEQ ID NO: 991109 - DNA, 33 bp, Homo sapien
catgaccattgagagacgaatatggaatgagag

SEQ ID NO: 991110 - DNA, 33 bp, Homo sapien
catgaccattgagagatgaatatggaatgagag

SEQ ID NO: 991111 - DNA, 33 bp, Homo sapien
tcctgaaaaagaccatcaagctggtaacgtgaa

SEQ ID NO: 991112 - DNA, 33 bp, Homo sapien
tcctgaaaaagaccattaagctggtaacgtgaa

SEQ ID NO: 991113 - DNA, 33 bp, Homo sapien
aggaccatgtatctgacctaaattagtcaaatc

SEQ ID NO: 991114 - DNA, 33 bp, Homo sapien
aggaccatgtatctgatctaaattagtcaaatc

SEQ ID NO: 991115 - DNA, 33 bp, Homo sapien
aaaagtcagaaaataacgtgctggtgagtctat

SEQ ID NO: 991116 - DNA, 33 bp, Homo sapien
aaaagtcagaaaataaggtgctggtgagtctat

SEQ ID NO: 991117 - DNA, 33 bp, Homo sapien
tagtgtatgagagaatcagatttctaacacctt

SEQ ID NO: 991118 - DNA, 33 bp, Homo sapien
tagtgtatgagagaatgagatttctaacacctt

SEQ ID NO: 991119 - DNA, 33 bp, Homo sapien
agctttggtcaatgaacctggacatccactttg

SEQ ID NO: 991120 - DNA, 33 bp, Homo sapien
agctttggtcaatgaatctggacatccactttg

SEQ ID NO: 991121 - DNA, 33 bp, Homo sapien
tcattattccacataccaagccaacccatcact

SEQ ID NO: 991122 - DNA, 33 bp, Homo sapien
tcattattccacatacgaagccaacccatcact

SEQ ID NO: 991123 - DNA, 33 bp, Homo sapien
acttataccttatgaacatatttgtcccgatcc

SEQ ID NO: 991124 - DNA, 33 bp, Homo sapien
acttataccttatgaatatatttgtcccgatcc

SEQ ID NO: 991125 - DNA, 33 bp, Homo sapien
tagtgaaagacttttaaagttcagaacatggtc

SEQ ID NO: 991126 - DNA, 33 bp, Homo sapien
tagtgaaagacttttatagttcagaacatggtc

SEQ ID NO: 991127 - DNA, 33 bp, Homo sapien
atacagggaatgaaaacaatgaaaagaatgcca

SEQ ID NO: 991128 - DNA, 33 bp, Homo sapien
atacagggaatgaaaagaatgaaaagaatgcca

SEQ ID NO: 991129 - DNA, 33 bp, Homo sapien
catcaactgaggtctcaaactggaagcgcatga

SEQ ID NO: 991130 - DNA, 33 bp, Homo sapien
catcaactgaggtctctaactggaagcgcatga

SEQ ID NO: 991131 - DNA, 33 bp, Homo sapien
tatctgagagccaaccacgtgtcagtcactgag

SEQ ID NO: 991132 - DNA, 33 bp, Homo sapien
tatctgagagccaaccgcgtgtcagtcactgag

SEQ ID NO: 991133 - DNA, 33 bp, Homo sapien
tgtcagtcactgagggaagagatggagaggaca

SEQ ID NO: 991134 - DNA, 33 bp, Homo sapien
tgtcagtcactgaggggagagatggagaggaca

SEQ ID NO: 991135 - DNA, 33 bp, Homo sapien
gatttagacatttcctcaatctgtaatttattt

SEQ ID NO: 991136 - DNA, 33 bp, Homo sapien
gatttagacatttcctgaatctgtaatttattt

SEQ ID NO: 991137 - DNA, 33 bp, Homo sapien
tttaagaaattctacaagtgaaatcctcctctt

SEQ ID NO: 991138 - DNA, 33 bp, Homo sapien
tttaagaaattctacaggtgaaatcctcctctt

SEQ ID NO: 991139 - DNA, 33 bp, Homo sapien
tcacaccatacacataaatttgaaatgaatcag

SEQ ID NO: 991140 - DNA, 33 bp, Homo sapien
tcacaccatacacatatatttgaaatgaatcag

SEQ ID NO: 991141 - DNA, 33 bp, Homo sapien
aaatgagatcactttgaatgagaaaaagtcgag

SEQ ID NO: 991142 - DNA, 33 bp, Homo sapien
aaatgagatcactttggatgagaaaaagtcgag

SEQ ID NO: 991143 - DNA, 33 bp, Homo sapien
tggaatgggtcaacttcaacgttcagtgaggac

SEQ ID NO: 991144 - DNA, 33 bp, Homo sapien
tggaatgggtcaactttaacgttcagtgaggac

SEQ ID NO: 991145 - DNA, 33 bp, Homo sapien
tgcatttggatttgggaaacctgttttgattaa

SEQ ID NO: 991146 - DNA, 33 bp, Homo sapien
tgcatttggatttggggaacctgttttgattaa

SEQ ID NO: 991147 - DNA, 33 bp, Homo sapien
aggaggaaggagataaaggtctaaaaactcggc

SEQ ID NO: 991148 - DNA, 33 bp, Homo sapien
aggaggaaggagataacggtctaaaaactcggc

SEQ ID NO: 991149 - DNA, 33 bp, Homo sapien
agattgaagaggctgacatttttatttccgcaa

SEQ ID NO: 991150 - DNA, 33 bp, Homo sapien
agattgaagaggctgatatttttatttccgcaa

SEQ ID NO: 991151 - DNA, 33 bp, Homo sapien
aaaggttttcaaatgaacaaagattgaagaggc

SEQ ID NO: 991152 - DNA, 33 bp, Homo sapien
aaaggttttcaaatgagcaaagattgaagaggc

SEQ ID NO: 991153 - DNA, 33 bp, Homo sapien
gttatttccctgcttaaatattcctagtggttc

SEQ ID NO: 991154 - DNA, 33 bp, Homo sapien
gttatttccctgcttagatattcctagtggttc

SEQ ID NO: 991155 - DNA, 33 bp, Homo sapien
tttcccgcgtctcatacactcaacactcaacaa

SEQ ID NO: 991156 - DNA, 33 bp, Homo sapien
tttcccgcgtctcatatactcaacactcaacaa

SEQ ID NO: 991157 - DNA, 33 bp, Homo sapien
catggagcatacatacacaacaaagaacttcca

SEQ ID NO: 991158 - DNA, 33 bp, Homo sapien
catggagcatacatacgcaacaaagaacttcca

SEQ ID NO: 991159 - DNA, 33 bp, Homo sapien
ttggagttggtagacaacttgtgaaaggaatca

SEQ ID NO: 991160 - DNA, 33 bp, Homo sapien
ttggagttggtagacatcttgtgaaaggaatca

SEQ ID NO: 991161 - DNA, 33 bp, Homo sapien
ctcatgtctagcacatcatctaactcaataaat

SEQ ID NO: 991162 - DNA, 33 bp, Homo sapien
ctcatgtctagcacattatctaactcaataaat

SEQ ID NO: 991163 - DNA, 33 bp, Homo sapien
aggctgggtaagcacaatacactgaatgtgctg

SEQ ID NO: 991164 - DNA, 33 bp, Homo sapien
aggctgggtaagcacagtacactgaatgtgctg

SEQ ID NO: 991165 - DNA, 33 bp, Homo sapien
ccatatagtcccccaacgtagtcagcatatcac

SEQ ID NO: 991166 - DNA, 33 bp, Homo sapien
ccatatagtcccccaatgtagtcagcatatcac

SEQ ID NO: 991167 - DNA, 33 bp, Homo sapien
ccagaaggcagagaagccaacatatggaatccc

SEQ ID NO: 991168 - DNA, 33 bp, Homo sapien
ccagaaggcagagaagtcaacatatggaatccc

SEQ ID NO: 991169 - DNA, 33 bp, Homo sapien
tgtatgtcacctaaggaatctcaggcctgctaa

SEQ ID NO: 991170 - DNA, 33 bp, Homo sapien
tgtatgtcacctaaggtatctcaggcctgctaa

SEQ ID NO: 991171 - DNA, 33 bp, Homo sapien
tttggacttggacaaaatgagaactgaggagga

SEQ ID NO: 991172 - DNA, 33 bp, Homo sapien
tttggacttggacaaagtgagaactgaggagga

SEQ ID NO: 991173 - DNA, 33 bp, Homo sapien
ctatgtaagtttgagccctgatttaccaaaatt

SEQ ID NO: 991174 - DNA, 33 bp, Homo sapien
ctatgtaagtttgagctctgatttaccaaaatt

SEQ ID NO: 991175 - DNA, 33 bp, Homo sapien
gtattataattttacaagacctctgtcatctat

SEQ ID NO: 991176 - DNA, 33 bp, Homo sapien
gtattataattttacaggacctctgtcatctat

SEQ ID NO: 991177 - DNA, 33 bp, Homo sapien
aggctgaaaagccaaccggactgatgcctcagg

SEQ ID NO: 991178 - DNA, 33 bp, Homo sapien
aggctgaaaagccaactggactgatgcctcagg

SEQ ID NO: 991179 - DNA, 33 bp, Homo sapien
cattatacaatacagactctccttgacttatga

SEQ ID NO: 991180 - DNA, 33 bp, Homo sapien
cattatacaatacagagtctccttgacttatga

SEQ ID NO: 991181 - DNA, 33 bp, Homo sapien
agagccaaaagctgaaggtgatactctccaccc

SEQ ID NO: 991182 - DNA, 33 bp, Homo sapien
agagccaaaagctgaatgtgatactctccaccc

SEQ ID NO: 991183 - DNA, 33 bp, Homo sapien
tgcagtgtgtggtctgaatatatcaactatgaa

SEQ ID NO: 991184 - DNA, 33 bp, Homo sapien
tgcagtgtgtggtctgcatatatcaactatgaa

SEQ ID NO: 991185 - DNA, 33 bp, Homo sapien
ctcattcattttactacctatctcctcataatt

SEQ ID NO: 991186 - DNA, 33 bp, Homo sapien
ctcattcattttactagctatctcctcataatt

SEQ ID NO: 991187 - DNA, 33 bp, Homo sapien
tattattcacgttccaagaaagaagatctaagg

SEQ ID NO: 991188 - DNA, 33 bp, Homo sapien
tattattcacgttccatgaaagaagatctaagg

SEQ ID NO: 991189 - DNA, 33 bp, Homo sapien
actttgtactaaaccacgtgataccccctcata

SEQ ID NO: 991190 - DNA, 33 bp, Homo sapien
actttgtactaaaccatgtgataccccctcata

SEQ ID NO: 991191 - DNA, 33 bp, Homo sapien
tacataaattcttgcccatagtaatgcctaata

SEQ ID NO: 991192 - DNA, 33 bp, Homo sapien
tacataaattcttgcctatagtaatgcctaata

SEQ ID NO: 991193 - DNA, 33 bp, Homo sapien
catggagaaggccatgaatatttgttttatatt

SEQ ID NO: 991194 - DNA, 33 bp, Homo sapien
catggagaaggccatgcatatttgttttatatt

SEQ ID NO: 991195 - DNA, 33 bp, Homo sapien
tttctaacaaatggggacaatgatatgacctac

SEQ ID NO: 991196 - DNA, 33 bp, Homo sapien
tttctaacaaatgggggcaatgatatgacctac

SEQ ID NO: 991197 - DNA, 33 bp, Homo sapien
gagttccacgctccaacagcatctaccacttgc

SEQ ID NO: 991198 - DNA, 33 bp, Homo sapien
gagttccacgctccaatagcatctaccacttgc

SEQ ID NO: 991199 - DNA, 33 bp, Homo sapien
atagtggaggactctaaacaaagttgtattaca

SEQ ID NO: 991200 - DNA, 33 bp, Homo sapien
atagtggaggactctacacaaagttgtattaca

SEQ ID NO: 991201 - DNA, 33 bp, Homo sapien
tcccatcctgaacaatgaggggtaaagatattt

SEQ ID NO: 991202 - DNA, 33 bp, Homo sapien
tcccatcctgaacaattaggggtaaagatattt

SEQ ID NO: 991203 - DNA, 33 bp, Homo sapien
gctcctaactttggtaataaggttctccataat

SEQ ID NO: 991204 - DNA, 33 bp, Homo sapien
gctcctaactttggtagtaaggttctccataat

SEQ ID NO: 991205 - DNA, 33 bp, Homo sapien
aacaagcctcttggacactactattcattgcac

SEQ ID NO: 991206 - DNA, 33 bp, Homo sapien
aacaagcctcttggacgctactattcattgcac

SEQ ID NO: 991207 - DNA, 33 bp, Homo sapien
tgctcaataaacgtgccgagaagagggaagtga

SEQ ID NO: 991208 - DNA, 33 bp, Homo sapien
tgctcaataaacgtgctgagaagagggaagtga

SEQ ID NO: 991209 - DNA, 33 bp, Homo sapien
aggcatgcatgtagggaattgctaaaagttgtg

SEQ ID NO: 991210 - DNA, 33 bp, Homo sapien
aggcatgcatgtaggggattgctaaaagttgtg

SEQ ID NO: 991211 - DNA, 33 bp, Homo sapien
acagtcaactatataacccgggcaatggaataa

SEQ ID NO: 991212 - DNA, 33 bp, Homo sapien
acagtcaactatataagccgggcaatggaataa

SEQ ID NO: 991213 - DNA, 33 bp, Homo sapien
ggtgtgagtgttggaagacgaggtcagagaagt

SEQ ID NO: 991214 - DNA, 33 bp, Homo sapien
ggtgtgagtgttggaatacgaggtcagagaagt

SEQ ID NO: 991215 - DNA, 33 bp, Homo sapien
taaatatgagttgtgcagaattttgcttggcaa

SEQ ID NO: 991216 - DNA, 33 bp, Homo sapien
taaatatgagttgtgcggaattttgcttggcaa

SEQ ID NO: 991217 - DNA, 33 bp, Homo sapien
gtgaccactgtgaccaacagattttctcccttt

SEQ ID NO: 991218 - DNA, 33 bp, Homo sapien
gtgaccactgtgaccagcagattttctcccttt

SEQ ID NO: 991219 - DNA, 33 bp, Homo sapien
taaccttctggttcccaaaagtgtttccatccc

SEQ ID NO: 991220 - DNA, 33 bp, Homo sapien
taaccttctggttcccgaaagtgtttccatccc

SEQ ID NO: 991221 - DNA, 33 bp, Homo sapien
agttaataatgaggataagagggggcaacctgc

SEQ ID NO: 991222 - DNA, 33 bp, Homo sapien
agttaataatgaggatgagagggggcaacctgc

SEQ ID NO: 991223 - DNA, 33 bp, Homo sapien
gacactgttttactaacagaaaagctctataac

SEQ ID NO: 991224 - DNA, 33 bp, Homo sapien
gacactgttttactaagagaaaagctctataac

SEQ ID NO: 991225 - DNA, 33 bp, Homo sapien
acaggtgcataaataagttaacacttgtcaaat

SEQ ID NO: 991226 - DNA, 33 bp, Homo sapien
acaggtgcataaataatttaacacttgtcaaat

SEQ ID NO: 991227 - DNA, 33 bp, Homo sapien
ctattaaaaatgtgcaaaagtcctaaaaggaga

SEQ ID NO: 991228 - DNA, 33 bp, Homo sapien
ctattaaaaatgtgcagaagtcctaaaaggaga

SEQ ID NO: 991229 - DNA, 33 bp, Homo sapien
aacagtaagtgtctgcactaaagggtgtggacc

SEQ ID NO: 991230 - DNA, 33 bp, Homo sapien
aacagtaagtgtctgctctaaagggtgtggacc

SEQ ID NO: 991231 - DNA, 33 bp, Homo sapien
atcagcatactcttttcgttcagccttcaaagt

SEQ ID NO: 991232 - DNA, 33 bp, Homo sapien
atcagcatactctttttgttcagccttcaaagt

SEQ ID NO: 991233 - DNA, 33 bp, Homo sapien
atgctcaatcctgcttctttttctgtgttctct

SEQ ID NO: 991234 - DNA, 33 bp, Homo sapien
atgctcaatcctgcttttttttctgtgttctct

SEQ ID NO: 991235 - DNA, 33 bp, Homo sapien
gacaaaaaaatttggaagtatggatgtcttgta

SEQ ID NO: 991236 - DNA, 33 bp, Homo sapien
gacaaaaaaatttggacgtatggatgtcttgta

SEQ ID NO: 991237 - DNA, 33 bp, Homo sapien
ccagggagaccagttacagaactttgagatggt

SEQ ID NO: 991238 - DNA, 33 bp, Homo sapien
ccagggagaccagttagagaactttgagatggt

SEQ ID NO: 991239 - DNA, 33 bp, Homo sapien
caggataaaacagagacaggagtaggggctact

SEQ ID NO: 991240 - DNA, 33 bp, Homo sapien
caggataaaacagagataggagtaggggctact

SEQ ID NO: 991241 - DNA, 33 bp, Homo sapien
tagcttcacaaagctactacataattatgcaaa

SEQ ID NO: 991242 - DNA, 33 bp, Homo sapien
tagcttcacaaagctagtacataattatgcaaa

SEQ ID NO: 991243 - DNA, 33 bp, Homo sapien
gataaaaaccttagaacatgatttgaagtaagt

SEQ ID NO: 991244 - DNA, 33 bp, Homo sapien
gataaaaaccttagaagatgatttgaagtaagt

SEQ ID NO: 991245 - DNA, 33 bp, Homo sapien
gattaaaaaggctgacggtatcaaattatggct

SEQ ID NO: 991246 - DNA, 33 bp, Homo sapien
gattaaaaaggctgactgtatcaaattatggct

SEQ ID NO: 991247 - DNA, 33 bp, Homo sapien
caaaagtatgctcaagaattgaacccgggagct

SEQ ID NO: 991248 - DNA, 33 bp, Homo sapien
caaaagtatgctcaaggattgaacccgggagct

SEQ ID NO: 991249 - DNA, 33 bp, Homo sapien
ggatctgaaattcagaacagttaggccaaatgt

SEQ ID NO: 991250 - DNA, 33 bp, Homo sapien
ggatctgaaattcagagcagttaggccaaatgt

SEQ ID NO: 991251 - DNA, 33 bp, Homo sapien
tcttactttctcagcactcttagaaatatctaa

SEQ ID NO: 991252 - DNA, 33 bp, Homo sapien
tcttactttctcagcattcttagaaatatctaa

SEQ ID NO: 991253 - DNA, 33 bp, Homo sapien
atattttttgcagataagaagaaggatggaaag

SEQ ID NO: 991254 - DNA, 33 bp, Homo sapien
atattttttgcagataggaagaaggatggaaag

SEQ ID NO: 991255 - DNA, 33 bp, Homo sapien
cccttacttcttttccactatagatttcctaac

SEQ ID NO: 991256 - DNA, 33 bp, Homo sapien
cccttacttcttttccgctatagatttcctaac

SEQ ID NO: 991257 - DNA, 33 bp, Homo sapien
atgttttctcaatctacattcaagtaagttgtc

SEQ ID NO: 991258 - DNA, 33 bp, Homo sapien
atgttttctcaatctatattcaagtaagttgtc

SEQ ID NO: 991259 - DNA, 33 bp, Homo sapien
tttctttttttctcaaaacagagtctcgctgtg

SEQ ID NO: 991260 - DNA, 33 bp, Homo sapien
tttctttttttctcaagacagagtctcgctgtg

SEQ ID NO: 991261 - DNA, 33 bp, Homo sapien
gaatttatcttagcaacgtcacttctctattat

SEQ ID NO: 991262 - DNA, 33 bp, Homo sapien
gaatttatcttagcaatgtcacttctctattat

SEQ ID NO: 991263 - DNA, 33 bp, Homo sapien
ttgctaagataaattcccatgattggctaaagc

SEQ ID NO: 991264 - DNA, 33 bp, Homo sapien
ttgctaagataaattctcatgattggctaaagc

SEQ ID NO: 991265 - DNA, 33 bp, Homo sapien
gtctatcacctggcaacccaactgctgctgttt

SEQ ID NO: 991266 - DNA, 33 bp, Homo sapien
gtctatcacctggcaatccaactgctgctgttt

SEQ ID NO: 991267 - DNA, 33 bp, Homo sapien
agtacacattcaattccaaccttaagcatcaaa

SEQ ID NO: 991268 - DNA, 33 bp, Homo sapien
agtacacattcaattctaaccttaagcatcaaa

SEQ ID NO: 991269 - DNA, 33 bp, Homo sapien
attgcggtttgtcacaaaagttaggccaccctg

SEQ ID NO: 991270 - DNA, 33 bp, Homo sapien
attgcggtttgtcacagaagttaggccaccctg

SEQ ID NO: 991271 - DNA, 33 bp, Homo sapien
cagttgaaacaacgggaatagctaaaatctcaa

SEQ ID NO: 991272 - DNA, 33 bp, Homo sapien
cagttgaaacaacgggcatagctaaaatctcaa

SEQ ID NO: 991273 - DNA, 33 bp, Homo sapien
gttcagctttttaaaactccacatataagtaag

SEQ ID NO: 991274 - DNA, 33 bp, Homo sapien
gttcagctttttaaaattccacatataagtaag

SEQ ID NO: 991275 - DNA, 33 bp, Homo sapien
actttattatcttagacgtgaaccattgcaaac

SEQ ID NO: 991276 - DNA, 33 bp, Homo sapien
actttattatcttagaggtgaaccattgcaaac

SEQ ID NO: 991277 - DNA, 33 bp, Homo sapien
catttctaggattctgcatccatcattgcacaa

SEQ ID NO: 991278 - DNA, 33 bp, Homo sapien
catttctaggattctgtatccatcattgcacaa

SEQ ID NO: 991279 - DNA, 33 bp, Homo sapien
ccaaggggccatttgtgaatcctatacagttct

SEQ ID NO: 991280 - DNA, 33 bp, Homo sapien
ccaaggggccatttgttaatcctatacagttct

SEQ ID NO: 991281 - DNA, 33 bp, Homo sapien
aatccctcttctaggaaaagtccatatttagcc

SEQ ID NO: 991282 - DNA, 33 bp, Homo sapien
aatccctcttctaggacaagtccatatttagcc

SEQ ID NO: 991283 - DNA, 33 bp, Homo sapien
aaacttctttgccaacactaattataataccta

SEQ ID NO: 991284 - DNA, 33 bp, Homo sapien
aaacttctttgccaacgctaattataataccta

SEQ ID NO: 991285 - DNA, 33 bp, Homo sapien
ctagatggtagtttgacctttcagttaccttgt

SEQ ID NO: 991286 - DNA, 33 bp, Homo sapien
ctagatggtagtttgatctttcagttaccttgt

SEQ ID NO: 991287 - DNA, 33 bp, Homo sapien
gagtggtaaggagcaggattcaaattcaggctg

SEQ ID NO: 991288 - DNA, 33 bp, Homo sapien
gagtggtaaggagcagtattcaaattcaggctg

SEQ ID NO: 991289 - DNA, 33 bp, Homo sapien
agctttcataaggccaatagtgggatctttgat

SEQ ID NO: 991290 - DNA, 33 bp, Homo sapien
agctttcataaggccagtagtgggatctttgat

SEQ ID NO: 991291 - DNA, 33 bp, Homo sapien
agatggagaacaccgccgccaaagaaaggtact

SEQ ID NO: 991292 - DNA, 33 bp, Homo sapien
agatggagaacaccgctgccaaagaaaggtact

SEQ ID NO: 991293 - DNA, 33 bp, Homo sapien
ttttctccatcactaacgtttggctctcttcag

SEQ ID NO: 991294 - DNA, 33 bp, Homo sapien
ttttctccatcactaatgtttggctctcttcag

SEQ ID NO: 991295 - DNA, 33 bp, Homo sapien
aagaatgtttaggaacaaagcaaatctgaaagg

SEQ ID NO: 991296 - DNA, 33 bp, Homo sapien
aagaatgtttaggaactaagcaaatctgaaagg

SEQ ID NO: 991297 - DNA, 33 bp, Homo sapien
tcaaccatccaaaatacattgagtacttgctct

SEQ ID NO: 991298 - DNA, 33 bp, Homo sapien
tcaaccatccaaaatatattgagtacttgctct

SEQ ID NO: 991299 - DNA, 33 bp, Homo sapien
aggctggtcaatgacaatgtaacagactcttga

SEQ ID NO: 991300 - DNA, 33 bp, Homo sapien
aggctggtcaatgacagtgtaacagactcttga

SEQ ID NO: 991301 - DNA, 33 bp, Homo sapien
taaatagttgatgcagaatggagtagtggggat

SEQ ID NO: 991302 - DNA, 33 bp, Homo sapien
taaatagttgatgcagcatggagtagtggggat

SEQ ID NO: 991303 - DNA, 33 bp, Homo sapien
ttgggatgagttatgactcaagcggagaatatg

SEQ ID NO: 991304 - DNA, 33 bp, Homo sapien
ttgggatgagttatgagtcaagcggagaatatg

SEQ ID NO: 991305 - DNA, 33 bp, Homo sapien
agacttcaaggtggaaagaactcagcacttacc

SEQ ID NO: 991306 - DNA, 33 bp, Homo sapien
agacttcaaggtggaaggaactcagcacttacc

SEQ ID NO: 991307 - DNA, 33 bp, Homo sapien
ataatatgccctctaactgttcagcatcagatt

SEQ ID NO: 991308 - DNA, 33 bp, Homo sapien
ataatatgccctctaattgttcagcatcagatt

SEQ ID NO: 991309 - DNA, 33 bp, Homo sapien
tttcactgcaggatgacgatgattcttagctgt

SEQ ID NO: 991310 - DNA, 33 bp, Homo sapien
tttcactgcaggatgatgatgattcttagctgt

SEQ ID NO: 991311 - DNA, 33 bp, Homo sapien
gcatcccaaatggtcacgatggatgttctactt

SEQ ID NO: 991312 - DNA, 33 bp, Homo sapien
gcatcccaaatggtcatgatggatgttctactt

SEQ ID NO: 991313 - DNA, 33 bp, Homo sapien
tcccatatctggataacgcaaccactaggaatc

SEQ ID NO: 991314 - DNA, 33 bp, Homo sapien
tcccatatctggataatgcaaccactaggaatc

SEQ ID NO: 991315 - DNA, 33 bp, Homo sapien
taaataaatgcttgacaaaattggtcaaaaata

SEQ ID NO: 991316 - DNA, 33 bp, Homo sapien
taaataaatgcttgacgaaattggtcaaaaata

SEQ ID NO: 991317 - DNA, 33 bp, Homo sapien
tgagttttctatcttaaagctaaagtgacagtt

SEQ ID NO: 991318 - DNA, 33 bp, Homo sapien
tgagttttctatcttatagctaaagtgacagtt

SEQ ID NO: 991319 - DNA, 33 bp, Homo sapien
aaggcagaggactttgaaggaagttttttctta

SEQ ID NO: 991320 - DNA, 33 bp, Homo sapien
aaggcagaggactttgcaggaagttttttctta

SEQ ID NO: 991321 - DNA, 33 bp, Homo sapien
tctccttaccagagtgcatctgaatctaatggc

SEQ ID NO: 991322 - DNA, 33 bp, Homo sapien
tctccttaccagagtgtatctgaatctaatggc

SEQ ID NO: 991323 - DNA, 33 bp, Homo sapien
aattagtaggagaacgacattgataatgttaat

SEQ ID NO: 991324 - DNA, 33 bp, Homo sapien
aattagtaggagaacgtcattgataatgttaat

SEQ ID NO: 991325 - DNA, 33 bp, Homo sapien
aaaaaggagtagatgacgagagagcaaactcac

SEQ ID NO: 991326 - DNA, 33 bp, Homo sapien
aaaaaggagtagatgatgagagagcaaactcac

SEQ ID NO: 991327 - DNA, 33 bp, Homo sapien
caatgcctaaaaccaccagccccatcaccattg

SEQ ID NO: 991328 - DNA, 33 bp, Homo sapien
caatgcctaaaaccacgagccccatcaccattg

SEQ ID NO: 991329 - DNA, 33 bp, Homo sapien
gagaggaggcaaaatgcataggagacagtggga

SEQ ID NO: 991330 - DNA, 33 bp, Homo sapien
gagaggaggcaaaatggataggagacagtggga

SEQ ID NO: 991331 - DNA, 33 bp, Homo sapien
taacctgacttacaaacggtaactcactatgtg

SEQ ID NO: 991332 - DNA, 33 bp, Homo sapien
taacctgacttacaaatggtaactcactatgtg

SEQ ID NO: 991333 - DNA, 33 bp, Homo sapien
tatcacctcagaatgaaccggaacccgtaaaga

SEQ ID NO: 991334 - DNA, 33 bp, Homo sapien
tatcacctcagaatgagccggaacccgtaaaga

SEQ ID NO: 991335 - DNA, 33 bp, Homo sapien
atatagttctttaaaagataatgtcatggctat

SEQ ID NO: 991336 - DNA, 33 bp, Homo sapien
atatagttctttaaaatataatgtcatggctat

SEQ ID NO: 991337 - DNA, 33 bp, Homo sapien
taaaggaaccataaaaatgtcaacagtatttaa

SEQ ID NO: 991338 - DNA, 33 bp, Homo sapien
taaaggaaccataaaagtgtcaacagtatttaa

SEQ ID NO: 991339 - DNA, 33 bp, Homo sapien; identical to SEQ ID NO: 991337

SEQ ID NO: 991340 - DNA, 33 bp, Homo sapien; identical to SEQ ID NO: 991338

SEQ ID NO: 991341 - DNA, 33 bp, Homo sapien
tttgtttaggctctgaatagatttgaggatgaa

SEQ ID NO: 991342 - DNA, 33 bp, Homo sapien
tttgtttaggctctgagtagatttgaggatgaa

SEQ ID NO: 991343 - DNA, 33 bp, Homo sapien
tgactatgaagtgagacaatgaactatgtaaag

SEQ ID NO: 991344 - DNA, 33 bp, Homo sapien
tgactatgaagtgagataatgaactatgtaaag

SEQ ID NO: 991345 - DNA, 33 bp, Homo sapien
tctcacttcatagtcaaaacaaacctactgata

SEQ ID NO: 991346 - DNA, 33 bp, Homo sapien
tctcacttcatagtcacaacaaacctactgata

SEQ ID NO: 991347 - DNA, 33 bp, Homo sapien
cctcagcaagccattgaacttctctgagctcag

SEQ ID NO: 991348 - DNA, 33 bp, Homo sapien
cctcagcaagccattggacttctctgagctcag

SEQ ID NO: 991349 - DNA, 33 bp, Homo sapien
ctgaacagtggagggacgcttcacctacagtta

SEQ ID NO: 991350 - DNA, 33 bp, Homo sapien
ctgaacagtggagggatgcttcacctacagtta

SEQ ID NO: 991351 - DNA, 33 bp, Homo sapien
gggttatgatagaaacaagaaagtaaaacaaac

SEQ ID NO: 991352 - DNA, 33 bp, Homo sapien
gggttatgatagaaacgagaaagtaaaacaaac

SEQ ID NO: 991353 - DNA, 33 bp, Homo sapien
ataatggaagaatcaactctatcaaaacaacaa

SEQ ID NO: 991354 - DNA, 33 bp, Homo sapien
ataatggaagaatcaagtctatcaaaacaacaa

SEQ ID NO: 991355 - DNA, 33 bp, Homo sapien
ctccagacgccatctccgaattatgcataatta

SEQ ID NO: 991356 - DNA, 33 bp, Homo sapien
ctccagacgccatctctgaattatgcataatta

SEQ ID NO: 991357 - DNA, 33 bp, Homo sapien
aataccatttgccagagataagtaatgctaaat

SEQ ID NO: 991358 - DNA, 33 bp, Homo sapien
aataccatttgccagatataagtaatgctaaat

SEQ ID NO: 991359 - DNA, 33 bp, Homo sapien
ggccctgggcttacaacggtgccatgagcctta

SEQ ID NO: 991360 - DNA, 33 bp, Homo sapien
ggccctgggcttacaatggtgccatgagcctta

SEQ ID NO: 991361 - DNA, 33 bp, Homo sapien
tgagcgaatgtttgagccaaccttttggataca

SEQ ID NO: 991362 - DNA, 33 bp, Homo sapien
tgagcgaatgtttgagtcaaccttttggataca

SEQ ID NO: 991363 - DNA, 33 bp, Homo sapien
aggttttctggacagaatcaatggtataatcat

SEQ ID NO: 991364 - DNA, 33 bp, Homo sapien
aggttttctggacagagtcaatggtataatcat

SEQ ID NO: 991365 - DNA, 33 bp, Homo sapien
ggcagaaattgatagcacattaaaataaatatg

SEQ ID NO: 991366 - DNA, 33 bp, Homo sapien
ggcagaaattgatagcgcattaaaataaatatg

SEQ ID NO: 991367 - DNA, 33 bp, Homo sapien
cccatggaactaccggaacaaattaccaagcaa

SEQ ID NO: 991368 - DNA, 33 bp, Homo sapien
cccatggaactaccgggacaaattaccaagcaa

SEQ ID NO: 991369 - DNA, 33 bp, Homo sapien
ttccctgaccagtaacacattgcttgtgggttt

SEQ ID NO: 991370 - DNA, 33 bp, Homo sapien
ttccctgaccagtaacgcattgcttgtgggttt

SEQ ID NO: 991371 - DNA, 33 bp, Homo sapien
taaatcaaggttgataccattatcagacaataa

SEQ ID NO: 991372 - DNA, 33 bp, Homo sapien
taaatcaaggttgatagcattatcagacaataa

SEQ ID NO: 991373 - DNA, 33 bp, Homo sapien
atgccaaccccaaactcaatatattataaccac

SEQ ID NO: 991374 - DNA, 33 bp, Homo sapien
atgccaaccccaaactgaatatattataaccac

SEQ ID NO: 991375 - DNA, 33 bp, Homo sapien
cgccattggctagaaccgagttgcatggataca

SEQ ID NO: 991376 - DNA, 33 bp, Homo sapien
cgccattggctagaactgagttgcatggataca

SEQ ID NO: 991377 - DNA, 33 bp, Homo sapien
ttgcttgattccaataaatacagcaaccttagc

SEQ ID NO: 991378 - DNA, 33 bp, Homo sapien
ttgcttgattccaatagatacagcaaccttagc

SEQ ID NO: 991379 - DNA, 33 bp, Homo sapien
ggcttaatcaattcacacatctttttccctcac

SEQ ID NO: 991380 - DNA, 33 bp, Homo sapien
ggcttaatcaattcacgcatctttttccctcac

SEQ ID NO: 991381 - DNA, 33 bp, Homo sapien
aataatgaagtcagcaaaaagttcaaaagaaaa

SEQ ID NO: 991382 - DNA, 33 bp, Homo sapien
aataatgaagtcagcagaaagttcaaaagaaaa

SEQ ID NO: 991383 - DNA, 33 bp, Homo sapien
tggttaatggagacaaattcaattcaaatatgt

SEQ ID NO: 991384 - DNA, 33 bp, Homo sapien
tggttaatggagacaacttcaattcaaatatgt

SEQ ID NO: 991385 - DNA, 33 bp, Homo sapien
gaaacctggagtgaagaacatgaatccatctgt

SEQ ID NO: 991386 - DNA, 33 bp, Homo sapien
gaaacctggagtgaaggacatgaatccatctgt

SEQ ID NO: 991387 - DNA, 33 bp, Homo sapien
gagaaaggaagagctgcaattcagggttactgg

SEQ ID NO: 991388 - DNA, 33 bp, Homo sapien
gagaaaggaagagctggaattcagggttactgg

SEQ ID NO: 991389 - DNA, 33 bp, Homo sapien
atcatttaatttgctacaggtctatgattttta

SEQ ID NO: 991390 - DNA, 33 bp, Homo sapien
atcatttaatttgctataggtctatgattttta

SEQ ID NO: 991391 - DNA, 33 bp, Homo sapien
aaatctaggatgttcacaattgaaataagtgga

SEQ ID NO: 991392 - DNA, 33 bp, Homo sapien
aaatctaggatgttcagaattgaaataagtgga

SEQ ID NO: 991393 - DNA, 33 bp, Homo sapien
tctcacagaaggaaaacgatggctcagagagtc

SEQ ID NO: 991394 - DNA, 33 bp, Homo sapien
tctcacagaaggaaaatgatggctcagagagtc

SEQ ID NO: 991395 - DNA, 33 bp, Homo sapien
ggctgtgggcacgagaagattaggatttgctgt

SEQ ID NO: 991396 - DNA, 33 bp, Homo sapien
ggctgtgggcacgagaggattaggatttgctgt

SEQ ID NO: 991397 - DNA, 33 bp, Homo sapien
catgtgaatccccaaaccttcctctctacaaac

SEQ ID NO: 991398 - DNA, 33 bp, Homo sapien
catgtgaatccccaaatcttcctctctacaaac

SEQ ID NO: 991399 - DNA, 33 bp, Homo sapien
gcaaaattgaaaataaatctatggttttacctt

SEQ ID NO: 991400 - DNA, 33 bp, Homo sapien
gcaaaattgaaaataagtctatggttttacctt

SEQ ID NO: 991401 - DNA, 33 bp, Homo sapien
tttccccattaagagacgataacacatgaggta

SEQ ID NO: 991402 - DNA, 33 bp, Homo sapien
tttccccattaagagatgataacacatgaggta

SEQ ID NO: 991403 - DNA, 33 bp, Homo sapien
aattcctgaatacttcaatatgccacagttgag

SEQ ID NO: 991404 - DNA, 33 bp, Homo sapien
aattcctgaatacttccatatgccacagttgag

SEQ ID NO: 991405 - DNA, 33 bp, Homo sapien
caggcaattctttgaggatcaatctggttgaat

SEQ ID NO: 991406 - DNA, 33 bp, Homo sapien
caggcaattctttgagtatcaatctggttgaat

SEQ ID NO: 991407 - DNA, 33 bp, Homo sapien
cacagcactgttatacactcatatacccggcat

SEQ ID NO: 991408 - DNA, 33 bp, Homo sapien
cacagcactgttatacgctcatatacccggcat

SEQ ID NO: 991409 - DNA, 33 bp, Homo sapien
aggtggctaattgcctaaagacaggcttgatta

SEQ ID NO: 991410 - DNA, 33 bp, Homo sapien
aggtggctaattgcctgaagacaggcttgatta

SEQ ID NO: 991411 - DNA, 33 bp, Homo sapien
tatgccaaagatgttaagctactgggcttgtca

SEQ ID NO: 991412 - DNA, 33 bp, Homo sapien
tatgccaaagatgttaggctactgggcttgtca

SEQ ID NO: 991413 - DNA, 33 bp, Homo sapien
ctagtcattgttgaggaaattttccccttcacg

SEQ ID NO: 991414 - DNA, 33 bp, Homo sapien
ctagtcattgttgaggcaattttccccttcacg

SEQ ID NO: 991415 - DNA, 33 bp, Homo sapien
cttttctatttgttggacatatgaactatagcc

SEQ ID NO: 991416 - DNA, 33 bp, Homo sapien
cttttctatttgttgggcatatgaactatagcc

SEQ ID NO: 991417 - DNA, 33 bp, Homo sapien
caaagcgacctacagaatcaggagaagtattgt

SEQ ID NO: 991418 - DNA, 33 bp, Homo sapien
caaagcgacctacagattcaggagaagtattgt

SEQ ID NO: 991419 - DNA, 33 bp, Homo sapien
tcaaatcctgttcccaacgtttcttaattatat

SEQ ID NO: 991420 - DNA, 33 bp, Homo sapien
tcaaatcctgttcccatcgtttcttaattatat

SEQ ID NO: 991421 - DNA, 33 bp, Homo sapien
gaactgcaatatgtatgagagtcctatttctga

SEQ ID NO: 991422 - DNA, 33 bp, Homo sapien
gaactgcaatatgtattagagtcctatttctga

SEQ ID NO: 991423 - DNA, 33 bp, Homo sapien
tcagcattccccaaaactgccatgtgctcactc

SEQ ID NO: 991424 - DNA, 33 bp, Homo sapien
tcagcattccccaaaagtgccatgtgctcactc

SEQ ID NO: 991425 - DNA, 33 bp, Homo sapien
tcttaaatgctttccaataagctttgctggtag

SEQ ID NO: 991426 - DNA, 33 bp, Homo sapien
tcttaaatgctttccagtaagctttgctggtag

SEQ ID NO: 991427 - DNA, 33 bp, Homo sapien
aagcattctacaaatacatggaattacttacaa

SEQ ID NO: 991428 - DNA, 33 bp, Homo sapien
aagcattctacaaatatatggaattacttacaa

SEQ ID NO: 991429 - DNA, 33 bp, Homo sapien
aaatatggaacacaaacgtaactccaggaaaat

SEQ ID NO: 991430 - DNA, 33 bp, Homo sapien
aaatatggaacacaaatgtaactccaggaaaat

SEQ ID NO: 991431 - DNA, 33 bp, Homo sapien
ttcctcaattattttacgatttttggcactcca

SEQ ID NO: 991432 - DNA, 33 bp, Homo sapien
ttcctcaattattttatgatttttggcactcca

SEQ ID NO: 991433 - DNA, 33 bp, Homo sapien
acccaataaaggcttacaaatcctctgtgagct

SEQ ID NO: 991434 - DNA, 33 bp, Homo sapien
acccaataaaggcttagaaatcctctgtgagct

SEQ ID NO: 991435 - DNA, 33 bp, Homo sapien
acaacgctttccagatcaagttgttttgaggat

SEQ ID NO: 991436 - DNA, 33 bp, Homo sapien
acaacgctttccagatgaagttgttttgaggat

SEQ ID NO: 991437 - DNA, 33 bp, Homo sapien
tcaccgtgcaactgtacgcaactcatcctttct

SEQ ID NO: 991438 - DNA, 33 bp, Homo sapien
tcaccgtgcaactgtatgcaactcatcctttct

SEQ ID NO: 991439 - DNA, 33 bp, Homo sapien
aggcaattccagctgaataagtttgagggttct

SEQ ID NO: 991440 - DNA, 33 bp, Homo sapien
aggcaattccagctgagtaagtttgagggttct

SEQ ID NO: 991441 - DNA, 33 bp, Homo sapien
cttgtttatcaagagggagaagaattttactca

SEQ ID NO: 991442 - DNA, 33 bp, Homo sapien
cttgtttatcaagaggtagaagaattttactca

SEQ ID NO: 991443 - DNA, 33 bp, Homo sapien
agtggatggatccagaaaggacttgtgaatgaa

SEQ ID NO: 991444 - DNA, 33 bp, Homo sapien
agtggatggatccagagaggacttgtgaatgaa

SEQ ID NO: 991445 - DNA, 33 bp, Homo sapien
atcaagagagtatgacggattaagaaagaatac

SEQ ID NO: 991446 - DNA, 33 bp, Homo sapien
atcaagagagtatgactgattaagaaagaatac

SEQ ID NO: 991447 - DNA, 33 bp, Homo sapien
gccagttgtgaatgataaatatctccctgagtc

SEQ ID NO: 991448 - DNA, 33 bp, Homo sapien
gccagttgtgaatgatgaatatctccctgagtc

SEQ ID NO: 991449 - DNA, 33 bp, Homo sapien
tgtaatggggagagaccgcacatttgacaaatg

SEQ ID NO: 991450 - DNA, 33 bp, Homo sapien
tgtaatggggagagactgcacatttgacaaatg

SEQ ID NO: 991451 - DNA, 33 bp, Homo sapien
tgagctcctaaatatccctctagaagggcagat

SEQ ID NO: 991452 - DNA, 33 bp, Homo sapien
tgagctcctaaatatctctctagaagggcagat

SEQ ID NO: 991453 - DNA, 33 bp, Homo sapien
taagatgcagtgtaaaagtgtttgttctcactg

SEQ ID NO: 991454 - DNA, 33 bp, Homo sapien
taagatgcagtgtaaaggtgtttgttctcactg

SEQ ID NO: 991455 - DNA, 33 bp, Homo sapien
ctgctcttatccacagcagtgtatctcaatgtt

SEQ ID NO: 991456 - DNA, 33 bp, Homo sapien
ctgctcttatccacaggagtgtatctcaatgtt

SEQ ID NO: 991457 - DNA, 33 bp, Homo sapien
agacaactctataagcaaatgatcatattaaaa

SEQ ID NO: 991458 - DNA, 33 bp, Homo sapien
agacaactctataagccaatgatcatattaaaa

SEQ ID NO: 991459 - DNA, 33 bp, Homo sapien
gcagcccagccaggaacattgggatcatcttct

SEQ ID NO: 991460 - DNA, 33 bp, Homo sapien
gcagcccagccaggaatattgggatcatcttct

SEQ ID NO: 991461 - DNA, 33 bp, Homo sapien
ttaatcgatagtgaagcctctgatcccacaaat

SEQ ID NO: 991462 - DNA, 33 bp, Homo sapien
ttaatcgatagtgaaggctctgatcccacaaat

SEQ ID NO: 991463 - DNA, 33 bp, Homo sapien
gtattgtctcgccaaacggaaggcatttcttgt

SEQ ID NO: 991464 - DNA, 33 bp, Homo sapien
gtattgtctcgccaaatggaaggcatttcttgt

SEQ ID NO: 991465 - DNA, 33 bp, Homo sapien
tactcatgtggagaagaaaactgctggaaggac

SEQ ID NO: 991466 - DNA, 33 bp, Homo sapien
tactcatgtggagaaggaaactgctggaaggac

SEQ ID NO: 991467 - DNA, 33 bp, Homo sapien
tctcacagtagaaccacgaagtagagacattac

SEQ ID NO: 991468 - DNA, 33 bp, Homo sapien
tctcacagtagaaccatgaagtagagacattac

SEQ ID NO: 991469 - DNA, 33 bp, Homo sapien
ttgcaatggactaatgaatttcccctaacatct

SEQ ID NO: 991470 - DNA, 33 bp, Homo sapien
ttgcaatggactaatgtatttcccctaacatct

SEQ ID NO: 991471 - DNA, 33 bp, Homo sapien
cttcattctgcctcacaatctcgcttgcagctt

SEQ ID NO: 991472 - DNA, 33 bp, Homo sapien
cttcattctgcctcaccatctcgcttgcagctt

SEQ ID NO: 991473 - DNA, 33 bp, Homo sapien
tacaacatggatgtaacggtagcactccagaag

SEQ ID NO: 991474 - DNA, 33 bp, Homo sapien
tacaacatggatgtaatggtagcactccagaag

SEQ ID NO: 991475 - DNA, 33 bp, Homo sapien
cttgcatgttgtagataaggaagctaagtctca

SEQ ID NO: 991476 - DNA, 33 bp, Homo sapien
cttgcatgttgtagatgaggaagctaagtctca

SEQ ID NO: 991477 - DNA, 33 bp, Homo sapien
atgtagcaaatagggcaatccttgtaacaaaac

SEQ ID NO: 991478 - DNA, 33 bp, Homo sapien
atgtagcaaatagggcgatccttgtaacaaaac

SEQ ID NO: 991479 - DNA, 33 bp, Homo sapien
acacagacacaaacaaagttaggaagcattgca

SEQ ID NO: 991480 - DNA, 33 bp, Homo sapien
acacagacacaaacaaggttaggaagcattgca

SEQ ID NO: 991481 - DNA, 33 bp, Homo sapien
gattcaatgatcagaacctccatgacagaaatt

SEQ ID NO: 991482 - DNA, 33 bp, Homo sapien
gattcaatgatcagaatctccatgacagaaatt

SEQ ID NO: 991483 - DNA, 33 bp, Homo sapien
gagtacttgcctcatacggcagattcttcattc

SEQ ID NO: 991484 - DNA, 33 bp, Homo sapien
gagtacttgcctcatatggcagattcttcattc

SEQ ID NO: 991485 - DNA, 33 bp, Homo sapien
ctaccactctgggagcacctatatcaccccata

SEQ ID NO: 991486 - DNA, 33 bp, Homo sapien
ctaccactctgggagcgcctatatcaccccata

SEQ ID NO: 991487 - DNA, 33 bp, Homo sapien
aattagtgactaggaaagtgaagtgactatata

SEQ ID NO: 991488 - DNA, 33 bp, Homo sapien
aattagtgactaggaaggtgaagtgactatata

SEQ ID NO: 991489 - DNA, 33 bp, Homo sapien
attcttgctttatcacaaattagttataccttt

SEQ ID NO: 991490 - DNA, 33 bp, Homo sapien
attcttgctttatcacgaattagttataccttt

SEQ ID NO: 991491 - DNA, 33 bp, Homo sapien
ttgatgtggaggcctgcaagtgcatccttgaat

SEQ ID NO: 991492 - DNA, 33 bp, Homo sapien
ttgatgtggaggcctggaagtgcatccttgaat

SEQ ID NO: 991493 - DNA, 33 bp, Homo sapien
tacttacaaaaagaccagctaccaatgtaacac

SEQ ID NO: 991494 - DNA, 33 bp, Homo sapien
tacttacaaaaagaccggctaccaatgtaacac

SEQ ID NO: 991495 - DNA, 33 bp, Homo sapien
gcatttaatctggaacaaaataatctcccattt

SEQ ID NO: 991496 - DNA, 33 bp, Homo sapien
gcatttaatctggaaccaaataatctcccattt

SEQ ID NO: 991497 - DNA, 33 bp, Homo sapien
ggttcctctggaaagaatagttaattggttcta

SEQ ID NO: 991498 - DNA, 33 bp, Homo sapien
ggttcctctggaaagagtagttaattggttcta

SEQ ID NO: 991499 - DNA, 33 bp, Homo sapien
tttatgaacatctgcagagagggacgctgtcaa

SEQ ID NO: 991500 - DNA, 33 bp, Homo sapien
tttatgaacatctgcatagagggacgctgtcaa

SEQ ID NO: 991501 - DNA, 33 bp, Homo sapien
ctagaagctgctttacaaacacagtcagctgct

SEQ ID NO: 991502 - DNA, 33 bp, Homo sapien
ctagaagctgctttaccaacacagtcagctgct

SEQ ID NO: 991503 - DNA, 33 bp, Homo sapien
tctttttgctttgcaactgtaactctttgtatg

SEQ ID NO: 991504 - DNA, 33 bp, Homo sapien
tctttttgctttgcaattgtaactctttgtatg

SEQ ID NO: 991505 - DNA, 33 bp, Homo sapien
tttaataaattgcaccagaataatgattattta

SEQ ID NO: 991506 - DNA, 33 bp, Homo sapien
tttaataaattgcaccggaataatgattattta

SEQ ID NO: 991507 - DNA, 33 bp, Homo sapien
tcaatgtgaggagaatcaactttggaaacagaa

SEQ ID NO: 991508 - DNA, 33 bp, Homo sapien
tcaatgtgaggagaatgaactttggaaacagaa

SEQ ID NO: 991509 - DNA, 33 bp, Homo sapien
acatggttactgagcacggaaatgtgtccaggc

SEQ ID NO: 991510 - DNA, 33 bp, Homo sapien
acatggttactgagcatggaaatgtgtccaggc

SEQ ID NO: 991511 - DNA, 33 bp, Homo sapien
gtctgtgttcttgaggacaaaactgtgtcttat

SEQ ID NO: 991512 - DNA, 33 bp, Homo sapien
gtctgtgttcttgagggcaaaactgtgtcttat

SEQ ID NO: 991513 - DNA, 33 bp, Homo sapien
atagtgacagtaccaactgaccaggtgtccaca

SEQ ID NO: 991514 - DNA, 33 bp, Homo sapien
atagtgacagtaccaattgaccaggtgtccaca

SEQ ID NO: 991515 - DNA, 33 bp, Homo sapien
agttgagaattgctaccgagactgttttgcctg

SEQ ID NO: 991516 - DNA, 33 bp, Homo sapien
agttgagaattgctactgagactgttttgcctg

SEQ ID NO: 991517 - DNA, 33 bp, Homo sapien
agaagaggaaagtttggaagattactgaagaaa

SEQ ID NO: 991518 - DNA, 33 bp, Homo sapien
agaagaggaaagtttgtaagattactgaagaaa

SEQ ID NO: 991519 - DNA, 33 bp, Homo sapien
ttcacccagaatctaactggcctcgcttgtgaa

SEQ ID NO: 991520 - DNA, 33 bp, Homo sapien
ttcacccagaatctaattggcctcgcttgtgaa

SEQ ID NO: 991521 - DNA, 33 bp, Homo sapien
cctgttcacaaccaaggccccttctcctttccc

SEQ ID NO: 991522 - DNA, 33 bp, Homo sapien
cctgttcacaaccaagtccccttctcctttccc

SEQ ID NO: 991523 - DNA, 33 bp, Homo sapien
tgtgtaggacaagaaaacaccagctggcacctg

SEQ ID NO: 991524 - DNA, 33 bp, Homo sapien
tgtgtaggacaagaaatcaccagctggcacctg

SEQ ID NO: 991525 - DNA, 33 bp, Homo sapien
aggcagggaaatgatacgacagatttgcatttt

SEQ ID NO: 991526 - DNA, 33 bp, Homo sapien
aggcagggaaatgatatgacagatttgcatttt

SEQ ID NO: 991527 - DNA, 33 bp, Homo sapien
ggaattgtgatatacagaaaggctatcatcatt

SEQ ID NO: 991528 - DNA, 33 bp, Homo sapien
ggaattgtgatatacataaaggctatcatcatt

SEQ ID NO: 991529 - DNA, 33 bp, Homo sapien
aagttctgtttgctaaatgattgtaacacagtg

SEQ ID NO: 991530 - DNA, 33 bp, Homo sapien
aagttctgtttgctaagtgattgtaacacagtg

SEQ ID NO: 991531 - DNA, 33 bp, Homo sapien
acatttctgattattacaacttgggggatgagt

SEQ ID NO: 991532 - DNA, 33 bp, Homo sapien
acatttctgattattataacttgggggatgagt

SEQ ID NO: 991533 - DNA, 33 bp, Homo sapien
gcaatgcatagaacagcctagcaagcaaagaat

SEQ ID NO: 991534 - DNA, 33 bp, Homo sapien
gcaatgcatagaacagtctagcaagcaaagaat

SEQ ID NO: 991535 - DNA, 33 bp, Homo sapien
attatctggctcaacacatcaatagtactgagg

SEQ ID NO: 991536 - DNA, 33 bp, Homo sapien
attatctggctcaacatatcaatagtactgagg

SEQ ID NO: 991537 - DNA, 33 bp, Homo sapien
aaagagatgtcaaaaacccgtcatggttctaaa

SEQ ID NO: 991538 - DNA, 33 bp, Homo sapien
aaagagatgtcaaaaatccgtcatggttctaaa

SEQ ID NO: 991539 - DNA, 33 bp, Homo sapien
aaaaagtacataaacaccatttgagaagactaa

SEQ ID NO: 991540 - DNA, 33 bp, Homo sapien
aaaaagtacataaacagcatttgagaagactaa

SEQ ID NO: 991541 - DNA, 33 bp, Homo sapien
gattattgtatgaagaagcattccaatatctga

SEQ ID NO: 991542 - DNA, 33 bp, Homo sapien
gattattgtatgaagaggcattccaatatctga

SEQ ID NO: 991543 - DNA, 33 bp, Homo sapien
gaatgatgcagagacaatgaagagtcaagagag

SEQ ID NO: 991544 - DNA, 33 bp, Homo sapien
gaatgatgcagagacagtgaagagtcaagagag

SEQ ID NO: 991545 - DNA, 33 bp, Homo sapien
caaggagcacactgtacagtccataatgtccaa

SEQ ID NO: 991546 - DNA, 33 bp, Homo sapien
caaggagcacactgtatagtccataatgtccaa

SEQ ID NO: 991547 - DNA, 33 bp, Homo sapien
cctgtccaattaaagaaatgcccatatggagca

SEQ ID NO: 991548 - DNA, 33 bp, Homo sapien
cctgtccaattaaagagatgcccatatggagca

SEQ ID NO: 991549 - DNA, 33 bp, Homo sapien
ggagggaataagactacgcaatggacatgaacg

SEQ ID NO: 991550 - DNA, 33 bp, Homo sapien
ggagggaataagactatgcaatggacatgaacg

SEQ ID NO: 991551 - DNA, 33 bp, Homo sapien
tccatagtgctttgtacgtgtagagtttaattt

SEQ ID NO: 991552 - DNA, 33 bp, Homo sapien
tccatagtgctttgtatgtgtagagtttaattt

SEQ ID NO: 991553 - DNA, 33 bp, Homo sapien
gaacacctacaaacagaaagataaatgtcaata

SEQ ID NO: 991554 - DNA, 33 bp, Homo sapien
gaacacctacaaacaggaagataaatgtcaata

SEQ ID NO: 991555 - DNA, 33 bp, Homo sapien
ctcttctttctctccaaaatctccaaacagcat

SEQ ID NO: 991556 - DNA, 33 bp, Homo sapien
ctcttctttctctccagaatctccaaacagcat

SEQ ID NO: 991557 - DNA, 33 bp, Homo sapien
cctctgtgtcctattcaagttcctgccccatga

SEQ ID NO: 991558 - DNA, 33 bp, Homo sapien
cctctgtgtcctattcgagttcctgccccatga

SEQ ID NO: 991559 - DNA, 33 bp, Homo sapien
ggggaaacagttggcacgagctaggaagtaatt

SEQ ID NO: 991560 - DNA, 33 bp, Homo sapien
ggggaaacagttggcaggagctaggaagtaatt

SEQ ID NO: 991561 - DNA, 33 bp, Homo sapien
cttcctctgtgtaaaacgctttaaaagctttcc

SEQ ID NO: 991562 - DNA, 33 bp, Homo sapien
cttcctctgtgtaaaatgctttaaaagctttcc

SEQ ID NO: 991563 - DNA, 33 bp, Homo sapien
ttacacagaggaaggacgtgattccaatttcat

SEQ ID NO: 991564 - DNA, 33 bp, Homo sapien
ttacacagaggaaggatgtgattccaatttcat

SEQ ID NO: 991565 - DNA, 33 bp, Homo sapien
tggtctactggctgcaatgaacacatatttccc

SEQ ID NO: 991566 - DNA, 33 bp, Homo sapien
tggtctactggctgcactgaacacatatttccc

SEQ ID NO: 991567 - DNA, 33 bp, Homo sapien
gtgcctggatgagatccgacttggagaattctt

SEQ ID NO: 991568 - DNA, 33 bp, Homo sapien
gtgcctggatgagatctgacttggagaattctt

SEQ ID NO: 991569 - DNA, 33 bp, Homo sapien
gtggattcttcatgacaacaaagtatcaagagc

SEQ ID NO: 991570 - DNA, 33 bp, Homo sapien
gtggattcttcatgactacaaagtatcaagagc

SEQ ID NO: 991571 - DNA, 33 bp, Homo sapien
aacgcatttacccaaactgattgtcacatctgt

SEQ ID NO: 991572 - DNA, 33 bp, Homo sapien
aacgcatttacccaaattgattgtcacatctgt

SEQ ID NO: 991573 - DNA, 33 bp, Homo sapien
actacagccttgctacaaaaagcatttctccct

SEQ ID NO: 991574 - DNA, 33 bp, Homo sapien
actacagccttgctaccaaaagcatttctccct

SEQ ID NO: 991575 - DNA, 33 bp, Homo sapien
tatggtagatggaaaccgtgatgaacaacacta

SEQ ID NO: 991576 - DNA, 33 bp, Homo sapien
tatggtagatggaaactgtgatgaacaacacta

SEQ ID NO: 991577 - DNA, 33 bp, Homo sapien
tgcaggctataactgacggatccaggtttcaaa

SEQ ID NO: 991578 - DNA, 33 bp, Homo sapien
tgcaggctataactgatggatccaggtttcaaa

SEQ ID NO: 991579 - DNA, 33 bp, Homo sapien
gtttggaagtactgataagcaggtggttagagt

SEQ ID NO: 991580 - DNA, 33 bp, Homo sapien
gtttggaagtactgattagcaggtggttagagt

SEQ ID NO: 991581 - DNA, 33 bp, Homo sapien
atttaggatactatcccgcgaattacatctcac

SEQ ID NO: 991582 - DNA, 33 bp, Homo sapien
atttaggatactatcctgcgaattacatctcac

SEQ ID NO: 991583 - DNA, 33 bp, Homo sapien
aagccatttctaataccatgacgctataaagaa

SEQ ID NO: 991584 - DNA, 33 bp, Homo sapien
aagccatttctaatactatgacgctataaagaa

SEQ ID NO: 991585 - DNA, 33 bp, Homo sapien
cactctttacctaacaccattttctctggaatt

SEQ ID NO: 991586 - DNA, 33 bp, Homo sapien
cactctttacctaacatcattttctctggaatt

SEQ ID NO: 991587 - DNA, 33 bp, Homo sapien
gatttttcttcagacacactttctccttctgtc

SEQ ID NO: 991588 - DNA, 33 bp, Homo sapien
gatttttcttcagacatactttctccttctgtc

SEQ ID NO: 991589 - DNA, 33 bp, Homo sapien
tagttactaggatgaaaaaggcaagagagaaat

SEQ ID NO: 991590 - DNA, 33 bp, Homo sapien
tagttactaggatgaagaaggcaagagagaaat

SEQ ID NO: 991591 - DNA, 33 bp, Homo sapien
aagtcccagagaacaccgtggcttctgcttact

SEQ ID NO: 991592 - DNA, 33 bp, Homo sapien
aagtcccagagaacactgtggcttctgcttact

SEQ ID NO: 991593 - DNA, 33 bp, Homo sapien
tagagcatgaatcaggcccctggcaaggagaag

SEQ ID NO: 991594 - DNA, 33 bp, Homo sapien
tagagcatgaatcaggtccctggcaaggagaag

SEQ ID NO: 991595 - DNA, 33 bp, Homo sapien
cttcaaggacataataacaagcagtaggtatat

SEQ ID NO: 991596 - DNA, 33 bp, Homo sapien
cttcaaggacataataccaagcagtaggtatat

SEQ ID NO: 991597 - DNA, 33 bp, Homo sapien
caagcgctgggctagaagtgtaagtaaatgaag

SEQ ID NO: 991598 - DNA, 33 bp, Homo sapien
caagcgctgggctagaggtgtaagtaaatgaag

SEQ ID NO: 991599 - DNA, 33 bp, Homo sapien
aaaatctctaacctgaagaaacctatagtccaa

SEQ ID NO: 991600 - DNA, 33 bp, Homo sapien
aaaatctctaacctgaggaaacctatagtccaa

SEQ ID NO: 991601 - DNA, 33 bp, Homo sapien
attctctccaccaagccgctggttatgtcattt

SEQ ID NO: 991602 - DNA, 33 bp, Homo sapien
attctctccaccaagctgctggttatgtcattt

SEQ ID NO: 991603 - DNA, 33 bp, Homo sapien
gctgactgccatctcaagggaggcctcaagcca

SEQ ID NO: 991604 - DNA, 33 bp, Homo sapien
gctgactgccatctcatgggaggcctcaagcca

SEQ ID NO: 991605 - DNA, 33 bp, Homo sapien
tcaggcatggctgagacaagaggatctacttcc

SEQ ID NO: 991606 - DNA, 33 bp, Homo sapien
tcaggcatggctgagagaagaggatctacttcc

SEQ ID NO: 991607 - DNA, 33 bp, Homo sapien
gtagctgctcaataaaagtgtacagactgggtg

SEQ ID NO: 991608 - DNA, 33 bp, Homo sapien
gtagctgctcaataaatgtgtacagactgggtg

SEQ ID NO: 991609 - DNA, 33 bp, Homo sapien
agctggatcctgaagaagattaaggtagaattt

SEQ ID NO: 991610 - DNA, 33 bp, Homo sapien
agctggatcctgaagaggattaaggtagaattt

SEQ ID NO: 991611 - DNA, 33 bp, Homo sapien
tccatggcaacttcaaatctatacaccccaggg

SEQ ID NO: 991612 - DNA, 33 bp, Homo sapien
tccatggcaacttcaactctatacaccccaggg

SEQ ID NO: 991613 - DNA, 33 bp, Homo sapien
tggtttctaaggccaacagtggcgcctttctct

SEQ ID NO: 991614 - DNA, 33 bp, Homo sapien
tggtttctaaggccaagagtggcgcctttctct

SEQ ID NO: 991615 - DNA, 33 bp, Homo sapien
aaatgccacctctttcacaagttctgtccatcc

SEQ ID NO: 991616 - DNA, 33 bp, Homo sapien
aaatgccacctctttcccaagttctgtccatcc

SEQ ID NO: 991617 - DNA, 33 bp, Homo sapien
aggagctgcttgattaccgtgaattgaattctt

SEQ ID NO: 991618 - DNA, 33 bp, Homo sapien
aggagctgcttgattatcgtgaattgaattctt

SEQ ID NO: 991619 - DNA, 33 bp, Homo sapien
gtatggaaggcttatcccacagagctacaggga

SEQ ID NO: 991620 - DNA, 33 bp, Homo sapien
gtatggaaggcttatctcacagagctacaggga

SEQ ID NO: 991621 - DNA, 33 bp, Homo sapien
tcaaccgagcccagtcaaaattatccacctgta

SEQ ID NO: 991622 - DNA, 33 bp, Homo sapien
tcaaccgagcccagtcgaaattatccacctgta

SEQ ID NO: 991623 - DNA, 33 bp, Homo sapien
agcccagttcctgttaccatcttcccattcttc

SEQ ID NO: 991624 - DNA, 33 bp, Homo sapien
agcccagttcctgttatcatcttcccattcttc

SEQ ID NO: 991625 - DNA, 33 bp, Homo sapien
ctgatagggaaaagtgaaagcgagatttgaacc

SEQ ID NO: 991626 - DNA, 33 bp, Homo sapien
ctgatagggaaaagtggaagcgagatttgaacc

SEQ ID NO: 991627 - DNA, 33 bp, Homo sapien
caggcttagatgttgaaacttaaaaaacataac

SEQ ID NO: 991628 - DNA, 33 bp, Homo sapien
caggcttagatgttgagacttaaaaaacataac

SEQ ID NO: 991629 - DNA, 33 bp, Homo sapien
ctttagattctgcctccgaaacactctaggctc

SEQ ID NO: 991630 - DNA, 33 bp, Homo sapien
ctttagattctgcctctgaaacactctaggctc

SEQ ID NO: 991631 - DNA, 33 bp, Homo sapien
tacctccataagtttgaagcctagatcggagca

SEQ ID NO: 991632 - DNA, 33 bp, Homo sapien
tacctccataagtttgtagcctagatcggagca

SEQ ID NO: 991633 - DNA, 33 bp, Homo sapien
tgaccctaaacagagcacatctcttctggtgcc

SEQ ID NO: 991634 - DNA, 33 bp, Homo sapien
tgaccctaaacagagcccatctcttctggtgcc

SEQ ID NO: 991635 - DNA, 33 bp, Homo sapien
catccaataagacataaaacaggtggccaggtg

SEQ ID NO: 991636 - DNA, 33 bp, Homo sapien
catccaataagacatagaacaggtggccaggtg

SEQ ID NO: 991637 - DNA, 33 bp, Homo sapien
tgtgactaaacaatgccacagtgttgcctgtct

SEQ ID NO: 991638 - DNA, 33 bp, Homo sapien
tgtgactaaacaatgctacagtgttgcctgtct

SEQ ID NO: 991639 - DNA, 33 bp, Homo sapien
ggctggagtgcatgacaaatgttctttgtagat

SEQ ID NO: 991640 - DNA, 33 bp, Homo sapien
ggctggagtgcatgacgaatgttctttgtagat

SEQ ID NO: 991641 - DNA, 33 bp, Homo sapien
attggttcatgagataacttggcagggtgcagt

SEQ ID NO: 991642 - DNA, 33 bp, Homo sapien
attggttcatgagataccttggcagggtgcagt

SEQ ID NO: 991643 - DNA, 33 bp, Homo sapien
agcacaggcctagctactacttgaagaagcccc

SEQ ID NO: 991644 - DNA, 33 bp, Homo sapien
agcacaggcctagctattacttgaagaagcccc

SEQ ID NO: 991645 - DNA, 33 bp, Homo sapien
tgctgaagccacccagaaagatgctcctgcaga

SEQ ID NO: 991646 - DNA, 33 bp, Homo sapien
tgctgaagccacccagcaagatgctcctgcaga

SEQ ID NO: 991647 - DNA, 33 bp, Homo sapien
ttttgaatggagaaacaaaaagtaggctcataa

SEQ ID NO: 991648 - DNA, 33 bp, Homo sapien
ttttgaatggagaaacgaaaagtaggctcataa

SEQ ID NO: 991649 - DNA, 33 bp, Homo sapien
cccttcactgggttcacaatctagctaagaaaa

SEQ ID NO: 991650 - DNA, 33 bp, Homo sapien
cccttcactgggttcataatctagctaagaaaa

SEQ ID NO: 991651 - DNA, 33 bp, Homo sapien
tgtggcttattagctccattttataggaggtga

SEQ ID NO: 991652 - DNA, 33 bp, Homo sapien
tgtggcttattagctctattttataggaggtga

SEQ ID NO: 991653 - DNA, 33 bp, Homo sapien
tacccaagaagttcagccgagtggatgagacag

SEQ ID NO: 991654 - DNA, 33 bp, Homo sapien
tacccaagaagttcagtcgagtggatgagacag

SEQ ID NO: 991655 - DNA, 33 bp, Homo sapien
ttttcctttctagaataatccttgctcttaccc

SEQ ID NO: 991656 - DNA, 33 bp, Homo sapien
ttttcctttctagaatgatccttgctcttaccc

SEQ ID NO: 991657 - DNA, 33 bp, Homo sapien
aataatctccatttatcaagccatgctgtctac

SEQ ID NO: 991658 - DNA, 33 bp, Homo sapien
aataatctccatttattaagccatgctgtctac

SEQ ID NO: 991659 - DNA, 33 bp, Homo sapien
taacattacgtttagcgctgagcttcctaatta

SEQ ID NO: 991660 - DNA, 33 bp, Homo sapien
taacattacgtttagctctgagcttcctaatta

SEQ ID NO: 991661 - DNA, 33 bp, Homo sapien
tgtccactgtagaggaagaggaacatagaaaag

SEQ ID NO: 991662 - DNA, 33 bp, Homo sapien
tgtccactgtagaggaggaggaacatagaaaag

SEQ ID NO: 991663 - DNA, 33 bp, Homo sapien
ggacacagatggatgaacaagatctccctcttc

SEQ ID NO: 991664 - DNA, 33 bp, Homo sapien
ggacacagatggatgagcaagatctccctcttc

SEQ ID NO: 991665 - DNA, 33 bp, Homo sapien
gctgtatcagcaaaaccgctaagccctgaccca

SEQ ID NO: 991666 - DNA, 33 bp, Homo sapien
gctgtatcagcaaaactgctaagccctgaccca

SEQ ID NO: 991667 - DNA, 33 bp, Homo sapien
ctgcttcggagtcctaactctaaacctcacttg

SEQ ID NO: 991668 - DNA, 33 bp, Homo sapien
ctgcttcggagtcctatctctaaacctcacttg

SEQ ID NO: 991669 - DNA, 33 bp, Homo sapien
gggccttgaagctgtacgtagcttggtgtccat

SEQ ID NO: 991670 - DNA, 33 bp, Homo sapien
gggccttgaagctgtatgtagcttggtgtccat

SEQ ID NO: 991671 - DNA, 33 bp, Homo sapien
tgcatgtatatgcgtacctatctccaatgcatg

SEQ ID NO: 991672 - DNA, 33 bp, Homo sapien
tgcatgtatatgcgtatctatctccaatgcatg

SEQ ID NO: 991673 - DNA, 33 bp, Homo sapien
agaaatgtacccattcactctttcctgacctaa

SEQ ID NO: 991674 - DNA, 33 bp, Homo sapien
agaaatgtacccattcgctctttcctgacctaa

SEQ ID NO: 991675 - DNA, 33 bp, Homo sapien
caaagcacttcatctccctaaaacttcactgct

SEQ ID NO: 991676 - DNA, 33 bp, Homo sapien
caaagcacttcatctctctaaaacttcactgct

SEQ ID NO: 991677 - DNA, 33 bp, Homo sapien
tcaagaccattcctcactcaaaccacttccacc

SEQ ID NO: 991678 - DNA, 33 bp, Homo sapien
tcaagaccattcctcattcaaaccacttccacc

SEQ ID NO: 991679 - DNA, 33 bp, Homo sapien
gtctcactgcgaaagtaacagagctagaattta

SEQ ID NO: 991680 - DNA, 33 bp, Homo sapien
gtctcactgcgaaagtgacagagctagaattta

SEQ ID NO: 991681 - DNA, 33 bp, Homo sapien
ttcacaaggagcatagacatctggagaatgata

SEQ ID NO: 991682 - DNA, 33 bp, Homo sapien
ttcacaaggagcatagccatctggagaatgata

SEQ ID NO: 991683 - DNA, 33 bp, Homo sapien
ccctcatggggaggtacctgtttactcgctgtt

SEQ ID NO: 991684 - DNA, 33 bp, Homo sapien
ccctcatggggaggtatctgtttactcgctgtt

SEQ ID NO: 991685 - DNA, 33 bp, Homo sapien
ttttggtagagtcagcccaaaatacagtctttg

SEQ ID NO: 991686 - DNA, 33 bp, Homo sapien
ttttggtagagtcagctcaaaatacagtctttg

SEQ ID NO: 991687 - DNA, 33 bp, Homo sapien
acagccactacctaaacagtacccaggacagga

SEQ ID NO: 991688 - DNA, 33 bp, Homo sapien
acagccactacctaaagagtacccaggacagga

SEQ ID NO: 991689 - DNA, 33 bp, Homo sapien
agtggttctcaacaaacggagatttttacacac

SEQ ID NO: 991690 - DNA, 33 bp, Homo sapien
agtggttctcaacaaagggagatttttacacac

SEQ ID NO: 991691 - DNA, 33 bp, Homo sapien
ttgggcccttgttcaaagttcagttgaccattt

SEQ ID NO: 991692 - DNA, 33 bp, Homo sapien
ttgggcccttgttcaaggttcagttgaccattt

SEQ ID NO: 991693 - DNA, 33 bp, Homo sapien
caaatcctggctctcacctacctctggcgcctg

SEQ ID NO: 991694 - DNA, 33 bp, Homo sapien
caaatcctggctctcatctacctctggcgcctg

SEQ ID NO: 991695 - DNA, 33 bp, Homo sapien
gtcgattcctaacttccctcggtgatcctttta

SEQ ID NO: 991696 - DNA, 33 bp, Homo sapien
gtcgattcctaacttctctcggtgatcctttta

SEQ ID NO: 991697 - DNA, 33 bp, Homo sapien
ggcctaagctggacacagaaaagaacattttac

SEQ ID NO: 991698 - DNA, 33 bp, Homo sapien
ggcctaagctggacaccgaaaagaacattttac

SEQ ID NO: 991699 - DNA, 33 bp, Homo sapien
ctgttctccaaaccacagaacaacttgaaggat

SEQ ID NO: 991700 - DNA, 33 bp, Homo sapien
ctgttctccaaaccacggaacaacttgaaggat

SEQ ID NO: 991701 - DNA, 33 bp, Homo sapien
agaatggctgaatttgcactgtgagggaactca

SEQ ID NO: 991702 - DNA, 33 bp, Homo sapien
agaatggctgaatttgtactgtgagggaactca

SEQ ID NO: 991703 - DNA, 33 bp, Homo sapien
gatgtcaggcagttcacgttacagaaagctctt

SEQ ID NO: 991704 - DNA, 33 bp, Homo sapien
gatgtcaggcagttcaggttacagaaagctctt

SEQ ID NO: 991705 - DNA, 33 bp, Homo sapien
gacacacacgtaaataaattagcaaggcagctt

SEQ ID NO: 991706 - DNA, 33 bp, Homo sapien
gacacacacgtaaatacattagcaaggcagctt

SEQ ID NO: 991707 - DNA, 33 bp, Homo sapien
tgtcaccttaatcacaaatgttaggatttatta

SEQ ID NO: 991708 - DNA, 33 bp, Homo sapien
tgtcaccttaatcacagatgttaggatttatta

SEQ ID NO: 991709 - DNA, 33 bp, Homo sapien
gataccaacacatctaaggaaggaatatgacaa

SEQ ID NO: 991710 - DNA, 33 bp, Homo sapien
gataccaacacatctatggaaggaatatgacaa

SEQ ID NO: 991711 - DNA, 33 bp, Homo sapien
actgaacacatgttaccagatgacagtgttggg

SEQ ID NO: 991712 - DNA, 33 bp, Homo sapien
actgaacacatgttactagatgacagtgttggg

SEQ ID NO: 991713 - DNA, 33 bp, Homo sapien
atctcctagtgaatgcaccacttgtagcagaag

SEQ ID NO: 991714 - DNA, 33 bp, Homo sapien
atctcctagtgaatgcgccacttgtagcagaag

SEQ ID NO: 991715 - DNA, 33 bp, Homo sapien
catttcttcctcagtgcaaggcagcctgctaag

SEQ ID NO: 991716 - DNA, 33 bp, Homo sapien
catttcttcctcagtgtaaggcagcctgctaag

SEQ ID NO: 991717 - DNA, 33 bp, Homo sapien
tcccggcatggagaaaatcccctccaccatcct

SEQ ID NO: 991718 - DNA, 33 bp, Homo sapien
tcccggcatggagaaagtcccctccaccatcct

SEQ ID NO: 991719 - DNA, 33 bp, Homo sapien
gaggccaggcaggcaacaaaaataagtgatgtg

SEQ ID NO: 991720 - DNA, 33 bp, Homo sapien
gaggccaggcaggcaataaaaataagtgatgtg

SEQ ID NO: 991721 - DNA, 33 bp, Homo sapien
ttctcatagttctcaaagctaaaagtccaagat

SEQ ID NO: 991722 - DNA, 33 bp, Homo sapien
ttctcatagttctcaaggctaaaagtccaagat

SEQ ID NO: 991723 - DNA, 33 bp, Homo sapien
ccattcatgaggactcaacactcgtgactggat

SEQ ID NO: 991724 - DNA, 33 bp, Homo sapien
ccattcatgaggactccacactcgtgactggat

SEQ ID NO: 991725 - DNA, 33 bp, Homo sapien
attcattattttgcgacatcttcagactctcat

SEQ ID NO: 991726 - DNA, 33 bp, Homo sapien
attcattattttgcgatatcttcagactctcat

SEQ ID NO: 991727 - DNA, 33 bp, Homo sapien
tgtctttgagctactaaaatactgaggtttatt

SEQ ID NO: 991728 - DNA, 33 bp, Homo sapien
tgtctttgagctactagaatactgaggtttatt

SEQ ID NO: 991729 - DNA, 33 bp, Homo sapien
cagataatctccaagaccccctctctgatgttc

SEQ ID NO: 991730 - DNA, 33 bp, Homo sapien
cagataatctccaagagcccctctctgatgttc

SEQ ID NO: 991731 - DNA, 33 bp, Homo sapien
cgactgtgatcaagaaaatgccatgaaagattg

SEQ ID NO: 991732 - DNA, 33 bp, Homo sapien
cgactgtgatcaagaagatgccatgaaagattg

SEQ ID NO: 991733 - DNA, 33 bp, Homo sapien
tactcagtataatcagcccccacaaacagaaat

SEQ ID NO: 991734 - DNA, 33 bp, Homo sapien
tactcagtataatcagtccccacaaacagaaat

SEQ ID NO: 991735 - DNA, 33 bp, Homo sapien
ttccaaaagtagttgaggtatcaggcaatgcat

SEQ ID NO: 991736 - DNA, 33 bp, Homo sapien
ttccaaaagtagttgatgtatcaggcaatgcat

SEQ ID NO: 991737 - DNA, 33 bp, Homo sapien
aactgtagtgtgcaaacaaagaccttgtggatc

SEQ ID NO: 991738 - DNA, 33 bp, Homo sapien
aactgtagtgtgcaaagaaagaccttgtggatc

SEQ ID NO: 991739 - DNA, 33 bp, Homo sapien
gccatgtggaaagacacgttcaatgctgagatg

SEQ ID NO: 991740 - DNA, 33 bp, Homo sapien
gccatgtggaaagacatgttcaatgctgagatg

SEQ ID NO: 991741 - DNA, 33 bp, Homo sapien
tcccatgttaagaagacgtatttgaaagtgatt

SEQ ID NO: 991742 - DNA, 33 bp, Homo sapien
tcccatgttaagaagatgtatttgaaagtgatt

SEQ ID NO: 991743 - DNA, 33 bp, Homo sapien
ataactggatccttgccacaaatgcttttattg

SEQ ID NO: 991744 - DNA, 33 bp, Homo sapien
ataactggatccttgctacaaatgcttttattg

SEQ ID NO: 991745 - DNA, 33 bp, Homo sapien
cgtactccatgtgacaactcaactggtatttga

SEQ ID NO: 991746 - DNA, 33 bp, Homo sapien
cgtactccatgtgacatctcaactggtatttga

SEQ ID NO: 991747 - DNA, 33 bp, Homo sapien
gtgtgaggaatactaactggtaatggtagttct

SEQ ID NO: 991748 - DNA, 33 bp, Homo sapien
gtgtgaggaatactaagtggtaatggtagttct

SEQ ID NO: 991749 - DNA, 33 bp, Homo sapien
aagcaagtgttagctcaaaccttctcactcttg

SEQ ID NO: 991750 - DNA, 33 bp, Homo sapien
aagcaagtgttagctcgaaccttctcactcttg

SEQ ID NO: 991751 - DNA, 33 bp, Homo sapien
gagctgggatctgaagaccgggagcctggctcc

SEQ ID NO: 991752 - DNA, 33 bp, Homo sapien
gagctgggatctgaagtccgggagcctggctcc

SEQ ID NO: 991753 - DNA, 33 bp, Homo sapien
ttagtttctccatctccaatcacgtagattaca

SEQ ID NO: 991754 - DNA, 33 bp, Homo sapien
ttagtttctccatctctaatcacgtagattaca

SEQ ID NO: 991755 - DNA, 33 bp, Homo sapien
cttcgctgattaagtgaatgtatgagccgatcc

SEQ ID NO: 991756 - DNA, 33 bp, Homo sapien
cttcgctgattaagtggatgtatgagccgatcc

SEQ ID NO: 991757 - DNA, 33 bp, Homo sapien
ttcatttatctgacaaatcaagccccagtagga

SEQ ID NO: 991758 - DNA, 33 bp, Homo sapien
ttcatttatctgacaagtcaagccccagtagga

SEQ ID NO: 991759 - DNA, 33 bp, Homo sapien
gattattcaaactccacctgtcctcaagttcca

SEQ ID NO: 991760 - DNA, 33 bp, Homo sapien
gattattcaaactccatctgtcctcaagttcca

SEQ ID NO: 991761 - DNA, 33 bp, Homo sapien
ttgaagaaactcaactaaaagagaacataaaca

SEQ ID NO: 991762 - DNA, 33 bp, Homo sapien
ttgaagaaactcaacttaaagagaacataaaca

SEQ ID NO: 991763 - DNA, 33 bp, Homo sapien
aaaagggtaggaataacagtttcacatcactca

SEQ ID NO: 991764 - DNA, 33 bp, Homo sapien
aaaagggtaggaataagagtttcacatcactca

SEQ ID NO: 991765 - DNA, 33 bp, Homo sapien
tttgcagcctgtacacaagtcccaggctgcttt

SEQ ID NO: 991766 - DNA, 33 bp, Homo sapien
tttgcagcctgtacacgagtcccaggctgcttt

SEQ ID NO: 991767 - DNA, 33 bp, Homo sapien
gctggtcaggtaaccaactccattcattcagtg

SEQ ID NO: 991768 - DNA, 33 bp, Homo sapien
gctggtcaggtaaccacctccattcattcagtg

SEQ ID NO: 991769 - DNA, 33 bp, Homo sapien
agttcctagcttgtgacggatccttcctaagga

SEQ ID NO: 991770 - DNA, 33 bp, Homo sapien
agttcctagcttgtgatggatccttcctaagga

SEQ ID NO: 991771 - DNA, 33 bp, Homo sapien
tataaaacagtacataactcttccagaaaaagt

SEQ ID NO: 991772 - DNA, 33 bp, Homo sapien
tataaaacagtacatacctcttccagaaaaagt

SEQ ID NO: 991773 - DNA, 33 bp, Homo sapien
gtaaagacaattgtaacgggcagagaagacaga

SEQ ID NO: 991774 - DNA, 33 bp, Homo sapien
gtaaagacaattgtaatgggcagagaagacaga

SEQ ID NO: 991775 - DNA, 33 bp, Homo sapien
catacgaagtcttgtacgaaccttcagagcaga

SEQ ID NO: 991776 - DNA, 33 bp, Homo sapien
catacgaagtcttgtatgaaccttcagagcaga

SEQ ID NO: 991777 - DNA, 33 bp, Homo sapien
gttttctctgggacgacggcagaggaaactatg

SEQ ID NO: 991778 - DNA, 33 bp, Homo sapien
gttttctctgggacgatggcagaggaaactatg

SEQ ID NO: 991779 - DNA, 33 bp, Homo sapien
caaactgtttatttacaaattgagcattgcacg

SEQ ID NO: 991780 - DNA, 33 bp, Homo sapien
caaactgtttatttacgaattgagcattgcacg

SEQ ID NO: 991781 - DNA, 33 bp, Homo sapien
tggccttcagaaacacactaaacaaaaattaac

SEQ ID NO: 991782 - DNA, 33 bp, Homo sapien
tggccttcagaaacacgctaaacaaaaattaac

SEQ ID NO: 991783 - DNA, 33 bp, Homo sapien
gtgacagcgctattgacagtccttcctgcagta

SEQ ID NO: 991784 - DNA, 33 bp, Homo sapien
gtgacagcgctattgatagtccttcctgcagta

SEQ ID NO: 991785 - DNA, 33 bp, Homo sapien
atttactctggtggaacgtgtgggctcacgtgg

SEQ ID NO: 991786 - DNA, 33 bp, Homo sapien
atttactctggtggaatgtgtgggctcacgtgg

SEQ ID NO: 991787 - DNA, 33 bp, Homo sapien
gcctctgtttctctgacagtaaaatctgggtat

SEQ ID NO: 991788 - DNA, 33 bp, Homo sapien
gcctctgtttctctgatagtaaaatctgggtat

SEQ ID NO: 991789 - DNA, 33 bp, Homo sapien
ccagagtgacagttcaaacttattttgccttgc

SEQ ID NO: 991790 - DNA, 33 bp, Homo sapien
ccagagtgacagttcagacttattttgccttgc

SEQ ID NO: 991791 - DNA, 33 bp, Homo sapien
tttctatgcagaaaacccactttaacaagatgt

SEQ ID NO: 991792 - DNA, 33 bp, Homo sapien
tttctatgcagaaaactcactttaacaagatgt

SEQ ID NO: 991793 - DNA, 33 bp, Homo sapien
atcaatagaaagattcaaagggcagagcaccaa

SEQ ID NO: 991794 - DNA, 33 bp, Homo sapien
atcaatagaaagattcgaagggcagagcaccaa

SEQ ID NO: 991795 - DNA, 33 bp, Homo sapien
tgttttcctgagcctcacggtgactaaaatgga

SEQ ID NO: 991796 - DNA, 33 bp, Homo sapien
tgttttcctgagcctcgcggtgactaaaatgga

SEQ ID NO: 991797 - DNA, 33 bp, Homo sapien
tttcctttcttaaccaagctaaatggactggag

SEQ ID NO: 991798 - DNA, 33 bp, Homo sapien
tttcctttcttaaccatgctaaatggactggag

SEQ ID NO: 991799 - DNA, 33 bp, Homo sapien
agggaatgtctcgtgccacagaaagctacctga

SEQ ID NO: 991800 - DNA, 33 bp, Homo sapien
agggaatgtctcgtgcgacagaaagctacctga

SEQ ID NO: 991801 - DNA, 33 bp, Homo sapien
ggctaatgttattaaacgttattgctgaaagaa

SEQ ID NO: 991802 - DNA, 33 bp, Homo sapien
ggctaatgttattaaatgttattgctgaaagaa

SEQ ID NO: 991803 - DNA, 33 bp, Homo sapien
ttttaactgtaaagtaatacattgctaagtgga

SEQ ID NO: 991804 - DNA, 33 bp, Homo sapien
ttttaactgtaaagtagtacattgctaagtgga

SEQ ID NO: 991805 - DNA, 33 bp, Homo sapien
aagcactgggactgtcaagccgaagaggtccct

SEQ ID NO: 991806 - DNA, 33 bp, Homo sapien
aagcactgggactgtcgagccgaagaggtccct

SEQ ID NO: 991807 - DNA, 33 bp, Homo sapien
caaagacgctgcattacgacaattctgggaagt

SEQ ID NO: 991808 - DNA, 33 bp, Homo sapien
caaagacgctgcattatgacaattctgggaagt

SEQ ID NO: 991809 - DNA, 33 bp, Homo sapien
tttgggtaactccacgcaagactgtctttacct

SEQ ID NO: 991810 - DNA, 33 bp, Homo sapien
tttgggtaactccacggaagactgtctttacct

SEQ ID NO: 991811 - DNA, 33 bp, Homo sapien
gagttcaccaaacagaaagtgcagcccaggagg

SEQ ID NO: 991812 - DNA, 33 bp, Homo sapien
gagttcaccaaacagagagtgcagcccaggagg

SEQ ID NO: 991813 - DNA, 33 bp, Homo sapien
tcactggatgatcttgaattaactatgctcagc

SEQ ID NO: 991814 - DNA, 33 bp, Homo sapien
tcactggatgatcttggattaactatgctcagc

SEQ ID NO: 991815 - DNA, 33 bp, Homo sapien
ataacattctgtgcctcactttacttgttttta

SEQ ID NO: 991816 - DNA, 33 bp, Homo sapien
ataacattctgtgccttactttacttgttttta

SEQ ID NO: 991817 - DNA, 33 bp, Homo sapien
gcactagggtgcactaacaggaatttaggtgct

SEQ ID NO: 991818 - DNA, 33 bp, Homo sapien
gcactagggtgcactatcaggaatttaggtgct

SEQ ID NO: 991819 - DNA, 33 bp, Homo sapien
ctgactcctgttctccacgtcattgcatatggc

SEQ ID NO: 991820 - DNA, 33 bp, Homo sapien
ctgactcctgttctccgcgtcattgcatatggc

SEQ ID NO: 991821 - DNA, 33 bp, Homo sapien
aaagctgtagggaagaacctttccttgcctctt

SEQ ID NO: 991822 - DNA, 33 bp, Homo sapien
aaagctgtagggaagagcctttccttgcctctt

SEQ ID NO: 991823 - DNA, 33 bp, Homo sapien
ggccttgagcccagacagataagacattccagg

SEQ ID NO: 991824 - DNA, 33 bp, Homo sapien
ggccttgagcccagacggataagacattccagg

SEQ ID NO: 991825 - DNA, 33 bp, Homo sapien
ggcaggcaagtgcaaagtctacacaggccttga

SEQ ID NO: 991826 - DNA, 33 bp, Homo sapien
ggcaggcaagtgcaaattctacacaggccttga

SEQ ID NO: 991827 - DNA, 33 bp, Homo sapien
agaagccttcctgtgacgtgcaaagccctcctc

SEQ ID NO: 991828 - DNA, 33 bp, Homo sapien
agaagccttcctgtgatgtgcaaagccctcctc

SEQ ID NO: 991829 - DNA, 33 bp, Homo sapien
ctcaagatccacaggtaaagaaggaagtctctg

SEQ ID NO: 991830 - DNA, 33 bp, Homo sapien
ctcaagatccacaggtgaagaaggaagtctctg

SEQ ID NO: 991831 - DNA, 33 bp, Homo sapien
ttaataagaaggagtaaaaactgggacaacctc

SEQ ID NO: 991832 - DNA, 33 bp, Homo sapien
ttaataagaaggagtagaaactgggacaacctc

SEQ ID NO: 991833 - DNA, 33 bp, Homo sapien
agtcagaaaatatgcacggctttaagcacgaca

SEQ ID NO: 991834 - DNA, 33 bp, Homo sapien
agtcagaaaatatgcatggctttaagcacgaca

SEQ ID NO: 991835 - DNA, 33 bp, Homo sapien
tttgcttggtattttcacacttgttgtttcatt

SEQ ID NO: 991836 - DNA, 33 bp, Homo sapien
tttgcttggtattttcgcacttgttgtttcatt

SEQ ID NO: 991837 - DNA, 33 bp, Homo sapien
tgctgtttgtgaacaacatacatcctggttatt

SEQ ID NO: 991838 - DNA, 33 bp, Homo sapien
tgctgtttgtgaacaatatacatcctggttatt

SEQ ID NO: 991839 - DNA, 33 bp, Homo sapien
aaggagaacccaggacactcctcagcctgatgg

SEQ ID NO: 991840 - DNA, 33 bp, Homo sapien
aaggagaacccaggacgctcctcagcctgatgg

SEQ ID NO: 991841 - DNA, 33 bp, Homo sapien
cacaactaggcaatgtaaaaaaaagcagattaa

SEQ ID NO: 991842 - DNA, 33 bp, Homo sapien
cacaactaggcaatgtgaaaaaaagcagattaa

SEQ ID NO: 991843 - DNA, 33 bp, Homo sapien
ctcagatgacacaaacaaaacccaaggccaaat

SEQ ID NO: 991844 - DNA, 33 bp, Homo sapien
ctcagatgacacaaacgaaacccaaggccaaat

SEQ ID NO: 991845 - DNA, 33 bp, Homo sapien
ggcggcagaaaaaggaagtcttataggcctgaa

SEQ ID NO: 991846 - DNA, 33 bp, Homo sapien
ggcggcagaaaaaggaggtcttataggcctgaa

SEQ ID NO: 991847 - DNA, 33 bp, Homo sapien
caaaccagacagtagccagaggagagtttaatc

SEQ ID NO: 991848 - DNA, 33 bp, Homo sapien
caaaccagacagtagcgagaggagagtttaatc

SEQ ID NO: 991849 - DNA, 33 bp, Homo sapien
gggaccaagtgcaataagtctatgtccaggata

SEQ ID NO: 991850 - DNA, 33 bp, Homo sapien
gggaccaagtgcaataggtctatgtccaggata

SEQ ID NO: 991851 - DNA, 33 bp, Homo sapien
gattaagcagttgatcaatttggtgaataaaac

SEQ ID NO: 991852 - DNA, 33 bp, Homo sapien
gattaagcagttgatcgatttggtgaataaaac

SEQ ID NO: 991853 - DNA, 33 bp, Homo sapien
aggttgtggttccttcaaggaagtagaaggact

SEQ ID NO: 991854 - DNA, 33 bp, Homo sapien
aggttgtggttccttcgaggaagtagaaggact

SEQ ID NO: 991855 - DNA, 33 bp, Homo sapien
ttccttaccctgagaagagtttactcaaggact

SEQ ID NO: 991856 - DNA, 33 bp, Homo sapien
ttccttaccctgagaatagtttactcaaggact

SEQ ID NO: 991857 - DNA, 33 bp, Homo sapien
actcttagtgcccccaatcactccccataaccc

SEQ ID NO: 991858 - DNA, 33 bp, Homo sapien
actcttagtgcccccagtcactccccataaccc

SEQ ID NO: 991859 - DNA, 33 bp, Homo sapien
caacctgtgctgaacaaaccctcctttgatgca

SEQ ID NO: 991860 - DNA, 33 bp, Homo sapien
caacctgtgctgaacagaccctcctttgatgca

SEQ ID NO: 991861 - DNA, 33 bp, Homo sapien
tgttccacaaaccagcaagatgagtgttatacc

SEQ ID NO: 991862 - DNA, 33 bp, Homo sapien
tgttccacaaaccagcgagatgagtgttatacc

SEQ ID NO: 991863 - DNA, 33 bp, Homo sapien
tcaccacctccaactcaagaaaatgtggtattt

SEQ ID NO: 991864 - DNA, 33 bp, Homo sapien
tcaccacctccaactccagaaaatgtggtattt

SEQ ID NO: 991865 - DNA, 33 bp, Homo sapien
agtgtctaatttctcacaggcttaacctggaac

SEQ ID NO: 991866 - DNA, 33 bp, Homo sapien
agtgtctaatttctcataggcttaacctggaac

SEQ ID NO: 991867 - DNA, 33 bp, Homo sapien
aggtttgtttgatgtaggtagtgactgaaacgg

SEQ ID NO: 991868 - DNA, 33 bp, Homo sapien
aggtttgtttgatgtatgtagtgactgaaacgg

SEQ ID NO: 991869 - DNA, 33 bp, Homo sapien
ccccagcagatgcctcaatgtgagtgtttctgg

SEQ ID NO: 991870 - DNA, 33 bp, Homo sapien
ccccagcagatgcctcgatgtgagtgtttctgg

SEQ ID NO: 991871 - DNA, 33 bp, Homo sapien
gcaagcttctaattccagatggctgtaaaaggt

SEQ ID NO: 991872 - DNA, 33 bp, Homo sapien
gcaagcttctaattccggatggctgtaaaaggt

SEQ ID NO: 991873 - DNA, 33 bp, Homo sapien
tagacaagacccaaaaatgacctaaagtcagag

SEQ ID NO: 991874 - DNA, 33 bp, Homo sapien
tagacaagacccaaaagtgacctaaagtcagag

SEQ ID NO: 991875 - DNA, 33 bp, Homo sapien
tagctattttggtggaaggagagtggttcatta

SEQ ID NO: 991876 - DNA, 33 bp, Homo sapien
tagctattttggtggagggagagtggttcatta

SEQ ID NO: 991877 - DNA, 33 bp, Homo sapien
cagttcttaataataacaggtagcctctgtata

SEQ ID NO: 991878 - DNA, 33 bp, Homo sapien
cagttcttaataataataggtagcctctgtata

SEQ ID NO: 991879 - DNA, 33 bp, Homo sapien
tcttcctgtagggcccagcttagatatcactca

SEQ ID NO: 991880 - DNA, 33 bp, Homo sapien
tcttcctgtagggcccggcttagatatcactca

SEQ ID NO: 991881 - DNA, 33 bp, Homo sapien
ttcatctgtgtttttccatgaagtgtttaagtg

SEQ ID NO: 991882 - DNA, 33 bp, Homo sapien
ttcatctgtgtttttctatgaagtgtttaagtg

SEQ ID NO: 991883 - DNA, 33 bp, Homo sapien
gactatgaggaagtccaagaataagcttgtaat

SEQ ID NO: 991884 - DNA, 33 bp, Homo sapien
gactatgaggaagtccgagaataagcttgtaat

SEQ ID NO: 991885 - DNA, 33 bp, Homo sapien
attacagagttagaaacataagggagctggccc

SEQ ID NO: 991886 - DNA, 33 bp, Homo sapien
attacagagttagaaatataagggagctggccc

SEQ ID NO: 991887 - DNA, 33 bp, Homo sapien
ttttgtatcatggacaggttggaaatttaaaaa

SEQ ID NO: 991888 - DNA, 33 bp, Homo sapien
ttttgtatcatggacatgttggaaatttaaaaa

SEQ ID NO: 991889 - DNA, 33 bp, Homo sapien
ccttgttctcagctcccaccctatgctgttatg

SEQ ID NO: 991890 - DNA, 33 bp, Homo sapien
ccttgttctcagctcctaccctatgctgttatg

SEQ ID NO: 991891 - DNA, 33 bp, Homo sapien
acgccaacattcccaactctactcctatgaatt

SEQ ID NO: 991892 - DNA, 33 bp, Homo sapien
acgccaacattcccaattctactcctatgaatt

SEQ ID NO: 991893 - DNA, 33 bp, Homo sapien
aagggtgccatccttacgacgaggaaggacgag

SEQ ID NO: 991894 - DNA, 33 bp, Homo sapien
aagggtgccatccttatgacgaggaaggacgag

SEQ ID NO: 991895 - DNA, 33 bp, Homo sapien
cttaaatgcaacagaactctactttattggtgt

SEQ ID NO: 991896 - DNA, 33 bp, Homo sapien
cttaaatgcaacagaagtctactttattggtgt

SEQ ID NO: 991897 - DNA, 33 bp, Homo sapien
cagagaaaattgtcacagagaaaattagactta

SEQ ID NO: 991898 - DNA, 33 bp, Homo sapien
cagagaaaattgtcactgagaaaattagactta

SEQ ID NO: 991899 - DNA, 33 bp, Homo sapien
gccacagacactgactcaaatacaatattggct

SEQ ID NO: 991900 - DNA, 33 bp, Homo sapien
gccacagacactgactgaaatacaatattggct

SEQ ID NO: 991901 - DNA, 33 bp, Homo sapien
acacaggcactactcacatacactcagacacat

SEQ ID NO: 991902 - DNA, 33 bp, Homo sapien
acacaggcactactcatatacactcagacacat

SEQ ID NO: 991903 - DNA, 33 bp, Homo sapien
acttttgctgcttataagaatgagagcaaaatc

SEQ ID NO: 991904 - DNA, 33 bp, Homo sapien
acttttgctgcttataggaatgagagcaaaatc

SEQ ID NO: 991905 - DNA, 33 bp, Homo sapien
gagttttaagccccaacggctggttgcatccca

SEQ ID NO: 991906 - DNA, 33 bp, Homo sapien
gagttttaagccccaatggctggttgcatccca

SEQ ID NO: 991907 - DNA, 33 bp, Homo sapien
ggttgatagagtttagcaaatgtccagagtctg

SEQ ID NO: 991908 - DNA, 33 bp, Homo sapien
ggttgatagagtttagtaaatgtccagagtctg

SEQ ID NO: 991909 - DNA, 33 bp, Homo sapien
tcctcctctttaatcacccagactgctacagtt

SEQ ID NO: 991910 - DNA, 33 bp, Homo sapien
tcctcctctttaatcatccagactgctacagtt

SEQ ID NO: 991911 - DNA, 33 bp, Homo sapien
aattggcttacacaacgactatcgacagcaaag

SEQ ID NO: 991912 - DNA, 33 bp, Homo sapien
aattggcttacacaactactatcgacagcaaag

SEQ ID NO: 991913 - DNA, 33 bp, Homo sapien
aggtccagatgggaaacgtatttgtgtgcattc

SEQ ID NO: 991914 - DNA, 33 bp, Homo sapien
aggtccagatgggaaatgtatttgtgtgcattc

SEQ ID NO: 991915 - DNA, 33 bp, Homo sapien
tgggcaaaagtcactcaccactctagacctcac

SEQ ID NO: 991916 - DNA, 33 bp, Homo sapien
tgggcaaaagtcactcgccactctagacctcac

SEQ ID NO: 991917 - DNA, 33 bp, Homo sapien
tgctgcatgacattaccgaagatacaagctatt

SEQ ID NO: 991918 - DNA, 33 bp, Homo sapien
tgctgcatgacattactgaagatacaagctatt

SEQ ID NO: 991919 - DNA, 33 bp, Homo sapien
aatacagacaagagacaagaagtgtttgggcaa

SEQ ID NO: 991920 - DNA, 33 bp, Homo sapien
aatacagacaagagacgagaagtgtttgggcaa

SEQ ID NO: 991921 - DNA, 33 bp, Homo sapien
ccactacaccaaacacaaactaaacctgacacc

SEQ ID NO: 991922 - DNA, 33 bp, Homo sapien
ccactacaccaaacacgaactaaacctgacacc

SEQ ID NO: 991923 - DNA, 33 bp, Homo sapien
gtattttcagttacacaatctctgcacttaatc

SEQ ID NO: 991924 - DNA, 33 bp, Homo sapien
gtattttcagttacacgatctctgcacttaatc

SEQ ID NO: 991925 - DNA, 33 bp, Homo sapien
gcaataactctactccaagtcaaattaaggggt

SEQ ID NO: 991926 - DNA, 33 bp, Homo sapien
gcaataactctactccgagtcaaattaaggggt

SEQ ID NO: 991927 - DNA, 33 bp, Homo sapien
tagacccatgggaccgaaacaaggaaggccact

SEQ ID NO: 991928 - DNA, 33 bp, Homo sapien
tagacccatgggaccgtaacaaggaaggccact

SEQ ID NO: 991929 - DNA, 33 bp, Homo sapien
attcttccagtctgacaatgactctttctaaat

SEQ ID NO: 991930 - DNA, 33 bp, Homo sapien
attcttccagtctgacgatgactctttctaaat

SEQ ID NO: 991931 - DNA, 33 bp, Homo sapien
aatgtggacagtgtgaaaggccatattcaattc

SEQ ID NO: 991932 - DNA, 33 bp, Homo sapien
aatgtggacagtgtgacaggccatattcaattc

SEQ ID NO: 991933 - DNA, 33 bp, Homo sapien
ttggaagtcaggataagcttgttccctttaatc

SEQ ID NO: 991934 - DNA, 33 bp, Homo sapien
ttggaagtcaggataatcttgttccctttaatc

SEQ ID NO: 991935 - DNA, 33 bp, Homo sapien
aatgtgaacaaaataacagggatctgcagagaa

SEQ ID NO: 991936 - DNA, 33 bp, Homo sapien
aatgtgaacaaaataatagggatctgcagagaa

SEQ ID NO: 991937 - DNA, 33 bp, Homo sapien
tcctcattttggcctagcagtgtgggtaaacaa

SEQ ID NO: 991938 - DNA, 33 bp, Homo sapien
tcctcattttggcctatcagtgtgggtaaacaa

SEQ ID NO: 991939 - DNA, 33 bp, Homo sapien
actagaaccatagcaacaaacaagccattcttg

SEQ ID NO: 991940 - DNA, 33 bp, Homo sapien
actagaaccatagcaataaacaagccattcttg

SEQ ID NO: 991941 - DNA, 33 bp, Homo sapien
gaatccttctcatcgcgagctggaccatttcaa

SEQ ID NO: 991942 - DNA, 33 bp, Homo sapien
gaatccttctcatcgctagctggaccatttcaa

SEQ ID NO: 991943 - DNA, 33 bp, Homo sapien
aaaaaggcattgtttccagagctaggctaccta

SEQ ID NO: 991944 - DNA, 33 bp, Homo sapien
aaaaaggcattgtttctagagctaggctaccta

SEQ ID NO: 991945 - DNA, 33 bp, Homo sapien
caggctggaagtgaccactaaattgacagaaca

SEQ ID NO: 991946 - DNA, 33 bp, Homo sapien
caggctggaagtgaccgctaaattgacagaaca

SEQ ID NO: 991947 - DNA, 33 bp, Homo sapien
tggctcagcaactgaacgaagagacttgataag

SEQ ID NO: 991948 - DNA, 33 bp, Homo sapien
tggctcagcaactgaatgaagagacttgataag

SEQ ID NO: 991949 - DNA, 33 bp, Homo sapien
tctaacagattttacaatgactagcttaagaca

SEQ ID NO: 991950 - DNA, 33 bp, Homo sapien
tctaacagattttacagtgactagcttaagaca

SEQ ID NO: 991951 - DNA, 33 bp, Homo sapien
taaaaatgtgctcaatgaaaaatgaaagttaga

SEQ ID NO: 991952 - DNA, 33 bp, Homo sapien
taaaaatgtgctcaattaaaaatgaaagttaga

SEQ ID NO: 991953 - DNA, 33 bp, Homo sapien
atgctctgtgttgctcagaaattccaagaagtt

SEQ ID NO: 991954 - DNA, 33 bp, Homo sapien
atgctctgtgttgctcggaaattccaagaagtt

SEQ ID NO: 991955 - DNA, 33 bp, Homo sapien
tgggaacatctgtgccaaactggattcacaagg

SEQ ID NO: 991956 - DNA, 33 bp, Homo sapien
tgggaacatctgtgccgaactggattcacaagg

SEQ ID NO: 991957 - DNA, 33 bp, Homo sapien
agacgtgccttaaacaaatgattccagtaagtt

SEQ ID NO: 991958 - DNA, 33 bp, Homo sapien
agacgtgccttaaacacatgattccagtaagtt

SEQ ID NO: 991959 - DNA, 33 bp, Homo sapien
ctagagttctgaaagaagaacacttgccctcaa

SEQ ID NO: 991960 - DNA, 33 bp, Homo sapien
ctagagttctgaaagaggaacacttgccctcaa

SEQ ID NO: 991961 - DNA, 33 bp, Homo sapien
cacttcttttaaaatacggtggcagagaatatg

SEQ ID NO: 991962 - DNA, 33 bp, Homo sapien
cacttcttttaaaatatggtggcagagaatatg

SEQ ID NO: 991963 - DNA, 33 bp, Homo sapien
cctatcaggtcagttaaatctacagccacatga

SEQ ID NO: 991964 - DNA, 33 bp, Homo sapien
cctatcaggtcagttacatctacagccacatga

SEQ ID NO: 991965 - DNA, 33 bp, Homo sapien
aactcccaaattgtaaggatcacttaggttaca

SEQ ID NO: 991966 - DNA, 33 bp, Homo sapien
aactcccaaattgtaatgatcacttaggttaca

SEQ ID NO: 991967 - DNA, 33 bp, Homo sapien
agttggttgttgttgccataatcacctctacaa

SEQ ID NO: 991968 - DNA, 33 bp, Homo sapien
agttggttgttgttgctataatcacctctacaa

SEQ ID NO: 991969 - DNA, 33 bp, Homo sapien
gagttgtacatccctccacttctttgctgtgaa

SEQ ID NO: 991970 - DNA, 33 bp, Homo sapien
gagttgtacatccctctacttctttgctgtgaa

SEQ ID NO: 991971 - DNA, 33 bp, Homo sapien
tttttttctccttcaagtcttacctcaaacact

SEQ ID NO: 991972 - DNA, 33 bp, Homo sapien
tttttttctccttcaattcttacctcaaacact

SEQ ID NO: 991973 - DNA, 33 bp, Homo sapien
agattaagagaccggaataacttgcagctgcca

SEQ ID NO: 991974 - DNA, 33 bp, Homo sapien
agattaagagaccggactaacttgcagctgcca

SEQ ID NO: 991975 - DNA, 33 bp, Homo sapien
gtaaacactttcaagagacaaacttaaaaataa

SEQ ID NO: 991976 - DNA, 33 bp, Homo sapien
gtaaacactttcaagatacaaacttaaaaataa

SEQ ID NO: 991977 - DNA, 33 bp, Homo sapien
acttggattatgatcaaagtatgtaaaagagat

SEQ ID NO: 991978 - DNA, 33 bp, Homo sapien
acttggattatgatcacagtatgtaaaagagat

SEQ ID NO: 991979 - DNA, 33 bp, Homo sapien
actggatgcccattaactaattcctgtactagt

SEQ ID NO: 991980 - DNA, 33 bp, Homo sapien
actggatgcccattaagtaattcctgtactagt

SEQ ID NO: 991981 - DNA, 33 bp, Homo sapien
cagcttgcttgtggacgaatgatttcatttaat

SEQ ID NO: 991982 - DNA, 33 bp, Homo sapien
cagcttgcttgtggactaatgatttcatttaat

SEQ ID NO: 991983 - DNA, 33 bp, Homo sapien
taggtccaaacagaacacttgaatcctcttcct

SEQ ID NO: 991984 - DNA, 33 bp, Homo sapien
taggtccaaacagaacccttgaatcctcttcct

SEQ ID NO: 991985 - DNA, 33 bp, Homo sapien
agatattataatggcccaggtgaatgaagatgg

SEQ ID NO: 991986 - DNA, 33 bp, Homo sapien
agatattataatggccgaggtgaatgaagatgg

SEQ ID NO: 991987 - DNA, 33 bp, Homo sapien
aaaatacctgagtccacgcatttgagctcctgg

SEQ ID NO: 991988 - DNA, 33 bp, Homo sapien
aaaatacctgagtccatgcatttgagctcctgg

SEQ ID NO: 991989 - DNA, 33 bp, Homo sapien
tgggtctacacactacaggcaaattagaaactg

SEQ ID NO: 991990 - DNA, 33 bp, Homo sapien
tgggtctacacactaccggcaaattagaaactg

SEQ ID NO: 991991 - DNA, 33 bp, Homo sapien
actgtattagaaatataaacggaccaccactta

SEQ ID NO: 991992 - DNA, 33 bp, Homo sapien
actgtattagaaatatgaacggaccaccactta

SEQ ID NO: 991993 - DNA, 33 bp, Homo sapien
aggagggcaaactgcacatttcttagcagatct

SEQ ID NO: 991994 - DNA, 33 bp, Homo sapien
aggagggcaaactgcatatttcttagcagatct

SEQ ID NO: 991995 - DNA, 33 bp, Homo sapien
gattacaaagcaccaaatacgcatctcgttctg

SEQ ID NO: 991996 - DNA, 33 bp, Homo sapien
gattacaaagcaccaagtacgcatctcgttctg

SEQ ID NO: 991997 - DNA, 33 bp, Homo sapien
attgtctggctttgaactcctctcttgctttca

SEQ ID NO: 991998 - DNA, 33 bp, Homo sapien
attgtctggctttgaattcctctcttgctttca

SEQ ID NO: 991999 - DNA, 33 bp, Homo sapien
tgcacagcttgaaagaaaatgccatacaaaaaa

SEQ ID NO: 992000 - DNA, 33 bp, Homo sapien
tgcacagcttgaaagagaatgccatacaaaaaa

SEQ ID NO: 992001 - DNA, 33 bp, Homo sapien
gaggaaagccacagttcaaaagaggactcatac

SEQ ID NO: 992002 - DNA, 33 bp, Homo sapien
gaggaaagccacagtttaaaagaggactcatac

SEQ ID NO: 992003 - DNA, 33 bp, Homo sapien
ttctgaaaaagcaaagaacaaacccagatgaga

SEQ ID NO: 992004 - DNA, 33 bp, Homo sapien
ttctgaaaaagcaaaggacaaacccagatgaga

SEQ ID NO: 992005 - DNA, 33 bp, Homo sapien
ttcttcttcctaaaaaatgttgccaatctttgt

SEQ ID NO: 992006 - DNA, 33 bp, Homo sapien
ttcttcttcctaaaaagtgttgccaatctttgt

SEQ ID NO: 992007 - DNA, 33 bp, Homo sapien
tgacaatggaaatgggaagaagataaactgaaa

SEQ ID NO: 992008 - DNA, 33 bp, Homo sapien
tgacaatggaaatggggagaagataaactgaaa

SEQ ID NO: 992009 - DNA, 33 bp, Homo sapien
atttgaattgcgtatgacagaaaatgacagctg

SEQ ID NO: 992010 - DNA, 33 bp, Homo sapien
atttgaattgcgtatggcagaaaatgacagctg

SEQ ID NO: 992011 - DNA, 33 bp, Homo sapien
catatgtgaaacgataaggcattgcactaggta

SEQ ID NO: 992012 - DNA, 33 bp, Homo sapien
catatgtgaaacgatagggcattgcactaggta

SEQ ID NO: 992013 - DNA, 33 bp, Homo sapien
tcctctctgtaagcagaacccgaagctcacaga

SEQ ID NO: 992014 - DNA, 33 bp, Homo sapien
tcctctctgtaagcaggacccgaagctcacaga

SEQ ID NO: 992015 - DNA, 33 bp, Homo sapien
aggctgatccaacacaaaatacacattaccctg

SEQ ID NO: 992016 - DNA, 33 bp, Homo sapien
aggctgatccaacacagaatacacattaccctg

SEQ ID NO: 992017 - DNA, 33 bp, Homo sapien
aattttacctatctgagcataactgttggatat

SEQ ID NO: 992018 - DNA, 33 bp, Homo sapien
aattttacctatctgatcataactgttggatat

SEQ ID NO: 992019 - DNA, 33 bp, Homo sapien
acttgcacaggacaaagactttgcccagcctgg

SEQ ID NO: 992020 - DNA, 33 bp, Homo sapien
acttgcacaggacaaatactttgcccagcctgg

SEQ ID NO: 992021 - DNA, 33 bp, Homo sapien
aagccttgtggtgaaggacaggagtcggttgag

SEQ ID NO: 992022 - DNA, 33 bp, Homo sapien
aagccttgtggtgaagtacaggagtcggttgag

SEQ ID NO: 992023 - DNA, 33 bp, Homo sapien
ggtggagccatgtctccagtaggttagcttggt

SEQ ID NO: 992024 - DNA, 33 bp, Homo sapien
ggtggagccatgtctctagtaggttagcttggt

SEQ ID NO: 992025 - DNA, 33 bp, Homo sapien
aggcactattcagggaagcaagggcagaggcta

SEQ ID NO: 992026 - DNA, 33 bp, Homo sapien
aggcactattcagggaggcaagggcagaggcta

SEQ ID NO: 992027 - DNA, 33 bp, Homo sapien
atgtgtctagtcatcaaaaggactggtcagtgc

SEQ ID NO: 992028 - DNA, 33 bp, Homo sapien
atgtgtctagtcatcagaaggactggtcagtgc

SEQ ID NO: 992029 - DNA, 33 bp, Homo sapien
ttgttattttaattcaccagcaatttcattatg

SEQ ID NO: 992030 - DNA, 33 bp, Homo sapien
ttgttattttaattcatcagcaatttcattatg

SEQ ID NO: 992031 - DNA, 33 bp, Homo sapien
agacagaagacaaagaaatcaactgtgaaaata

SEQ ID NO: 992032 - DNA, 33 bp, Homo sapien
agacagaagacaaagagatcaactgtgaaaata

SEQ ID NO: 992033 - DNA, 33 bp, Homo sapien
gaaaagtattttatgaaaagtcagagcatatac

SEQ ID NO: 992034 - DNA, 33 bp, Homo sapien
gaaaagtattttatgagaagtcagagcatatac

SEQ ID NO: 992035 - DNA, 33 bp, Homo sapien
ccagggatagaccctaacaaacaagggcacaca

SEQ ID NO: 992036 - DNA, 33 bp, Homo sapien
ccagggatagaccctagcaaacaagggcacaca

SEQ ID NO: 992037 - DNA, 33 bp, Homo sapien
cagtaggatagcaaggccaaccagggatagacc

SEQ ID NO: 992038 - DNA, 33 bp, Homo sapien
cagtaggatagcaaggtcaaccagggatagacc

SEQ ID NO: 992039 - DNA, 33 bp, Homo sapien
gagcataaatatgtccacattctcacatcacat

SEQ ID NO: 992040 - DNA, 33 bp, Homo sapien
gagcataaatatgtccgcattctcacatcacat

SEQ ID NO: 992041 - DNA, 33 bp, Homo sapien
taactgcacacaataaacagaaaacatttgtgc

SEQ ID NO: 992042 - DNA, 33 bp, Homo sapien
taactgcacacaataagcagaaaacatttgtgc

SEQ ID NO: 992043 - DNA, 33 bp, Homo sapien
ccttttgttttccttcaattttatctttgtgca

SEQ ID NO: 992044 - DNA, 33 bp, Homo sapien
ccttttgttttccttcgattttatctttgtgca

SEQ ID NO: 992045 - DNA, 33 bp, Homo sapien
tccatatttagttaaactaagaggcagctaaaa

SEQ ID NO: 992046 - DNA, 33 bp, Homo sapien
tccatatttagttaaattaagaggcagctaaaa

SEQ ID NO: 992047 - DNA, 33 bp, Homo sapien
ctgggcttgaagggtaagtaaagctccttgtgc

SEQ ID NO: 992048 - DNA, 33 bp, Homo sapien
ctgggcttgaagggtaggtaaagctccttgtgc

SEQ ID NO: 992049 - DNA, 33 bp, Homo sapien
gaacagatagctgaaacgtactgataatttgtt

SEQ ID NO: 992050 - DNA, 33 bp, Homo sapien
gaacagatagctgaaatgtactgataatttgtt

SEQ ID NO: 992051 - DNA, 33 bp, Homo sapien
ctgctttttgatgtaacaagaagtgccatcatt

SEQ ID NO: 992052 - DNA, 33 bp, Homo sapien
ctgctttttgatgtaataagaagtgccatcatt

SEQ ID NO: 992053 - DNA, 33 bp, Homo sapien
gtttgttagccaataaagatctggcactgatct

SEQ ID NO: 992054 - DNA, 33 bp, Homo sapien
gtttgttagccaataatgatctggcactgatct

SEQ ID NO: 992055 - DNA, 33 bp, Homo sapien
ggctgtcaatgttcagaactgtggaaagaaagt

SEQ ID NO: 992056 - DNA, 33 bp, Homo sapien
ggctgtcaatgttcaggactgtggaaagaaagt

SEQ ID NO: 992057 - DNA, 33 bp, Homo sapien
cttcttcggcaccgtaagcacattgaaaaagta

SEQ ID NO: 992058 - DNA, 33 bp, Homo sapien
cttcttcggcaccgtatgcacattgaaaaagta

SEQ ID NO: 992059 - DNA, 33 bp, Homo sapien
aaccactcagtattcaaagcccaggtcaaaatt

SEQ ID NO: 992060 - DNA, 33 bp, Homo sapien
aaccactcagtattcagagcccaggtcaaaatt

SEQ ID NO: 992061 - DNA, 33 bp, Homo sapien
ctcagtgagagagtgacgcctctattgaaagtc

SEQ ID NO: 992062 - DNA, 33 bp, Homo sapien
ctcagtgagagagtgatgcctctattgaaagtc

SEQ ID NO: 992063 - DNA, 33 bp, Homo sapien
tggccatctggaggcactaaaaagtgtagctat

SEQ ID NO: 992064 - DNA, 33 bp, Homo sapien
tggccatctggaggcattaaaaagtgtagctat

SEQ ID NO: 992065 - DNA, 33 bp, Homo sapien
gctagaagaagttgacagcagaacttgaaatgc

SEQ ID NO: 992066 - DNA, 33 bp, Homo sapien
gctagaagaagttgacggcagaacttgaaatgc

SEQ ID NO: 992067 - DNA, 33 bp, Homo sapien
gccagaatgtggtccacctgtctttgttctcct

SEQ ID NO: 992068 - DNA, 33 bp, Homo sapien
gccagaatgtggtccatctgtctttgttctcct

SEQ ID NO: 992069 - DNA, 33 bp, Homo sapien
tctggttatatctctccatttttgcatatctgt

SEQ ID NO: 992070 - DNA, 33 bp, Homo sapien
tctggttatatctctctatttttgcatatctgt

SEQ ID NO: 992071 - DNA, 33 bp, Homo sapien
tggaactaaaaagaagcccaaatagcctaagca

SEQ ID NO: 992072 - DNA, 33 bp, Homo sapien
tggaactaaaaagaagtccaaatagcctaagca

SEQ ID NO: 992073 - DNA, 33 bp, Homo sapien
tcaaatgctgtgaaacaaagaatgagcaatatt

SEQ ID NO: 992074 - DNA, 33 bp, Homo sapien
tcaaatgctgtgaaacgaagaatgagcaatatt

SEQ ID NO: 992075 - DNA, 33 bp, Homo sapien
tacttatgatcaagcaaaagagagaagttacct

SEQ ID NO: 992076 - DNA, 33 bp, Homo sapien
tacttatgatcaagcagaagagagaagttacct

SEQ ID NO: 992077 - DNA, 33 bp, Homo sapien
taagtaccctgaaggcagagatcttgtcttaca

SEQ ID NO: 992078 - DNA, 33 bp, Homo sapien
taagtaccctgaaggcggagatcttgtcttaca

SEQ ID NO: 992079 - DNA, 33 bp, Homo sapien
attagtggaaaacatgacatggaataagctact

SEQ ID NO: 992080 - DNA, 33 bp, Homo sapien
attagtggaaaacatggcatggaataagctact

SEQ ID NO: 992081 - DNA, 33 bp, Homo sapien
tttgacatctccacctaaagtcctgctgacacc

SEQ ID NO: 992082 - DNA, 33 bp, Homo sapien
tttgacatctccacctgaagtcctgctgacacc

SEQ ID NO: 992083 - DNA, 33 bp, Homo sapien
atgtcctcataaaatacggtgcagtgagaagag

SEQ ID NO: 992084 - DNA, 33 bp, Homo sapien
atgtcctcataaaatatggtgcagtgagaagag

SEQ ID NO: 992085 - DNA, 33 bp, Homo sapien
ggatagctagaaagaaagaattcattgtgaagc

SEQ ID NO: 992086 - DNA, 33 bp, Homo sapien
ggatagctagaaagaaggaattcattgtgaagc

SEQ ID NO: 992087 - DNA, 33 bp, Homo sapien
actctcatctcacccaaaactgactgctggccc

SEQ ID NO: 992088 - DNA, 33 bp, Homo sapien
actctcatctcacccacaactgactgctggccc

SEQ ID NO: 992089 - DNA, 33 bp, Homo sapien
ctttgctgaattcccacctcttctcacaagtaa

SEQ ID NO: 992090 - DNA, 33 bp, Homo sapien
ctttgctgaattcccatctcttctcacaagtaa

SEQ ID NO: 992091 - DNA, 33 bp, Homo sapien
ttacctctagaacctacggagttagatttgatg

SEQ ID NO: 992092 - DNA, 33 bp, Homo sapien
ttacctctagaacctatggagttagatttgatg

SEQ ID NO: 992093 - DNA, 33 bp, Homo sapien
tgatcatattaatcaacactgtgtttatatgga

SEQ ID NO: 992094 - DNA, 33 bp, Homo sapien
tgatcatattaatcaagactgtgtttatatgga

SEQ ID NO: 992095 - DNA, 33 bp, Homo sapien
attaatatgatcactgcagactttactgtatat

SEQ ID NO: 992096 - DNA, 33 bp, Homo sapien
attaatatgatcactgtagactttactgtatat

SEQ ID NO: 992097 - DNA, 33 bp, Homo sapien
agtttttgctccttgacgttattttcaaacgat

SEQ ID NO: 992098 - DNA, 33 bp, Homo sapien
agtttttgctccttgatgttattttcaaacgat

SEQ ID NO: 992099 - DNA, 33 bp, Homo sapien
agaggtaagcgcagtacatgggtttgagagaag

SEQ ID NO: 992100 - DNA, 33 bp, Homo sapien
agaggtaagcgcagtatatgggtttgagagaag

SEQ ID NO: 992101 - DNA, 33 bp, Homo sapien
cctggagtgttggagcccaagtgaggagaggag

SEQ ID NO: 992102 - DNA, 33 bp, Homo sapien
cctggagtgttggagctcaagtgaggagaggag

SEQ ID NO: 992103 - DNA, 33 bp, Homo sapien
aggcatccgtgtagggaatggaaaacccagcag

SEQ ID NO: 992104 - DNA, 33 bp, Homo sapien
aggcatccgtgtaggggatggaaaacccagcag

SEQ ID NO: 992105 - DNA, 33 bp, Homo sapien
gtggcactgtcaaaccacagggttattggagct

SEQ ID NO: 992106 - DNA, 33 bp, Homo sapien
gtggcactgtcaaaccgcagggttattggagct

SEQ ID NO: 992107 - DNA, 33 bp, Homo sapien
cttgtatgaccttcaacctaaagaaataatttg

SEQ ID NO: 992108 - DNA, 33 bp, Homo sapien
cttgtatgaccttcaatctaaagaaataatttg

SEQ ID NO: 992109 - DNA, 33 bp, Homo sapien
gtggagtcaacagtagaatagatcttggctggc

SEQ ID NO: 992110 - DNA, 33 bp, Homo sapien
gtggagtcaacagtagcatagatcttggctggc

SEQ ID NO: 992111 - DNA, 33 bp, Homo sapien
ttctattcctgactaggattgctaaatggttta

SEQ ID NO: 992112 - DNA, 33 bp, Homo sapien
ttctattcctgactagtattgctaaatggttta

SEQ ID NO: 992113 - DNA, 33 bp, Homo sapien
aaaaaaaaactattgaacctgtgcagctatctt

SEQ ID NO: 992114 - DNA, 33 bp, Homo sapien
aaaaaaaaactattgaccctgtgcagctatctt

SEQ ID NO: 992115 - DNA, 33 bp, Homo sapien
atgtgcccctgtattaagttgctcaacctcttt

SEQ ID NO: 992116 - DNA, 33 bp, Homo sapien
atgtgcccctgtattatgttgctcaacctcttt

SEQ ID NO: 992117 - DNA, 33 bp, Homo sapien
agttttcatttgcagaccatggtaattactgac

SEQ ID NO: 992118 - DNA, 33 bp, Homo sapien
agttttcatttgcagatcatggtaattactgac

SEQ ID NO: 992119 - DNA, 33 bp, Homo sapien
ggcaccgccttatgcactgaagttacggagaca

SEQ ID NO: 992120 - DNA, 33 bp, Homo sapien
ggcaccgccttatgcattgaagttacggagaca

SEQ ID NO: 992121 - DNA, 33 bp, Homo sapien
catcacactcaccaaagggccaatttcttttta

SEQ ID NO: 992122 - DNA, 33 bp, Homo sapien
catcacactcaccaaatggccaatttcttttta

SEQ ID NO: 992123 - DNA, 33 bp, Homo sapien
aaaggagcctgtatgtcaatgtttcttggaggt

SEQ ID NO: 992124 - DNA, 33 bp, Homo sapien
aaaggagcctgtatgtgaatgtttcttggaggt

SEQ ID NO: 992125 - DNA, 33 bp, Homo sapien
ggaaagatggagtttacaggtttttagcttcca

SEQ ID NO: 992126 - DNA, 33 bp, Homo sapien
ggaaagatggagtttataggtttttagcttcca

SEQ ID NO: 992127 - DNA, 33 bp, Homo sapien
aggccccttgcagtgaatagtctttgggcagca

SEQ ID NO: 992128 - DNA, 33 bp, Homo sapien
aggccccttgcagtgagtagtctttgggcagca

SEQ ID NO: 992129 - DNA, 33 bp, Homo sapien
gaggaatctgttatgtaaacttccaagcagacg

SEQ ID NO: 992130 - DNA, 33 bp, Homo sapien
gaggaatctgttatgtgaacttccaagcagacg

SEQ ID NO: 992131 - DNA, 33 bp, Homo sapien
gcatgtagcatgaatgccatcataaaggagcac

SEQ ID NO: 992132 - DNA, 33 bp, Homo sapien
gcatgtagcatgaatgtcatcataaaggagcac

SEQ ID NO: 992133 - DNA, 33 bp, Homo sapien
tgtttgacaagacctcaaggtatcatgactgag

SEQ ID NO: 992134 - DNA, 33 bp, Homo sapien
tgtttgacaagacctccaggtatcatgactgag

SEQ ID NO: 992135 - DNA, 33 bp, Homo sapien
gtaggcactcagtcaacgttcttttcccttctt

SEQ ID NO: 992136 - DNA, 33 bp, Homo sapien
gtaggcactcagtcaatgttcttttcccttctt

SEQ ID NO: 992137 - DNA, 33 bp, Homo sapien
agggttattcctatcactaccttccacttacac

SEQ ID NO: 992138 - DNA, 33 bp, Homo sapien
agggttattcctatcattaccttccacttacac

SEQ ID NO: 992139 - DNA, 33 bp, Homo sapien
actgttggtgccttgcacttatacccttggatg

SEQ ID NO: 992140 - DNA, 33 bp, Homo sapien
actgttggtgccttgcgcttatacccttggatg

SEQ ID NO: 992141 - DNA, 33 bp, Homo sapien
atctagaaagaagataaagcacaatgaagtggg

SEQ ID NO: 992142 - DNA, 33 bp, Homo sapien
atctagaaagaagatagagcacaatgaagtggg

SEQ ID NO: 992143 - DNA, 33 bp, Homo sapien
aggttgtaaacttcaaaggactgtctgcaagta

SEQ ID NO: 992144 - DNA, 33 bp, Homo sapien
aggttgtaaacttcaagggactgtctgcaagta

SEQ ID NO: 992145 - DNA, 33 bp, Homo sapien
gaatattaaaatgctgaattatgcaataaagac

SEQ ID NO: 992146 - DNA, 33 bp, Homo sapien
gaatattaaaatgctggattatgcaataaagac

SEQ ID NO: 992147 - DNA, 33 bp, Homo sapien
ctgagatgatctattacgtttgttatttgtttt

SEQ ID NO: 992148 - DNA, 33 bp, Homo sapien
ctgagatgatctattatgtttgttatttgtttt

SEQ ID NO: 992149 - DNA, 33 bp, Homo sapien
ccttagatttccagtaacaaattagcccacact

SEQ ID NO: 992150 - DNA, 33 bp, Homo sapien
ccttagatttccagtagcaaattagcccacact

SEQ ID NO: 992151 - DNA, 33 bp, Homo sapien
caaagtgaatattataggcccagtatgcaaagt

SEQ ID NO: 992152 - DNA, 33 bp, Homo sapien
caaagtgaatattatatgcccagtatgcaaagt

SEQ ID NO: 992153 - DNA, 33 bp, Homo sapien
tgccatcaattatttaacaagcatttactgaac

SEQ ID NO: 992154 - DNA, 33 bp, Homo sapien
tgccatcaattatttagcaagcatttactgaac

SEQ ID NO: 992155 - DNA, 33 bp, Homo sapien
tgtcatgctactgatacgtaatcacaatgtcaa

SEQ ID NO: 992156 - DNA, 33 bp, Homo sapien
tgtcatgctactgatatgtaatcacaatgtcaa

SEQ ID NO: 992157 - DNA, 33 bp, Homo sapien
gctggctgcaactcagaaaggtgcatccatgaa

SEQ ID NO: 992158 - DNA, 33 bp, Homo sapien
gctggctgcaactcaggaaggtgcatccatgaa

SEQ ID NO: 992159 - DNA, 33 bp, Homo sapien
aggaggaaaagtgggccctttgaaatgtgagca

SEQ ID NO: 992160 - DNA, 33 bp, Homo sapien
aggaggaaaagtgggctctttgaaatgtgagca

SEQ ID NO: 992161 - DNA, 33 bp, Homo sapien
agcacaaagagatccacaaaagaccatggagaa

SEQ ID NO: 992162 - DNA, 33 bp, Homo sapien
agcacaaagagatccagaaaagaccatggagaa

SEQ ID NO: 992163 - DNA, 33 bp, Homo sapien
aatgaaagcgtgtgtgcaaatgaactaacactg

SEQ ID NO: 992164 - DNA, 33 bp, Homo sapien
aatgaaagcgtgtgtgtaaatgaactaacactg

SEQ ID NO: 992165 - DNA, 33 bp, Homo sapien
ttcaggtctgggaacaacttactgggttcaact

SEQ ID NO: 992166 - DNA, 33 bp, Homo sapien
ttcaggtctgggaacagcttactgggttcaact

SEQ ID NO: 992167 - DNA, 33 bp, Homo sapien
tttttcttaattgttacagctcttggacaagag

SEQ ID NO: 992168 - DNA, 33 bp, Homo sapien
tttttcttaattgttatagctcttggacaagag

SEQ ID NO: 992169 - DNA, 33 bp, Homo sapien
tgaccaatggaagaaacagaattccgctgtatt

SEQ ID NO: 992170 - DNA, 33 bp, Homo sapien
tgaccaatggaagaaatagaattccgctgtatt

SEQ ID NO: 992171 - DNA, 33 bp, Homo sapien
tattaaagccaaacacaaaagctcctttttaat

SEQ ID NO: 992172 - DNA, 33 bp, Homo sapien
tattaaagccaaacacgaaagctcctttttaat

SEQ ID NO: 992173 - DNA, 33 bp, Homo sapien
gaatctcagagtttagaaaatgtgctcaaggtt

SEQ ID NO: 992174 - DNA, 33 bp, Homo sapien
gaatctcagagtttaggaaatgtgctcaaggtt

SEQ ID NO: 992175 - DNA, 33 bp, Homo sapien
aaatttccattacctaacacagagcttggcatg

SEQ ID NO: 992176 - DNA, 33 bp, Homo sapien
aaatttccattacctagcacagagcttggcatg

SEQ ID NO: 992177 - DNA, 33 bp, Homo sapien
gcctattgtgatactaaatgaagactggaaaca

SEQ ID NO: 992178 - DNA, 33 bp, Homo sapien
gcctattgtgatactacatgaagactggaaaca

SEQ ID NO: 992179 - DNA, 33 bp, Homo sapien
gtgttaacccaaacaaagtgaagtggagtcaaa

SEQ ID NO: 992180 - DNA, 33 bp, Homo sapien
gtgttaacccaaacaatgtgaagtggagtcaaa

SEQ ID NO: 992181 - DNA, 33 bp, Homo sapien
aagggcatcaatgagacgtggctatagtctagg

SEQ ID NO: 992182 - DNA, 33 bp, Homo sapien
aagggcatcaatgagatgtggctatagtctagg

SEQ ID NO: 992183 - DNA, 33 bp, Homo sapien; identical to SEQ ID NO: 992181

SEQ ID NO: 992184 - DNA, 33 bp, Homo sapien; identical to SEQ ID NO: 992182

SEQ ID NO: 992185 - DNA, 33 bp, Homo sapien
ccagggcccaggttacaaacttagacttctgtg

SEQ ID NO: 992186 - DNA, 33 bp, Homo sapien
ccagggcccaggttaccaacttagacttctgtg

SEQ ID NO: 992187 - DNA, 33 bp, Homo sapien
gaaatcagcctatttccatcattgtagacctgt

SEQ ID NO: 992188 - DNA, 33 bp, Homo sapien
gaaatcagcctatttctatcattgtagacctgt

SEQ ID NO: 992189 - DNA, 33 bp, Homo sapien
ttttctaggcacatccagagctagaatctgctc

SEQ ID NO: 992190 - DNA, 33 bp, Homo sapien
ttttctaggcacatccggagctagaatctgctc

SEQ ID NO: 992191 - DNA, 33 bp, Homo sapien
gatcttaaaacgtataaaattccagcatatgta

SEQ ID NO: 992192 - DNA, 33 bp, Homo sapien
gatcttaaaacgtatacaattccagcatatgta

SEQ ID NO: 992193 - DNA, 33 bp, Homo sapien
cggtctcttgcaaatagtatgtcataatctacc

SEQ ID NO: 992194 - DNA, 33 bp, Homo sapien
cggtctcttgcaaatattatgtcataatctacc

SEQ ID NO: 992195 - DNA, 33 bp, Homo sapien
agtttatataaagacacggaggtattaaatagc

SEQ ID NO: 992196 - DNA, 33 bp, Homo sapien
agtttatataaagacatggaggtattaaatagc

SEQ ID NO: 992197 - DNA, 33 bp, Homo sapien
tgtttataaagtagaaaaacgacaactgggaac

SEQ ID NO: 992198 - DNA, 33 bp, Homo sapien
tgtttataaagtagaagaacgacaactgggaac

SEQ ID NO: 992199 - DNA, 33 bp, Homo sapien
gagacctaacttgatccgagtgtttggagaagg

SEQ ID NO: 992200 - DNA, 33 bp, Homo sapien
gagacctaacttgatcggagtgtttggagaagg

SEQ ID NO: 992201 - DNA, 33 bp, Homo sapien
tcttagcaaagaaagaagatgcaaataagaacc

SEQ ID NO: 992202 - DNA, 33 bp, Homo sapien
tcttagcaaagaaagaggatgcaaataagaacc

SEQ ID NO: 992203 - DNA, 33 bp, Homo sapien
caaaactctcaccacagctcaacagttacaaga

SEQ ID NO: 992204 - DNA, 33 bp, Homo sapien
caaaactctcaccacatctcaacagttacaaga

SEQ ID NO: 992205 - DNA, 33 bp, Homo sapien
atgtactgaatctgaaaaaattatttaaggatg

SEQ ID NO: 992206 - DNA, 33 bp, Homo sapien
atgtactgaatctgaagaaattatttaaggatg

SEQ ID NO: 992207 - DNA, 33 bp, Homo sapien
gaaatgcctaaacacacgctactcatttttcag

SEQ ID NO: 992208 - DNA, 33 bp, Homo sapien
gaaatgcctaaacacatgctactcatttttcag

SEQ ID NO: 992209 - DNA, 33 bp, Homo sapien
acagcctattgtgagaacttctgatcatgaagg

SEQ ID NO: 992210 - DNA, 33 bp, Homo sapien
acagcctattgtgagaccttctgatcatgaagg

SEQ ID NO: 992211 - DNA, 33 bp, Homo sapien
agaaggtgatactggccgaacaccaggggtaca

SEQ ID NO: 992212 - DNA, 33 bp, Homo sapien
agaaggtgatactggctgaacaccaggggtaca

SEQ ID NO: 992213 - DNA, 33 bp, Homo sapien
aatttgtaacttggaaaacctcaatcctgaggt

SEQ ID NO: 992214 - DNA, 33 bp, Homo sapien
aatttgtaacttggaagacctcaatcctgaggt

SEQ ID NO: 992215 - DNA, 33 bp, Homo sapien
tagatgttttgttttacctcagagtgatctaaa

SEQ ID NO: 992216 - DNA, 33 bp, Homo sapien
tagatgttttgttttatctcagagtgatctaaa

SEQ ID NO: 992217 - DNA, 33 bp, Homo sapien
aggatcaaagatttaaaaccatgttcttctgtc

SEQ ID NO: 992218 - DNA, 33 bp, Homo sapien
aggatcaaagatttaagaccatgttcttctgtc

SEQ ID NO: 992219 - DNA, 33 bp, Homo sapien
tcagcttagatttgacaatgattccttagatac

SEQ ID NO: 992220 - DNA, 33 bp, Homo sapien
tcagcttagatttgacgatgattccttagatac

SEQ ID NO: 992221 - DNA, 33 bp, Homo sapien
acctgcatatgtaccaactgtgtttaaaataca

SEQ ID NO: 992222 - DNA, 33 bp, Homo sapien
acctgcatatgtaccagctgtgtttaaaataca

SEQ ID NO: 992223 - DNA, 33 bp, Homo sapien
tgttcagctcccactcaaacgatttatgtaatg

SEQ ID NO: 992224 - DNA, 33 bp, Homo sapien
tgttcagctcccactccaacgatttatgtaatg

SEQ ID NO: 992225 - DNA, 33 bp, Homo sapien
gcatgagaaggaacacaacaatgtcttgtcatt

SEQ ID NO: 992226 - DNA, 33 bp, Homo sapien
gcatgagaaggaacaccacaatgtcttgtcatt

SEQ ID NO: 992227 - DNA, 33 bp, Homo sapien
gtacttaaatttgagaaaaggcaatgagtatca

SEQ ID NO: 992228 - DNA, 33 bp, Homo sapien
gtacttaaatttgagagaaggcaatgagtatca

SEQ ID NO: 992229 - DNA, 33 bp, Homo sapien
agctctgatttcccagactaaattgatctactt

SEQ ID NO: 992230 - DNA, 33 bp, Homo sapien
agctctgatttcccaggctaaattgatctactt

SEQ ID NO: 992231 - DNA, 33 bp, Homo sapien
actcattatgtcctcaaagtggcttgagttgct

SEQ ID NO: 992232 - DNA, 33 bp, Homo sapien
actcattatgtcctcacagtggcttgagttgct

SEQ ID NO: 992233 - DNA, 33 bp, Homo sapien
gtttatcggccaaatgccatcattaaaccctag

SEQ ID NO: 992234 - DNA, 33 bp, Homo sapien
gtttatcggccaaatggcatcattaaaccctag

SEQ ID NO: 992235 - DNA, 33 bp, Homo sapien
gggtgatggtccttaactaggagaaaataaccc

SEQ ID NO: 992236 - DNA, 33 bp, Homo sapien
gggtgatggtccttaattaggagaaaataaccc

SEQ ID NO: 992237 - DNA, 33 bp, Homo sapien
atagtagctcagttcagctatgcaaacttggca

SEQ ID NO: 992238 - DNA, 33 bp, Homo sapien
atagtagctcagttcatctatgcaaacttggca

SEQ ID NO: 992239 - DNA, 33 bp, Homo sapien
caatttagctttgcacaacctttaagacaataa

SEQ ID NO: 992240 - DNA, 33 bp, Homo sapien
caatttagctttgcacgacctttaagacaataa

SEQ ID NO: 992241 - DNA, 33 bp, Homo sapien
aacctcattttatgcacgaagtaactaaggctt

SEQ ID NO: 992242 - DNA, 33 bp, Homo sapien
aacctcattttatgcatgaagtaactaaggctt

SEQ ID NO: 992243 - DNA, 33 bp, Homo sapien
tagagtacagattcaacgagttttcctcaagtt

SEQ ID NO: 992244 - DNA, 33 bp, Homo sapien
tagagtacagattcaaggagttttcctcaagtt

SEQ ID NO: 992245 - DNA, 33 bp, Homo sapien
acaaactcatctaaataactggtctggccccag

SEQ ID NO: 992246 - DNA, 33 bp, Homo sapien
acaaactcatctaaatgactggtctggccccag

SEQ ID NO: 992247 - DNA, 33 bp, Homo sapien
ctagctcacacttaaaccttatattgcatttta

SEQ ID NO: 992248 - DNA, 33 bp, Homo sapien
ctagctcacacttaaatcttatattgcatttta

SEQ ID NO: 992249 - DNA, 33 bp, Homo sapien
atgtatagggggaatccagtcactgctaagtgt

SEQ ID NO: 992250 - DNA, 33 bp, Homo sapien
atgtatagggggaatctagtcactgctaagtgt

SEQ ID NO: 992251 - DNA, 33 bp, Homo sapien
gtgtaacttacccgaaccttagttcctattttg

SEQ ID NO: 992252 - DNA, 33 bp, Homo sapien
gtgtaacttacccgaatcttagttcctattttg

SEQ ID NO: 992253 - DNA, 33 bp, Homo sapien
gtatagcaatagcataactctatgtagacgcta

SEQ ID NO: 992254 - DNA, 33 bp, Homo sapien
gtatagcaatagcatatctctatgtagacgcta

SEQ ID NO: 992255 - DNA, 33 bp, Homo sapien
gatggtatataaattccagtcagatgtcagcag

SEQ ID NO: 992256 - DNA, 33 bp, Homo sapien
gatggtatataaattctagtcagatgtcagcag

SEQ ID NO: 992257 - DNA, 33 bp, Homo sapien
caaattggattggcaacacttgagttgttatga

SEQ ID NO: 992258 - DNA, 33 bp, Homo sapien
caaattggattggcaatacttgagttgttatga

SEQ ID NO: 992259 - DNA, 33 bp, Homo sapien
aagctattacagtagacaccaacatagtcgaga

SEQ ID NO: 992260 - DNA, 33 bp, Homo sapien
aagctattacagtagataccaacatagtcgaga

SEQ ID NO: 992261 - DNA, 33 bp, Homo sapien
tgctacaagctcttggaaaacataacctattat

SEQ ID NO: 992262 - DNA, 33 bp, Homo sapien
tgctacaagctcttggtaaacataacctattat

SEQ ID NO: 992263 - DNA, 33 bp, Homo sapien
gtgtctcagaatgctaacctagaatcacaaaca

SEQ ID NO: 992264 - DNA, 33 bp, Homo sapien
gtgtctcagaatgctaccctagaatcacaaaca

SEQ ID NO: 992265 - DNA, 33 bp, Homo sapien
cagccaaaaaagtacaatcaaaccctctctagc

SEQ ID NO: 992266 - DNA, 33 bp, Homo sapien
cagccaaaaaagtacagtcaaaccctctctagc

SEQ ID NO: 992267 - DNA, 33 bp, Homo sapien
aacctatttggttagacaagaaaaatatactgg

SEQ ID NO: 992268 - DNA, 33 bp, Homo sapien
aacctatttggttagataagaaaaatatactgg

SEQ ID NO: 992269 - DNA, 33 bp, Homo sapien
ggatacccagggaagacgttctttcctccacca

SEQ ID NO: 992270 - DNA, 33 bp, Homo sapien
ggatacccagggaagatgttctttcctccacca

SEQ ID NO: 992271 - DNA, 33 bp, Homo sapien
ccctcctgtaatgtaaccactttgcaacttcat

SEQ ID NO: 992272 - DNA, 33 bp, Homo sapien
ccctcctgtaatgtaatcactttgcaacttcat

SEQ ID NO: 992273 - DNA, 33 bp, Homo sapien
atgacttcagttagccaatgaaagtcttgctgc

SEQ ID NO: 992274 - DNA, 33 bp, Homo sapien
atgacttcagttagccgatgaaagtcttgctgc

SEQ ID NO: 992275 - DNA, 33 bp, Homo sapien
attgtcctggttgaggccatattaggtcagcag

SEQ ID NO: 992276 - DNA, 33 bp, Homo sapien
attgtcctggttgaggtcatattaggtcagcag

SEQ ID NO: 992277 - DNA, 33 bp, Homo sapien
ctcttgaagcaatggaccaagaaacttgtggat

SEQ ID NO: 992278 - DNA, 33 bp, Homo sapien
ctcttgaagcaatggagcaagaaacttgtggat

SEQ ID NO: 992279 - DNA, 33 bp, Homo sapien
aatcaagcctacatttcaaaggtttcctgaagc

SEQ ID NO: 992280 - DNA, 33 bp, Homo sapien
aatcaagcctacatttgaaaggtttcctgaagc

SEQ ID NO: 992281 - DNA, 33 bp, Homo sapien
aggatgctctttcctacgttgtttcatctgacc

SEQ ID NO: 992282 - DNA, 33 bp, Homo sapien
aggatgctctttcctaggttgtttcatctgacc

SEQ ID NO: 992283 - DNA, 33 bp, Homo sapien
ccaccccaaagaataaaccagttgcttttatgg

SEQ ID NO: 992284 - DNA, 33 bp, Homo sapien
ccaccccaaagaataacccagttgcttttatgg

SEQ ID NO: 992285 - DNA, 33 bp, Homo sapien
agacatctgtttctacccccattccaccccata

SEQ ID NO: 992286 - DNA, 33 bp, Homo sapien
agacatctgtttctactcccattccaccccata

SEQ ID NO: 992287 - DNA, 33 bp, Homo sapien
ggcctttaatatctcgccacaggagtcagaaag

SEQ ID NO: 992288 - DNA, 33 bp, Homo sapien
ggcctttaatatctcgtcacaggagtcagaaag

SEQ ID NO: 992289 - DNA, 33 bp, Homo sapien
tcatttagacctgactaagctaccctctcttca

SEQ ID NO: 992290 - DNA, 33 bp, Homo sapien
tcatttagacctgactgagctaccctctcttca

SEQ ID NO: 992291 - DNA, 33 bp, Homo sapien
cactcaagatccaccacgtcaaaccttggttta

SEQ ID NO: 992292 - DNA, 33 bp, Homo sapien
cactcaagatccaccatgtcaaaccttggttta

SEQ ID NO: 992293 - DNA, 33 bp, Homo sapien
tgcctgccacgcatcaagtgttcagtaaataga

SEQ ID NO: 992294 - DNA, 33 bp, Homo sapien
tgcctgccacgcatcaggtgttcagtaaataga

SEQ ID NO: 992295 - DNA, 33 bp, Homo sapien
cctgaccccactgatactacatttcacccattt

SEQ ID NO: 992296 - DNA, 33 bp, Homo sapien
cctgaccccactgatagtacatttcacccattt

SEQ ID NO: 992297 - DNA, 33 bp, Homo sapien
atccattaagatacacagcattaacattcttcc

SEQ ID NO: 992298 - DNA, 33 bp, Homo sapien
atccattaagatacacggcattaacattcttcc

SEQ ID NO: 992299 - DNA, 33 bp, Homo sapien
ctttttatgctacagaagtgttgatgttatgat

SEQ ID NO: 992300 - DNA, 33 bp, Homo sapien
ctttttatgctacagacgtgttgatgttatgat

SEQ ID NO: 992301 - DNA, 33 bp, Homo sapien
tgaagaatgagtgaaaatcagttgtccaagaga

SEQ ID NO: 992302 - DNA, 33 bp, Homo sapien
tgaagaatgagtgaaagtcagttgtccaagaga

SEQ ID NO: 992303 - DNA, 33 bp, Homo sapien
tttcttgatccttaagactaggtgagggccttg

SEQ ID NO: 992304 - DNA, 33 bp, Homo sapien
tttcttgatccttaagtctaggtgagggccttg

SEQ ID NO: 992305 - DNA, 33 bp, Homo sapien
cacaaagacatcaaaaagaccatacacacccat

SEQ ID NO: 992306 - DNA, 33 bp, Homo sapien
cacaaagacatcaaaaggaccatacacacccat

SEQ ID NO: 992307 - DNA, 33 bp, Homo sapien
gggtttcaggagtaaactgagctcctaattctt

SEQ ID NO: 992308 - DNA, 33 bp, Homo sapien
gggtttcaggagtaaattgagctcctaattctt

SEQ ID NO: 992309 - DNA, 33 bp, Homo sapien
tctatctcatgttcagaattcagctgacacatc

SEQ ID NO: 992310 - DNA, 33 bp, Homo sapien
tctatctcatgttcagtattcagctgacacatc

SEQ ID NO: 992311 - DNA, 33 bp, Homo sapien
cagatcctcagctttaccttctccctttcctct

SEQ ID NO: 992312 - DNA, 33 bp, Homo sapien
cagatcctcagctttatcttctccctttcctct

SEQ ID NO: 992313 - DNA, 33 bp, Homo sapien
accaggtacagtattcaagtaggtgctcagtag

SEQ ID NO: 992314 - DNA, 33 bp, Homo sapien
accaggtacagtattcgagtaggtgctcagtag

SEQ ID NO: 992315 - DNA, 33 bp, Homo sapien
caggtgactgttttcaaatgtagaaaggagcca

SEQ ID NO: 992316 - DNA, 33 bp, Homo sapien
caggtgactgttttcagatgtagaaaggagcca

SEQ ID NO: 992317 - DNA, 33 bp, Homo sapien
tgatctttggaaggcgaaagggcagctaaagca

SEQ ID NO: 992318 - DNA, 33 bp, Homo sapien
tgatctttggaaggcggaagggcagctaaagca

SEQ ID NO: 992319 - DNA, 33 bp, Homo sapien
tcaatctctgaccttgaaaaaacattttaattt

SEQ ID NO: 992320 - DNA, 33 bp, Homo sapien
tcaatctctgaccttggaaaaacattttaattt

SEQ ID NO: 992321 - DNA, 33 bp, Homo sapien
ttcacttaatgccaaaaataacaaagtacagtc

SEQ ID NO: 992322 - DNA, 33 bp, Homo sapien
ttcacttaatgccaaacataacaaagtacagtc

SEQ ID NO: 992323 - DNA, 33 bp, Homo sapien
ttaaaatgtatgaaaaattattgttgcctgtgg

SEQ ID NO: 992324 - DNA, 33 bp, Homo sapien
ttaaaatgtatgaaaagttattgttgcctgtgg

SEQ ID NO: 992325 - DNA, 33 bp, Homo sapien
tgacatggacaagctaaattgattattgttatt

SEQ ID NO: 992326 - DNA, 33 bp, Homo sapien
tgacatggacaagctagattgattattgttatt

SEQ ID NO: 992327 - DNA, 33 bp, Homo sapien
gtgctcaagatttgctaaagataatgatagatt

SEQ ID NO: 992328 - DNA, 33 bp, Homo sapien
gtgctcaagatttgctgaagataatgatagatt

SEQ ID NO: 992329 - DNA, 33 bp, Homo sapien
aaacacatacccagataaccacctttcaacttc

SEQ ID NO: 992330 - DNA, 33 bp, Homo sapien
aaacacatacccagatgaccacctttcaacttc

SEQ ID NO: 992331 - DNA, 33 bp, Homo sapien
aggaagaaaactgagacggaagtaaatgagctt

SEQ ID NO: 992332 - DNA, 33 bp, Homo sapien
aggaagaaaactgagatggaagtaaatgagctt

SEQ ID NO: 992333 - DNA, 33 bp, Homo sapien
catattgtttcctccacagctagaattctcaaa

SEQ ID NO: 992334 - DNA, 33 bp, Homo sapien
catattgtttcctccagagctagaattctcaaa

SEQ ID NO: 992335 - DNA, 33 bp, Homo sapien
gctggttgacctccaccatccaagagtcctatg

SEQ ID NO: 992336 - DNA, 33 bp, Homo sapien
gctggttgacctccactatccaagagtcctatg

SEQ ID NO: 992337 - DNA, 33 bp, Homo sapien
aagagtcctatgcaaacccaaacttcctagtta

SEQ ID NO: 992338 - DNA, 33 bp, Homo sapien
aagagtcctatgcaaatccaaacttcctagtta

SEQ ID NO: 992339 - DNA, 33 bp, Homo sapien
agagcataaatgtgtacaggaaagtggaggaaa

SEQ ID NO: 992340 - DNA, 33 bp, Homo sapien
agagcataaatgtgtataggaaagtggaggaaa

SEQ ID NO: 992341 - DNA, 33 bp, Homo sapien
acaggagcagtctgcaactctcaggaatgtgaa

SEQ ID NO: 992342 - DNA, 33 bp, Homo sapien
acaggagcagtctgcagctctcaggaatgtgaa

SEQ ID NO: 992343 - DNA, 33 bp, Homo sapien
agctgaagattggagaaatgcactcattgttca

SEQ ID NO: 992344 - DNA, 33 bp, Homo sapien
agctgaagattggagagatgcactcattgttca

SEQ ID NO: 992345 - DNA, 33 bp, Homo sapien
ggaatggaataggagacaagtagaataggtgag

SEQ ID NO: 992346 - DNA, 33 bp, Homo sapien
ggaatggaataggagataagtagaataggtgag

SEQ ID NO: 992347 - DNA, 33 bp, Homo sapien
taggatatatgtgatgcacacggtttaccgtga

SEQ ID NO: 992348 - DNA, 33 bp, Homo sapien
taggatatatgtgatggacacggtttaccgtga

SEQ ID NO: 992349 - DNA, 33 bp, Homo sapien
gttcctcagaaaatgcaaatatggctttcccaa

SEQ ID NO: 992350 - DNA, 33 bp, Homo sapien
gttcctcagaaaatgcgaatatggctttcccaa

SEQ ID NO: 992351 - DNA, 33 bp, Homo sapien
atggccacgtagtaaacggtaaagctggcttct

SEQ ID NO: 992352 - DNA, 33 bp, Homo sapien
atggccacgtagtaaatggtaaagctggcttct

SEQ ID NO: 992353 - DNA, 33 bp, Homo sapien
gacagttataggacaaactttagctcccagtga

SEQ ID NO: 992354 - DNA, 33 bp, Homo sapien
gacagttataggacaacctttagctcccagtga

SEQ ID NO: 992355 - DNA, 33 bp, Homo sapien
atatagtaggtccttacctgatgacaaaagttt

SEQ ID NO: 992356 - DNA, 33 bp, Homo sapien
atatagtaggtccttagctgatgacaaaagttt

SEQ ID NO: 992357 - DNA, 33 bp, Homo sapien
tttttttctactgagaagtgagacacaaacact

SEQ ID NO: 992358 - DNA, 33 bp, Homo sapien
tttttttctactgagaggtgagacacaaacact

SEQ ID NO: 992359 - DNA, 33 bp, Homo sapien
tcttggctcaatttcaacatctcactcatccat

SEQ ID NO: 992360 - DNA, 33 bp, Homo sapien
tcttggctcaatttcagcatctcactcatccat

SEQ ID NO: 992361 - DNA, 33 bp, Homo sapien
tttcatacttgaatcccaaaaaccttagtacca

SEQ ID NO: 992362 - DNA, 33 bp, Homo sapien
tttcatacttgaatccgaaaaaccttagtacca

SEQ ID NO: 992363 - DNA, 33 bp, Homo sapien
atgcttctttgctttgcattcatatttcagaca

SEQ ID NO: 992364 - DNA, 33 bp, Homo sapien
atgcttctttgctttgtattcatatttcagaca

SEQ ID NO: 992365 - DNA, 33 bp, Homo sapien
ttccaaacatttcaaaagggttgagcatccagc

SEQ ID NO: 992366 - DNA, 33 bp, Homo sapien
ttccaaacatttcaaacgggttgagcatccagc

SEQ ID NO: 992367 - DNA, 33 bp, Homo sapien
atattgtgtacactaacgatttgttcctgcatt

SEQ ID NO: 992368 - DNA, 33 bp, Homo sapien
atattgtgtacactaatgatttgttcctgcatt

SEQ ID NO: 992369 - DNA, 33 bp, Homo sapien
atgactaaaaagcaaacagaccaaagcaattta

SEQ ID NO: 992370 - DNA, 33 bp, Homo sapien
atgactaaaaagcaaatagaccaaagcaattta

SEQ ID NO: 992371 - DNA, 33 bp, Homo sapien
acaaagcatatatatacagagcttcaaaaaatg

SEQ ID NO: 992372 - DNA, 33 bp, Homo sapien
acaaagcatatatatagagagcttcaaaaaatg

SEQ ID NO: 992373 - DNA, 33 bp, Homo sapien
agagtttagatgtaagaactctcattttgattg

SEQ ID NO: 992374 - DNA, 33 bp, Homo sapien
agagtttagatgtaaggactctcattttgattg

SEQ ID NO: 992375 - DNA, 33 bp, Homo sapien
gaaagagttgcttgagaaattgtttttttctga

SEQ ID NO: 992376 - DNA, 33 bp, Homo sapien
gaaagagttgcttgaggaattgtttttttctga

SEQ ID NO: 992377 - DNA, 33 bp, Homo sapien
ttgaaagacctagtccaacaaaaattatatctt

SEQ ID NO: 992378 - DNA, 33 bp, Homo sapien
ttgaaagacctagtcctacaaaaattatatctt

SEQ ID NO: 992379 - DNA, 33 bp, Homo sapien
atatgcttactacacaaaatatgaaatgagagg

SEQ ID NO: 992380 - DNA, 33 bp, Homo sapien
atatgcttactacacagaatatgaaatgagagg

SEQ ID NO: 992381 - DNA, 33 bp, Homo sapien
aaagtgtgtataaatacgtgaaaaatgtgaatt

SEQ ID NO: 992382 - DNA, 33 bp, Homo sapien
aaagtgtgtataaatatgtgaaaaatgtgaatt

SEQ ID NO: 992383 - DNA, 33 bp, Homo sapien
ataagagtctcacttccagtaatcaatctgagg

SEQ ID NO: 992384 - DNA, 33 bp, Homo sapien
ataagagtctcacttctagtaatcaatctgagg

SEQ ID NO: 992385 - DNA, 33 bp, Homo sapien
ccatacatttgaaccacgcagaatgtagccttt

SEQ ID NO: 992386 - DNA, 33 bp, Homo sapien
ccatacatttgaaccatgcagaatgtagccttt

SEQ ID NO: 992387 - DNA, 33 bp, Homo sapien
tgattatattaatatcaaactttcaggaccatc

SEQ ID NO: 992388 - DNA, 33 bp, Homo sapien
tgattatattaatatccaactttcaggaccatc

SEQ ID NO: 992389 - DNA, 33 bp, Homo sapien
ataggtgcaacctgaacgaaatgtctcatatga

SEQ ID NO: 992390 - DNA, 33 bp, Homo sapien
ataggtgcaacctgaatgaaatgtctcatatga

SEQ ID NO: 992391 - DNA, 33 bp, Homo sapien
agtaagtatggttgtcaaaggaaagagaagatt

SEQ ID NO: 992392 - DNA, 33 bp, Homo sapien
agtaagtatggttgtcgaaggaaagagaagatt

SEQ ID NO: 992393 - DNA, 33 bp, Homo sapien
aaaaggtttcatgtcccagggataatttttttt

SEQ ID NO: 992394 - DNA, 33 bp, Homo sapien
aaaaggtttcatgtcctagggataatttttttt

SEQ ID NO: 992395 - DNA, 33 bp, Homo sapien
tttctagtttctgacacaagacacttgaaagca

SEQ ID NO: 992396 - DNA, 33 bp, Homo sapien
tttctagtttctgacagaagacacttgaaagca

SEQ ID NO: 992397 - DNA, 33 bp, Homo sapien
atcaacagctcaattacgtaaacagagaattca

SEQ ID NO: 992398 - DNA, 33 bp, Homo sapien
atcaacagctcaattatgtaaacagagaattca

SEQ ID NO: 992399 - DNA, 33 bp, Homo sapien
atacaagttccccaaaattgcctctaaaagatg

SEQ ID NO: 992400 - DNA, 33 bp, Homo sapien
atacaagttccccaaagttgcctctaaaagatg

SEQ ID NO: 992401 - DNA, 33 bp, Homo sapien
gtgttctgatccaatccagaggttaccttctaa

SEQ ID NO: 992402 - DNA, 33 bp, Homo sapien
gtgttctgatccaatcgagaggttaccttctaa

SEQ ID NO: 992403 - DNA, 33 bp, Homo sapien
gagttcactaacctaaacatcaaatcaaagccc

SEQ ID NO: 992404 - DNA, 33 bp, Homo sapien
gagttcactaacctaatcatcaaatcaaagccc

SEQ ID NO: 992405 - DNA, 33 bp, Homo sapien
tgacaacttttcacaaatcctatgcctccagat

SEQ ID NO: 992406 - DNA, 33 bp, Homo sapien
tgacaacttttcacaactcctatgcctccagat

SEQ ID NO: 992407 - DNA, 33 bp, Homo sapien
ttctgctgtttctagcactctttcaggtaattt

SEQ ID NO: 992408 - DNA, 33 bp, Homo sapien
ttctgctgtttctagcgctctttcaggtaattt

SEQ ID NO: 992409 - DNA, 33 bp, Homo sapien
tagcccaaatatccaaactgaagttagcttaaa

SEQ ID NO: 992410 - DNA, 33 bp, Homo sapien
tagcccaaatatccaagctgaagttagcttaaa

SEQ ID NO: 992411 - DNA, 33 bp, Homo sapien
cccttggtaaatcctcacctttcatctaactgg

SEQ ID NO: 992412 - DNA, 33 bp, Homo sapien
cccttggtaaatcctcgcctttcatctaactgg

SEQ ID NO: 992413 - DNA, 33 bp, Homo sapien
agtttttgactttgcaaatacgtcacttagtag

SEQ ID NO: 992414 - DNA, 33 bp, Homo sapien
agtttttgactttgcagatacgtcacttagtag

SEQ ID NO: 992415 - DNA, 33 bp, Homo sapien
taatattttaaatggccgataatcttgaagaag

SEQ ID NO: 992416 - DNA, 33 bp, Homo sapien
taatattttaaatggctgataatcttgaagaag

SEQ ID NO: 992417 - DNA, 33 bp, Homo sapien
acaaaggatcatctagaccaaaaagtcaatagt

SEQ ID NO: 992418 - DNA, 33 bp, Homo sapien
acaaaggatcatctagcccaaaaagtcaatagt

SEQ ID NO: 992419 - DNA, 33 bp, Homo sapien
tatttgggtatgcctagagctaatttggctgtc

SEQ ID NO: 992420 - DNA, 33 bp, Homo sapien
tatttgggtatgcctatagctaatttggctgtc

SEQ ID NO: 992421 - DNA, 33 bp, Homo sapien
tagtttggacaggggaaaaaggtggagaacatt

SEQ ID NO: 992422 - DNA, 33 bp, Homo sapien
tagtttggacaggggagaaaggtggagaacatt

SEQ ID NO: 992423 - DNA, 33 bp, Homo sapien
atcttattcttatatacgttgggggagtttttg

SEQ ID NO: 992424 - DNA, 33 bp, Homo sapien
atcttattcttatatatgttgggggagtttttg

SEQ ID NO: 992425 - DNA, 33 bp, Homo sapien
aattagtaaacaatgacaagaggaggcataaca

SEQ ID NO: 992426 - DNA, 33 bp, Homo sapien
aattagtaaacaatgataagaggaggcataaca

SEQ ID NO: 992427 - DNA, 33 bp, Homo sapien
ggagactcaaagatgaaatggttgatgagttta

SEQ ID NO: 992428 - DNA, 33 bp, Homo sapien
ggagactcaaagatgacatggttgatgagttta

SEQ ID NO: 992429 - DNA, 33 bp, Homo sapien
ctgttacttgagtccaaatatatttccatctga

SEQ ID NO: 992430 - DNA, 33 bp, Homo sapien
ctgttacttgagtccagatatatttccatctga

SEQ ID NO: 992431 - DNA, 33 bp, Homo sapien
caccacagctaaaaaagccatttaaatatgaca

SEQ ID NO: 992432 - DNA, 33 bp, Homo sapien
caccacagctaaaaaatccatttaaatatgaca

SEQ ID NO: 992433 - DNA, 33 bp, Homo sapien
gatcttgcactcttaacatctataattctctac

SEQ ID NO: 992434 - DNA, 33 bp, Homo sapien
gatcttgcactcttaagatctataattctctac

SEQ ID NO: 992435 - DNA, 33 bp, Homo sapien
ttgggtcacataaactaagtgagagcagacagg

SEQ ID NO: 992436 - DNA, 33 bp, Homo sapien
ttgggtcacataaactgagtgagagcagacagg

SEQ ID NO: 992437 - DNA, 33 bp, Homo sapien
atgaaaacgacaaagggatgttggaaatttaaa

SEQ ID NO: 992438 - DNA, 33 bp, Homo sapien
atgaaaacgacaaaggtatgttggaaatttaaa

SEQ ID NO: 992439 - DNA, 33 bp, Homo sapien
gtgctctgtttattaccgcacttagaaagcttt

SEQ ID NO: 992440 - DNA, 33 bp, Homo sapien
gtgctctgtttattactgcacttagaaagcttt

SEQ ID NO: 992441 - DNA, 33 bp, Homo sapien
ccagtatttcctgttacagtttctgcctttggt

SEQ ID NO: 992442 - DNA, 33 bp, Homo sapien
ccagtatttcctgttatagtttctgcctttggt

SEQ ID NO: 992443 - DNA, 33 bp, Homo sapien
tgaataaatataataaccgaagttgtgaaatgt

SEQ ID NO: 992444 - DNA, 33 bp, Homo sapien
tgaataaatataataatcgaagttgtgaaatgt

SEQ ID NO: 992445 - DNA, 33 bp, Homo sapien
cactcaataccgcaaaatatacaatgtttaata

SEQ ID NO: 992446 - DNA, 33 bp, Homo sapien
cactcaataccgcaaagtatacaatgtttaata

SEQ ID NO: 992447 - DNA, 33 bp, Homo sapien
acaaataagcatgaaaatggatcataatcaaga

SEQ ID NO: 992448 - DNA, 33 bp, Homo sapien
acaaataagcatgaaagtggatcataatcaaga

SEQ ID NO: 992449 - DNA, 33 bp, Homo sapien
ttgattgaagaaaatgaacagggctttagtaat

SEQ ID NO: 992450 - DNA, 33 bp, Homo sapien
ttgattgaagaaaatggacagggctttagtaat

SEQ ID NO: 992451 - DNA, 33 bp, Homo sapien
atgttccaaacaccaacggaagccaatttgcat

SEQ ID NO: 992452 - DNA, 33 bp, Homo sapien
atgttccaaacaccaatggaagccaatttgcat

SEQ ID NO: 992453 - DNA, 33 bp, Homo sapien
atcaaagtaagtattaaatgtccaaagcagggg

SEQ ID NO: 992454 - DNA, 33 bp, Homo sapien
atcaaagtaagtattagatgtccaaagcagggg

SEQ ID NO: 992455 - DNA, 33 bp, Homo sapien
cctgattgcttattaccggctctgcatcctgaa

SEQ ID NO: 992456 - DNA, 33 bp, Homo sapien
cctgattgcttattacgggctctgcatcctgaa

SEQ ID NO: 992457 - DNA, 33 bp, Homo sapien
tttttagtaactgctaacttgaataacttccct

SEQ ID NO: 992458 - DNA, 33 bp, Homo sapien
tttttagtaactgctagcttgaataacttccct

SEQ ID NO: 992459 - DNA, 33 bp, Homo sapien
tcattgagccttagaacggttaagaaaactgcc

SEQ ID NO: 992460 - DNA, 33 bp, Homo sapien
tcattgagccttagaatggttaagaaaactgcc

SEQ ID NO: 992461 - DNA, 33 bp, Homo sapien
gaggagcacaagtttaagagtacaggttctaaa

SEQ ID NO: 992462 - DNA, 33 bp, Homo sapien
gaggagcacaagtttaggagtacaggttctaaa

SEQ ID NO: 992463 - DNA, 33 bp, Homo sapien
tccaaaacaaaggaacagcctattatgcaaacg

SEQ ID NO: 992464 - DNA, 33 bp, Homo sapien
tccaaaacaaaggaactgcctattatgcaaacg

SEQ ID NO: 992465 - DNA, 33 bp, Homo sapien
gctctatgggtgctgaatacacagggttgaata

SEQ ID NO: 992466 - DNA, 33 bp, Homo sapien
gctctatgggtgctgactacacagggttgaata

SEQ ID NO: 992467 - DNA, 33 bp, Homo sapien
agtatggctcccatcacctgagtagtgagtata

SEQ ID NO: 992468 - DNA, 33 bp, Homo sapien
agtatggctcccatcatctgagtagtgagtata

SEQ ID NO: 992469 - DNA, 33 bp, Homo sapien
catttagcaaatatgcacttgatctaagctcca

SEQ ID NO: 992470 - DNA, 33 bp, Homo sapien
catttagcaaatatgctcttgatctaagctcca

SEQ ID NO: 992471 - DNA, 33 bp, Homo sapien
tgccaactgaatcagcgcagtgtaaatacaagg

SEQ ID NO: 992472 - DNA, 33 bp, Homo sapien
tgccaactgaatcagctcagtgtaaatacaagg

SEQ ID NO: 992473 - DNA, 33 bp, Homo sapien
aatgtatgtaccttaacgaacatacattgaata

SEQ ID NO: 992474 - DNA, 33 bp, Homo sapien
aatgtatgtaccttaatgaacatacattgaata

SEQ ID NO: 992475 - DNA, 33 bp, Homo sapien
tccttccagaacaaagactgaaggagcatccct

SEQ ID NO: 992476 - DNA, 33 bp, Homo sapien
tccttccagaacaaaggctgaaggagcatccct

SEQ ID NO: 992477 - DNA, 33 bp, Homo sapien
aatatgtcaacaggttaaaaatgcttatttctc

SEQ ID NO: 992478 - DNA, 33 bp, Homo sapien
aatatgtcaacaggttgaaaatgcttatttctc

SEQ ID NO: 992479 - DNA, 33 bp, Homo sapien
gaaagtttatttctcactcaagtcacagtccca

SEQ ID NO: 992480 - DNA, 33 bp, Homo sapien
gaaagtttatttctcattcaagtcacagtccca

SEQ ID NO: 992481 - DNA, 33 bp, Homo sapien
gcttattagcttaataaacttttggattgagat

SEQ ID NO: 992482 - DNA, 33 bp, Homo sapien
gcttattagcttaatacacttttggattgagat

SEQ ID NO: 992483 - DNA, 33 bp, Homo sapien
catacacgtgcaggtaccttttcaatgatatga

SEQ ID NO: 992484 - DNA, 33 bp, Homo sapien
catacacgtgcaggtatcttttcaatgatatga

SEQ ID NO: 992485 - DNA, 33 bp, Homo sapien
tttggaatcctgattaactgaccaactctttca

SEQ ID NO: 992486 - DNA, 33 bp, Homo sapien
tttggaatcctgattatctgaccaactctttca

SEQ ID NO: 992487 - DNA, 33 bp, Homo sapien
aggacttgatgtagccaatccagattaaaaaaa

SEQ ID NO: 992488 - DNA, 33 bp, Homo sapien
aggacttgatgtagcctatccagattaaaaaaa

SEQ ID NO: 992489 - DNA, 33 bp, Homo sapien
actgagaaatgagtgacgtgaagaggtgactag

SEQ ID NO: 992490 - DNA, 33 bp, Homo sapien
actgagaaatgagtgatgtgaagaggtgactag

SEQ ID NO: 992491 - DNA, 33 bp, Homo sapien
actttgggtactagaacttaataggtaaggaac

SEQ ID NO: 992492 - DNA, 33 bp, Homo sapien
actttgggtactagaatttaataggtaaggaac

SEQ ID NO: 992493 - DNA, 33 bp, Homo sapien
agtctagattcagttggattcttatcagttgca

SEQ ID NO: 992494 - DNA, 33 bp, Homo sapien
agtctagattcagttgtattcttatcagttgca

SEQ ID NO: 992495 - DNA, 33 bp, Homo sapien
gctcaactgatgctttctgtacgtgcttccttc

SEQ ID NO: 992496 - DNA, 33 bp, Homo sapien
gctcaactgatgctttgtgtacgtgcttccttc

SEQ ID NO: 992497 - DNA, 33 bp, Homo sapien
gagaagctttccagagcaggtaatgtcagacct

SEQ ID NO: 992498 - DNA, 33 bp, Homo sapien
gagaagctttccagagtaggtaatgtcagacct

SEQ ID NO: 992499 - DNA, 33 bp, Homo sapien
tatttggcattacaaaactcagttatctagata

SEQ ID NO: 992500 - DNA, 33 bp, Homo sapien
tatttggcattacaaagctcagttatctagata

SEQ ID NO: 992501 - DNA, 33 bp, Homo sapien
gggagctaaagagtgaaaacacatggacacata

SEQ ID NO: 992502 - DNA, 33 bp, Homo sapien
gggagctaaagagtgagaacacatggacacata

SEQ ID NO: 992503 - DNA, 33 bp, Homo sapien
ttgtatgatcctacagaactctgacctcctttc

SEQ ID NO: 992504 - DNA, 33 bp, Homo sapien
ttgtatgatcctacagtactctgacctcctttc

SEQ ID NO: 992505 - DNA, 33 bp, Homo sapien
atgctgttgtggaaaaaattctaattgcatgaa

SEQ ID NO: 992506 - DNA, 33 bp, Homo sapien
atgctgttgtggaaaacattctaattgcatgaa

SEQ ID NO: 992507 - DNA, 33 bp, Homo sapien
ggggtaggatctaataaatgtcaagcactgttc

SEQ ID NO: 992508 - DNA, 33 bp, Homo sapien
ggggtaggatctaatatatgtcaagcactgttc

SEQ ID NO: 992509 - DNA, 33 bp, Homo sapien
gctcaacagtcaggcaagaggggtttcgtctta

SEQ ID NO: 992510 - DNA, 33 bp, Homo sapien
gctcaacagtcaggcaggaggggtttcgtctta

SEQ ID NO: 992511 - DNA, 33 bp, Homo sapien
aggcaggtgctatttccaccaggactcataaaa

SEQ ID NO: 992512 - DNA, 33 bp, Homo sapien
aggcaggtgctatttctaccaggactcataaaa

SEQ ID NO: 992513 - DNA, 33 bp, Homo sapien
ccttaaaatagagagaacaatatcctgctgcag

SEQ ID NO: 992514 - DNA, 33 bp, Homo sapien
ccttaaaatagagagagcaatatcctgctgcag

SEQ ID NO: 992515 - DNA, 33 bp, Homo sapien
tgaactgaggatcggaaaggcaaagggactatc

SEQ ID NO: 992516 - DNA, 33 bp, Homo sapien
tgaactgaggatcggagaggcaaagggactatc

SEQ ID NO: 992517 - DNA, 33 bp, Homo sapien
tgaagtgatggtatcaacagactgtggtaaatt

SEQ ID NO: 992518 - DNA, 33 bp, Homo sapien
tgaagtgatggtatcagcagactgtggtaaatt

SEQ ID NO: 992519 - DNA, 33 bp, Homo sapien
taagtacacagcactacgttcggttataccctc

SEQ ID NO: 992520 - DNA, 33 bp, Homo sapien
taagtacacagcactatgttcggttataccctc

SEQ ID NO: 992521 - DNA, 33 bp, Homo sapien
acacatgaggaaagaaggccatatgatgataga

SEQ ID NO: 992522 - DNA, 33 bp, Homo sapien
acacatgaggaaagaatgccatatgatgataga

SEQ ID NO: 992523 - DNA, 33 bp, Homo sapien
tgccaagaaatgtgaaaaaatttctgaattttg

SEQ ID NO: 992524 - DNA, 33 bp, Homo sapien
tgccaagaaatgtgaacaaatttctgaattttg

SEQ ID NO: 992525 - DNA, 33 bp, Homo sapien
cattttgcttggattacacctgacagaaccgaa

SEQ ID NO: 992526 - DNA, 33 bp, Homo sapien
cattttgcttggattatacctgacagaaccgaa

SEQ ID NO: 992527 - DNA, 33 bp, Homo sapien
caagcagttggcaagaaaggtttttatgtgtcc

SEQ ID NO: 992528 - DNA, 33 bp, Homo sapien
caagcagttggcaagacaggtttttatgtgtcc

SEQ ID NO: 992529 - DNA, 33 bp, Homo sapien
tttccatagttgaaggaaggaatgaatgaggag

SEQ ID NO: 992530 - DNA, 33 bp, Homo sapien
tttccatagttgaagggaggaatgaatgaggag

SEQ ID NO: 992531 - DNA, 33 bp, Homo sapien
ctaattcattcatccactcattgagaacgtatt

SEQ ID NO: 992532 - DNA, 33 bp, Homo sapien
ctaattcattcatccattcattgagaacgtatt

SEQ ID NO: 992533 - DNA, 33 bp, Homo sapien
acagttaactcggacacactttagtgcttttca

SEQ ID NO: 992534 - DNA, 33 bp, Homo sapien
acagttaactcggacatactttagtgcttttca

SEQ ID NO: 992535 - DNA, 33 bp, Homo sapien
acagccagtttctccacagagttgtgatcagat

SEQ ID NO: 992536 - DNA, 33 bp, Homo sapien
acagccagtttctccatagagttgtgatcagat

SEQ ID NO: 992537 - DNA, 33 bp, Homo sapien
gggggcatgtggggacggacaccaatgaagcga

SEQ ID NO: 992538 - DNA, 33 bp, Homo sapien
gggggcatgtggggactgacaccaatgaagcga

SEQ ID NO: 992539 - DNA, 33 bp, Homo sapien
cattggtctcatttcacaattgggaaaactgat

SEQ ID NO: 992540 - DNA, 33 bp, Homo sapien
cattggtctcatttcataattgggaaaactgat

SEQ ID NO: 992541 - DNA, 33 bp, Homo sapien
tagagatagtgaaccaatggtgagttttaagaa

SEQ ID NO: 992542 - DNA, 33 bp, Homo sapien
tagagatagtgaaccagtggtgagttttaagaa

SEQ ID NO: 992543 - DNA, 33 bp, Homo sapien
cagagagtggcaggtacgtccaggtcctaaaga

SEQ ID NO: 992544 - DNA, 33 bp, Homo sapien
cagagagtggcaggtatgtccaggtcctaaaga

SEQ ID NO: 992545 - DNA, 33 bp, Homo sapien
tgccacagagagcatcaatccaggactacgggg

SEQ ID NO: 992546 - DNA, 33 bp, Homo sapien
tgccacagagagcatcgatccaggactacgggg

SEQ ID NO: 992547 - DNA, 33 bp, Homo sapien
gaaggaacatgagaataagataaaaacaaaagc

SEQ ID NO: 992548 - DNA, 33 bp, Homo sapien
gaaggaacatgagaatcagataaaaacaaaagc

SEQ ID NO: 992549 - DNA, 33 bp, Homo sapien
cagtatatgagggatcaaatttcttcactgtct

SEQ ID NO: 992550 - DNA, 33 bp, Homo sapien
cagtatatgagggatccaatttcttcactgtct

SEQ ID NO: 992551 - DNA, 33 bp, Homo sapien
agtcgtaattaggaatcatgtggccaaatagta

SEQ ID NO: 992552 - DNA, 33 bp, Homo sapien
agtcgtaattaggaatgatgtggccaaatagta

SEQ ID NO: 992553 - DNA, 33 bp, Homo sapien
ttttatgggttaaaaaatgacatctattcctgg

SEQ ID NO: 992554 - DNA, 33 bp, Homo sapien
ttttatgggttaaaaagtgacatctattcctgg

SEQ ID NO: 992555 - DNA, 33 bp, Homo sapien
aatggaaacagttatgccaaccttgcagagcta

SEQ ID NO: 992556 - DNA, 33 bp, Homo sapien
aatggaaacagttatgtcaaccttgcagagcta

SEQ ID NO: 992557 - DNA, 33 bp, Homo sapien
gtgttctcataactacagcaaggaaaacgtata

SEQ ID NO: 992558 - DNA, 33 bp, Homo sapien
gtgttctcataactaccgcaaggaaaacgtata

SEQ ID NO: 992559 - DNA, 33 bp, Homo sapien
ggttctaggaagaattcaagcagtacaagacat

SEQ ID NO: 992560 - DNA, 33 bp, Homo sapien
ggttctaggaagaatttaagcagtacaagacat

SEQ ID NO: 992561 - DNA, 33 bp, Homo sapien
ccatattctgatacaaagccaagtttgtttatt

SEQ ID NO: 992562 - DNA, 33 bp, Homo sapien
ccatattctgatacaaggccaagtttgtttatt

SEQ ID NO: 992563 - DNA, 33 bp, Homo sapien
caatcaaagagcaagacgcaggatcaggtcgca

SEQ ID NO: 992564 - DNA, 33 bp, Homo sapien
caatcaaagagcaagaggcaggatcaggtcgca

SEQ ID NO: 992565 - DNA, 33 bp, Homo sapien
acagtacactgtaaccacagagaatgacacact

SEQ ID NO: 992566 - DNA, 33 bp, Homo sapien
acagtacactgtaaccgcagagaatgacacact

SEQ ID NO: 992567 - DNA, 33 bp, Homo sapien
attcaaggaaggcatcaacctttgtgaaaagag

SEQ ID NO: 992568 - DNA, 33 bp, Homo sapien
attcaaggaaggcatccacctttgtgaaaagag

SEQ ID NO: 992569 - DNA, 33 bp, Homo sapien
agctggtagccatcaacgaggccaccttttgcc

SEQ ID NO: 992570 - DNA, 33 bp, Homo sapien
agctggtagccatcaatgaggccaccttttgcc

SEQ ID NO: 992571 - DNA, 33 bp, Homo sapien
ctagattcttaggaaacgttcatgcattctttc

SEQ ID NO: 992572 - DNA, 33 bp, Homo sapien
ctagattcttaggaaatgttcatgcattctttc

SEQ ID NO: 992573 - DNA, 33 bp, Homo sapien
aaccaatcctgccaacacttcaatcttagcttt

SEQ ID NO: 992574 - DNA, 33 bp, Homo sapien
aaccaatcctgccaacgcttcaatcttagcttt

SEQ ID NO: 992575 - DNA, 33 bp, Homo sapien
tttggaggacctggaacgaaatgatgactgaat

SEQ ID NO: 992576 - DNA, 33 bp, Homo sapien
tttggaggacctggaatgaaatgatgactgaat

SEQ ID NO: 992577 - DNA, 33 bp, Homo sapien
tgagcattggattaagacaagccatacttcgaa

SEQ ID NO: 992578 - DNA, 33 bp, Homo sapien
tgagcattggattaaggcaagccatacttcgaa

SEQ ID NO: 992579 - DNA, 33 bp, Homo sapien
gtagacattgggaagaccttcaaggaagaaata

SEQ ID NO: 992580 - DNA, 33 bp, Homo sapien
gtagacattgggaagagcttcaaggaagaaata

SEQ ID NO: 992581 - DNA, 33 bp, Homo sapien
atttcactgtggcaaaaacttttccttatgcag

SEQ ID NO: 992582 - DNA, 33 bp, Homo sapien
atttcactgtggcaaagacttttccttatgcag

SEQ ID NO: 992583 - DNA, 33 bp, Homo sapien
agacttagtatgaaacaaggcagaaaatggaaa

SEQ ID NO: 992584 - DNA, 33 bp, Homo sapien
agacttagtatgaaaccaggcagaaaatggaaa

SEQ ID NO: 992585 - DNA, 33 bp, Homo sapien
gcctactaagtggaagccattgaggtaagccct

SEQ ID NO: 992586 - DNA, 33 bp, Homo sapien
gcctactaagtggaaggcattgaggtaagccct

SEQ ID NO: 992587 - DNA, 33 bp, Homo sapien
acccaacactccttcccgaaaatgaggaaaacc

SEQ ID NO: 992588 - DNA, 33 bp, Homo sapien
acccaacactccttcctgaaaatgaggaaaacc

SEQ ID NO: 992589 - DNA, 33 bp, Homo sapien
atctaaccactagtcacgtgtgcctattaaaat

SEQ ID NO: 992590 - DNA, 33 bp, Homo sapien
atctaaccactagtcatgtgtgcctattaaaat

SEQ ID NO: 992591 - DNA, 33 bp, Homo sapien
tggaaatcacttattaacatccctctattaata

SEQ ID NO: 992592 - DNA, 33 bp, Homo sapien
tggaaatcacttattagcatccctctattaata

SEQ ID NO: 992593 - DNA, 33 bp, Homo sapien
ctttatcatttactcactatgtgtcaggcacta

SEQ ID NO: 992594 - DNA, 33 bp, Homo sapien
ctttatcatttactcagtatgtgtcaggcacta

SEQ ID NO: 992595 - DNA, 33 bp, Homo sapien
tgtaaggattagatgaaccaaggcatggtatat

SEQ ID NO: 992596 - DNA, 33 bp, Homo sapien
tgtaaggattagatgagccaaggcatggtatat

SEQ ID NO: 992597 - DNA, 33 bp, Homo sapien
ccccttgccttcagaccgatccctgtatgtcaa

SEQ ID NO: 992598 - DNA, 33 bp, Homo sapien
ccccttgccttcagacggatccctgtatgtcaa

SEQ ID NO: 992599 - DNA, 33 bp, Homo sapien
gattaagatgtggacacaggtattgagtgaggg

SEQ ID NO: 992600 - DNA, 33 bp, Homo sapien
gattaagatgtggacataggtattgagtgaggg

SEQ ID NO: 992601 - DNA, 33 bp, Homo sapien
aactctgggtcttatccagggcccgtcaactcc

SEQ ID NO: 992602 - DNA, 33 bp, Homo sapien
aactctgggtcttatctagggcccgtcaactcc

SEQ ID NO: 992603 - DNA, 33 bp, Homo sapien
taatcattccaagcagaacaaaaagaaagaaaa

SEQ ID NO: 992604 - DNA, 33 bp, Homo sapien
taatcattccaagcaggacaaaaagaaagaaaa

SEQ ID NO: 992605 - DNA, 33 bp, Homo sapien
ctatccattccagaaacctccaccctagctaaa

SEQ ID NO: 992606 - DNA, 33 bp, Homo sapien
ctatccattccagaaatctccaccctagctaaa

SEQ ID NO: 992607 - DNA, 33 bp, Homo sapien
gccacttctaaaagtacggtgctaaagcgtttc

SEQ ID NO: 992608 - DNA, 33 bp, Homo sapien
gccacttctaaaagtatggtgctaaagcgtttc

SEQ ID NO: 992609 - DNA, 33 bp, Homo sapien
tatgaagccttcttcaatctcaccgtgataatg

SEQ ID NO: 992610 - DNA, 33 bp, Homo sapien
tatgaagccttcttcagtctcaccgtgataatg

SEQ ID NO: 992611 - DNA, 33 bp, Homo sapien
tgggcggctcctccatcacatcatccattcctt

SEQ ID NO: 992612 - DNA, 33 bp, Homo sapien
tgggcggctcctccatgacatcatccattcctt

SEQ ID NO: 992613 - DNA, 33 bp, Homo sapien
atgtatgagaacacagaatttggaattgacaaa

SEQ ID NO: 992614 - DNA, 33 bp, Homo sapien
atgtatgagaacacagcatttggaattgacaaa

SEQ ID NO: 992615 - DNA, 33 bp, Homo sapien
tttaagcacaagagtgaaatatcacatctgtgt

SEQ ID NO: 992616 - DNA, 33 bp, Homo sapien
tttaagcacaagagtgtaatatcacatctgtgt

SEQ ID NO: 992617 - DNA, 33 bp, Homo sapien
agacaatgaggatagacatatggcaatggatca

SEQ ID NO: 992618 - DNA, 33 bp, Homo sapien
agacaatgaggatagagatatggcaatggatca

SEQ ID NO: 992619 - DNA, 33 bp, Homo sapien
ctctgcagagaaaatgccaaatgcggctctgtc

SEQ ID NO: 992620 - DNA, 33 bp, Homo sapien
ctctgcagagaaaatggcaaatgcggctctgtc

SEQ ID NO: 992621 - DNA, 33 bp, Homo sapien
atagttgtcatgggaacggaagtcaggggcaat

SEQ ID NO: 992622 - DNA, 33 bp, Homo sapien
atagttgtcatgggaatggaagtcaggggcaat

SEQ ID NO: 992623 - DNA, 33 bp, Homo sapien
cagtgaaagggaggaacgccctgtctcaggaat

SEQ ID NO: 992624 - DNA, 33 bp, Homo sapien
cagtgaaagggaggaatgccctgtctcaggaat

SEQ ID NO: 992625 - DNA, 33 bp, Homo sapien
gagtatgttttaaaagccaataacttgattgtc

SEQ ID NO: 992626 - DNA, 33 bp, Homo sapien
gagtatgttttaaaaggcaataacttgattgtc

SEQ ID NO: 992627 - DNA, 33 bp, Homo sapien
aggaaccagcttgtcactaagtgagttgttact

SEQ ID NO: 992628 - DNA, 33 bp, Homo sapien
aggaaccagcttgtcattaagtgagttgttact

SEQ ID NO: 992629 - DNA, 33 bp, Homo sapien
agggagcattggttccacatctatgaaatggtg

SEQ ID NO: 992630 - DNA, 33 bp, Homo sapien
agggagcattggttccgcatctatgaaatggtg

SEQ ID NO: 992631 - DNA, 33 bp, Homo sapien
agaatcattcttcttacctctggttccctcacc

SEQ ID NO: 992632 - DNA, 33 bp, Homo sapien
agaatcattcttcttatctctggttccctcacc

SEQ ID NO: 992633 - DNA, 33 bp, Homo sapien
tctcaggcatcaacgccgaccagaaagtgggga

SEQ ID NO: 992634 - DNA, 33 bp, Homo sapien
tctcaggcatcaacgctgaccagaaagtgggga

SEQ ID NO: 992635 - DNA, 33 bp, Homo sapien
tggctccctcagggtgaactgcttgggatgaga

SEQ ID NO: 992636 - DNA, 33 bp, Homo sapien
tggctccctcagggtgtactgcttgggatgaga

SEQ ID NO: 992637 - DNA, 33 bp, Homo sapien
gttggtggtttctatgcaagtcagaaactgagg

SEQ ID NO: 992638 - DNA, 33 bp, Homo sapien
gttggtggtttctatggaagtcagaaactgagg

SEQ ID NO: 992639 - DNA, 33 bp, Homo sapien
cagaggattctgtcccgcatcgtggatatcacc

SEQ ID NO: 992640 - DNA, 33 bp, Homo sapien
cagaggattctgtccctcatcgtggatatcacc

SEQ ID NO: 992641 - DNA, 33 bp, Homo sapien
ctgaaggagtgccggaagagaggggacaacctg

SEQ ID NO: 992642 - DNA, 33 bp, Homo sapien
ctgaaggagtgccggaggagaggggacaacctg

SEQ ID NO: 992643 - DNA, 33 bp, Homo sapien
ggagtgtgcacaaagaatactgggatgtgattt

SEQ ID NO: 992644 - DNA, 33 bp, Homo sapien
ggagtgtgcacaaagagtactgggatgtgattt

SEQ ID NO: 992645 - DNA, 33 bp, Homo sapien
aatcaccaggtttatacccaggcagtcagtgtg

SEQ ID NO: 992646 - DNA, 33 bp, Homo sapien
aatcaccaggtttatatccaggcagtcagtgtg

SEQ ID NO: 992647 - DNA, 33 bp, Homo sapien
tcattcatgtcccactcaaacttagaggtgagc

SEQ ID NO: 992648 - DNA, 33 bp, Homo sapien
tcattcatgtcccactgaaacttagaggtgagc

SEQ ID NO: 992649 - DNA, 33 bp, Homo sapien
acaaagcccagtccaccatttcaaggaggtgga

SEQ ID NO: 992650 - DNA, 33 bp, Homo sapien
acaaagcccagtccacgatttcaaggaggtgga

SEQ ID NO: 992651 - DNA, 33 bp, Homo sapien
caaggcatgtgccttccacctataagcctctaa

SEQ ID NO: 992652 - DNA, 33 bp, Homo sapien
caaggcatgtgccttctacctataagcctctaa

SEQ ID NO: 992653 - DNA, 33 bp, Homo sapien
ggtgaggtgtcagggaactttttctcaaggtgg

SEQ ID NO: 992654 - DNA, 33 bp, Homo sapien
ggtgaggtgtcagggagctttttctcaaggtgg

SEQ ID NO: 992655 - DNA, 33 bp, Homo sapien
atgaacaacagagaggaatgaagctaggtggct

SEQ ID NO: 992656 - DNA, 33 bp, Homo sapien
atgaacaacagagaggcatgaagctaggtggct

SEQ ID NO: 992657 - DNA, 33 bp, Homo sapien
agtgaaccatctaagacatcatgctgggattca

SEQ ID NO: 992658 - DNA, 33 bp, Homo sapien
agtgaaccatctaagagatcatgctgggattca

SEQ ID NO: 992659 - DNA, 33 bp, Homo sapien
gagacgggttggtgaccaagctgggcaaggaag

SEQ ID NO: 992660 - DNA, 33 bp, Homo sapien
gagacgggttggtgacgaagctgggcaaggaag

SEQ ID NO: 992661 - DNA, 33 bp, Homo sapien
agagaccagtgatcccaggagtacatactgagg

SEQ ID NO: 992662 - DNA, 33 bp, Homo sapien
agagaccagtgatccctggagtacatactgagg

SEQ ID NO: 992663 - DNA, 33 bp, Homo sapien
actaacagcaggaaaaacacttcttcaagcaga

SEQ ID NO: 992664 - DNA, 33 bp, Homo sapien
actaacagcaggaaaagcacttcttcaagcaga

SEQ ID NO: 992665 - DNA, 33 bp, Homo sapien
ataatggaggacggtaaaattttataatcattt

SEQ ID NO: 992666 - DNA, 33 bp, Homo sapien
ataatggaggacggtacaattttataatcattt

SEQ ID NO: 992667 - DNA, 33 bp, Homo sapien
aggagtcatacaaatgaaacaatagattaaatt

SEQ ID NO: 992668 - DNA, 33 bp, Homo sapien
aggagtcatacaaatggaacaatagattaaatt

SEQ ID NO: 992669 - DNA, 33 bp, Homo sapien
taacaaagagtgcagaagtcatcagggtcactc

SEQ ID NO: 992670 - DNA, 33 bp, Homo sapien
taacaaagagtgcagaggtcatcagggtcactc

SEQ ID NO: 992671 - DNA, 33 bp, Homo sapien
cacacatattaatgtaagaagcacacatattaa

SEQ ID NO: 992672 - DNA, 33 bp, Homo sapien
cacacatattaatgtaggaagcacacatattaa

SEQ ID NO: 992673 - DNA, 33 bp, Homo sapien
aggcattcttcagtcaagcacaccttacctcca

SEQ ID NO: 992674 - DNA, 33 bp, Homo sapien
aggcattcttcagtcaggcacaccttacctcca

SEQ ID NO: 992675 - DNA, 33 bp, Homo sapien
cactgctgagaggagacgaaagaggaaggagca

SEQ ID NO: 992676 - DNA, 33 bp, Homo sapien
cactgctgagaggagatgaaagaggaaggagca

SEQ ID NO: 992677 - DNA, 33 bp, Homo sapien
ggagatattgctataagactgggtcgttctctt

SEQ ID NO: 992678 - DNA, 33 bp, Homo sapien
ggagatattgctataatactgggtcgttctctt

SEQ ID NO: 992679 - DNA, 33 bp, Homo sapien
ttccccagtgtaaggacgtatcacttttaaagg

SEQ ID NO: 992680 - DNA, 33 bp, Homo sapien
ttccccagtgtaaggatgtatcacttttaaagg

SEQ ID NO: 992681 - DNA, 33 bp, Homo sapien
ctgtaatcctcacaaacttactttgcaacaatg

SEQ ID NO: 992682 - DNA, 33 bp, Homo sapien
ctgtaatcctcacaaatttactttgcaacaatg

SEQ ID NO: 992683 - DNA, 33 bp, Homo sapien
agagacagttgagatcactaacaacaagaaaag

SEQ ID NO: 992684 - DNA, 33 bp, Homo sapien
agagacagttgagatcgctaacaacaagaaaag

SEQ ID NO: 992685 - DNA, 33 bp, Homo sapien
gccaggaagctcggagacaaatttgcgcttagt

SEQ ID NO: 992686 - DNA, 33 bp, Homo sapien
gccaggaagctcggagccaaatttgcgcttagt

SEQ ID NO: 992687 - DNA, 33 bp, Homo sapien
ctagtcccctgatgaacgaaggtcaagggcaga

SEQ ID NO: 992688 - DNA, 33 bp, Homo sapien
ctagtcccctgatgaaggaaggtcaagggcaga

SEQ ID NO: 992689 - DNA, 33 bp, Homo sapien
gggagtcagtattttcacaagatggtcttcctc

SEQ ID NO: 992690 - DNA, 33 bp, Homo sapien
gggagtcagtattttcgcaagatggtcttcctc

SEQ ID NO: 992691 - DNA, 33 bp, Homo sapien
aagctcctcgccataaatccagtttcaggtatt

SEQ ID NO: 992692 - DNA, 33 bp, Homo sapien
aagctcctcgccataattccagtttcaggtatt

SEQ ID NO: 992693 - DNA, 33 bp, Homo sapien
atttcgctatcccctacgcctgatacaagagaa

SEQ ID NO: 992694 - DNA, 33 bp, Homo sapien
atttcgctatcccctatgcctgatacaagagaa

SEQ ID NO: 992695 - DNA, 33 bp, Homo sapien
cccctgcacccggctcaatacatatgattttaa

SEQ ID NO: 992696 - DNA, 33 bp, Homo sapien
cccctgcacccggctcgatacatatgattttaa

SEQ ID NO: 992697 - DNA, 33 bp, Homo sapien
cagaccctcaatcctacgttctttctaacatgt

SEQ ID NO: 992698 - DNA, 33 bp, Homo sapien
cagaccctcaatcctatgttctttctaacatgt

SEQ ID NO: 992699 - DNA, 33 bp, Homo sapien
acacgacatcatttaacagtaggcactgctatt

SEQ ID NO: 992700 - DNA, 33 bp, Homo sapien
acacgacatcatttaatagtaggcactgctatt

SEQ ID NO: 992701 - DNA, 33 bp, Homo sapien
cgtgcaaaaggagacaagggaaatattcttgca

SEQ ID NO: 992702 - DNA, 33 bp, Homo sapien
cgtgcaaaaggagacatgggaaatattcttgca

SEQ ID NO: 992703 - DNA, 33 bp, Homo sapien
actatcctttgaaaaagagcatttacacatttt

SEQ ID NO: 992704 - DNA, 33 bp, Homo sapien
actatcctttgaaaaatagcatttacacatttt

SEQ ID NO: 992705 - DNA, 33 bp, Homo sapien
gtgatgggtgtgctagcaggataccaagcaaga

SEQ ID NO: 992706 - DNA, 33 bp, Homo sapien
gtgatgggtgtgctagtaggataccaagcaaga

SEQ ID NO: 992707 - DNA, 33 bp, Homo sapien
taccctgctgacaggaaagaatcaaggcttcct

SEQ ID NO: 992708 - DNA, 33 bp, Homo sapien
taccctgctgacaggagagaatcaaggcttcct

SEQ ID NO: 992709 - DNA, 33 bp, Homo sapien
tgtctagtcatatctccaaaaaagtcaaaatca

SEQ ID NO: 992710 - DNA, 33 bp, Homo sapien
tgtctagtcatatctctaaaaaagtcaaaatca

SEQ ID NO: 992711 - DNA, 33 bp, Homo sapien
cagaatacaggaaaacactgggttcttaatggg

SEQ ID NO: 992712 - DNA, 33 bp, Homo sapien
cagaatacaggaaaacgctgggttcttaatggg

SEQ ID NO: 992713 - DNA, 33 bp, Homo sapien
tttcttttcttttaaacgcagttagctgaggca

SEQ ID NO: 992714 - DNA, 33 bp, Homo sapien
tttcttttcttttaaatgcagttagctgaggca

SEQ ID NO: 992715 - DNA, 33 bp, Homo sapien
taaggctggataaaaactgcccgtaagagatct

SEQ ID NO: 992716 - DNA, 33 bp, Homo sapien
taaggctggataaaaattgcccgtaagagatct

SEQ ID NO: 992717 - DNA, 33 bp, Homo sapien
tacaagtttgattccacatttaatgttaggcaa

SEQ ID NO: 992718 - DNA, 33 bp, Homo sapien
tacaagtttgattccatatttaatgttaggcaa

SEQ ID NO: 992719 - DNA, 33 bp, Homo sapien
aggtagacaccaggcacgagcaggtagtaaaag

SEQ ID NO: 992720 - DNA, 33 bp, Homo sapien
aggtagacaccaggcatgagcaggtagtaaaag

SEQ ID NO: 992721 - DNA, 33 bp, Homo sapien
tgtttactggaaccacacctggcatacagtgaa

SEQ ID NO: 992722 - DNA, 33 bp, Homo sapien
tgtttactggaaccacgcctggcatacagtgaa

SEQ ID NO: 992723 - DNA, 33 bp, Homo sapien
catgtcatatatacccaagtcagcacccagcat

SEQ ID NO: 992724 - DNA, 33 bp, Homo sapien
catgtcatatatacccgagtcagcacccagcat

SEQ ID NO: 992725 - DNA, 33 bp, Homo sapien
ttgagaatatctccccaaacagtactcagcaag

SEQ ID NO: 992726 - DNA, 33 bp, Homo sapien
ttgagaatatctcccccaacagtactcagcaag

SEQ ID NO: 992727 - DNA, 33 bp, Homo sapien
agaatatgagagtgaaaaggtgtgctccttata

SEQ ID NO: 992728 - DNA, 33 bp, Homo sapien
agaatatgagagtgaagaggtgtgctccttata

SEQ ID NO: 992729 - DNA, 33 bp, Homo sapien
tagatccactgagcgccgaaggtaaactggaca

SEQ ID NO: 992730 - DNA, 33 bp, Homo sapien
tagatccactgagcgctgaaggtaaactggaca

SEQ ID NO: 992731 - DNA, 33 bp, Homo sapien
ttgtaagtgtgattgaaaggttttaaacaggag

SEQ ID NO: 992732 - DNA, 33 bp, Homo sapien
ttgtaagtgtgattgagaggttttaaacaggag

SEQ ID NO: 992733 - DNA, 33 bp, Homo sapien
tactctaggctaggcaatcacacccttcatctc

SEQ ID NO: 992734 - DNA, 33 bp, Homo sapien
tactctaggctaggcagtcacacccttcatctc

SEQ ID NO: 992735 - DNA, 33 bp, Homo sapien
agacagtcaaaacttacgcgtacttggctcctc

SEQ ID NO: 992736 - DNA, 33 bp, Homo sapien
agacagtcaaaacttatgcgtacttggctcctc

SEQ ID NO: 992737 - DNA, 33 bp, Homo sapien
aatatgcctgtgctaacaactttacacttccag

SEQ ID NO: 992738 - DNA, 33 bp, Homo sapien
aatatgcctgtgctaataactttacacttccag

SEQ ID NO: 992739 - DNA, 33 bp, Homo sapien
agcagaatagtagaaaagagagatgagcattta

SEQ ID NO: 992740 - DNA, 33 bp, Homo sapien
agcagaatagtagaaatgagagatgagcattta

SEQ ID NO: 992741 - DNA, 33 bp, Homo sapien
gaacatactgtattcaaaatgctagccttgctg

SEQ ID NO: 992742 - DNA, 33 bp, Homo sapien
gaacatactgtattcagaatgctagccttgctg

SEQ ID NO: 992743 - DNA, 33 bp, Homo sapien
ccagtgtcatcctaaacatcaaacactcaatcc

SEQ ID NO: 992744 - DNA, 33 bp, Homo sapien
ccagtgtcatcctaaatatcaaacactcaatcc

SEQ ID NO: 992745 - DNA, 33 bp, Homo sapien
gaggtaaaaactcagaactgactacggaggacc

SEQ ID NO: 992746 - DNA, 33 bp, Homo sapien
gaggtaaaaactcagacctgactacggaggacc

SEQ ID NO: 992747 - DNA, 33 bp, Homo sapien
tgcagtcatcttccaacgtatctctaatagtat

SEQ ID NO: 992748 - DNA, 33 bp, Homo sapien
tgcagtcatcttccaatgtatctctaatagtat

SEQ ID NO: 992749 - DNA, 33 bp, Homo sapien
gtccactgaactaggacgagctaaaacagagag

SEQ ID NO: 992750 - DNA, 33 bp, Homo sapien
gtccactgaactaggatgagctaaaacagagag

SEQ ID NO: 992751 - DNA, 33 bp, Homo sapien
catgaattgtgtataaaagtgcggtgactggta

SEQ ID NO: 992752 - DNA, 33 bp, Homo sapien
catgaattgtgtataatagtgcggtgactggta

SEQ ID NO: 992753 - DNA, 33 bp, Homo sapien
ctctccacaggtaggaacagtgtttattcatct

SEQ ID NO: 992754 - DNA, 33 bp, Homo sapien
ctctccacaggtaggagcagtgtttattcatct

SEQ ID NO: 992755 - DNA, 33 bp, Homo sapien
atacaatgaaacagtacgcagcctgttagagca

SEQ ID NO: 992756 - DNA, 33 bp, Homo sapien
atacaatgaaacagtatgcagcctgttagagca

SEQ ID NO: 992757 - DNA, 33 bp, Homo sapien
agacaaacaaatgtatcaggtgagcaaacgcag

SEQ ID NO: 992758 - DNA, 33 bp, Homo sapien
agacaaacaaatgtattaggtgagcaaacgcag

SEQ ID NO: 992759 - DNA, 33 bp, Homo sapien
tatttggccagttacaatattctttttctctgt

SEQ ID NO: 992760 - DNA, 33 bp, Homo sapien
tatttggccagttacagtattctttttctctgt

SEQ ID NO: 992761 - DNA, 33 bp, Homo sapien
agttactttgaacaccaatcactacgaattctc

SEQ ID NO: 992762 - DNA, 33 bp, Homo sapien
agttactttgaacaccgatcactacgaattctc

SEQ ID NO: 992763 - DNA, 33 bp, Homo sapien
tcatgaacgaagaaaaatcttccagaggatagc

SEQ ID NO: 992764 - DNA, 33 bp, Homo sapien
tcatgaacgaagaaaagtcttccagaggatagc

SEQ ID NO: 992765 - DNA, 33 bp, Homo sapien
gaatgcaacagacaaactagccgagcaaagtca

SEQ ID NO: 992766 - DNA, 33 bp, Homo sapien
gaatgcaacagacaaattagccgagcaaagtca

SEQ ID NO: 992767 - DNA, 33 bp, Homo sapien
tcttgttttctcacaaagcttaagtgatacaaa

SEQ ID NO: 992768 - DNA, 33 bp, Homo sapien
tcttgttttctcacaatgcttaagtgatacaaa

SEQ ID NO: 992769 - DNA, 33 bp, Homo sapien
tgaggatagtggtattaaaaaaagttgttgaag

SEQ ID NO: 992770 - DNA, 33 bp, Homo sapien
tgaggatagtggtatttaaaaaagttgttgaag

SEQ ID NO: 992771 - DNA, 33 bp, Homo sapien
gccccaacaggtagcacggtatcagacctatta

SEQ ID NO: 992772 - DNA, 33 bp, Homo sapien
gccccaacaggtagcatggtatcagacctatta

SEQ ID NO: 992773 - DNA, 33 bp, Homo sapien
gaatccaaaatgaccacgtgggtacaataaacc

SEQ ID NO: 992774 - DNA, 33 bp, Homo sapien
gaatccaaaatgaccatgtgggtacaataaacc

SEQ ID NO: 992775 - DNA, 33 bp, Homo sapien
gccattggtacaaaagacagagtggtttaatga

SEQ ID NO: 992776 - DNA, 33 bp, Homo sapien
gccattggtacaaaaggcagagtggtttaatga

SEQ ID NO: 992777 - DNA, 33 bp, Homo sapien
tcatgatgtcctaacacgccaggctcctttctg

SEQ ID NO: 992778 - DNA, 33 bp, Homo sapien
tcatgatgtcctaacatgccaggctcctttctg

SEQ ID NO: 992779 - DNA, 33 bp, Homo sapien
aatacagttatagttcaaaaaaaagcttagata

SEQ ID NO: 992780 - DNA, 33 bp, Homo sapien
aatacagttatagttccaaaaaaagcttagata

SEQ ID NO: 992781 - DNA, 33 bp, Homo sapien
ccaagtaaaatagccactctgtgacctgactgt

SEQ ID NO: 992782 - DNA, 33 bp, Homo sapien
ccaagtaaaatagccattctgtgacctgactgt

SEQ ID NO: 992783 - DNA, 33 bp, Homo sapien
atgggctttcttcatactagatttaagataaga

SEQ ID NO: 992784 - DNA, 33 bp, Homo sapien
atgggctttcttcatattagatttaagataaga

SEQ ID NO: 992785 - DNA, 33 bp, Homo sapien
tttccccttctgcagaccttgagtggaagcagg

SEQ ID NO: 992786 - DNA, 33 bp, Homo sapien
tttccccttctgcagatcttgagtggaagcagg

SEQ ID NO: 992787 - DNA, 33 bp, Homo sapien
cttctgttgatcactcagacttgaatgaaatat

SEQ ID NO: 992788 - DNA, 33 bp, Homo sapien
cttctgttgatcactcggacttgaatgaaatat

SEQ ID NO: 992789 - DNA, 33 bp, Homo sapien
cacataaagccttcctcaataccaccagtacag

SEQ ID NO: 992790 - DNA, 33 bp, Homo sapien
cacataaagccttcctgaataccaccagtacag

SEQ ID NO: 992791 - DNA, 33 bp, Homo sapien
caaatctgattttctagacctggttttaaggca

SEQ ID NO: 992792 - DNA, 33 bp, Homo sapien
caaatctgattttctatacctggttttaaggca

SEQ ID NO: 992793 - DNA, 33 bp, Homo sapien
gtggatacagtcagtgaaatacccactcttagg

SEQ ID NO: 992794 - DNA, 33 bp, Homo sapien
gtggatacagtcagtgcaatacccactcttagg

SEQ ID NO: 992795 - DNA, 33 bp, Homo sapien
tgaaaactggacaaacaaccattctagacagta

SEQ ID NO: 992796 - DNA, 33 bp, Homo sapien
tgaaaactggacaaaccaccattctagacagta

SEQ ID NO: 992797 - DNA, 33 bp, Homo sapien
gcacagtgcctggaacaagcaaataatagttag

SEQ ID NO: 992798 - DNA, 33 bp, Homo sapien
gcacagtgcctggaactagcaaataatagttag

SEQ ID NO: 992799 - DNA, 33 bp, Homo sapien
tttactttctcactcactcgtcaaacttatcag

SEQ ID NO: 992800 - DNA, 33 bp, Homo sapien
tttactttctcactcattcgtcaaacttatcag

SEQ ID NO: 992801 - DNA, 33 bp, Homo sapien
gactatctcccatcacaataaaacccccagaac

SEQ ID NO: 992802 - DNA, 33 bp, Homo sapien
gactatctcccatcacgataaaacccccagaac

SEQ ID NO: 992803 - DNA, 33 bp, Homo sapien
acccagcataagcagacgacatgagaaatagta

SEQ ID NO: 992804 - DNA, 33 bp, Homo sapien
acccagcataagcagaggacatgagaaatagta

SEQ ID NO: 992805 - DNA, 33 bp, Homo sapien
attttcaagttttccccaatggccatattttat

SEQ ID NO: 992806 - DNA, 33 bp, Homo sapien
attttcaagttttccctaatggccatattttat

SEQ ID NO: 992807 - DNA, 33 bp, Homo sapien
ctatttctaggggggaaaatttctgtgctaggc

SEQ ID NO: 992808 - DNA, 33 bp, Homo sapien
ctatttctaggggggataatttctgtgctaggc

SEQ ID NO: 992809 - DNA, 33 bp, Homo sapien
tgaacatggactgaaccccaactctatcacgta

SEQ ID NO: 992810 - DNA, 33 bp, Homo sapien
tgaacatggactgaactccaactctatcacgta

SEQ ID NO: 992811 - DNA, 33 bp, Homo sapien
aacattcacatggcccacatcttaaccatgcac

SEQ ID NO: 992812 - DNA, 33 bp, Homo sapien
aacattcacatggcccgcatcttaaccatgcac

SEQ ID NO: 992813 - DNA, 33 bp, Homo sapien
ggaaggcgttttgggacatacaaagaggaaagc

SEQ ID NO: 992814 - DNA, 33 bp, Homo sapien
ggaaggcgttttgggatatacaaagaggaaagc

SEQ ID NO: 992815 - DNA, 33 bp, Homo sapien
tctgctcagaaagataaagtgccctaccaacac

SEQ ID NO: 992816 - DNA, 33 bp, Homo sapien
tctgctcagaaagatagagtgccctaccaacac

SEQ ID NO: 992817 - DNA, 33 bp, Homo sapien
atgccctgccatacttgaaaaaaattgttacag

SEQ ID NO: 992818 - DNA, 33 bp, Homo sapien
atgccctgccatactttaaaaaaattgttacag

SEQ ID NO: 992819 - DNA, 33 bp, Homo sapien
gggcctattatgtgacaagcagcatgcagaatg

SEQ ID NO: 992820 - DNA, 33 bp, Homo sapien
gggcctattatgtgacgagcagcatgcagaatg

SEQ ID NO: 992821 - DNA, 33 bp, Homo sapien
ggagaagtagtttcttcaaatgttctctggtgg

SEQ ID NO: 992822 - DNA, 33 bp, Homo sapien
ggagaagtagtttcttgaaatgttctctggtgg

SEQ ID NO: 992823 - DNA, 33 bp, Homo sapien
aatcacaaatagctaacccagtcaggactcaca

SEQ ID NO: 992824 - DNA, 33 bp, Homo sapien
aatcacaaatagctaagccagtcaggactcaca

SEQ ID NO: 992825 - DNA, 33 bp, Homo sapien
tcttgctgctcttttacctcttatttgttaata

SEQ ID NO: 992826 - DNA, 33 bp, Homo sapien
tcttgctgctcttttatctcttatttgttaata

SEQ ID NO: 992827 - DNA, 33 bp, Homo sapien
atgtaggttagactcaaaagaacttcctgacag

SEQ ID NO: 992828 - DNA, 33 bp, Homo sapien
atgtaggttagactcagaagaacttcctgacag

SEQ ID NO: 992829 - DNA, 33 bp, Homo sapien
actaaggagaggactaaggcaacaccaaacact

SEQ ID NO: 992830 - DNA, 33 bp, Homo sapien
actaaggagaggactagggcaacaccaaacact

SEQ ID NO: 992831 - DNA, 33 bp, Homo sapien
agatctagtttagtccacattgctttgagaggt

SEQ ID NO: 992832 - DNA, 33 bp, Homo sapien
agatctagtttagtcctcattgctttgagaggt

SEQ ID NO: 992833 - DNA, 33 bp, Homo sapien
tcacagagatttaactaaaagcatcaacatctg

SEQ ID NO: 992834 - DNA, 33 bp, Homo sapien
tcacagagatttaactgaaagcatcaacatctg

SEQ ID NO: 992835 - DNA, 33 bp, Homo sapien
aaagtcagctttgggagcttagcctaactggac

SEQ ID NO: 992836 - DNA, 33 bp, Homo sapien
aaagtcagctttgggatcttagcctaactggac

SEQ ID NO: 992837 - DNA, 33 bp, Homo sapien
accttttcagatgcaacatcaaagctgtcattg

SEQ ID NO: 992838 - DNA, 33 bp, Homo sapien
accttttcagatgcaatatcaaagctgtcattg

SEQ ID NO: 992839 - DNA, 33 bp, Homo sapien
tatatatatatgaaaactgtctagtccatgaaa

SEQ ID NO: 992840 - DNA, 33 bp, Homo sapien
tatatatatatgaaaattgtctagtccatgaaa

SEQ ID NO: 992841 - DNA, 33 bp, Homo sapien
gacaagaccagcatcaccacttcccatctctca

SEQ ID NO: 992842 - DNA, 33 bp, Homo sapien
gacaagaccagcatcatcacttcccatctctca

SEQ ID NO: 992843 - DNA, 33 bp, Homo sapien
ctctcttcttctataacaataactctcaatttg

SEQ ID NO: 992844 - DNA, 33 bp, Homo sapien
ctctcttcttctataataataactctcaatttg

SEQ ID NO: 992845 - DNA, 33 bp, Homo sapien
gctacattttgcggcaaagaaggctgggaagtg

SEQ ID NO: 992846 - DNA, 33 bp, Homo sapien
gctacattttgcggcagagaaggctgggaagtg

SEQ ID NO: 992847 - DNA, 33 bp, Homo sapien
aactgaaagacctagccattagtacaaaatccc

SEQ ID NO: 992848 - DNA, 33 bp, Homo sapien
aactgaaagacctagcgattagtacaaaatccc

SEQ ID NO: 992849 - DNA, 33 bp, Homo sapien
accaaccctgatcagccctgatttaggcatctg

SEQ ID NO: 992850 - DNA, 33 bp, Homo sapien
accaaccctgatcagctctgatttaggcatctg

SEQ ID NO: 992851 - DNA, 33 bp, Homo sapien
catctgggtgtgaacacaatgtcataggacctg

SEQ ID NO: 992852 - DNA, 33 bp, Homo sapien
catctgggtgtgaacataatgtcataggacctg

SEQ ID NO: 992853 - DNA, 33 bp, Homo sapien
tctttccgcccgtatcacttgtgtcagagcgag

SEQ ID NO: 992854 - DNA, 33 bp, Homo sapien
tctttccgcccgtatctcttgtgtcagagcgag

SEQ ID NO: 992855 - DNA, 33 bp, Homo sapien
acaacaatctctgaaccgtgagaagggactgct

SEQ ID NO: 992856 - DNA, 33 bp, Homo sapien
acaacaatctctgaactgtgagaagggactgct

SEQ ID NO: 992857 - DNA, 33 bp, Homo sapien
gctgtactggtggttccaataaaagtctcagga

SEQ ID NO: 992858 - DNA, 33 bp, Homo sapien
gctgtactggtggttctaataaaagtctcagga

SEQ ID NO: 992859 - DNA, 33 bp, Homo sapien
catacttggcctataaaatcccaatttaatctc

SEQ ID NO: 992860 - DNA, 33 bp, Homo sapien
catacttggcctataagatcccaatttaatctc

SEQ ID NO: 992861 - DNA, 33 bp, Homo sapien
cttgagatcaatgctgacaagccttaaccacca

SEQ ID NO: 992862 - DNA, 33 bp, Homo sapien
cttgagatcaatgctgtcaagccttaaccacca

SEQ ID NO: 992863 - DNA, 33 bp, Homo sapien
ctagaagtctgttatccgagaaacaagatctgg

SEQ ID NO: 992864 - DNA, 33 bp, Homo sapien
ctagaagtctgttatctgagaaacaagatctgg

SEQ ID NO: 992865 - DNA, 33 bp, Homo sapien
cacatataaacccacacgtgttggtgaatatat

SEQ ID NO: 992866 - DNA, 33 bp, Homo sapien
cacatataaacccacatgtgttggtgaatatat

SEQ ID NO: 992867 - DNA, 33 bp, Homo sapien
ttgtcagggtgcatcagcattgtttgtttgcat

SEQ ID NO: 992868 - DNA, 33 bp, Homo sapien
ttgtcagggtgcatcatcattgtttgtttgcat

SEQ ID NO: 992869 - DNA, 33 bp, Homo sapien
ggccgtgggaagacgaagaagacagcaagagca

SEQ ID NO: 992870 - DNA, 33 bp, Homo sapien
ggccgtgggaagacgatgaagacagcaagagca

SEQ ID NO: 992871 - DNA, 33 bp, Homo sapien
attaatgaaggctacaaatgtcttcaagatacc

SEQ ID NO: 992872 - DNA, 33 bp, Homo sapien
attaatgaaggctacagatgtcttcaagatacc

SEQ ID NO: 992873 - DNA, 33 bp, Homo sapien
attaactgaaatcatgcatcatagagggtatag

SEQ ID NO: 992874 - DNA, 33 bp, Homo sapien
attaactgaaatcatgtatcatagagggtatag

SEQ ID NO: 992875 - DNA, 33 bp, Homo sapien
aacacatatccatataacacctaccataagcca

SEQ ID NO: 992876 - DNA, 33 bp, Homo sapien
aacacatatccatatagcacctaccataagcca

SEQ ID NO: 992877 - DNA, 33 bp, Homo sapien
agggatatgggactcacggtttataagctttgt

SEQ ID NO: 992878 - DNA, 33 bp, Homo sapien
agggatatgggactcagggtttataagctttgt

SEQ ID NO: 992879 - DNA, 33 bp, Homo sapien
tggctgttttatgatacatttctgtgtccctgc

SEQ ID NO: 992880 - DNA, 33 bp, Homo sapien
tggctgttttatgatagatttctgtgtccctgc

SEQ ID NO: 992881 - DNA, 33 bp, Homo sapien
atgcactcattaccataaagaggccaccacgcc

SEQ ID NO: 992882 - DNA, 33 bp, Homo sapien
atgcactcattaccatgaagaggccaccacgcc

SEQ ID NO: 992883 - DNA, 33 bp, Homo sapien
aggtattttattatcgaaacagaaatacctgcc

SEQ ID NO: 992884 - DNA, 33 bp, Homo sapien
aggtattttattatcgtaacagaaatacctgcc

SEQ ID NO: 992885 - DNA, 33 bp, Homo sapien
aacagtgagcaaaacacacccgaattcttgcaa

SEQ ID NO: 992886 - DNA, 33 bp, Homo sapien
aacagtgagcaaaacatacccgaattcttgcaa

SEQ ID NO: 992887 - DNA, 33 bp, Homo sapien
tccagtttgtcgtctacgggatctagttcattc

SEQ ID NO: 992888 - DNA, 33 bp, Homo sapien
tccagtttgtcgtctaggggatctagttcattc

SEQ ID NO: 992889 - DNA, 33 bp, Homo sapien
cctctgccctcaaggagcatatgttctggtggg

SEQ ID NO: 992890 - DNA, 33 bp, Homo sapien
cctctgccctcaaggatcatatgttctggtggg

SEQ ID NO: 992891 - DNA, 33 bp, Homo sapien
tgtagctttaatgagactctcagggccacactt

SEQ ID NO: 992892 - DNA, 33 bp, Homo sapien
tgtagctttaatgagattctcagggccacactt

SEQ ID NO: 992893 - DNA, 33 bp, Homo sapien
ttgctggctaagctcaatatctgttaatcaggc

SEQ ID NO: 992894 - DNA, 33 bp, Homo sapien
ttgctggctaagctcagtatctgttaatcaggc

SEQ ID NO: 992895 - DNA, 33 bp, Homo sapien
aatgagactggcctccaagaaatgctcctgaat

SEQ ID NO: 992896 - DNA, 33 bp, Homo sapien
aatgagactggcctccgagaaatgctcctgaat

SEQ ID NO: 992897 - DNA, 33 bp, Homo sapien
agttgaagaattagcaagtgagagaaatgtaca

SEQ ID NO: 992898 - DNA, 33 bp, Homo sapien
agttgaagaattagcaggtgagagaaatgtaca

SEQ ID NO: 992899 - DNA, 33 bp, Homo sapien
cagaatggatgcttacccattcagaacacattc

SEQ ID NO: 992900 - DNA, 33 bp, Homo sapien
cagaatggatgcttactcattcagaacacattc

SEQ ID NO: 992901 - DNA, 33 bp, Homo sapien
ctagatttaatgactcacttctagattactgaa

SEQ ID NO: 992902 - DNA, 33 bp, Homo sapien
ctagatttaatgactctcttctagattactgaa

SEQ ID NO: 992903 - DNA, 33 bp, Homo sapien
cccaggcctgcacataaaaggtgttagtaccct

SEQ ID NO: 992904 - DNA, 33 bp, Homo sapien
cccaggcctgcacatagaaggtgttagtaccct

SEQ ID NO: 992905 - DNA, 33 bp, Homo sapien
cagaaatagtcaaaaactccatagataagtcaa

SEQ ID NO: 992906 - DNA, 33 bp, Homo sapien
cagaaatagtcaaaaattccatagataagtcaa

SEQ ID NO: 992907 - DNA, 33 bp, Homo sapien
agtcatgtaagtaatacgtcatttttcactagc

SEQ ID NO: 992908 - DNA, 33 bp, Homo sapien
agtcatgtaagtaatatgtcatttttcactagc

SEQ ID NO: 992909 - DNA, 33 bp, Homo sapien
tgtgaacagcttttccagagggagggaggtcca

SEQ ID NO: 992910 - DNA, 33 bp, Homo sapien
tgtgaacagcttttccggagggagggaggtcca

SEQ ID NO: 992911 - DNA, 33 bp, Homo sapien
ttcataaatgtagccacatagatcgtataacat

SEQ ID NO: 992912 - DNA, 33 bp, Homo sapien
ttcataaatgtagccatatagatcgtataacat

SEQ ID NO: 992913 - DNA, 33 bp, Homo sapien
agattcaggaggctacagatgtcattaaacttc

SEQ ID NO: 992914 - DNA, 33 bp, Homo sapien
agattcaggaggctacggatgtcattaaacttc

SEQ ID NO: 992915 - DNA, 33 bp, Homo sapien
ggaaaaaggagacaaacttctggtgttaatata

SEQ ID NO: 992916 - DNA, 33 bp, Homo sapien
ggaaaaaggagacaaatttctggtgttaatata

SEQ ID NO: 992917 - DNA, 33 bp, Homo sapien
aagctgttggttttctaaagtgtctatagtctt

SEQ ID NO: 992918 - DNA, 33 bp, Homo sapien
aagctgttggttttctgaagtgtctatagtctt

SEQ ID NO: 992919 - DNA, 33 bp, Homo sapien
tacaaagtacacagccgaaaagcatgaacaagg

SEQ ID NO: 992920 - DNA, 33 bp, Homo sapien
tacaaagtacacagcctaaaagcatgaacaagg

SEQ ID NO: 992921 - DNA, 33 bp, Homo sapien
aactagtattgaactacagtggagtggacggaa

SEQ ID NO: 992922 - DNA, 33 bp, Homo sapien
aactagtattgaactatagtggagtggacggaa

SEQ ID NO: 992923 - DNA, 33 bp, Homo sapien
gaattcaagtaaattacaaaatgcacctaaagt

SEQ ID NO: 992924 - DNA, 33 bp, Homo sapien
gaattcaagtaaattataaaatgcacctaaagt

SEQ ID NO: 992925 - DNA, 33 bp, Homo sapien
ataaactaacacaaacaaagtgctaagagcaat

SEQ ID NO: 992926 - DNA, 33 bp, Homo sapien
ataaactaacacaaacgaagtgctaagagcaat

SEQ ID NO: 992927 - DNA, 33 bp, Homo sapien
tccatgccccatcaaacacatcattatttctat

SEQ ID NO: 992928 - DNA, 33 bp, Homo sapien
tccatgccccatcaaagacatcattatttctat

SEQ ID NO: 992929 - DNA, 33 bp, Homo sapien
atatcaacccactctcactatcatatgtgttgc

SEQ ID NO: 992930 - DNA, 33 bp, Homo sapien
atatcaacccactctcgctatcatatgtgttgc

SEQ ID NO: 992931 - DNA, 33 bp, Homo sapien
tgcagttgagacaaacactgatggaactaacac

SEQ ID NO: 992932 - DNA, 33 bp, Homo sapien
tgcagttgagacaaaccctgatggaactaacac

SEQ ID NO: 992933 - DNA, 33 bp, Homo sapien
aactgcaaaatattaacgatggttttcttttgt

SEQ ID NO: 992934 - DNA, 33 bp, Homo sapien
aactgcaaaatattaatgatggttttcttttgt

SEQ ID NO: 992935 - DNA, 33 bp, Homo sapien
gaaaagcacaaaaaaaatcatattcacaccaac

SEQ ID NO: 992936 - DNA, 33 bp, Homo sapien
gaaaagcacaaaaaaattcatattcacaccaac

SEQ ID NO: 992937 - DNA, 33 bp, Homo sapien
atgattcagtagaagaaactgcaagacacagat

SEQ ID NO: 992938 - DNA, 33 bp, Homo sapien
atgattcagtagaagatactgcaagacacagat

SEQ ID NO: 992939 - DNA, 33 bp, Homo sapien
tgggagttgttgggtacgaatccaagacaaagt

SEQ ID NO: 992940 - DNA, 33 bp, Homo sapien
tgggagttgttgggtaggaatccaagacaaagt

SEQ ID NO: 992941 - DNA, 33 bp, Homo sapien
attggtattcatgtgccgaaaggtgcctttaat

SEQ ID NO: 992942 - DNA, 33 bp, Homo sapien
attggtattcatgtgctgaaaggtgcctttaat

SEQ ID NO: 992943 - DNA, 33 bp, Homo sapien
gcctgtatttgaaaaccgtcctttaaatcagct

SEQ ID NO: 992944 - DNA, 33 bp, Homo sapien
gcctgtatttgaaaactgtcctttaaatcagct

SEQ ID NO: 992945 - DNA, 33 bp, Homo sapien
ccgtgtagcaccaaacaaagatcccatctgcaa

SEQ ID NO: 992946 - DNA, 33 bp, Homo sapien
ccgtgtagcaccaaacgaagatcccatctgcaa

SEQ ID NO: 992947 - DNA, 33 bp, Homo sapien
gtgggaccatctgaccgcctgttagtatccctc

SEQ ID NO: 992948 - DNA, 33 bp, Homo sapien
gtgggaccatctgacctcctgttagtatccctc

SEQ ID NO: 992949 - DNA, 33 bp, Homo sapien
ttagtctaaaggtaaactccataagagtgcaaa

SEQ ID NO: 992950 - DNA, 33 bp, Homo sapien
ttagtctaaaggtaaattccataagagtgcaaa

SEQ ID NO: 992951 - DNA, 33 bp, Homo sapien
gattaaatcattataacaactcgataaggcagt

SEQ ID NO: 992952 - DNA, 33 bp, Homo sapien
gattaaatcattataataactcgataaggcagt

SEQ ID NO: 992953 - DNA, 33 bp, Homo sapien
gccacattggcctctcacgcttatgtatatatg

SEQ ID NO: 992954 - DNA, 33 bp, Homo sapien
gccacattggcctctcgcgcttatgtatatatg

SEQ ID NO: 992955 - DNA, 33 bp, Homo sapien
gctcagtgcttcttgcccataaatgtaccaaac

SEQ ID NO: 992956 - DNA, 33 bp, Homo sapien
gctcagtgcttcttgctcataaatgtaccaaac

SEQ ID NO: 992957 - DNA, 33 bp, Homo sapien
caatttatctttgtaaacctagcatttaccaca

SEQ ID NO: 992958 - DNA, 33 bp, Homo sapien
caatttatctttgtaaccctagcatttaccaca

SEQ ID NO: 992959 - DNA, 33 bp, Homo sapien
tgtgtgtgatcaaccacattggatatataaaag

SEQ ID NO: 992960 - DNA, 33 bp, Homo sapien
tgtgtgtgatcaaccatattggatatataaaag

SEQ ID NO: 992961 - DNA, 33 bp, Homo sapien
cactgtcatgttctcaaattcatctttcctgac

SEQ ID NO: 992962 - DNA, 33 bp, Homo sapien
cactgtcatgttctcagattcatctttcctgac

SEQ ID NO: 992963 - DNA, 33 bp, Homo sapien
ctcagttttacttccacggtattctgatgctca

SEQ ID NO: 992964 - DNA, 33 bp, Homo sapien
ctcagttttacttccatggtattctgatgctca

SEQ ID NO: 992965 - DNA, 33 bp, Homo sapien
tctcaaaatgaacaggaaaagggaagctgaaat

SEQ ID NO: 992966 - DNA, 33 bp, Homo sapien
tctcaaaatgaacagggaaagggaagctgaaat

SEQ ID NO: 992967 - DNA, 33 bp, Homo sapien
aatggtagcctcaagagaatgtgtactgtgttc

SEQ ID NO: 992968 - DNA, 33 bp, Homo sapien
aatggtagcctcaagataatgtgtactgtgttc

SEQ ID NO: 992969 - DNA, 33 bp, Homo sapien
gcttctggtccatgcacagtgtgttgcaaaggc

SEQ ID NO: 992970 - DNA, 33 bp, Homo sapien
gcttctggtccatgcatagtgtgttgcaaaggc

SEQ ID NO: 992971 - DNA, 33 bp, Homo sapien
tctggctcataatctacgctcctgtccagtcca

SEQ ID NO: 992972 - DNA, 33 bp, Homo sapien
tctggctcataatctatgctcctgtccagtcca

SEQ ID NO: 992973 - DNA, 33 bp, Homo sapien
catgcctctaactttacagctggtccctgcttg

SEQ ID NO: 992974 - DNA, 33 bp, Homo sapien
catgcctctaactttatagctggtccctgcttg

SEQ ID NO: 992975 - DNA, 33 bp, Homo sapien
gagaacagggaccttccctgattatgtcccaag

SEQ ID NO: 992976 - DNA, 33 bp, Homo sapien
gagaacagggaccttctctgattatgtcccaag

SEQ ID NO: 992977 - DNA, 33 bp, Homo sapien
cattactttatcttggacaatacataaactgtt

SEQ ID NO: 992978 - DNA, 33 bp, Homo sapien
cattactttatcttgggcaatacataaactgtt

SEQ ID NO: 992979 - DNA, 33 bp, Homo sapien
ctgccttatgccaagcactggcaaaatagcaaa

SEQ ID NO: 992980 - DNA, 33 bp, Homo sapien
ctgccttatgccaagcgctggcaaaatagcaaa

SEQ ID NO: 992981 - DNA, 33 bp, Homo sapien
gcagaacggtaatgcaagaaaagcataggtatg

SEQ ID NO: 992982 - DNA, 33 bp, Homo sapien
gcagaacggtaatgcaggaaaagcataggtatg

SEQ ID NO: 992983 - DNA, 33 bp, Homo sapien
aaacaataagtgttcaaaaaatttcacctgatc

SEQ ID NO: 992984 - DNA, 33 bp, Homo sapien
aaacaataagtgttcataaaatttcacctgatc

SEQ ID NO: 992985 - DNA, 33 bp, Homo sapien
atctactaaggacttacatacagaaccgaagcc

SEQ ID NO: 992986 - DNA, 33 bp, Homo sapien
atctactaaggacttatatacagaaccgaagcc

SEQ ID NO: 992987 - DNA, 33 bp, Homo sapien
tggattgctgctttcacagtcaggaagggtgga

SEQ ID NO: 992988 - DNA, 33 bp, Homo sapien
tggattgctgctttcagagtcaggaagggtgga

SEQ ID NO: 992989 - DNA, 33 bp, Homo sapien
ccagttgataaacgaaacgccttgcagttagga

SEQ ID NO: 992990 - DNA, 33 bp, Homo sapien
ccagttgataaacgaagcgccttgcagttagga

SEQ ID NO: 992991 - DNA, 33 bp, Homo sapien
ggagtgagcaaacatccagaggtgtgaatgatc

SEQ ID NO: 992992 - DNA, 33 bp, Homo sapien
ggagtgagcaaacatcgagaggtgtgaatgatc

SEQ ID NO: 992993 - DNA, 33 bp, Homo sapien
tatcctttttctctgacaagagtgactgaagct

SEQ ID NO: 992994 - DNA, 33 bp, Homo sapien
tatcctttttctctgataagagtgactgaagct

SEQ ID NO: 992995 - DNA, 33 bp, Homo sapien
gttgcttcttgtgagacataccaggacaaagga

SEQ ID NO: 992996 - DNA, 33 bp, Homo sapien
gttgcttcttgtgagatataccaggacaaagga

SEQ ID NO: 992997 - DNA, 33 bp, Homo sapien
ctttatgatcatgataaggaactataatttttt

SEQ ID NO: 992998 - DNA, 33 bp, Homo sapien
ctttatgatcatgatagggaactataatttttt

SEQ ID NO: 992999 - DNA, 33 bp, Homo sapien
catgcctgggcttgccaaaagattggagaagtt

SEQ ID NO: 993000 - DNA, 33 bp, Homo sapien
catgcctgggcttgccgaaagattggagaagtt

SEQ ID NO: 993001 - DNA, 33 bp, Homo sapien
acgtgtacgggcaatgccacatctgctgcctac

SEQ ID NO: 993002 - DNA, 33 bp, Homo sapien
acgtgtacgggcaatgtcacatctgctgcctac

SEQ ID NO: 993003 - DNA, 33 bp, Homo sapien
cagagggctgccatgacgatatttctgttatag

SEQ ID NO: 993004 - DNA, 33 bp, Homo sapien
cagagggctgccatgatgatatttctgttatag

SEQ ID NO: 993005 - DNA, 33 bp, Homo sapien
aaatatagattgactgaatgcaatgcctattag

SEQ ID NO: 993006 - DNA, 33 bp, Homo sapien
aaatatagattgactggatgcaatgcctattag

SEQ ID NO: 993007 - DNA, 33 bp, Homo sapien
acttcctaataagaaacgtcacgtaagtgaaat

SEQ ID NO: 993008 - DNA, 33 bp, Homo sapien
acttcctaataagaaaggtcacgtaagtgaaat

SEQ ID NO: 993009 - DNA, 33 bp, Homo sapien
ttttctctaagagatcaaataatttcagtgctg

SEQ ID NO: 993010 - DNA, 33 bp, Homo sapien
ttttctctaagagatcgaataatttcagtgctg

SEQ ID NO: 993011 - DNA, 33 bp, Homo sapien
aaaggtgcaatactcacaagtgtttttatctta

SEQ ID NO: 993012 - DNA, 33 bp, Homo sapien
aaaggtgcaatactcagaagtgtttttatctta

SEQ ID NO: 993013 - DNA, 33 bp, Homo sapien
ctggcaagtgccataaaggaagaaaatagcacc

SEQ ID NO: 993014 - DNA, 33 bp, Homo sapien
ctggcaagtgccataagggaagaaaatagcacc

SEQ ID NO: 993015 - DNA, 33 bp, Homo sapien
atttcagaaataagccagaggataatttgaaaa

SEQ ID NO: 993016 - DNA, 33 bp, Homo sapien
atttcagaaataagcccgaggataatttgaaaa

SEQ ID NO: 993017 - DNA, 33 bp, Homo sapien
cattttctacttccaacgtgctacaagtaagtc

SEQ ID NO: 993018 - DNA, 33 bp, Homo sapien
cattttctacttccaatgtgctacaagtaagtc

SEQ ID NO: 993019 - DNA, 33 bp, Homo sapien
gaaggtggcaccaccacaatttgctgagtgatt

SEQ ID NO: 993020 - DNA, 33 bp, Homo sapien
gaaggtggcaccaccagaatttgctgagtgatt

SEQ ID NO: 993021 - DNA, 33 bp, Homo sapien
ttttaccactggcaaccgctattctgggactgt

SEQ ID NO: 993022 - DNA, 33 bp, Homo sapien
ttttaccactggcaactgctattctgggactgt

SEQ ID NO: 993023 - DNA, 33 bp, Homo sapien
cttggggatgctttaactgagaaaaatattcat

SEQ ID NO: 993024 - DNA, 33 bp, Homo sapien
cttggggatgctttaattgagaaaaatattcat

SEQ ID NO: 993025 - DNA, 33 bp, Homo sapien
tcatgagttcatcaaacggaaagtgttttaata

SEQ ID NO: 993026 - DNA, 33 bp, Homo sapien
tcatgagttcatcaaatggaaagtgttttaata

SEQ ID NO: 993027 - DNA, 33 bp, Homo sapien
aacttgcttaggccaacaacatttagtgaaagc

SEQ ID NO: 993028 - DNA, 33 bp, Homo sapien
aacttgcttaggccaataacatttagtgaaagc

SEQ ID NO: 993029 - DNA, 33 bp, Homo sapien
gtgacgttaaaaagtgcatagatacagagagta

SEQ ID NO: 993030 - DNA, 33 bp, Homo sapien
gtgacgttaaaaagtgtatagatacagagagta

SEQ ID NO: 993031 - DNA, 33 bp, Homo sapien
tacacatctatgccccaaagactaacctcctca

SEQ ID NO: 993032 - DNA, 33 bp, Homo sapien
tacacatctatgccccgaagactaacctcctca

SEQ ID NO: 993033 - DNA, 33 bp, Homo sapien
aaatagcaagttgggacggacaagtagaggaga

SEQ ID NO: 993034 - DNA, 33 bp, Homo sapien
aaatagcaagttgggatggacaagtagaggaga

SEQ ID NO: 993035 - DNA, 33 bp, Homo sapien
agcaagaatcacataagggctatcatttgttga

SEQ ID NO: 993036 - DNA, 33 bp, Homo sapien
agcaagaatcacataatggctatcatttgttga

SEQ ID NO: 993037 - DNA, 33 bp, Homo sapien
tccaggtacaggacaccataaatggaatgttaa

SEQ ID NO: 993038 - DNA, 33 bp, Homo sapien
tccaggtacaggacactataaatggaatgttaa

SEQ ID NO: 993039 - DNA, 33 bp, Homo sapien
tctcaaaaaaatgagcaaagaagctgactcgag

SEQ ID NO: 993040 - DNA, 33 bp, Homo sapien
tctcaaaaaaatgagcgaagaagctgactcgag

SEQ ID NO: 993041 - DNA, 33 bp, Homo sapien
gatttgtgatatggataatcaaaaactaaagag

SEQ ID NO: 993042 - DNA, 33 bp, Homo sapien
gatttgtgatatggatgatcaaaaactaaagag

SEQ ID NO: 993043 - DNA, 33 bp, Homo sapien
aatcaagtcttggatgcaatcataacagaacaa

SEQ ID NO: 993044 - DNA, 33 bp, Homo sapien
aatcaagtcttggatgtaatcataacagaacaa

SEQ ID NO: 993045 - DNA, 33 bp, Homo sapien
ttactttgtcagtgaacagcatcagcttaaaat

SEQ ID NO: 993046 - DNA, 33 bp, Homo sapien
ttactttgtcagtgaatagcatcagcttaaaat

SEQ ID NO: 993047 - DNA, 33 bp, Homo sapien
aactaggttttatgtgaaataatgctattatgg

SEQ ID NO: 993048 - DNA, 33 bp, Homo sapien
aactaggttttatgtggaataatgctattatgg

SEQ ID NO: 993049 - DNA, 33 bp, Homo sapien
cttttaagttttgacaatgtaggtatcaagctc

SEQ ID NO: 993050 - DNA, 33 bp, Homo sapien
cttttaagttttgacagtgtaggtatcaagctc

SEQ ID NO: 993051 - DNA, 33 bp, Homo sapien
agtccagagcttgtgaatagagacaagattgtg

SEQ ID NO: 993052 - DNA, 33 bp, Homo sapien
agtccagagcttgtgagtagagacaagattgtg

SEQ ID NO: 993053 - DNA, 33 bp, Homo sapien
caaaaacaactaggcaaaccattctttaatcaa

SEQ ID NO: 993054 - DNA, 33 bp, Homo sapien
caaaaacaactaggcataccattctttaatcaa

SEQ ID NO: 993055 - DNA, 33 bp, Homo sapien
agaacttatgccatttaaaatgatcaaagggga

SEQ ID NO: 993056 - DNA, 33 bp, Homo sapien
agaacttatgccatttgaaatgatcaaagggga

SEQ ID NO: 993057 - DNA, 33 bp, Homo sapien
tctttggccttgcagacgttgagcaaggagtgg

SEQ ID NO: 993058 - DNA, 33 bp, Homo sapien
tctttggccttgcagatgttgagcaaggagtgg

SEQ ID NO: 993059 - DNA, 33 bp, Homo sapien
gccttcaggcttccagcactctacagttcccct

SEQ ID NO: 993060 - DNA, 33 bp, Homo sapien
gccttcaggcttccagtactctacagttcccct

SEQ ID NO: 993061 - DNA, 33 bp, Homo sapien
acctagaacagctccaagtcgttctggtgttag

SEQ ID NO: 993062 - DNA, 33 bp, Homo sapien
acctagaacagctccaggtcgttctggtgttag

SEQ ID NO: 993063 - DNA, 33 bp, Homo sapien
cctctgaaatctgagcagaagttcccaaaactc

SEQ ID NO: 993064 - DNA, 33 bp, Homo sapien
cctctgaaatctgagcggaagttcccaaaactc

SEQ ID NO: 993065 - DNA, 33 bp, Homo sapien
gtccctgctgtagagaactgtgaaattttgaac

SEQ ID NO: 993066 - DNA, 33 bp, Homo sapien
gtccctgctgtagagatctgtgaaattttgaac

SEQ ID NO: 993067 - DNA, 33 bp, Homo sapien
gattctataatagtgacgttatctgtagagtaa

SEQ ID NO: 993068 - DNA, 33 bp, Homo sapien
gattctataatagtgatgttatctgtagagtaa

SEQ ID NO: 993069 - DNA, 33 bp, Homo sapien
tatctgtttgtaacaaatagtctttagaggtgg

SEQ ID NO: 993070 - DNA, 33 bp, Homo sapien
tatctgtttgtaacaagtagtctttagaggtgg

SEQ ID NO: 993071 - DNA, 33 bp, Homo sapien
gattctcctcctctaacgtgacagctcagcagt

SEQ ID NO: 993072 - DNA, 33 bp, Homo sapien
gattctcctcctctaatgtgacagctcagcagt

SEQ ID NO: 993073 - DNA, 33 bp, Homo sapien
cctacacataactagaacttctaggctcaggct

SEQ ID NO: 993074 - DNA, 33 bp, Homo sapien
cctacacataactagaccttctaggctcaggct

SEQ ID NO: 993075 - DNA, 33 bp, Homo sapien
aaatctcgtgaataacagtaacctcaataatat

SEQ ID NO: 993076 - DNA, 33 bp, Homo sapien
aaatctcgtgaataacggtaacctcaataatat

SEQ ID NO: 993077 - DNA, 33 bp, Homo sapien
ccctggactctagactcacacatccagatgtac

SEQ ID NO: 993078 - DNA, 33 bp, Homo sapien
ccctggactctagacttacacatccagatgtac

SEQ ID NO: 993079 - DNA, 33 bp, Homo sapien
agtttgagaggcctaacgtacatctggatgtgt

SEQ ID NO: 993080 - DNA, 33 bp, Homo sapien
agtttgagaggcctaatgtacatctggatgtgt

SEQ ID NO: 993081 - DNA, 33 bp, Homo sapien
cctcctggggggacagacaacagttagaaggtg

SEQ ID NO: 993082 - DNA, 33 bp, Homo sapien
cctcctggggggacagccaacagttagaaggtg

SEQ ID NO: 993083 - DNA, 33 bp, Homo sapien
gggaagttgtgtgtcacgcctggagtcaccagt

SEQ ID NO: 993084 - DNA, 33 bp, Homo sapien
gggaagttgtgtgtcatgcctggagtcaccagt

SEQ ID NO: 993085 - DNA, 33 bp, Homo sapien
gccctagtatgcaggaagtatctgtggagtggg

SEQ ID NO: 993086 - DNA, 33 bp, Homo sapien
gccctagtatgcaggacgtatctgtggagtggg

SEQ ID NO: 993087 - DNA, 33 bp, Homo sapien
atttctgtatatgatacgtttcccacacttttc

SEQ ID NO: 993088 - DNA, 33 bp, Homo sapien
atttctgtatatgatatgtttcccacacttttc

SEQ ID NO: 993089 - DNA, 33 bp, Homo sapien
agcctgtgtaggaaaagcacagtctcccgtgag

SEQ ID NO: 993090 - DNA, 33 bp, Homo sapien
agcctgtgtaggaaaatcacagtctcccgtgag

SEQ ID NO: 993091 - DNA, 33 bp, Homo sapien
acttactcttctggaagctgatccaggtgggtg

SEQ ID NO: 993092 - DNA, 33 bp, Homo sapien
acttactcttctggaatctgatccaggtgggtg

SEQ ID NO: 993093 - DNA, 33 bp, Homo sapien
ttgagaaagcctcaaccaaaccttattgaattt

SEQ ID NO: 993094 - DNA, 33 bp, Homo sapien
ttgagaaagcctcaactaaaccttattgaattt

SEQ ID NO: 993095 - DNA, 33 bp, Homo sapien
cctctctatccagccaactgaggagaaaaaagg

SEQ ID NO: 993096 - DNA, 33 bp, Homo sapien
cctctctatccagccatctgaggagaaaaaagg

SEQ ID NO: 993097 - DNA, 33 bp, Homo sapien
ttctgatcaagttgcacatctgatcaagttaca

SEQ ID NO: 993098 - DNA, 33 bp, Homo sapien
ttctgatcaagttgcatatctgatcaagttaca

SEQ ID NO: 993099 - DNA, 33 bp, Homo sapien
gtgtggtaagccaggccataagttgaaggaaaa

SEQ ID NO: 993100 - DNA, 33 bp, Homo sapien
gtgtggtaagccaggctataagttgaaggaaaa

SEQ ID NO: 993101 - DNA, 33 bp, Homo sapien
atgctaagagtagtgacaagcactgaaagggtg

SEQ ID NO: 993102 - DNA, 33 bp, Homo sapien
atgctaagagtagtgagaagcactgaaagggtg

SEQ ID NO: 993103 - DNA, 33 bp, Homo sapien
tttagcaattccgtcaacccctctgtgcctcaa

SEQ ID NO: 993104 - DNA, 33 bp, Homo sapien
tttagcaattccgtcagcccctctgtgcctcaa

SEQ ID NO: 993105 - DNA, 33 bp, Homo sapien
ttttcttttccatctaactcatttccttgtggt

SEQ ID NO: 993106 - DNA, 33 bp, Homo sapien
ttttcttttccatctagctcatttccttgtggt

SEQ ID NO: 993107 - DNA, 33 bp, Homo sapien
agatgaatcagcagagcctccatgcggtaaaat

SEQ ID NO: 993108 - DNA, 33 bp, Homo sapien
agatgaatcagcagaggctccatgcggtaaaat

SEQ ID NO: 993109 - DNA, 33 bp, Homo sapien
ggggagacaggaccacacatagtttgcagggtc

SEQ ID NO: 993110 - DNA, 33 bp, Homo sapien
ggggagacaggaccacgcatagtttgcagggtc

SEQ ID NO: 993111 - DNA, 33 bp, Homo sapien
ttctaaattcctgtgtcaaggttagttatcctt

SEQ ID NO: 993112 - DNA, 33 bp, Homo sapien
ttctaaattcctgtgttaaggttagttatcctt

SEQ ID NO: 993113 - DNA, 33 bp, Homo sapien
ttccgtgttctggagcacatatccaactgggga

SEQ ID NO: 993114 - DNA, 33 bp, Homo sapien
ttccgtgttctggagcgcatatccaactgggga

SEQ ID NO: 993115 - DNA, 33 bp, Homo sapien
aaatgatgcatcatccaattagttacctctgtg

SEQ ID NO: 993116 - DNA, 33 bp, Homo sapien
aaatgatgcatcatccgattagttacctctgtg

SEQ ID NO: 993117 - DNA, 33 bp, Homo sapien
caggtggcaagggctacactgtagagtttttga

SEQ ID NO: 993118 - DNA, 33 bp, Homo sapien
caggtggcaagggctatactgtagagtttttga

SEQ ID NO: 993119 - DNA, 33 bp, Homo sapien
aatgcacctacacacggcctttctataatgaag

SEQ ID NO: 993120 - DNA, 33 bp, Homo sapien
aatgcacctacacacgtcctttctataatgaag

SEQ ID NO: 993121 - DNA, 33 bp, Homo sapien
gagtcccgggaaacccactggctcatcatggct

SEQ ID NO: 993122 - DNA, 33 bp, Homo sapien
gagtcccgggaaacccgctggctcatcatggct

SEQ ID NO: 993123 - DNA, 33 bp, Homo sapien
tttggatttgagctcactactcactagctttgt

SEQ ID NO: 993124 - DNA, 33 bp, Homo sapien
tttggatttgagctcagtactcactagctttgt

SEQ ID NO: 993125 - DNA, 33 bp, Homo sapien
atcacttggcttccaacaaaatgcctcccaaaa

SEQ ID NO: 993126 - DNA, 33 bp, Homo sapien
atcacttggcttccaataaaatgcctcccaaaa

SEQ ID NO: 993127 - DNA, 33 bp, Homo sapien
aatccccatatgtcaaagatgggtccaggtgga

SEQ ID NO: 993128 - DNA, 33 bp, Homo sapien
aatccccatatgtcaaggatgggtccaggtgga

SEQ ID NO: 993129 - DNA, 33 bp, Homo sapien
agccatctgcaagccaaataagagccctcatca

SEQ ID NO: 993130 - DNA, 33 bp, Homo sapien
agccatctgcaagccagataagagccctcatca

SEQ ID NO: 993131 - DNA, 33 bp, Homo sapien
taggacagatctgtaacgaagtctttattataa

SEQ ID NO: 993132 - DNA, 33 bp, Homo sapien
taggacagatctgtaatgaagtctttattataa

SEQ ID NO: 993133 - DNA, 33 bp, Homo sapien
ttatactttcctatcaaaatccatgtgaagatg

SEQ ID NO: 993134 - DNA, 33 bp, Homo sapien
ttatactttcctatcagaatccatgtgaagatg

SEQ ID NO: 993135 - DNA, 33 bp, Homo sapien
ctttttccttgtgaagccttatcttttaggatt

SEQ ID NO: 993136 - DNA, 33 bp, Homo sapien
ctttttccttgtgaagtcttatcttttaggatt

SEQ ID NO: 993137 - DNA, 33 bp, Homo sapien
agtagcttacgaaacaatatgagagctatgcaa

SEQ ID NO: 993138 - DNA, 33 bp, Homo sapien
agtagcttacgaaacagtatgagagctatgcaa

SEQ ID NO: 993139 - DNA, 33 bp, Homo sapien
tctgtgtacctacttacaattgcttgcccttaa

SEQ ID NO: 993140 - DNA, 33 bp, Homo sapien
tctgtgtacctacttataattgcttgcccttaa

SEQ ID NO: 993141 - DNA, 33 bp, Homo sapien
tttattacatcggaaaggttcatttgtccacac

SEQ ID NO: 993142 - DNA, 33 bp, Homo sapien
tttattacatcggaaatgttcatttgtccacac

SEQ ID NO: 993143 - DNA, 33 bp, Homo sapien
ctctatttaccatttcaatgaatgttgtacctt

SEQ ID NO: 993144 - DNA, 33 bp, Homo sapien
ctctatttaccatttccatgaatgttgtacctt

SEQ ID NO: 993145 - DNA, 33 bp, Homo sapien
atctacaacatgtttaaaccttctgacttgtcc

SEQ ID NO: 993146 - DNA, 33 bp, Homo sapien
atctacaacatgtttagaccttctgacttgtcc

SEQ ID NO: 993147 - DNA, 33 bp, Homo sapien
gggtcagctttccccacatgatatgatgtcata

SEQ ID NO: 993148 - DNA, 33 bp, Homo sapien
gggtcagctttccccatatgatatgatgtcata

SEQ ID NO: 993149 - DNA, 33 bp, Homo sapien
aagagagtagatcttacgtgctgtcaccaccta

SEQ ID NO: 993150 - DNA, 33 bp, Homo sapien
aagagagtagatcttatgtgctgtcaccaccta

SEQ ID NO: 993151 - DNA, 33 bp, Homo sapien
tgactgataatgagggaaaaaaatcaaccaaag

SEQ ID NO: 993152 - DNA, 33 bp, Homo sapien
tgactgataatgaggggaaaaaatcaaccaaag

SEQ ID NO: 993153 - DNA, 33 bp, Homo sapien
ttatttatctaggacaccctttccatcctgtca

SEQ ID NO: 993154 - DNA, 33 bp, Homo sapien
ttatttatctaggacatcctttccatcctgtca

SEQ ID NO: 993155 - DNA, 33 bp, Homo sapien
ggagtgtgaatgctaaaatgacaccataagggt

SEQ ID NO: 993156 - DNA, 33 bp, Homo sapien
ggagtgtgaatgctaagatgacaccataagggt

SEQ ID NO: 993157 - DNA, 33 bp, Homo sapien
tttctccacaatgaaacggtcatcttgttcagg

SEQ ID NO: 993158 - DNA, 33 bp, Homo sapien
tttctccacaatgaaatggtcatcttgttcagg

SEQ ID NO: 993159 - DNA, 33 bp, Homo sapien
tgttgtccatgactcaagcagctagatttttga

SEQ ID NO: 993160 - DNA, 33 bp, Homo sapien
tgttgtccatgactcaggcagctagatttttga

SEQ ID NO: 993161 - DNA, 33 bp, Homo sapien
tccgggaagatgatggaacagatggtatatttc

SEQ ID NO: 993162 - DNA, 33 bp, Homo sapien
tccgggaagatgatgggacagatggtatatttc

SEQ ID NO: 993163 - DNA, 33 bp, Homo sapien
ctttcagtgccttttaccttacagtcaaaatgg

SEQ ID NO: 993164 - DNA, 33 bp, Homo sapien
ctttcagtgccttttagcttacagtcaaaatgg

SEQ ID NO: 993165 - DNA, 33 bp, Homo sapien
acattctggacatagcgaagaaccaattgtact

SEQ ID NO: 993166 - DNA, 33 bp, Homo sapien
acattctggacatagctaagaaccaattgtact

SEQ ID NO: 993167 - DNA, 33 bp, Homo sapien
ttcttgggaagtccatcaggaacagctcagagc

SEQ ID NO: 993168 - DNA, 33 bp, Homo sapien
ttcttgggaagtccattaggaacagctcagagc

SEQ ID NO: 993169 - DNA, 33 bp, Homo sapien
ccctgggatacaagacacattaagattggccca

SEQ ID NO: 993170 - DNA, 33 bp, Homo sapien
ccctgggatacaagacgcattaagattggccca

SEQ ID NO: 993171 - DNA, 33 bp, Homo sapien
atcacttatcttgggcccttccattttcagagc

SEQ ID NO: 993172 - DNA, 33 bp, Homo sapien
atcacttatcttgggcgcttccattttcagagc

SEQ ID NO: 993173 - DNA, 33 bp, Homo sapien
attcagacttttgggacccagagaatgtcactc

SEQ ID NO: 993174 - DNA, 33 bp, Homo sapien
attcagacttttgggatccagagaatgtcactc

SEQ ID NO: 993175 - DNA, 33 bp, Homo sapien
ctactatagctaaatccaaagactaccacatct

SEQ ID NO: 993176 - DNA, 33 bp, Homo sapien
ctactatagctaaatctaaagactaccacatct

SEQ ID NO: 993177 - DNA, 33 bp, Homo sapien
gattgatgtggttaaactgtataggaatgcttg

SEQ ID NO: 993178 - DNA, 33 bp, Homo sapien
gattgatgtggttaaattgtataggaatgcttg

SEQ ID NO: 993179 - DNA, 33 bp, Homo sapien
gcataggtcattacacactcctgatgttgcctg

SEQ ID NO: 993180 - DNA, 33 bp, Homo sapien
gcataggtcattacacgctcctgatgttgcctg

SEQ ID NO: 993181 - DNA, 33 bp, Homo sapien
ttcacaaaattcacaaatacattgaaattaaac

SEQ ID NO: 993182 - DNA, 33 bp, Homo sapien
ttcacaaaattcacaactacattgaaattaaac

SEQ ID NO: 993183 - DNA, 33 bp, Homo sapien
gtgtaaagggggacaacgggactgcgatatggt

SEQ ID NO: 993184 - DNA, 33 bp, Homo sapien
gtgtaaagggggacaatgggactgcgatatggt

SEQ ID NO: 993185 - DNA, 33 bp, Homo sapien
ctattgaaagaacaaaaggattccctgagagct

SEQ ID NO: 993186 - DNA, 33 bp, Homo sapien
ctattgaaagaacaaatggattccctgagagct

SEQ ID NO: 993187 - DNA, 33 bp, Homo sapien
ggggcaccaacagggcaagaagcttgagttggg

SEQ ID NO: 993188 - DNA, 33 bp, Homo sapien
ggggcaccaacagggcgagaagcttgagttggg

SEQ ID NO: 993189 - DNA, 33 bp, Homo sapien
ccaaggaagcttttgcagagttcaatagaatca

SEQ ID NO: 993190 - DNA, 33 bp, Homo sapien
ccaaggaagcttttgcggagttcaatagaatca

SEQ ID NO: 993191 - DNA, 33 bp, Homo sapien
ctctttgaacgctcaaattgacttcagctatca

SEQ ID NO: 993192 - DNA, 33 bp, Homo sapien
ctctttgaacgctcaagttgacttcagctatca

SEQ ID NO: 993193 - DNA, 33 bp, Homo sapien
tctcctccccctagtaacggctctgaaaacgcg

SEQ ID NO: 993194 - DNA, 33 bp, Homo sapien
tctcctccccctagtagcggctctgaaaacgcg

SEQ ID NO: 993195 - DNA, 33 bp, Homo sapien
taacgggagcactgaaaaaggattcctgcagaa

SEQ ID NO: 993196 - DNA, 33 bp, Homo sapien
taacgggagcactgaagaaggattcctgcagaa

SEQ ID NO: 993197 - DNA, 33 bp, Homo sapien
cttctttgcatctcaaattaaagcctggagcag

SEQ ID NO: 993198 - DNA, 33 bp, Homo sapien
cttctttgcatctcaagttaaagcctggagcag

SEQ ID NO: 993199 - DNA, 33 bp, Homo sapien
ataactcattgtagatgaacaactgagaaaatg

SEQ ID NO: 993200 - DNA, 33 bp, Homo sapien
ataactcattgtagattaacaactgagaaaatg

SEQ ID NO: 993201 - DNA, 33 bp, Homo sapien
aagaaaacaagggttaaccaaggagagctggac

SEQ ID NO: 993202 - DNA, 33 bp, Homo sapien
aagaaaacaagggttagccaaggagagctggac

SEQ ID NO: 993203 - DNA, 33 bp, Homo sapien
ttgttacagggatgggacattcatggagaacct

SEQ ID NO: 993204 - DNA, 33 bp, Homo sapien
ttgttacagggatggggcattcatggagaacct

SEQ ID NO: 993205 - DNA, 33 bp, Homo sapien; identical to SEQ ID NO: 993203

SEQ ID NO: 993206 - DNA, 33 bp, Homo sapien; identical to SEQ ID NO: 993204

SEQ ID NO: 993207 - DNA, 33 bp, Homo sapien
atgtctttgggttacgacatgtgggaaaagtga

SEQ ID NO: 993208 - DNA, 33 bp, Homo sapien
atgtctttgggttacgccatgtgggaaaagtga

SEQ ID NO: 993209 - DNA, 33 bp, Homo sapien
agctgcatggatgtagacagattaggttgaaag

SEQ ID NO: 993210 - DNA, 33 bp, Homo sapien
agctgcatggatgtaggcagattaggttgaaag

SEQ ID NO: 993211 - DNA, 33 bp, Homo sapien
caagtgcccttatcatcaagccaatgatggtta

SEQ ID NO: 993212 - DNA, 33 bp, Homo sapien
caagtgcccttatcatgaagccaatgatggtta

SEQ ID NO: 993213 - DNA, 33 bp, Homo sapien
gtatttcattattgtaagtgtcggaagatgcta

SEQ ID NO: 993214 - DNA, 33 bp, Homo sapien
gtatttcattattgtaggtgtcggaagatgcta

SEQ ID NO: 993215 - DNA, 33 bp, Homo sapien
tacaccaaagtgaagaaattctttgacagatct

SEQ ID NO: 993216 - DNA, 33 bp, Homo sapien
tacaccaaagtgaagacattctttgacagatct

SEQ ID NO: 993217 - DNA, 33 bp, Homo sapien
cttcctagttgggccacctaagctacttaactt

SEQ ID NO: 993218 - DNA, 33 bp, Homo sapien
cttcctagttgggccatctaagctacttaactt

SEQ ID NO: 993219 - DNA, 33 bp, Homo sapien
ttcatacacatgaataacactgcctgggccaca

SEQ ID NO: 993220 - DNA, 33 bp, Homo sapien
ttcatacacatgaatagcactgcctgggccaca

SEQ ID NO: 993221 - DNA, 33 bp, Homo sapien
agcttttgttttaagcacctgaccagactgtgt

SEQ ID NO: 993222 - DNA, 33 bp, Homo sapien
agcttttgttttaagcgcctgaccagactgtgt

SEQ ID NO: 993223 - DNA, 33 bp, Homo sapien
aagatacatatttacacgttcaataatcttagc

SEQ ID NO: 993224 - DNA, 33 bp, Homo sapien
aagatacatatttacaggttcaataatcttagc

SEQ ID NO: 993225 - DNA, 33 bp, Homo sapien
ataaaaccatcagataacttaagacttattcac

SEQ ID NO: 993226 - DNA, 33 bp, Homo sapien
ataaaaccatcagataccttaagacttattcac

SEQ ID NO: 993227 - DNA, 33 bp, Homo sapien
gaggaccaactattaacggcagaaacaatagcc

SEQ ID NO: 993228 - DNA, 33 bp, Homo sapien
gaggaccaactattaatggcagaaacaatagcc

SEQ ID NO: 993229 - DNA, 33 bp, Homo sapien
agcaaggacagtcagggagacaagttagaggct

SEQ ID NO: 993230 - DNA, 33 bp, Homo sapien
agcaaggacagtcaggtagacaagttagaggct

SEQ ID NO: 993231 - DNA, 33 bp, Homo sapien
ttgagataatgaatgacgcaagtggtaaagctg

SEQ ID NO: 993232 - DNA, 33 bp, Homo sapien
ttgagataatgaatgatgcaagtggtaaagctg

SEQ ID NO: 993233 - DNA, 33 bp, Homo sapien
ccttgtcttcccagaactctccaggttttaaaa

SEQ ID NO: 993234 - DNA, 33 bp, Homo sapien
ccttgtcttcccagaattctccaggttttaaaa

SEQ ID NO: 993235 - DNA, 33 bp, Homo sapien
ttgacctccatgaattaaatagatgattgtcag

SEQ ID NO: 993236 - DNA, 33 bp, Homo sapien
ttgacctccatgaattgaatagatgattgtcag

SEQ ID NO: 993237 - DNA, 33 bp, Homo sapien
ttgtttggtccacatacgtataaccctagcaca

SEQ ID NO: 993238 - DNA, 33 bp, Homo sapien
ttgtttggtccacatatgtataaccctagcaca

SEQ ID NO: 993239 - DNA, 33 bp, Homo sapien
gaaaatagggatgcaacgtcaccctaatcccca

SEQ ID NO: 993240 - DNA, 33 bp, Homo sapien
gaaaatagggatgcaatgtcaccctaatcccca

SEQ ID NO: 993241 - DNA, 33 bp, Homo sapien
actctggtcttcaaaacatatctaatttgccta

SEQ ID NO: 993242 - DNA, 33 bp, Homo sapien
actctggtcttcaaaagatatctaatttgccta

SEQ ID NO: 993243 - DNA, 33 bp, Homo sapien
actggaaggtagttatcaattatcctgctttaa

SEQ ID NO: 993244 - DNA, 33 bp, Homo sapien
actggaaggtagttattaattatcctgctttaa

SEQ ID NO: 993245 - DNA, 33 bp, Homo sapien
attcttctgaacttcacggttattgtgacaatg

SEQ ID NO: 993246 - DNA, 33 bp, Homo sapien
attcttctgaacttcatggttattgtgacaatg

SEQ ID NO: 993247 - DNA, 33 bp, Homo sapien
aggatcattggagttacaatttggcagattctt

SEQ ID NO: 993248 - DNA, 33 bp, Homo sapien
aggatcattggagttataatttggcagattctt

SEQ ID NO: 993249 - DNA, 33 bp, Homo sapien
agttctttgaaagacccatgccatcttctaccc

SEQ ID NO: 993250 - DNA, 33 bp, Homo sapien
agttctttgaaagacctatgccatcttctaccc

SEQ ID NO: 993251 - DNA, 33 bp, Homo sapien
taaggtaaaagaacacactcatatgtggcaata

SEQ ID NO: 993252 - DNA, 33 bp, Homo sapien
taaggtaaaagaacacgctcatatgtggcaata

SEQ ID NO: 993253 - DNA, 33 bp, Homo sapien
ttacaactgccgtttccatctacagtgccagtg

SEQ ID NO: 993254 - DNA, 33 bp, Homo sapien
ttacaactgccgtttctatctacagtgccagtg

SEQ ID NO: 993255 - DNA, 33 bp, Homo sapien
gaatagattaattaaccatggagatgccagaca

SEQ ID NO: 993256 - DNA, 33 bp, Homo sapien
gaatagattaattaactatggagatgccagaca

SEQ ID NO: 993257 - DNA, 33 bp, Homo sapien
gtgaagtgttttcaaacagatggctggtgtgag

SEQ ID NO: 993258 - DNA, 33 bp, Homo sapien
gtgaagtgttttcaaatagatggctggtgtgag

SEQ ID NO: 993259 - DNA, 33 bp, Homo sapien
gtgtttttatcctgagaagatgatattgatgaa

SEQ ID NO: 993260 - DNA, 33 bp, Homo sapien
gtgtttttatcctgagtagatgatattgatgaa

SEQ ID NO: 993261 - DNA, 33 bp, Homo sapien
aataaaatgtcaaacaatcacgcagtgtgaaat

SEQ ID NO: 993262 - DNA, 33 bp, Homo sapien
aataaaatgtcaaacagtcacgcagtgtgaaat

SEQ ID NO: 993263 - DNA, 33 bp, Homo sapien
ggaagacgccatttaacgttaagtcaatttgca

SEQ ID NO: 993264 - DNA, 33 bp, Homo sapien
ggaagacgccatttaatgttaagtcaatttgca

SEQ ID NO: 993265 - DNA, 33 bp, Homo sapien
gagaccataacctgtcaactctaacagatggct

SEQ ID NO: 993266 - DNA, 33 bp, Homo sapien
gagaccataacctgtcgactctaacagatggct

SEQ ID NO: 993267 - DNA, 33 bp, Homo sapien
aataagcatggaatcaaagaaacagtcgtggcc

SEQ ID NO: 993268 - DNA, 33 bp, Homo sapien
aataagcatggaatcacagaaacagtcgtggcc

SEQ ID NO: 993269 - DNA, 33 bp, Homo sapien
tcaaagatggttatgaaggttttatgaatttac

SEQ ID NO: 993270 - DNA, 33 bp, Homo sapien
tcaaagatggttatgagggttttatgaatttac

SEQ ID NO: 993271 - DNA, 33 bp, Homo sapien
tccacgtcaggagcaacgaatgccttcccaggt

SEQ ID NO: 993272 - DNA, 33 bp, Homo sapien
tccacgtcaggagcaatgaatgccttcccaggt

SEQ ID NO: 993273 - DNA, 33 bp, Homo sapien
tggcagtctgccaagcaaagaggaaacagaaaa

SEQ ID NO: 993274 - DNA, 33 bp, Homo sapien
tggcagtctgccaagcgaagaggaaacagaaaa

SEQ ID NO: 993275 - DNA, 33 bp, Homo sapien
aatgaaaagaaacaaacactgcctacaagatat

SEQ ID NO: 993276 - DNA, 33 bp, Homo sapien
aatgaaaagaaacaaagactgcctacaagatat

SEQ ID NO: 993277 - DNA, 33 bp, Homo sapien
gttttattctagagctcacacccttctcacact

SEQ ID NO: 993278 - DNA, 33 bp, Homo sapien
gttttattctagagcttacacccttctcacact

SEQ ID NO: 993279 - DNA, 33 bp, Homo sapien
gtagagggttttgagagccaggctgaagagttt

SEQ ID NO: 993280 - DNA, 33 bp, Homo sapien
gtagagggttttgagatccaggctgaagagttt

SEQ ID NO: 993281 - DNA, 33 bp, Homo sapien
tggcatgtgaaatcccacgtgtctgaaatctaa

SEQ ID NO: 993282 - DNA, 33 bp, Homo sapien
tggcatgtgaaatcccgcgtgtctgaaatctaa

SEQ ID NO: 993283 - DNA, 33 bp, Homo sapien
tgcaggagaacggatcaagtggaaaattttatc

SEQ ID NO: 993284 - DNA, 33 bp, Homo sapien
tgcaggagaacggatcgagtggaaaattttatc

SEQ ID NO: 993285 - DNA, 33 bp, Homo sapien
tataatagaacataaacgacatgaaagactaaa

SEQ ID NO: 993286 - DNA, 33 bp, Homo sapien
tataatagaacataaatgacatgaaagactaaa

SEQ ID NO: 993287 - DNA, 33 bp, Homo sapien
atcatagccatattaacatcacagcacaatgca

SEQ ID NO: 993288 - DNA, 33 bp, Homo sapien
atcatagccatattaatatcacagcacaatgca

SEQ ID NO: 993289 - DNA, 33 bp, Homo sapien
gccctgtcctataaaacgaatctcaataaataa

SEQ ID NO: 993290 - DNA, 33 bp, Homo sapien
gccctgtcctataaaatgaatctcaataaataa

SEQ ID NO: 993291 - DNA, 33 bp, Homo sapien
tggagcacctaaattgaagcaaatttcatactg

SEQ ID NO: 993292 - DNA, 33 bp, Homo sapien
tggagcacctaaattgcagcaaatttcatactg

SEQ ID NO: 993293 - DNA, 33 bp, Homo sapien
tagagggagggcattgaagaacagggttagagc

SEQ ID NO: 993294 - DNA, 33 bp, Homo sapien
tagagggagggcattgcagaacagggttagagc

SEQ ID NO: 993295 - DNA, 33 bp, Homo sapien
tctttttccagacagaaggtaggattgtacatc

SEQ ID NO: 993296 - DNA, 33 bp, Homo sapien
tctttttccagacagatggtaggattgtacatc

SEQ ID NO: 993297 - DNA, 33 bp, Homo sapien
attcttatggctcatacatttactcagacatta

SEQ ID NO: 993298 - DNA, 33 bp, Homo sapien
attcttatggctcatagatttactcagacatta

SEQ ID NO: 993299 - DNA, 33 bp, Homo sapien
ccgcagatttagagagaagaaaccgcggacagg

SEQ ID NO: 993300 - DNA, 33 bp, Homo sapien
ccgcagatttagagaggagaaaccgcggacagg

SEQ ID NO: 993301 - DNA, 33 bp, Homo sapien
ttgtgttcaataaatacatacacagttaggcat

SEQ ID NO: 993302 - DNA, 33 bp, Homo sapien
ttgtgttcaataaatagatacacagttaggcat

SEQ ID NO: 993303 - DNA, 33 bp, Homo sapien
tcaataacaaatcaagccactggaggtgtcagt

SEQ ID NO: 993304 - DNA, 33 bp, Homo sapien
tcaataacaaatcaagtcactggaggtgtcagt

SEQ ID NO: 993305 - DNA, 33 bp, Homo sapien
tggtcttggttttctccgaatctctttcctaag

SEQ ID NO: 993306 - DNA, 33 bp, Homo sapien
tggtcttggttttctctgaatctctttcctaag

SEQ ID NO: 993307 - DNA, 33 bp, Homo sapien
tcagctcctatagttacgaaatgggaatattaa

SEQ ID NO: 993308 - DNA, 33 bp, Homo sapien
tcagctcctatagttatgaaatgggaatattaa

SEQ ID NO: 993309 - DNA, 33 bp, Homo sapien
aatctgaaagattgaccaattacgtttctctag

SEQ ID NO: 993310 - DNA, 33 bp, Homo sapien
aatctgaaagattgactaattacgtttctctag

SEQ ID NO: 993311 - DNA, 33 bp, Homo sapien
tgagcaagtgactgaaataagctagtgtctatt

SEQ ID NO: 993312 - DNA, 33 bp, Homo sapien
tgagcaagtgactgaactaagctagtgtctatt

SEQ ID NO: 993313 - DNA, 33 bp, Homo sapien
ctattcttgttttttgaaatgaaccagattttc

SEQ ID NO: 993314 - DNA, 33 bp, Homo sapien
ctattcttgttttttggaatgaaccagattttc

SEQ ID NO: 993315 - DNA, 33 bp, Homo sapien
cctgctcatctgaggcaaatcacccattgctgt

SEQ ID NO: 993316 - DNA, 33 bp, Homo sapien
cctgctcatctgaggcgaatcacccattgctgt

SEQ ID NO: 993317 - DNA, 33 bp, Homo sapien
tttatattccatccctaaacattgagaataata

SEQ ID NO: 993318 - DNA, 33 bp, Homo sapien
tttatattccatccctcaacattgagaataata

SEQ ID NO: 993319 - DNA, 33 bp, Homo sapien
gttgaacaattcacaactacccatgaagatgtg

SEQ ID NO: 993320 - DNA, 33 bp, Homo sapien
gttgaacaattcacaagtacccatgaagatgtg

SEQ ID NO: 993321 - DNA, 33 bp, Homo sapien
aatgtggccagctagaccagctaacacggtgga

SEQ ID NO: 993322 - DNA, 33 bp, Homo sapien
aatgtggccagctagatcagctaacacggtgga

SEQ ID NO: 993323 - DNA, 33 bp, Homo sapien
gcaaacttactggaagcaaatggatgtgattga

SEQ ID NO: 993324 - DNA, 33 bp, Homo sapien
gcaaacttactggaaggaaatggatgtgattga

SEQ ID NO: 993325 - DNA, 33 bp, Homo sapien
tacctaagctagtaaaacagccatcattttgga

SEQ ID NO: 993326 - DNA, 33 bp, Homo sapien
tacctaagctagtaaagcagccatcattttgga

SEQ ID NO: 993327 - DNA, 33 bp, Homo sapien
tttaaaagttcagaacaaaatggcaattagggc

SEQ ID NO: 993328 - DNA, 33 bp, Homo sapien
tttaaaagttcagaaccaaatggcaattagggc

SEQ ID NO: 993329 - DNA, 33 bp, Homo sapien
aatgtttacctgtgaacggcagaatcacaggta

SEQ ID NO: 993330 - DNA, 33 bp, Homo sapien
aatgtttacctgtgaatggcagaatcacaggta

SEQ ID NO: 993331 - DNA, 33 bp, Homo sapien
acttaattctcataacaataaaactgatttaaa

SEQ ID NO: 993332 - DNA, 33 bp, Homo sapien
acttaattctcataacgataaaactgatttaaa

SEQ ID NO: 993333 - DNA, 33 bp, Homo sapien
atactttagaaatagaaaagctcatatctaaat

SEQ ID NO: 993334 - DNA, 33 bp, Homo sapien
atactttagaaatagacaagctcatatctaaat

SEQ ID NO: 993335 - DNA, 33 bp, Homo sapien
caactgtatttcagacaaaggaattttcttcag

SEQ ID NO: 993336 - DNA, 33 bp, Homo sapien
caactgtatttcagacgaaggaattttcttcag

SEQ ID NO: 993337 - DNA, 33 bp, Homo sapien
tctattctttatcaatcagtcagtctgaaatat

SEQ ID NO: 993338 - DNA, 33 bp, Homo sapien
tctattctttatcaattagtcagtctgaaatat

SEQ ID NO: 993339 - DNA, 33 bp, Homo sapien
cttcaccataaagaaacactggaacctgtgact

SEQ ID NO: 993340 - DNA, 33 bp, Homo sapien
cttcaccataaagaaatactggaacctgtgact

SEQ ID NO: 993341 - DNA, 33 bp, Homo sapien
gactgctgaaatgtggaactaaaaggcattgtt

SEQ ID NO: 993342 - DNA, 33 bp, Homo sapien
gactgctgaaatgtgggactaaaaggcattgtt

SEQ ID NO: 993343 - DNA, 33 bp, Homo sapien
ccaggtggccatcaaaaagtgagatgcaaatat

SEQ ID NO: 993344 - DNA, 33 bp, Homo sapien
ccaggtggccatcaaacagtgagatgcaaatat

SEQ ID NO: 993345 - DNA, 33 bp, Homo sapien
atttttaattttgatgaacctcaagatttaacc

SEQ ID NO: 993346 - DNA, 33 bp, Homo sapien
atttttaattttgatggacctcaagatttaacc

SEQ ID NO: 993347 - DNA, 33 bp, Homo sapien
cagttttgcaagaaagcaacttgatttacctta

SEQ ID NO: 993348 - DNA, 33 bp, Homo sapien
cagttttgcaagaaaggaacttgatttacctta

SEQ ID NO: 993349 - DNA, 33 bp, Homo sapien
ctctggaaaatcctcacggtagatctactagac

SEQ ID NO: 993350 - DNA, 33 bp, Homo sapien
ctctggaaaatcctcatggtagatctactagac

SEQ ID NO: 993351 - DNA, 33 bp, Homo sapien
caaatcggtatgtaagaccctgcagatacaacc

SEQ ID NO: 993352 - DNA, 33 bp, Homo sapien
caaatcggtatgtaaggccctgcagatacaacc

SEQ ID NO: 993353 - DNA, 33 bp, Homo sapien
agttaagatgtttgcacatatattctctgtcac

SEQ ID NO: 993354 - DNA, 33 bp, Homo sapien
agttaagatgtttgcatatatattctctgtcac

SEQ ID NO: 993355 - DNA, 33 bp, Homo sapien
acctcttcacgtaattcaaactgtttacaacat

SEQ ID NO: 993356 - DNA, 33 bp, Homo sapien
acctcttcacgtaattgaaactgtttacaacat

SEQ ID NO: 993357 - DNA, 33 bp, Homo sapien
cctcttagattcatgcccaatagaaaaagtgcc

SEQ ID NO: 993358 - DNA, 33 bp, Homo sapien
cctcttagattcatgctcaatagaaaaagtgcc

SEQ ID NO: 993359 - DNA, 33 bp, Homo sapien
tctgggaatcaaagcaacatggatatggcagag

SEQ ID NO: 993360 - DNA, 33 bp, Homo sapien
tctgggaatcaaagcaccatggatatggcagag

SEQ ID NO: 993361 - DNA, 33 bp, Homo sapien
cacttctttctaagccacctcaatttccttacc

SEQ ID NO: 993362 - DNA, 33 bp, Homo sapien
cacttctttctaagccgcctcaatttccttacc

SEQ ID NO: 993363 - DNA, 33 bp, Homo sapien
aactgttgtatgtctaactactcccgtaagcaa

SEQ ID NO: 993364 - DNA, 33 bp, Homo sapien
aactgttgtatgtctatctactcccgtaagcaa

SEQ ID NO: 993365 - DNA, 33 bp, Homo sapien
atgctggaaacaagaaacatctcaacagatatg

SEQ ID NO: 993366 - DNA, 33 bp, Homo sapien
atgctggaaacaagaaccatctcaacagatatg

SEQ ID NO: 993367 - DNA, 33 bp, Homo sapien
agtcacagaaaaaccaatcaaaaatagaaaatt

SEQ ID NO: 993368 - DNA, 33 bp, Homo sapien
agtcacagaaaaaccagtcaaaaatagaaaatt

SEQ ID NO: 993369 - DNA, 33 bp, Homo sapien
ggattcttctttgtacagacttgtgccagcctg

SEQ ID NO: 993370 - DNA, 33 bp, Homo sapien
ggattcttctttgtactgacttgtgccagcctg

SEQ ID NO: 993371 - DNA, 33 bp, Homo sapien
cagaattacctcgataacaaagccatgcaaaga

SEQ ID NO: 993372 - DNA, 33 bp, Homo sapien
cagaattacctcgataccaaagccatgcaaaga

SEQ ID NO: 993373 - DNA, 33 bp, Homo sapien
cccacatggctgaaacagagtgatgtctctgag

SEQ ID NO: 993374 - DNA, 33 bp, Homo sapien
cccacatggctgaaacggagtgatgtctctgag

SEQ ID NO: 993375 - DNA, 33 bp, Homo sapien
gtgtgtgtgagcctcaaatgatacttgatatgt

SEQ ID NO: 993376 - DNA, 33 bp, Homo sapien
gtgtgtgtgagcctcagatgatacttgatatgt

SEQ ID NO: 993377 - DNA, 33 bp, Homo sapien
atggtttgcatgaaagaccagattagcttctct

SEQ ID NO: 993378 - DNA, 33 bp, Homo sapien
atggtttgcatgaaagcccagattagcttctct

SEQ ID NO: 993379 - DNA, 33 bp, Homo sapien
gctactcagcacctaagtatcattccagttaat

SEQ ID NO: 993380 - DNA, 33 bp, Homo sapien
gctactcagcacctaattatcattccagttaat

SEQ ID NO: 993381 - DNA, 33 bp, Homo sapien
tactcaccagtctaaacgggttgtgctcagaaa

SEQ ID NO: 993382 - DNA, 33 bp, Homo sapien
tactcaccagtctaaatgggttgtgctcagaaa

SEQ ID NO: 993383 - DNA, 33 bp, Homo sapien
gttctatggttggaaacgatggttttatagtca

SEQ ID NO: 993384 - DNA, 33 bp, Homo sapien
gttctatggttggaaatgatggttttatagtca

SEQ ID NO: 993385 - DNA, 33 bp, Homo sapien
cttaatggatgagtaaagcagtaaagcatggtt

SEQ ID NO: 993386 - DNA, 33 bp, Homo sapien
cttaatggatgagtaaggcagtaaagcatggtt

SEQ ID NO: 993387 - DNA, 33 bp, Homo sapien
tagaggggtgatcaaacgaaggattgaggagat

SEQ ID NO: 993388 - DNA, 33 bp, Homo sapien
tagaggggtgatcaaatgaaggattgaggagat

SEQ ID NO: 993389 - DNA, 33 bp, Homo sapien
attgtctcatttcttccacagcaccaaactttc

SEQ ID NO: 993390 - DNA, 33 bp, Homo sapien
attgtctcatttcttctacagcaccaaactttc

SEQ ID NO: 993391 - DNA, 33 bp, Homo sapien
tgcctttgcacatcacaaatgtgttctattcag

SEQ ID NO: 993392 - DNA, 33 bp, Homo sapien
tgcctttgcacatcacgaatgtgttctattcag

SEQ ID NO: 993393 - DNA, 33 bp, Homo sapien
tgttattttgcctagaccaaaatgggaaaatag

SEQ ID NO: 993394 - DNA, 33 bp, Homo sapien
tgttattttgcctagatcaaaatgggaaaatag

SEQ ID NO: 993395 - DNA, 33 bp, Homo sapien
atgcctcagaattggcaaaatgggtgcacaaaa

SEQ ID NO: 993396 - DNA, 33 bp, Homo sapien
atgcctcagaattggctaaatgggtgcacaaaa

SEQ ID NO: 993397 - DNA, 33 bp, Homo sapien
tctagttctgtggcataacttgaatcagcttca

SEQ ID NO: 993398 - DNA, 33 bp, Homo sapien
tctagttctgtggcatgacttgaatcagcttca

SEQ ID NO: 993399 - DNA, 33 bp, Homo sapien
tagactaattcaatagaagcatggtcaaatgct

SEQ ID NO: 993400 - DNA, 33 bp, Homo sapien
tagactaattcaataggagcatggtcaaatgct

SEQ ID NO: 993401 - DNA, 33 bp, Homo sapien
aaaatgttgatgcacaatgatctgaaacaacct

SEQ ID NO: 993402 - DNA, 33 bp, Homo sapien
aaaatgttgatgcacagtgatctgaaacaacct

SEQ ID NO: 993403 - DNA, 33 bp, Homo sapien
gagaacagattaatacaagtggtaaatgtaaac

SEQ ID NO: 993404 - DNA, 33 bp, Homo sapien
gagaacagattaataccagtggtaaatgtaaac

SEQ ID NO: 993405 - DNA, 33 bp, Homo sapien
aactttttctgacccactcaaaaaaatgtatca

SEQ ID NO: 993406 - DNA, 33 bp, Homo sapien
aactttttctgacccattcaaaaaaatgtatca

SEQ ID NO: 993407 - DNA, 33 bp, Homo sapien
tgccacctgatctgttaaaagttggcgaatgtg

SEQ ID NO: 993408 - DNA, 33 bp, Homo sapien
tgccacctgatctgttcaaagttggcgaatgtg

SEQ ID NO: 993409 - DNA, 33 bp, Homo sapien
tagaatgtgctgggaaattaaccacctgagata

SEQ ID NO: 993410 - DNA, 33 bp, Homo sapien
tagaatgtgctgggaatttaaccacctgagata

SEQ ID NO: 993411 - DNA, 33 bp, Homo sapien
tcaaatgaatagggaactaatcctttctcttca

SEQ ID NO: 993412 - DNA, 33 bp, Homo sapien
tcaaatgaatagggaattaatcctttctcttca

SEQ ID NO: 993413 - DNA, 33 bp, Homo sapien
agtactaaatctcaaccggtaggtatgcattct

SEQ ID NO: 993414 - DNA, 33 bp, Homo sapien
agtactaaatctcaactggtaggtatgcattct

SEQ ID NO: 993415 - DNA, 33 bp, Homo sapien
tgagctggaaattaaccattacaatgtctgaat

SEQ ID NO: 993416 - DNA, 33 bp, Homo sapien
tgagctggaaattaactattacaatgtctgaat

SEQ ID NO: 993417 - DNA, 33 bp, Homo sapien
agtttcatctgtcaacgaaggaggggaattcta

SEQ ID NO: 993418 - DNA, 33 bp, Homo sapien
agtttcatctgtcaactaaggaggggaattcta

SEQ ID NO: 993419 - DNA, 33 bp, Homo sapien
ttgggaatgggtaggcacaaaattatatggttt

SEQ ID NO: 993420 - DNA, 33 bp, Homo sapien
ttgggaatgggtaggcgcaaaattatatggttt

SEQ ID NO: 993421 - DNA, 33 bp, Homo sapien
gacaccacaaattccacgcactcactctcatga

SEQ ID NO: 993422 - DNA, 33 bp, Homo sapien
gacaccacaaattccatgcactcactctcatga

SEQ ID NO: 993423 - DNA, 33 bp, Homo sapien
tttgtcaagcatggggcacagatcccaattcag

SEQ ID NO: 993424 - DNA, 33 bp, Homo sapien
tttgtcaagcatgggggacagatcccaattcag

SEQ ID NO: 993425 - DNA, 33 bp, Homo sapien
tagtgcttatctctaacatagcatgggcacacc

SEQ ID NO: 993426 - DNA, 33 bp, Homo sapien
tagtgcttatctctaatatagcatgggcacacc

SEQ ID NO: 993427 - DNA, 33 bp, Homo sapien
ataatgagttctgaagaagagagacagggatga

SEQ ID NO: 993428 - DNA, 33 bp, Homo sapien
ataatgagttctgaaggagagagacagggatga

SEQ ID NO: 993429 - DNA, 33 bp, Homo sapien
acttttctaatgtttccaggtaaataaacttgc

SEQ ID NO: 993430 - DNA, 33 bp, Homo sapien
acttttctaatgtttctaggtaaataaacttgc

SEQ ID NO: 993431 - DNA, 33 bp, Homo sapien
gaaataaatctgtaacccataaaatctgaaatt

SEQ ID NO: 993432 - DNA, 33 bp, Homo sapien
gaaataaatctgtaactcataaaatctgaaatt

SEQ ID NO: 993433 - DNA, 33 bp, Homo sapien
atatgaaggcccaaaaccataaaagagcaagga

SEQ ID NO: 993434 - DNA, 33 bp, Homo sapien
atatgaaggcccaaaatcataaaagagcaagga

SEQ ID NO: 993435 - DNA, 33 bp, Homo sapien
cttttaagggtcaacaagataagaatttctctg

SEQ ID NO: 993436 - DNA, 33 bp, Homo sapien
cttttaagggtcaacatgataagaatttctctg

SEQ ID NO: 993437 - DNA, 33 bp, Homo sapien
catcagagccatcagaatcagggtacatattga

SEQ ID NO: 993438 - DNA, 33 bp, Homo sapien
catcagagccatcagagtcagggtacatattga

SEQ ID NO: 993439 - DNA, 33 bp, Homo sapien
tgtttggcatagtccaatgaaaaggaagaaaga

SEQ ID NO: 993440 - DNA, 33 bp, Homo sapien
tgtttggcatagtccagtgaaaaggaagaaaga

SEQ ID NO: 993441 - DNA, 33 bp, Homo sapien
aaaaacagcagggtctaaagtcattattgtgtg

SEQ ID NO: 993442 - DNA, 33 bp, Homo sapien
aaaaacagcagggtctgaagtcattattgtgtg

SEQ ID NO: 993443 - DNA, 33 bp, Homo sapien
aactaaggaggaaaaaatcaatgctacattgtt

SEQ ID NO: 993444 - DNA, 33 bp, Homo sapien
aactaaggaggaaaaattcaatgctacattgtt

SEQ ID NO: 993445 - DNA, 33 bp, Homo sapien
aacatggaaaatccaacagtcagagaccacttt

SEQ ID NO: 993446 - DNA, 33 bp, Homo sapien
aacatggaaaatccaatagtcagagaccacttt

SEQ ID NO: 993447 - DNA, 33 bp, Homo sapien
tgacctcaagaaggtacaggtggatagatttga

SEQ ID NO: 993448 - DNA, 33 bp, Homo sapien
tgacctcaagaaggtagaggtggatagatttga

SEQ ID NO: 993449 - DNA, 33 bp, Homo sapien
tattcttcctttggccagaaaagccataaagca

SEQ ID NO: 993450 - DNA, 33 bp, Homo sapien
tattcttcctttggccggaaaagccataaagca

SEQ ID NO: 993451 - DNA, 33 bp, Homo sapien
aacctttaccttggagaacatcccagctgtcag

SEQ ID NO: 993452 - DNA, 33 bp, Homo sapien
aacctttaccttggaggacatcccagctgtcag

SEQ ID NO: 993453 - DNA, 33 bp, Homo sapien
ctctattttcctttcactccaattggatagtgg

SEQ ID NO: 993454 - DNA, 33 bp, Homo sapien
ctctattttcctttcagtccaattggatagtgg

SEQ ID NO: 993455 - DNA, 33 bp, Homo sapien
tagtaaatatctgccaactctccatgccaatat

SEQ ID NO: 993456 - DNA, 33 bp, Homo sapien
tagtaaatatctgccatctctccatgccaatat

SEQ ID NO: 993457 - DNA, 33 bp, Homo sapien
aaagtgttgtaagatacctacattggctttagt

SEQ ID NO: 993458 - DNA, 33 bp, Homo sapien
aaagtgttgtaagatatctacattggctttagt

SEQ ID NO: 993459 - DNA, 33 bp, Homo sapien
tgctcattattacaaacgtttagtagtctttac

SEQ ID NO: 993460 - DNA, 33 bp, Homo sapien
tgctcattattacaaatgtttagtagtctttac

SEQ ID NO: 993461 - DNA, 33 bp, Homo sapien
ctagtggtcaatgtcccaaagaaaataaagtgt

SEQ ID NO: 993462 - DNA, 33 bp, Homo sapien
ctagtggtcaatgtcctaaagaaaataaagtgt

SEQ ID NO: 993463 - DNA, 33 bp, Homo sapien
accaaaggtaattggacacattgcagaattgtg

SEQ ID NO: 993464 - DNA, 33 bp, Homo sapien
accaaaggtaattggatacattgcagaattgtg

SEQ ID NO: 993465 - DNA, 33 bp, Homo sapien
acaagcatttatctgacactgtattaggtcctg

SEQ ID NO: 993466 - DNA, 33 bp, Homo sapien
acaagcatttatctgatactgtattaggtcctg

SEQ ID NO: 993467 - DNA, 33 bp, Homo sapien
aaggtgcaagaattcacgtgattcagaaactga

SEQ ID NO: 993468 - DNA, 33 bp, Homo sapien
aaggtgcaagaattcatgtgattcagaaactga

SEQ ID NO: 993469 - DNA, 33 bp, Homo sapien
ctcacaagcatggtgaaagatgaaaggtatgtc

SEQ ID NO: 993470 - DNA, 33 bp, Homo sapien
ctcacaagcatggtgagagatgaaaggtatgtc

SEQ ID NO: 993471 - DNA, 33 bp, Homo sapien
agtgctgctattaaccccgttttcatattagaa

SEQ ID NO: 993472 - DNA, 33 bp, Homo sapien
agtgctgctattaacctcgttttcatattagaa

SEQ ID NO: 993473 - DNA, 33 bp, Homo sapien
aacaagtttaagcttcacatttcagagcctttc

SEQ ID NO: 993474 - DNA, 33 bp, Homo sapien
aacaagtttaagcttcgcatttcagagcctttc

SEQ ID NO: 993475 - DNA, 33 bp, Homo sapien
atttgcacatgaatgaaaataatgtggccaggc

SEQ ID NO: 993476 - DNA, 33 bp, Homo sapien
atttgcacatgaatgagaataatgtggccaggc

SEQ ID NO: 993477 - DNA, 33 bp, Homo sapien
aaagaaatgacattgaactaatatgtgaagtat

SEQ ID NO: 993478 - DNA, 33 bp, Homo sapien
aaagaaatgacattgacctaatatgtgaagtat

SEQ ID NO: 993479 - DNA, 33 bp, Homo sapien
tcatgctatttttagcccctattcttactacct

SEQ ID NO: 993480 - DNA, 33 bp, Homo sapien
tcatgctatttttagctcctattcttactacct

SEQ ID NO: 993481 - DNA, 33 bp, Homo sapien
aataggataatggaagactatttaatgcaggta

SEQ ID NO: 993482 - DNA, 33 bp, Homo sapien
aataggataatggaaggctatttaatgcaggta

SEQ ID NO: 993483 - DNA, 33 bp, Homo sapien
atcacatgaattagtacacgcaaaggatttata

SEQ ID NO: 993484 - DNA, 33 bp, Homo sapien
atcacatgaattagtatacgcaaaggatttata

SEQ ID NO: 993485 - DNA, 33 bp, Homo sapien
gaacagactttgtagccagagaaaactggatcc

SEQ ID NO: 993486 - DNA, 33 bp, Homo sapien
gaacagactttgtagcgagagaaaactggatcc

SEQ ID NO: 993487 - DNA, 33 bp, Homo sapien
taggcattttctacatcagagtcatcagagtca

SEQ ID NO: 993488 - DNA, 33 bp, Homo sapien
taggcattttctacatgagagtcatcagagtca

SEQ ID NO: 993489 - DNA, 33 bp, Homo sapien
tcttcagcaacactctaaccaactgagctaaat

SEQ ID NO: 993490 - DNA, 33 bp, Homo sapien
tcttcagcaacactctcaccaactgagctaaat

SEQ ID NO: 993491 - DNA, 33 bp, Homo sapien
ctccaaaaatttgaaacgtcctcctaatgagga

SEQ ID NO: 993492 - DNA, 33 bp, Homo sapien
ctccaaaaatttgaaatgtcctcctaatgagga

SEQ ID NO: 993493 - DNA, 33 bp, Homo sapien
agagcccgcttgaggacaatgactttagaattt

SEQ ID NO: 993494 - DNA, 33 bp, Homo sapien
agagcccgcttgaggataatgactttagaattt

SEQ ID NO: 993495 - DNA, 33 bp, Homo sapien
gtgtcactgtgttttcgcatcaactcagcaaac

SEQ ID NO: 993496 - DNA, 33 bp, Homo sapien
gtgtcactgtgttttctcatcaactcagcaaac

SEQ ID NO: 993497 - DNA, 33 bp, Homo sapien
caaatggaccaactcagaccaccccataattta

SEQ ID NO: 993498 - DNA, 33 bp, Homo sapien
caaatggaccaactcataccaccccataattta

SEQ ID NO: 993499 - DNA, 33 bp, Homo sapien
aacaacaggacataacaatgggtggatcaacag

SEQ ID NO: 993500 - DNA, 33 bp, Homo sapien
aacaacaggacataacgatgggtggatcaacag

SEQ ID NO: 993501 - DNA, 33 bp, Homo sapien
cctgggtcatcagagagatgtgtccagttacaa

SEQ ID NO: 993502 - DNA, 33 bp, Homo sapien
cctgggtcatcagagatatgtgtccagttacaa

SEQ ID NO: 993503 - DNA, 33 bp, Homo sapien
tctcatgcttgctccaactggttatgctgcttc

SEQ ID NO: 993504 - DNA, 33 bp, Homo sapien
tctcatgcttgctccagctggttatgctgcttc

SEQ ID NO: 993505 - DNA, 33 bp, Homo sapien
tattccatgcatacacactactttagacttcaa

SEQ ID NO: 993506 - DNA, 33 bp, Homo sapien
tattccatgcatacacgctactttagacttcaa

SEQ ID NO: 993507 - DNA, 33 bp, Homo sapien
atcagggatgtatgagcaatgttgtgcattggg

SEQ ID NO: 993508 - DNA, 33 bp, Homo sapien
atcagggatgtatgagtaatgttgtgcattggg

SEQ ID NO: 993509 - DNA, 33 bp, Homo sapien
tcattaatggacatgacatacagttagaagaaa

SEQ ID NO: 993510 - DNA, 33 bp, Homo sapien
tcattaatggacatgatatacagttagaagaaa

SEQ ID NO: 993511 - DNA, 33 bp, Homo sapien
ttaggctccacctttacggggcaggtttaatgc

SEQ ID NO: 993512 - DNA, 33 bp, Homo sapien
ttaggctccacctttatggggcaggtttaatgc

SEQ ID NO: 993513 - DNA, 33 bp, Homo sapien
tgacagaaaaatggaaaagcaaagagagaaaac

SEQ ID NO: 993514 - DNA, 33 bp, Homo sapien
tgacagaaaaatggaagagcaaagagagaaaac

SEQ ID NO: 993515 - DNA, 33 bp, Homo sapien
taaaatgattaataaaatagggcttgtccataa

SEQ ID NO: 993516 - DNA, 33 bp, Homo sapien
taaaatgattaataaagtagggcttgtccataa

SEQ ID NO: 993517 - DNA, 33 bp, Homo sapien
ttttgccacaacgtcaccctaagaaactcatga

SEQ ID NO: 993518 - DNA, 33 bp, Homo sapien
ttttgccacaacgtcatcctaagaaactcatga

SEQ ID NO: 993519 - DNA, 33 bp, Homo sapien
gacctaatcaggaatcagaggtggttttctctg

SEQ ID NO: 993520 - DNA, 33 bp, Homo sapien
gacctaatcaggaatccgaggtggttttctctg

SEQ ID NO: 993521 - DNA, 33 bp, Homo sapien
atttttagttgggaagcatagattcaaagataa

SEQ ID NO: 993522 - DNA, 33 bp, Homo sapien
atttttagttgggaagtatagattcaaagataa

SEQ ID NO: 993523 - DNA, 33 bp, Homo sapien
gcttgtctatatttgcacattcaaggagagcac

SEQ ID NO: 993524 - DNA, 33 bp, Homo sapien
gcttgtctatatttgcgcattcaaggagagcac

SEQ ID NO: 993525 - DNA, 33 bp, Homo sapien
aattagggagcaacataataaaggttctgggtc

SEQ ID NO: 993526 - DNA, 33 bp, Homo sapien
aattagggagcaacatcataaaggttctgggtc

SEQ ID NO: 993527 - DNA, 33 bp, Homo sapien
tctttttttacactgcaagcatttcttagccta

SEQ ID NO: 993528 - DNA, 33 bp, Homo sapien
tctttttttacactgcgagcatttcttagccta

SEQ ID NO: 993529 - DNA, 33 bp, Homo sapien
taatgtttgaatcaaccggctgagttaaatcct

SEQ ID NO: 993530 - DNA, 33 bp, Homo sapien
taatgtttgaatcaactggctgagttaaatcct

SEQ ID NO: 993531 - DNA, 33 bp, Homo sapien
gtcaggaagccattgtcaatgtcaagcacaaac

SEQ ID NO: 993532 - DNA, 33 bp, Homo sapien
gtcaggaagccattgtgaatgtcaagcacaaac

SEQ ID NO: 993533 - DNA, 33 bp, Homo sapien
attgtatctccagcaccaaatcctttgcctaac

SEQ ID NO: 993534 - DNA, 33 bp, Homo sapien
attgtatctccagcactaaatcctttgcctaac

SEQ ID NO: 993535 - DNA, 33 bp, Homo sapien
tactgaaaaagagaataaacaacataacagtca

SEQ ID NO: 993536 - DNA, 33 bp, Homo sapien
tactgaaaaagagaatgaacaacataacagtca

SEQ ID NO: 993537 - DNA, 33 bp, Homo sapien
caattggaaaaaaagcagaatggatattaggaa

SEQ ID NO: 993538 - DNA, 33 bp, Homo sapien
caattggaaaaaaagctgaatggatattaggaa

SEQ ID NO: 993539 - DNA, 33 bp, Homo sapien
gggagaatgtcccacacaaaaattgtctccttc

SEQ ID NO: 993540 - DNA, 33 bp, Homo sapien
gggagaatgtcccacagaaaaattgtctccttc

SEQ ID NO: 993541 - DNA, 33 bp, Homo sapien
cagtgggacaataggaaaaacttcccaaaacag

SEQ ID NO: 993542 - DNA, 33 bp, Homo sapien
cagtgggacaataggacaaacttcccaaaacag

SEQ ID NO: 993543 - DNA, 33 bp, Homo sapien
gctttccctgtcttaagtccagcctcgcagctg

SEQ ID NO: 993544 - DNA, 33 bp, Homo sapien
gctttccctgtcttaattccagcctcgcagctg

SEQ ID NO: 993545 - DNA, 33 bp, Homo sapien
tcttattctcaaactagtaaggacacaagtatg

SEQ ID NO: 993546 - DNA, 33 bp, Homo sapien
tcttattctcaaactattaaggacacaagtatg

SEQ ID NO: 993547 - DNA, 33 bp, Homo sapien
agatccctagagaggtaaaataatgaaatatgg

SEQ ID NO: 993548 - DNA, 33 bp, Homo sapien
agatccctagagaggtcaaataatgaaatatgg

SEQ ID NO: 993549 - DNA, 33 bp, Homo sapien
tttactggattaaagcacttgccattctttctt

SEQ ID NO: 993550 - DNA, 33 bp, Homo sapien
tttactggattaaagcgcttgccattctttctt

SEQ ID NO: 993551 - DNA, 33 bp, Homo sapien
aaagtgcatccccaaaatgaactcctcactgag

SEQ ID NO: 993552 - DNA, 33 bp, Homo sapien
aaagtgcatccccaaagtgaactcctcactgag

SEQ ID NO: 993553 - DNA, 33 bp, Homo sapien
tcttcttcattaaaacacagcaattatgcaatc

SEQ ID NO: 993554 - DNA, 33 bp, Homo sapien
tcttcttcattaaaacgcagcaattatgcaatc

SEQ ID NO: 993555 - DNA, 33 bp, Homo sapien
ttgtaaattatctacaaggttgctaacaactag

SEQ ID NO: 993556 - DNA, 33 bp, Homo sapien
ttgtaaattatctacagggttgctaacaactag

SEQ ID NO: 993557 - DNA, 33 bp, Homo sapien
agtgtttggtaactccaaattttgacataagta

SEQ ID NO: 993558 - DNA, 33 bp, Homo sapien
agtgtttggtaactccgaattttgacataagta

SEQ ID NO: 993559 - DNA, 33 bp, Homo sapien
gaaccgtaagtattcacgttctcctgtgttcct

SEQ ID NO: 993560 - DNA, 33 bp, Homo sapien
gaaccgtaagtattcatgttctcctgtgttcct

SEQ ID NO: 993561 - DNA, 33 bp, Homo sapien
agttaggaggagagaaacaagtgccatggaccc

SEQ ID NO: 993562 - DNA, 33 bp, Homo sapien
agttaggaggagagaagcaagtgccatggaccc

SEQ ID NO: 993563 - DNA, 33 bp, Homo sapien
gtgaggtagctattgtaaaggaaaatgaggctc

SEQ ID NO: 993564 - DNA, 33 bp, Homo sapien
gtgaggtagctattgtcaaggaaaatgaggctc

SEQ ID NO: 993565 - DNA, 33 bp, Homo sapien
ttccctaagtccaataactccgtgccaggtcgt

SEQ ID NO: 993566 - DNA, 33 bp, Homo sapien
ttccctaagtccaatagctccgtgccaggtcgt

SEQ ID NO: 993567 - DNA, 33 bp, Homo sapien
acttcttgagacctccagcttaaacaacaccca

SEQ ID NO: 993568 - DNA, 33 bp, Homo sapien
acttcttgagacctccggcttaaacaacaccca

SEQ ID NO: 993569 - DNA, 33 bp, Homo sapien
acagctctagagatcaactacttttttacactc

SEQ ID NO: 993570 - DNA, 33 bp, Homo sapien
acagctctagagatcagctacttttttacactc

SEQ ID NO: 993571 - DNA, 33 bp, Homo sapien
ctgtgagttttattaacgaatactgtagtctga

SEQ ID NO: 993572 - DNA, 33 bp, Homo sapien
ctgtgagttttattaatgaatactgtagtctga

SEQ ID NO: 993573 - DNA, 33 bp, Homo sapien
aggtagaccatgaaaaagagttggacagaatta

SEQ ID NO: 993574 - DNA, 33 bp, Homo sapien
aggtagaccatgaaaatgagttggacagaatta

SEQ ID NO: 993575 - DNA, 33 bp, Homo sapien
aggataaaacccaataggaaggatagaagcata

SEQ ID NO: 993576 - DNA, 33 bp, Homo sapien
aggataaaacccaatatgaaggatagaagcata

SEQ ID NO: 993577 - DNA, 33 bp, Homo sapien
gcactatcccccttagaattgtcttcacagttg

SEQ ID NO: 993578 - DNA, 33 bp, Homo sapien
gcactatcccccttagtattgtcttcacagttg

SEQ ID NO: 993579 - DNA, 33 bp, Homo sapien
ttttttttggagcttacgttccagtgagagaga

SEQ ID NO: 993580 - DNA, 33 bp, Homo sapien
ttttttttggagcttatgttccagtgagagaga

SEQ ID NO: 993581 - DNA, 33 bp, Homo sapien
tttttcactcagcctcaaaagtctcacagcctc

SEQ ID NO: 993582 - DNA, 33 bp, Homo sapien
tttttcactcagcctcgaaagtctcacagcctc

SEQ ID NO: 993583 - DNA, 33 bp, Homo sapien
tgataaccatatgccaagtttaagaagcttaaa

SEQ ID NO: 993584 - DNA, 33 bp, Homo sapien
tgataaccatatgccaggtttaagaagcttaaa

SEQ ID NO: 993585 - DNA, 33 bp, Homo sapien
gatttactgcaaggcaaaagaaaggcctggtct

SEQ ID NO: 993586 - DNA, 33 bp, Homo sapien
gatttactgcaaggcacaagaaaggcctggtct

SEQ ID NO: 993587 - DNA, 33 bp, Homo sapien
tcatacccttctagtacccttgagcagaaaaga

SEQ ID NO: 993588 - DNA, 33 bp, Homo sapien
tcatacccttctagtatccttgagcagaaaaga

SEQ ID NO: 993589 - DNA, 33 bp, Homo sapien
ctttgaaaaccatgagaagccgagaaagcattt

SEQ ID NO: 993590 - DNA, 33 bp, Homo sapien
ctttgaaaaccatgaggagccgagaaagcattt

SEQ ID NO: 993591 - DNA, 33 bp, Homo sapien
ggcttagttcactcacaaggcctaactggtttt

SEQ ID NO: 993592 - DNA, 33 bp, Homo sapien
ggcttagttcactcacgaggcctaactggtttt

SEQ ID NO: 993593 - DNA, 33 bp, Homo sapien
tccaaagaataacttacctgactccagttacaa

SEQ ID NO: 993594 - DNA, 33 bp, Homo sapien
tccaaagaataacttatctgactccagttacaa

SEQ ID NO: 993595 - DNA, 33 bp, Homo sapien
gaaaagcaccctaactaaggttgtggaagaata

SEQ ID NO: 993596 - DNA, 33 bp, Homo sapien
gaaaagcaccctaactgaggttgtggaagaata

SEQ ID NO: 993597 - DNA, 33 bp, Homo sapien
ttatcccttttgcatacgtatttcttgctctct

SEQ ID NO: 993598 - DNA, 33 bp, Homo sapien
ttatcccttttgcatatgtatttcttgctctct

SEQ ID NO: 993599 - DNA, 33 bp, Homo sapien
ttgagcttttagagccaagttttcaaaatttct

SEQ ID NO: 993600 - DNA, 33 bp, Homo sapien
ttgagcttttagagccgagttttcaaaatttct

SEQ ID NO: 993601 - DNA, 33 bp, Homo sapien
gtcagtttgaagcaagacaaaataccagtttta

SEQ ID NO: 993602 - DNA, 33 bp, Homo sapien
gtcagtttgaagcaagtcaaaataccagtttta

SEQ ID NO: 993603 - DNA, 33 bp, Homo sapien
ccacgtttttctaaaacatgaccagacctttga

SEQ ID NO: 993604 - DNA, 33 bp, Homo sapien
ccacgtttttctaaaatatgaccagacctttga

SEQ ID NO: 993605 - DNA, 33 bp, Homo sapien
attggttgaaatacaccctataaatggaaactg

SEQ ID NO: 993606 - DNA, 33 bp, Homo sapien
attggttgaaatacactctataaatggaaactg

SEQ ID NO: 993607 - DNA, 33 bp, Homo sapien
ctcccgtgaagaacaactaagactgaactacag

SEQ ID NO: 993608 - DNA, 33 bp, Homo sapien
ctcccgtgaagaacaagtaagactgaactacag

SEQ ID NO: 993609 - DNA, 33 bp, Homo sapien
gtatttttgttttggaagatagctttatcccaa

SEQ ID NO: 993610 - DNA, 33 bp, Homo sapien
gtatttttgttttggaggatagctttatcccaa

SEQ ID NO: 993611 - DNA, 33 bp, Homo sapien
tacctcacagtacttacctccactattatattt

SEQ ID NO: 993612 - DNA, 33 bp, Homo sapien
tacctcacagtacttatctccactattatattt

SEQ ID NO: 993613 - DNA, 33 bp, Homo sapien
ttacttaggagttactaaatttgcatttctttc

SEQ ID NO: 993614 - DNA, 33 bp, Homo sapien
ttacttaggagttacttaatttgcatttctttc

SEQ ID NO: 993615 - DNA, 33 bp, Homo sapien
tactacttaaagttgcaaatgtgagaaacagaa

SEQ ID NO: 993616 - DNA, 33 bp, Homo sapien
tactacttaaagttgccaatgtgagaaacagaa

SEQ ID NO: 993617 - DNA, 33 bp, Homo sapien
atctgtaggcagtgtcaacttaaatacaagttc

SEQ ID NO: 993618 - DNA, 33 bp, Homo sapien
atctgtaggcagtgtcgacttaaatacaagttc

SEQ ID NO: 993619 - DNA, 33 bp, Homo sapien
atcaattctgtgaaaacaagattagctgattta

SEQ ID NO: 993620 - DNA, 33 bp, Homo sapien
atcaattctgtgaaaataagattagctgattta

SEQ ID NO: 993621 - DNA, 33 bp, Homo sapien
tgtttgttttcttctcaataatcaggtgacctc

SEQ ID NO: 993622 - DNA, 33 bp, Homo sapien
tgtttgttttcttctcgataatcaggtgacctc

SEQ ID NO: 993623 - DNA, 33 bp, Homo sapien
attttaagcaaaattacctttgtcctctgtctt

SEQ ID NO: 993624 - DNA, 33 bp, Homo sapien
attttaagcaaaattatctttgtcctctgtctt

SEQ ID NO: 993625 - DNA, 33 bp, Homo sapien
tttattcatagttgccaaatgtccattagcacg

SEQ ID NO: 993626 - DNA, 33 bp, Homo sapien
tttattcatagttgcccaatgtccattagcacg

SEQ ID NO: 993627 - DNA, 33 bp, Homo sapien
cgcatgaagacctcagcatatgatttgtaaagc

SEQ ID NO: 993628 - DNA, 33 bp, Homo sapien
cgcatgaagacctcaggatatgatttgtaaagc

SEQ ID NO: 993629 - DNA, 33 bp, Homo sapien
agttaagcactgtcagaatcacctcttaaaaca

SEQ ID NO: 993630 - DNA, 33 bp, Homo sapien
agttaagcactgtcaggatcacctcttaaaaca

SEQ ID NO: 993631 - DNA, 33 bp, Homo sapien
aggcttgagcaaacaccagtatagctcctaaca

SEQ ID NO: 993632 - DNA, 33 bp, Homo sapien
aggcttgagcaaacactagtatagctcctaaca

SEQ ID NO: 993633 - DNA, 33 bp, Homo sapien
tggagggaaaaaatgaaactgagctgagccatt

SEQ ID NO: 993634 - DNA, 33 bp, Homo sapien
tggagggaaaaaatgacactgagctgagccatt

SEQ ID NO: 993635 - DNA, 33 bp, Homo sapien
actgtgggtgacttaacacagtgatagccacgg

SEQ ID NO: 993636 - DNA, 33 bp, Homo sapien
actgtgggtgacttaatacagtgatagccacgg

SEQ ID NO: 993637 - DNA, 33 bp, Homo sapien
gagggagacaaacttccatcagtcattgctcct

SEQ ID NO: 993638 - DNA, 33 bp, Homo sapien
gagggagacaaacttctatcagtcattgctcct

SEQ ID NO: 993639 - DNA, 33 bp, Homo sapien
ccatataaggtggataacctgaaggtgtgtgga

SEQ ID NO: 993640 - DNA, 33 bp, Homo sapien
ccatataaggtggataccctgaaggtgtgtgga

SEQ ID NO: 993641 - DNA, 33 bp, Homo sapien
gcatcaaacccataccacttgagcttttgctct

SEQ ID NO: 993642 - DNA, 33 bp, Homo sapien
gcatcaaacccataccgcttgagcttttgctct

SEQ ID NO: 993643 - DNA, 33 bp, Homo sapien
gaatgaatacattaataagtgcatgaggtcaac

SEQ ID NO: 993644 - DNA, 33 bp, Homo sapien
gaatgaatacattaatgagtgcatgaggtcaac

SEQ ID NO: 993645 - DNA, 33 bp, Homo sapien
ggtggctctacagcatcataggcccactttcct

SEQ ID NO: 993646 - DNA, 33 bp, Homo sapien
ggtggctctacagcattataggcccactttcct

SEQ ID NO: 993647 - DNA, 33 bp, Homo sapien
ttcacttctggctgtgccacacgaaaaaatgtt

SEQ ID NO: 993648 - DNA, 33 bp, Homo sapien
ttcacttctggctgtgtcacacgaaaaaatgtt

SEQ ID NO: 993649 - DNA, 33 bp, Homo sapien
cctatagactcagaacaaaaggactatcaagct

SEQ ID NO: 993650 - DNA, 33 bp, Homo sapien
cctatagactcagaacgaaaggactatcaagct

SEQ ID NO: 993651 - DNA, 33 bp, Homo sapien
aggggaatttggaaaaagacagcctggaatcca

SEQ ID NO: 993652 - DNA, 33 bp, Homo sapien
aggggaatttggaaaaggacagcctggaatcca

SEQ ID NO: 993653 - DNA, 33 bp, Homo sapien
tcactctctccaagaaaagtaagcagaggggaa

SEQ ID NO: 993654 - DNA, 33 bp, Homo sapien
tcactctctccaagaagagtaagcagaggggaa

SEQ ID NO: 993655 - DNA, 33 bp, Homo sapien
gcctccctttggaacagaggtctcctcaagctg

SEQ ID NO: 993656 - DNA, 33 bp, Homo sapien
gcctccctttggaacataggtctcctcaagctg

SEQ ID NO: 993657 - DNA, 33 bp, Homo sapien
ccaaacgaggtccatacccactcctcttctctc

SEQ ID NO: 993658 - DNA, 33 bp, Homo sapien
ccaaacgaggtccatatccactcctcttctctc

SEQ ID NO: 993659 - DNA, 33 bp, Homo sapien
agcttctgacacctaaaggatgctcaaaagttg

SEQ ID NO: 993660 - DNA, 33 bp, Homo sapien
agcttctgacacctaatggatgctcaaaagttg

SEQ ID NO: 993661 - DNA, 33 bp, Homo sapien
gattttcagttgataaatgggatctttgacaca

SEQ ID NO: 993662 - DNA, 33 bp, Homo sapien
gattttcagttgataagtgggatctttgacaca

SEQ ID NO: 993663 - DNA, 33 bp, Homo sapien
atataaagtttaagaacgtcaaagtgtgtcaaa

SEQ ID NO: 993664 - DNA, 33 bp, Homo sapien
atataaagtttaagaatgtcaaagtgtgtcaaa

SEQ ID NO: 993665 - DNA, 33 bp, Homo sapien
aggactaagctctagactccaaggagagctcct

SEQ ID NO: 993666 - DNA, 33 bp, Homo sapien
aggactaagctctagattccaaggagagctcct

SEQ ID NO: 993667 - DNA, 33 bp, Homo sapien
ttgtggcctaaacaaaacaggctgattgtggtt

SEQ ID NO: 993668 - DNA, 33 bp, Homo sapien
ttgtggcctaaacaaagcaggctgattgtggtt

SEQ ID NO: 993669 - DNA, 33 bp, Homo sapien
acccatctgtaaaatgaaaatgtagccatgagc

SEQ ID NO: 993670 - DNA, 33 bp, Homo sapien
acccatctgtaaaatggaaatgtagccatgagc

SEQ ID NO: 993671 - DNA, 33 bp, Homo sapien
aagaaatgaccatggaatcaatcagtaaataca

SEQ ID NO: 993672 - DNA, 33 bp, Homo sapien
aagaaatgaccatggagtcaatcagtaaataca

SEQ ID NO: 993673 - DNA, 33 bp, Homo sapien
tatttgcccccttagaatataactccataaata

SEQ ID NO: 993674 - DNA, 33 bp, Homo sapien
tatttgcccccttagactataactccataaata

SEQ ID NO: 993675 - DNA, 33 bp, Homo sapien
gtcattctgcctgtgaccaaggcttggtattag

SEQ ID NO: 993676 - DNA, 33 bp, Homo sapien
gtcattctgcctgtgagcaaggcttggtattag

SEQ ID NO: 993677 - DNA, 33 bp, Homo sapien
gcacatcaggagaaaaactgtccctggtaatga

SEQ ID NO: 993678 - DNA, 33 bp, Homo sapien
gcacatcaggagaaaagctgtccctggtaatga

SEQ ID NO: 993679 - DNA, 33 bp, Homo sapien
tcttcagttcttcagggcagatataagctgcaa

SEQ ID NO: 993680 - DNA, 33 bp, Homo sapien
tcttcagttcttcaggtcagatataagctgcaa

SEQ ID NO: 993681 - DNA, 33 bp, Homo sapien
tgcttatatatgtgagcctagaggtaacaggag

SEQ ID NO: 993682 - DNA, 33 bp, Homo sapien
tgcttatatatgtgagtctagaggtaacaggag

SEQ ID NO: 993683 - DNA, 33 bp, Homo sapien
gtacttgctttcaggcacatcaactttagcatc

SEQ ID NO: 993684 - DNA, 33 bp, Homo sapien
gtacttgctttcaggctcatcaactttagcatc

SEQ ID NO: 993685 - DNA, 33 bp, Homo sapien
tgcaaacatgaatgaactgcttgacctcttcag

SEQ ID NO: 993686 - DNA, 33 bp, Homo sapien
tgcaaacatgaatgaattgcttgacctcttcag

SEQ ID NO: 993687 - DNA, 33 bp, Homo sapien
gttagtagtaatttggcaaaacgttcagctctt

SEQ ID NO: 993688 - DNA, 33 bp, Homo sapien
gttagtagtaatttggtaaaacgttcagctctt

SEQ ID NO: 993689 - DNA, 33 bp, Homo sapien
aattcatgtgaaggataaggcatacttgcattc

SEQ ID NO: 993690 - DNA, 33 bp, Homo sapien
aattcatgtgaaggatgaggcatacttgcattc

SEQ ID NO: 993691 - DNA, 33 bp, Homo sapien
gttgtctttcaatatcaattctcccaccttcct

SEQ ID NO: 993692 - DNA, 33 bp, Homo sapien
gttgtctttcaatatcgattctcccaccttcct

SEQ ID NO: 993693 - DNA, 33 bp, Homo sapien
taccttaggctatgagaacacagatcattatga

SEQ ID NO: 993694 - DNA, 33 bp, Homo sapien
taccttaggctatgaggacacagatcattatga

SEQ ID NO: 993695 - DNA, 33 bp, Homo sapien
ggtacataggtagataagtaggttagataagta

SEQ ID NO: 993696 - DNA, 33 bp, Homo sapien
ggtacataggtagataggtaggttagataagta

SEQ ID NO: 993697 - DNA, 33 bp, Homo sapien
tggcaaaagttgctatgacctaccagaggaaca

SEQ ID NO: 993698 - DNA, 33 bp, Homo sapien
tggcaaaagttgctattacctaccagaggaaca

SEQ ID NO: 993699 - DNA, 33 bp, Homo sapien
ttataattttatttcaggagtcaaatcatattt

SEQ ID NO: 993700 - DNA, 33 bp, Homo sapien
ttataattttatttcatgagtcaaatcatattt

SEQ ID NO: 993701 - DNA, 33 bp, Homo sapien
cataatcatgcctttcacaccatttcattaacc

SEQ ID NO: 993702 - DNA, 33 bp, Homo sapien
cataatcatgcctttctcaccatttcattaacc

SEQ ID NO: 993703 - DNA, 33 bp, Homo sapien
caaatgtatttgttgaagagattcacagggtaa

SEQ ID NO: 993704 - DNA, 33 bp, Homo sapien
caaatgtatttgttgatgagattcacagggtaa

SEQ ID NO: 993705 - DNA, 33 bp, Homo sapien
ttcactggttacatagccattacaagtgtttaa

SEQ ID NO: 993706 - DNA, 33 bp, Homo sapien
ttcactggttacatagtcattacaagtgtttaa

SEQ ID NO: 993707 - DNA, 33 bp, Homo sapien
gtacatttatttactccctgctccccgctagga

SEQ ID NO: 993708 - DNA, 33 bp, Homo sapien
gtacatttatttactctctgctccccgctagga

SEQ ID NO: 993709 - DNA, 33 bp, Homo sapien
aaatgccagtcacatagctatcaataatcaaaa

SEQ ID NO: 993710 - DNA, 33 bp, Homo sapien
aaatgccagtcacatatctatcaataatcaaaa

SEQ ID NO: 993711 - DNA, 33 bp, Homo sapien
attaatttcacaagacacttgggtgacttcttg

SEQ ID NO: 993712 - DNA, 33 bp, Homo sapien
attaatttcacaagactcttgggtgacttcttg

SEQ ID NO: 993713 - DNA, 33 bp, Homo sapien
aaacagactggacttcaaatcctggttctccca

SEQ ID NO: 993714 - DNA, 33 bp, Homo sapien
aaacagactggacttccaatcctggttctccca

SEQ ID NO: 993715 - DNA, 33 bp, Homo sapien
tgagtaaggaaatataactttttagctgttgcc

SEQ ID NO: 993716 - DNA, 33 bp, Homo sapien
tgagtaaggaaatatagctttttagctgttgcc

SEQ ID NO: 993717 - DNA, 33 bp, Homo sapien
ccagccattttttagcgcactcttttatcctca

SEQ ID NO: 993718 - DNA, 33 bp, Homo sapien
ccagccattttttagctcactcttttatcctca

SEQ ID NO: 993719 - DNA, 33 bp, Homo sapien
agaaaataaaagcatacagagattgaaagtaga

SEQ ID NO: 993720 - DNA, 33 bp, Homo sapien
agaaaataaaagcatatagagattgaaagtaga

SEQ ID NO: 993721 - DNA, 33 bp, Homo sapien
atgctctggggcatcaagtagagacaactcatt

SEQ ID NO: 993722 - DNA, 33 bp, Homo sapien
atgctctggggcatcacgtagagacaactcatt

SEQ ID NO: 993723 - DNA, 33 bp, Homo sapien
atggactttgcagccacattgttgtgttctaga

SEQ ID NO: 993724 - DNA, 33 bp, Homo sapien
atggactttgcagccagattgttgtgttctaga

SEQ ID NO: 993725 - DNA, 33 bp, Homo sapien
cttctgagttcacctgcagttcatagataattc

SEQ ID NO: 993726 - DNA, 33 bp, Homo sapien
cttctgagttcacctgtagttcatagataattc

SEQ ID NO: 993727 - DNA, 33 bp, Homo sapien
ataggaaagagcccaccgaatttatgtaatata

SEQ ID NO: 993728 - DNA, 33 bp, Homo sapien
ataggaaagagcccactgaatttatgtaatata

SEQ ID NO: 993729 - DNA, 33 bp, Homo sapien
cctaaagacaataccaagttcatgctaactttg

SEQ ID NO: 993730 - DNA, 33 bp, Homo sapien
cctaaagacaataccatgttcatgctaactttg

SEQ ID NO: 993731 - DNA, 33 bp, Homo sapien
tattttattgattaacaggaattcacagatttt

SEQ ID NO: 993732 - DNA, 33 bp, Homo sapien
tattttattgattaacgggaattcacagatttt

SEQ ID NO: 993733 - DNA, 33 bp, Homo sapien
tgttcctaatgtgagaacagaagtggattcttc

SEQ ID NO: 993734 - DNA, 33 bp, Homo sapien
tgttcctaatgtgagaccagaagtggattcttc

SEQ ID NO: 993735 - DNA, 33 bp, Homo sapien
aatgttatttgcttcaaaacaacttttatgaga

SEQ ID NO: 993736 - DNA, 33 bp, Homo sapien
aatgttatttgcttcagaacaacttttatgaga

SEQ ID NO: 993737 - DNA, 33 bp, Homo sapien
tttgtctctgtgctacaagtaggctttcttcac

SEQ ID NO: 993738 - DNA, 33 bp, Homo sapien
tttgtctctgtgctacgagtaggctttcttcac

SEQ ID NO: 993739 - DNA, 33 bp, Homo sapien
tcatcatttcctaatacgagagtctggcactat

SEQ ID NO: 993740 - DNA, 33 bp, Homo sapien
tcatcatttcctaatatgagagtctggcactat

SEQ ID NO: 993741 - DNA, 33 bp, Homo sapien
cgttgctattggttggcaggaaatattcttttt

SEQ ID NO: 993742 - DNA, 33 bp, Homo sapien
cgttgctattggttgggaggaaatattcttttt

SEQ ID NO: 993743 - DNA, 33 bp, Homo sapien
tacatggtgatttaagccctaaaaatacaaggg

SEQ ID NO: 993744 - DNA, 33 bp, Homo sapien
tacatggtgatttaagtcctaaaaatacaaggg

SEQ ID NO: 993745 - DNA, 33 bp, Homo sapien
tgctttgacaattcacaactcaccaggaaacac

SEQ ID NO: 993746 - DNA, 33 bp, Homo sapien
tgctttgacaattcacgactcaccaggaaacac

SEQ ID NO: 993747 - DNA, 33 bp, Homo sapien
agtgctcactgcctgccgaatgaatagatgtgt

SEQ ID NO: 993748 - DNA, 33 bp, Homo sapien
agtgctcactgcctgctgaatgaatagatgtgt

SEQ ID NO: 993749 - DNA, 33 bp, Homo sapien
tgggacaacatcactcggacagggaagctgagg

SEQ ID NO: 993750 - DNA, 33 bp, Homo sapien
tgggacaacatcactctgacagggaagctgagg

SEQ ID NO: 993751 - DNA, 33 bp, Homo sapien
tatttattctgtgacacacatgacatataaaca

SEQ ID NO: 993752 - DNA, 33 bp, Homo sapien
tatttattctgtgacatacatgacatataaaca

SEQ ID NO: 993753 - DNA, 33 bp, Homo sapien
atttcacagtctgtccaatctggtgctttgttg

SEQ ID NO: 993754 - DNA, 33 bp, Homo sapien
atttcacagtctgtccgatctggtgctttgttg

SEQ ID NO: 993755 - DNA, 33 bp, Homo sapien
cagtgaattctagaaactaaggtgaattctcca

SEQ ID NO: 993756 - DNA, 33 bp, Homo sapien
cagtgaattctagaaagtaaggtgaattctcca

SEQ ID NO: 993757 - DNA, 33 bp, Homo sapien
gagtataccactgggcaaaaacacgcaatgtgg

SEQ ID NO: 993758 - DNA, 33 bp, Homo sapien
gagtataccactgggcgaaaacacgcaatgtgg

SEQ ID NO: 993759 - DNA, 33 bp, Homo sapien
ctacagtccagcatacagaaggcattaagaaac

SEQ ID NO: 993760 - DNA, 33 bp, Homo sapien
ctacagtccagcatacggaaggcattaagaaac

SEQ ID NO: 993761 - DNA, 33 bp, Homo sapien
ggaaatgtgctgtgttcaaagatagccaggcag

SEQ ID NO: 993762 - DNA, 33 bp, Homo sapien
ggaaatgtgctgtgtttaaagatagccaggcag

SEQ ID NO: 993763 - DNA, 33 bp, Homo sapien
catgaggcacacactacagccatgcactccagt

SEQ ID NO: 993764 - DNA, 33 bp, Homo sapien
catgaggcacacactatagccatgcactccagt

SEQ ID NO: 993765 - DNA, 33 bp, Homo sapien
tgtgccattggaataaagaaaaaatgtacagga

SEQ ID NO: 993766 - DNA, 33 bp, Homo sapien
tgtgccattggaataaggaaaaaatgtacagga

SEQ ID NO: 993767 - DNA, 33 bp, Homo sapien
tgaaagatggacggaacaaaattaggaccttaa

SEQ ID NO: 993768 - DNA, 33 bp, Homo sapien
tgaaagatggacggaagaaaattaggaccttaa

SEQ ID NO: 993769 - DNA, 33 bp, Homo sapien
cctaaactagctctacaccatatggaaataacc

SEQ ID NO: 993770 - DNA, 33 bp, Homo sapien
cctaaactagctctacgccatatggaaataacc

SEQ ID NO: 993771 - DNA, 33 bp, Homo sapien
acttaccatgggccagactctattctaagcatg

SEQ ID NO: 993772 - DNA, 33 bp, Homo sapien
acttaccatgggccaggctctattctaagcatg

SEQ ID NO: 993773 - DNA, 33 bp, Homo sapien
tctcatttggtcttcacaaccacaatgtaagat

SEQ ID NO: 993774 - DNA, 33 bp, Homo sapien
tctcatttggtcttcataaccacaatgtaagat

SEQ ID NO: 993775 - DNA, 33 bp, Homo sapien
gggctcttttcagccactcattcattcatttat

SEQ ID NO: 993776 - DNA, 33 bp, Homo sapien
gggctcttttcagccagtcattcattcatttat

SEQ ID NO: 993777 - DNA, 33 bp, Homo sapien
ccattgtcatcatagcaaacattgtcttaactc

SEQ ID NO: 993778 - DNA, 33 bp, Homo sapien
ccattgtcatcatagcgaacattgtcttaactc

SEQ ID NO: 993779 - DNA, 33 bp, Homo sapien
acgtaataatgacagaataccattccacttgtg

SEQ ID NO: 993780 - DNA, 33 bp, Homo sapien
acgtaataatgacagagtaccattccacttgtg

SEQ ID NO: 993781 - DNA, 33 bp, Homo sapien
tgataaggaaaggtccaatcaatgtgtgagcag

SEQ ID NO: 993782 - DNA, 33 bp, Homo sapien
tgataaggaaaggtccgatcaatgtgtgagcag

SEQ ID NO: 993783 - DNA, 33 bp, Homo sapien
cacaggcagctgtagacaggacactctgctttc

SEQ ID NO: 993784 - DNA, 33 bp, Homo sapien
cacaggcagctgtagataggacactctgctttc

SEQ ID NO: 993785 - DNA, 33 bp, Homo sapien
cctatgggtccctaggccaaatctgaggggaag

SEQ ID NO: 993786 - DNA, 33 bp, Homo sapien
cctatgggtccctaggtcaaatctgaggggaag

SEQ ID NO: 993787 - DNA, 33 bp, Homo sapien
ttagctgacttgcccaagaattctaatcctgct

SEQ ID NO: 993788 - DNA, 33 bp, Homo sapien
ttagctgacttgcccaggaattctaatcctgct

SEQ ID NO: 993789 - DNA, 33 bp, Homo sapien
atcccatgattgttgacccttgcagttccagaa

SEQ ID NO: 993790 - DNA, 33 bp, Homo sapien
atcccatgattgttgatccttgcagttccagaa

SEQ ID NO: 993791 - DNA, 33 bp, Homo sapien
ggatgagggagagaaaacatatgatggagaaga

SEQ ID NO: 993792 - DNA, 33 bp, Homo sapien
ggatgagggagagaaagcatatgatggagaaga

SEQ ID NO: 993793 - DNA, 33 bp, Homo sapien
ataagaagaaatcctacgggaatgcacaaaagg

SEQ ID NO: 993794 - DNA, 33 bp, Homo sapien
ataagaagaaatcctatgggaatgcacaaaagg

SEQ ID NO: 993795 - DNA, 33 bp, Homo sapien
tgtgaaaataaatgctcacagactacacagtac

SEQ ID NO: 993796 - DNA, 33 bp, Homo sapien
tgtgaaaataaatgctgacagactacacagtac

SEQ ID NO: 993797 - DNA, 33 bp, Homo sapien
aacaaatctaaccaccaggatcatatttttgag

SEQ ID NO: 993798 - DNA, 33 bp, Homo sapien
aacaaatctaaccacccggatcatatttttgag

SEQ ID NO: 993799 - DNA, 33 bp, Homo sapien
aaatgcattatttccaaggcaaccaatgctaac

SEQ ID NO: 993800 - DNA, 33 bp, Homo sapien
aaatgcattatttccagggcaaccaatgctaac

SEQ ID NO: 993801 - DNA, 33 bp, Homo sapien
attgacaagtagccaaagtccaaattataataa

SEQ ID NO: 993802 - DNA, 33 bp, Homo sapien
attgacaagtagccaaggtccaaattataataa

SEQ ID NO: 993803 - DNA, 33 bp, Homo sapien
aaaaactgcactggtaccacctttcatggcttt

SEQ ID NO: 993804 - DNA, 33 bp, Homo sapien
aaaaactgcactggtagcacctttcatggcttt

SEQ ID NO: 993805 - DNA, 33 bp, Homo sapien
taatgacatgccacaaactcctatcaggagacg

SEQ ID NO: 993806 - DNA, 33 bp, Homo sapien
taatgacatgccacaatctcctatcaggagacg

SEQ ID NO: 993807 - DNA, 33 bp, Homo sapien
aggaaaagctagaaagacatctgtgaagaaacc

SEQ ID NO: 993808 - DNA, 33 bp, Homo sapien
aggaaaagctagaaaggcatctgtgaagaaacc

SEQ ID NO: 993809 - DNA, 33 bp, Homo sapien
ctttcttctgtgtgtaaagaaaaagcaatctct

SEQ ID NO: 993810 - DNA, 33 bp, Homo sapien
ctttcttctgtgtgtagagaaaaagcaatctct

SEQ ID NO: 993811 - DNA, 33 bp, Homo sapien
aacaaaaggcaaaggaagtagtgttgacaatga

SEQ ID NO: 993812 - DNA, 33 bp, Homo sapien
aacaaaaggcaaaggaggtagtgttgacaatga

SEQ ID NO: 993813 - DNA, 33 bp, Homo sapien
attacagaaactcaaactaaaatcacctaaaat

SEQ ID NO: 993814 - DNA, 33 bp, Homo sapien
attacagaaactcaaagtaaaatcacctaaaat

SEQ ID NO: 993815 - DNA, 33 bp, Homo sapien
gtaggtaccaaatgaacatttatcgaatgaatg

SEQ ID NO: 993816 - DNA, 33 bp, Homo sapien
gtaggtaccaaatgaatatttatcgaatgaatg

SEQ ID NO: 993817 - DNA, 33 bp, Homo sapien
gtgactctcgtttggaaagcagagaaggtgaca

SEQ ID NO: 993818 - DNA, 33 bp, Homo sapien
gtgactctcgtttggagagcagagaaggtgaca

SEQ ID NO: 993819 - DNA, 33 bp, Homo sapien
ccacctgagccaacaacgactatctttcatgaa

SEQ ID NO: 993820 - DNA, 33 bp, Homo sapien
ccacctgagccaacaatgactatctttcatgaa

SEQ ID NO: 993821 - DNA, 33 bp, Homo sapien
acgaaaactccagcaacaccctgaagatgggat

SEQ ID NO: 993822 - DNA, 33 bp, Homo sapien
acgaaaactccagcaataccctgaagatgggat

SEQ ID NO: 993823 - DNA, 33 bp, Homo sapien
gaataaatgtataaagcagaggaaaacgaagca

SEQ ID NO: 993824 - DNA, 33 bp, Homo sapien
gaataaatgtataaagtagaggaaaacgaagca

SEQ ID NO: 993825 - DNA, 33 bp, Homo sapien
tcttcaagattgtggaactccttgaggtaaaag

SEQ ID NO: 993826 - DNA, 33 bp, Homo sapien
tcttcaagattgtggatctccttgaggtaaaag

SEQ ID NO: 993827 - DNA, 33 bp, Homo sapien
cacccagttctccttacgtaacctgagagctta

SEQ ID NO: 993828 - DNA, 33 bp, Homo sapien
cacccagttctccttatgtaacctgagagctta

SEQ ID NO: 993829 - DNA, 33 bp, Homo sapien
ccatgcaggtctgggccaagagcatttaagtga

SEQ ID NO: 993830 - DNA, 33 bp, Homo sapien
ccatgcaggtctgggcgaagagcatttaagtga

SEQ ID NO: 993831 - DNA, 33 bp, Homo sapien
acccactgcttctacaaggtttgtttcctgatg

SEQ ID NO: 993832 - DNA, 33 bp, Homo sapien
acccactgcttctacagggtttgtttcctgatg

SEQ ID NO: 993833 - DNA, 33 bp, Homo sapien
acagatgcagactgtaataagagttttaaaatt

SEQ ID NO: 993834 - DNA, 33 bp, Homo sapien
acagatgcagactgtagtaagagttttaaaatt

SEQ ID NO: 993835 - DNA, 33 bp, Homo sapien
agtgccaagaaaaagacgggcttcttctatgaa

SEQ ID NO: 993836 - DNA, 33 bp, Homo sapien
agtgccaagaaaaagatgggcttcttctatgaa

SEQ ID NO: 993837 - DNA, 33 bp, Homo sapien
aattgaattatggggacgggtgtttttgtgctg

SEQ ID NO: 993838 - DNA, 33 bp, Homo sapien
aattgaattatggggatgggtgtttttgtgctg

SEQ ID NO: 993839 - DNA, 33 bp, Homo sapien
tcaaaagtacacagtccgaagtctcatctgagg

SEQ ID NO: 993840 - DNA, 33 bp, Homo sapien
tcaaaagtacacagtctgaagtctcatctgagg

SEQ ID NO: 993841 - DNA, 33 bp, Homo sapien
cagagcctgccctggacgtttctgtggttctgc

SEQ ID NO: 993842 - DNA, 33 bp, Homo sapien
cagagcctgccctggatgtttctgtggttctgc

SEQ ID NO: 993843 - DNA, 33 bp, Homo sapien
atgctacttaatagcaaggcagaaaagttgaag

SEQ ID NO: 993844 - DNA, 33 bp, Homo sapien
atgctacttaatagcatggcagaaaagttgaag

SEQ ID NO: 993845 - DNA, 33 bp, Homo sapien
gtgatacatgctaaaacaatcaaatatataaaa

SEQ ID NO: 993846 - DNA, 33 bp, Homo sapien
gtgatacatgctaaaataatcaaatatataaaa

SEQ ID NO: 993847 - DNA, 33 bp, Homo sapien
cttccataatcagatacgcaacttttctgaggg

SEQ ID NO: 993848 - DNA, 33 bp, Homo sapien
cttccataatcagatatgcaacttttctgaggg

SEQ ID NO: 993849 - DNA, 33 bp, Homo sapien
tgcttgcaactgtctcacatccccatcccacca

SEQ ID NO: 993850 - DNA, 33 bp, Homo sapien
tgcttgcaactgtctcgcatccccatcccacca

SEQ ID NO: 993851 - DNA, 33 bp, Homo sapien
aaagggagagtttggccgaattttgaaggatga

SEQ ID NO: 993852 - DNA, 33 bp, Homo sapien
aaagggagagtttggctgaattttgaaggatga

SEQ ID NO: 993853 - DNA, 33 bp, Homo sapien
agaagtttccattcgacagtactgatttagagg

SEQ ID NO: 993854 - DNA, 33 bp, Homo sapien
agaagtttccattcgatagtactgatttagagg

SEQ ID NO: 993855 - DNA, 33 bp, Homo sapien
agggagcttagatgaaatggtctgcagagatca

SEQ ID NO: 993856 - DNA, 33 bp, Homo sapien
agggagcttagatgaagtggtctgcagagatca

SEQ ID NO: 993857 - DNA, 33 bp, Homo sapien
ccaaaatctcctaactcacaaacaccctgaaaa

SEQ ID NO: 993858 - DNA, 33 bp, Homo sapien
ccaaaatctcctaacttacaaacaccctgaaaa

SEQ ID NO: 993859 - DNA, 33 bp, Homo sapien
cctcttctgtttataacgatatcagtcactgga

SEQ ID NO: 993860 - DNA, 33 bp, Homo sapien
cctcttctgtttataatgatatcagtcactgga

SEQ ID NO: 993861 - DNA, 33 bp, Homo sapien
gtttgctgggtgctccacataaaccatttcata

SEQ ID NO: 993862 - DNA, 33 bp, Homo sapien
gtttgctgggtgctccgcataaaccatttcata

SEQ ID NO: 993863 - DNA, 33 bp, Homo sapien
caactctatgggaaacactgcgttaggcactat

SEQ ID NO: 993864 - DNA, 33 bp, Homo sapien
caactctatgggaaacgctgcgttaggcactat

SEQ ID NO: 993865 - DNA, 33 bp, Homo sapien
ttgtctttgggtattacagtttctggttcctaa

SEQ ID NO: 993866 - DNA, 33 bp, Homo sapien
ttgtctttgggtattatagtttctggttcctaa

SEQ ID NO: 993867 - DNA, 33 bp, Homo sapien
cttatggaatttctcacggaggaaggcagacaa

SEQ ID NO: 993868 - DNA, 33 bp, Homo sapien
cttatggaatttctcatggaggaaggcagacaa

SEQ ID NO: 993869 - DNA, 33 bp, Homo sapien
aaacaaatggcttctacaatttcctttcttttt

SEQ ID NO: 993870 - DNA, 33 bp, Homo sapien
aaacaaatggcttctataatttcctttcttttt

SEQ ID NO: 993871 - DNA, 33 bp, Homo sapien
ctccatcacctcctcaatgagccttctcttaat

SEQ ID NO: 993872 - DNA, 33 bp, Homo sapien
ctccatcacctcctcagtgagccttctcttaat

SEQ ID NO: 993873 - DNA, 33 bp, Homo sapien
ctttctataccctgaacctgtagcctatgttgt

SEQ ID NO: 993874 - DNA, 33 bp, Homo sapien
ctttctataccctgaatctgtagcctatgttgt

SEQ ID NO: 993875 - DNA, 33 bp, Homo sapien
gtacttggtgactcatcactgacaaagcggact

SEQ ID NO: 993876 - DNA, 33 bp, Homo sapien
gtacttggtgactcattactgacaaagcggact

SEQ ID NO: 993877 - DNA, 33 bp, Homo sapien
caacccacgtttagacaaggaagctcagagaga

SEQ ID NO: 993878 - DNA, 33 bp, Homo sapien
caacccacgtttagacgaggaagctcagagaga

SEQ ID NO: 993879 - DNA, 33 bp, Homo sapien
agcactttgaccaaacaggagcttgaatagcga

SEQ ID NO: 993880 - DNA, 33 bp, Homo sapien
agcactttgaccaaacgggagcttgaatagcga

SEQ ID NO: 993881 - DNA, 33 bp, Homo sapien
tatatagtgagaacaacggccaacgatatcaga

SEQ ID NO: 993882 - DNA, 33 bp, Homo sapien
tatatagtgagaacaatggccaacgatatcaga

SEQ ID NO: 993883 - DNA, 33 bp, Homo sapien
gagtctaggcttactgaacctctgagatatatt

SEQ ID NO: 993884 - DNA, 33 bp, Homo sapien
gagtctaggcttactggacctctgagatatatt

SEQ ID NO: 993885 - DNA, 33 bp, Homo sapien
aataacaaaaggcaaacgtcatcttgatgccaa

SEQ ID NO: 993886 - DNA, 33 bp, Homo sapien
aataacaaaaggcaaatgtcatcttgatgccaa

SEQ ID NO: 993887 - DNA, 33 bp, Homo sapien
tattggtagataaaacacgaaaccacaaaaggc

SEQ ID NO: 993888 - DNA, 33 bp, Homo sapien
tattggtagataaaacgcgaaaccacaaaaggc

SEQ ID NO: 993889 - DNA, 33 bp, Homo sapien
aataaatctgtataagacccacttttgacaccc

SEQ ID NO: 993890 - DNA, 33 bp, Homo sapien
aataaatctgtataaggcccacttttgacaccc

SEQ ID NO: 993891 - DNA, 33 bp, Homo sapien
agagcataaaaaatcacgttgaacaaattaatg

SEQ ID NO: 993892 - DNA, 33 bp, Homo sapien
agagcataaaaaatcatgttgaacaaattaatg

SEQ ID NO: 993893 - DNA, 33 bp, Homo sapien
gagagaagagcagaaaaaaattagtattgggta

SEQ ID NO: 993894 - DNA, 33 bp, Homo sapien
gagagaagagcagaaagaaattagtattgggta

SEQ ID NO: 993895 - DNA, 33 bp, Homo sapien
ctttttaccttctctacacatcaatgaacagaa

SEQ ID NO: 993896 - DNA, 33 bp, Homo sapien
ctttttaccttctctatacatcaatgaacagaa

SEQ ID NO: 993897 - DNA, 33 bp, Homo sapien
atttcagccaacatagacctctaagagctggtt

SEQ ID NO: 993898 - DNA, 33 bp, Homo sapien
atttcagccaacatagtcctctaagagctggtt

SEQ ID NO: 993899 - DNA, 33 bp, Homo sapien
aatctgtaaggaaaacacaggcaacctaatgga

SEQ ID NO: 993900 - DNA, 33 bp, Homo sapien
aatctgtaaggaaaacgcaggcaacctaatgga

SEQ ID NO: 993901 - DNA, 33 bp, Homo sapien
tgtacagctgaattaccgtaaagagaacaactg

SEQ ID NO: 993902 - DNA, 33 bp, Homo sapien
tgtacagctgaattactgtaaagagaacaactg

SEQ ID NO: 993903 - DNA, 33 bp, Homo sapien
taaaaaatgatattaaagcaacccaacaaaaac

SEQ ID NO: 993904 - DNA, 33 bp, Homo sapien
taaaaaatgatattaaggcaacccaacaaaaac

SEQ ID NO: 993905 - DNA, 33 bp, Homo sapien
aggacatattctcaaccaaatgccagccagcct

SEQ ID NO: 993906 - DNA, 33 bp, Homo sapien
aggacatattctcaactaaatgccagccagcct

SEQ ID NO: 993907 - DNA, 33 bp, Homo sapien
tttgacaagaaagtgaatcaatttaggtcagag

SEQ ID NO: 993908 - DNA, 33 bp, Homo sapien
tttgacaagaaagtgactcaatttaggtcagag

SEQ ID NO: 993909 - DNA, 33 bp, Homo sapien
ttcttgtcaaagaggacagtggttcttcagctc

SEQ ID NO: 993910 - DNA, 33 bp, Homo sapien
ttcttgtcaaagaggagagtggttcttcagctc

SEQ ID NO: 993911 - DNA, 33 bp, Homo sapien
gttttattttggaacccagccatactctttgtt

SEQ ID NO: 993912 - DNA, 33 bp, Homo sapien
gttttattttggaaccgagccatactctttgtt

SEQ ID NO: 993913 - DNA, 33 bp, Homo sapien
tatctgctctgttcaacggggcaaagagtgggc

SEQ ID NO: 993914 - DNA, 33 bp, Homo sapien
tatctgctctgttcaatggggcaaagagtgggc

SEQ ID NO: 993915 - DNA, 33 bp, Homo sapien
ggcagaagccatattgaatctctagtctgacat

SEQ ID NO: 993916 - DNA, 33 bp, Homo sapien
ggcagaagccatattgcatctctagtctgacat

SEQ ID NO: 993917 - DNA, 33 bp, Homo sapien
ccacttagcagcaagacggtcatctgactcaga

SEQ ID NO: 993918 - DNA, 33 bp, Homo sapien
ccacttagcagcaagatggtcatctgactcaga

SEQ ID NO: 993919 - DNA, 33 bp, Homo sapien
taaatataaactcagaccataggctttctgaag

SEQ ID NO: 993920 - DNA, 33 bp, Homo sapien
taaatataaactcagatcataggctttctgaag

SEQ ID NO: 993921 - DNA, 33 bp, Homo sapien
cgacatggagaactacgctgcacaatggggcgg

SEQ ID NO: 993922 - DNA, 33 bp, Homo sapien
cgacatggagaactactctgcacaatggggcgg

SEQ ID NO: 993923 - DNA, 33 bp, Homo sapien
tggcagattgcagagaccgtgggatttggtggc

SEQ ID NO: 993924 - DNA, 33 bp, Homo sapien
tggcagattgcagagagcgtgggatttggtggc

SEQ ID NO: 993925 - DNA, 33 bp, Homo sapien
aaccttaagctactctaaagacaatgccttcgt

SEQ ID NO: 993926 - DNA, 33 bp, Homo sapien
aaccttaagctactctcaagacaatgccttcgt

SEQ ID NO: 993927 - DNA, 33 bp, Homo sapien
tgagcttgggagacccagactctgctctccttg

SEQ ID NO: 993928 - DNA, 33 bp, Homo sapien
tgagcttgggagacccggactctgctctccttg

SEQ ID NO: 993929 - DNA, 33 bp, Homo sapien
atgagtctatgtgtcaccaaaaattcccaggca

SEQ ID NO: 993930 - DNA, 33 bp, Homo sapien
atgagtctatgtgtcagcaaaaattcccaggca

SEQ ID NO: 993931 - DNA, 33 bp, Homo sapien
ggagatgcttcttgagcccgattgtgttagttt

SEQ ID NO: 993932 - DNA, 33 bp, Homo sapien
ggagatgcttcttgagtccgattgtgttagttt

SEQ ID NO: 993933 - DNA, 33 bp, Homo sapien
aaacactgtttccatcaagcaatagctccacct

SEQ ID NO: 993934 - DNA, 33 bp, Homo sapien
aaacactgtttccatcgagcaatagctccacct

SEQ ID NO: 993935 - DNA, 33 bp, Homo sapien
gtttaattcatagaaacagagagtggggcggtg

SEQ ID NO: 993936 - DNA, 33 bp, Homo sapien
gtttaattcatagaaatagagagtggggcggtg

SEQ ID NO: 993937 - DNA, 33 bp, Homo sapien
gtgtctcatctttgccagaaggttccagtggag

SEQ ID NO: 993938 - DNA, 33 bp, Homo sapien
gtgtctcatctttgccggaaggttccagtggag

SEQ ID NO: 993939 - DNA, 33 bp, Homo sapien
tggggcaggaaatatacacaaggtgagccaagg

SEQ ID NO: 993940 - DNA, 33 bp, Homo sapien
tggggcaggaaatatatacaaggtgagccaagg

SEQ ID NO: 993941 - DNA, 33 bp, Homo sapien
taacttaatacaaacacagatggttatgaatag

SEQ ID NO: 993942 - DNA, 33 bp, Homo sapien
taacttaatacaaacatagatggttatgaatag

SEQ ID NO: 993943 - DNA, 33 bp, Homo sapien
tgtgtaaagcgaatgaagacttgctttttagtg

SEQ ID NO: 993944 - DNA, 33 bp, Homo sapien
tgtgtaaagcgaatgaggacttgctttttagtg

SEQ ID NO: 993945 - DNA, 33 bp, Homo sapien
ttgctgaaagtgatacaaaggaaagtggaatca

SEQ ID NO: 993946 - DNA, 33 bp, Homo sapien
ttgctgaaagtgatacgaaggaaagtggaatca

SEQ ID NO: 993947 - DNA, 33 bp, Homo sapien
agatttccatcaagtacatttcatcatgtgtac

SEQ ID NO: 993948 - DNA, 33 bp, Homo sapien
agatttccatcaagtagatttcatcatgtgtac

SEQ ID NO: 993949 - DNA, 33 bp, Homo sapien
gatattgaaaacaagagagagcaactgtgtggt

SEQ ID NO: 993950 - DNA, 33 bp, Homo sapien
gatattgaaaacaagatagagcaactgtgtggt

SEQ ID NO: 993951 - DNA, 33 bp, Homo sapien
tgtggccactagaagtaaaatgagttacagaaa

SEQ ID NO: 993952 - DNA, 33 bp, Homo sapien
tgtggccactagaagtcaaatgagttacagaaa

SEQ ID NO: 993953 - DNA, 33 bp, Homo sapien
ctggaaccaatcaagaatcaagcactgaatttg

SEQ ID NO: 993954 - DNA, 33 bp, Homo sapien
ctggaaccaatcaagagtcaagcactgaatttg

SEQ ID NO: 993955 - DNA, 33 bp, Homo sapien
taactgcattcatatacactattctttgagact

SEQ ID NO: 993956 - DNA, 33 bp, Homo sapien
taactgcattcatatatactattctttgagact

SEQ ID NO: 993957 - DNA, 33 bp, Homo sapien
atgtggaattctttgacggtgaatgaggcattc

SEQ ID NO: 993958 - DNA, 33 bp, Homo sapien
atgtggaattctttgatggtgaatgaggcattc

SEQ ID NO: 993959 - DNA, 33 bp, Homo sapien
tagatgctttggaaagacctagatgtttctgga

SEQ ID NO: 993960 - DNA, 33 bp, Homo sapien
tagatgctttggaaaggcctagatgtttctgga

SEQ ID NO: 993961 - DNA, 33 bp, Homo sapien
cagctgggactgccagacagaaagcctacatga

SEQ ID NO: 993962 - DNA, 33 bp, Homo sapien
cagctgggactgccagccagaaagcctacatga

SEQ ID NO: 993963 - DNA, 33 bp, Homo sapien
acttcttatgtagaggccaagtgtccaatgatt

SEQ ID NO: 993964 - DNA, 33 bp, Homo sapien
acttcttatgtagagggcaagtgtccaatgatt

SEQ ID NO: 993965 - DNA, 33 bp, Homo sapien
aatcacaccaggagttaaacagcgggtcaggca

SEQ ID NO: 993966 - DNA, 33 bp, Homo sapien
aatcacaccaggagttgaacagcgggtcaggca

SEQ ID NO: 993967 - DNA, 33 bp, Homo sapien
ttaggtaataggtaacaaggatccaaattagag

SEQ ID NO: 993968 - DNA, 33 bp, Homo sapien
ttaggtaataggtaacgaggatccaaattagag

SEQ ID NO: 993969 - DNA, 33 bp, Homo sapien
tttactgtgtaatctaggagttgttgtggttgt

SEQ ID NO: 993970 - DNA, 33 bp, Homo sapien
tttactgtgtaatctatgagttgttgtggttgt

SEQ ID NO: 993971 - DNA, 33 bp, Homo sapien
ctggaggcaagacaaactctattgcttatggta

SEQ ID NO: 993972 - DNA, 33 bp, Homo sapien
ctggaggcaagacaaattctattgcttatggta

SEQ ID NO: 993973 - DNA, 33 bp, Homo sapien
acaacccagccaactaataagaatagctggagg

SEQ ID NO: 993974 - DNA, 33 bp, Homo sapien
acaacccagccaactagtaagaatagctggagg

SEQ ID NO: 993975 - DNA, 33 bp, Homo sapien
ctttctattttcatcactgaaatcgccatttgt

SEQ ID NO: 993976 - DNA, 33 bp, Homo sapien
ctttctattttcatcattgaaatcgccatttgt

SEQ ID NO: 993977 - DNA, 33 bp, Homo sapien
ttctgttccttcattcccgtgatagcaattgtc

SEQ ID NO: 993978 - DNA, 33 bp, Homo sapien
ttctgttccttcattctcgtgatagcaattgtc

SEQ ID NO: 993979 - DNA, 33 bp, Homo sapien
ttctgtgagagaaaaacgagagcataaaagcac

SEQ ID NO: 993980 - DNA, 33 bp, Homo sapien
ttctgtgagagaaaaatgagagcataaaagcac

SEQ ID NO: 993981 - DNA, 33 bp, Homo sapien
tctagtttaatgttaacaatgattttcaagata

SEQ ID NO: 993982 - DNA, 33 bp, Homo sapien
tctagtttaatgttaataatgattttcaagata

SEQ ID NO: 993983 - DNA, 33 bp, Homo sapien
ttagaaatttgagtcaataaatgtgtgttgaat

SEQ ID NO: 993984 - DNA, 33 bp, Homo sapien
ttagaaatttgagtcagtaaatgtgtgttgaat

SEQ ID NO: 993985 - DNA, 33 bp, Homo sapien
tatatatgcttttatacacttgtgtgaattatg

SEQ ID NO: 993986 - DNA, 33 bp, Homo sapien
tatatatgcttttatatacttgtgtgaattatg

SEQ ID NO: 993987 - DNA, 33 bp, Homo sapien
ggaagcatcacttaccacattgcatggcacctt

SEQ ID NO: 993988 - DNA, 33 bp, Homo sapien
ggaagcatcacttaccgcattgcatggcacctt

SEQ ID NO: 993989 - DNA, 33 bp, Homo sapien
tccagggtcattgagaaaatcagaagcaaaact

SEQ ID NO: 993990 - DNA, 33 bp, Homo sapien
tccagggtcattgagataatcagaagcaaaact

SEQ ID NO: 993991 - DNA, 33 bp, Homo sapien
acttaattcttgcttaaccagatatacttccct

SEQ ID NO: 993992 - DNA, 33 bp, Homo sapien
acttaattcttgcttagccagatatacttccct

SEQ ID NO: 993993 - DNA, 33 bp, Homo sapien
cttcattgctttaagagtctatcatccccattg

SEQ ID NO: 993994 - DNA, 33 bp, Homo sapien
cttcattgctttaagattctatcatccccattg

SEQ ID NO: 993995 - DNA, 33 bp, Homo sapien
atgactggcataacacacaagccttgaaacaaa

SEQ ID NO: 993996 - DNA, 33 bp, Homo sapien
atgactggcataacacgcaagccttgaaacaaa

SEQ ID NO: 993997 - DNA, 33 bp, Homo sapien
gtgttgcttgactacaatccctgatacagaggg

SEQ ID NO: 993998 - DNA, 33 bp, Homo sapien
gtgttgcttgactacagtccctgatacagaggg

SEQ ID NO: 993999 - DNA, 33 bp, Homo sapien
caacataagaactttacagacattgcaaatcat

SEQ ID NO: 994000 - DNA, 33 bp, Homo sapien
caacataagaactttatagacattgcaaatcat

SEQ ID NO: 994001 - DNA, 33 bp, Homo sapien
gagtggaagcacctagaatgattttgcatccta

SEQ ID NO: 994002 - DNA, 33 bp, Homo sapien
gagtggaagcacctagcatgattttgcatccta

SEQ ID NO: 994003 - DNA, 33 bp, Homo sapien
ctcagtgcttctaatcaaacttaattgcttccc

SEQ ID NO: 994004 - DNA, 33 bp, Homo sapien
ctcagtgcttctaatccaacttaattgcttccc

SEQ ID NO: 994005 - DNA, 33 bp, Homo sapien
aaaaggatgttttctaagcctgttactgctcaa

SEQ ID NO: 994006 - DNA, 33 bp, Homo sapien
aaaaggatgttttctatgcctgttactgctcaa

SEQ ID NO: 994007 - DNA, 33 bp, Homo sapien
aattcataattctgaaccactcttctaaactgc

SEQ ID NO: 994008 - DNA, 33 bp, Homo sapien
aattcataattctgaagcactcttctaaactgc

SEQ ID NO: 994009 - DNA, 33 bp, Homo sapien
acggggtagttcctgacgtcatggggcaaccca

SEQ ID NO: 994010 - DNA, 33 bp, Homo sapien
acggggtagttcctgatgtcatggggcaaccca

SEQ ID NO: 994011 - DNA, 33 bp, Homo sapien
ccccagcctgcagtggaaggacataggaatagg

SEQ ID NO: 994012 - DNA, 33 bp, Homo sapien
ccccagcctgcagtgggaggacataggaatagg

SEQ ID NO: 994013 - DNA, 33 bp, Homo sapien
cccttgagttctgttgcaggctaaatagagacc

SEQ ID NO: 994014 - DNA, 33 bp, Homo sapien
cccttgagttctgttgtaggctaaatagagacc

SEQ ID NO: 994015 - DNA, 33 bp, Homo sapien
agaaagaaacctgttaacagtcattgctctatc

SEQ ID NO: 994016 - DNA, 33 bp, Homo sapien
agaaagaaacctgttagcagtcattgctctatc

SEQ ID NO: 994017 - DNA, 33 bp, Homo sapien
ggcgccagacacaccacgttccggccaagtggc

SEQ ID NO: 994018 - DNA, 33 bp, Homo sapien
ggcgccagacacaccaggttccggccaagtggc

SEQ ID NO: 994019 - DNA, 33 bp, Homo sapien
tcatcatgtggaaatacagaagtttcagctttc

SEQ ID NO: 994020 - DNA, 33 bp, Homo sapien
tcatcatgtggaaatagagaagtttcagctttc

SEQ ID NO: 994021 - DNA, 33 bp, Homo sapien
ttttacatgtaatgtgccaattagtcctcaagg

SEQ ID NO: 994022 - DNA, 33 bp, Homo sapien
ttttacatgtaatgtgtcaattagtcctcaagg

SEQ ID NO: 994023 - DNA, 33 bp, Homo sapien
ccaacctaatagctcacactgagtactttctac

SEQ ID NO: 994024 - DNA, 33 bp, Homo sapien
ccaacctaatagctcatactgagtactttctac

SEQ ID NO: 994025 - DNA, 33 bp, Homo sapien
tgagccaggtggggacaaagaatgcaggtggct

SEQ ID NO: 994026 - DNA, 33 bp, Homo sapien
tgagccaggtggggacgaagaatgcaggtggct

SEQ ID NO: 994027 - DNA, 33 bp, Homo sapien
atgccacatgaaatcaatgacaagattgggtaa

SEQ ID NO: 994028 - DNA, 33 bp, Homo sapien
atgccacatgaaatcagtgacaagattgggtaa

SEQ ID NO: 994029 - DNA, 33 bp, Homo sapien
ggctactaaccactaacctactaacagtctata

SEQ ID NO: 994030 - DNA, 33 bp, Homo sapien
ggctactaaccactaatctactaacagtctata

SEQ ID NO: 994031 - DNA, 33 bp, Homo sapien
ctccttgacagacccaatcaaccaggttttggg

SEQ ID NO: 994032 - DNA, 33 bp, Homo sapien
ctccttgacagacccagtcaaccaggttttggg

SEQ ID NO: 994033 - DNA, 33 bp, Homo sapien
aatcagaatagaaaacaaagtgatagagtgtct

SEQ ID NO: 994034 - DNA, 33 bp, Homo sapien
aatcagaatagaaaacgaagtgatagagtgtct

SEQ ID NO: 994035 - DNA, 33 bp, Homo sapien
gctcacagtcaagatggagacaactccaggtag

SEQ ID NO: 994036 - DNA, 33 bp, Homo sapien
gctcacagtcaagatgtagacaactccaggtag

SEQ ID NO: 994037 - DNA, 33 bp, Homo sapien
agggatgagacatgaaaggagaaccaaagtatc

SEQ ID NO: 994038 - DNA, 33 bp, Homo sapien
agggatgagacatgaagggagaaccaaagtatc

SEQ ID NO: 994039 - DNA, 33 bp, Homo sapien
tcatctacggttaccacctaatatcaagtcact

SEQ ID NO: 994040 - DNA, 33 bp, Homo sapien
tcatctacggttaccatctaatatcaagtcact

SEQ ID NO: 994041 - DNA, 33 bp, Homo sapien
ctcaaaatgtcagtaaatcaatattggctagaa

SEQ ID NO: 994042 - DNA, 33 bp, Homo sapien
ctcaaaatgtcagtaagtcaatattggctagaa

SEQ ID NO: 994043 - DNA, 33 bp, Homo sapien
cttctgggctgtctaccctctttcattgatctg

SEQ ID NO: 994044 - DNA, 33 bp, Homo sapien
cttctgggctgtctactctctttcattgatctg

SEQ ID NO: 994045 - DNA, 33 bp, Homo sapien
gagactccacccttccaattgtatttgtatatc

SEQ ID NO: 994046 - DNA, 33 bp, Homo sapien
gagactccacccttcccattgtatttgtatatc

SEQ ID NO: 994047 - DNA, 33 bp, Homo sapien
aataaggcaaggaaataatcaatcagctatagt

SEQ ID NO: 994048 - DNA, 33 bp, Homo sapien
aataaggcaaggaaatcatcaatcagctatagt

SEQ ID NO: 994049 - DNA, 33 bp, Homo sapien
ggaagtctctaaagacaaaaaatgagaacatat

SEQ ID NO: 994050 - DNA, 33 bp, Homo sapien
ggaagtctctaaagaccaaaaatgagaacatat

SEQ ID NO: 994051 - DNA, 33 bp, Homo sapien
ggaagagtaggaggccacccaggtatagcaggt

SEQ ID NO: 994052 - DNA, 33 bp, Homo sapien
ggaagagtaggaggccgcccaggtatagcaggt

SEQ ID NO: 994053 - DNA, 33 bp, Homo sapien
ctacatatcctttaaacccatctatacaaactt

SEQ ID NO: 994054 - DNA, 33 bp, Homo sapien
ctacatatcctttaaatccatctatacaaactt

SEQ ID NO: 994055 - DNA, 33 bp, Homo sapien
cactcagagtatgaaaacaaagcctttgaaatg

SEQ ID NO: 994056 - DNA, 33 bp, Homo sapien
cactcagagtatgaaagcaaagcctttgaaatg

SEQ ID NO: 994057 - DNA, 33 bp, Homo sapien
tgggagttaaacagtggatattcatgaatataa

SEQ ID NO: 994058 - DNA, 33 bp, Homo sapien
tgggagttaaacagtgtatattcatgaatataa

SEQ ID NO: 994059 - DNA, 33 bp, Homo sapien
gcatggctacagggaacagattagtgatgacat

SEQ ID NO: 994060 - DNA, 33 bp, Homo sapien
gcatggctacagggaagagattagtgatgacat

SEQ ID NO: 994061 - DNA, 33 bp, Homo sapien
accaacaattttggaaatgcaaaccgaattatg

SEQ ID NO: 994062 - DNA, 33 bp, Homo sapien
accaacaattttggaagtgcaaaccgaattatg

SEQ ID NO: 994063 - DNA, 33 bp, Homo sapien
ctagagagactcacaacggaggataagtggtgc

SEQ ID NO: 994064 - DNA, 33 bp, Homo sapien
ctagagagactcacaatggaggataagtggtgc

SEQ ID NO: 994065 - DNA, 33 bp, Homo sapien
accaatgagatggtagaagactgatgcacacag

SEQ ID NO: 994066 - DNA, 33 bp, Homo sapien
accaatgagatggtagcagactgatgcacacag

SEQ ID NO: 994067 - DNA, 33 bp, Homo sapien
gggtggttttttgtgaatcaattaacagcactg

SEQ ID NO: 994068 - DNA, 33 bp, Homo sapien
gggtggttttttgtgactcaattaacagcactg

SEQ ID NO: 994069 - DNA, 33 bp, Homo sapien
aaggcctagtcagtaaactcacaagaaaagaaa

SEQ ID NO: 994070 - DNA, 33 bp, Homo sapien
aaggcctagtcagtaacctcacaagaaaagaaa

SEQ ID NO: 994071 - DNA, 33 bp, Homo sapien
gtagtgtgttaaaattaaatttgtcaagtccat

SEQ ID NO: 994072 - DNA, 33 bp, Homo sapien
gtagtgtgttaaaattgaatttgtcaagtccat

SEQ ID NO: 994073 - DNA, 33 bp, Homo sapien
agggcaagcactgatgaatttaatcaggggagt

SEQ ID NO: 994074 - DNA, 33 bp, Homo sapien
agggcaagcactgatggatttaatcaggggagt

SEQ ID NO: 994075 - DNA, 33 bp, Homo sapien
tgataatgatagaaaccgtaatagcaaactaga

SEQ ID NO: 994076 - DNA, 33 bp, Homo sapien
tgataatgatagaaactgtaatagcaaactaga

SEQ ID NO: 994077 - DNA, 33 bp, Homo sapien
atttcaggatgccactaaattgctgctagctct

SEQ ID NO: 994078 - DNA, 33 bp, Homo sapien
atttcaggatgccactgaattgctgctagctct

SEQ ID NO: 994079 - DNA, 33 bp, Homo sapien
atcaagctaaaccttaagaagtagagtgaaaga

SEQ ID NO: 994080 - DNA, 33 bp, Homo sapien
atcaagctaaaccttaggaagtagagtgaaaga

SEQ ID NO: 994081 - DNA, 33 bp, Homo sapien
actttgatatcttagaatcattattgccaagcc

SEQ ID NO: 994082 - DNA, 33 bp, Homo sapien
actttgatatcttagagtcattattgccaagcc

SEQ ID NO: 994083 - DNA, 33 bp, Homo sapien
tgctcatgttaaaagaagtaatgaatggtggat

SEQ ID NO: 994084 - DNA, 33 bp, Homo sapien
tgctcatgttaaaagaggtaatgaatggtggat

SEQ ID NO: 994085 - DNA, 33 bp, Homo sapien
tgagttttgctagcacaattaagtagttgtagc

SEQ ID NO: 994086 - DNA, 33 bp, Homo sapien
tgagttttgctagcaccattaagtagttgtagc

SEQ ID NO: 994087 - DNA, 33 bp, Homo sapien
tcactgtcagttctaaccaaatcaaaatacctg

SEQ ID NO: 994088 - DNA, 33 bp, Homo sapien
tcactgtcagttctaatcaaatcaaaatacctg

SEQ ID NO: 994089 - DNA, 33 bp, Homo sapien
agaaataatgtgatgacgttcttaaacttcagt

SEQ ID NO: 994090 - DNA, 33 bp, Homo sapien
agaaataatgtgatgaggttcttaaacttcagt

SEQ ID NO: 994091 - DNA, 33 bp, Homo sapien
tttactattgcaggtacgtcaggctctgtgttt

SEQ ID NO: 994092 - DNA, 33 bp, Homo sapien
tttactattgcaggtatgtcaggctctgtgttt

SEQ ID NO: 994093 - DNA, 33 bp, Homo sapien
ttccacatatttcttccaccagaaaagcacttt

SEQ ID NO: 994094 - DNA, 33 bp, Homo sapien
ttccacatatttcttctaccagaaaagcacttt

SEQ ID NO: 994095 - DNA, 33 bp, Homo sapien
ccattaacactagtgagtcacaacgtatatttt

SEQ ID NO: 994096 - DNA, 33 bp, Homo sapien
ccattaacactagtgattcacaacgtatatttt

SEQ ID NO: 994097 - DNA, 33 bp, Homo sapien
aatgtaccattcaaatcatagtcaatctcatag

SEQ ID NO: 994098 - DNA, 33 bp, Homo sapien
aatgtaccattcaaattatagtcaatctcatag

SEQ ID NO: 994099 - DNA, 33 bp, Homo sapien
ggaatgcaacatttgaaccctaaaatactaagg

SEQ ID NO: 994100 - DNA, 33 bp, Homo sapien
ggaatgcaacatttgagccctaaaatactaagg

SEQ ID NO: 994101 - DNA, 33 bp, Homo sapien
tatgagaggttatgcaatctaactcatttgatt

SEQ ID NO: 994102 - DNA, 33 bp, Homo sapien
tatgagaggttatgcagtctaactcatttgatt

SEQ ID NO: 994103 - DNA, 33 bp, Homo sapien
aagtaaaaggtagagaagagtttagctataatt

SEQ ID NO: 994104 - DNA, 33 bp, Homo sapien
aagtaaaaggtagagaggagtttagctataatt

SEQ ID NO: 994105 - DNA, 33 bp, Homo sapien
acctttccaaaaattcaagggaactgtcttcat

SEQ ID NO: 994106 - DNA, 33 bp, Homo sapien
acctttccaaaaattcgagggaactgtcttcat

SEQ ID NO: 994107 - DNA, 33 bp, Homo sapien
ctctaatgcaatagcaaccagagtcagagagtg

SEQ ID NO: 994108 - DNA, 33 bp, Homo sapien
ctctaatgcaatagcagccagagtcagagagtg

SEQ ID NO: 994109 - DNA, 33 bp, Homo sapien
agtcaaaaagtgataactcctgatgacaaaaat

SEQ ID NO: 994110 - DNA, 33 bp, Homo sapien
agtcaaaaagtgataattcctgatgacaaaaat

SEQ ID NO: 994111 - DNA, 33 bp, Homo sapien
tggaacattctgtccaataacacaagaacatac

SEQ ID NO: 994112 - DNA, 33 bp, Homo sapien
tggaacattctgtccagtaacacaagaacatac

SEQ ID NO: 994113 - DNA, 33 bp, Homo sapien
aagacaaggagtactaatagacacaaaaagtca

SEQ ID NO: 994114 - DNA, 33 bp, Homo sapien
aagacaaggagtactactagacacaaaaagtca

SEQ ID NO: 994115 - DNA, 33 bp, Homo sapien
aaaaacttatttacaaatgttcatagcaatatt

SEQ ID NO: 994116 - DNA, 33 bp, Homo sapien
aaaaacttatttacaagtgttcatagcaatatt

SEQ ID NO: 994117 - DNA, 33 bp, Homo sapien
aagtgacatggatggccatattttagaggactg

SEQ ID NO: 994118 - DNA, 33 bp, Homo sapien
aagtgacatggatggctatattttagaggactg

SEQ ID NO: 994119 - DNA, 33 bp, Homo sapien
gtccaggcagagtggacctgagctcaaaaaagt

SEQ ID NO: 994120 - DNA, 33 bp, Homo sapien
gtccaggcagagtggatctgagctcaaaaaagt

SEQ ID NO: 994121 - DNA, 33 bp, Homo sapien
agactcacaacgttcaatgaaatcctgtttatg

SEQ ID NO: 994122 - DNA, 33 bp, Homo sapien
agactcacaacgttcagtgaaatcctgtttatg

SEQ ID NO: 994123 - DNA, 33 bp, Homo sapien
gcccctgctcattacaccatagtgaagatttga

SEQ ID NO: 994124 - DNA, 33 bp, Homo sapien
gcccctgctcattacatcatagtgaagatttga

SEQ ID NO: 994125 - DNA, 33 bp, Homo sapien
ccacaagagggcagtcaagttaaatgcaaaagt

SEQ ID NO: 994126 - DNA, 33 bp, Homo sapien
ccacaagagggcagtcgagttaaatgcaaaagt

SEQ ID NO: 994127 - DNA, 33 bp, Homo sapien
aatcattccatttgtcccacttaaccttttgaa

SEQ ID NO: 994128 - DNA, 33 bp, Homo sapien
aatcattccatttgtctcacttaaccttttgaa

SEQ ID NO: 994129 - DNA, 33 bp, Homo sapien
gccctgtcaattacaggctgagcaagctttcct

SEQ ID NO: 994130 - DNA, 33 bp, Homo sapien
gccctgtcaattacagtctgagcaagctttcct

SEQ ID NO: 994131 - DNA, 33 bp, Homo sapien
cagagaagcagcttccagaaacttcagtctctt

SEQ ID NO: 994132 - DNA, 33 bp, Homo sapien
cagagaagcagcttccggaaacttcagtctctt

SEQ ID NO: 994133 - DNA, 33 bp, Homo sapien
gagctgatgaaggctacaaaagtggagatgacc

SEQ ID NO: 994134 - DNA, 33 bp, Homo sapien
gagctgatgaaggctataaaagtggagatgacc

SEQ ID NO: 994135 - DNA, 33 bp, Homo sapien
caaactcctctcaagaatcatcccagtagttgg

SEQ ID NO: 994136 - DNA, 33 bp, Homo sapien
caaactcctctcaagattcatcccagtagttgg

SEQ ID NO: 994137 - DNA, 33 bp, Homo sapien
aaaaattgaacacaaaagtctttgagtgccaca

SEQ ID NO: 994138 - DNA, 33 bp, Homo sapien
aaaaattgaacacaaaggtctttgagtgccaca

SEQ ID NO: 994139 - DNA, 33 bp, Homo sapien
ggcgtaatcactcccacgcagaaactgctccgc

SEQ ID NO: 994140 - DNA, 33 bp, Homo sapien
ggcgtaatcactcccaggcagaaactgctccgc

SEQ ID NO: 994141 - DNA, 33 bp, Homo sapien
tgaaagacaactcaagaagcctactgcaaatcg

SEQ ID NO: 994142 - DNA, 33 bp, Homo sapien
tgaaagacaactcaaggagcctactgcaaatcg

SEQ ID NO: 994143 - DNA, 33 bp, Homo sapien
aattaaagagcaaacacactcatcgtgacaatt

SEQ ID NO: 994144 - DNA, 33 bp, Homo sapien
aattaaagagcaaacatactcatcgtgacaatt

SEQ ID NO: 994145 - DNA, 33 bp, Homo sapien
aggtcagagcttctaagaagggagtcttattct

SEQ ID NO: 994146 - DNA, 33 bp, Homo sapien
aggtcagagcttctaataagggagtcttattct

SEQ ID NO: 994147 - DNA, 33 bp, Homo sapien
ctggagccaaggtttgaagccagatccatctga

SEQ ID NO: 994148 - DNA, 33 bp, Homo sapien
ctggagccaaggtttggagccagatccatctga

SEQ ID NO: 994149 - DNA, 33 bp, Homo sapien
aaaaccctccagtcaccctctaggcacccaagc

SEQ ID NO: 994150 - DNA, 33 bp, Homo sapien
aaaaccctccagtcactctctaggcacccaagc

SEQ ID NO: 994151 - DNA, 33 bp, Homo sapien
agagaaccttcaccacacatggctgacatcttg

SEQ ID NO: 994152 - DNA, 33 bp, Homo sapien
agagaaccttcaccacgcatggctgacatcttg

SEQ ID NO: 994153 - DNA, 33 bp, Homo sapien
atttggatgaacattacgaaataccacagactg

SEQ ID NO: 994154 - DNA, 33 bp, Homo sapien
atttggatgaacattatgaaataccacagactg

SEQ ID NO: 994155 - DNA, 33 bp, Homo sapien
tccagtctggatattcgaggcatctctgccctg

SEQ ID NO: 994156 - DNA, 33 bp, Homo sapien
tccagtctggatattctaggcatctctgccctg

SEQ ID NO: 994157 - DNA, 33 bp, Homo sapien
aaggtggctcaagcccacacctggtcctctctc

SEQ ID NO: 994158 - DNA, 33 bp, Homo sapien
aaggtggctcaagcccgcacctggtcctctctc

SEQ ID NO: 994159 - DNA, 33 bp, Homo sapien
ggagatgataacttccccatagggttgtaagaa

SEQ ID NO: 994160 - DNA, 33 bp, Homo sapien
ggagatgataacttcctcatagggttgtaagaa

SEQ ID NO: 994161 - DNA, 33 bp, Homo sapien
tctggctgaaagctccagcagaaatggtcgttc

SEQ ID NO: 994162 - DNA, 33 bp, Homo sapien
tctggctgaaagctccggcagaaatggtcgttc

SEQ ID NO: 994163 - DNA, 33 bp, Homo sapien
agagggcccagatgagcaaagcttgtgttggag

SEQ ID NO: 994164 - DNA, 33 bp, Homo sapien
agagggcccagatgagtaaagcttgtgttggag

SEQ ID NO: 994165 - DNA, 33 bp, Homo sapien
gctctcggtcattgacaaggtgtccaagtcaca

SEQ ID NO: 994166 - DNA, 33 bp, Homo sapien
gctctcggtcattgacgaggtgtccaagtcaca

SEQ ID NO: 994167 - DNA, 33 bp, Homo sapien
tggctgtgtagtcttaagcaagtcactcaccct

SEQ ID NO: 994168 - DNA, 33 bp, Homo sapien
tggctgtgtagtcttaggcaagtcactcaccct

SEQ ID NO: 994169 - DNA, 33 bp, Homo sapien
tagcatacagtagataaactgtcaactctgcaa

SEQ ID NO: 994170 - DNA, 33 bp, Homo sapien
tagcatacagtagatacactgtcaactctgcaa

SEQ ID NO: 994171 - DNA, 33 bp, Homo sapien
ctgtctctggactatcacagcttcaatttgcca

SEQ ID NO: 994172 - DNA, 33 bp, Homo sapien
ctgtctctggactatcgcagcttcaatttgcca

SEQ ID NO: 994173 - DNA, 33 bp, Homo sapien
acaaggctcaagcagacgccccttactccagct

SEQ ID NO: 994174 - DNA, 33 bp, Homo sapien
acaaggctcaagcagatgccccttactccagct

SEQ ID NO: 994175 - DNA, 33 bp, Homo sapien
agaaagagaagctagaaaagtttcccagaaaaa

SEQ ID NO: 994176 - DNA, 33 bp, Homo sapien
agaaagagaagctagagaagtttcccagaaaaa

SEQ ID NO: 994177 - DNA, 33 bp, Homo sapien
agatctcggcctgacaccaatgatttactaact

SEQ ID NO: 994178 - DNA, 33 bp, Homo sapien
agatctcggcctgacagcaatgatttactaact

SEQ ID NO: 994179 - DNA, 33 bp, Homo sapien
tatatatctatccctgaaaaatctcatgtttgc

SEQ ID NO: 994180 - DNA, 33 bp, Homo sapien
tatatatctatccctggaaaatctcatgtttgc

SEQ ID NO: 994181 - DNA, 33 bp, Homo sapien
gacactctaaaattaacagggctgatttgaaaa

SEQ ID NO: 994182 - DNA, 33 bp, Homo sapien
gacactctaaaattaatagggctgatttgaaaa

SEQ ID NO: 994183 - DNA, 33 bp, Homo sapien
agtgcctacacccaaagagaaggtgacagtcaa

SEQ ID NO: 994184 - DNA, 33 bp, Homo sapien
agtgcctacacccaaatagaaggtgacagtcaa

SEQ ID NO: 994185 - DNA, 33 bp, Homo sapien
tatatgtgcaatggaacgttctaggcattacaa

SEQ ID NO: 994186 - DNA, 33 bp, Homo sapien
tatatgtgcaatggaatgttctaggcattacaa

SEQ ID NO: 994187 - DNA, 33 bp, Homo sapien
gcatttgcatcgcacactgcctagttctcaagc

SEQ ID NO: 994188 - DNA, 33 bp, Homo sapien
gcatttgcatcgcacattgcctagttctcaagc

SEQ ID NO: 994189 - DNA, 33 bp, Homo sapien
cctgatgaggtagagacgtagaagtcttggagt

SEQ ID NO: 994190 - DNA, 33 bp, Homo sapien
cctgatgaggtagagatgtagaagtcttggagt

SEQ ID NO: 994191 - DNA, 33 bp, Homo sapien
agctccatgtctcagtgaatagccttcagaaaa

SEQ ID NO: 994192 - DNA, 33 bp, Homo sapien
agctccatgtctcagttaatagccttcagaaaa

SEQ ID NO: 994193 - DNA, 33 bp, Homo sapien
agaagggctaagaacaatgtatctgccttctgc

SEQ ID NO: 994194 - DNA, 33 bp, Homo sapien
agaagggctaagaacactgtatctgccttctgc

SEQ ID NO: 994195 - DNA, 33 bp, Homo sapien
ttatgttgaactaaacactcacctcgcagtgct

SEQ ID NO: 994196 - DNA, 33 bp, Homo sapien
ttatgttgaactaaactctcacctcgcagtgct

SEQ ID NO: 994197 - DNA, 33 bp, Homo sapien
ggatgtgtggagagaaatctgtaactaggggag

SEQ ID NO: 994198 - DNA, 33 bp, Homo sapien
ggatgtgtggagagaagtctgtaactaggggag

SEQ ID NO: 994199 - DNA, 33 bp, Homo sapien
cctgagagcatttgcaaataaagataggtgaca

SEQ ID NO: 994200 - DNA, 33 bp, Homo sapien
cctgagagcatttgcagataaagataggtgaca

SEQ ID NO: 994201 - DNA, 33 bp, Homo sapien
aaattactcttcacaccagcaaggccctctgct

SEQ ID NO: 994202 - DNA, 33 bp, Homo sapien
aaattactcttcacacgagcaaggccctctgct

SEQ ID NO: 994203 - DNA, 33 bp, Homo sapien
ctggagctggaagaacaaaaggaacagctggcc

SEQ ID NO: 994204 - DNA, 33 bp, Homo sapien
ctggagctggaagaacgaaaggaacagctggcc

SEQ ID NO: 994205 - DNA, 33 bp, Homo sapien
tagggccctttttaaacgactcatcctattcct

SEQ ID NO: 994206 - DNA, 33 bp, Homo sapien
tagggccctttttaaatgactcatcctattcct

SEQ ID NO: 994207 - DNA, 33 bp, Homo sapien
ccattatgaagaatcacctgacaatcctgggcc

SEQ ID NO: 994208 - DNA, 33 bp, Homo sapien
ccattatgaagaatcagctgacaatcctgggcc

SEQ ID NO: 994209 - DNA, 33 bp, Homo sapien
ctcaagccttaccacaactcctaactccattag

SEQ ID NO: 994210 - DNA, 33 bp, Homo sapien
ctcaagccttaccacatctcctaactccattag

SEQ ID NO: 994211 - DNA, 33 bp, Homo sapien
cagaggatagtttatacacagtattcccattct

SEQ ID NO: 994212 - DNA, 33 bp, Homo sapien
cagaggatagtttatatacagtattcccattct

SEQ ID NO: 994213 - DNA, 33 bp, Homo sapien
ctcctgggacactcgaaggctgtgtgagtttcc

SEQ ID NO: 994214 - DNA, 33 bp, Homo sapien
ctcctgggacactcgagggctgtgtgagtttcc

SEQ ID NO: 994215 - DNA, 33 bp, Homo sapien
agtggttgctatctaacgggataagaggtagac

SEQ ID NO: 994216 - DNA, 33 bp, Homo sapien
agtggttgctatctaatgggataagaggtagac

SEQ ID NO: 994217 - DNA, 33 bp, Homo sapien
aggatcacaaacacaacgcctgatcaagcaggg

SEQ ID NO: 994218 - DNA, 33 bp, Homo sapien
aggatcacaaacacaatgcctgatcaagcaggg

SEQ ID NO: 994219 - DNA, 33 bp, Homo sapien
caccagagaccatgtcaccatcccagcctgcat

SEQ ID NO: 994220 - DNA, 33 bp, Homo sapien
caccagagaccatgtcgccatcccagcctgcat

SEQ ID NO: 994221 - DNA, 33 bp, Homo sapien
aatagttaactaaagacgtccatatagctgtca

SEQ ID NO: 994222 - DNA, 33 bp, Homo sapien
aatagttaactaaagatgtccatatagctgtca

SEQ ID NO: 994223 - DNA, 33 bp, Homo sapien
ctcaccaatccaagaacattgtcctaatgcatg

SEQ ID NO: 994224 - DNA, 33 bp, Homo sapien
ctcaccaatccaagaatattgtcctaatgcatg

SEQ ID NO: 994225 - DNA, 33 bp, Homo sapien
accatcttgttaggaccgtcaagctgtcccact

SEQ ID NO: 994226 - DNA, 33 bp, Homo sapien
accatcttgttaggactgtcaagctgtcccact

SEQ ID NO: 994227 - DNA, 33 bp, Homo sapien
tttgcttctgggacacaggatgaagatgtctag

SEQ ID NO: 994228 - DNA, 33 bp, Homo sapien
tttgcttctgggacacgggatgaagatgtctag

SEQ ID NO: 994229 - DNA, 33 bp, Homo sapien
agtttgagccaaaacacacttattagctgagtt

SEQ ID NO: 994230 - DNA, 33 bp, Homo sapien
agtttgagccaaaacatacttattagctgagtt

SEQ ID NO: 994231 - DNA, 33 bp, Homo sapien
tttcttttgtaaattaaccagtctttatcagta

SEQ ID NO: 994232 - DNA, 33 bp, Homo sapien
tttcttttgtaaattatccagtctttatcagta

SEQ ID NO: 994233 - DNA, 33 bp, Homo sapien
aagtatatcaaaagccaaaaaccactttaattt

SEQ ID NO: 994234 - DNA, 33 bp, Homo sapien
aagtatatcaaaagccgaaaaccactttaattt

SEQ ID NO: 994235 - DNA, 33 bp, Homo sapien
acttcatctcagagtacgattcccgggaaactg

SEQ ID NO: 994236 - DNA, 33 bp, Homo sapien
acttcatctcagagtatgattcccgggaaactg

SEQ ID NO: 994237 - DNA, 33 bp, Homo sapien
aggtaaaagtgatcaactaacttttgttgaaga

SEQ ID NO: 994238 - DNA, 33 bp, Homo sapien
aggtaaaagtgatcaattaacttttgttgaaga

SEQ ID NO: 994239 - DNA, 33 bp, Homo sapien
gagtgatagtatgttaaaagtggctagtgctac

SEQ ID NO: 994240 - DNA, 33 bp, Homo sapien
gagtgatagtatgttacaagtggctagtgctac

SEQ ID NO: 994241 - DNA, 33 bp, Homo sapien
ccaggaataaggaggaatataagggatgccatc

SEQ ID NO: 994242 - DNA, 33 bp, Homo sapien
ccaggaataaggaggagtataagggatgccatc

SEQ ID NO: 994243 - DNA, 33 bp, Homo sapien
ttctcccagacatcaacctaaacacagagtatg

SEQ ID NO: 994244 - DNA, 33 bp, Homo sapien
ttctcccagacatcaatctaaacacagagtatg

SEQ ID NO: 994245 - DNA, 33 bp, Homo sapien
cccacagggcagccaaagtgtccaagggaatat

SEQ ID NO: 994246 - DNA, 33 bp, Homo sapien
cccacagggcagccaaggtgtccaagggaatat

SEQ ID NO: 994247 - DNA, 33 bp, Homo sapien
tgcagacagaagtccaactactccgcaggagct

SEQ ID NO: 994248 - DNA, 33 bp, Homo sapien
tgcagacagaagtccatctactccgcaggagct

SEQ ID NO: 994249 - DNA, 33 bp, Homo sapien
tcgaggaaacaagataaggctacagagaaactg

SEQ ID NO: 994250 - DNA, 33 bp, Homo sapien
tcgaggaaacaagatagggctacagagaaactg

SEQ ID NO: 994251 - DNA, 33 bp, Homo sapien
gataaactcctaagtaacagtggcttaacactg

SEQ ID NO: 994252 - DNA, 33 bp, Homo sapien
gataaactcctaagtatcagtggcttaacactg

SEQ ID NO: 994253 - DNA, 33 bp, Homo sapien
cactggctttggaacacggcgacagggatgagc

SEQ ID NO: 994254 - DNA, 33 bp, Homo sapien
cactggctttggaacatggcgacagggatgagc

SEQ ID NO: 994255 - DNA, 33 bp, Homo sapien
ctgtcccacagaacagaacaaatgaactcaaga

SEQ ID NO: 994256 - DNA, 33 bp, Homo sapien
ctgtcccacagaacaggacaaatgaactcaaga

SEQ ID NO: 994257 - DNA, 33 bp, Homo sapien
tggacttggagcagtgaagctcagacatgtagt

SEQ ID NO: 994258 - DNA, 33 bp, Homo sapien
tggacttggagcagtgcagctcagacatgtagt

SEQ ID NO: 994259 - DNA, 33 bp, Homo sapien
ttcctttactggtgaaaaaactgaaactttaga

SEQ ID NO: 994260 - DNA, 33 bp, Homo sapien
ttcctttactggtgaagaaactgaaactttaga

SEQ ID NO: 994261 - DNA, 33 bp, Homo sapien
actctgctaagagcataagcaacataatgttag

SEQ ID NO: 994262 - DNA, 33 bp, Homo sapien
actctgctaagagcatcagcaacataatgttag

SEQ ID NO: 994263 - DNA, 33 bp, Homo sapien
gtaaaaagagaaatcacctcatggcttaggatg

SEQ ID NO: 994264 - DNA, 33 bp, Homo sapien
gtaaaaagagaaatcagctcatggcttaggatg

SEQ ID NO: 994265 - DNA, 33 bp, Homo sapien
tgaggctaccaggccaaaaataccgaaatctaa

SEQ ID NO: 994266 - DNA, 33 bp, Homo sapien
tgaggctaccaggccagaaataccgaaatctaa

SEQ ID NO: 994267 - DNA, 33 bp, Homo sapien
aaattacataaataaaaggaagagcagcagtga

SEQ ID NO: 994268 - DNA, 33 bp, Homo sapien
aaattacataaataaagggaagagcagcagtga

SEQ ID NO: 994269 - DNA, 33 bp, Homo sapien
gccacattaaagaggaaggttgcagtatgggtc

SEQ ID NO: 994270 - DNA, 33 bp, Homo sapien
gccacattaaagaggagggttgcagtatgggtc

SEQ ID NO: 994271 - DNA, 33 bp, Homo sapien
tcatctcctctcctaaggaccctggaatgaggt

SEQ ID NO: 994272 - DNA, 33 bp, Homo sapien
tcatctcctctcctaatgaccctggaatgaggt

SEQ ID NO: 994273 - DNA, 33 bp, Homo sapien
gtttctgggtgtaagacagaaaccaagagtgat

SEQ ID NO: 994274 - DNA, 33 bp, Homo sapien
gtttctgggtgtaagatagaaaccaagagtgat

SEQ ID NO: 994275 - DNA, 33 bp, Homo sapien
gagaccatgagtttagccatgactccaggaaat

SEQ ID NO: 994276 - DNA, 33 bp, Homo sapien
gagaccatgagtttaggcatgactccaggaaat

SEQ ID NO: 994277 - DNA, 33 bp, Homo sapien
ccaggctgagaggtgacgacccaagatgggttc

SEQ ID NO: 994278 - DNA, 33 bp, Homo sapien
ccaggctgagaggtgatgacccaagatgggttc

SEQ ID NO: 994279 - DNA, 33 bp, Homo sapien
gggcaggtgactaacccctgatctcacactaac

SEQ ID NO: 994280 - DNA, 33 bp, Homo sapien
gggcaggtgactaacctctgatctcacactaac

SEQ ID NO: 994281 - DNA, 33 bp, Homo sapien
ctggagctggaaacctcacatctccggacttca

SEQ ID NO: 994282 - DNA, 33 bp, Homo sapien
ctggagctggaaaccttacatctccggacttca

SEQ ID NO: 994283 - DNA, 33 bp, Homo sapien
ggagatacattcatgcactacctgagaattctc

SEQ ID NO: 994284 - DNA, 33 bp, Homo sapien
ggagatacattcatgctctacctgagaattctc

SEQ ID NO: 994285 - DNA, 33 bp, Homo sapien
acagagatccttgtgaactctgtttaaggacac

SEQ ID NO: 994286 - DNA, 33 bp, Homo sapien
acagagatccttgtgagctctgtttaaggacac

SEQ ID NO: 994287 - DNA, 33 bp, Homo sapien
tcaagttgtcagtgcaagagtcagtaagatttc

SEQ ID NO: 994288 - DNA, 33 bp, Homo sapien
tcaagttgtcagtgcacgagtcagtaagatttc

SEQ ID NO: 994289 - DNA, 33 bp, Homo sapien
tgtgagacaagggagactctatcccaagttgct

SEQ ID NO: 994290 - DNA, 33 bp, Homo sapien
tgtgagacaagggagagtctatcccaagttgct

SEQ ID NO: 994291 - DNA, 33 bp, Homo sapien
tcctccatcacaggaaggccatagggctcaaaa

SEQ ID NO: 994292 - DNA, 33 bp, Homo sapien
tcctccatcacaggaatgccatagggctcaaaa

SEQ ID NO: 994293 - DNA, 33 bp, Homo sapien
ctacctgttggtatagacatgatctaggagaca

SEQ ID NO: 994294 - DNA, 33 bp, Homo sapien
ctacctgttggtatagtcatgatctaggagaca

SEQ ID NO: 994295 - DNA, 33 bp, Homo sapien
tctcttctgttccgcacatggtgttccacacct

SEQ ID NO: 994296 - DNA, 33 bp, Homo sapien
tctcttctgttccgcatatggtgttccacacct

SEQ ID NO: 994297 - DNA, 33 bp, Homo sapien
ttgccacaatctccgaacctcttaaagaaccat

SEQ ID NO: 994298 - DNA, 33 bp, Homo sapien
ttgccacaatctccgatcctcttaaagaaccat

SEQ ID NO: 994299 - DNA, 33 bp, Homo sapien
cacacaatgggaagataaggattggtcaacagc

SEQ ID NO: 994300 - DNA, 33 bp, Homo sapien
cacacaatgggaagatcaggattggtcaacagc

SEQ ID NO: 994301 - DNA, 33 bp, Homo sapien
attttacaatgtgtcacaggcatcacttaagcc

SEQ ID NO: 994302 - DNA, 33 bp, Homo sapien
attttacaatgtgtcagaggcatcacttaagcc

SEQ ID NO: 994303 - DNA, 33 bp, Homo sapien
ctcagaagggcttgcaatcagatgataacagac

SEQ ID NO: 994304 - DNA, 33 bp, Homo sapien
ctcagaagggcttgcagtcagatgataacagac

SEQ ID NO: 994305 - DNA, 33 bp, Homo sapien
tgggggggacaagtcaatccttctgatcctcag

SEQ ID NO: 994306 - DNA, 33 bp, Homo sapien
tgggggggacaagtcagtccttctgatcctcag

SEQ ID NO: 994307 - DNA, 33 bp, Homo sapien
gttctgctgtctctgactactcttgaaagccaa

SEQ ID NO: 994308 - DNA, 33 bp, Homo sapien
gttctgctgtctctgattactcttgaaagccaa

SEQ ID NO: 994309 - DNA, 33 bp, Homo sapien
atgttagaacgaaatgcattaatgattataaag

SEQ ID NO: 994310 - DNA, 33 bp, Homo sapien
atgttagaacgaaatgtattaatgattataaag

SEQ ID NO: 994311 - DNA, 33 bp, Homo sapien
ccccattttattgacccgaaatgaaggcacaga

SEQ ID NO: 994312 - DNA, 33 bp, Homo sapien
ccccattttattgacctgaaatgaaggcacaga

SEQ ID NO: 994313 - DNA, 33 bp, Homo sapien
caatttgaggaaagtcaaggccggaccagtagc

SEQ ID NO: 994314 - DNA, 33 bp, Homo sapien
caatttgaggaaagtcgaggccggaccagtagc

SEQ ID NO: 994315 - DNA, 33 bp, Homo sapien
tggccatagaccactggattaggagggcacctt

SEQ ID NO: 994316 - DNA, 33 bp, Homo sapien
tggccatagaccactgtattaggagggcacctt

SEQ ID NO: 994317 - DNA, 33 bp, Homo sapien
ctatgagccaagaatcaccttaggccaccaggg

SEQ ID NO: 994318 - DNA, 33 bp, Homo sapien
ctatgagccaagaatcgccttaggccaccaggg

SEQ ID NO: 994319 - DNA, 33 bp, Homo sapien
gctcagggacggggaaataatctgctcacatcc

SEQ ID NO: 994320 - DNA, 33 bp, Homo sapien
gctcagggacggggaagtaatctgctcacatcc

SEQ ID NO: 994321 - DNA, 33 bp, Homo sapien
cttgcccaaggccacaaagatagtaagtggact

SEQ ID NO: 994322 - DNA, 33 bp, Homo sapien
cttgcccaaggccacacagatagtaagtggact

SEQ ID NO: 994323 - DNA, 33 bp, Homo sapien
tgttcatctctgcccactgaagaaactttgagc

SEQ ID NO: 994324 - DNA, 33 bp, Homo sapien
tgttcatctctgcccattgaagaaactttgagc

SEQ ID NO: 994325 - DNA, 33 bp, Homo sapien
tttgagtgtgatgagaaggcattgcagatttta

SEQ ID NO: 994326 - DNA, 33 bp, Homo sapien
tttgagtgtgatgagagggcattgcagatttta

SEQ ID NO: 994327 - DNA, 33 bp, Homo sapien
caatgacaaatacaataacttaaacagttgggc

SEQ ID NO: 994328 - DNA, 33 bp, Homo sapien
caatgacaaatacaatgacttaaacagttgggc

SEQ ID NO: 994329 - DNA, 33 bp, Homo sapien
cccttttaaaacatgaccgtcaattcttctggt

SEQ ID NO: 994330 - DNA, 33 bp, Homo sapien
cccttttaaaacatgatcgtcaattcttctggt

SEQ ID NO: 994331 - DNA, 33 bp, Homo sapien
gccaaatctccattcaactgggccctaaacagg

SEQ ID NO: 994332 - DNA, 33 bp, Homo sapien
gccaaatctccattcagctgggccctaaacagg

SEQ ID NO: 994333 - DNA, 33 bp, Homo sapien
cactgcaaagctaggccatttctgggtgaggaa

SEQ ID NO: 994334 - DNA, 33 bp, Homo sapien
cactgcaaagctaggctatttctgggtgaggaa

SEQ ID NO: 994335 - DNA, 33 bp, Homo sapien
gtcatgacccatgcaacggatatggggtgtcac

SEQ ID NO: 994336 - DNA, 33 bp, Homo sapien
gtcatgacccatgcaatggatatggggtgtcac

SEQ ID NO: 994337 - DNA, 33 bp, Homo sapien
cacatgaaaatagttacatgctatagggatatg

SEQ ID NO: 994338 - DNA, 33 bp, Homo sapien
cacatgaaaatagttatatgctatagggatatg

SEQ ID NO: 994339 - DNA, 33 bp, Homo sapien
acagatatctgtttgacacctttcagcccttga

SEQ ID NO: 994340 - DNA, 33 bp, Homo sapien
acagatatctgtttgatacctttcagcccttga

SEQ ID NO: 994341 - DNA, 33 bp, Homo sapien
ctttggcttgacatacagaaactgctacttaac

SEQ ID NO: 994342 - DNA, 33 bp, Homo sapien
ctttggcttgacatacggaaactgctacttaac

SEQ ID NO: 994343 - DNA, 33 bp, Homo sapien
ataggcaagaaacagaactaggattgaagcctt

SEQ ID NO: 994344 - DNA, 33 bp, Homo sapien
ataggcaagaaacagagctaggattgaagcctt

SEQ ID NO: 994345 - DNA, 33 bp, Homo sapien
tgtttctcttgccacaataatctccaggaagca

SEQ ID NO: 994346 - DNA, 33 bp, Homo sapien
tgtttctcttgccacagtaatctccaggaagca

SEQ ID NO: 994347 - DNA, 33 bp, Homo sapien
ctgcccacatccaccaatagatgtgcacctgga

SEQ ID NO: 994348 - DNA, 33 bp, Homo sapien
ctgcccacatccaccagtagatgtgcacctgga

SEQ ID NO: 994349 - DNA, 33 bp, Homo sapien
agactcatatgcccaacggatgtgtcatggaca

SEQ ID NO: 994350 - DNA, 33 bp, Homo sapien
agactcatatgcccaatggatgtgtcatggaca

SEQ ID NO: 994351 - DNA, 33 bp, Homo sapien
ggatcacagatgaaccacctagctgagcctttc

SEQ ID NO: 994352 - DNA, 33 bp, Homo sapien
ggatcacagatgaaccgcctagctgagcctttc

SEQ ID NO: 994353 - DNA, 33 bp, Homo sapien
agtcaggagtagaaccaaagtcaggagtagaac

SEQ ID NO: 994354 - DNA, 33 bp, Homo sapien
agtcaggagtagaaccgaagtcaggagtagaac

SEQ ID NO: 994355 - DNA, 33 bp, Homo sapien
gtcaacaggaggctaacgtcagatcttctagaa

SEQ ID NO: 994356 - DNA, 33 bp, Homo sapien
gtcaacaggaggctaatgtcagatcttctagaa

SEQ ID NO: 994357 - DNA, 33 bp, Homo sapien
cataccaaatggagctaaaagaaggaaagctgt

SEQ ID NO: 994358 - DNA, 33 bp, Homo sapien
cataccaaatggagctgaaagaaggaaagctgt

SEQ ID NO: 994359 - DNA, 33 bp, Homo sapien
agggctcttgagtttcaaacactaagaaggcct

SEQ ID NO: 994360 - DNA, 33 bp, Homo sapien
agggctcttgagtttcgaacactaagaaggcct

SEQ ID NO: 994361 - DNA, 33 bp, Homo sapien
tgcccagacaacacccaatttctgatttctacc

SEQ ID NO: 994362 - DNA, 33 bp, Homo sapien
tgcccagacaacacccgatttctgatttctacc

SEQ ID NO: 994363 - DNA, 33 bp, Homo sapien
tcatatttgcaatacacctttagcacagattaa

SEQ ID NO: 994364 - DNA, 33 bp, Homo sapien
tcatatttgcaatacatctttagcacagattaa

SEQ ID NO: 994365 - DNA, 33 bp, Homo sapien
attttcacgttcagcaacagggagcttggtgtg

SEQ ID NO: 994366 - DNA, 33 bp, Homo sapien
attttcacgttcagcagcagggagcttggtgtg

SEQ ID NO: 994367 - DNA, 33 bp, Homo sapien
ctccttgagagacaaaacgctaccttgtgggct

SEQ ID NO: 994368 - DNA, 33 bp, Homo sapien
ctccttgagagacaaagcgctaccttgtgggct

SEQ ID NO: 994369 - DNA, 33 bp, Homo sapien
aagcctgagcagagggacattcttcttgtttcc

SEQ ID NO: 994370 - DNA, 33 bp, Homo sapien
aagcctgagcagaggggcattcttcttgtttcc

SEQ ID NO: 994371 - DNA, 33 bp, Homo sapien
cacaggtctcatctgacgttcacgagagcccta

SEQ ID NO: 994372 - DNA, 33 bp, Homo sapien
cacaggtctcatctgatgttcacgagagcccta

SEQ ID NO: 994373 - DNA, 33 bp, Homo sapien
tttaaatattcacccaagttgagagaataatat

SEQ ID NO: 994374 - DNA, 33 bp, Homo sapien
tttaaatattcacccacgttgagagaataatat

SEQ ID NO: 994375 - DNA, 33 bp, Homo sapien
gggtggagggaagaacaaatgaatgagggagcc

SEQ ID NO: 994376 - DNA, 33 bp, Homo sapien
gggtggagggaagaacgaatgaatgagggagcc

SEQ ID NO: 994377 - DNA, 33 bp, Homo sapien
actgcacacactcttacaagagaaagggatcta

SEQ ID NO: 994378 - DNA, 33 bp, Homo sapien
actgcacacactcttagaagagaaagggatcta

SEQ ID NO: 994379 - DNA, 33 bp, Homo sapien
gggaatatctggggcacgtatgtgtgttgacct

SEQ ID NO: 994380 - DNA, 33 bp, Homo sapien
gggaatatctggggcatgtatgtgtgttgacct

SEQ ID NO: 994381 - DNA, 33 bp, Homo sapien
tgtgcaaggccacacaagtcaggtagtcaggga

SEQ ID NO: 994382 - DNA, 33 bp, Homo sapien
tgtgcaaggccacacaggtcaggtagtcaggga

SEQ ID NO: 994383 - DNA, 33 bp, Homo sapien
tgttcatttccccaaccaatctgccatcctttg

SEQ ID NO: 994384 - DNA, 33 bp, Homo sapien
tgttcatttccccaactaatctgccatcctttg

SEQ ID NO: 994385 - DNA, 33 bp, Homo sapien
gattttagcaggaggacggcagggttagatttg

SEQ ID NO: 994386 - DNA, 33 bp, Homo sapien
gattttagcaggaggatggcagggttagatttg

SEQ ID NO: 994387 - DNA, 33 bp, Homo sapien
gaggaaggcaagacccaaagagacagatggaca

SEQ ID NO: 994388 - DNA, 33 bp, Homo sapien
gaggaaggcaagacccgaagagacagatggaca

SEQ ID NO: 994389 - DNA, 33 bp, Homo sapien
ttttttcccctctgagcatccggaaagggctgg

SEQ ID NO: 994390 - DNA, 33 bp, Homo sapien
ttttttcccctctgagtatccggaaagggctgg

SEQ ID NO: 994391 - DNA, 33 bp, Homo sapien
ttattttatctgaaccacatggttaatttatga

SEQ ID NO: 994392 - DNA, 33 bp, Homo sapien
ttattttatctgaacctcatggttaatttatga

SEQ ID NO: 994393 - DNA, 33 bp, Homo sapien
cagggacagtgggccacgccttgttgtagctct

SEQ ID NO: 994394 - DNA, 33 bp, Homo sapien
cagggacagtgggccatgccttgttgtagctct

SEQ ID NO: 994395 - DNA, 33 bp, Homo sapien
caccacgcctgaccagaaataagagttttaaaa

SEQ ID NO: 994396 - DNA, 33 bp, Homo sapien
caccacgcctgaccaggaataagagttttaaaa

SEQ ID NO: 994397 - DNA, 33 bp, Homo sapien
tagggccaccattttacgcttcagagttacaca

SEQ ID NO: 994398 - DNA, 33 bp, Homo sapien
tagggccaccattttatgcttcagagttacaca

SEQ ID NO: 994399 - DNA, 33 bp, Homo sapien
tcagagttacacaaaaatcagatcttagaaagg

SEQ ID NO: 994400 - DNA, 33 bp, Homo sapien
tcagagttacacaaaagtcagatcttagaaagg

SEQ ID NO: 994401 - DNA, 33 bp, Homo sapien
tagcactgatacatgtaaacacctgcaacagtt

SEQ ID NO: 994402 - DNA, 33 bp, Homo sapien
tagcactgatacatgtgaacacctgcaacagtt

SEQ ID NO: 994403 - DNA, 33 bp, Homo sapien
ttgaaaatgtggccaccgggaaattagaattaa

SEQ ID NO: 994404 - DNA, 33 bp, Homo sapien
ttgaaaatgtggccactgggaaattagaattaa

SEQ ID NO: 994405 - DNA, 33 bp, Homo sapien
agctttggattaataccgagttaggcgcagtat

SEQ ID NO: 994406 - DNA, 33 bp, Homo sapien
agctttggattaatactgagttaggcgcagtat

SEQ ID NO: 994407 - DNA, 33 bp, Homo sapien
gatttgtgggtgagaactaggggctcagagaaa

SEQ ID NO: 994408 - DNA, 33 bp, Homo sapien
gatttgtgggtgagaagtaggggctcagagaaa

SEQ ID NO: 994409 - DNA, 33 bp, Homo sapien
ttcctcctttgttgaacagaagttgtttcacac

SEQ ID NO: 994410 - DNA, 33 bp, Homo sapien
ttcctcctttgttgaatagaagttgtttcacac

SEQ ID NO: 994411 - DNA, 33 bp, Homo sapien
gggaccctctatggtgaagaatctgacttctac

SEQ ID NO: 994412 - DNA, 33 bp, Homo sapien
gggaccctctatggtggagaatctgacttctac

SEQ ID NO: 994413 - DNA, 33 bp, Homo sapien
aggaaaatagcccagcacggtttctgacgtaca

SEQ ID NO: 994414 - DNA, 33 bp, Homo sapien
aggaaaatagcccagcgcggtttctgacgtaca

SEQ ID NO: 994415 - DNA, 33 bp, Homo sapien
attccagtaggctgcccgaaataaataaaaaat

SEQ ID NO: 994416 - DNA, 33 bp, Homo sapien
attccagtaggctgcctgaaataaataaaaaat

SEQ ID NO: 994417 - DNA, 33 bp, Homo sapien
agaagtttctgtttgactatttcagaagactat

SEQ ID NO: 994418 - DNA, 33 bp, Homo sapien
agaagtttctgtttgattatttcagaagactat

SEQ ID NO: 994419 - DNA, 33 bp, Homo sapien
gttgcttaattcatcaacatactttcctttcag

SEQ ID NO: 994420 - DNA, 33 bp, Homo sapien
gttgcttaattcatcagcatactttcctttcag

SEQ ID NO: 994421 - DNA, 33 bp, Homo sapien
tgtgtgatggaagtaccgcgtgtccacttgctt

SEQ ID NO: 994422 - DNA, 33 bp, Homo sapien
tgtgtgatggaagtactgcgtgtccacttgctt

SEQ ID NO: 994423 - DNA, 33 bp, Homo sapien
acaggatcaatgaaagccctaataaggcagaac

SEQ ID NO: 994424 - DNA, 33 bp, Homo sapien
acaggatcaatgaaaggcctaataaggcagaac

SEQ ID NO: 994425 - DNA, 33 bp, Homo sapien
catgaaaaaaaacctcaaatgagtacatttaaa

SEQ ID NO: 994426 - DNA, 33 bp, Homo sapien
catgaaaaaaaacctctaatgagtacatttaaa

SEQ ID NO: 994427 - DNA, 33 bp, Homo sapien
gctaataagcagctaccgggaactgggctaagt

SEQ ID NO: 994428 - DNA, 33 bp, Homo sapien
gctaataagcagctactgggaactgggctaagt

SEQ ID NO: 994429 - DNA, 33 bp, Homo sapien
gacccagtgccatcaacatctctggacaggcat

SEQ ID NO: 994430 - DNA, 33 bp, Homo sapien
gacccagtgccatcaatatctctggacaggcat

SEQ ID NO: 994431 - DNA, 33 bp, Homo sapien
accaagtgttcatggcgaatgagaagaactaat

SEQ ID NO: 994432 - DNA, 33 bp, Homo sapien
accaagtgttcatggctaatgagaagaactaat

SEQ ID NO: 994433 - DNA, 33 bp, Homo sapien
agtgtacatggtttcacgattatagctcgtttt

SEQ ID NO: 994434 - DNA, 33 bp, Homo sapien
agtgtacatggtttcatgattatagctcgtttt

SEQ ID NO: 994435 - DNA, 33 bp, Homo sapien
acaaatcctcccaaataaaacttgtctggatct

SEQ ID NO: 994436 - DNA, 33 bp, Homo sapien
acaaatcctcccaaatgaaacttgtctggatct

SEQ ID NO: 994437 - DNA, 33 bp, Homo sapien
cacagaatttatttcaagcgtgtaaatgtaggc

SEQ ID NO: 994438 - DNA, 33 bp, Homo sapien
cacagaatttatttcaggcgtgtaaatgtaggc

SEQ ID NO: 994439 - DNA, 33 bp, Homo sapien
gtcaggagattctgtacgaccaacacatgttct

SEQ ID NO: 994440 - DNA, 33 bp, Homo sapien
gtcaggagattctgtaggaccaacacatgttct

SEQ ID NO: 994441 - DNA, 33 bp, Homo sapien
cctccaggtatagtagaaccttgcgggaaagct

SEQ ID NO: 994442 - DNA, 33 bp, Homo sapien
cctccaggtatagtaggaccttgcgggaaagct

SEQ ID NO: 994443 - DNA, 33 bp, Homo sapien
ctacgctgtgttttcaggaaggaaagggagtga

SEQ ID NO: 994444 - DNA, 33 bp, Homo sapien
ctacgctgtgttttcatgaaggaaagggagtga

SEQ ID NO: 994445 - DNA, 33 bp, Homo sapien
cttctggcctgagttacctgtctggggcaaaac

SEQ ID NO: 994446 - DNA, 33 bp, Homo sapien
cttctggcctgagttatctgtctggggcaaaac

SEQ ID NO: 994447 - DNA, 33 bp, Homo sapien
aatgtatttcctattcaaagttacttgataagc

SEQ ID NO: 994448 - DNA, 33 bp, Homo sapien
aatgtatttcctattcgaagttacttgataagc

SEQ ID NO: 994449 - DNA, 33 bp, Homo sapien
tacacctgactaatacaataaaatgtatccatc

SEQ ID NO: 994450 - DNA, 33 bp, Homo sapien
tacacctgactaatacgataaaatgtatccatc

SEQ ID NO: 994451 - DNA, 33 bp, Homo sapien
caaggtcttttgaaaacacagatctgattatgt

SEQ ID NO: 994452 - DNA, 33 bp, Homo sapien
caaggtcttttgaaaatacagatctgattatgt

SEQ ID NO: 994453 - DNA, 33 bp, Homo sapien
acagtttcagggctaaaccttcagaaagcctgg

SEQ ID NO: 994454 - DNA, 33 bp, Homo sapien
acagtttcagggctaagccttcagaaagcctgg

SEQ ID NO: 994455 - DNA, 33 bp, Homo sapien
tcatcctattagaaaacggcagagcagacgctc

SEQ ID NO: 994456 - DNA, 33 bp, Homo sapien
tcatcctattagaaaatggcagagcagacgctc

SEQ ID NO: 994457 - DNA, 33 bp, Homo sapien
accaaaaactgtcttacgtcaaactcccacacc

SEQ ID NO: 994458 - DNA, 33 bp, Homo sapien
accaaaaactgtcttatgtcaaactcccacacc

SEQ ID NO: 994459 - DNA, 33 bp, Homo sapien
aatctaacagagcatcaaggtgttggaatggac

SEQ ID NO: 994460 - DNA, 33 bp, Homo sapien
aatctaacagagcatctaggtgttggaatggac

SEQ ID NO: 994461 - DNA, 33 bp, Homo sapien
ttttaacagatgctgccaaatacagtgcttcca

SEQ ID NO: 994462 - DNA, 33 bp, Homo sapien
ttttaacagatgctgctaaatacagtgcttcca

SEQ ID NO: 994463 - DNA, 33 bp, Homo sapien
tagaagatcttgtatcactttcattgttattac

SEQ ID NO: 994464 - DNA, 33 bp, Homo sapien
tagaagatcttgtatcgctttcattgttattac

SEQ ID NO: 994465 - DNA, 33 bp, Homo sapien
ttgcaaacaatgcttcaacagagatctcagtag

SEQ ID NO: 994466 - DNA, 33 bp, Homo sapien
ttgcaaacaatgcttcgacagagatctcagtag

SEQ ID NO: 994467 - DNA, 33 bp, Homo sapien
ttgccagtctcctaaacagaatagaagtagctc

SEQ ID NO: 994468 - DNA, 33 bp, Homo sapien
ttgccagtctcctaaagagaatagaagtagctc

SEQ ID NO: 994469 - DNA, 33 bp, Homo sapien
ctaacccgatgaggcccgacccagtaaacagcc

SEQ ID NO: 994470 - DNA, 33 bp, Homo sapien
ctaacccgatgaggcctgacccagtaaacagcc

SEQ ID NO: 994471 - DNA, 33 bp, Homo sapien
aaaagctttgcaggaactgactttttctaccct

SEQ ID NO: 994472 - DNA, 33 bp, Homo sapien
aaaagctttgcaggaattgactttttctaccct

SEQ ID NO: 994473 - DNA, 33 bp, Homo sapien
catcattacaaagggactaatgcttcctaccct

SEQ ID NO: 994474 - DNA, 33 bp, Homo sapien
catcattacaaagggattaatgcttcctaccct

SEQ ID NO: 994475 - DNA, 33 bp, Homo sapien
agagaaaataatccacacttgccacttgaatta

SEQ ID NO: 994476 - DNA, 33 bp, Homo sapien
agagaaaataatccacgcttgccacttgaatta

SEQ ID NO: 994477 - DNA, 33 bp, Homo sapien
atgcagaggatttggacgatggaggacttggga

SEQ ID NO: 994478 - DNA, 33 bp, Homo sapien
atgcagaggatttggatgatggaggacttggga

SEQ ID NO: 994479 - DNA, 33 bp, Homo sapien
gggtgtgctctttcaacgtgatggtcacaggcc

SEQ ID NO: 994480 - DNA, 33 bp, Homo sapien
gggtgtgctctttcaatgtgatggtcacaggcc

SEQ ID NO: 994481 - DNA, 33 bp, Homo sapien
tcacgtaggaaatgacacgcatatggagatgcc

SEQ ID NO: 994482 - DNA, 33 bp, Homo sapien
tcacgtaggaaatgacgcgcatatggagatgcc

SEQ ID NO: 994483 - DNA, 33 bp, Homo sapien
cgctgtgcatctcgcaccactctgagcatctac

SEQ ID NO: 994484 - DNA, 33 bp, Homo sapien
cgctgtgcatctcgcagcactctgagcatctac

SEQ ID NO: 994485 - DNA, 33 bp, Homo sapien
tgttgcctatgggtgaacatcatatgggccctg

SEQ ID NO: 994486 - DNA, 33 bp, Homo sapien
tgttgcctatgggtgagcatcatatgggccctg

SEQ ID NO: 994487 - DNA, 33 bp, Homo sapien
gagcttttcaagggaaccgtaacaataagataa

SEQ ID NO: 994488 - DNA, 33 bp, Homo sapien
gagcttttcaagggaatcgtaacaataagataa

SEQ ID NO: 994489 - DNA, 33 bp, Homo sapien
gttggctcccacgggcacaaaagacagcaagag

SEQ ID NO: 994490 - DNA, 33 bp, Homo sapien
gttggctcccacgggcgcaaaagacagcaagag

SEQ ID NO: 994491 - DNA, 33 bp, Homo sapien
ggatgaaggtttagacccattcatgtctgagcc

SEQ ID NO: 994492 - DNA, 33 bp, Homo sapien
ggatgaaggtttagactcattcatgtctgagcc

SEQ ID NO: 994493 - DNA, 33 bp, Homo sapien
ggctggagcatcagtcacctctttctatccctt

SEQ ID NO: 994494 - DNA, 33 bp, Homo sapien
ggctggagcatcagtcgcctctttctatccctt

SEQ ID NO: 994495 - DNA, 33 bp, Homo sapien
tgtgacaagtgaccaacgaagagtacagagcct

SEQ ID NO: 994496 - DNA, 33 bp, Homo sapien
tgtgacaagtgaccaaggaagagtacagagcct

SEQ ID NO: 994497 - DNA, 33 bp, Homo sapien
tgccagcgtgtgaaaaagaaccagccgcggtca

SEQ ID NO: 994498 - DNA, 33 bp, Homo sapien
tgccagcgtgtgaaaaggaaccagccgcggtca

SEQ ID NO: 994499 - DNA, 33 bp, Homo sapien
aaaggagaaggtcacaaatttgaggaaggatgc

SEQ ID NO: 994500 - DNA, 33 bp, Homo sapien
aaaggagaaggtcacatatttgaggaaggatgc

SEQ ID NO: 994501 - DNA, 33 bp, Homo sapien
tctttgtagctattacgctattccagcctagtt

SEQ ID NO: 994502 - DNA, 33 bp, Homo sapien
tctttgtagctattactctattccagcctagtt

SEQ ID NO: 994503 - DNA, 33 bp, Homo sapien
aataacacctgccctgaaaggttgctgtaaggg

SEQ ID NO: 994504 - DNA, 33 bp, Homo sapien
aataacacctgccctgcaaggttgctgtaaggg

SEQ ID NO: 994505 - DNA, 33 bp, Homo sapien
actactcaaaggaacaactgcttgggaagaggc

SEQ ID NO: 994506 - DNA, 33 bp, Homo sapien
actactcaaaggaacatctgcttgggaagaggc

SEQ ID NO: 994507 - DNA, 33 bp, Homo sapien
ccagaactattgctcccgagaactttctcatag

SEQ ID NO: 994508 - DNA, 33 bp, Homo sapien
ccagaactattgctcctgagaactttctcatag

SEQ ID NO: 994509 - DNA, 33 bp, Homo sapien
gcattgagaagatgaccgagaggatgccggtag

SEQ ID NO: 994510 - DNA, 33 bp, Homo sapien
gcattgagaagatgactgagaggatgccggtag

SEQ ID NO: 994511 - DNA, 33 bp, Homo sapien; identical to SEQ ID NO: 994509

SEQ ID NO: 994512 - DNA, 33 bp, Homo sapien; identical to SEQ ID NO: 994510

SEQ ID NO: 994513 - DNA, 33 bp, Homo sapien
ctggtctctacctactaaatgctaggagtgccc

SEQ ID NO: 994514 - DNA, 33 bp, Homo sapien
ctggtctctacctactgaatgctaggagtgccc

SEQ ID NO: 994515 - DNA, 33 bp, Homo sapien
ttaccatgcctggctcaccacctccttccctag

SEQ ID NO: 994516 - DNA, 33 bp, Homo sapien
ttaccatgcctggctcgccacctccttccctag

SEQ ID NO: 994517 - DNA, 33 bp, Homo sapien
tctttaaggattgcagaagaataggctacttta

SEQ ID NO: 994518 - DNA, 33 bp, Homo sapien
tctttaaggattgcaggagaataggctacttta

SEQ ID NO: 994519 - DNA, 33 bp, Homo sapien
ccctaatgaagataaactcctctggcaataggg

SEQ ID NO: 994520 - DNA, 33 bp, Homo sapien
ccctaatgaagataaattcctctggcaataggg

SEQ ID NO: 994521 - DNA, 33 bp, Homo sapien
agaacaggaacatggaaaggcaaagaaaagatg

SEQ ID NO: 994522 - DNA, 33 bp, Homo sapien
agaacaggaacatggagaggcaaagaaaagatg

SEQ ID NO: 994523 - DNA, 33 bp, Homo sapien
aacaaaaatgctcacacgaagcgttgctgtggg

SEQ ID NO: 994524 - DNA, 33 bp, Homo sapien
aacaaaaatgctcacatgaagcgttgctgtggg

SEQ ID NO: 994525 - DNA, 33 bp, Homo sapien
tgctgaacaaaacaaaagttagacaaagtagaa

SEQ ID NO: 994526 - DNA, 33 bp, Homo sapien
tgctgaacaaaacaaaggttagacaaagtagaa

SEQ ID NO: 994527 - DNA, 33 bp, Homo sapien
ctgcctgaaccagttccgaaagttgaatctctt

SEQ ID NO: 994528 - DNA, 33 bp, Homo sapien
ctgcctgaaccagttctgaaagttgaatctctt

SEQ ID NO: 994529 - DNA, 33 bp, Homo sapien
gtagctgggtttataacgtgatcttaatcccca

SEQ ID NO: 994530 - DNA, 33 bp, Homo sapien
gtagctgggtttataatgtgatcttaatcccca

SEQ ID NO: 994531 - DNA, 33 bp, Homo sapien
tggtgttggtcatttacgggagaaggagagaga

SEQ ID NO: 994532 - DNA, 33 bp, Homo sapien
tggtgttggtcatttaggggagaaggagagaga

SEQ ID NO: 994533 - DNA, 33 bp, Homo sapien
gcagtgttaggaaggaaagcaccaggtgaaagt

SEQ ID NO: 994534 - DNA, 33 bp, Homo sapien
gcagtgttaggaaggagagcaccaggtgaaagt

SEQ ID NO: 994535 - DNA, 33 bp, Homo sapien
cttgcttagaaagaacaatgtctgaggctgttt

SEQ ID NO: 994536 - DNA, 33 bp, Homo sapien
cttgcttagaaagaacgatgtctgaggctgttt

SEQ ID NO: 994537 - DNA, 33 bp, Homo sapien
ctaggccttatcgttaacaaggactttcctgaa

SEQ ID NO: 994538 - DNA, 33 bp, Homo sapien
ctaggccttatcgttatcaaggactttcctgaa

SEQ ID NO: 994539 - DNA, 33 bp, Homo sapien
gtcccacaccggctgaataccaccagctacttt

SEQ ID NO: 994540 - DNA, 33 bp, Homo sapien
gtcccacaccggctgactaccaccagctacttt

SEQ ID NO: 994541 - DNA, 33 bp, Homo sapien
ccaaatgctttagcacaggtttagaattgcccg

SEQ ID NO: 994542 - DNA, 33 bp, Homo sapien
ccaaatgctttagcactggtttagaattgcccg

SEQ ID NO: 994543 - DNA, 33 bp, Homo sapien
gctaaagcatttggaccctcagacttctcctct

SEQ ID NO: 994544 - DNA, 33 bp, Homo sapien
gctaaagcatttggacgctcagacttctcctct

SEQ ID NO: 994545 - DNA, 33 bp, Homo sapien
acactgtatgattcacacaaataaccagtgacc

SEQ ID NO: 994546 - DNA, 33 bp, Homo sapien
acactgtatgattcacgcaaataaccagtgacc

SEQ ID NO: 994547 - DNA, 33 bp, Homo sapien
aggcccttcacctttcaatggcctccgagatga

SEQ ID NO: 994548 - DNA, 33 bp, Homo sapien
aggcccttcacctttcgatggcctccgagatga

SEQ ID NO: 994549 - DNA, 33 bp, Homo sapien
ttgtctggaaaactcacggtaagggtaatagta

SEQ ID NO: 994550 - DNA, 33 bp, Homo sapien
ttgtctggaaaactcatggtaagggtaatagta

SEQ ID NO: 994551 - DNA, 33 bp, Homo sapien
gtgtgcctgtgtgtaaactgcctctgtacctcc

SEQ ID NO: 994552 - DNA, 33 bp, Homo sapien
gtgtgcctgtgtgtaacctgcctctgtacctcc

SEQ ID NO: 994553 - DNA, 33 bp, Homo sapien
tgacattataataaagcatttcccccatgctat

SEQ ID NO: 994554 - DNA, 33 bp, Homo sapien
tgacattataataaagtatttcccccatgctat

SEQ ID NO: 994555 - DNA, 33 bp, Homo sapien
atttatgaccaattgacaaatgtctgttgagct

SEQ ID NO: 994556 - DNA, 33 bp, Homo sapien
atttatgaccaattgagaaatgtctgttgagct

SEQ ID NO: 994557 - DNA, 33 bp, Homo sapien
actggatgttgtgacacgctttagccaatggaa

SEQ ID NO: 994558 - DNA, 33 bp, Homo sapien
actggatgttgtgacatgctttagccaatggaa

SEQ ID NO: 994559 - DNA, 33 bp, Homo sapien
tacaaggcctgacttcactgagttgttctgaga

SEQ ID NO: 994560 - DNA, 33 bp, Homo sapien
tacaaggcctgacttcgctgagttgttctgaga

SEQ ID NO: 994561 - DNA, 33 bp, Homo sapien
tgaggtggtggggtgaaaagtgtccactcttgg

SEQ ID NO: 994562 - DNA, 33 bp, Homo sapien
tgaggtggtggggtgagaagtgtccactcttgg

SEQ ID NO: 994563 - DNA, 33 bp, Homo sapien
gctattttggttgcacacacatgatgtcattta

SEQ ID NO: 994564 - DNA, 33 bp, Homo sapien
gctattttggttgcacgcacatgatgtcattta

SEQ ID NO: 994565 - DNA, 33 bp, Homo sapien
cacctaccccagctcgaatcataactccttgaa

SEQ ID NO: 994566 - DNA, 33 bp, Homo sapien
cacctaccccagctcgcatcataactccttgaa

SEQ ID NO: 994567 - DNA, 33 bp, Homo sapien
tctgcaaatctgtgtacgctctgctcggtcacc

SEQ ID NO: 994568 - DNA, 33 bp, Homo sapien
tctgcaaatctgtgtatgctctgctcggtcacc

SEQ ID NO: 994569 - DNA, 33 bp, Homo sapien
cctgaagggcatccgaatatgtccttcctcctt

SEQ ID NO: 994570 - DNA, 33 bp, Homo sapien
cctgaagggcatccgagtatgtccttcctcctt

SEQ ID NO: 994571 - DNA, 33 bp, Homo sapien
aaactgggcctgaacacggtttaataaatgcag

SEQ ID NO: 994572 - DNA, 33 bp, Homo sapien
aaactgggcctgaacatggtttaataaatgcag

SEQ ID NO: 994573 - DNA, 33 bp, Homo sapien
ttctcaatctcatgaaaccagagcattcgtttc

SEQ ID NO: 994574 - DNA, 33 bp, Homo sapien
ttctcaatctcatgaacccagagcattcgtttc

SEQ ID NO: 994575 - DNA, 33 bp, Homo sapien
aacaatggagtttaacacagatatgaagtaatt

SEQ ID NO: 994576 - DNA, 33 bp, Homo sapien
aacaatggagtttaacgcagatatgaagtaatt

SEQ ID NO: 994577 - DNA, 33 bp, Homo sapien
tcattactttgttcaacatgttctttcaaagta

SEQ ID NO: 994578 - DNA, 33 bp, Homo sapien
tcattactttgttcaatatgttctttcaaagta

SEQ ID NO: 994579 - DNA, 33 bp, Homo sapien
ggtgagtaactcacaactcctctccgcagggag

SEQ ID NO: 994580 - DNA, 33 bp, Homo sapien
ggtgagtaactcacaattcctctccgcagggag

SEQ ID NO: 994581 - DNA, 33 bp, Homo sapien
caaaacaatacaggtaacacacttctaagatgt

SEQ ID NO: 994582 - DNA, 33 bp, Homo sapien
caaaacaatacaggtaccacacttctaagatgt

SEQ ID NO: 994583 - DNA, 33 bp, Homo sapien
ggactcaatatagaaaaaggcatgacagcagag

SEQ ID NO: 994584 - DNA, 33 bp, Homo sapien
ggactcaatatagaaagaggcatgacagcagag

SEQ ID NO: 994585 - DNA, 33 bp, Homo sapien
gtggtggcattctgggacacatttgccagggac

SEQ ID NO: 994586 - DNA, 33 bp, Homo sapien
gtggtggcattctgggtcacatttgccagggac

SEQ ID NO: 994587 - DNA, 33 bp, Homo sapien
tgtaaacacagtggaaatcatccagtcaaccaa

SEQ ID NO: 994588 - DNA, 33 bp, Homo sapien
tgtaaacacagtggaagtcatccagtcaaccaa

SEQ ID NO: 994589 - DNA, 33 bp, Homo sapien
gtgttgccacagcatacctttaacaaggactct

SEQ ID NO: 994590 - DNA, 33 bp, Homo sapien
gtgttgccacagcatatctttaacaaggactct

SEQ ID NO: 994591 - DNA, 33 bp, Homo sapien
cagaatgggttgaagaactggttccaacctaag

SEQ ID NO: 994592 - DNA, 33 bp, Homo sapien
cagaatgggttgaagacctggttccaacctaag

SEQ ID NO: 994593 - DNA, 33 bp, Homo sapien
atgtttcctgagcaacagtctttattcatcaaa

SEQ ID NO: 994594 - DNA, 33 bp, Homo sapien
atgtttcctgagcaacggtctttattcatcaaa

SEQ ID NO: 994595 - DNA, 33 bp, Homo sapien
ggaactcctgcccaaaaggatgttacagagcat

SEQ ID NO: 994596 - DNA, 33 bp, Homo sapien
ggaactcctgcccaaacggatgttacagagcat

SEQ ID NO: 994597 - DNA, 33 bp, Homo sapien
tgcatctgatgtacaacgttttattcaaataag

SEQ ID NO: 994598 - DNA, 33 bp, Homo sapien
tgcatctgatgtacaatgttttattcaaataag

SEQ ID NO: 994599 - DNA, 33 bp, Homo sapien
tgagtcctttaaaccacgcagagctagcagtaa

SEQ ID NO: 994600 - DNA, 33 bp, Homo sapien
tgagtcctttaaaccatgcagagctagcagtaa

SEQ ID NO: 994601 - DNA, 33 bp, Homo sapien
ggttgagatggcaaacaactttaacctgggtgt

SEQ ID NO: 994602 - DNA, 33 bp, Homo sapien
ggttgagatggcaaactactttaacctgggtgt

SEQ ID NO: 994603 - DNA, 33 bp, Homo sapien
gcagaagcttcttcagactccaacaagctcctt

SEQ ID NO: 994604 - DNA, 33 bp, Homo sapien
gcagaagcttcttcagtctccaacaagctcctt

SEQ ID NO: 994605 - DNA, 33 bp, Homo sapien
ggagaggtagcatccacctagtagggcaagacc

SEQ ID NO: 994606 - DNA, 33 bp, Homo sapien
ggagaggtagcatccatctagtagggcaagacc

SEQ ID NO: 994607 - DNA, 33 bp, Homo sapien
ccgtgacaaataaaaacgacactgcctcctctc

SEQ ID NO: 994608 - DNA, 33 bp, Homo sapien
ccgtgacaaataaaaatgacactgcctcctctc

SEQ ID NO: 994609 - DNA, 33 bp, Homo sapien
agcaactaaatggtgcacagaaagtaccgtgac

SEQ ID NO: 994610 - DNA, 33 bp, Homo sapien
agcaactaaatggtgcccagaaagtaccgtgac

SEQ ID NO: 994611 - DNA, 33 bp, Homo sapien
ttccattccgccttcaagatttcctcaactcct

SEQ ID NO: 994612 - DNA, 33 bp, Homo sapien
ttccattccgccttcacgatttcctcaactcct

SEQ ID NO: 994613 - DNA, 33 bp, Homo sapien
cacttctcaaaacaaaagccaaacgcaagattt

SEQ ID NO: 994614 - DNA, 33 bp, Homo sapien
cacttctcaaaacaaaggccaaacgcaagattt

SEQ ID NO: 994615 - DNA, 33 bp, Homo sapien
tgcagtttaagatcacagatcaggggccaccaa

SEQ ID NO: 994616 - DNA, 33 bp, Homo sapien
tgcagtttaagatcacggatcaggggccaccaa

SEQ ID NO: 994617 - DNA, 33 bp, Homo sapien
tactgcttgtaaaaacagagttatgtaccaggt

SEQ ID NO: 994618 - DNA, 33 bp, Homo sapien
tactgcttgtaaaaacggagttatgtaccaggt

SEQ ID NO: 994619 - DNA, 33 bp, Homo sapien
gcccgtccttccatgacgtgttcaagcagctgg

SEQ ID NO: 994620 - DNA, 33 bp, Homo sapien
gcccgtccttccatgatgtgttcaagcagctgg

SEQ ID NO: 994621 - DNA, 33 bp, Homo sapien
agagagtctgagcatcactggcttacataaatt

SEQ ID NO: 994622 - DNA, 33 bp, Homo sapien
agagagtctgagcatcgctggcttacataaatt

SEQ ID NO: 994623 - DNA, 33 bp, Homo sapien
tgctgactccaaattacagaataaacataagaa

SEQ ID NO: 994624 - DNA, 33 bp, Homo sapien
tgctgactccaaattagagaataaacataagaa

SEQ ID NO: 994625 - DNA, 33 bp, Homo sapien
ctctggcaagacaaaacgttctgctctcccaac

SEQ ID NO: 994626 - DNA, 33 bp, Homo sapien
ctctggcaagacaaaatgttctgctctcccaac

SEQ ID NO: 994627 - DNA, 33 bp, Homo sapien
ccacgtacaattggctcagaaagtcttgttact

SEQ ID NO: 994628 - DNA, 33 bp, Homo sapien
ccacgtacaattggcttagaaagtcttgttact

SEQ ID NO: 994629 - DNA, 33 bp, Homo sapien
tgctacaacagagccacagacaaatcaacagtg

SEQ ID NO: 994630 - DNA, 33 bp, Homo sapien
tgctacaacagagccagagacaaatcaacagtg

SEQ ID NO: 994631 - DNA, 33 bp, Homo sapien
tctgttgtagcagaaagaatccaaggctatggg

SEQ ID NO: 994632 - DNA, 33 bp, Homo sapien
tctgttgtagcagaaataatccaaggctatggg

SEQ ID NO: 994633 - DNA, 33 bp, Homo sapien
gttctgtgtttctggacagctgtgactaacaca

SEQ ID NO: 994634 - DNA, 33 bp, Homo sapien
gttctgtgtttctggagagctgtgactaacaca

SEQ ID NO: 994635 - DNA, 33 bp, Homo sapien
tcagttactcctttcccctgctaagtccatcct

SEQ ID NO: 994636 - DNA, 33 bp, Homo sapien
tcagttactcctttcctctgctaagtccatcct

SEQ ID NO: 994637 - DNA, 33 bp, Homo sapien
gtgcatatacgtgggcacccaaattgctagagc

SEQ ID NO: 994638 - DNA, 33 bp, Homo sapien
gtgcatatacgtgggcgcccaaattgctagagc

SEQ ID NO: 994639 - DNA, 33 bp, Homo sapien
gtctgtctctgaataactaagtacaagggttaa

SEQ ID NO: 994640 - DNA, 33 bp, Homo sapien
gtctgtctctgaataagtaagtacaagggttaa

SEQ ID NO: 994641 - DNA, 33 bp, Homo sapien
tcttggcatgaattaacgtttgtcttgagccat

SEQ ID NO: 994642 - DNA, 33 bp, Homo sapien
tcttggcatgaattaatgtttgtcttgagccat

SEQ ID NO: 994643 - DNA, 33 bp, Homo sapien
gctggggtatgaagataagccatacatagtgct

SEQ ID NO: 994644 - DNA, 33 bp, Homo sapien
gctggggtatgaagatgagccatacatagtgct

SEQ ID NO: 994645 - DNA, 33 bp, Homo sapien
actgaccggttcttcacgccatattgactgaat

SEQ ID NO: 994646 - DNA, 33 bp, Homo sapien
actgaccggttcttcaggccatattgactgaat

SEQ ID NO: 994647 - DNA, 33 bp, Homo sapien
tgaaaacctaaagcaacgcagggaatgtctgct

SEQ ID NO: 994648 - DNA, 33 bp, Homo sapien
tgaaaacctaaagcaatgcagggaatgtctgct

SEQ ID NO: 994649 - DNA, 33 bp, Homo sapien
acaactctcacatttcaaagtctcagatttcga

SEQ ID NO: 994650 - DNA, 33 bp, Homo sapien
acaactctcacatttcgaagtctcagatttcga

SEQ ID NO: 994651 - DNA, 33 bp, Homo sapien
tttctatggcacatcaaaaccagtcatagagaa

SEQ ID NO: 994652 - DNA, 33 bp, Homo sapien
tttctatggcacatcagaaccagtcatagagaa

SEQ ID NO: 994653 - DNA, 33 bp, Homo sapien
cagtccatctgctatacactacgttaactctaa

SEQ ID NO: 994654 - DNA, 33 bp, Homo sapien
cagtccatctgctatatactacgttaactctaa

SEQ ID NO: 994655 - DNA, 33 bp, Homo sapien
ccacaggtctttgagaactatagacagcagaca

SEQ ID NO: 994656 - DNA, 33 bp, Homo sapien
ccacaggtctttgagagctatagacagcagaca

SEQ ID NO: 994657 - DNA, 33 bp, Homo sapien
acatagcatactggaaccgtcaaagtcgtgttt

SEQ ID NO: 994658 - DNA, 33 bp, Homo sapien
acatagcatactggaatcgtcaaagtcgtgttt

SEQ ID NO: 994659 - DNA, 33 bp, Homo sapien
ggagtgttcttttggcaatgcaatctggccttg

SEQ ID NO: 994660 - DNA, 33 bp, Homo sapien
ggagtgttcttttggctatgcaatctggccttg

SEQ ID NO: 994661 - DNA, 33 bp, Homo sapien
tgaatagcctctgacaatgaaaccctcttcatg

SEQ ID NO: 994662 - DNA, 33 bp, Homo sapien
tgaatagcctctgacagtgaaaccctcttcatg

SEQ ID NO: 994663 - DNA, 33 bp, Homo sapien
cttatcactgatgtaccgagtttttactttgtg

SEQ ID NO: 994664 - DNA, 33 bp, Homo sapien
cttatcactgatgtactgagtttttactttgtg

SEQ ID NO: 994665 - DNA, 33 bp, Homo sapien
acagaccaaactgatccagtctaatccaagtca

SEQ ID NO: 994666 - DNA, 33 bp, Homo sapien
acagaccaaactgatctagtctaatccaagtca

SEQ ID NO: 994667 - DNA, 33 bp, Homo sapien
cccagctgtaaagcagccatctcaataacatta

SEQ ID NO: 994668 - DNA, 33 bp, Homo sapien
cccagctgtaaagcaggcatctcaataacatta

SEQ ID NO: 994669 - DNA, 33 bp, Homo sapien
cacattcagaacaacccatattaacacaaaagc

SEQ ID NO: 994670 - DNA, 33 bp, Homo sapien
cacattcagaacaacctatattaacacaaaagc

SEQ ID NO: 994671 - DNA, 33 bp, Homo sapien
aagcctgagaagagaacagatgaaaatacaacc

SEQ ID NO: 994672 - DNA, 33 bp, Homo sapien
aagcctgagaagagaagagatgaaaatacaacc

SEQ ID NO: 994673 - DNA, 33 bp, Homo sapien
cctgaatgtttatgaccggggaaactgagggaa

SEQ ID NO: 994674 - DNA, 33 bp, Homo sapien
cctgaatgtttatgactggggaaactgagggaa

SEQ ID NO: 994675 - DNA, 33 bp, Homo sapien
atcagaacagcagcaaaatcccgggcaggcctt

SEQ ID NO: 994676 - DNA, 33 bp, Homo sapien
atcagaacagcagcaacatcccgggcaggcctt

SEQ ID NO: 994677 - DNA, 33 bp, Homo sapien
gctgacttctgctctaaacccaaatatgcaact

SEQ ID NO: 994678 - DNA, 33 bp, Homo sapien
gctgacttctgctctagacccaaatatgcaact

SEQ ID NO: 994679 - DNA, 33 bp, Homo sapien
taaactgtgtctcatcaaagtatcttgtaatga

SEQ ID NO: 994680 - DNA, 33 bp, Homo sapien
taaactgtgtctcatcgaagtatcttgtaatga

SEQ ID NO: 994681 - DNA, 33 bp, Homo sapien
ctaataagacaaagaaactcactgtatagtcca

SEQ ID NO: 994682 - DNA, 33 bp, Homo sapien
ctaataagacaaagaagctcactgtatagtcca

SEQ ID NO: 994683 - DNA, 33 bp, Homo sapien
agagaatatcataaaaatatccaggaaaagtaa

SEQ ID NO: 994684 - DNA, 33 bp, Homo sapien
agagaatatcataaaagtatccaggaaaagtaa

SEQ ID NO: 994685 - DNA, 33 bp, Homo sapien
gttaaactgagtggtacaggctaggtgcagtgg

SEQ ID NO: 994686 - DNA, 33 bp, Homo sapien
gttaaactgagtggtataggctaggtgcagtgg

SEQ ID NO: 994687 - DNA, 33 bp, Homo sapien
ttacaaagctaagtaacgtctatatcaggggaa

SEQ ID NO: 994688 - DNA, 33 bp, Homo sapien
ttacaaagctaagtaatgtctatatcaggggaa

SEQ ID NO: 994689 - DNA, 33 bp, Homo sapien
aataatatatacaaagactgccacacaagttga

SEQ ID NO: 994690 - DNA, 33 bp, Homo sapien
aataatatatacaaagcctgccacacaagttga

SEQ ID NO: 994691 - DNA, 33 bp, Homo sapien
ggataagcaccttcacgcattatcccccaatgc

SEQ ID NO: 994692 - DNA, 33 bp, Homo sapien
ggataagcaccttcactcattatcccccaatgc

SEQ ID NO: 994693 - DNA, 33 bp, Homo sapien
catgcatcttagaagcaatcctctgctacctga

SEQ ID NO: 994694 - DNA, 33 bp, Homo sapien
catgcatcttagaagcgatcctctgctacctga

SEQ ID NO: 994695 - DNA, 33 bp, Homo sapien
ttcactccttttcaaacggacagtcccaagagc

SEQ ID NO: 994696 - DNA, 33 bp, Homo sapien
ttcactccttttcaaatggacagtcccaagagc

SEQ ID NO: 994697 - DNA, 33 bp, Homo sapien
aggaccctgtctggtaccaccttgtctcccatt

SEQ ID NO: 994698 - DNA, 33 bp, Homo sapien
aggaccctgtctggtatcaccttgtctcccatt

SEQ ID NO: 994699 - DNA, 33 bp, Homo sapien
agcttggcccaagatacacctcttctgagttag

SEQ ID NO: 994700 - DNA, 33 bp, Homo sapien
agcttggcccaagatatacctcttctgagttag

SEQ ID NO: 994701 - DNA, 33 bp, Homo sapien
caactcacctgttacaatgctcaggggttcatc

SEQ ID NO: 994702 - DNA, 33 bp, Homo sapien
caactcacctgttacagtgctcaggggttcatc

SEQ ID NO: 994703 - DNA, 33 bp, Homo sapien
atgaagtcaagcaagccgattcaaccacctaat

SEQ ID NO: 994704 - DNA, 33 bp, Homo sapien
atgaagtcaagcaagcggattcaaccacctaat

SEQ ID NO: 994705 - DNA, 33 bp, Homo sapien
ctaaaggctcatggaacatagctgaaagatgcc

SEQ ID NO: 994706 - DNA, 33 bp, Homo sapien
ctaaaggctcatggaatatagctgaaagatgcc

SEQ ID NO: 994707 - DNA, 33 bp, Homo sapien
tgtcatcccctatcaacttagtgagaccagaag

SEQ ID NO: 994708 - DNA, 33 bp, Homo sapien
tgtcatcccctatcaagttagtgagaccagaag

SEQ ID NO: 994709 - DNA, 33 bp, Homo sapien
aactccaattaagagaaggcttataagcagcca

SEQ ID NO: 994710 - DNA, 33 bp, Homo sapien
aactccaattaagagatggcttataagcagcca

SEQ ID NO: 994711 - DNA, 33 bp, Homo sapien
tctgtgatgtcatgagaacagggtatggggcac

SEQ ID NO: 994712 - DNA, 33 bp, Homo sapien
tctgtgatgtcatgaggacagggtatggggcac

SEQ ID NO: 994713 - DNA, 33 bp, Homo sapien
atgtcagcttttagccactctcccaatcaaatg

SEQ ID NO: 994714 - DNA, 33 bp, Homo sapien
atgtcagcttttagcctctctcccaatcaaatg

SEQ ID NO: 994715 - DNA, 33 bp, Homo sapien
tggggagaggcctagaagtgtggaactgctagt

SEQ ID NO: 994716 - DNA, 33 bp, Homo sapien
tggggagaggcctagaggtgtggaactgctagt

SEQ ID NO: 994717 - DNA, 33 bp, Homo sapien
aaaatggacatttgaaacaaaacttgactggca

SEQ ID NO: 994718 - DNA, 33 bp, Homo sapien
aaaatggacatttgaaccaaaacttgactggca

SEQ ID NO: 994719 - DNA, 33 bp, Homo sapien
aaagcctggtctttttcggctgaatggcttcag

SEQ ID NO: 994720 - DNA, 33 bp, Homo sapien
aaagcctggtcttttttggctgaatggcttcag

SEQ ID NO: 994721 - DNA, 33 bp, Homo sapien
gcaagcaaacctagaacagtgctggaccactca

SEQ ID NO: 994722 - DNA, 33 bp, Homo sapien
gcaagcaaacctagaagagtgctggaccactca

SEQ ID NO: 994723 - DNA, 33 bp, Homo sapien
ccctcactgtgttgaaaaaatgtgaaaggattt

SEQ ID NO: 994724 - DNA, 33 bp, Homo sapien
ccctcactgtgttgaataaatgtgaaaggattt

SEQ ID NO: 994725 - DNA, 33 bp, Homo sapien
ggtccccaggcaaccacgagggctcagctccaa

SEQ ID NO: 994726 - DNA, 33 bp, Homo sapien
ggtccccaggcaaccatgagggctcagctccaa

SEQ ID NO: 994727 - DNA, 33 bp, Homo sapien
ttgtatgcactataaacagactccagtttgttt

SEQ ID NO: 994728 - DNA, 33 bp, Homo sapien
ttgtatgcactataaagagactccagtttgttt

SEQ ID NO: 994729 - DNA, 33 bp, Homo sapien
tttatgtccctgactgaagttagcttatatgca

SEQ ID NO: 994730 - DNA, 33 bp, Homo sapien
tttatgtccctgactgcagttagcttatatgca

SEQ ID NO: 994731 - DNA, 33 bp, Homo sapien
atacaaggaatgtggaagttttgtgaaagctgc

SEQ ID NO: 994732 - DNA, 33 bp, Homo sapien
atacaaggaatgtggaggttttgtgaaagctgc

SEQ ID NO: 994733 - DNA, 33 bp, Homo sapien
tggacttagcagcaagaccattatgctatttga

SEQ ID NO: 994734 - DNA, 33 bp, Homo sapien
tggacttagcagcaaggccattatgctatttga

SEQ ID NO: 994735 - DNA, 33 bp, Homo sapien
tcattatcgaaggacacagcctctgagcatgct

SEQ ID NO: 994736 - DNA, 33 bp, Homo sapien
tcattatcgaaggacagagcctctgagcatgct

SEQ ID NO: 994737 - DNA, 33 bp, Homo sapien
actttgggcttgaccacgtaagaatgacagagg

SEQ ID NO: 994738 - DNA, 33 bp, Homo sapien
actttgggcttgaccaggtaagaatgacagagg

SEQ ID NO: 994739 - DNA, 33 bp, Homo sapien
agatgacatagttgataaggaaaagtgtccttc

SEQ ID NO: 994740 - DNA, 33 bp, Homo sapien
agatgacatagttgatcaggaaaagtgtccttc

SEQ ID NO: 994741 - DNA, 33 bp, Homo sapien
cagagaagtcagcagacagcgaccttagagaca

SEQ ID NO: 994742 - DNA, 33 bp, Homo sapien
cagagaagtcagcagagagcgaccttagagaca

SEQ ID NO: 994743 - DNA, 33 bp, Homo sapien
ctagaagtatgtaagtaaagattgagatatata

SEQ ID NO: 994744 - DNA, 33 bp, Homo sapien
ctagaagtatgtaagtgaagattgagatatata

SEQ ID NO: 994745 - DNA, 33 bp, Homo sapien
atgattgatctgttggcaaagtgtctaaattta

SEQ ID NO: 994746 - DNA, 33 bp, Homo sapien
atgattgatctgttggtaaagtgtctaaattta

SEQ ID NO: 994747 - DNA, 33 bp, Homo sapien
gtctttgtttgtgttaagagctgaatcccagct

SEQ ID NO: 994748 - DNA, 33 bp, Homo sapien
gtctttgtttgtgttacgagctgaatcccagct

SEQ ID NO: 994749 - DNA, 33 bp, Homo sapien
tattaaagcggaatgtaaaatcgtaatgtgaac

SEQ ID NO: 994750 - DNA, 33 bp, Homo sapien
tattaaagcggaatgtgaaatcgtaatgtgaac

SEQ ID NO: 994751 - DNA, 33 bp, Homo sapien
gtccaatccaagtcacaagaccagatccattat

SEQ ID NO: 994752 - DNA, 33 bp, Homo sapien
gtccaatccaagtcactagaccagatccattat

SEQ ID NO: 994753 - DNA, 33 bp, Homo sapien
gagagacttggcaaaacggccagggttgctcaa

SEQ ID NO: 994754 - DNA, 33 bp, Homo sapien
gagagacttggcaaaatggccagggttgctcaa

SEQ ID NO: 994755 - DNA, 33 bp, Homo sapien
gaaccacacataagggacccattgccaattgag

SEQ ID NO: 994756 - DNA, 33 bp, Homo sapien
gaaccacacataaggggcccattgccaattgag

SEQ ID NO: 994757 - DNA, 33 bp, Homo sapien
gtgcttggtaaatgctcactgaattattccaag

SEQ ID NO: 994758 - DNA, 33 bp, Homo sapien
gtgcttggtaaatgctgactgaattattccaag

SEQ ID NO: 994759 - DNA, 33 bp, Homo sapien
aatgagaatttggtgagattacctatgtcaata

SEQ ID NO: 994760 - DNA, 33 bp, Homo sapien
aatgagaatttggtgatattacctatgtcaata

SEQ ID NO: 994761 - DNA, 33 bp, Homo sapien
gatccagactttggaacagagaataaagaataa

SEQ ID NO: 994762 - DNA, 33 bp, Homo sapien
gatccagactttggaagagagaataaagaataa

SEQ ID NO: 994763 - DNA, 33 bp, Homo sapien
tgcagctttggcaagcaataggaagaaggctgc

SEQ ID NO: 994764 - DNA, 33 bp, Homo sapien
tgcagctttggcaagcgataggaagaaggctgc

SEQ ID NO: 994765 - DNA, 33 bp, Homo sapien
tgtgtgggagaaaggacggaaggcctgagtaag

SEQ ID NO: 994766 - DNA, 33 bp, Homo sapien
tgtgtgggagaaaggatggaaggcctgagtaag

SEQ ID NO: 994767 - DNA, 33 bp, Homo sapien
gtggtcctgggaaaaacgcacagatcgacagga

SEQ ID NO: 994768 - DNA, 33 bp, Homo sapien
gtggtcctgggaaaaatgcacagatcgacagga

SEQ ID NO: 994769 - DNA, 33 bp, Homo sapien
aaagtgtctaaaggcaagacgatgatcaatgat

SEQ ID NO: 994770 - DNA, 33 bp, Homo sapien
aaagtgtctaaaggcaggacgatgatcaatgat

SEQ ID NO: 994771 - DNA, 33 bp, Homo sapien
cttgctttctccccgccaaaattaggtgtgtga

SEQ ID NO: 994772 - DNA, 33 bp, Homo sapien
cttgctttctccccgctaaaattaggtgtgtga

SEQ ID NO: 994773 - DNA, 33 bp, Homo sapien
gaagaaaaatagactgaattgtcttgcttaggt

SEQ ID NO: 994774 - DNA, 33 bp, Homo sapien
gaagaaaaatagactgcattgtcttgcttaggt

SEQ ID NO: 994775 - DNA, 33 bp, Homo sapien
acatatggtatacgctaaacaacaaaatgggcc

SEQ ID NO: 994776 - DNA, 33 bp, Homo sapien
acatatggtatacgctgaacaacaaaatgggcc

SEQ ID NO: 994777 - DNA, 33 bp, Homo sapien
agtcatttgtgaaggacgcagatcttgagtgtt

SEQ ID NO: 994778 - DNA, 33 bp, Homo sapien
agtcatttgtgaaggaggcagatcttgagtgtt

SEQ ID NO: 994779 - DNA, 33 bp, Homo sapien
ccaggtgatgctaatgcagccgctcagccaggc

SEQ ID NO: 994780 - DNA, 33 bp, Homo sapien
ccaggtgatgctaatgtagccgctcagccaggc

SEQ ID NO: 994781 - DNA, 33 bp, Homo sapien
atggttacagtattaccgcccaattcttagtgt

SEQ ID NO: 994782 - DNA, 33 bp, Homo sapien
atggttacagtattactgcccaattcttagtgt

SEQ ID NO: 994783 - DNA, 33 bp, Homo sapien
ctgctaacctggggaacatgtgtcttatcaatg

SEQ ID NO: 994784 - DNA, 33 bp, Homo sapien
ctgctaacctggggaatatgtgtcttatcaatg

SEQ ID NO: 994785 - DNA, 33 bp, Homo sapien
gtgtctatggttgtccgatcggcacgggtgaaa

SEQ ID NO: 994786 - DNA, 33 bp, Homo sapien
gtgtctatggttgtcctatcggcacgggtgaaa

SEQ ID NO: 994787 - DNA, 33 bp, Homo sapien
aatttacattaacaaaaccatgcaaaaaaagac

SEQ ID NO: 994788 - DNA, 33 bp, Homo sapien
aatttacattaacaaatccatgcaaaaaaagac

SEQ ID NO: 994789 - DNA, 33 bp, Homo sapien
gttaaactttatttccaatattcacactcaact

SEQ ID NO: 994790 - DNA, 33 bp, Homo sapien
gttaaactttatttccgatattcacactcaact

SEQ ID NO: 994791 - DNA, 33 bp, Homo sapien
gtcaattgttaaatacactttccactatatttt

SEQ ID NO: 994792 - DNA, 33 bp, Homo sapien
gtcaattgttaaatacgctttccactatatttt

SEQ ID NO: 994793 - DNA, 33 bp, Homo sapien
cacaaatcattatgcaactcctgctcagtgaga

SEQ ID NO: 994794 - DNA, 33 bp, Homo sapien
cacaaatcattatgcagctcctgctcagtgaga

SEQ ID NO: 994795 - DNA, 33 bp, Homo sapien
atttttacctctgaaaactccattgtgtttacc

SEQ ID NO: 994796 - DNA, 33 bp, Homo sapien
atttttacctctgaaagctccattgtgtttacc

SEQ ID NO: 994797 - DNA, 33 bp, Homo sapien
aaagacacctgctcgtaaatgcaaaatgagcct

SEQ ID NO: 994798 - DNA, 33 bp, Homo sapien
aaagacacctgctcgtcaatgcaaaatgagcct

SEQ ID NO: 994799 - DNA, 33 bp, Homo sapien
cagttacagacagcacaacctatactatggcta

SEQ ID NO: 994800 - DNA, 33 bp, Homo sapien
cagttacagacagcaccacctatactatggcta

SEQ ID NO: 994801 - DNA, 33 bp, Homo sapien
gttgtgaaagccctgaaagcaggtcacaggggc

SEQ ID NO: 994802 - DNA, 33 bp, Homo sapien
gttgtgaaagccctgacagcaggtcacaggggc

SEQ ID NO: 994803 - DNA, 33 bp, Homo sapien
attgttgttattacaaaaactcaatgagacatg

SEQ ID NO: 994804 - DNA, 33 bp, Homo sapien
attgttgttattacaagaactcaatgagacatg

SEQ ID NO: 994805 - DNA, 33 bp, Homo sapien
aaatccaggtgacaaaccttgtgcaaaacagct

SEQ ID NO: 994806 - DNA, 33 bp, Homo sapien
aaatccaggtgacaaatcttgtgcaaaacagct

SEQ ID NO: 994807 - DNA, 33 bp, Homo sapien
gtctgtgagctatgtcaaaagaaatgcttctgg

SEQ ID NO: 994808 - DNA, 33 bp, Homo sapien
gtctgtgagctatgtcgaaagaaatgcttctgg

SEQ ID NO: 994809 - DNA, 33 bp, Homo sapien
gtcctaacaaacagaagagaaacatgagggagg

SEQ ID NO: 994810 - DNA, 33 bp, Homo sapien
gtcctaacaaacagaatagaaacatgagggagg

SEQ ID NO: 994811 - DNA, 33 bp, Homo sapien
cttatttcactacgaaccctccatttttttctt

SEQ ID NO: 994812 - DNA, 33 bp, Homo sapien
cttatttcactacgaatcctccatttttttctt

SEQ ID NO: 994813 - DNA, 33 bp, Homo sapien
aagctgggccgtcttacaaggcaggagccagtg

SEQ ID NO: 994814 - DNA, 33 bp, Homo sapien
aagctgggccgtcttagaaggcaggagccagtg

SEQ ID NO: 994815 - DNA, 33 bp, Homo sapien
gtttctcaaaagactcaagagaagttgggaatt

SEQ ID NO: 994816 - DNA, 33 bp, Homo sapien
gtttctcaaaagactcgagagaagttgggaatt

SEQ ID NO: 994817 - DNA, 33 bp, Homo sapien
gtactatcaactaaaagcacacaatataaattt

SEQ ID NO: 994818 - DNA, 33 bp, Homo sapien
gtactatcaactaaaatcacacaatataaattt

SEQ ID NO: 994819 - DNA, 33 bp, Homo sapien
ccattagcagatcttcacagtagggaaggatga

SEQ ID NO: 994820 - DNA, 33 bp, Homo sapien
ccattagcagatcttcgcagtagggaaggatga

SEQ ID NO: 994821 - DNA, 33 bp, Homo sapien
cagttttattccacagccaagagaatattgtag

SEQ ID NO: 994822 - DNA, 33 bp, Homo sapien
cagttttattccacaggcaagagaatattgtag

SEQ ID NO: 994823 - DNA, 33 bp, Homo sapien
ttatagagctaataaacggaaatgcatacttgc

SEQ ID NO: 994824 - DNA, 33 bp, Homo sapien
ttatagagctaataaagggaaatgcatacttgc

SEQ ID NO: 994825 - DNA, 33 bp, Homo sapien
agagtttatgggattccaggattgttctatttc

SEQ ID NO: 994826 - DNA, 33 bp, Homo sapien
agagtttatgggattctaggattgttctatttc

SEQ ID NO: 994827 - DNA, 33 bp, Homo sapien
atgataacgtttaacactaaaaccacatgggcc

SEQ ID NO: 994828 - DNA, 33 bp, Homo sapien
atgataacgtttaacagtaaaaccacatgggcc

SEQ ID NO: 994829 - DNA, 33 bp, Homo sapien
tacctatctatgagtacggagtccatgaggaaa

SEQ ID NO: 994830 - DNA, 33 bp, Homo sapien
tacctatctatgagtatggagtccatgaggaaa

SEQ ID NO: 994831 - DNA, 33 bp, Homo sapien
gctcacccaaaatcaacagactttgatgctcta

SEQ ID NO: 994832 - DNA, 33 bp, Homo sapien
gctcacccaaaatcaatagactttgatgctcta

SEQ ID NO: 994833 - DNA, 33 bp, Homo sapien
actgtacaataatagaagtgttatcacaagtgc

SEQ ID NO: 994834 - DNA, 33 bp, Homo sapien
actgtacaataatagaggtgttatcacaagtgc

SEQ ID NO: 994835 - DNA, 33 bp, Homo sapien
catgattcactatgtaaatctactcttaagcat

SEQ ID NO: 994836 - DNA, 33 bp, Homo sapien
catgattcactatgtacatctactcttaagcat

SEQ ID NO: 994837 - DNA, 33 bp, Homo sapien
tcctgagggtgggaacacagttttgaggtcaat

SEQ ID NO: 994838 - DNA, 33 bp, Homo sapien
tcctgagggtgggaacccagttttgaggtcaat

SEQ ID NO: 994839 - DNA, 33 bp, Homo sapien
aggttttggtacatagcatatgctcaataaata

SEQ ID NO: 994840 - DNA, 33 bp, Homo sapien
aggttttggtacatagtatatgctcaataaata

SEQ ID NO: 994841 - DNA, 33 bp, Homo sapien
atcacaggccatctacaatttcttcaactctta

SEQ ID NO: 994842 - DNA, 33 bp, Homo sapien
atcacaggccatctaccatttcttcaactctta

SEQ ID NO: 994843 - DNA, 33 bp, Homo sapien
tctgttgctctctatccctttatctggcactaa

SEQ ID NO: 994844 - DNA, 33 bp, Homo sapien
tctgttgctctctatctctttatctggcactaa

SEQ ID NO: 994845 - DNA, 33 bp, Homo sapien
ttattgatgagataacagaagttagaggtagat

SEQ ID NO: 994846 - DNA, 33 bp, Homo sapien
ttattgatgagataacggaagttagaggtagat

SEQ ID NO: 994847 - DNA, 33 bp, Homo sapien
attcacaacaattacacacaaagtctacattgt

SEQ ID NO: 994848 - DNA, 33 bp, Homo sapien
attcacaacaattacatacaaagtctacattgt

SEQ ID NO: 994849 - DNA, 33 bp, Homo sapien
agtgatctggtgtccaagaagactctagaatcc

SEQ ID NO: 994850 - DNA, 33 bp, Homo sapien
agtgatctggtgtccaggaagactctagaatcc

SEQ ID NO: 994851 - DNA, 33 bp, Homo sapien
ctaaatgtgcacagtaactataccttatttgat

SEQ ID NO: 994852 - DNA, 33 bp, Homo sapien
ctaaatgtgcacagtacctataccttatttgat

SEQ ID NO: 994853 - DNA, 33 bp, Homo sapien
caaggcaggacaaacactggaatgcaattttta

SEQ ID NO: 994854 - DNA, 33 bp, Homo sapien
caaggcaggacaaacattggaatgcaattttta

SEQ ID NO: 994855 - DNA, 33 bp, Homo sapien
attgttttcctatatgcatcacaaattggagac

SEQ ID NO: 994856 - DNA, 33 bp, Homo sapien
attgttttcctatatggatcacaaattggagac

SEQ ID NO: 994857 - DNA, 33 bp, Homo sapien
cacagcgttagtggagaaatagctcactaatat

SEQ ID NO: 994858 - DNA, 33 bp, Homo sapien
cacagcgttagtggaggaatagctcactaatat

SEQ ID NO: 994859 - DNA, 33 bp, Homo sapien
tctggtcctttattcaacttttgcttctagtag

SEQ ID NO: 994860 - DNA, 33 bp, Homo sapien
tctggtcctttattcatcttttgcttctagtag

SEQ ID NO: 994861 - DNA, 33 bp, Homo sapien
ggcttctgggaaaagaagttatggtaagattcc

SEQ ID NO: 994862 - DNA, 33 bp, Homo sapien
ggcttctgggaaaagatgttatggtaagattcc

SEQ ID NO: 994863 - DNA, 33 bp, Homo sapien
catcatcagcctaagacgaagctggttgggtat

SEQ ID NO: 994864 - DNA, 33 bp, Homo sapien
catcatcagcctaagatgaagctggttgggtat

SEQ ID NO: 994865 - DNA, 33 bp, Homo sapien
tagttgtcatcagaaccagctggagaccttctg

SEQ ID NO: 994866 - DNA, 33 bp, Homo sapien
tagttgtcatcagaactagctggagaccttctg

SEQ ID NO: 994867 - DNA, 33 bp, Homo sapien
acagaaatagctgaaaatcatttttaaacacaa

SEQ ID NO: 994868 - DNA, 33 bp, Homo sapien
acagaaatagctgaaactcatttttaaacacaa

SEQ ID NO: 994869 - DNA, 33 bp, Homo sapien
tactgactgtgttttagaccctgcacagtctga

SEQ ID NO: 994870 - DNA, 33 bp, Homo sapien
tactgactgtgttttataccctgcacagtctga

SEQ ID NO: 994871 - DNA, 33 bp, Homo sapien
ttcattctcacactcaaatctctgcaggtggtt

SEQ ID NO: 994872 - DNA, 33 bp, Homo sapien
ttcattctcacactcacatctctgcaggtggtt

SEQ ID NO: 994873 - DNA, 33 bp, Homo sapien
gggattatgtgctctgcaatttggtcttgacaa

SEQ ID NO: 994874 - DNA, 33 bp, Homo sapien
gggattatgtgctctgtaatttggtcttgacaa

SEQ ID NO: 994875 - DNA, 33 bp, Homo sapien
agaggtatagaggtgaacattctgagcagtgat

SEQ ID NO: 994876 - DNA, 33 bp, Homo sapien
agaggtatagaggtgagcattctgagcagtgat

SEQ ID NO: 994877 - DNA, 33 bp, Homo sapien
tgttgtcatgtttcagcaaaataatcaaaagga

SEQ ID NO: 994878 - DNA, 33 bp, Homo sapien
tgttgtcatgtttcaggaaaataatcaaaagga

SEQ ID NO: 994879 - DNA, 33 bp, Homo sapien
attggttccattccaaaaggcctttccccaaga

SEQ ID NO: 994880 - DNA, 33 bp, Homo sapien
attggttccattccaagaggcctttccccaaga

SEQ ID NO: 994881 - DNA, 33 bp, Homo sapien
ctgtcaatactgttaaaaggcaatgcacttctc

SEQ ID NO: 994882 - DNA, 33 bp, Homo sapien
ctgtcaatactgttaagaggcaatgcacttctc

SEQ ID NO: 994883 - DNA, 33 bp, Homo sapien
tcacttgactatactacgaatgttctttcagat

SEQ ID NO: 994884 - DNA, 33 bp, Homo sapien
tcacttgactatactatgaatgttctttcagat

SEQ ID NO: 994885 - DNA, 33 bp, Homo sapien
tgttgagaaccttgacagcatattataataacc

SEQ ID NO: 994886 - DNA, 33 bp, Homo sapien
tgttgagaaccttgacggcatattataataacc

SEQ ID NO: 994887 - DNA, 33 bp, Homo sapien
tcatagcagcaagagcacagtagatcacaggat

SEQ ID NO: 994888 - DNA, 33 bp, Homo sapien
tcatagcagcaagagcgcagtagatcacaggat

SEQ ID NO: 994889 - DNA, 33 bp, Homo sapien
atttcttctgcaggtgccaccagaaacttcagg

SEQ ID NO: 994890 - DNA, 33 bp, Homo sapien
atttcttctgcaggtgtcaccagaaacttcagg

SEQ ID NO: 994891 - DNA, 33 bp, Homo sapien
gttttcgcatccaaacaattactttttgcaggg

SEQ ID NO: 994892 - DNA, 33 bp, Homo sapien
gttttcgcatccaaacgattactttttgcaggg

SEQ ID NO: 994893 - DNA, 33 bp, Homo sapien
aaaaccagtagagagacacacataatgaatata

SEQ ID NO: 994894 - DNA, 33 bp, Homo sapien
aaaaccagtagagagagacacataatgaatata

SEQ ID NO: 994895 - DNA, 33 bp, Homo sapien
atggagaacgttttaaagagagaatgagggtat

SEQ ID NO: 994896 - DNA, 33 bp, Homo sapien
atggagaacgttttaaggagagaatgagggtat

SEQ ID NO: 994897 - DNA, 33 bp, Homo sapien
tgtgccaagaatcttccataacaccacacagca

SEQ ID NO: 994898 - DNA, 33 bp, Homo sapien
tgtgccaagaatcttcgataacaccacacagca

SEQ ID NO: 994899 - DNA, 33 bp, Homo sapien
aatattgcacaaaatcaatatgactataaaact

SEQ ID NO: 994900 - DNA, 33 bp, Homo sapien
aatattgcacaaaatcgatatgactataaaact

SEQ ID NO: 994901 - DNA, 33 bp, Homo sapien
aacagctagctctaaactcaggctgctcattaa

SEQ ID NO: 994902 - DNA, 33 bp, Homo sapien
aacagctagctctaaattcaggctgctcattaa

SEQ ID NO: 994903 - DNA, 33 bp, Homo sapien
catctgtgaggcatgagaacactagtttcaaca

SEQ ID NO: 994904 - DNA, 33 bp, Homo sapien
catctgtgaggcatgataacactagtttcaaca

SEQ ID NO: 994905 - DNA, 33 bp, Homo sapien
catgcagaggaaagacaatgtaaggacacaggg

SEQ ID NO: 994906 - DNA, 33 bp, Homo sapien
catgcagaggaaagaccatgtaaggacacaggg

SEQ ID NO: 994907 - DNA, 33 bp, Homo sapien
taggtccctaatctaacaagactgatggctcca

SEQ ID NO: 994908 - DNA, 33 bp, Homo sapien
taggtccctaatctaataagactgatggctcca

SEQ ID NO: 994909 - DNA, 33 bp, Homo sapien
ttttgcttaagctagaataattcaccttatgtc

SEQ ID NO: 994910 - DNA, 33 bp, Homo sapien
ttttgcttaagctagagtaattcaccttatgtc

SEQ ID NO: 994911 - DNA, 33 bp, Homo sapien
tgcccctgggtcagaactccatgcttagtctaa

SEQ ID NO: 994912 - DNA, 33 bp, Homo sapien
tgcccctgggtcagaagtccatgcttagtctaa

SEQ ID NO: 994913 - DNA, 33 bp, Homo sapien
tgcttccctcctataacagcgggtgcctgggcc

SEQ ID NO: 994914 - DNA, 33 bp, Homo sapien
tgcttccctcctataagagcgggtgcctgggcc

SEQ ID NO: 994915 - DNA, 33 bp, Homo sapien
caaatgggtggagtcacgtcaagataatataac

SEQ ID NO: 994916 - DNA, 33 bp, Homo sapien
caaatgggtggagtcaggtcaagataatataac

SEQ ID NO: 994917 - DNA, 33 bp, Homo sapien
tacagtgtgcaattgacgaaatttactgtccac

SEQ ID NO: 994918 - DNA, 33 bp, Homo sapien
tacagtgtgcaattgatgaaatttactgtccac

SEQ ID NO: 994919 - DNA, 33 bp, Homo sapien
aaaaatctggcaaaatcagtgaaagagaatttc

SEQ ID NO: 994920 - DNA, 33 bp, Homo sapien
aaaaatctggcaaaattagtgaaagagaatttc

SEQ ID NO: 994921 - DNA, 33 bp, Homo sapien
tactcaactgactttaaagattttatttgatct

SEQ ID NO: 994922 - DNA, 33 bp, Homo sapien
tactcaactgactttagagattttatttgatct

SEQ ID NO: 994923 - DNA, 33 bp, Homo sapien
actgaactgtttaatcaattcacctggacacat

SEQ ID NO: 994924 - DNA, 33 bp, Homo sapien
actgaactgtttaatcgattcacctggacacat

SEQ ID NO: 994925 - DNA, 33 bp, Homo sapien
tacatggggctgtgaacttagggaatgtcctca

SEQ ID NO: 994926 - DNA, 33 bp, Homo sapien
tacatggggctgtgaatttagggaatgtcctca

SEQ ID NO: 994927 - DNA, 33 bp, Homo sapien
gacccattgtcattcacaaatatttccaatgtg

SEQ ID NO: 994928 - DNA, 33 bp, Homo sapien
gacccattgtcattcataaatatttccaatgtg

SEQ ID NO: 994929 - DNA, 33 bp, Homo sapien
agttaatgagatttcacacaggagattgaaggc

SEQ ID NO: 994930 - DNA, 33 bp, Homo sapien
agttaatgagatttcagacaggagattgaaggc

SEQ ID NO: 994931 - DNA, 33 bp, Homo sapien
tgtgcacatcgtaggcacaaaaggaattctaac

SEQ ID NO: 994932 - DNA, 33 bp, Homo sapien
tgtgcacatcgtaggcgcaaaaggaattctaac

SEQ ID NO: 994933 - DNA, 33 bp, Homo sapien
cttgagtccaatattacacacatagcacatgaa

SEQ ID NO: 994934 - DNA, 33 bp, Homo sapien
cttgagtccaatattatacacatagcacatgaa

SEQ ID NO: 994935 - DNA, 33 bp, Homo sapien
atcttctgtcactttacggaaatgaaacttgga

SEQ ID NO: 994936 - DNA, 33 bp, Homo sapien
atcttctgtcactttatggaaatgaaacttgga

SEQ ID NO: 994937 - DNA, 33 bp, Homo sapien
ctttcccttaactcatcacatcagagtcaacag

SEQ ID NO: 994938 - DNA, 33 bp, Homo sapien
ctttcccttaactcattacatcagagtcaacag

SEQ ID NO: 994939 - DNA, 33 bp, Homo sapien
ggcctgagagtgctgaaaagtgctgttcttgca

SEQ ID NO: 994940 - DNA, 33 bp, Homo sapien
ggcctgagagtgctgagaagtgctgttcttgca

SEQ ID NO: 994941 - DNA, 33 bp, Homo sapien
agatgcaatcgaagaaacacccgtgattttcct

SEQ ID NO: 994942 - DNA, 33 bp, Homo sapien
agatgcaatcgaagaagcacccgtgattttcct

SEQ ID NO: 994943 - DNA, 33 bp, Homo sapien
tttgtccgtttccccaacacaatgcctgctata

SEQ ID NO: 994944 - DNA, 33 bp, Homo sapien
tttgtccgtttccccagcacaatgcctgctata

SEQ ID NO: 994945 - DNA, 33 bp, Homo sapien
tcttgccccacataggcagtgttaaatcaagcc

SEQ ID NO: 994946 - DNA, 33 bp, Homo sapien
tcttgccccacataggtagtgttaaatcaagcc

SEQ ID NO: 994947 - DNA, 33 bp, Homo sapien
ttctttttgtttgtacccctcctgcaacacttg

SEQ ID NO: 994948 - DNA, 33 bp, Homo sapien
ttctttttgtttgtactcctcctgcaacacttg

SEQ ID NO: 994949 - DNA, 33 bp, Homo sapien
acccattaatcctgaaactaccatgttcaaaat

SEQ ID NO: 994950 - DNA, 33 bp, Homo sapien
acccattaatcctgaatctaccatgttcaaaat

SEQ ID NO: 994951 - DNA, 33 bp, Homo sapien
tccttccaaatgtttcactctgagcagcttatt

SEQ ID NO: 994952 - DNA, 33 bp, Homo sapien
tccttccaaatgtttcgctctgagcagcttatt

SEQ ID NO: 994953 - DNA, 33 bp, Homo sapien
aatccttagtcctataacatcactcatggtctc

SEQ ID NO: 994954 - DNA, 33 bp, Homo sapien
aatccttagtcctatagcatcactcatggtctc

SEQ ID NO: 994955 - DNA, 33 bp, Homo sapien
gactaaggattacatgacatgatttttaaagcc

SEQ ID NO: 994956 - DNA, 33 bp, Homo sapien
gactaaggattacatggcatgatttttaaagcc

SEQ ID NO: 994957 - DNA, 33 bp, Homo sapien
ttttttttcctaaaatcatcttcagactgccat

SEQ ID NO: 994958 - DNA, 33 bp, Homo sapien
ttttttttcctaaaattatcttcagactgccat

SEQ ID NO: 994959 - DNA, 33 bp, Homo sapien
aagttctgttctaccacgaatgcctggcacccc

SEQ ID NO: 994960 - DNA, 33 bp, Homo sapien
aagttctgttctaccatgaatgcctggcacccc

SEQ ID NO: 994961 - DNA, 33 bp, Homo sapien
ccatttccttccatagcaaagattccgtttatt

SEQ ID NO: 994962 - DNA, 33 bp, Homo sapien
ccatttccttccatagtaaagattccgtttatt

SEQ ID NO: 994963 - DNA, 33 bp, Homo sapien
gcagttgacaggtttacgcctcatgacgggcgt

SEQ ID NO: 994964 - DNA, 33 bp, Homo sapien
gcagttgacaggtttatgcctcatgacgggcgt

SEQ ID NO: 994965 - DNA, 33 bp, Homo sapien
gtagctggtgtaacctaaataatttcccaggct

SEQ ID NO: 994966 - DNA, 33 bp, Homo sapien
gtagctggtgtaacctgaataatttcccaggct

SEQ ID NO: 994967 - DNA, 33 bp, Homo sapien
gtaatccttggaaatacagtgtagaaacagaat

SEQ ID NO: 994968 - DNA, 33 bp, Homo sapien
gtaatccttggaaatatagtgtagaaacagaat

SEQ ID NO: 994969 - DNA, 33 bp, Homo sapien
cccccacaggaatttaagatacagtacgagtca

SEQ ID NO: 994970 - DNA, 33 bp, Homo sapien
cccccacaggaatttaggatacagtacgagtca

SEQ ID NO: 994971 - DNA, 33 bp, Homo sapien
ttcatctatttaaccactgaaaatttcatattc

SEQ ID NO: 994972 - DNA, 33 bp, Homo sapien
ttcatctatttaaccattgaaaatttcatattc

SEQ ID NO: 994973 - DNA, 33 bp, Homo sapien
tgttttttaattctaacacttcaactcagagtg

SEQ ID NO: 994974 - DNA, 33 bp, Homo sapien
tgttttttaattctaagacttcaactcagagtg

SEQ ID NO: 994975 - DNA, 33 bp, Homo sapien
tgagatcttaacccccaagttgataatattagg

SEQ ID NO: 994976 - DNA, 33 bp, Homo sapien
tgagatcttaacccccgagttgataatattagg

SEQ ID NO: 994977 - DNA, 33 bp, Homo sapien
aatcattggcagaataaatatttctagttggag

SEQ ID NO: 994978 - DNA, 33 bp, Homo sapien
aatcattggcagaatagatatttctagttggag

SEQ ID NO: 994979 - DNA, 33 bp, Homo sapien
ccagataaggcttcaacgctatgaatggtactg

SEQ ID NO: 994980 - DNA, 33 bp, Homo sapien
ccagataaggcttcaatgctatgaatggtactg

SEQ ID NO: 994981 - DNA, 33 bp, Homo sapien
tgatgatgtgaagggaaaactttgttgaaataa

SEQ ID NO: 994982 - DNA, 33 bp, Homo sapien
tgatgatgtgaagggagaactttgttgaaataa

SEQ ID NO: 994983 - DNA, 33 bp, Homo sapien
tgagtttaacatgaagaactcacattggtaaga

SEQ ID NO: 994984 - DNA, 33 bp, Homo sapien
tgagtttaacatgaaggactcacattggtaaga

SEQ ID NO: 994985 - DNA, 33 bp, Homo sapien
ttagctttcttattcaaactaaaaatgcaaagc

SEQ ID NO: 994986 - DNA, 33 bp, Homo sapien
ttagctttcttattcagactaaaaatgcaaagc

SEQ ID NO: 994987 - DNA, 33 bp, Homo sapien
atgatggattaatcaacttccaagctaatgcat

SEQ ID NO: 994988 - DNA, 33 bp, Homo sapien
atgatggattaatcaatttccaagctaatgcat

SEQ ID NO: 994989 - DNA, 33 bp, Homo sapien
ggagtggttgaaaacaatcacatgatggattaa

SEQ ID NO: 994990 - DNA, 33 bp, Homo sapien
ggagtggttgaaaacattcacatgatggattaa

SEQ ID NO: 994991 - DNA, 33 bp, Homo sapien
tgggtgttggagttggaacttaggtaatggtca

SEQ ID NO: 994992 - DNA, 33 bp, Homo sapien
tgggtgttggagttggcacttaggtaatggtca

SEQ ID NO: 994993 - DNA, 33 bp, Homo sapien
cattttgaaatcctgtaacaaggcaatcagcaa

SEQ ID NO: 994994 - DNA, 33 bp, Homo sapien
cattttgaaatcctgtgacaaggcaatcagcaa

SEQ ID NO: 994995 - DNA, 33 bp, Homo sapien
tcctttatagtttttcaatcaaatggtttggaa

SEQ ID NO: 994996 - DNA, 33 bp, Homo sapien
tcctttatagtttttccatcaaatggtttggaa

SEQ ID NO: 994997 - DNA, 33 bp, Homo sapien
atgcctttctggaaataatccacactctcacct

SEQ ID NO: 994998 - DNA, 33 bp, Homo sapien
atgcctttctggaaatcatccacactctcacct

SEQ ID NO: 994999 - DNA, 33 bp, Homo sapien
catacctcagaccagacgtcaggttctccatgt

SEQ ID NO: 995000 - DNA, 33 bp, Homo sapien
catacctcagaccagatgtcaggttctccatgt

SEQ ID NO: 995001 - DNA, 33 bp, Homo sapien
aaaaggccagatcccacggaaatatgaaagata

SEQ ID NO: 995002 - DNA, 33 bp, Homo sapien
aaaaggccagatcccatggaaatatgaaagata

SEQ ID NO: 995003 - DNA, 33 bp, Homo sapien
ctgcacagtccttccacagagagcatgaggaat

SEQ ID NO: 995004 - DNA, 33 bp, Homo sapien
ctgcacagtccttccatagagagcatgaggaat

SEQ ID NO: 995005 - DNA, 33 bp, Homo sapien
ggtacaacaggttcaaatatgtgttccccctat

SEQ ID NO: 995006 - DNA, 33 bp, Homo sapien
ggtacaacaggttcaagtatgtgttccccctat

SEQ ID NO: 995007 - DNA, 33 bp, Homo sapien
gtcttcaaagcatttgcagttgcagttcccatt

SEQ ID NO: 995008 - DNA, 33 bp, Homo sapien
gtcttcaaagcatttgtagttgcagttcccatt

SEQ ID NO: 995009 - DNA, 33 bp, Homo sapien
tggtatctaaatgatacgcttctaaattatcca

SEQ ID NO: 995010 - DNA, 33 bp, Homo sapien
tggtatctaaatgatatgcttctaaattatcca

SEQ ID NO: 995011 - DNA, 33 bp, Homo sapien
tggaaaatggttttcacagagaattttagcagt

SEQ ID NO: 995012 - DNA, 33 bp, Homo sapien
tggaaaatggttttcatagagaattttagcagt

SEQ ID NO: 995013 - DNA, 33 bp, Homo sapien
atttcttttggcagaacgtgagtgtgagtccca

SEQ ID NO: 995014 - DNA, 33 bp, Homo sapien
atttcttttggcagaatgtgagtgtgagtccca

SEQ ID NO: 995015 - DNA, 33 bp, Homo sapien
acatgttctctctgaaactaaactgttattcca

SEQ ID NO: 995016 - DNA, 33 bp, Homo sapien
acatgttctctctgaatctaaactgttattcca

SEQ ID NO: 995017 - DNA, 33 bp, Homo sapien
tagagagagaaagggaaccacatatgaggcagg

SEQ ID NO: 995018 - DNA, 33 bp, Homo sapien
tagagagagaaagggacccacatatgaggcagg

SEQ ID NO: 995019 - DNA, 33 bp, Homo sapien
gacatacctaagagtaagccatttacaaaagaa

SEQ ID NO: 995020 - DNA, 33 bp, Homo sapien
gacatacctaagagtaggccatttacaaaagaa

SEQ ID NO: 995021 - DNA, 33 bp, Homo sapien
gcacggtacagcctcactcctagcagctttcac

SEQ ID NO: 995022 - DNA, 33 bp, Homo sapien
gcacggtacagcctcattcctagcagctttcac

SEQ ID NO: 995023 - DNA, 33 bp, Homo sapien
tttgagtcaaaaattgcagcgtggtgagtactg

SEQ ID NO: 995024 - DNA, 33 bp, Homo sapien
tttgagtcaaaaattgtagcgtggtgagtactg

SEQ ID NO: 995025 - DNA, 33 bp, Homo sapien
aattgtatcaccattcactggcattagatacaa

SEQ ID NO: 995026 - DNA, 33 bp, Homo sapien
aattgtatcaccattctctggcattagatacaa

SEQ ID NO: 995027 - DNA, 33 bp, Homo sapien
gaactggtacacggtaggttctcaacacatttt

SEQ ID NO: 995028 - DNA, 33 bp, Homo sapien
gaactggtacacggtatgttctcaacacatttt

SEQ ID NO: 995029 - DNA, 33 bp, Homo sapien
aatgcctagttagacaatgacccaaataagaaa

SEQ ID NO: 995030 - DNA, 33 bp, Homo sapien
aatgcctagttagacagtgacccaaataagaaa

SEQ ID NO: 995031 - DNA, 33 bp, Homo sapien
ctagtgcccctgactacccagagcagaatgggg

SEQ ID NO: 995032 - DNA, 33 bp, Homo sapien
ctagtgcccctgactatccagagcagaatgggg

SEQ ID NO: 995033 - DNA, 33 bp, Homo sapien
agtaagttttctatggccatgaactcccaactc

SEQ ID NO: 995034 - DNA, 33 bp, Homo sapien
agtaagttttctatggtcatgaactcccaactc

SEQ ID NO: 995035 - DNA, 33 bp, Homo sapien
ctctgaattctggtctcactgtctcactaacca

SEQ ID NO: 995036 - DNA, 33 bp, Homo sapien
ctctgaattctggtcttactgtctcactaacca

SEQ ID NO: 995037 - DNA, 33 bp, Homo sapien
ctgcacggcagaacaccgaaagtcccagactag

SEQ ID NO: 995038 - DNA, 33 bp, Homo sapien
ctgcacggcagaacactgaaagtcccagactag

SEQ ID NO: 995039 - DNA, 33 bp, Homo sapien
atttgattaggcatccaggagtgtcaggacatc

SEQ ID NO: 995040 - DNA, 33 bp, Homo sapien
atttgattaggcatccgggagtgtcaggacatc

SEQ ID NO: 995041 - DNA, 33 bp, Homo sapien
atggcaaaccaagatgcactctgagctctgaaa

SEQ ID NO: 995042 - DNA, 33 bp, Homo sapien
atggcaaaccaagatggactctgagctctgaaa

SEQ ID NO: 995043 - DNA, 33 bp, Homo sapien
gctgttagccctgatacgtaagctgatcaatta

SEQ ID NO: 995044 - DNA, 33 bp, Homo sapien
gctgttagccctgatatgtaagctgatcaatta

SEQ ID NO: 995045 - DNA, 33 bp, Homo sapien
gtgtgggaaaatgagaaaggagtatagcgtggt

SEQ ID NO: 995046 - DNA, 33 bp, Homo sapien
gtgtgggaaaatgagataggagtatagcgtggt

SEQ ID NO: 995047 - DNA, 33 bp, Homo sapien
aggaagaacaaagagacgaacaggatttaagtc

SEQ ID NO: 995048 - DNA, 33 bp, Homo sapien
aggaagaacaaagagatgaacaggatttaagtc

SEQ ID NO: 995049 - DNA, 33 bp, Homo sapien
cagtgtgtttgttatgcagactatttgtgccta

SEQ ID NO: 995050 - DNA, 33 bp, Homo sapien
cagtgtgtttgttatggagactatttgtgccta

SEQ ID NO: 995051 - DNA, 33 bp, Homo sapien
atagccaaccatggacaaatggatgtgctcttc

SEQ ID NO: 995052 - DNA, 33 bp, Homo sapien
atagccaaccatggaccaatggatgtgctcttc

SEQ ID NO: 995053 - DNA, 33 bp, Homo sapien
ttctctgtccttccaaactgccctgcaattcct

SEQ ID NO: 995054 - DNA, 33 bp, Homo sapien
ttctctgtccttccaacctgccctgcaattcct

SEQ ID NO: 995055 - DNA, 33 bp, Homo sapien
cataagcacatctctccgactctaaagacagtg

SEQ ID NO: 995056 - DNA, 33 bp, Homo sapien
cataagcacatctctctgactctaaagacagtg

SEQ ID NO: 995057 - DNA, 33 bp, Homo sapien
cctggtaggtagcacacgagaagacaccatggg

SEQ ID NO: 995058 - DNA, 33 bp, Homo sapien
cctggtaggtagcacatgagaagacaccatggg

SEQ ID NO: 995059 - DNA, 33 bp, Homo sapien
aaggaagactggttcaaataaggccagcatcct

SEQ ID NO: 995060 - DNA, 33 bp, Homo sapien
aaggaagactggttcagataaggccagcatcct

SEQ ID NO: 995061 - DNA, 33 bp, Homo sapien
ttacagggtcaggttgacaaatgggtatgaccc

SEQ ID NO: 995062 - DNA, 33 bp, Homo sapien
ttacagggtcaggttggcaaatgggtatgaccc

SEQ ID NO: 995063 - DNA, 33 bp, Homo sapien
ttctctagttgatggcaagggcatggagattaa

SEQ ID NO: 995064 - DNA, 33 bp, Homo sapien
ttctctagttgatggcgagggcatggagattaa

SEQ ID NO: 995065 - DNA, 33 bp, Homo sapien
ctttcattgaaactaaaaccttgcacctagcca

SEQ ID NO: 995066 - DNA, 33 bp, Homo sapien
ctttcattgaaactaagaccttgcacctagcca

SEQ ID NO: 995067 - DNA, 33 bp, Homo sapien
actcctaccatagttcaccaatccctgagtcct

SEQ ID NO: 995068 - DNA, 33 bp, Homo sapien
actcctaccatagttcgccaatccctgagtcct

SEQ ID NO: 995069 - DNA, 33 bp, Homo sapien
ccatgctcataagcaccacattgtccaaaccat

SEQ ID NO: 995070 - DNA, 33 bp, Homo sapien
ccatgctcataagcactacattgtccaaaccat

SEQ ID NO: 995071 - DNA, 33 bp, Homo sapien
agctaacaaccatgataaaacattacaggaggt

SEQ ID NO: 995072 - DNA, 33 bp, Homo sapien
agctaacaaccatgatgaaacattacaggaggt

SEQ ID NO: 995073 - DNA, 33 bp, Homo sapien
aattccgatattacagaatgctagttattatcc

SEQ ID NO: 995074 - DNA, 33 bp, Homo sapien
aattccgatattacagcatgctagttattatcc

SEQ ID NO: 995075 - DNA, 33 bp, Homo sapien
gacagacaagggaatacattttgtgttgcatta

SEQ ID NO: 995076 - DNA, 33 bp, Homo sapien
gacagacaagggaatatattttgtgttgcatta

SEQ ID NO: 995077 - DNA, 33 bp, Homo sapien
tgaaatgacagtttaacaacaaggtggccaggc

SEQ ID NO: 995078 - DNA, 33 bp, Homo sapien
tgaaatgacagtttaagaacaaggtggccaggc

SEQ ID NO: 995079 - DNA, 33 bp, Homo sapien
gctacctcaacctcaagagctaccaccacttcc

SEQ ID NO: 995080 - DNA, 33 bp, Homo sapien
gctacctcaacctcaatagctaccaccacttcc

SEQ ID NO: 995081 - DNA, 33 bp, Homo sapien
tgaagcaagtcaaccaagccataagctgtgcaa

SEQ ID NO: 995082 - DNA, 33 bp, Homo sapien
tgaagcaagtcaaccaggccataagctgtgcaa

SEQ ID NO: 995083 - DNA, 33 bp, Homo sapien
ttttatccaggtatcaaccattccgtgcatcag

SEQ ID NO: 995084 - DNA, 33 bp, Homo sapien
ttttatccaggtatcacccattccgtgcatcag

SEQ ID NO: 995085 - DNA, 33 bp, Homo sapien
ttaggaatgttagagacgacctgctctgaacat

SEQ ID NO: 995086 - DNA, 33 bp, Homo sapien
ttaggaatgttagagatgacctgctctgaacat

SEQ ID NO: 995087 - DNA, 33 bp, Homo sapien
gtccccagaagaggaacaaaacaggaacccagt

SEQ ID NO: 995088 - DNA, 33 bp, Homo sapien
gtccccagaagaggaataaaacaggaacccagt

SEQ ID NO: 995089 - DNA, 33 bp, Homo sapien
tcccataggattatatcaggaaaggcccaagtg

SEQ ID NO: 995090 - DNA, 33 bp, Homo sapien
tcccataggattatatgaggaaaggcccaagtg

SEQ ID NO: 995091 - DNA, 33 bp, Homo sapien
cattggcaaagcacataacttctcagtcaggac

SEQ ID NO: 995092 - DNA, 33 bp, Homo sapien
cattggcaaagcacatcacttctcagtcaggac

SEQ ID NO: 995093 - DNA, 33 bp, Homo sapien
ttacacacacacaaacaactgtgactgaattaa

SEQ ID NO: 995094 - DNA, 33 bp, Homo sapien
ttacacacacacaaaccactgtgactgaattaa

SEQ ID NO: 995095 - DNA, 33 bp, Homo sapien
ttcttcttctatcagcaccttgtgtctgacatc

SEQ ID NO: 995096 - DNA, 33 bp, Homo sapien
ttcttcttctatcagctccttgtgtctgacatc

SEQ ID NO: 995097 - DNA, 33 bp, Homo sapien
cagtgaatgacagagccgaaaccaaacccatgg

SEQ ID NO: 995098 - DNA, 33 bp, Homo sapien
cagtgaatgacagagctgaaaccaaacccatgg

SEQ ID NO: 995099 - DNA, 33 bp, Homo sapien
tccagtcaaaattttacgtttggaagtgaatct

SEQ ID NO: 995100 - DNA, 33 bp, Homo sapien
tccagtcaaaattttatgtttggaagtgaatct

SEQ ID NO: 995101 - DNA, 33 bp, Homo sapien
tgatgcaaagaaaagaaatgttcgaatgctaac

SEQ ID NO: 995102 - DNA, 33 bp, Homo sapien
tgatgcaaagaaaagagatgttcgaatgctaac

SEQ ID NO: 995103 - DNA, 33 bp, Homo sapien
gtaacgataacatggacggtagaatagttttga

SEQ ID NO: 995104 - DNA, 33 bp, Homo sapien
gtaacgataacatggatggtagaatagttttga

SEQ ID NO: 995105 - DNA, 33 bp, Homo sapien
ggactgtaggtaataacagtgtcatgtagtcag

SEQ ID NO: 995106 - DNA, 33 bp, Homo sapien
ggactgtaggtaataatagtgtcatgtagtcag

SEQ ID NO: 995107 - DNA, 33 bp, Homo sapien
catgcttcaacatctacatcaaatgacaactgt

SEQ ID NO: 995108 - DNA, 33 bp, Homo sapien
catgcttcaacatctatatcaaatgacaactgt

SEQ ID NO: 995109 - DNA, 33 bp, Homo sapien
tcttatatcctccccccacaagcttggagtttc

SEQ ID NO: 995110 - DNA, 33 bp, Homo sapien
tcttatatcctcccccgacaagcttggagtttc

SEQ ID NO: 995111 - DNA, 33 bp, Homo sapien
atgctccagccataccaaacaactggcaattat

SEQ ID NO: 995112 - DNA, 33 bp, Homo sapien
atgctccagccataccgaacaactggcaattat

SEQ ID NO: 995113 - DNA, 33 bp, Homo sapien
ggtggcagtatggaaaaagattaatggaccaca

SEQ ID NO: 995114 - DNA, 33 bp, Homo sapien
ggtggcagtatggaaagagattaatggaccaca

SEQ ID NO: 995115 - DNA, 33 bp, Homo sapien
tgagacagcttggccaagtttggaaggtacaaa

SEQ ID NO: 995116 - DNA, 33 bp, Homo sapien
tgagacagcttggccaggtttggaaggtacaaa

SEQ ID NO: 995117 - DNA, 33 bp, Homo sapien
caagattgtggagtaaaaggaatgcttatacac

SEQ ID NO: 995118 - DNA, 33 bp, Homo sapien
caagattgtggagtaagaggaatgcttatacac

SEQ ID NO: 995119 - DNA, 33 bp, Homo sapien
cattctgatttcctcaagtagttccatgcctgc

SEQ ID NO: 995120 - DNA, 33 bp, Homo sapien
cattctgatttcctcaggtagttccatgcctgc

SEQ ID NO: 995121 - DNA, 33 bp, Homo sapien
accttcccaggtacaacattcagtttagccctt

SEQ ID NO: 995122 - DNA, 33 bp, Homo sapien
accttcccaggtacaagattcagtttagccctt

SEQ ID NO: 995123 - DNA, 33 bp, Homo sapien
ataagttcaatgaagaaagaagacaacataaaa

SEQ ID NO: 995124 - DNA, 33 bp, Homo sapien
ataagttcaatgaagacagaagacaacataaaa

SEQ ID NO: 995125 - DNA, 33 bp, Homo sapien
ctgtgcatcattcaaaatcaggctggacttgtt

SEQ ID NO: 995126 - DNA, 33 bp, Homo sapien
ctgtgcatcattcaaactcaggctggacttgtt

SEQ ID NO: 995127 - DNA, 33 bp, Homo sapien
gacattgtagaagatacactgtctggattctgg

SEQ ID NO: 995128 - DNA, 33 bp, Homo sapien
gacattgtagaagatatactgtctggattctgg

SEQ ID NO: 995129 - DNA, 33 bp, Homo sapien
ccctgaggagcaacaactggaatctgcaggttc

SEQ ID NO: 995130 - DNA, 33 bp, Homo sapien
ccctgaggagcaacaattggaatctgcaggttc

SEQ ID NO: 995131 - DNA, 33 bp, Homo sapien
caattcagtagttttacacacacagaaagaacc

SEQ ID NO: 995132 - DNA, 33 bp, Homo sapien
caattcagtagttttatacacacagaaagaacc

SEQ ID NO: 995133 - DNA, 33 bp, Homo sapien
actccccacaggccagaatgcttccctctgcct

SEQ ID NO: 995134 - DNA, 33 bp, Homo sapien
actccccacaggccagtatgcttccctctgcct

SEQ ID NO: 995135 - DNA, 33 bp, Homo sapien
ccacaccctgcttggactagaggattgggcttc

SEQ ID NO: 995136 - DNA, 33 bp, Homo sapien
ccacaccctgcttggagtagaggattgggcttc

SEQ ID NO: 995137 - DNA, 33 bp, Homo sapien
agtgaccatttttgagcactgatgcagtgaatc

SEQ ID NO: 995138 - DNA, 33 bp, Homo sapien
agtgaccatttttgaggactgatgcagtgaatc

SEQ ID NO: 995139 - DNA, 33 bp, Homo sapien
gccggatggtagagaacgctctggaagagtgaa

SEQ ID NO: 995140 - DNA, 33 bp, Homo sapien
gccggatggtagagaatgctctggaagagtgaa

SEQ ID NO: 995141 - DNA, 33 bp, Homo sapien
tgtaatagcctttgtgcactggctcctcggggc

SEQ ID NO: 995142 - DNA, 33 bp, Homo sapien
tgtaatagcctttgtgtactggctcctcggggc

SEQ ID NO: 995143 - DNA, 33 bp, Homo sapien
cacagctttcaaaacacggtgcgaagaacctcc

SEQ ID NO: 995144 - DNA, 33 bp, Homo sapien
cacagctttcaaaacagggtgcgaagaacctcc

SEQ ID NO: 995145 - DNA, 33 bp, Homo sapien
aaacatgaaggatgcccgaagcgaaatgacctc

SEQ ID NO: 995146 - DNA, 33 bp, Homo sapien
aaacatgaaggatgcctgaagcgaaatgacctc

SEQ ID NO: 995147 - DNA, 33 bp, Homo sapien
cctgtaaccttcaaaacaaaagccaagctcccc

SEQ ID NO: 995148 - DNA, 33 bp, Homo sapien
cctgtaaccttcaaaagaaaagccaagctcccc

SEQ ID NO: 995149 - DNA, 33 bp, Homo sapien
gacagaagagagggcccagaagttgtctgaagt

SEQ ID NO: 995150 - DNA, 33 bp, Homo sapien
gacagaagagagggcctagaagttgtctgaagt

SEQ ID NO: 995151 - DNA, 33 bp, Homo sapien
catcttcaaagccaacaacatttggtggagtct

SEQ ID NO: 995152 - DNA, 33 bp, Homo sapien
catcttcaaagccaacgacatttggtggagtct

SEQ ID NO: 995153 - DNA, 33 bp, Homo sapien
tcattagtagcaagtacatctaagaacagaaaa

SEQ ID NO: 995154 - DNA, 33 bp, Homo sapien
tcattagtagcaagtagatctaagaacagaaaa

SEQ ID NO: 995155 - DNA, 33 bp, Homo sapien
atgtgctgacagggcaaacgtccggtgggagag

SEQ ID NO: 995156 - DNA, 33 bp, Homo sapien
atgtgctgacagggcagacgtccggtgggagag

SEQ ID NO: 995157 - DNA, 33 bp, Homo sapien
atcccgggcctctgccaactttaattgtatgaa

SEQ ID NO: 995158 - DNA, 33 bp, Homo sapien
atcccgggcctctgccgactttaattgtatgaa

SEQ ID NO: 995159 - DNA, 33 bp, Homo sapien
gtccatgtgcacatacaaatggccaggacactc

SEQ ID NO: 995160 - DNA, 33 bp, Homo sapien
gtccatgtgcacatacgaatggccaggacactc

SEQ ID NO: 995161 - DNA, 33 bp, Homo sapien
gacaatctgaagactgcaatctagtaaacacca

SEQ ID NO: 995162 - DNA, 33 bp, Homo sapien
gacaatctgaagactggaatctagtaaacacca

SEQ ID NO: 995163 - DNA, 33 bp, Homo sapien
gtatcaattattcaaccagtaggctttggaact

SEQ ID NO: 995164 - DNA, 33 bp, Homo sapien
gtatcaattattcaacgagtaggctttggaact

SEQ ID NO: 995165 - DNA, 33 bp, Homo sapien
cagtgcttctgagctcccagggattatcagcct

SEQ ID NO: 995166 - DNA, 33 bp, Homo sapien
cagtgcttctgagctctcagggattatcagcct

SEQ ID NO: 995167 - DNA, 33 bp, Homo sapien
ggtctcttttatgtaacgttagcagtaactgat

SEQ ID NO: 995168 - DNA, 33 bp, Homo sapien
ggtctcttttatgtaatgttagcagtaactgat

SEQ ID NO: 995169 - DNA, 33 bp, Homo sapien
tttcattaaaattagcactggatggaatttctc

SEQ ID NO: 995170 - DNA, 33 bp, Homo sapien
tttcattaaaattagccctggatggaatttctc

SEQ ID NO: 995171 - DNA, 33 bp, Homo sapien
atgatagtgaaagtaaaagatggcccgagggcc

SEQ ID NO: 995172 - DNA, 33 bp, Homo sapien
atgatagtgaaagtaagagatggcccgagggcc

SEQ ID NO: 995173 - DNA, 33 bp, Homo sapien
ctcatacatcaagtcacggtttcttcacaacag

SEQ ID NO: 995174 - DNA, 33 bp, Homo sapien
ctcatacatcaagtcatggtttcttcacaacag

SEQ ID NO: 995175 - DNA, 33 bp, Homo sapien
tgcatctgggagatgactaaatgtgggccacat

SEQ ID NO: 995176 - DNA, 33 bp, Homo sapien
tgcatctgggagatgattaaatgtgggccacat

SEQ ID NO: 995177 - DNA, 33 bp, Homo sapien
acatcttcctctatatcaaaacatgaaattata

SEQ ID NO: 995178 - DNA, 33 bp, Homo sapien
acatcttcctctatatgaaaacatgaaattata

SEQ ID NO: 995179 - DNA, 33 bp, Homo sapien
ggctgtcatcaggtaaggtttttgcagtctaat

SEQ ID NO: 995180 - DNA, 33 bp, Homo sapien
ggctgtcatcaggtaatgtttttgcagtctaat

SEQ ID NO: 995181 - DNA, 33 bp, Homo sapien
tgatattgctctattccactgagttccttgggt

SEQ ID NO: 995182 - DNA, 33 bp, Homo sapien
tgatattgctctattctactgagttccttgggt

SEQ ID NO: 995183 - DNA, 33 bp, Homo sapien
taatctctcctgctaacggatcagatggatgat

SEQ ID NO: 995184 - DNA, 33 bp, Homo sapien
taatctctcctgctaatggatcagatggatgat

SEQ ID NO: 995185 - DNA, 33 bp, Homo sapien
cccagattactcacataagccacagtctgctgt

SEQ ID NO: 995186 - DNA, 33 bp, Homo sapien
cccagattactcacatgagccacagtctgctgt

SEQ ID NO: 995187 - DNA, 33 bp, Homo sapien
gtgagattccagaaatcatgttgtgttttacag

SEQ ID NO: 995188 - DNA, 33 bp, Homo sapien
gtgagattccagaaatgatgttgtgttttacag

SEQ ID NO: 995189 - DNA, 33 bp, Homo sapien
atgaacaatgtaagaaccataaaacactgtaat

SEQ ID NO: 995190 - DNA, 33 bp, Homo sapien
atgaacaatgtaagaagcataaaacactgtaat

SEQ ID NO: 995191 - DNA, 33 bp, Homo sapien
tacaacacatagaaaacagacaccaagatcata

SEQ ID NO: 995192 - DNA, 33 bp, Homo sapien
tacaacacatagaaaatagacaccaagatcata

SEQ ID NO: 995193 - DNA, 33 bp, Homo sapien
ctggtttatgtgcagaagaaatggatttggggg

SEQ ID NO: 995194 - DNA, 33 bp, Homo sapien
ctggtttatgtgcagaggaaatggatttggggg

SEQ ID NO: 995195 - DNA, 33 bp, Homo sapien
tgaagaagctaaaacacggacttcatcctttca

SEQ ID NO: 995196 - DNA, 33 bp, Homo sapien
tgaagaagctaaaacatggacttcatcctttca

SEQ ID NO: 995197 - DNA, 33 bp, Homo sapien
cagaacagccttgtggaaggtgaattttcatgg

SEQ ID NO: 995198 - DNA, 33 bp, Homo sapien
cagaacagccttgtgggaggtgaattttcatgg

SEQ ID NO: 995199 - DNA, 33 bp, Homo sapien
ttcataaaaatccaaccgcttcctacaagtatg

SEQ ID NO: 995200 - DNA, 33 bp, Homo sapien
ttcataaaaatccaactgcttcctacaagtatg

SEQ ID NO: 995201 - DNA, 33 bp, Homo sapien
cctgccttctagattacgaactccttgaacgca

SEQ ID NO: 995202 - DNA, 33 bp, Homo sapien
cctgccttctagattatgaactccttgaacgca

SEQ ID NO: 995203 - DNA, 33 bp, Homo sapien
caggtcctctaagcaactaatgtcacaggtatg

SEQ ID NO: 995204 - DNA, 33 bp, Homo sapien
caggtcctctaagcaagtaatgtcacaggtatg

SEQ ID NO: 995205 - DNA, 33 bp, Homo sapien
tttgtttttcttgtcccatgttttgagagtaaa

SEQ ID NO: 995206 - DNA, 33 bp, Homo sapien
tttgtttttcttgtcctatgttttgagagtaaa

SEQ ID NO: 995207 - DNA, 33 bp, Homo sapien
ctcagtgtttgactcacgttattggagtcagta

SEQ ID NO: 995208 - DNA, 33 bp, Homo sapien
ctcagtgtttgactcatgttattggagtcagta

SEQ ID NO: 995209 - DNA, 33 bp, Homo sapien
aaaagggaagttgtaagtgagctttaccacctg

SEQ ID NO: 995210 - DNA, 33 bp, Homo sapien
aaaagggaagttgtaattgagctttaccacctg

SEQ ID NO: 995211 - DNA, 33 bp, Homo sapien
ggctccctatttaccacgtgtttagccttggga

SEQ ID NO: 995212 - DNA, 33 bp, Homo sapien
ggctccctatttaccatgtgtttagccttggga

SEQ ID NO: 995213 - DNA, 33 bp, Homo sapien
gtctgtttgcaaagaacaccttctaagtgagcc

SEQ ID NO: 995214 - DNA, 33 bp, Homo sapien
gtctgtttgcaaagaataccttctaagtgagcc

SEQ ID NO: 995215 - DNA, 33 bp, Homo sapien
ggcaggtgaacgagcaatagtcgcaggcgaact

SEQ ID NO: 995216 - DNA, 33 bp, Homo sapien
ggcaggtgaacgagcagtagtcgcaggcgaact

SEQ ID NO: 995217 - DNA, 33 bp, Homo sapien
agtagtctagagccaacctaggtctatttcatt

SEQ ID NO: 995218 - DNA, 33 bp, Homo sapien
agtagtctagagccaatctaggtctatttcatt

SEQ ID NO: 995219 - DNA, 33 bp, Homo sapien
ttaatataagtagatcaagtgaaaatatatctc

SEQ ID NO: 995220 - DNA, 33 bp, Homo sapien
ttaatataagtagatcgagtgaaaatatatctc

SEQ ID NO: 995221 - DNA, 33 bp, Homo sapien
agtataatattttttccctatgcgcttgaggtg

SEQ ID NO: 995222 - DNA, 33 bp, Homo sapien
agtataatattttttctctatgcgcttgaggtg

SEQ ID NO: 995223 - DNA, 33 bp, Homo sapien
acctggattgtgggacaaacaccaaaaaaactt

SEQ ID NO: 995224 - DNA, 33 bp, Homo sapien
acctggattgtgggacgaacaccaaaaaaactt

SEQ ID NO: 995225 - DNA, 33 bp, Homo sapien
tgactcctataaagccagagaatgaggaaaaca

SEQ ID NO: 995226 - DNA, 33 bp, Homo sapien
tgactcctataaagccggagaatgaggaaaaca

SEQ ID NO: 995227 - DNA, 33 bp, Homo sapien
tactgggtgatacacacgcataaataactatag

SEQ ID NO: 995228 - DNA, 33 bp, Homo sapien
tactgggtgatacacatgcataaataactatag

SEQ ID NO: 995229 - DNA, 33 bp, Homo sapien
gtgtctctgctaacagcatcttgactaacacac

SEQ ID NO: 995230 - DNA, 33 bp, Homo sapien
gtgtctctgctaacagtatcttgactaacacac

SEQ ID NO: 995231 - DNA, 33 bp, Homo sapien
ccaaacgtgactctggcagcggctaaggtggaa

SEQ ID NO: 995232 - DNA, 33 bp, Homo sapien
ccaaacgtgactctggtagcggctaaggtggaa

SEQ ID NO: 995233 - DNA, 33 bp, Homo sapien
gtaattgtgttcttccaccttacagccatcttt

SEQ ID NO: 995234 - DNA, 33 bp, Homo sapien
gtaattgtgttcttcctccttacagccatcttt

SEQ ID NO: 995235 - DNA, 33 bp, Homo sapien
tcctcctatgttggaaatgcttcagtttgttca

SEQ ID NO: 995236 - DNA, 33 bp, Homo sapien
tcctcctatgttggaagtgcttcagtttgttca

SEQ ID NO: 995237 - DNA, 33 bp, Homo sapien
agacaggaagggcctccaacctcacacagtggg

SEQ ID NO: 995238 - DNA, 33 bp, Homo sapien
agacaggaagggcctcgaacctcacacagtggg

SEQ ID NO: 995239 - DNA, 33 bp, Homo sapien
tggctgggactagaagaatactgaggacaggtg

SEQ ID NO: 995240 - DNA, 33 bp, Homo sapien
tggctgggactagaaggatactgaggacaggtg

SEQ ID NO: 995241 - DNA, 33 bp, Homo sapien
gctctgtcgcagctcacgattaatacaaaccga

SEQ ID NO: 995242 - DNA, 33 bp, Homo sapien
gctctgtcgcagctcatgattaatacaaaccga

SEQ ID NO: 995243 - DNA, 33 bp, Homo sapien
ctcactgaactccctgaatcactcatcatcctc

SEQ ID NO: 995244 - DNA, 33 bp, Homo sapien
ctcactgaactccctgcatcactcatcatcctc

SEQ ID NO: 995245 - DNA, 33 bp, Homo sapien
gtgcaggatttgcgtccgaatttcttacccttg

SEQ ID NO: 995246 - DNA, 33 bp, Homo sapien
gtgcaggatttgcgtctgaatttcttacccttg

SEQ ID NO: 995247 - DNA, 33 bp, Homo sapien
attgattacacccacactgattcgaacctgctg

SEQ ID NO: 995248 - DNA, 33 bp, Homo sapien
attgattacacccacagtgattcgaacctgctg

SEQ ID NO: 995249 - DNA, 33 bp, Homo sapien
atgaaccatcacgagaaaaatgcctattccatc

SEQ ID NO: 995250 - DNA, 33 bp, Homo sapien
atgaaccatcacgagagaaatgcctattccatc

SEQ ID NO: 995251 - DNA, 33 bp, Homo sapien
cttaatgaccaaagggcactcagggccttttgc

SEQ ID NO: 995252 - DNA, 33 bp, Homo sapien
cttaatgaccaaagggtactcagggccttttgc

SEQ ID NO: 995253 - DNA, 33 bp, Homo sapien
aagttgcctaagcccagctagagagtacctgtt

SEQ ID NO: 995254 - DNA, 33 bp, Homo sapien
aagttgcctaagcccatctagagagtacctgtt

SEQ ID NO: 995255 - DNA, 33 bp, Homo sapien
taaacaactctgataacgtagcttactgtcatt

SEQ ID NO: 995256 - DNA, 33 bp, Homo sapien
taaacaactctgataatgtagcttactgtcatt

SEQ ID NO: 995257 - DNA, 33 bp, Homo sapien
ctttttatctgaactacgtaaagtataagaagc

SEQ ID NO: 995258 - DNA, 33 bp, Homo sapien
ctttttatctgaactatgtaaagtataagaagc

SEQ ID NO: 995259 - DNA, 33 bp, Homo sapien
aaatggctgcattagacggcaaacaagaggtaa

SEQ ID NO: 995260 - DNA, 33 bp, Homo sapien
aaatggctgcattagatggcaaacaagaggtaa

SEQ ID NO: 995261 - DNA, 33 bp, Homo sapien
tttatgacatatgaacccatcttatccttactc

SEQ ID NO: 995262 - DNA, 33 bp, Homo sapien
tttatgacatatgaactcatcttatccttactc

SEQ ID NO: 995263 - DNA, 33 bp, Homo sapien
catgactcactcaaaaacattttcagtcatggc

SEQ ID NO: 995264 - DNA, 33 bp, Homo sapien
catgactcactcaaaaccattttcagtcatggc

SEQ ID NO: 995265 - DNA, 33 bp, Homo sapien
tgaatggtagcagaaaacaggaaaagagatttt

SEQ ID NO: 995266 - DNA, 33 bp, Homo sapien
tgaatggtagcagaaaccaggaaaagagatttt

SEQ ID NO: 995267 - DNA, 33 bp, Homo sapien
ggtctgtgcttttgaccgctttgctgtgtgtcc

SEQ ID NO: 995268 - DNA, 33 bp, Homo sapien
ggtctgtgcttttgactgctttgctgtgtgtcc

SEQ ID NO: 995269 - DNA, 33 bp, Homo sapien
gagctttggaaataaacgtcagggagattgact

SEQ ID NO: 995270 - DNA, 33 bp, Homo sapien
gagctttggaaataaaggtcagggagattgact

SEQ ID NO: 995271 - DNA, 33 bp, Homo sapien
aataattcattgtctcccctattgcttcctgag

SEQ ID NO: 995272 - DNA, 33 bp, Homo sapien
aataattcattgtctctcctattgcttcctgag

SEQ ID NO: 995273 - DNA, 33 bp, Homo sapien
aaaagtacaaggagcaagcttgggatgccttca

SEQ ID NO: 995274 - DNA, 33 bp, Homo sapien
aaaagtacaaggagcaggcttgggatgccttca

SEQ ID NO: 995275 - DNA, 33 bp, Homo sapien
aacatttcagtcaacaacatataaaggatccaa

SEQ ID NO: 995276 - DNA, 33 bp, Homo sapien
aacatttcagtcaacagcatataaaggatccaa

SEQ ID NO: 995277 - DNA, 33 bp, Homo sapien
ctgcaatcactgggtacgttcataaagcagcgt

SEQ ID NO: 995278 - DNA, 33 bp, Homo sapien
ctgcaatcactgggtatgttcataaagcagcgt

SEQ ID NO: 995279 - DNA, 33 bp, Homo sapien
catgattaaggataagcctgtctacaacaagcg

SEQ ID NO: 995280 - DNA, 33 bp, Homo sapien
catgattaaggataagtctgtctacaacaagcg

SEQ ID NO: 995281 - DNA, 33 bp, Homo sapien
ccgggagttactgtcaagcagaaagcacagacc

SEQ ID NO: 995282 - DNA, 33 bp, Homo sapien
ccgggagttactgtcaggcagaaagcacagacc

SEQ ID NO: 995283 - DNA, 33 bp, Homo sapien
tcatttccacatcaaaagtaaaaggagcaaaat

SEQ ID NO: 995284 - DNA, 33 bp, Homo sapien
tcatttccacatcaaacgtaaaaggagcaaaat

SEQ ID NO: 995285 - DNA, 33 bp, Homo sapien
cagtttgcggtgcgaccatcctgctgtgggcat

SEQ ID NO: 995286 - DNA, 33 bp, Homo sapien
cagtttgcggtgcgactatcctgctgtgggcat

SEQ ID NO: 995287 - DNA, 33 bp, Homo sapien
tgatggagtcttaggcactgagttcaacgtggg

SEQ ID NO: 995288 - DNA, 33 bp, Homo sapien
tgatggagtcttaggcgctgagttcaacgtggg

SEQ ID NO: 995289 - DNA, 33 bp, Homo sapien
ctttaagatgtgattggaccatgatggctctgc

SEQ ID NO: 995290 - DNA, 33 bp, Homo sapien
ctttaagatgtgattgtaccatgatggctctgc

SEQ ID NO: 995291 - DNA, 33 bp, Homo sapien
agcactgagcggcctacgatcacacgtgacaag

SEQ ID NO: 995292 - DNA, 33 bp, Homo sapien
agcactgagcggcctaggatcacacgtgacaag

SEQ ID NO: 995293 - DNA, 33 bp, Homo sapien
caatatgtaagaatcacggaaaggggcgatggg

SEQ ID NO: 995294 - DNA, 33 bp, Homo sapien
caatatgtaagaatcatggaaaggggcgatggg

SEQ ID NO: 995295 - DNA, 33 bp, Homo sapien
tgctgtatgacactcaccttgttagacatcact

SEQ ID NO: 995296 - DNA, 33 bp, Homo sapien
tgctgtatgacactcatcttgttagacatcact

SEQ ID NO: 995297 - DNA, 33 bp, Homo sapien
ccgggtttgccctatcacattcaagggtggctc

SEQ ID NO: 995298 - DNA, 33 bp, Homo sapien
ccgggtttgccctatcgcattcaagggtggctc

SEQ ID NO: 995299 - DNA, 33 bp, Homo sapien
acagttcagtcaataacacgttgtaagcccctc

SEQ ID NO: 995300 - DNA, 33 bp, Homo sapien
acagttcagtcaataatacgttgtaagcccctc

SEQ ID NO: 995301 - DNA, 33 bp, Homo sapien
cagggagatgcagtgaactccaagcccagtcaa

SEQ ID NO: 995302 - DNA, 33 bp, Homo sapien
cagggagatgcagtgagctccaagcccagtcaa

SEQ ID NO: 995303 - DNA, 33 bp, Homo sapien
cctttggttgttacgcactgctcccacttgtgt

SEQ ID NO: 995304 - DNA, 33 bp, Homo sapien
cctttggttgttacgcgctgctcccacttgtgt

SEQ ID NO: 995305 - DNA, 33 bp, Homo sapien
agcttgcagttatctgcatcaacctcgacatct

SEQ ID NO: 995306 - DNA, 33 bp, Homo sapien
agcttgcagttatctgtatcaacctcgacatct

SEQ ID NO: 995307 - DNA, 33 bp, Homo sapien
cctcgacatctcccataactctcgccttttaaa

SEQ ID NO: 995308 - DNA, 33 bp, Homo sapien
cctcgacatctcccatgactctcgccttttaaa

SEQ ID NO: 995309 - DNA, 33 bp, Homo sapien
agagtccagcaacaaccgctcctggggaagaag

SEQ ID NO: 995310 - DNA, 33 bp, Homo sapien
agagtccagcaacaactgctcctggggaagaag

SEQ ID NO: 995311 - DNA, 33 bp, Homo sapien
tgtggagcagagaacaatggggagaaggtaaga

SEQ ID NO: 995312 - DNA, 33 bp, Homo sapien
tgtggagcagagaacagtggggagaaggtaaga

SEQ ID NO: 995313 - DNA, 33 bp, Homo sapien
ctcagaatggataatgccatagaccccagctgg

SEQ ID NO: 995314 - DNA, 33 bp, Homo sapien
ctcagaatggataatggcatagaccccagctgg

SEQ ID NO: 995315 - DNA, 33 bp, Homo sapien
agtatctacagagaagcactcagtggtgtgtgt

SEQ ID NO: 995316 - DNA, 33 bp, Homo sapien
agtatctacagagaaggactcagtggtgtgtgt

SEQ ID NO: 995317 - DNA, 33 bp, Homo sapien
caagtgttacaatggacgagttgaagagtagag

SEQ ID NO: 995318 - DNA, 33 bp, Homo sapien
caagtgttacaatggatgagttgaagagtagag

SEQ ID NO: 995319 - DNA, 33 bp, Homo sapien
aggtagtttataatcagtagtagtgactaagaa

SEQ ID NO: 995320 - DNA, 33 bp, Homo sapien
aggtagtttataatcattagtagtgactaagaa

SEQ ID NO: 995321 - DNA, 33 bp, Homo sapien
tttatagaacaataacagtcaatagagacatct

SEQ ID NO: 995322 - DNA, 33 bp, Homo sapien
tttatagaacaataacggtcaatagagacatct

SEQ ID NO: 995323 - DNA, 33 bp, Homo sapien
atggggatatttacaaagctgtcatgaaaagca

SEQ ID NO: 995324 - DNA, 33 bp, Homo sapien
atggggatatttacaaggctgtcatgaaaagca

SEQ ID NO: 995325 - DNA, 33 bp, Homo sapien
acctcacccttcttcaaaacacccagaagagcc

SEQ ID NO: 995326 - DNA, 33 bp, Homo sapien
acctcacccttcttcagaacacccagaagagcc

SEQ ID NO: 995327 - DNA, 33 bp, Homo sapien
ggttttgaaaagtgacaacatgagatttgggaa

SEQ ID NO: 995328 - DNA, 33 bp, Homo sapien
ggttttgaaaagtgacgacatgagatttgggaa

SEQ ID NO: 995329 - DNA, 33 bp, Homo sapien
tgagaagaaacaaacacaactctggagagtgaa

SEQ ID NO: 995330 - DNA, 33 bp, Homo sapien
tgagaagaaacaaacagaactctggagagtgaa

SEQ ID NO: 995331 - DNA, 33 bp, Homo sapien
tttctctgtaaggatgaaagagaatttcactct

SEQ ID NO: 995332 - DNA, 33 bp, Homo sapien
tttctctgtaaggatggaagagaatttcactct

SEQ ID NO: 995333 - DNA, 33 bp, Homo sapien
aaagtagttactgcataaggatgagaaaatgta

SEQ ID NO: 995334 - DNA, 33 bp, Homo sapien
aaagtagttactgcatgaggatgagaaaatgta

SEQ ID NO: 995335 - DNA, 33 bp, Homo sapien
ttcctattcttacagaacctctatgttggctgt

SEQ ID NO: 995336 - DNA, 33 bp, Homo sapien
ttcctattcttacagagcctctatgttggctgt

SEQ ID NO: 995337 - DNA, 33 bp, Homo sapien
cccagcattatttggacattcatccgtgttgta

SEQ ID NO: 995338 - DNA, 33 bp, Homo sapien
cccagcattatttggagattcatccgtgttgta

SEQ ID NO: 995339 - DNA, 33 bp, Homo sapien
acagaattgtgattataagcttccttcataaat

SEQ ID NO: 995340 - DNA, 33 bp, Homo sapien
acagaattgtgattatgagcttccttcataaat

SEQ ID NO: 995341 - DNA, 33 bp, Homo sapien
cagctgtgctctacttcaagaaatttgacattt

SEQ ID NO: 995342 - DNA, 33 bp, Homo sapien
cagctgtgctctactttaagaaatttgacattt

SEQ ID NO: 995343 - DNA, 33 bp, Homo sapien
taggttttgtttttagcaacatttctcagaggt

SEQ ID NO: 995344 - DNA, 33 bp, Homo sapien
taggttttgtttttaggaacatttctcagaggt

SEQ ID NO: 995345 - DNA, 33 bp, Homo sapien
tggctctgggctcaccacaagaggtactccacc

SEQ ID NO: 995346 - DNA, 33 bp, Homo sapien
tggctctgggctcaccgcaagaggtactccacc

SEQ ID NO: 995347 - DNA, 33 bp, Homo sapien
agttccgtgcatcaggcacttcacatggtcctt

SEQ ID NO: 995348 - DNA, 33 bp, Homo sapien
agttccgtgcatcaggtacttcacatggtcctt

SEQ ID NO: 995349 - DNA, 33 bp, Homo sapien
gctcacattttgcagcacttggcactttctatg

SEQ ID NO: 995350 - DNA, 33 bp, Homo sapien
gctcacattttgcagcgcttggcactttctatg

SEQ ID NO: 995351 - DNA, 33 bp, Homo sapien
cacacaaagatgaatgacaataggttcaaatat

SEQ ID NO: 995352 - DNA, 33 bp, Homo sapien
cacacaaagatgaatgtcaataggttcaaatat

SEQ ID NO: 995353 - DNA, 33 bp, Homo sapien
tactcaattcgagagacgaagagagaggcaggt

SEQ ID NO: 995354 - DNA, 33 bp, Homo sapien
tactcaattcgagagatgaagagagaggcaggt

SEQ ID NO: 995355 - DNA, 33 bp, Homo sapien
acacagagtaatgggaacctcgcagtggacagc

SEQ ID NO: 995356 - DNA, 33 bp, Homo sapien
acacagagtaatgggagcctcgcagtggacagc

SEQ ID NO: 995357 - DNA, 33 bp, Homo sapien
ctggttgaccttttgacgcccactcttgctcaa

SEQ ID NO: 995358 - DNA, 33 bp, Homo sapien
ctggttgaccttttgatgcccactcttgctcaa

SEQ ID NO: 995359 - DNA, 33 bp, Homo sapien
ttagtatgtgacagacaacaacgtggtggacac

SEQ ID NO: 995360 - DNA, 33 bp, Homo sapien
ttagtatgtgacagacgacaacgtggtggacac

SEQ ID NO: 995361 - DNA, 33 bp, Homo sapien
aactgctctctttaaaacactgcaatgcttccc

SEQ ID NO: 995362 - DNA, 33 bp, Homo sapien
aactgctctctttaaagcactgcaatgcttccc

SEQ ID NO: 995363 - DNA, 33 bp, Homo sapien
ctatgatggagtcttacagaacgtaatgagatc

SEQ ID NO: 995364 - DNA, 33 bp, Homo sapien
ctatgatggagtcttatagaacgtaatgagatc

SEQ ID NO: 995365 - DNA, 33 bp, Homo sapien
ataaactttttgaaggaccccttgtattctatt

SEQ ID NO: 995366 - DNA, 33 bp, Homo sapien
ataaactttttgaagggccccttgtattctatt

SEQ ID NO: 995367 - DNA, 33 bp, Homo sapien
taagcatggaaaaactaacatgatacctggcaa

SEQ ID NO: 995368 - DNA, 33 bp, Homo sapien
taagcatggaaaaacttacatgatacctggcaa

SEQ ID NO: 995369 - DNA, 33 bp, Homo sapien
caagtgtccatcagcaagtgagcaaataaccaa

SEQ ID NO: 995370 - DNA, 33 bp, Homo sapien
caagtgtccatcagcaggtgagcaaataaccaa

SEQ ID NO: 995371 - DNA, 33 bp, Homo sapien
ccatccctccaagtccaacaaaccaccgctgac

SEQ ID NO: 995372 - DNA, 33 bp, Homo sapien
ccatccctccaagtccgacaaaccaccgctgac

SEQ ID NO: 995373 - DNA, 33 bp, Homo sapien
tttactcatttacactaagaaatcactgctctg

SEQ ID NO: 995374 - DNA, 33 bp, Homo sapien
tttactcatttacactgagaaatcactgctctg

SEQ ID NO: 995375 - DNA, 33 bp, Homo sapien
ccactacatgaggactaacaaagtatttgatct

SEQ ID NO: 995376 - DNA, 33 bp, Homo sapien
ccactacatgaggacttacaaagtatttgatct

SEQ ID NO: 995377 - DNA, 33 bp, Homo sapien
aacaccaatttatctccactggaatcaacacac

SEQ ID NO: 995378 - DNA, 33 bp, Homo sapien
aacaccaatttatctctactggaatcaacacac

SEQ ID NO: 995379 - DNA, 33 bp, Homo sapien
cctggcaaaatggaaacaataggatcttgaaat

SEQ ID NO: 995380 - DNA, 33 bp, Homo sapien
cctggcaaaatggaaataataggatcttgaaat

SEQ ID NO: 995381 - DNA, 33 bp, Homo sapien
atcatctgctggccaaaaaagaggacccattgc

SEQ ID NO: 995382 - DNA, 33 bp, Homo sapien
atcatctgctggccaacaaagaggacccattgc

SEQ ID NO: 995383 - DNA, 33 bp, Homo sapien
tctcaaatgggtcagaacaaaatataataggag

SEQ ID NO: 995384 - DNA, 33 bp, Homo sapien
tctcaaatgggtcagagcaaaatataataggag

SEQ ID NO: 995385 - DNA, 33 bp, Homo sapien
tggtgacttttgtggcccctctttgtaatatac

SEQ ID NO: 995386 - DNA, 33 bp, Homo sapien
tggtgacttttgtggcgcctctttgtaatatac

SEQ ID NO: 995387 - DNA, 33 bp, Homo sapien
cccaggcaattcataaatgctttaaactttgag

SEQ ID NO: 995388 - DNA, 33 bp, Homo sapien
cccaggcaattcataagtgctttaaactttgag

SEQ ID NO: 995389 - DNA, 33 bp, Homo sapien
ttgctgaacgccacaacgcaaatcaagacctag

SEQ ID NO: 995390 - DNA, 33 bp, Homo sapien
ttgctgaacgccacaaggcaaatcaagacctag

SEQ ID NO: 995391 - DNA, 33 bp, Homo sapien
gagcgcttactgtataacacctgctgttctgcc

SEQ ID NO: 995392 - DNA, 33 bp, Homo sapien
gagcgcttactgtataccacctgctgttctgcc

SEQ ID NO: 995393 - DNA, 33 bp, Homo sapien
aatgcggagtcttccaaccaaagttcctcatta

SEQ ID NO: 995394 - DNA, 33 bp, Homo sapien
aatgcggagtcttccagccaaagttcctcatta

SEQ ID NO: 995395 - DNA, 33 bp, Homo sapien
tgcctgtggtccaggacagagctgcaaggaaga

SEQ ID NO: 995396 - DNA, 33 bp, Homo sapien
tgcctgtggtccaggatagagctgcaaggaaga

SEQ ID NO: 995397 - DNA, 33 bp, Homo sapien
taaatctgctgacagcaacacctggcaagctac

SEQ ID NO: 995398 - DNA, 33 bp, Homo sapien
taaatctgctgacagcgacacctggcaagctac

SEQ ID NO: 995399 - DNA, 33 bp, Homo sapien
ctggcatctttctccacacctacaacccactga

SEQ ID NO: 995400 - DNA, 33 bp, Homo sapien
ctggcatctttctccatacctacaacccactga

SEQ ID NO: 995401 - DNA, 33 bp, Homo sapien
ggtttccagaggtgacagggggacatcctgggt

SEQ ID NO: 995402 - DNA, 33 bp, Homo sapien
ggtttccagaggtgacggggggacatcctgggt

SEQ ID NO: 995403 - DNA, 33 bp, Homo sapien
gaaatattcactgcaacagttaatgctctaggc

SEQ ID NO: 995404 - DNA, 33 bp, Homo sapien
gaaatattcactgcaatagttaatgctctaggc

SEQ ID NO: 995405 - DNA, 33 bp, Homo sapien
ggtgctggattctaccaacctcttaatattact

SEQ ID NO: 995406 - DNA, 33 bp, Homo sapien
ggtgctggattctaccgacctcttaatattact

SEQ ID NO: 995407 - DNA, 33 bp, Homo sapien
aaaacaaaatgaaaaacaagtatcgtacaaagg

SEQ ID NO: 995408 - DNA, 33 bp, Homo sapien
aaaacaaaatgaaaaataagtatcgtacaaagg

SEQ ID NO: 995409 - DNA, 33 bp, Homo sapien
gactacactttgcacactggagttttactcatc

SEQ ID NO: 995410 - DNA, 33 bp, Homo sapien
gactacactttgcacattggagttttactcatc

SEQ ID NO: 995411 - DNA, 33 bp, Homo sapien
aagaggctgtgaataacggaatggtgtgtaaat

SEQ ID NO: 995412 - DNA, 33 bp, Homo sapien
aagaggctgtgaataatggaatggtgtgtaaat

SEQ ID NO: 995413 - DNA, 33 bp, Homo sapien
ttaactttagttgtgaacatttctcccatgtca

SEQ ID NO: 995414 - DNA, 33 bp, Homo sapien
ttaactttagttgtgagcatttctcccatgtca

SEQ ID NO: 995415 - DNA, 33 bp, Homo sapien
ttctgccggggatctacgaatcggaagcagcag

SEQ ID NO: 995416 - DNA, 33 bp, Homo sapien
ttctgccggggatctatgaatcggaagcagcag

SEQ ID NO: 995417 - DNA, 33 bp, Homo sapien
aggtcttaaatgcctgacactaatcccagatgg

SEQ ID NO: 995418 - DNA, 33 bp, Homo sapien
aggtcttaaatgcctggcactaatcccagatgg

SEQ ID NO: 995419 - DNA, 33 bp, Homo sapien
aagatgaaataacacaagtaaagtgctgtcacc

SEQ ID NO: 995420 - DNA, 33 bp, Homo sapien
aagatgaaataacacaggtaaagtgctgtcacc

SEQ ID NO: 995421 - DNA, 33 bp, Homo sapien
ctgcagagtcccagcaagaggtttcccaggaaa

SEQ ID NO: 995422 - DNA, 33 bp, Homo sapien
ctgcagagtcccagcacgaggtttcccaggaaa

SEQ ID NO: 995423 - DNA, 33 bp, Homo sapien
tgagggttttgaatgccctaatatagcagggag

SEQ ID NO: 995424 - DNA, 33 bp, Homo sapien
tgagggttttgaatgctctaatatagcagggag

SEQ ID NO: 995425 - DNA, 33 bp, Homo sapien
agatatgtatgtaaagccctgggtatgaaggca

SEQ ID NO: 995426 - DNA, 33 bp, Homo sapien
agatatgtatgtaaaggcctgggtatgaaggca

SEQ ID NO: 995427 - DNA, 33 bp, Homo sapien
ttttgtgtagggtaaagcacggtgaggaataag

SEQ ID NO: 995428 - DNA, 33 bp, Homo sapien
ttttgtgtagggtaaatcacggtgaggaataag

SEQ ID NO: 995429 - DNA, 33 bp, Homo sapien
tcagaaagtagaataacgcaagcttaaagtggc

SEQ ID NO: 995430 - DNA, 33 bp, Homo sapien
tcagaaagtagaataatgcaagcttaaagtggc

SEQ ID NO: 995431 - DNA, 33 bp, Homo sapien
tttgcctctccaggccacagtttatccacctgg

SEQ ID NO: 995432 - DNA, 33 bp, Homo sapien
tttgcctctccaggccgcagtttatccacctgg

SEQ ID NO: 995433 - DNA, 33 bp, Homo sapien
aagccaaaagctgagcagatttcagagaagagt

SEQ ID NO: 995434 - DNA, 33 bp, Homo sapien
aagccaaaagctgagcggatttcagagaagagt

SEQ ID NO: 995435 - DNA, 33 bp, Homo sapien
ctggatggcaactagaatcaaagaggacatttt

SEQ ID NO: 995436 - DNA, 33 bp, Homo sapien
ctggatggcaactagagtcaaagaggacatttt

SEQ ID NO: 995437 - DNA, 33 bp, Homo sapien
gagactagtccctaaactcttggagcaaatgga

SEQ ID NO: 995438 - DNA, 33 bp, Homo sapien
gagactagtccctaaattcttggagcaaatgga

SEQ ID NO: 995439 - DNA, 33 bp, Homo sapien
gtcactgatagtggggaagtttgagctagccac

SEQ ID NO: 995440 - DNA, 33 bp, Homo sapien
gtcactgatagtggggcagtttgagctagccac

SEQ ID NO: 995441 - DNA, 33 bp, Homo sapien
tttactggtgaataaaagtcagtcagagaccct

SEQ ID NO: 995442 - DNA, 33 bp, Homo sapien
tttactggtgaataaaggtcagtcagagaccct

SEQ ID NO: 995443 - DNA, 33 bp, Homo sapien
gaatggcttctgtttagaagtggcacatgtcac

SEQ ID NO: 995444 - DNA, 33 bp, Homo sapien
gaatggcttctgtttataagtggcacatgtcac

SEQ ID NO: 995445 - DNA, 33 bp, Homo sapien
cccctcttgttatgaaaacaatacgcccagaaa

SEQ ID NO: 995446 - DNA, 33 bp, Homo sapien
cccctcttgttatgaatacaatacgcccagaaa

SEQ ID NO: 995447 - DNA, 33 bp, Homo sapien
cagagaagaggaggaaaaggatttcataacctt

SEQ ID NO: 995448 - DNA, 33 bp, Homo sapien
cagagaagaggaggaagaggatttcataacctt

SEQ ID NO: 995449 - DNA, 33 bp, Homo sapien
tcaccaagcctttcaacggctatgagtgatcaa

SEQ ID NO: 995450 - DNA, 33 bp, Homo sapien
tcaccaagcctttcaatggctatgagtgatcaa

SEQ ID NO: 995451 - DNA, 33 bp, Homo sapien
tgtttgttgcaagtaacccaggcggcagtgccc

SEQ ID NO: 995452 - DNA, 33 bp, Homo sapien
tgtttgttgcaagtaatccaggcggcagtgccc

SEQ ID NO: 995453 - DNA, 33 bp, Homo sapien
caagttaggccttgaaacaaaatgaagacacca

SEQ ID NO: 995454 - DNA, 33 bp, Homo sapien
caagttaggccttgaagcaaaatgaagacacca

SEQ ID NO: 995455 - DNA, 33 bp, Homo sapien
agaaaaggcattgcaaaaaaaaccaggactgct

SEQ ID NO: 995456 - DNA, 33 bp, Homo sapien
agaaaaggcattgcaacaaaaaccaggactgct

SEQ ID NO: 995457 - DNA, 33 bp, Homo sapien
tctctcctcaaaacaacgacaacagcaaaaaca

SEQ ID NO: 995458 - DNA, 33 bp, Homo sapien
tctctcctcaaaacaatgacaacagcaaaaaca

SEQ ID NO: 995459 - DNA, 33 bp, Homo sapien
gtgtttctttggttacccagaagatttgataat

SEQ ID NO: 995460 - DNA, 33 bp, Homo sapien
gtgtttctttggttactcagaagatttgataat

SEQ ID NO: 995461 - DNA, 33 bp, Homo sapien
gggattccctgcataacattgcctcagaccaag

SEQ ID NO: 995462 - DNA, 33 bp, Homo sapien
gggattccctgcataatattgcctcagaccaag

SEQ ID NO: 995463 - DNA, 33 bp, Homo sapien
catagtgaggtgaacaagaaaaagtcacatctt

SEQ ID NO: 995464 - DNA, 33 bp, Homo sapien
catagtgaggtgaacatgaaaaagtcacatctt

SEQ ID NO: 995465 - DNA, 33 bp, Homo sapien
tccttcaattcattcacgtgacctcatttttcc

SEQ ID NO: 995466 - DNA, 33 bp, Homo sapien
tccttcaattcattcatgtgacctcatttttcc

SEQ ID NO: 995467 - DNA, 33 bp, Homo sapien
cctcaggagtggacccaagccagtcacttttaa

SEQ ID NO: 995468 - DNA, 33 bp, Homo sapien
cctcaggagtggaccccagccagtcacttttaa

SEQ ID NO: 995469 - DNA, 33 bp, Homo sapien
gaatcaggatggtcttcaagaactttaacatct

SEQ ID NO: 995470 - DNA, 33 bp, Homo sapien
gaatcaggatggtcttgaagaactttaacatct

SEQ ID NO: 995471 - DNA, 33 bp, Homo sapien
tgccaggaagccatccagagataaggtgagact

SEQ ID NO: 995472 - DNA, 33 bp, Homo sapien
tgccaggaagccatccggagataaggtgagact

SEQ ID NO: 995473 - DNA, 33 bp, Homo sapien
attttaggaatttgataagattcagtagcacat

SEQ ID NO: 995474 - DNA, 33 bp, Homo sapien
attttaggaatttgatgagattcagtagcacat

SEQ ID NO: 995475 - DNA, 33 bp, Homo sapien
tcagtcattaaaatgaactcggacttaatagcg

SEQ ID NO: 995476 - DNA, 33 bp, Homo sapien
tcagtcattaaaatgacctcggacttaatagcg

SEQ ID NO: 995477 - DNA, 33 bp, Homo sapien
tagaagctgagtgagaaaattcagaagcagggt

SEQ ID NO: 995478 - DNA, 33 bp, Homo sapien
tagaagctgagtgagagaattcagaagcagggt

SEQ ID NO: 995479 - DNA, 33 bp, Homo sapien
acacatagaaagatgcacatatcataagtttac

SEQ ID NO: 995480 - DNA, 33 bp, Homo sapien
acacatagaaagatgcccatatcataagtttac

SEQ ID NO: 995481 - DNA, 33 bp, Homo sapien
aacatggtttcctctgaactttgaagagaaccc

SEQ ID NO: 995482 - DNA, 33 bp, Homo sapien
aacatggtttcctctggactttgaagagaaccc

SEQ ID NO: 995483 - DNA, 33 bp, Homo sapien
atgctggggtttcagcacagatttgttcatcca

SEQ ID NO: 995484 - DNA, 33 bp, Homo sapien
atgctggggtttcagcgcagatttgttcatcca

SEQ ID NO: 995485 - DNA, 33 bp, Homo sapien
caaccataagaaaccaatacactcttccagccc

SEQ ID NO: 995486 - DNA, 33 bp, Homo sapien
caaccataagaaaccagtacactcttccagccc

SEQ ID NO: 995487 - DNA, 33 bp, Homo sapien
aatgagcatcagtttcaacagagaaaagctatg

SEQ ID NO: 995488 - DNA, 33 bp, Homo sapien
aatgagcatcagtttcgacagagaaaagctatg

SEQ ID NO: 995489 - DNA, 33 bp, Homo sapien
ttgtttgaaagaggaaaatgaagggacctcctc

SEQ ID NO: 995490 - DNA, 33 bp, Homo sapien
ttgtttgaaagaggaagatgaagggacctcctc

SEQ ID NO: 995491 - DNA, 33 bp, Homo sapien
gtagtagtgaccataccaagaggagaaactcag

SEQ ID NO: 995492 - DNA, 33 bp, Homo sapien
gtagtagtgaccatactaagaggagaaactcag

SEQ ID NO: 995493 - DNA, 33 bp, Homo sapien
ttccaatttcgtaccaatcatggacagggagtg

SEQ ID NO: 995494 - DNA, 33 bp, Homo sapien
ttccaatttcgtaccagtcatggacagggagtg

SEQ ID NO: 995495 - DNA, 33 bp, Homo sapien
tagcaaataaaagttacggatagtatagattca

SEQ ID NO: 995496 - DNA, 33 bp, Homo sapien
tagcaaataaaagttatggatagtatagattca

SEQ ID NO: 995497 - DNA, 33 bp, Homo sapien
ctctttatctagtaaaaaggacacatgcaaatt

SEQ ID NO: 995498 - DNA, 33 bp, Homo sapien
ctctttatctagtaaacaggacacatgcaaatt

SEQ ID NO: 995499 - DNA, 33 bp, Homo sapien
actggctgtcctggaacgtgaggcaaactggat

SEQ ID NO: 995500 - DNA, 33 bp, Homo sapien
actggctgtcctggaatgtgaggcaaactggat

SEQ ID NO: 995501 - DNA, 33 bp, Homo sapien
acataggagttgaataaaaggacaaatccaaga

SEQ ID NO: 995502 - DNA, 33 bp, Homo sapien
acataggagttgaatacaaggacaaatccaaga

SEQ ID NO: 995503 - DNA, 33 bp, Homo sapien
gtggtgagagagaacaccaaatggaagaagaat

SEQ ID NO: 995504 - DNA, 33 bp, Homo sapien
gtggtgagagagaacatcaaatggaagaagaat

SEQ ID NO: 995505 - DNA, 33 bp, Homo sapien
gtaagtgagtgcctcacatggacttaatggtgt

SEQ ID NO: 995506 - DNA, 33 bp, Homo sapien
gtaagtgagtgcctcatatggacttaatggtgt

SEQ ID NO: 995507 - DNA, 33 bp, Homo sapien
ctttcaaggattcttacggcctaactccagaag

SEQ ID NO: 995508 - DNA, 33 bp, Homo sapien
ctttcaaggattcttatggcctaactccagaag

SEQ ID NO: 995509 - DNA, 33 bp, Homo sapien
aaagggaaagtattgacagcaagagatgcaaga

SEQ ID NO: 995510 - DNA, 33 bp, Homo sapien
aaagggaaagtattgagagcaagagatgcaaga

SEQ ID NO: 995511 - DNA, 33 bp, Homo sapien
cacattttaaaggctcacaggatgattctgaag

SEQ ID NO: 995512 - DNA, 33 bp, Homo sapien
cacattttaaaggctcgcaggatgattctgaag

SEQ ID NO: 995513 - DNA, 33 bp, Homo sapien
gctaactaaaacaccaaacttacatgaccttga

SEQ ID NO: 995514 - DNA, 33 bp, Homo sapien
gctaactaaaacaccacacttacatgaccttga

SEQ ID NO: 995515 - DNA, 33 bp, Homo sapien
tattttccctcttatcagaacctttcaaaacag

SEQ ID NO: 995516 - DNA, 33 bp, Homo sapien
tattttccctcttatcggaacctttcaaaacag

SEQ ID NO: 995517 - DNA, 33 bp, Homo sapien
gagcttagggaatgagaaaagaccaaaactata

SEQ ID NO: 995518 - DNA, 33 bp, Homo sapien
gagcttagggaatgaggaaagaccaaaactata

SEQ ID NO: 995519 - DNA, 33 bp, Homo sapien
gtacagatatacagcaaaacagaaagccacgag

SEQ ID NO: 995520 - DNA, 33 bp, Homo sapien
gtacagatatacagcagaacagaaagccacgag

SEQ ID NO: 995521 - DNA, 33 bp, Homo sapien
tgggctcgctgtctgacgatatgcatagaagtg

SEQ ID NO: 995522 - DNA, 33 bp, Homo sapien
tgggctcgctgtctgatgatatgcatagaagtg

SEQ ID NO: 995523 - DNA, 33 bp, Homo sapien
ctgagcatgtccagagaaagccagtgcgctccc

SEQ ID NO: 995524 - DNA, 33 bp, Homo sapien
ctgagcatgtccagaggaagccagtgcgctccc

SEQ ID NO: 995525 - DNA, 33 bp, Homo sapien
acaacactctgttaaactgagcttctgtggcag

SEQ ID NO: 995526 - DNA, 33 bp, Homo sapien
acaacactctgttaaattgagcttctgtggcag

SEQ ID NO: 995527 - DNA, 33 bp, Homo sapien
tatgtaatttttgaagacaatgtacaaattaaa

SEQ ID NO: 995528 - DNA, 33 bp, Homo sapien
tatgtaatttttgaaggcaatgtacaaattaaa

SEQ ID NO: 995529 - DNA, 33 bp, Homo sapien
aatctctcatctgttaactcctagtgcttatca

SEQ ID NO: 995530 - DNA, 33 bp, Homo sapien
aatctctcatctgttacctcctagtgcttatca

SEQ ID NO: 995531 - DNA, 33 bp, Homo sapien
ctctctctaaagctctaaaaaaaggatggctat

SEQ ID NO: 995532 - DNA, 33 bp, Homo sapien
ctctctctaaagctctgaaaaaaggatggctat

SEQ ID NO: 995533 - DNA, 33 bp, Homo sapien
gcacattccaggcaataagatcaaaatgtgtaa

SEQ ID NO: 995534 - DNA, 33 bp, Homo sapien
gcacattccaggcaatgagatcaaaatgtgtaa

SEQ ID NO: 995535 - DNA, 33 bp, Homo sapien
tctctgcactgtcctcgccttgttgttagcacg

SEQ ID NO: 995536 - DNA, 33 bp, Homo sapien
tctctgcactgtcctctccttgttgttagcacg

SEQ ID NO: 995537 - DNA, 33 bp, Homo sapien
tggtacatgcatagaacagattccaacatttgt

SEQ ID NO: 995538 - DNA, 33 bp, Homo sapien
tggtacatgcatagaatagattccaacatttgt

SEQ ID NO: 995539 - DNA, 33 bp, Homo sapien
acactccataatgctacgtactagggataagtt

SEQ ID NO: 995540 - DNA, 33 bp, Homo sapien
acactccataatgctatgtactagggataagtt

SEQ ID NO: 995541 - DNA, 33 bp, Homo sapien
cactacacccagtctccctggatcctttctcac

SEQ ID NO: 995542 - DNA, 33 bp, Homo sapien
cactacacccagtctctctggatcctttctcac

SEQ ID NO: 995543 - DNA, 33 bp, Homo sapien
tctcacctctgacagaagttactaggtccttcc

SEQ ID NO: 995544 - DNA, 33 bp, Homo sapien
tctcacctctgacagatgttactaggtccttcc

SEQ ID NO: 995545 - DNA, 33 bp, Homo sapien
gatactgacggtggaaaaattgggtagaattgg

SEQ ID NO: 995546 - DNA, 33 bp, Homo sapien
gatactgacggtggaacaattgggtagaattgg

SEQ ID NO: 995547 - DNA, 33 bp, Homo sapien
agtaagaaaatgtcagcatgaagaaaagagttt

SEQ ID NO: 995548 - DNA, 33 bp, Homo sapien
agtaagaaaatgtcaggatgaagaaaagagttt

SEQ ID NO: 995549 - DNA, 33 bp, Homo sapien
aggcatctcctacatacccagggaacagagcta

SEQ ID NO: 995550 - DNA, 33 bp, Homo sapien
aggcatctcctacatatccagggaacagagcta

SEQ ID NO: 995551 - DNA, 33 bp, Homo sapien
cttaatctccatgcacaaattctcaattgtatg

SEQ ID NO: 995552 - DNA, 33 bp, Homo sapien
cttaatctccatgcactaattctcaattgtatg

SEQ ID NO: 995553 - DNA, 33 bp, Homo sapien
gcataaagtcagagaacgtaaaactcttttctt

SEQ ID NO: 995554 - DNA, 33 bp, Homo sapien
gcataaagtcagagaatgtaaaactcttttctt

SEQ ID NO: 995555 - DNA, 33 bp, Homo sapien
ccatgtttaaaatctaagcatacaatgttaaaa

SEQ ID NO: 995556 - DNA, 33 bp, Homo sapien
ccatgtttaaaatctaggcatacaatgttaaaa

SEQ ID NO: 995557 - DNA, 33 bp, Homo sapien
ccaacctaacagctaaataatcttaccttccaa

SEQ ID NO: 995558 - DNA, 33 bp, Homo sapien
ccaacctaacagctaactaatcttaccttccaa

SEQ ID NO: 995559 - DNA, 33 bp, Homo sapien
caggtgtgtttagcaagctttggggatattttg

SEQ ID NO: 995560 - DNA, 33 bp, Homo sapien
caggtgtgtttagcaatctttggggatattttg

SEQ ID NO: 995561 - DNA, 33 bp, Homo sapien
aacctgggcagtacacaggattgaggccctttg

SEQ ID NO: 995562 - DNA, 33 bp, Homo sapien
aacctgggcagtacacgggattgaggccctttg

SEQ ID NO: 995563 - DNA, 33 bp, Homo sapien
ccctgtatcctccttgcaataagctgctccaca

SEQ ID NO: 995564 - DNA, 33 bp, Homo sapien
ccctgtatcctccttgtaataagctgctccaca

SEQ ID NO: 995565 - DNA, 33 bp, Homo sapien
atcccattttgaatagcagaatttatccaatgc

SEQ ID NO: 995566 - DNA, 33 bp, Homo sapien
atcccattttgaataggagaatttatccaatgc

SEQ ID NO: 995567 - DNA, 33 bp, Homo sapien
cagcttacaggttataacaatcaaatgatgtac

SEQ ID NO: 995568 - DNA, 33 bp, Homo sapien
cagcttacaggttatatcaatcaaatgatgtac

SEQ ID NO: 995569 - DNA, 33 bp, Homo sapien
cttttccctagctctgcaattgttcaggtctgg

SEQ ID NO: 995570 - DNA, 33 bp, Homo sapien
cttttccctagctctgtaattgttcaggtctgg

SEQ ID NO: 995571 - DNA, 33 bp, Homo sapien
gatgtagctccaagaaaccctttgtcataaaat

SEQ ID NO: 995572 - DNA, 33 bp, Homo sapien
gatgtagctccaagaagccctttgtcataaaat

SEQ ID NO: 995573 - DNA, 33 bp, Homo sapien
ctctgctgtagcatccactctaactcagctcat

SEQ ID NO: 995574 - DNA, 33 bp, Homo sapien
ctctgctgtagcatccgctctaactcagctcat

SEQ ID NO: 995575 - DNA, 33 bp, Homo sapien
ctgtgatccatgattcacattttggtaagtaag

SEQ ID NO: 995576 - DNA, 33 bp, Homo sapien
ctgtgatccatgattcccattttggtaagtaag

SEQ ID NO: 995577 - DNA, 33 bp, Homo sapien
gatcaaacaggagacaatagaagcctggtgaca

SEQ ID NO: 995578 - DNA, 33 bp, Homo sapien
gatcaaacaggagacagtagaagcctggtgaca

SEQ ID NO: 995579 - DNA, 33 bp, Homo sapien
aaaaatctaaatccaaatgagaaacaaattcca

SEQ ID NO: 995580 - DNA, 33 bp, Homo sapien
aaaaatctaaatccaagtgagaaacaaattcca

SEQ ID NO: 995581 - DNA, 33 bp, Homo sapien
agcgatggaaagttaacgcttttctgacagaat

SEQ ID NO: 995582 - DNA, 33 bp, Homo sapien
agcgatggaaagttaatgcttttctgacagaat

SEQ ID NO: 995583 - DNA, 33 bp, Homo sapien
aaattgtgagaataaggcatccggctatttcac

SEQ ID NO: 995584 - DNA, 33 bp, Homo sapien
aaattgtgagaataagtcatccggctatttcac

SEQ ID NO: 995585 - DNA, 33 bp, Homo sapien
ggaactgaaagaaggaaatatttctgagtcaca

SEQ ID NO: 995586 - DNA, 33 bp, Homo sapien
ggaactgaaagaaggagatatttctgagtcaca

SEQ ID NO: 995587 - DNA, 33 bp, Homo sapien
gctatatattgtaaaaatgtagatcaaaggggt

SEQ ID NO: 995588 - DNA, 33 bp, Homo sapien
gctatatattgtaaaagtgtagatcaaaggggt

SEQ ID NO: 995589 - DNA, 33 bp, Homo sapien
accctattaaggtctcagacaagagaggattct

SEQ ID NO: 995590 - DNA, 33 bp, Homo sapien
accctattaaggtctcggacaagagaggattct

SEQ ID NO: 995591 - DNA, 33 bp, Homo sapien
ttgtttgcttacatgacgattttcttcatggct

SEQ ID NO: 995592 - DNA, 33 bp, Homo sapien
ttgtttgcttacatgatgattttcttcatggct

SEQ ID NO: 995593 - DNA, 33 bp, Homo sapien
taaagacttacccccagagctccatcctccaat

SEQ ID NO: 995594 - DNA, 33 bp, Homo sapien
taaagacttacccccatagctccatcctccaat

SEQ ID NO: 995595 - DNA, 33 bp, Homo sapien
attcagttttcagttcacacatcttcccttaaa

SEQ ID NO: 995596 - DNA, 33 bp, Homo sapien
attcagttttcagttcgcacatcttcccttaaa

SEQ ID NO: 995597 - DNA, 33 bp, Homo sapien
ttcgactgacacaaagacttgttttttagctca

SEQ ID NO: 995598 - DNA, 33 bp, Homo sapien
ttcgactgacacaaagccttgttttttagctca

SEQ ID NO: 995599 - DNA, 33 bp, Homo sapien
ttcatacattcattcacagtgtaggcctgggta

SEQ ID NO: 995600 - DNA, 33 bp, Homo sapien
ttcatacattcattcatagtgtaggcctgggta

SEQ ID NO: 995601 - DNA, 33 bp, Homo sapien
tcacatgtgcacaagaactcttcattttccaaa

SEQ ID NO: 995602 - DNA, 33 bp, Homo sapien
tcacatgtgcacaagatctcttcattttccaaa

SEQ ID NO: 995603 - DNA, 33 bp, Homo sapien
catgatacaagccacactcattcccattagcag

SEQ ID NO: 995604 - DNA, 33 bp, Homo sapien
catgatacaagccacattcattcccattagcag

SEQ ID NO: 995605 - DNA, 33 bp, Homo sapien
agatgaagagtctggacgctagagccagagaga

SEQ ID NO: 995606 - DNA, 33 bp, Homo sapien
agatgaagagtctggatgctagagccagagaga

SEQ ID NO: 995607 - DNA, 33 bp, Homo sapien
cctggattctagctctcacttcaagcatttctt

SEQ ID NO: 995608 - DNA, 33 bp, Homo sapien
cctggattctagctcttacttcaagcatttctt

SEQ ID NO: 995609 - DNA, 33 bp, Homo sapien
acaccatcagctttcccaggtttccagcttaca

SEQ ID NO: 995610 - DNA, 33 bp, Homo sapien
acaccatcagctttcctaggtttccagcttaca

SEQ ID NO: 995611 - DNA, 33 bp, Homo sapien
cttggactaagattccaatgcgcctgtactcct

SEQ ID NO: 995612 - DNA, 33 bp, Homo sapien
cttggactaagattccgatgcgcctgtactcct

SEQ ID NO: 995613 - DNA, 33 bp, Homo sapien
ggaaatgtctcttggaagaataagtcagtggca

SEQ ID NO: 995614 - DNA, 33 bp, Homo sapien
ggaaatgtctcttggaggaataagtcagtggca

SEQ ID NO: 995615 - DNA, 33 bp, Homo sapien
atttttcctaataaagaagctgaatcaaagtta

SEQ ID NO: 995616 - DNA, 33 bp, Homo sapien
atttttcctaataaagtagctgaatcaaagtta

SEQ ID NO: 995617 - DNA, 33 bp, Homo sapien
caactgccctgctcacccagtccaatactaggc

SEQ ID NO: 995618 - DNA, 33 bp, Homo sapien
caactgccctgctcactcagtccaatactaggc

SEQ ID NO: 995619 - DNA, 33 bp, Homo sapien
aaactaaattcacgtgaaagtcatggattaaat

SEQ ID NO: 995620 - DNA, 33 bp, Homo sapien
aaactaaattcacgtggaagtcatggattaaat

SEQ ID NO: 995621 - DNA, 33 bp, Homo sapien
gctaagtgctgggatgcagagcaagctaatact

SEQ ID NO: 995622 - DNA, 33 bp, Homo sapien
gctaagtgctgggatgtagagcaagctaatact

SEQ ID NO: 995623 - DNA, 33 bp, Homo sapien
ggcagatctctcctcaaaatcagtatccggaag

SEQ ID NO: 995624 - DNA, 33 bp, Homo sapien
ggcagatctctcctcataatcagtatccggaag

SEQ ID NO: 995625 - DNA, 33 bp, Homo sapien
gagtgttcactctatggcagtgtgggcactagc

SEQ ID NO: 995626 - DNA, 33 bp, Homo sapien
gagtgttcactctatgtcagtgtgggcactagc

SEQ ID NO: 995627 - DNA, 33 bp, Homo sapien
ggcaagtccttgaaatcaagcactgttaagaag

SEQ ID NO: 995628 - DNA, 33 bp, Homo sapien
ggcaagtccttgaaattaagcactgttaagaag

SEQ ID NO: 995629 - DNA, 33 bp, Homo sapien
tcaagtttcagattcaaatgttctctgagacct

SEQ ID NO: 995630 - DNA, 33 bp, Homo sapien
tcaagtttcagattcagatgttctctgagacct

SEQ ID NO: 995631 - DNA, 33 bp, Homo sapien
gcttgacttatattgaacctgatgagctcagtg

SEQ ID NO: 995632 - DNA, 33 bp, Homo sapien
gcttgacttatattgaccctgatgagctcagtg

SEQ ID NO: 995633 - DNA, 33 bp, Homo sapien
catttctagacatcaaatatctttctccacccc

SEQ ID NO: 995634 - DNA, 33 bp, Homo sapien
catttctagacatcaagtatctttctccacccc

SEQ ID NO: 995635 - DNA, 33 bp, Homo sapien
tacctcatagtgttacaaggatgctaaaatgaa

SEQ ID NO: 995636 - DNA, 33 bp, Homo sapien
tacctcatagtgttactaggatgctaaaatgaa

SEQ ID NO: 995637 - DNA, 33 bp, Homo sapien
atattttatttattgccatgtgatcaactacct

SEQ ID NO: 995638 - DNA, 33 bp, Homo sapien
atattttatttattgctatgtgatcaactacct

SEQ ID NO: 995639 - DNA, 33 bp, Homo sapien
ctgaaacagataattacgattcctgatataaaa

SEQ ID NO: 995640 - DNA, 33 bp, Homo sapien
ctgaaacagataattatgattcctgatataaaa

SEQ ID NO: 995641 - DNA, 33 bp, Homo sapien
tcctcttgaaagaaccgatcgatacttttatta

SEQ ID NO: 995642 - DNA, 33 bp, Homo sapien
tcctcttgaaagaacctatcgatacttttatta

SEQ ID NO: 995643 - DNA, 33 bp, Homo sapien
ctcagagaaatcaccaccttgcttctcaactta

SEQ ID NO: 995644 - DNA, 33 bp, Homo sapien
ctcagagaaatcaccatcttgcttctcaactta

SEQ ID NO: 995645 - DNA, 33 bp, Homo sapien
aaatgcaggacgaaaactaggaggagaaaaaaa

SEQ ID NO: 995646 - DNA, 33 bp, Homo sapien
aaatgcaggacgaaaattaggaggagaaaaaaa

SEQ ID NO: 995647 - DNA, 33 bp, Homo sapien
cagacgctgacttgtaagagccccatcatctgc

SEQ ID NO: 995648 - DNA, 33 bp, Homo sapien
cagacgctgacttgtaggagccccatcatctgc

SEQ ID NO: 995649 - DNA, 33 bp, Homo sapien
agtcagtgtcataaggaacggaatggagtggaa

SEQ ID NO: 995650 - DNA, 33 bp, Homo sapien
agtcagtgtcataaggcacggaatggagtggaa

SEQ ID NO: 995651 - DNA, 33 bp, Homo sapien
agtttaaattagttcaactacatggaagacagt

SEQ ID NO: 995652 - DNA, 33 bp, Homo sapien
agtttaaattagttcatctacatggaagacagt

SEQ ID NO: 995653 - DNA, 33 bp, Homo sapien
cccattaacattaatcaccaatccaaggagaga

SEQ ID NO: 995654 - DNA, 33 bp, Homo sapien
cccattaacattaatcgccaatccaaggagaga

SEQ ID NO: 995655 - DNA, 33 bp, Homo sapien
atgacgcttgaagaaaagtaactgaatgaggtg

SEQ ID NO: 995656 - DNA, 33 bp, Homo sapien
atgacgcttgaagaaaggtaactgaatgaggtg

SEQ ID NO: 995657 - DNA, 33 bp, Homo sapien
tgttatcagagacttcactgggtacaaagagaa

SEQ ID NO: 995658 - DNA, 33 bp, Homo sapien
tgttatcagagacttcgctgggtacaaagagaa

SEQ ID NO: 995659 - DNA, 33 bp, Homo sapien
tcctatgaggaaataacacatcctgcagtagtt

SEQ ID NO: 995660 - DNA, 33 bp, Homo sapien
tcctatgaggaaataagacatcctgcagtagtt

SEQ ID NO: 995661 - DNA, 33 bp, Homo sapien
atctgttattagactacgcgataatctgaaggt

SEQ ID NO: 995662 - DNA, 33 bp, Homo sapien
atctgttattagactatgcgataatctgaaggt

SEQ ID NO: 995663 - DNA, 33 bp, Homo sapien
tttatgaagtatatgccattgttttcattgtat

SEQ ID NO: 995664 - DNA, 33 bp, Homo sapien
tttatgaagtatatgctattgttttcattgtat

SEQ ID NO: 995665 - DNA, 33 bp, Homo sapien
atatctttgagttagaatatctgacttagaatt

SEQ ID NO: 995666 - DNA, 33 bp, Homo sapien
atatctttgagttagattatctgacttagaatt

SEQ ID NO: 995667 - DNA, 33 bp, Homo sapien
gtttttaaacaaaatcggagaaggacttattta

SEQ ID NO: 995668 - DNA, 33 bp, Homo sapien
gtttttaaacaaaatctgagaaggacttattta

SEQ ID NO: 995669 - DNA, 33 bp, Homo sapien
gctgccataataaaacactccagtcttcttaag

SEQ ID NO: 995670 - DNA, 33 bp, Homo sapien
gctgccataataaaacgctccagtcttcttaag

SEQ ID NO: 995671 - DNA, 33 bp, Homo sapien
atgatttccttgttaacgtctactattcgatac

SEQ ID NO: 995672 - DNA, 33 bp, Homo sapien
atgatttccttgttaatgtctactattcgatac

SEQ ID NO: 995673 - DNA, 33 bp, Homo sapien
tacgtatgaaatcttacggaacctgaattgtca

SEQ ID NO: 995674 - DNA, 33 bp, Homo sapien
tacgtatgaaatcttatggaacctgaattgtca

SEQ ID NO: 995675 - DNA, 33 bp, Homo sapien
ataagaaattgtgataagaatacctactttgtt

SEQ ID NO: 995676 - DNA, 33 bp, Homo sapien
ataagaaattgtgataggaatacctactttgtt

SEQ ID NO: 995677 - DNA, 33 bp, Homo sapien
accggggaatggaacacgatgataccgagaaac

SEQ ID NO: 995678 - DNA, 33 bp, Homo sapien
accggggaatggaacatgatgataccgagaaac

SEQ ID NO: 995679 - DNA, 33 bp, Homo sapien
gagcccgatgtcacaactgcttagtctcagatc

SEQ ID NO: 995680 - DNA, 33 bp, Homo sapien
gagcccgatgtcacaattgcttagtctcagatc

SEQ ID NO: 995681 - DNA, 33 bp, Homo sapien
atttttcctatcacataataagcagttagtagg

SEQ ID NO: 995682 - DNA, 33 bp, Homo sapien
atttttcctatcacatgataagcagttagtagg

SEQ ID NO: 995683 - DNA, 33 bp, Homo sapien
taactgtttgatgtccaagacttatagataact

SEQ ID NO: 995684 - DNA, 33 bp, Homo sapien
taactgtttgatgtccgagacttatagataact

SEQ ID NO: 995685 - DNA, 33 bp, Homo sapien
ctttttaaataaatcaaaatgcttaaaatctga

SEQ ID NO: 995686 - DNA, 33 bp, Homo sapien
ctttttaaataaatcagaatgcttaaaatctga

SEQ ID NO: 995687 - DNA, 33 bp, Homo sapien
caacaattccttaaagcaagatccttgaaagag

SEQ ID NO: 995688 - DNA, 33 bp, Homo sapien
caacaattccttaaagtaagatccttgaaagag

SEQ ID NO: 995689 - DNA, 33 bp, Homo sapien
agattttcctgctctcaatagaatgagtgattt

SEQ ID NO: 995690 - DNA, 33 bp, Homo sapien
agattttcctgctctcgatagaatgagtgattt

SEQ ID NO: 995691 - DNA, 33 bp, Homo sapien
aggtggaaggagaaacagtccaggttccccatt

SEQ ID NO: 995692 - DNA, 33 bp, Homo sapien
aggtggaaggagaaacggtccaggttccccatt

SEQ ID NO: 995693 - DNA, 33 bp, Homo sapien
aatatacaatttgatcacttgcaacttctacct

SEQ ID NO: 995694 - DNA, 33 bp, Homo sapien
aatatacaatttgatcgcttgcaacttctacct

SEQ ID NO: 995695 - DNA, 33 bp, Homo sapien
tgagttgcattcaggcactaagtatgtggcaat

SEQ ID NO: 995696 - DNA, 33 bp, Homo sapien
tgagttgcattcaggcgctaagtatgtggcaat

SEQ ID NO: 995697 - DNA, 33 bp, Homo sapien
gatttctgaggttgctcaagagaagactcagca

SEQ ID NO: 995698 - DNA, 33 bp, Homo sapien
gatttctgaggttgcttaagagaagactcagca

SEQ ID NO: 995699 - DNA, 33 bp, Homo sapien
ttgttactgctgatcaatgagggacccaatgct

SEQ ID NO: 995700 - DNA, 33 bp, Homo sapien
ttgttactgctgatcagtgagggacccaatgct

SEQ ID NO: 995701 - DNA, 33 bp, Homo sapien
tcttcctcactcagtcaaccagctcactagtca

SEQ ID NO: 995702 - DNA, 33 bp, Homo sapien
tcttcctcactcagtcgaccagctcactagtca

SEQ ID NO: 995703 - DNA, 33 bp, Homo sapien
aatgaatctcaaatgcacactgttgagtgaaag

SEQ ID NO: 995704 - DNA, 33 bp, Homo sapien
aatgaatctcaaatgcgcactgttgagtgaaag

SEQ ID NO: 995705 - DNA, 33 bp, Homo sapien
ctttgtagtataaacacaagataagaagacaca

SEQ ID NO: 995706 - DNA, 33 bp, Homo sapien
ctttgtagtataaacagaagataagaagacaca

SEQ ID NO: 995707 - DNA, 33 bp, Homo sapien
gacgtgcccagcatgactaataaaacaatactg

SEQ ID NO: 995708 - DNA, 33 bp, Homo sapien
gacgtgcccagcatgagtaataaaacaatactg

SEQ ID NO: 995709 - DNA, 33 bp, Homo sapien
gaggtcacttctatggaagtaaggataggaaga

SEQ ID NO: 995710 - DNA, 33 bp, Homo sapien
gaggtcacttctatgggagtaaggataggaaga

SEQ ID NO: 995711 - DNA, 33 bp, Homo sapien
gaatatgaaacaaagacgctgaaagcagacaaa

SEQ ID NO: 995712 - DNA, 33 bp, Homo sapien
gaatatgaaacaaagaggctgaaagcagacaaa

SEQ ID NO: 995713 - DNA, 33 bp, Homo sapien
aaactaaatgcccaacacaacagtattacgatg

SEQ ID NO: 995714 - DNA, 33 bp, Homo sapien
aaactaaatgcccaacgcaacagtattacgatg

SEQ ID NO: 995715 - DNA, 33 bp, Homo sapien
aatcagaactttccccaggctagctgactagtt

SEQ ID NO: 995716 - DNA, 33 bp, Homo sapien
aatcagaactttccccgggctagctgactagtt

SEQ ID NO: 995717 - DNA, 33 bp, Homo sapien
gtattctagctttcacccttctgtattgtaagt

SEQ ID NO: 995718 - DNA, 33 bp, Homo sapien
gtattctagctttcactcttctgtattgtaagt

SEQ ID NO: 995719 - DNA, 33 bp, Homo sapien
tgatgttcttccttcactcacacaacaggcatt

SEQ ID NO: 995720 - DNA, 33 bp, Homo sapien
tgatgttcttccttcagtcacacaacaggcatt

SEQ ID NO: 995721 - DNA, 33 bp, Homo sapien
ctgggccctctgcctcgatgctggaagacgtgg

SEQ ID NO: 995722 - DNA, 33 bp, Homo sapien
ctgggccctctgcctctatgctggaagacgtgg

SEQ ID NO: 995723 - DNA, 33 bp, Homo sapien
aaccctcatgatgaccaatggtggttgagttcc

SEQ ID NO: 995724 - DNA, 33 bp, Homo sapien
aaccctcatgatgaccgatggtggttgagttcc

SEQ ID NO: 995725 - DNA, 33 bp, Homo sapien
tagtccataaagttccagctcatagcaggagag

SEQ ID NO: 995726 - DNA, 33 bp, Homo sapien
tagtccataaagttccggctcatagcaggagag

SEQ ID NO: 995727 - DNA, 33 bp, Homo sapien
tggacaaaaccagaaaatagtgtgatttggaca

SEQ ID NO: 995728 - DNA, 33 bp, Homo sapien
tggacaaaaccagaaattagtgtgatttggaca

SEQ ID NO: 995729 - DNA, 33 bp, Homo sapien
acatttgtcattattacggtttgggacactttc

SEQ ID NO: 995730 - DNA, 33 bp, Homo sapien
acatttgtcattattatggtttgggacactttc

SEQ ID NO: 995731 - DNA, 33 bp, Homo sapien
ttatcacaactgtcaaaacagactcaggcagta

SEQ ID NO: 995732 - DNA, 33 bp, Homo sapien
ttatcacaactgtcaacacagactcaggcagta

SEQ ID NO: 995733 - DNA, 33 bp, Homo sapien
atcaactaaagctaacactagaaattctactcc

SEQ ID NO: 995734 - DNA, 33 bp, Homo sapien
atcaactaaagctaaccctagaaattctactcc

SEQ ID NO: 995735 - DNA, 33 bp, Homo sapien
ggtctagattctccacagatccccaacaactaa

SEQ ID NO: 995736 - DNA, 33 bp, Homo sapien
ggtctagattctccacggatccccaacaactaa

SEQ ID NO: 995737 - DNA, 33 bp, Homo sapien
aaagggtgtagatacaaggaaagatggaggatt

SEQ ID NO: 995738 - DNA, 33 bp, Homo sapien
aaagggtgtagatacagggaaagatggaggatt

SEQ ID NO: 995739 - DNA, 33 bp, Homo sapien
atagtgagacttaaacaaaacaacacacataaa

SEQ ID NO: 995740 - DNA, 33 bp, Homo sapien
atagtgagacttaaacgaaacaacacacataaa

SEQ ID NO: 995741 - DNA, 33 bp, Homo sapien
cactggcttctggttacgcacatttcagatctc

SEQ ID NO: 995742 - DNA, 33 bp, Homo sapien
cactggcttctggttatgcacatttcagatctc

SEQ ID NO: 995743 - DNA, 33 bp, Homo sapien
agtgcctcagcctagacgtagaatatcatgaca

SEQ ID NO: 995744 - DNA, 33 bp, Homo sapien
agtgcctcagcctagaggtagaatatcatgaca

SEQ ID NO: 995745 - DNA, 33 bp, Homo sapien
atccaggtttccagacccttgaggaaatggtgg

SEQ ID NO: 995746 - DNA, 33 bp, Homo sapien
atccaggtttccagactcttgaggaaatggtgg

SEQ ID NO: 995747 - DNA, 33 bp, Homo sapien
agtcattatgtaatcacaggtctctctgtgaga

SEQ ID NO: 995748 - DNA, 33 bp, Homo sapien
agtcattatgtaatcagaggtctctctgtgaga

SEQ ID NO: 995749 - DNA, 33 bp, Homo sapien
gagaataaagtgccccaaatcatgagcagccaa

SEQ ID NO: 995750 - DNA, 33 bp, Homo sapien
gagaataaagtgccccgaatcatgagcagccaa

SEQ ID NO: 995751 - DNA, 33 bp, Homo sapien
ctttggagctaattgacagtttcctttagcccc

SEQ ID NO: 995752 - DNA, 33 bp, Homo sapien
ctttggagctaattgagagtttcctttagcccc

SEQ ID NO: 995753 - DNA, 33 bp, Homo sapien
aatgtattcccatcataagagtcatcacacaca

SEQ ID NO: 995754 - DNA, 33 bp, Homo sapien
aatgtattcccatcatgagagtcatcacacaca

SEQ ID NO: 995755 - DNA, 33 bp, Homo sapien
tcatctttccaggttaaggttggtatgataata

SEQ ID NO: 995756 - DNA, 33 bp, Homo sapien
tcatctttccaggttatggttggtatgataata

SEQ ID NO: 995757 - DNA, 33 bp, Homo sapien
taagacatttgatcccaaaccatttcttgctca

SEQ ID NO: 995758 - DNA, 33 bp, Homo sapien
taagacatttgatccccaaccatttcttgctca

SEQ ID NO: 995759 - DNA, 33 bp, Homo sapien
actagcttcttaggtacagttctgcagttggtc

SEQ ID NO: 995760 - DNA, 33 bp, Homo sapien
actagcttcttaggtatagttctgcagttggtc

SEQ ID NO: 995761 - DNA, 33 bp, Homo sapien
ggaccgcatttcctaccggggtcaatgtgttta

SEQ ID NO: 995762 - DNA, 33 bp, Homo sapien
ggaccgcatttcctactggggtcaatgtgttta

SEQ ID NO: 995763 - DNA, 33 bp, Homo sapien
aaggcatatctgagacagtaatttatatggaaa

SEQ ID NO: 995764 - DNA, 33 bp, Homo sapien
aaggcatatctgagacggtaatttatatggaaa

SEQ ID NO: 995765 - DNA, 33 bp, Homo sapien
aggcagctacacacaaagaaatcatcagaagtt

SEQ ID NO: 995766 - DNA, 33 bp, Homo sapien
aggcagctacacacaaggaaatcatcagaagtt

SEQ ID NO: 995767 - DNA, 33 bp, Homo sapien
tctatcgatgcatagaaaggttaaatcattcag

SEQ ID NO: 995768 - DNA, 33 bp, Homo sapien
tctatcgatgcatagagaggttaaatcattcag

SEQ ID NO: 995769 - DNA, 33 bp, Homo sapien
ctgtgtgaatattttaccatagcacctatacat

SEQ ID NO: 995770 - DNA, 33 bp, Homo sapien
ctgtgtgaatattttatcatagcacctatacat

SEQ ID NO: 995771 - DNA, 33 bp, Homo sapien
gagtccagggctgttcagaaaaatgaagcagtt

SEQ ID NO: 995772 - DNA, 33 bp, Homo sapien
gagtccagggctgttcggaaaaatgaagcagtt

SEQ ID NO: 995773 - DNA, 33 bp, Homo sapien
gtttgtaaggatgcaacgtgtaaagctttttat

SEQ ID NO: 995774 - DNA, 33 bp, Homo sapien
gtttgtaaggatgcaatgtgtaaagctttttat

SEQ ID NO: 995775 - DNA, 33 bp, Homo sapien
catgttattgtggaaagatcttgggttcttaac

SEQ ID NO: 995776 - DNA, 33 bp, Homo sapien
catgttattgtggaaatatcttgggttcttaac

SEQ ID NO: 995777 - DNA, 33 bp, Homo sapien
agacagcattgatctgcactagaatatattttt

SEQ ID NO: 995778 - DNA, 33 bp, Homo sapien
agacagcattgatctggactagaatatattttt

SEQ ID NO: 995779 - DNA, 33 bp, Homo sapien
atttgtcacagtgcaaatgttagaatttcatca

SEQ ID NO: 995780 - DNA, 33 bp, Homo sapien
atttgtcacagtgcaagtgttagaatttcatca

SEQ ID NO: 995781 - DNA, 33 bp, Homo sapien
gatctaagactgttgacggatgcctggagtggt

SEQ ID NO: 995782 - DNA, 33 bp, Homo sapien
gatctaagactgttgatggatgcctggagtggt

SEQ ID NO: 995783 - DNA, 33 bp, Homo sapien
gggtagccggcatccaatgactattcaatgact

SEQ ID NO: 995784 - DNA, 33 bp, Homo sapien
gggtagccggcatccactgactattcaatgact

SEQ ID NO: 995785 - DNA, 33 bp, Homo sapien
tgtttcatcaaacaaaatcatccaagaagaata

SEQ ID NO: 995786 - DNA, 33 bp, Homo sapien
tgtttcatcaaacaaactcatccaagaagaata

SEQ ID NO: 995787 - DNA, 33 bp, Homo sapien
gggcatatgtctagtcaattgtgaagacagacc

SEQ ID NO: 995788 - DNA, 33 bp, Homo sapien
gggcatatgtctagtcgattgtgaagacagacc

SEQ ID NO: 995789 - DNA, 33 bp, Homo sapien
tttaatttttgaaatcaagatgagagctttata

SEQ ID NO: 995790 - DNA, 33 bp, Homo sapien
tttaatttttgaaatcgagatgagagctttata

SEQ ID NO: 995791 - DNA, 33 bp, Homo sapien
ctaaaaagtgaattcactctgtaagcctaccaa

SEQ ID NO: 995792 - DNA, 33 bp, Homo sapien
ctaaaaagtgaattcattctgtaagcctaccaa

SEQ ID NO: 995793 - DNA, 33 bp, Homo sapien
gcccagcttgagtagtcaaagctccctgacagg

SEQ ID NO: 995794 - DNA, 33 bp, Homo sapien
gcccagcttgagtagttaaagctccctgacagg

SEQ ID NO: 995795 - DNA, 33 bp, Homo sapien
acatggccatgataaagtcaccattcattaagt

SEQ ID NO: 995796 - DNA, 33 bp, Homo sapien
acatggccatgataaattcaccattcattaagt

SEQ ID NO: 995797 - DNA, 33 bp, Homo sapien
attttgcagttatacaaaatggcactctaaatt

SEQ ID NO: 995798 - DNA, 33 bp, Homo sapien
attttgcagttatacagaatggcactctaaatt

SEQ ID NO: 995799 - DNA, 33 bp, Homo sapien
ttattaacagttaagaactccttgtttctccat

SEQ ID NO: 995800 - DNA, 33 bp, Homo sapien
ttattaacagttaagagctccttgtttctccat

SEQ ID NO: 995801 - DNA, 33 bp, Homo sapien
aacaaactgtttgacacgaaaatgaactcaaaa

SEQ ID NO: 995802 - DNA, 33 bp, Homo sapien
aacaaactgtttgacatgaaaatgaactcaaaa

SEQ ID NO: 995803 - DNA, 33 bp, Homo sapien
actcggtattcagagaggccttgtaaagggtag

SEQ ID NO: 995804 - DNA, 33 bp, Homo sapien
actcggtattcagagatgccttgtaaagggtag

SEQ ID NO: 995805 - DNA, 33 bp, Homo sapien
agtatcttgaatgtcacgcaaaagagcccaaac

SEQ ID NO: 995806 - DNA, 33 bp, Homo sapien
agtatcttgaatgtcatgcaaaagagcccaaac

SEQ ID NO: 995807 - DNA, 33 bp, Homo sapien
ggccatagtttgactcaatgatctctggataaa

SEQ ID NO: 995808 - DNA, 33 bp, Homo sapien
ggccatagtttgactcgatgatctctggataaa

SEQ ID NO: 995809 - DNA, 33 bp, Homo sapien
ctaggataaccactgggataggaaatcagggaa

SEQ ID NO: 995810 - DNA, 33 bp, Homo sapien
ctaggataaccactggtataggaaatcagggaa

SEQ ID NO: 995811 - DNA, 33 bp, Homo sapien
gtttgccaacataaatgatactgtggaaaacat

SEQ ID NO: 995812 - DNA, 33 bp, Homo sapien
gtttgccaacataaattatactgtggaaaacat

SEQ ID NO: 995813 - DNA, 33 bp, Homo sapien
gttaatagacatctaggcagtttcctacttgtt

SEQ ID NO: 995814 - DNA, 33 bp, Homo sapien
gttaatagacatctagtcagtttcctacttgtt

SEQ ID NO: 995815 - DNA, 33 bp, Homo sapien
tgtgatcgtaagaaaacgacctaaataccatga

SEQ ID NO: 995816 - DNA, 33 bp, Homo sapien
tgtgatcgtaagaaaatgacctaaataccatga

SEQ ID NO: 995817 - DNA, 33 bp, Homo sapien
gagaaattcgccaccacgatctaatcagctccc

SEQ ID NO: 995818 - DNA, 33 bp, Homo sapien
gagaaattcgccaccatgatctaatcagctccc

SEQ ID NO: 995819 - DNA, 33 bp, Homo sapien
gagcccatgtcaaatcactttttcctgtgcgtt

SEQ ID NO: 995820 - DNA, 33 bp, Homo sapien
gagcccatgtcaaatcgctttttcctgtgcgtt

SEQ ID NO: 995821 - DNA, 33 bp, Homo sapien
tctgtagccttatcccagagagattattgcaca

SEQ ID NO: 995822 - DNA, 33 bp, Homo sapien
tctgtagccttatccctgagagattattgcaca

SEQ ID NO: 995823 - DNA, 33 bp, Homo sapien
agcttggaagagaacaatgggctctgcttcccc

SEQ ID NO: 995824 - DNA, 33 bp, Homo sapien
agcttggaagagaacattgggctctgcttcccc

SEQ ID NO: 995825 - DNA, 33 bp, Homo sapien
attgaataaaagtcacagtaggaaacaatgctt

SEQ ID NO: 995826 - DNA, 33 bp, Homo sapien
attgaataaaagtcaccgtaggaaacaatgctt

SEQ ID NO: 995827 - DNA, 33 bp, Homo sapien
cgaagaaaatgcaggaaaagttatagctgagct

SEQ ID NO: 995828 - DNA, 33 bp, Homo sapien
cgaagaaaatgcaggagaagttatagctgagct

SEQ ID NO: 995829 - DNA, 33 bp, Homo sapien
agaagttagacttcaactaattcagcaaggccc

SEQ ID NO: 995830 - DNA, 33 bp, Homo sapien
agaagttagacttcaattaattcagcaaggccc

SEQ ID NO: 995831 - DNA, 33 bp, Homo sapien
ggactctgtgaggtcgcaaggtggcacagggct

SEQ ID NO: 995832 - DNA, 33 bp, Homo sapien
ggactctgtgaggtcgtaaggtggcacagggct

SEQ ID NO: 995833 - DNA, 33 bp, Homo sapien
tgctttaaaaatgacaccttgctgcattgtcaa

SEQ ID NO: 995834 - DNA, 33 bp, Homo sapien
tgctttaaaaatgacatcttgctgcattgtcaa

SEQ ID NO: 995835 - DNA, 33 bp, Homo sapien
tctacatcagagggtaagtatactgttaacttt

SEQ ID NO: 995836 - DNA, 33 bp, Homo sapien
tctacatcagagggtaggtatactgttaacttt

SEQ ID NO: 995837 - DNA, 33 bp, Homo sapien
taaggaggtagactcacgagagaaaattgcagg

SEQ ID NO: 995838 - DNA, 33 bp, Homo sapien
taaggaggtagactcatgagagaaaattgcagg

SEQ ID NO: 995839 - DNA, 33 bp, Homo sapien
caggaagaagtgaaacaaatccagaccacaaca

SEQ ID NO: 995840 - DNA, 33 bp, Homo sapien
caggaagaagtgaaacgaatccagaccacaaca

SEQ ID NO: 995841 - DNA, 33 bp, Homo sapien
tttaattcagtggctactaattgattgctcact

SEQ ID NO: 995842 - DNA, 33 bp, Homo sapien
tttaattcagtggctattaattgattgctcact

SEQ ID NO: 995843 - DNA, 33 bp, Homo sapien
tattttgggtcaaggaagctggacttttatagt

SEQ ID NO: 995844 - DNA, 33 bp, Homo sapien
tattttgggtcaaggaggctggacttttatagt

SEQ ID NO: 995845 - DNA, 33 bp, Homo sapien
gatctgtaactggttaactggttttagactata

SEQ ID NO: 995846 - DNA, 33 bp, Homo sapien
gatctgtaactggttagctggttttagactata

SEQ ID NO: 995847 - DNA, 33 bp, Homo sapien
tcaaattctcttgccactgctgagtgcccatcc

SEQ ID NO: 995848 - DNA, 33 bp, Homo sapien
tcaaattctcttgccagtgctgagtgcccatcc

SEQ ID NO: 995849 - DNA, 33 bp, Homo sapien
tcaaactcgccaagtgaacacatgaaaagccag

SEQ ID NO: 995850 - DNA, 33 bp, Homo sapien
tcaaactcgccaagtggacacatgaaaagccag

SEQ ID NO: 995851 - DNA, 33 bp, Homo sapien
ccctcctggaacaataaacttactaattaatgg

SEQ ID NO: 995852 - DNA, 33 bp, Homo sapien
ccctcctggaacaatacacttactaattaatgg

SEQ ID NO: 995853 - DNA, 33 bp, Homo sapien
gctatactgaccatgaaaaagagaatgcttgta

SEQ ID NO: 995854 - DNA, 33 bp, Homo sapien
gctatactgaccatgacaaagagaatgcttgta

SEQ ID NO: 995855 - DNA, 33 bp, Homo sapien
acagtctaagttataacaaaaagagtaggtgca

SEQ ID NO: 995856 - DNA, 33 bp, Homo sapien
acagtctaagttataataaaaagagtaggtgca

SEQ ID NO: 995857 - DNA, 33 bp, Homo sapien
acctctcttgatcctcaatacaagtagtgttca

SEQ ID NO: 995858 - DNA, 33 bp, Homo sapien
acctctcttgatcctcgatacaagtagtgttca

SEQ ID NO: 995859 - DNA, 33 bp, Homo sapien
tattttactgcatctgcatttagtatttattcg

SEQ ID NO: 995860 - DNA, 33 bp, Homo sapien
tattttactgcatctgtatttagtatttattcg

SEQ ID NO: 995861 - DNA, 33 bp, Homo sapien
gagtttattagaaagacgctagagaggagaagg

SEQ ID NO: 995862 - DNA, 33 bp, Homo sapien
gagtttattagaaagaggctagagaggagaagg

SEQ ID NO: 995863 - DNA, 33 bp, Homo sapien
ctgattggtgggtagaaacaaacaacaaagaaa

SEQ ID NO: 995864 - DNA, 33 bp, Homo sapien
ctgattggtgggtagagacaaacaacaaagaaa

SEQ ID NO: 995865 - DNA, 33 bp, Homo sapien
gcctgaaatgtcaatcactttccatgtggatgc

SEQ ID NO: 995866 - DNA, 33 bp, Homo sapien
gcctgaaatgtcaatccctttccatgtggatgc

SEQ ID NO: 995867 - DNA, 33 bp, Homo sapien
gccaagaaatggcagacccaagtgttgaaatca

SEQ ID NO: 995868 - DNA, 33 bp, Homo sapien
gccaagaaatggcagatccaagtgttgaaatca

SEQ ID NO: 995869 - DNA, 33 bp, Homo sapien
acttagcttgtctgaaactgtcccttgtgccaa

SEQ ID NO: 995870 - DNA, 33 bp, Homo sapien
acttagcttgtctgaagctgtcccttgtgccaa

SEQ ID NO: 995871 - DNA, 33 bp, Homo sapien
gcctggctttgtcagcagctacttagagaggtt

SEQ ID NO: 995872 - DNA, 33 bp, Homo sapien
gcctggctttgtcagcggctacttagagaggtt

SEQ ID NO: 995873 - DNA, 33 bp, Homo sapien
tctgctgaggatgttggacacccagtagtgcca

SEQ ID NO: 995874 - DNA, 33 bp, Homo sapien
tctgctgaggatgttgtacacccagtagtgcca

SEQ ID NO: 995875 - DNA, 33 bp, Homo sapien
gtttcaaagtatgctcaccacagaggttatacc

SEQ ID NO: 995876 - DNA, 33 bp, Homo sapien
gtttcaaagtatgctcgccacagaggttatacc

SEQ ID NO: 995877 - DNA, 33 bp, Homo sapien
gaatctaggtgcctaccaggacaatggtgccat

SEQ ID NO: 995878 - DNA, 33 bp, Homo sapien
gaatctaggtgcctactaggacaatggtgccat

SEQ ID NO: 995879 - DNA, 33 bp, Homo sapien
aaaaatgagagtgtgacctacttgtggcacagg

SEQ ID NO: 995880 - DNA, 33 bp, Homo sapien
aaaaatgagagtgtgatctacttgtggcacagg

SEQ ID NO: 995881 - DNA, 33 bp, Homo sapien
aaaacaagtgaagaaaagtataactgatatgct

SEQ ID NO: 995882 - DNA, 33 bp, Homo sapien
aaaacaagtgaagaaatgtataactgatatgct

SEQ ID NO: 995883 - DNA, 33 bp, Homo sapien
ttgtaccctgtcttacccttcacttggatccat

SEQ ID NO: 995884 - DNA, 33 bp, Homo sapien
ttgtaccctgtcttacgcttcacttggatccat

SEQ ID NO: 995885 - DNA, 33 bp, Homo sapien
acaatttgctccaacacctgcaggctactgtac

SEQ ID NO: 995886 - DNA, 33 bp, Homo sapien
acaatttgctccaacatctgcaggctactgtac

SEQ ID NO: 995887 - DNA, 33 bp, Homo sapien
agagagtgagtgaaataaggaaggatcatcatc

SEQ ID NO: 995888 - DNA, 33 bp, Homo sapien
agagagtgagtgaaatgaggaaggatcatcatc

SEQ ID NO: 995889 - DNA, 33 bp, Homo sapien
cagttggataagccaagaaatgaatctacaaga

SEQ ID NO: 995890 - DNA, 33 bp, Homo sapien
cagttggataagccaataaatgaatctacaaga

SEQ ID NO: 995891 - DNA, 33 bp, Homo sapien
gtgatccccagtgatgaaccacgagagtgactt

SEQ ID NO: 995892 - DNA, 33 bp, Homo sapien
gtgatccccagtgatggaccacgagagtgactt

SEQ ID NO: 995893 - DNA, 33 bp, Homo sapien
atgacaagtactttaacaactatgtttctgttt

SEQ ID NO: 995894 - DNA, 33 bp, Homo sapien
atgacaagtactttaataactatgtttctgttt

SEQ ID NO: 995895 - DNA, 33 bp, Homo sapien
acagtgaaaatttcaaatgcagtagaggaccag

SEQ ID NO: 995896 - DNA, 33 bp, Homo sapien
acagtgaaaatttcaagtgcagtagaggaccag

SEQ ID NO: 995897 - DNA, 33 bp, Homo sapien
tatttgttaaaatcacacatccttgttgttttg

SEQ ID NO: 995898 - DNA, 33 bp, Homo sapien
tatttgttaaaatcactcatccttgttgttttg

SEQ ID NO: 995899 - DNA, 33 bp, Homo sapien
ggatgtggtggcatgaagaacgtacagctcctg

SEQ ID NO: 995900 - DNA, 33 bp, Homo sapien
ggatgtggtggcatgaggaacgtacagctcctg

SEQ ID NO: 995901 - DNA, 33 bp, Homo sapien
gaaagattacatttgaaagcccaaagctacagc

SEQ ID NO: 995902 - DNA, 33 bp, Homo sapien
gaaagattacatttgagagcccaaagctacagc

SEQ ID NO: 995903 - DNA, 33 bp, Homo sapien
tttattttttctgaagactcaagctgtagcttt

SEQ ID NO: 995904 - DNA, 33 bp, Homo sapien
tttattttttctgaagcctcaagctgtagcttt

SEQ ID NO: 995905 - DNA, 33 bp, Homo sapien
aaaggtgtatttattacagtgtaccattagcgt

SEQ ID NO: 995906 - DNA, 33 bp, Homo sapien
aaaggtgtatttattagagtgtaccattagcgt

SEQ ID NO: 995907 - DNA, 33 bp, Homo sapien
attaaatgtcatgagcagaataagggtaaagac

SEQ ID NO: 995908 - DNA, 33 bp, Homo sapien
attaaatgtcatgagcggaataagggtaaagac

SEQ ID NO: 995909 - DNA, 33 bp, Homo sapien
tcaatttacaaagtgaagtcagtttctcatctc

SEQ ID NO: 995910 - DNA, 33 bp, Homo sapien
tcaatttacaaagtgaggtcagtttctcatctc

SEQ ID NO: 995911 - DNA, 33 bp, Homo sapien
agtgagggcagacacaatgatgagctgcaaagg

SEQ ID NO: 995912 - DNA, 33 bp, Homo sapien
agtgagggcagacacagtgatgagctgcaaagg

SEQ ID NO: 995913 - DNA, 33 bp, Homo sapien
ttaatttgacctaaaaagctacaagctatatcc

SEQ ID NO: 995914 - DNA, 33 bp, Homo sapien
ttaatttgacctaaaaggctacaagctatatcc

SEQ ID NO: 995915 - DNA, 33 bp, Homo sapien
gtgaaaaacaacatctcaaagtgaggtataaat

SEQ ID NO: 995916 - DNA, 33 bp, Homo sapien
gtgaaaaacaacatctgaaagtgaggtataaat

SEQ ID NO: 995917 - DNA, 33 bp, Homo sapien
tctccattcacgttgcacacccaaaattacaag

SEQ ID NO: 995918 - DNA, 33 bp, Homo sapien
tctccattcacgttgcgcacccaaaattacaag

SEQ ID NO: 995919 - DNA, 33 bp, Homo sapien
aattattgcagtggaacgatcaagacttaagtc

SEQ ID NO: 995920 - DNA, 33 bp, Homo sapien
aattattgcagtggaatgatcaagacttaagtc

SEQ ID NO: 995921 - DNA, 33 bp, Homo sapien
gcccctgaacttcaaacaccatgctgttaatta

SEQ ID NO: 995922 - DNA, 33 bp, Homo sapien
gcccctgaacttcaaataccatgctgttaatta

SEQ ID NO: 995923 - DNA, 33 bp, Homo sapien
ttccttctcaaattcaatcgatatcattgttgg

SEQ ID NO: 995924 - DNA, 33 bp, Homo sapien
ttccttctcaaattcagtcgatatcattgttgg

SEQ ID NO: 995925 - DNA, 33 bp, Homo sapien
ataataagttacaaaacgtaagtctgaactcac

SEQ ID NO: 995926 - DNA, 33 bp, Homo sapien
ataataagttacaaaaggtaagtctgaactcac

SEQ ID NO: 995927 - DNA, 33 bp, Homo sapien
gaattcatgttgccataagggtagtggctgagg

SEQ ID NO: 995928 - DNA, 33 bp, Homo sapien
gaattcatgttgccatgagggtagtggctgagg

SEQ ID NO: 995929 - DNA, 33 bp, Homo sapien
ttagttgttttaacacaggacagtattgttaac

SEQ ID NO: 995930 - DNA, 33 bp, Homo sapien
ttagttgttttaacactggacagtattgttaac

SEQ ID NO: 995931 - DNA, 33 bp, Homo sapien
gacagtattgttaaccactcaatgtgacttgct

SEQ ID NO: 995932 - DNA, 33 bp, Homo sapien
gacagtattgttaaccgctcaatgtgacttgct

SEQ ID NO: 995933 - DNA, 33 bp, Homo sapien
aatgtgcaggttaagacattgattaggaaagag

SEQ ID NO: 995934 - DNA, 33 bp, Homo sapien
aatgtgcaggttaagatattgattaggaaagag

SEQ ID NO: 995935 - DNA, 33 bp, Homo sapien
acctggcacctgtcctaaaaggatttaagtttg

SEQ ID NO: 995936 - DNA, 33 bp, Homo sapien
acctggcacctgtcctgaaaggatttaagtttg

SEQ ID NO: 995937 - DNA, 33 bp, Homo sapien
catgttttattattggaaatttgattaactctt

SEQ ID NO: 995938 - DNA, 33 bp, Homo sapien
catgttttattattgggaatttgattaactctt

SEQ ID NO: 995939 - DNA, 33 bp, Homo sapien
tttggcatcattgtaaccgtgtattgcagtgga

SEQ ID NO: 995940 - DNA, 33 bp, Homo sapien
tttggcatcattgtaatcgtgtattgcagtgga

SEQ ID NO: 995941 - DNA, 33 bp, Homo sapien
tcactatgatgttaaaagaggaagcatcctcat

SEQ ID NO: 995942 - DNA, 33 bp, Homo sapien
tcactatgatgttaaaggaggaagcatcctcat

SEQ ID NO: 995943 - DNA, 33 bp, Homo sapien
atagattacggtggagaatgaaaacaaaaggtc

SEQ ID NO: 995944 - DNA, 33 bp, Homo sapien
atagattacggtggaggatgaaaacaaaaggtc

SEQ ID NO: 995945 - DNA, 33 bp, Homo sapien
agcctctgtaaacaaaataatcgatcaatggct

SEQ ID NO: 995946 - DNA, 33 bp, Homo sapien
agcctctgtaaacaaagtaatcgatcaatggct

SEQ ID NO: 995947 - DNA, 33 bp, Homo sapien
aataaaagttaaacagaaacctcagaagatggg

SEQ ID NO: 995948 - DNA, 33 bp, Homo sapien
aataaaagttaaacaggaacctcagaagatggg

SEQ ID NO: 995949 - DNA, 33 bp, Homo sapien
actacgcaaatgacaaaatgtgagtgcaaggac

SEQ ID NO: 995950 - DNA, 33 bp, Homo sapien
actacgcaaatgacaagatgtgagtgcaaggac

SEQ ID NO: 995951 - DNA, 33 bp, Homo sapien
aaaaactacctttatcaaatattctatcaaatc

SEQ ID NO: 995952 - DNA, 33 bp, Homo sapien
aaaaactacctttatccaatattctatcaaatc

SEQ ID NO: 995953 - DNA, 33 bp, Homo sapien
aaagcaataagaatacagactcttgaacttttt

SEQ ID NO: 995954 - DNA, 33 bp, Homo sapien
aaagcaataagaataccgactcttgaacttttt

SEQ ID NO: 995955 - DNA, 33 bp, Homo sapien
ggctgccactgttggccaattaatcaaaagaac

SEQ ID NO: 995956 - DNA, 33 bp, Homo sapien
ggctgccactgttggctaattaatcaaaagaac

SEQ ID NO: 995957 - DNA, 33 bp, Homo sapien
tacctacagtctgtccacaaatcctgggactct

SEQ ID NO: 995958 - DNA, 33 bp, Homo sapien
tacctacagtctgtccgcaaatcctgggactct

SEQ ID NO: 995959 - DNA, 33 bp, Homo sapien
gttttcttagtggctacaacaaaactaggcaca

SEQ ID NO: 995960 - DNA, 33 bp, Homo sapien
gttttcttagtggctagaacaaaactaggcaca

SEQ ID NO: 995961 - DNA, 33 bp, Homo sapien
atctttatggcatctggatatgttagcactatt

SEQ ID NO: 995962 - DNA, 33 bp, Homo sapien
atctttatggcatctgtatatgttagcactatt

SEQ ID NO: 995963 - DNA, 33 bp, Homo sapien
tggggcaggaaccctgacagcaacaatcactga

SEQ ID NO: 995964 - DNA, 33 bp, Homo sapien
tggggcaggaaccctggcagcaacaatcactga

SEQ ID NO: 995965 - DNA, 33 bp, Homo sapien
tggcgatgcgtaatacaatctttaggtctgcaa

SEQ ID NO: 995966 - DNA, 33 bp, Homo sapien
tggcgatgcgtaatacgatctttaggtctgcaa

SEQ ID NO: 995967 - DNA, 33 bp, Homo sapien
gtgttcatactgacacggactttgtgctcaaca

SEQ ID NO: 995968 - DNA, 33 bp, Homo sapien
gtgttcatactgacactgactttgtgctcaaca

SEQ ID NO: 995969 - DNA, 33 bp, Homo sapien
gttttaggcaatgaagaaatagcaataactgaa

SEQ ID NO: 995970 - DNA, 33 bp, Homo sapien
gttttaggcaatgaagtaatagcaataactgaa

SEQ ID NO: 995971 - DNA, 33 bp, Homo sapien
aatgagtctggacttcacattgaagagcatgtt

SEQ ID NO: 995972 - DNA, 33 bp, Homo sapien
aatgagtctggacttcgcattgaagagcatgtt

SEQ ID NO: 995973 - DNA, 33 bp, Homo sapien
aaagagtttcttttagcaatgcaagtactgatg

SEQ ID NO: 995974 - DNA, 33 bp, Homo sapien
aaagagtttcttttaggaatgcaagtactgatg

SEQ ID NO: 995975 - DNA, 33 bp, Homo sapien
agaaactaaaaagtgccctgcaaaagtaaagag

SEQ ID NO: 995976 - DNA, 33 bp, Homo sapien
agaaactaaaaagtgctctgcaaaagtaaagag

SEQ ID NO: 995977 - DNA, 33 bp, Homo sapien
gctgaattgaattgaacctcaagagtcactgag

SEQ ID NO: 995978 - DNA, 33 bp, Homo sapien
gctgaattgaattgaatctcaagagtcactgag

SEQ ID NO: 995979 - DNA, 33 bp, Homo sapien
ctgttatactgaaatcaatctttgctcacttac

SEQ ID NO: 995980 - DNA, 33 bp, Homo sapien
ctgttatactgaaatcgatctttgctcacttac

SEQ ID NO: 995981 - DNA, 33 bp, Homo sapien
tatgaatgcttccagacagaaatatggaaaatg

SEQ ID NO: 995982 - DNA, 33 bp, Homo sapien
tatgaatgcttccagagagaaatatggaaaatg

SEQ ID NO: 995983 - DNA, 33 bp, Homo sapien
tcagtgaattagcatacgcaaaagcacttttta

SEQ ID NO: 995984 - DNA, 33 bp, Homo sapien
tcagtgaattagcataggcaaaagcacttttta

SEQ ID NO: 995985 - DNA, 33 bp, Homo sapien
cctttgctcttaaaccacagcctggatgtacca

SEQ ID NO: 995986 - DNA, 33 bp, Homo sapien
cctttgctcttaaaccgcagcctggatgtacca

SEQ ID NO: 995987 - DNA, 33 bp, Homo sapien
attttccatttaaatccacaaggccacacagaa

SEQ ID NO: 995988 - DNA, 33 bp, Homo sapien
attttccatttaaatctacaaggccacacagaa

SEQ ID NO: 995989 - DNA, 33 bp, Homo sapien
agtagtttgttctcacagaagtaaacgtgtttg

SEQ ID NO: 995990 - DNA, 33 bp, Homo sapien
agtagtttgttctcaccgaagtaaacgtgtttg

SEQ ID NO: 995991 - DNA, 33 bp, Homo sapien
tctaagtgatatgtaaaaggggcatttatgttt

SEQ ID NO: 995992 - DNA, 33 bp, Homo sapien
tctaagtgatatgtaagaggggcatttatgttt

SEQ ID NO: 995993 - DNA, 33 bp, Homo sapien
gtagatagtaactcacaaagactggagaatgtt

SEQ ID NO: 995994 - DNA, 33 bp, Homo sapien
gtagatagtaactcacgaagactggagaatgtt

SEQ ID NO: 995995 - DNA, 33 bp, Homo sapien
gaatttttgtgtataaaggcacatttaagaatt

SEQ ID NO: 995996 - DNA, 33 bp, Homo sapien
gaatttttgtgtataagggcacatttaagaatt

SEQ ID NO: 995997 - DNA, 33 bp, Homo sapien
agctatagtttagacacgttctcctaaaaagac

SEQ ID NO: 995998 - DNA, 33 bp, Homo sapien
agctatagtttagacatgttctcctaaaaagac

SEQ ID NO: 995999 - DNA, 33 bp, Homo sapien
tgaacaattttagacggccaggaaatgagtcac

SEQ ID NO: 996000 - DNA, 33 bp, Homo sapien
tgaacaattttagacgtccaggaaatgagtcac

SEQ ID NO: 996001 - DNA, 33 bp, Homo sapien
tttgagttgccataaacaccataatccgcaata

SEQ ID NO: 996002 - DNA, 33 bp, Homo sapien
tttgagttgccataaagaccataatccgcaata

SEQ ID NO: 996003 - DNA, 33 bp, Homo sapien
tagtagattccatgcagaaattttgaactcaga

SEQ ID NO: 996004 - DNA, 33 bp, Homo sapien
tagtagattccatgcataaattttgaactcaga

SEQ ID NO: 996005 - DNA, 33 bp, Homo sapien
tctcaacccctaatccacctgtcagagaagaaa

SEQ ID NO: 996006 - DNA, 33 bp, Homo sapien
tctcaacccctaatcctcctgtcagagaagaaa

SEQ ID NO: 996007 - DNA, 33 bp, Homo sapien
actatctactgaggcccgagactgcatggaggg

SEQ ID NO: 996008 - DNA, 33 bp, Homo sapien
actatctactgaggcctgagactgcatggaggg

SEQ ID NO: 996009 - DNA, 33 bp, Homo sapien
ggaggtggaggtagtaagaagctgcatccctca

SEQ ID NO: 996010 - DNA, 33 bp, Homo sapien
ggaggtggaggtagtaggaagctgcatccctca

SEQ ID NO: 996011 - DNA, 33 bp, Homo sapien
cacacgccatgtaatacggtttggctatgaccc

SEQ ID NO: 996012 - DNA, 33 bp, Homo sapien
cacacgccatgtaatatggtttggctatgaccc

SEQ ID NO: 996013 - DNA, 33 bp, Homo sapien
accaactgtagcacaaacaattaccggaaacaa

SEQ ID NO: 996014 - DNA, 33 bp, Homo sapien
accaactgtagcacaagcaattaccggaaacaa

SEQ ID NO: 996015 - DNA, 33 bp, Homo sapien
aacaaaaaaatatctcaaagtccagctgcgtct

SEQ ID NO: 996016 - DNA, 33 bp, Homo sapien
aacaaaaaaatatctcgaagtccagctgcgtct

SEQ ID NO: 996017 - DNA, 33 bp, Homo sapien
cctactgatagaagacaggatcagggaagtgct

SEQ ID NO: 996018 - DNA, 33 bp, Homo sapien
cctactgatagaagacgggatcagggaagtgct

SEQ ID NO: 996019 - DNA, 33 bp, Homo sapien
ctttgtctctcttaaacctaactgatctattgt

SEQ ID NO: 996020 - DNA, 33 bp, Homo sapien
ctttgtctctcttaaatctaactgatctattgt

SEQ ID NO: 996021 - DNA, 33 bp, Homo sapien
ctgcttatatcataaccgaacacttggtacaaa

SEQ ID NO: 996022 - DNA, 33 bp, Homo sapien
ctgcttatatcataactgaacacttggtacaaa

SEQ ID NO: 996023 - DNA, 33 bp, Homo sapien
aatgagtatgttgagacaattcaatcatatttc

SEQ ID NO: 996024 - DNA, 33 bp, Homo sapien
aatgagtatgttgagagaattcaatcatatttc

SEQ ID NO: 996025 - DNA, 33 bp, Homo sapien
tacattctgcccattcccaaaaaaagttccatc

SEQ ID NO: 996026 - DNA, 33 bp, Homo sapien
tacattctgcccattctcaaaaaaagttccatc

SEQ ID NO: 996027 - DNA, 33 bp, Homo sapien
cgttccaagacaaagacgttctattgaagatat

SEQ ID NO: 996028 - DNA, 33 bp, Homo sapien
cgttccaagacaaagatgttctattgaagatat

SEQ ID NO: 996029 - DNA, 33 bp, Homo sapien
cacaaaaacagcatacactcttctcaaatgaac

SEQ ID NO: 996030 - DNA, 33 bp, Homo sapien
cacaaaaacagcatacgctcttctcaaatgaac

SEQ ID NO: 996031 - DNA, 33 bp, Homo sapien
aactgttccatgatgacgtggcataaaagagag

SEQ ID NO: 996032 - DNA, 33 bp, Homo sapien
aactgttccatgatgatgtggcataaaagagag

SEQ ID NO: 996033 - DNA, 33 bp, Homo sapien
ccttgcactggaaaagacaaatgattgtgacat

SEQ ID NO: 996034 - DNA, 33 bp, Homo sapien
ccttgcactggaaaaggcaaatgattgtgacat

SEQ ID NO: 996035 - DNA, 33 bp, Homo sapien
agttgatgttgtattacactgtgtcaacgtcat

SEQ ID NO: 996036 - DNA, 33 bp, Homo sapien
agttgatgttgtattatactgtgtcaacgtcat

SEQ ID NO: 996037 - DNA, 33 bp, Homo sapien
gagaggattattgttccaagcgttgaacaatag

SEQ ID NO: 996038 - DNA, 33 bp, Homo sapien
gagaggattattgttcgaagcgttgaacaatag

SEQ ID NO: 996039 - DNA, 33 bp, Homo sapien
aatagctactagacaaacactacctctacttct

SEQ ID NO: 996040 - DNA, 33 bp, Homo sapien
aatagctactagacaatcactacctctacttct

SEQ ID NO: 996041 - DNA, 33 bp, Homo sapien
agcctggggactagaacggctgcttcagagagg

SEQ ID NO: 996042 - DNA, 33 bp, Homo sapien
agcctggggactagaagggctgcttcagagagg

SEQ ID NO: 996043 - DNA, 33 bp, Homo sapien
ggcaaaataacataaaataaagcctgttataag

SEQ ID NO: 996044 - DNA, 33 bp, Homo sapien
ggcaaaataacataaagtaaagcctgttataag

SEQ ID NO: 996045 - DNA, 33 bp, Homo sapien
gtagaaacagtatttcaagtacctatgcaacca

SEQ ID NO: 996046 - DNA, 33 bp, Homo sapien
gtagaaacagtatttcgagtacctatgcaacca

SEQ ID NO: 996047 - DNA, 33 bp, Homo sapien
gtagcggacgcagtgcagatacaagggacaaat

SEQ ID NO: 996048 - DNA, 33 bp, Homo sapien
gtagcggacgcagtgcggatacaagggacaaat

SEQ ID NO: 996049 - DNA, 33 bp, Homo sapien
aaggatcttgtctttacctgccctcaagctcct

SEQ ID NO: 996050 - DNA, 33 bp, Homo sapien
aaggatcttgtctttatctgccctcaagctcct

SEQ ID NO: 996051 - DNA, 33 bp, Homo sapien
taagtaatgccaaccacaaaagaagaggataac

SEQ ID NO: 996052 - DNA, 33 bp, Homo sapien
taagtaatgccaaccataaaagaagaggataac

SEQ ID NO: 996053 - DNA, 33 bp, Homo sapien
tatctttgcagtttccacaaataagcctatctc

SEQ ID NO: 996054 - DNA, 33 bp, Homo sapien
tatctttgcagtttccgcaaataagcctatctc

SEQ ID NO: 996055 - DNA, 33 bp, Homo sapien
tctcaaatgtaaaaaaaagaatgcagttagcac

SEQ ID NO: 996056 - DNA, 33 bp, Homo sapien
tctcaaatgtaaaaaatagaatgcagttagcac

SEQ ID NO: 996057 - DNA, 33 bp, Homo sapien
ctctaagacaaggctaggatgtaaatagttcat

SEQ ID NO: 996058 - DNA, 33 bp, Homo sapien
ctctaagacaaggctatgatgtaaatagttcat

SEQ ID NO: 996059 - DNA, 33 bp, Homo sapien
ctgctttgtttgctgcaataaccttagccctag

SEQ ID NO: 996060 - DNA, 33 bp, Homo sapien
ctgctttgtttgctgcgataaccttagccctag

SEQ ID NO: 996061 - DNA, 33 bp, Homo sapien
aagaaattgagatatgcaaaggtaaaaatgggc

SEQ ID NO: 996062 - DNA, 33 bp, Homo sapien
aagaaattgagatatgtaaaggtaaaaatgggc

SEQ ID NO: 996063 - DNA, 33 bp, Homo sapien
aggaagggagctaaaactggctgttatatgttg

SEQ ID NO: 996064 - DNA, 33 bp, Homo sapien
aggaagggagctaaaattggctgttatatgttg

SEQ ID NO: 996065 - DNA, 33 bp, Homo sapien
gacctcatggaattgaataagaattgagggctg

SEQ ID NO: 996066 - DNA, 33 bp, Homo sapien
gacctcatggaattgagtaagaattgagggctg

SEQ ID NO: 996067 - DNA, 33 bp, Homo sapien
attggataatgttagacataaaagtatttaatg

SEQ ID NO: 996068 - DNA, 33 bp, Homo sapien
attggataatgttagatataaaagtatttaatg

SEQ ID NO: 996069 - DNA, 33 bp, Homo sapien
tgggggcctttctctcaaatttcaggctgactt

SEQ ID NO: 996070 - DNA, 33 bp, Homo sapien
tgggggcctttctctcgaatttcaggctgactt

SEQ ID NO: 996071 - DNA, 33 bp, Homo sapien
ttacccacgtcttcagcatgattagatattggt

SEQ ID NO: 996072 - DNA, 33 bp, Homo sapien
ttacccacgtcttcagtatgattagatattggt

SEQ ID NO: 996073 - DNA, 33 bp, Homo sapien
gtggtgttttcagctacgttgtaattaggagct

SEQ ID NO: 996074 - DNA, 33 bp, Homo sapien
gtggtgttttcagctatgttgtaattaggagct

SEQ ID NO: 996075 - DNA, 33 bp, Homo sapien
ttgggccatgccagtacgctatatggagcagag

SEQ ID NO: 996076 - DNA, 33 bp, Homo sapien
ttgggccatgccagtatgctatatggagcagag

SEQ ID NO: 996077 - DNA, 33 bp, Homo sapien
gacttggttccatcctcaaggtaatgagtaagt

SEQ ID NO: 996078 - DNA, 33 bp, Homo sapien
gacttggttccatccttaaggtaatgagtaagt

SEQ ID NO: 996079 - DNA, 33 bp, Homo sapien
aatcaagcaattcatacgtttaccacgaattgt

SEQ ID NO: 996080 - DNA, 33 bp, Homo sapien
aatcaagcaattcatatgtttaccacgaattgt

SEQ ID NO: 996081 - DNA, 33 bp, Homo sapien
ggcatattaatgacagactggaagactctttag

SEQ ID NO: 996082 - DNA, 33 bp, Homo sapien
ggcatattaatgacaggctggaagactctttag

SEQ ID NO: 996083 - DNA, 33 bp, Homo sapien
cactgctatggtgaaaagtcatctgagacccat

SEQ ID NO: 996084 - DNA, 33 bp, Homo sapien
cactgctatggtgaaaggtcatctgagacccat

SEQ ID NO: 996085 - DNA, 33 bp, Homo sapien
ttagtgtatgccatacgcacattattactagaa

SEQ ID NO: 996086 - DNA, 33 bp, Homo sapien
ttagtgtatgccatactcacattattactagaa

SEQ ID NO: 996087 - DNA, 33 bp, Homo sapien
cagacagatgcagaaaaaacagggtgagaatac

SEQ ID NO: 996088 - DNA, 33 bp, Homo sapien
cagacagatgcagaaacaacagggtgagaatac

SEQ ID NO: 996089 - DNA, 33 bp, Homo sapien
cagaatttgtcactcaacttttattggctttga

SEQ ID NO: 996090 - DNA, 33 bp, Homo sapien
cagaatttgtcactcatcttttattggctttga

SEQ ID NO: 996091 - DNA, 33 bp, Homo sapien
cctcttttattgcagaaggataatgacagtttt

SEQ ID NO: 996092 - DNA, 33 bp, Homo sapien
cctcttttattgcagagggataatgacagtttt

SEQ ID NO: 996093 - DNA, 33 bp, Homo sapien
aataactcaaattcccactgacataaaaatgag

SEQ ID NO: 996094 - DNA, 33 bp, Homo sapien
aataactcaaattccctctgacataaaaatgag

SEQ ID NO: 996095 - DNA, 33 bp, Homo sapien
agatatctcattgtgacggcacagatctcctgt

SEQ ID NO: 996096 - DNA, 33 bp, Homo sapien
agatatctcattgtgatggcacagatctcctgt

SEQ ID NO: 996097 - DNA, 33 bp, Homo sapien
taagtgaaatgaaccaagtacagaaatcataat

SEQ ID NO: 996098 - DNA, 33 bp, Homo sapien
taagtgaaatgaaccacgtacagaaatcataat

SEQ ID NO: 996099 - DNA, 33 bp, Homo sapien
aaactgttttgtaaaaatgccctgcccgcgtga

SEQ ID NO: 996100 - DNA, 33 bp, Homo sapien
aaactgttttgtaaaagtgccctgcccgcgtga

SEQ ID NO: 996101 - DNA, 33 bp, Homo sapien
ttgaagaaagtgatgaaattctcaaaactgttt

SEQ ID NO: 996102 - DNA, 33 bp, Homo sapien
ttgaagaaagtgatgacattctcaaaactgttt

SEQ ID NO: 996103 - DNA, 33 bp, Homo sapien
cctcttcctaccttcacgctctgttctcctact

SEQ ID NO: 996104 - DNA, 33 bp, Homo sapien
cctcttcctaccttcatgctctgttctcctact

SEQ ID NO: 996105 - DNA, 33 bp, Homo sapien
ataaaatgatgctttaccaaatttcaaatccac

SEQ ID NO: 996106 - DNA, 33 bp, Homo sapien
ataaaatgatgctttatcaaatttcaaatccac

SEQ ID NO: 996107 - DNA, 33 bp, Homo sapien
cttaatgtacttcaaaacaaatattatacgatt

SEQ ID NO: 996108 - DNA, 33 bp, Homo sapien
cttaatgtacttcaaagcaaatattatacgatt

SEQ ID NO: 996109 - DNA, 33 bp, Homo sapien
acaaaaaccaattaaagagctcccagtgatcaa

SEQ ID NO: 996110 - DNA, 33 bp, Homo sapien
acaaaaaccaattaaatagctcccagtgatcaa

SEQ ID NO: 996111 - DNA, 33 bp, Homo sapien
acttatttctctttgtaaactgggagctacatg

SEQ ID NO: 996112 - DNA, 33 bp, Homo sapien
acttatttctctttgttaactgggagctacatg

SEQ ID NO: 996113 - DNA, 33 bp, Homo sapien
tttttgtacataaagcaagttcttgaaagtgca

SEQ ID NO: 996114 - DNA, 33 bp, Homo sapien
tttttgtacataaagccagttcttgaaagtgca

SEQ ID NO: 996115 - DNA, 33 bp, Homo sapien
atcttattcacctttcaatgatgtacttattgc

SEQ ID NO: 996116 - DNA, 33 bp, Homo sapien
atcttattcacctttcgatgatgtacttattgc

SEQ ID NO: 996117 - DNA, 33 bp, Homo sapien
ctggagtccagtccaccggtgaacatctggtct

SEQ ID NO: 996118 - DNA, 33 bp, Homo sapien
ctggagtccagtccactggtgaacatctggtct

SEQ ID NO: 996119 - DNA, 33 bp, Homo sapien
ttaaaataaagtggacaaggaaggcaagatttc

SEQ ID NO: 996120 - DNA, 33 bp, Homo sapien
ttaaaataaagtggacgaggaaggcaagatttc

SEQ ID NO: 996121 - DNA, 33 bp, Homo sapien
agctttctaaggcctaagtccacaagaggccag

SEQ ID NO: 996122 - DNA, 33 bp, Homo sapien
agctttctaaggcctatgtccacaagaggccag

SEQ ID NO: 996123 - DNA, 33 bp, Homo sapien
aaattatgtcccatgaaggagatggaagaaaat

SEQ ID NO: 996124 - DNA, 33 bp, Homo sapien
aaattatgtcccatgacggagatggaagaaaat

SEQ ID NO: 996125 - DNA, 33 bp, Homo sapien
aagcatggaatctgaacagtcttggtccaactc

SEQ ID NO: 996126 - DNA, 33 bp, Homo sapien
aagcatggaatctgaagagtcttggtccaactc

SEQ ID NO: 996127 - DNA, 33 bp, Homo sapien
caataatatgagtgagaataagtataatggtac

SEQ ID NO: 996128 - DNA, 33 bp, Homo sapien
caataatatgagtgagtataagtataatggtac

SEQ ID NO: 996129 - DNA, 33 bp, Homo sapien
gtaatccatagatccactgatttatttatttac

SEQ ID NO: 996130 - DNA, 33 bp, Homo sapien
gtaatccatagatccattgatttatttatttac

SEQ ID NO: 996131 - DNA, 33 bp, Homo sapien
tactggaggactgttacgttgaggattaagttt

SEQ ID NO: 996132 - DNA, 33 bp, Homo sapien
tactggaggactgttatgttgaggattaagttt

SEQ ID NO: 996133 - DNA, 33 bp, Homo sapien
cctgccaatgtggtaacgaagaaatgacctgga

SEQ ID NO: 996134 - DNA, 33 bp, Homo sapien
cctgccaatgtggtaatgaagaaatgacctgga

SEQ ID NO: 996135 - DNA, 33 bp, Homo sapien
ccttgccgttgcagacactagagggaaactaca

SEQ ID NO: 996136 - DNA, 33 bp, Homo sapien
ccttgccgttgcagacgctagagggaaactaca

SEQ ID NO: 996137 - DNA, 33 bp, Homo sapien
aatgaaaaacataaaaaagaacacacaggccag

SEQ ID NO: 996138 - DNA, 33 bp, Homo sapien
aatgaaaaacataaaagagaacacacaggccag

SEQ ID NO: 996139 - DNA, 33 bp, Homo sapien
gttcttaacacttgagaattagttcatgggaag

SEQ ID NO: 996140 - DNA, 33 bp, Homo sapien
gttcttaacacttgaggattagttcatgggaag

SEQ ID NO: 996141 - DNA, 33 bp, Homo sapien
caatgtggcttctacaatggcaagacaaggacc

SEQ ID NO: 996142 - DNA, 33 bp, Homo sapien
caatgtggcttctacattggcaagacaaggacc

SEQ ID NO: 996143 - DNA, 33 bp, Homo sapien
tcacctttatctaatacgggcaggcatcaacca

SEQ ID NO: 996144 - DNA, 33 bp, Homo sapien
tcacctttatctaatatgggcaggcatcaacca

SEQ ID NO: 996145 - DNA, 33 bp, Homo sapien
ctgggccaaaaccagaaagcattagttataaga

SEQ ID NO: 996146 - DNA, 33 bp, Homo sapien
ctgggccaaaaccagagagcattagttataaga

SEQ ID NO: 996147 - DNA, 33 bp, Homo sapien
aactttgagtaacaagaagcctacatcttggtt

SEQ ID NO: 996148 - DNA, 33 bp, Homo sapien
aactttgagtaacaaggagcctacatcttggtt

SEQ ID NO: 996149 - DNA, 33 bp, Homo sapien
aagaagagtgatgaatcaggcctcctccttttc

SEQ ID NO: 996150 - DNA, 33 bp, Homo sapien
aagaagagtgatgaattaggcctcctccttttc

SEQ ID NO: 996151 - DNA, 33 bp, Homo sapien
attctggcttagctgcaattctctccagctcct

SEQ ID NO: 996152 - DNA, 33 bp, Homo sapien
attctggcttagctgcgattctctccagctcct

SEQ ID NO: 996153 - DNA, 33 bp, Homo sapien
ttcttacaatctctatgacctctaacatattgc

SEQ ID NO: 996154 - DNA, 33 bp, Homo sapien
ttcttacaatctctattacctctaacatattgc

SEQ ID NO: 996155 - DNA, 33 bp, Homo sapien
gtaatgatggtatatacgtgagcttcctaaata

SEQ ID NO: 996156 - DNA, 33 bp, Homo sapien
gtaatgatggtatatatgtgagcttcctaaata

SEQ ID NO: 996157 - DNA, 33 bp, Homo sapien
tagcttgagaggaaaacgggtacaggttcaaaa

SEQ ID NO: 996158 - DNA, 33 bp, Homo sapien
tagcttgagaggaaaatgggtacaggttcaaaa

SEQ ID NO: 996159 - DNA, 33 bp, Homo sapien
aaagcataaggaaataccataggcagtcatggg

SEQ ID NO: 996160 - DNA, 33 bp, Homo sapien
aaagcataaggaaatatcataggcagtcatggg

SEQ ID NO: 996161 - DNA, 33 bp, Homo sapien
ggcgcgacaatgaggaggttttacaaagaatag

SEQ ID NO: 996162 - DNA, 33 bp, Homo sapien
ggcgcgacaatgaggatgttttacaaagaatag

SEQ ID NO: 996163 - DNA, 33 bp, Homo sapien
ccctaccttaaaccatcagagtttgcatgatca

SEQ ID NO: 996164 - DNA, 33 bp, Homo sapien
ccctaccttaaaccattagagtttgcatgatca

SEQ ID NO: 996165 - DNA, 33 bp, Homo sapien
tatagtccacctataagtcctctagcataaata

SEQ ID NO: 996166 - DNA, 33 bp, Homo sapien
tatagtccacctataattcctctagcataaata

SEQ ID NO: 996167 - DNA, 33 bp, Homo sapien
ccaaattaccgccccacgaaatactgtcttatc

SEQ ID NO: 996168 - DNA, 33 bp, Homo sapien
ccaaattaccgccccatgaaatactgtcttatc

SEQ ID NO: 996169 - DNA, 33 bp, Homo sapien
caaactccaacaagtaaatccaactgaacatta

SEQ ID NO: 996170 - DNA, 33 bp, Homo sapien
caaactccaacaagtatatccaactgaacatta

SEQ ID NO: 996171 - DNA, 33 bp, Homo sapien
tttccaatgtgattaccgtaacaattccacaac

SEQ ID NO: 996172 - DNA, 33 bp, Homo sapien
tttccaatgtgattactgtaacaattccacaac

SEQ ID NO: 996173 - DNA, 33 bp, Homo sapien
atctttgctaaactggaaaatggtacaatccac

SEQ ID NO: 996174 - DNA, 33 bp, Homo sapien
atctttgctaaactgggaaatggtacaatccac

SEQ ID NO: 996175 - DNA, 33 bp, Homo sapien
ataaacaatgtatagcaatgttccaaccaaaat

SEQ ID NO: 996176 - DNA, 33 bp, Homo sapien
ataaacaatgtatagccatgttccaaccaaaat

SEQ ID NO: 996177 - DNA, 33 bp, Homo sapien
tattaaaaacatgatgcactatgtgtctttatg

SEQ ID NO: 996178 - DNA, 33 bp, Homo sapien
tattaaaaacatgatggactatgtgtctttatg

SEQ ID NO: 996179 - DNA, 33 bp, Homo sapien
cccagatgaaaggcgacgggcattttgaccagg

SEQ ID NO: 996180 - DNA, 33 bp, Homo sapien
cccagatgaaaggcgatgggcattttgaccagg

SEQ ID NO: 996181 - DNA, 33 bp, Homo sapien
aggcgaaggttgcagtgaagtaaggtcacgcca

SEQ ID NO: 996182 - DNA, 33 bp, Homo sapien
aggcgaaggttgcagttaagtaaggtcacgcca

SEQ ID NO: 996183 - DNA, 33 bp, Homo sapien
attgttaattagggaccgatgagaatcttgcaa

SEQ ID NO: 996184 - DNA, 33 bp, Homo sapien
attgttaattagggactgatgagaatcttgcaa

SEQ ID NO: 996185 - DNA, 33 bp, Homo sapien
gaaaaagtaaatcaaacgttcacataaactgga

SEQ ID NO: 996186 - DNA, 33 bp, Homo sapien
gaaaaagtaaatcaaatgttcacataaactgga

SEQ ID NO: 996187 - DNA, 33 bp, Homo sapien
taaacgtaagtatgatcaaggatggaacaataa

SEQ ID NO: 996188 - DNA, 33 bp, Homo sapien
taaacgtaagtatgattaaggatggaacaataa

SEQ ID NO: 996189 - DNA, 33 bp, Homo sapien
gtagtggaactctgagacaaataaaccattaaa

SEQ ID NO: 996190 - DNA, 33 bp, Homo sapien
gtagtggaactctgagccaaataaaccattaaa

SEQ ID NO: 996191 - DNA, 33 bp, Homo sapien
tctacagcgacccacaaccccatttttctagca

SEQ ID NO: 996192 - DNA, 33 bp, Homo sapien
tctacagcgacccacatccccatttttctagca

SEQ ID NO: 996193 - DNA, 33 bp, Homo sapien
taagaaagagcttacaggatcaggcttccttaa

SEQ ID NO: 996194 - DNA, 33 bp, Homo sapien
taagaaagagcttacatgatcaggcttccttaa

SEQ ID NO: 996195 - DNA, 33 bp, Homo sapien
ggtctgggttgcagttgaaaatatggaagtgag

SEQ ID NO: 996196 - DNA, 33 bp, Homo sapien
ggtctgggttgcagtttaaaatatggaagtgag

SEQ ID NO: 996197 - DNA, 33 bp, Homo sapien
ttaaactgtcatatacccatacagtggaatatg

SEQ ID NO: 996198 - DNA, 33 bp, Homo sapien
ttaaactgtcatatactcatacagtggaatatg

SEQ ID NO: 996199 - DNA, 33 bp, Homo sapien
gctcataggttgtcaccatccttctgtatactt

SEQ ID NO: 996200 - DNA, 33 bp, Homo sapien
gctcataggttgtcactatccttctgtatactt

SEQ ID NO: 996201 - DNA, 33 bp, Homo sapien
gcaatttgtgtttcacgcagtaaatttaacaca

SEQ ID NO: 996202 - DNA, 33 bp, Homo sapien
gcaatttgtgtttcactcagtaaatttaacaca

SEQ ID NO: 996203 - DNA, 33 bp, Homo sapien
aaatttggcactcataatacctgctgtatcttg

SEQ ID NO: 996204 - DNA, 33 bp, Homo sapien
aaatttggcactcatagtacctgctgtatcttg

SEQ ID NO: 996205 - DNA, 33 bp, Homo sapien
gtgttttgttacgtgaataagtgatagagtgct

SEQ ID NO: 996206 - DNA, 33 bp, Homo sapien
gtgttttgttacgtgagtaagtgatagagtgct

SEQ ID NO: 996207 - DNA, 33 bp, Homo sapien
acgtggaagcactaaactgtttactacttttaa

SEQ ID NO: 996208 - DNA, 33 bp, Homo sapien
acgtggaagcactaaattgtttactacttttaa

SEQ ID NO: 996209 - DNA, 33 bp, Homo sapien
ctgctatcggagctgacgagttatgtggaaaac

SEQ ID NO: 996210 - DNA, 33 bp, Homo sapien
ctgctatcggagctgatgagttatgtggaaaac

SEQ ID NO: 996211 - DNA, 33 bp, Homo sapien
ttcagcataaatacaccggacaaagggctgatt

SEQ ID NO: 996212 - DNA, 33 bp, Homo sapien
ttcagcataaatacactggacaaagggctgatt

SEQ ID NO: 996213 - DNA, 33 bp, Homo sapien
aacagccgtggatataaagatatttcagcttat

SEQ ID NO: 996214 - DNA, 33 bp, Homo sapien
aacagccgtggatatagagatatttcagcttat

SEQ ID NO: 996215 - DNA, 33 bp, Homo sapien
gctgtgcaagctatgaacttaggcagtgaataa

SEQ ID NO: 996216 - DNA, 33 bp, Homo sapien
gctgtgcaagctatgatcttaggcagtgaataa

SEQ ID NO: 996217 - DNA, 33 bp, Homo sapien
aaatgtatccacaacaatacacatttttagttc

SEQ ID NO: 996218 - DNA, 33 bp, Homo sapien
aaatgtatccacaacagtacacatttttagttc

SEQ ID NO: 996219 - DNA, 33 bp, Homo sapien
cttaccaaggtgtggcaatgcttactagctatt

SEQ ID NO: 996220 - DNA, 33 bp, Homo sapien
cttaccaaggtgtggcgatgcttactagctatt

SEQ ID NO: 996221 - DNA, 33 bp, Homo sapien
attataggcacttttgaaatgtgttttttcttt

SEQ ID NO: 996222 - DNA, 33 bp, Homo sapien
attataggcacttttggaatgtgttttttcttt

SEQ ID NO: 996223 - DNA, 33 bp, Homo sapien
tctcgatttttgaccacggtattaaggatggac

SEQ ID NO: 996224 - DNA, 33 bp, Homo sapien
tctcgatttttgaccatggtattaaggatggac

SEQ ID NO: 996225 - DNA, 33 bp, Homo sapien
aataattagagaagaaagggagtaccaaggttg

SEQ ID NO: 996226 - DNA, 33 bp, Homo sapien
aataattagagaagaacgggagtaccaaggttg

SEQ ID NO: 996227 - DNA, 33 bp, Homo sapien
aactcttgcacaaatacaccaagagccttgcac

SEQ ID NO: 996228 - DNA, 33 bp, Homo sapien
aactcttgcacaaatagaccaagagccttgcac

SEQ ID NO: 996229 - DNA, 33 bp, Homo sapien
tgagtacagctaaaagcagtgtagttctcagta

SEQ ID NO: 996230 - DNA, 33 bp, Homo sapien
tgagtacagctaaaaggagtgtagttctcagta

SEQ ID NO: 996231 - DNA, 33 bp, Homo sapien
ctctagctgcctcaaaagggtgttgaaataata

SEQ ID NO: 996232 - DNA, 33 bp, Homo sapien
ctctagctgcctcaaaggggtgttgaaataata

SEQ ID NO: 996233 - DNA, 33 bp, Homo sapien
ctagcttctagaagtacagcaagtttttttttt

SEQ ID NO: 996234 - DNA, 33 bp, Homo sapien
ctagcttctagaagtatagcaagtttttttttt

SEQ ID NO: 996235 - DNA, 33 bp, Homo sapien
aggactcattcccaaacttctttcactgtggag

SEQ ID NO: 996236 - DNA, 33 bp, Homo sapien
aggactcattcccaaagttctttcactgtggag

SEQ ID NO: 996237 - DNA, 33 bp, Homo sapien
aagttttgtatggagaagattaatgggttgtgc

SEQ ID NO: 996238 - DNA, 33 bp, Homo sapien
aagttttgtatggagatgattaatgggttgtgc

SEQ ID NO: 996239 - DNA, 33 bp, Homo sapien
gtagctgttagctaagaaaaaaacaaaatgtca

SEQ ID NO: 996240 - DNA, 33 bp, Homo sapien
gtagctgttagctaaggaaaaaacaaaatgtca

SEQ ID NO: 996241 - DNA, 33 bp, Homo sapien
gaggaagaaatgtaaaaagtgacaccaaattga

SEQ ID NO: 996242 - DNA, 33 bp, Homo sapien
gaggaagaaatgtaaagagtgacaccaaattga

SEQ ID NO: 996243 - DNA, 33 bp, Homo sapien
ctgggaggtgggagaaacctgagactcacgaat

SEQ ID NO: 996244 - DNA, 33 bp, Homo sapien
ctgggaggtgggagaatcctgagactcacgaat

SEQ ID NO: 996245 - DNA, 33 bp, Homo sapien
catctgtgccattctaagtctatggcaggaatc

SEQ ID NO: 996246 - DNA, 33 bp, Homo sapien
catctgtgccattctatgtctatggcaggaatc

SEQ ID NO: 996247 - DNA, 33 bp, Homo sapien
cacttggtaacctcccagagaacacttgagaat

SEQ ID NO: 996248 - DNA, 33 bp, Homo sapien
cacttggtaacctcccggagaacacttgagaat

SEQ ID NO: 996249 - DNA, 33 bp, Homo sapien
ttttccagtagtgacactgatgttgggaattag

SEQ ID NO: 996250 - DNA, 33 bp, Homo sapien
ttttccagtagtgacattgatgttgggaattag

SEQ ID NO: 996251 - DNA, 33 bp, Homo sapien
aggacctgacatttcaaggttgctcaatgaatg

SEQ ID NO: 996252 - DNA, 33 bp, Homo sapien
aggacctgacatttcatggttgctcaatgaatg

SEQ ID NO: 996253 - DNA, 33 bp, Homo sapien
gtttgtgagagccttcactttcctctaaagtga

SEQ ID NO: 996254 - DNA, 33 bp, Homo sapien
gtttgtgagagccttcgctttcctctaaagtga

SEQ ID NO: 996255 - DNA, 33 bp, Homo sapien
agcatttctcattgcccaaagttttcactatct

SEQ ID NO: 996256 - DNA, 33 bp, Homo sapien
agcatttctcattgccgaaagttttcactatct

SEQ ID NO: 996257 - DNA, 33 bp, Homo sapien
taaattatcttggcgcaagtgaacgtttataag

SEQ ID NO: 996258 - DNA, 33 bp, Homo sapien
taaattatcttggcgccagtgaacgtttataag

SEQ ID NO: 996259 - DNA, 33 bp, Homo sapien
taaatatcagcatctcaagatcttttcactgga

SEQ ID NO: 996260 - DNA, 33 bp, Homo sapien
taaatatcagcatctcgagatcttttcactgga

SEQ ID NO: 996261 - DNA, 33 bp, Homo sapien
tcagtctcctagctaacgcttgctccacctgtc

SEQ ID NO: 996262 - DNA, 33 bp, Homo sapien
tcagtctcctagctaatgcttgctccacctgtc

SEQ ID NO: 996263 - DNA, 33 bp, Homo sapien
aggaccttcagatcacacagagtgaacagctag

SEQ ID NO: 996264 - DNA, 33 bp, Homo sapien
aggaccttcagatcacgcagagtgaacagctag

SEQ ID NO: 996265 - DNA, 33 bp, Homo sapien
attatcatcccctgaagatcaagggtgtacaat

SEQ ID NO: 996266 - DNA, 33 bp, Homo sapien
attatcatcccctgaatatcaagggtgtacaat

SEQ ID NO: 996267 - DNA, 33 bp, Homo sapien
ctgtaagtgaagtgacagactgcaaaaaaagag

SEQ ID NO: 996268 - DNA, 33 bp, Homo sapien
ctgtaagtgaagtgacggactgcaaaaaaagag

SEQ ID NO: 996269 - DNA, 33 bp, Homo sapien
ccaatgcataacttacaataaaatgcctctctt

SEQ ID NO: 996270 - DNA, 33 bp, Homo sapien
ccaatgcataacttaccataaaatgcctctctt

SEQ ID NO: 996271 - DNA, 33 bp, Homo sapien
atgataggtgttcccaactatgatattctcaag

SEQ ID NO: 996272 - DNA, 33 bp, Homo sapien
atgataggtgttcccagctatgatattctcaag

SEQ ID NO: 996273 - DNA, 33 bp, Homo sapien
agttccacaccccaacaatcctatgtcaggaac

SEQ ID NO: 996274 - DNA, 33 bp, Homo sapien
agttccacaccccaacgatcctatgtcaggaac

SEQ ID NO: 996275 - DNA, 33 bp, Homo sapien
ttgaaaaagctataccactggtccctagagtta

SEQ ID NO: 996276 - DNA, 33 bp, Homo sapien
ttgaaaaagctataccgctggtccctagagtta

SEQ ID NO: 996277 - DNA, 33 bp, Homo sapien
gatccagtttcagtacaagatttattgagacta

SEQ ID NO: 996278 - DNA, 33 bp, Homo sapien
gatccagtttcagtaccagatttattgagacta

SEQ ID NO: 996279 - DNA, 33 bp, Homo sapien
actcaattggaacatacagtttatgcctgtaat

SEQ ID NO: 996280 - DNA, 33 bp, Homo sapien
actcaattggaacatagagtttatgcctgtaat

SEQ ID NO: 996281 - DNA, 33 bp, Homo sapien
ttcagctagttatgtacagataaatttgatgtt

SEQ ID NO: 996282 - DNA, 33 bp, Homo sapien
ttcagctagttatgtatagataaatttgatgtt

SEQ ID NO: 996283 - DNA, 33 bp, Homo sapien
actcctataggtactacgtgagataaagactat

SEQ ID NO: 996284 - DNA, 33 bp, Homo sapien
actcctataggtactatgtgagataaagactat

SEQ ID NO: 996285 - DNA, 33 bp, Homo sapien
cttttctccagtgcaaatatcctcttatggcaa

SEQ ID NO: 996286 - DNA, 33 bp, Homo sapien
cttttctccagtgcaagtatcctcttatggcaa

SEQ ID NO: 996287 - DNA, 33 bp, Homo sapien
gttgtacaagctaacaaaatgcacacactctta

SEQ ID NO: 996288 - DNA, 33 bp, Homo sapien
gttgtacaagctaacagaatgcacacactctta

SEQ ID NO: 996289 - DNA, 33 bp, Homo sapien
agccactcatgagtgaccaaatataactttcgg

SEQ ID NO: 996290 - DNA, 33 bp, Homo sapien
agccactcatgagtgagcaaatataactttcgg

SEQ ID NO: 996291 - DNA, 33 bp, Homo sapien
atttctgtaattaaatcagcaccgaagctgatc

SEQ ID NO: 996292 - DNA, 33 bp, Homo sapien
atttctgtaattaaattagcaccgaagctgatc

SEQ ID NO: 996293 - DNA, 33 bp, Homo sapien
actgacccatatttaaagagtcaatcttgctaa

SEQ ID NO: 996294 - DNA, 33 bp, Homo sapien
actgacccatatttaaggagtcaatcttgctaa

SEQ ID NO: 996295 - DNA, 33 bp, Homo sapien
atttgtagccagtgttgcgtgtcttagcgttct

SEQ ID NO: 996296 - DNA, 33 bp, Homo sapien
atttgtagccagtgtttcgtgtcttagcgttct

SEQ ID NO: 996297 - DNA, 33 bp, Homo sapien
ggtactgactgttctaaggtggctttggatagt

SEQ ID NO: 996298 - DNA, 33 bp, Homo sapien
ggtactgactgttctagggtggctttggatagt

SEQ ID NO: 996299 - DNA, 33 bp, Homo sapien
atcagtaccataggagacataatcttagaacaa

SEQ ID NO: 996300 - DNA, 33 bp, Homo sapien
atcagtaccataggaggcataatcttagaacaa

SEQ ID NO: 996301 - DNA, 33 bp, Homo sapien
cacaaattgggttgaaagtttcagagactaatc

SEQ ID NO: 996302 - DNA, 33 bp, Homo sapien
cacaaattgggttgaacgtttcagagactaatc

SEQ ID NO: 996303 - DNA, 33 bp, Homo sapien
actttttttgccctctaaagatgcctttgaatc

SEQ ID NO: 996304 - DNA, 33 bp, Homo sapien
actttttttgccctctgaagatgcctttgaatc

SEQ ID NO: 996305 - DNA, 33 bp, Homo sapien
acatgtatgaattaacagtgtagaaccaaagtg

SEQ ID NO: 996306 - DNA, 33 bp, Homo sapien
acatgtatgaattaactgtgtagaaccaaagtg

SEQ ID NO: 996307 - DNA, 33 bp, Homo sapien
cagtatgaattctagaaagggctgtaataggag

SEQ ID NO: 996308 - DNA, 33 bp, Homo sapien
cagtatgaattctagagagggctgtaataggag

SEQ ID NO: 996309 - DNA, 33 bp, Homo sapien
actccaactgtgttcacaataatagcacaagac

SEQ ID NO: 996310 - DNA, 33 bp, Homo sapien
actccaactgtgttcataataatagcacaagac

SEQ ID NO: 996311 - DNA, 33 bp, Homo sapien
gcttttttcaataggtcaatctgagaactttct

SEQ ID NO: 996312 - DNA, 33 bp, Homo sapien
gcttttttcaataggtgaatctgagaactttct

SEQ ID NO: 996313 - DNA, 33 bp, Homo sapien
atggaaattagcttcactatacctgtgggtttt

SEQ ID NO: 996314 - DNA, 33 bp, Homo sapien
atggaaattagcttcagtatacctgtgggtttt

SEQ ID NO: 996315 - DNA, 33 bp, Homo sapien
ataaaatggtcacaagaaaatgtaacaaaaaat

SEQ ID NO: 996316 - DNA, 33 bp, Homo sapien
ataaaatggtcacaaggaaatgtaacaaaaaat

SEQ ID NO: 996317 - DNA, 33 bp, Homo sapien
tgagatttctaaagcactgattgtgactttttc

SEQ ID NO: 996318 - DNA, 33 bp, Homo sapien
tgagatttctaaagcattgattgtgactttttc

SEQ ID NO: 996319 - DNA, 33 bp, Homo sapien
aaatgaacacaaattagatccatgctgaatcgg

SEQ ID NO: 996320 - DNA, 33 bp, Homo sapien
aaatgaacacaaattatatccatgctgaatcgg

SEQ ID NO: 996321 - DNA, 33 bp, Homo sapien
ggacttggcctgaagaaaatgggtcagaagtga

SEQ ID NO: 996322 - DNA, 33 bp, Homo sapien
ggacttggcctgaagacaatgggtcagaagtga

SEQ ID NO: 996323 - DNA, 33 bp, Homo sapien
aaaacctgtgttggacggaccctatttttctat

SEQ ID NO: 996324 - DNA, 33 bp, Homo sapien
aaaacctgtgttggactgaccctatttttctat

SEQ ID NO: 996325 - DNA, 33 bp, Homo sapien
tctgtaggatcacaacccacaaaaataacaata

SEQ ID NO: 996326 - DNA, 33 bp, Homo sapien
tctgtaggatcacaacgcacaaaaataacaata

SEQ ID NO: 996327 - DNA, 33 bp, Homo sapien
accagagacaggtacaagcttagagtaaacatg

SEQ ID NO: 996328 - DNA, 33 bp, Homo sapien
accagagacaggtacaggcttagagtaaacatg

SEQ ID NO: 996329 - DNA, 33 bp, Homo sapien
gagtcttgaaaaattaaactctttagtgcagaa

SEQ ID NO: 996330 - DNA, 33 bp, Homo sapien
gagtcttgaaaaattacactctttagtgcagaa

SEQ ID NO: 996331 - DNA, 33 bp, Homo sapien
ttctgaggagaagaaacggacagggcagttgca

SEQ ID NO: 996332 - DNA, 33 bp, Homo sapien
ttctgaggagaagaaatggacagggcagttgca

SEQ ID NO: 996333 - DNA, 33 bp, Homo sapien
ttctgccactgataaaccctatggtctttgtca

SEQ ID NO: 996334 - DNA, 33 bp, Homo sapien
ttctgccactgataaatcctatggtctttgtca

SEQ ID NO: 996335 - DNA, 33 bp, Homo sapien
ggtggtggtgacttaagaggatcatccaattga

SEQ ID NO: 996336 - DNA, 33 bp, Homo sapien
ggtggtggtgacttaataggatcatccaattga

SEQ ID NO: 996337 - DNA, 33 bp, Homo sapien
atgcctgaaactcaaccatgcctctagaaatta

SEQ ID NO: 996338 - DNA, 33 bp, Homo sapien
atgcctgaaactcaactatgcctctagaaatta

SEQ ID NO: 996339 - DNA, 33 bp, Homo sapien
attttctacgcacttcaatttccccatgtttca

SEQ ID NO: 996340 - DNA, 33 bp, Homo sapien
attttctacgcacttcgatttccccatgtttca

SEQ ID NO: 996341 - DNA, 33 bp, Homo sapien
gtaagcctcttaattgaaactgaagtagagaaa

SEQ ID NO: 996342 - DNA, 33 bp, Homo sapien
gtaagcctcttaattgcaactgaagtagagaaa

SEQ ID NO: 996343 - DNA, 33 bp, Homo sapien
acagatgacatctaaacaggtgacaaatttatg

SEQ ID NO: 996344 - DNA, 33 bp, Homo sapien
acagatgacatctaaataggtgacaaatttatg

SEQ ID NO: 996345 - DNA, 33 bp, Homo sapien
ccactgggcattagaagaatttttgaaaagcat

SEQ ID NO: 996346 - DNA, 33 bp, Homo sapien
ccactgggcattagaataatttttgaaaagcat

SEQ ID NO: 996347 - DNA, 33 bp, Homo sapien
agtatacctctataacaactgagcaggccatct

SEQ ID NO: 996348 - DNA, 33 bp, Homo sapien
agtatacctctataacgactgagcaggccatct

SEQ ID NO: 996349 - DNA, 33 bp, Homo sapien
tagcaaagacatagaaccaatgtaggtgcacat

SEQ ID NO: 996350 - DNA, 33 bp, Homo sapien
tagcaaagacatagaatcaatgtaggtgcacat

SEQ ID NO: 996351 - DNA, 33 bp, Homo sapien
gagatgggcaaagagaccaatgattgtaatgca

SEQ ID NO: 996352 - DNA, 33 bp, Homo sapien
gagatgggcaaagagagcaatgattgtaatgca

SEQ ID NO: 996353 - DNA, 33 bp, Homo sapien
agcagacgtcttggtacccctggtccttgtttc

SEQ ID NO: 996354 - DNA, 33 bp, Homo sapien
agcagacgtcttggtatccctggtccttgtttc

SEQ ID NO: 996355 - DNA, 33 bp, Homo sapien
tagggggtgcctaaaaatccgacaatcacaaat

SEQ ID NO: 996356 - DNA, 33 bp, Homo sapien
tagggggtgcctaaaattccgacaatcacaaat

SEQ ID NO: 996357 - DNA, 33 bp, Homo sapien
atttggggaaaacaaactctctgagcctcaact

SEQ ID NO: 996358 - DNA, 33 bp, Homo sapien
atttggggaaaacaaattctctgagcctcaact

SEQ ID NO: 996359 - DNA, 33 bp, Homo sapien
ttgagacacctttttaacaatgtcctgctgcaa

SEQ ID NO: 996360 - DNA, 33 bp, Homo sapien
ttgagacacctttttatcaatgtcctgctgcaa

SEQ ID NO: 996361 - DNA, 33 bp, Homo sapien
ttgtgtctgctcctcaataccatatctgtggca

SEQ ID NO: 996362 - DNA, 33 bp, Homo sapien
ttgtgtctgctcctcagtaccatatctgtggca

SEQ ID NO: 996363 - DNA, 33 bp, Homo sapien
tttctgtttggtattacattggtatagccctat

SEQ ID NO: 996364 - DNA, 33 bp, Homo sapien
tttctgtttggtattatattggtatagccctat

SEQ ID NO: 996365 - DNA, 33 bp, Homo sapien
atgataataaggctgaataaaactacaatcaga

SEQ ID NO: 996366 - DNA, 33 bp, Homo sapien
atgataataaggctgactaaaactacaatcaga

SEQ ID NO: 996367 - DNA, 33 bp, Homo sapien
attccttatttcagtacctattgtttcctttat

SEQ ID NO: 996368 - DNA, 33 bp, Homo sapien
attccttatttcagtagctattgtttcctttat

SEQ ID NO: 996369 - DNA, 33 bp, Homo sapien
accttgcattaagggaaggaccaagacttgtat

SEQ ID NO: 996370 - DNA, 33 bp, Homo sapien
accttgcattaagggagggaccaagacttgtat

SEQ ID NO: 996371 - DNA, 33 bp, Homo sapien
aaaacaccagcaaaaccaagtactattttaact

SEQ ID NO: 996372 - DNA, 33 bp, Homo sapien
aaaacaccagcaaaacgaagtactattttaact

SEQ ID NO: 996373 - DNA, 33 bp, Homo sapien
gcatgctggagaaacagattgtgggcttgaagt

SEQ ID NO: 996374 - DNA, 33 bp, Homo sapien
gcatgctggagaaacatattgtgggcttgaagt

SEQ ID NO: 996375 - DNA, 33 bp, Homo sapien
actctaacagggaaagacaattcagctatcctc

SEQ ID NO: 996376 - DNA, 33 bp, Homo sapien
actctaacagggaaaggcaattcagctatcctc

SEQ ID NO: 996377 - DNA, 33 bp, Homo sapien
cacagagtctacaaggaattgtttaaagatagt

SEQ ID NO: 996378 - DNA, 33 bp, Homo sapien
cacagagtctacaagggattgtttaaagatagt

SEQ ID NO: 996379 - DNA, 33 bp, Homo sapien
gtttgtgtgtgtcctacgttgtctaatatatta

SEQ ID NO: 996380 - DNA, 33 bp, Homo sapien
gtttgtgtgtgtcctatgttgtctaatatatta

SEQ ID NO: 996381 - DNA, 33 bp, Homo sapien
agtcttcttccacctacagtgcaacccaagaga

SEQ ID NO: 996382 - DNA, 33 bp, Homo sapien
agtcttcttccacctatagtgcaacccaagaga

SEQ ID NO: 996383 - DNA, 33 bp, Homo sapien
aatattcttttctgagcccagcacaaaatcagc

SEQ ID NO: 996384 - DNA, 33 bp, Homo sapien
aatattcttttctgagtccagcacaaaatcagc

SEQ ID NO: 996385 - DNA, 33 bp, Homo sapien
ccttgtggcctagcaacgccaacagaatgcagc

SEQ ID NO: 996386 - DNA, 33 bp, Homo sapien
ccttgtggcctagcaatgccaacagaatgcagc

SEQ ID NO: 996387 - DNA, 33 bp, Homo sapien
ctctaccaaacatagacggtgtttatagagaca

SEQ ID NO: 996388 - DNA, 33 bp, Homo sapien
ctctaccaaacatagatggtgtttatagagaca

SEQ ID NO: 996389 - DNA, 33 bp, Homo sapien
acactgcaaattcagaaacatactgagtagaat

SEQ ID NO: 996390 - DNA, 33 bp, Homo sapien
acactgcaaattcagatacatactgagtagaat

SEQ ID NO: 996391 - DNA, 33 bp, Homo sapien
attagtctactgttaaggtcaacccagattttt

SEQ ID NO: 996392 - DNA, 33 bp, Homo sapien
attagtctactgttaatgtcaacccagattttt

SEQ ID NO: 996393 - DNA, 33 bp, Homo sapien
tcttttatacagcccaacaaatagaatctatta

SEQ ID NO: 996394 - DNA, 33 bp, Homo sapien
tcttttatacagcccagcaaatagaatctatta

SEQ ID NO: 996395 - DNA, 33 bp, Homo sapien
atgctttggggagaacccatatgacaggtagat

SEQ ID NO: 996396 - DNA, 33 bp, Homo sapien
atgctttggggagaactcatatgacaggtagat

SEQ ID NO: 996397 - DNA, 33 bp, Homo sapien
attaaaccacaagtacaaggtgttgccagaaaa

SEQ ID NO: 996398 - DNA, 33 bp, Homo sapien
attaaaccacaagtacgaggtgttgccagaaaa

SEQ ID NO: 996399 - DNA, 33 bp, Homo sapien
gggatgtggcagcatgaactgcgtggtggcaga

SEQ ID NO: 996400 - DNA, 33 bp, Homo sapien
gggatgtggcagcatggactgcgtggtggcaga

SEQ ID NO: 996401 - DNA, 33 bp, Homo sapien
aaacctgaaggatgagaataattcagccactgg

SEQ ID NO: 996402 - DNA, 33 bp, Homo sapien
aaacctgaaggatgaggataattcagccactgg

SEQ ID NO: 996403 - DNA, 33 bp, Homo sapien
ggcttgggacaaggaacgggataagtgacgctc

SEQ ID NO: 996404 - DNA, 33 bp, Homo sapien
ggcttgggacaaggaatgggataagtgacgctc

SEQ ID NO: 996405 - DNA, 33 bp, Homo sapien
ttcttaaatctgacaacgctgaatggagaataa

SEQ ID NO: 996406 - DNA, 33 bp, Homo sapien
ttcttaaatctgacaatgctgaatggagaataa

SEQ ID NO: 996407 - DNA, 33 bp, Homo sapien
aaagtctattctggcagaagtgtgagggatgaa

SEQ ID NO: 996408 - DNA, 33 bp, Homo sapien
aaagtctattctggcataagtgtgagggatgaa

SEQ ID NO: 996409 - DNA, 33 bp, Homo sapien
accatttctcagttagaagagtttctggcaaga

SEQ ID NO: 996410 - DNA, 33 bp, Homo sapien
accatttctcagttaggagagtttctggcaaga

SEQ ID NO: 996411 - DNA, 33 bp, Homo sapien
aaattctgtactaccaatctaaaatgccaacag

SEQ ID NO: 996412 - DNA, 33 bp, Homo sapien
aaattctgtactaccactctaaaatgccaacag

SEQ ID NO: 996413 - DNA, 33 bp, Homo sapien
gagtctcatcaaataaccaaaaaagttgaaacc

SEQ ID NO: 996414 - DNA, 33 bp, Homo sapien
gagtctcatcaaataatcaaaaaagttgaaacc

SEQ ID NO: 996415 - DNA, 33 bp, Homo sapien
tttcagattattcttcacctttggagaatttgt

SEQ ID NO: 996416 - DNA, 33 bp, Homo sapien
tttcagattattcttcccctttggagaatttgt

SEQ ID NO: 996417 - DNA, 33 bp, Homo sapien
actctggatctgtgacaatttctacatagttag

SEQ ID NO: 996418 - DNA, 33 bp, Homo sapien
actctggatctgtgaccatttctacatagttag

SEQ ID NO: 996419 - DNA, 33 bp, Homo sapien
ttttcactttctaggaaccttagccatgggttg

SEQ ID NO: 996420 - DNA, 33 bp, Homo sapien
ttttcactttctaggatccttagccatgggttg

SEQ ID NO: 996421 - DNA, 33 bp, Homo sapien
aagaagagttaaacaacgacagcatatgcttca

SEQ ID NO: 996422 - DNA, 33 bp, Homo sapien
aagaagagttaaacaatgacagcatatgcttca

SEQ ID NO: 996423 - DNA, 33 bp, Homo sapien
cctgtatcctaatctgaaatcatgaagtgcagc

SEQ ID NO: 996424 - DNA, 33 bp, Homo sapien
cctgtatcctaatctgtaatcatgaagtgcagc

SEQ ID NO: 996425 - DNA, 33 bp, Homo sapien
gaagagattgcaatcaccgtatttttgtcattt

SEQ ID NO: 996426 - DNA, 33 bp, Homo sapien
gaagagattgcaatcagcgtatttttgtcattt

SEQ ID NO: 996427 - DNA, 33 bp, Homo sapien
agatagtttgtataacagccatgtacatctctt

SEQ ID NO: 996428 - DNA, 33 bp, Homo sapien
agatagtttgtataactgccatgtacatctctt

SEQ ID NO: 996429 - DNA, 33 bp, Homo sapien
cttatggtttttgacaactgtcttctttaattt

SEQ ID NO: 996430 - DNA, 33 bp, Homo sapien
cttatggtttttgacatctgtcttctttaattt

SEQ ID NO: 996431 - DNA, 33 bp, Homo sapien
gtcatgcccttaagacaatcaaacttcttgatt

SEQ ID NO: 996432 - DNA, 33 bp, Homo sapien
gtcatgcccttaagacgatcaaacttcttgatt

SEQ ID NO: 996433 - DNA, 33 bp, Homo sapien
aataatagcagtcagcagcagggtaatttggta

SEQ ID NO: 996434 - DNA, 33 bp, Homo sapien
aataatagcagtcagccgcagggtaatttggta

SEQ ID NO: 996435 - DNA, 33 bp, Homo sapien
gaagaagcatcctgagaagcattaaacctttga

SEQ ID NO: 996436 - DNA, 33 bp, Homo sapien
gaagaagcatcctgaggagcattaaacctttga

SEQ ID NO: 996437 - DNA, 33 bp, Homo sapien
acaaatgaaggcataccaatctgaacttgagtc

SEQ ID NO: 996438 - DNA, 33 bp, Homo sapien
acaaatgaaggcatactaatctgaacttgagtc

SEQ ID NO: 996439 - DNA, 33 bp, Homo sapien
ttagcgttaagggaacccttgattgtagctgcg

SEQ ID NO: 996440 - DNA, 33 bp, Homo sapien
ttagcgttaagggaacgcttgattgtagctgcg

SEQ ID NO: 996441 - DNA, 33 bp, Homo sapien
aattgaatcatgaggacagttgcccccatgctg

SEQ ID NO: 996442 - DNA, 33 bp, Homo sapien
aattgaatcatgaggatagttgcccccatgctg

SEQ ID NO: 996443 - DNA, 33 bp, Homo sapien
ataaaacacagtggtaataatattggcagcttc

SEQ ID NO: 996444 - DNA, 33 bp, Homo sapien
ataaaacacagtggtagtaatattggcagcttc

SEQ ID NO: 996445 - DNA, 33 bp, Homo sapien
ccctgagtgtgaagacagatgtttaaaattgaa

SEQ ID NO: 996446 - DNA, 33 bp, Homo sapien
ccctgagtgtgaagacggatgtttaaaattgaa

SEQ ID NO: 996447 - DNA, 33 bp, Homo sapien
tatgtgtgtatctgtacgtgcaatcacaaaatc

SEQ ID NO: 996448 - DNA, 33 bp, Homo sapien
tatgtgtgtatctgtatgtgcaatcacaaaatc

SEQ ID NO: 996449 - DNA, 33 bp, Homo sapien
ttatcatagaaattaaggaggtgagatacttaa

SEQ ID NO: 996450 - DNA, 33 bp, Homo sapien
ttatcatagaaattaatgaggtgagatacttaa

SEQ ID NO: 996451 - DNA, 33 bp, Homo sapien
aattttaaaggagagacctaacgcaaaaagcat

SEQ ID NO: 996452 - DNA, 33 bp, Homo sapien
aattttaaaggagagagctaacgcaaaaagcat

SEQ ID NO: 996453 - DNA, 33 bp, Homo sapien
ttttgctgataagaggaagagacagaatcaaca

SEQ ID NO: 996454 - DNA, 33 bp, Homo sapien
ttttgctgataagaggcagagacagaatcaaca

SEQ ID NO: 996455 - DNA, 33 bp, Homo sapien
gatcatcttcttttgccattctagatttgtgtt

SEQ ID NO: 996456 - DNA, 33 bp, Homo sapien
gatcatcttcttttgcgattctagatttgtgtt

SEQ ID NO: 996457 - DNA, 33 bp, Homo sapien
gccacctctttatagactcattattcagatgcc

SEQ ID NO: 996458 - DNA, 33 bp, Homo sapien
gccacctctttatagagtcattattcagatgcc

SEQ ID NO: 996459 - DNA, 33 bp, Homo sapien
ttagaccataaatctccatttagccaaaattag

SEQ ID NO: 996460 - DNA, 33 bp, Homo sapien
ttagaccataaatctctatttagccaaaattag

SEQ ID NO: 996461 - DNA, 33 bp, Homo sapien
ttatgctcttatagcaaaacaaaactattgatt

SEQ ID NO: 996462 - DNA, 33 bp, Homo sapien
ttatgctcttatagcagaacaaaactattgatt

SEQ ID NO: 996463 - DNA, 33 bp, Homo sapien
tggctttaggatctggccaaatacatctacctc

SEQ ID NO: 996464 - DNA, 33 bp, Homo sapien
tggctttaggatctggtcaaatacatctacctc

SEQ ID NO: 996465 - DNA, 33 bp, Homo sapien
acaggaatcaggaatcaactcaccttaatgtgt

SEQ ID NO: 996466 - DNA, 33 bp, Homo sapien
acaggaatcaggaatcgactcaccttaatgtgt

SEQ ID NO: 996467 - DNA, 33 bp, Homo sapien
gaatatgggtttctggccaataaagattttcat

SEQ ID NO: 996468 - DNA, 33 bp, Homo sapien
gaatatgggtttctggtcaataaagattttcat

SEQ ID NO: 996469 - DNA, 33 bp, Homo sapien
tgttaaaaccaagtaaactgaatgctgggtaag

SEQ ID NO: 996470 - DNA, 33 bp, Homo sapien
tgttaaaaccaagtaagctgaatgctgggtaag

SEQ ID NO: 996471 - DNA, 33 bp, Homo sapien
tagccattcttttacagggatgaagcttcacat

SEQ ID NO: 996472 - DNA, 33 bp, Homo sapien
tagccattcttttacatggatgaagcttcacat

SEQ ID NO: 996473 - DNA, 33 bp, Homo sapien
aagattgagatgggccactatgagccatggaaa

SEQ ID NO: 996474 - DNA, 33 bp, Homo sapien
aagattgagatgggccgctatgagccatggaaa

SEQ ID NO: 996475 - DNA, 33 bp, Homo sapien
agtcaaaatcggcactaaggtttctgtgggaaa

SEQ ID NO: 996476 - DNA, 33 bp, Homo sapien
agtcaaaatcggcactgaggtttctgtgggaaa

SEQ ID NO: 996477 - DNA, 33 bp, Homo sapien
tattctgtggagaacaaaaatctgtagtatctt

SEQ ID NO: 996478 - DNA, 33 bp, Homo sapien
tattctgtggagaacacaaatctgtagtatctt

SEQ ID NO: 996479 - DNA, 33 bp, Homo sapien
atatatctacctctacaatgtcccttaatctat

SEQ ID NO: 996480 - DNA, 33 bp, Homo sapien
atatatctacctctacgatgtcccttaatctat

SEQ ID NO: 996481 - DNA, 33 bp, Homo sapien
aaaacattagagttagcaagctttagtgagatt

SEQ ID NO: 996482 - DNA, 33 bp, Homo sapien
aaaacattagagttaggaagctttagtgagatt

SEQ ID NO: 996483 - DNA, 33 bp, Homo sapien
aagtccacacagcaaacaagtatacaggttttg

SEQ ID NO: 996484 - DNA, 33 bp, Homo sapien
aagtccacacagcaaagaagtatacaggttttg

SEQ ID NO: 996485 - DNA, 33 bp, Homo sapien
ttggttatgaccattgaatctatcacactgtat

SEQ ID NO: 996486 - DNA, 33 bp, Homo sapien
ttggttatgaccattggatctatcacactgtat

SEQ ID NO: 996487 - DNA, 33 bp, Homo sapien
tgggcttagctatagagtcccaatttcactgtt

SEQ ID NO: 996488 - DNA, 33 bp, Homo sapien
tgggcttagctatagattcccaatttcactgtt

SEQ ID NO: 996489 - DNA, 33 bp, Homo sapien
gaatctcattctttcacaaccaggattctggaa

SEQ ID NO: 996490 - DNA, 33 bp, Homo sapien
gaatctcattctttcataaccaggattctggaa

SEQ ID NO: 996491 - DNA, 33 bp, Homo sapien
catattctgatgggacaaattggtccttgtaaa

SEQ ID NO: 996492 - DNA, 33 bp, Homo sapien
catattctgatgggacgaattggtccttgtaaa

SEQ ID NO: 996493 - DNA, 33 bp, Homo sapien
attatgttccacagaaaagcctggaagacgtat

SEQ ID NO: 996494 - DNA, 33 bp, Homo sapien
attatgttccacagaagagcctggaagacgtat

SEQ ID NO: 996495 - DNA, 33 bp, Homo sapien
ctgaggaatgcactgaaactgcactgaagttca

SEQ ID NO: 996496 - DNA, 33 bp, Homo sapien
ctgaggaatgcactgagactgcactgaagttca

SEQ ID NO: 996497 - DNA, 33 bp, Homo sapien
agtcaacatggattcactactgaccagtgacct

SEQ ID NO: 996498 - DNA, 33 bp, Homo sapien
agtcaacatggattcattactgaccagtgacct

SEQ ID NO: 996499 - DNA, 33 bp, Homo sapien
gctgcaggtaaagacaatcctgagtctgggcaa

SEQ ID NO: 996500 - DNA, 33 bp, Homo sapien
gctgcaggtaaagacattcctgagtctgggcaa

SEQ ID NO: 996501 - DNA, 33 bp, Homo sapien
ggtggagatacattaaaggatagttatggtgga

SEQ ID NO: 996502 - DNA, 33 bp, Homo sapien
ggtggagatacattaagggatagttatggtgga

SEQ ID NO: 996503 - DNA, 33 bp, Homo sapien
tgggataataagatccacaattaagtgttccat

SEQ ID NO: 996504 - DNA, 33 bp, Homo sapien
tgggataataagatccgcaattaagtgttccat

SEQ ID NO: 996505 - DNA, 33 bp, Homo sapien
cattaaatcactgaccaggcttatggaaaactg

SEQ ID NO: 996506 - DNA, 33 bp, Homo sapien
cattaaatcactgaccgggcttatggaaaactg

SEQ ID NO: 996507 - DNA, 33 bp, Homo sapien
cctaattttattgtcacgaggcagaaatgaaat

SEQ ID NO: 996508 - DNA, 33 bp, Homo sapien
cctaattttattgtcatgaggcagaaatgaaat

SEQ ID NO: 996509 - DNA, 33 bp, Homo sapien
aattctgcagaggaaacgtggtgattacatctg

SEQ ID NO: 996510 - DNA, 33 bp, Homo sapien
aattctgcagaggaaatgtggtgattacatctg

SEQ ID NO: 996511 - DNA, 33 bp, Homo sapien
ttgcataactcaaaccaaatgggcacacatcat

SEQ ID NO: 996512 - DNA, 33 bp, Homo sapien
ttgcataactcaaacccaatgggcacacatcat

SEQ ID NO: 996513 - DNA, 33 bp, Homo sapien
tggagagaggagaagaccataagaactacagtg

SEQ ID NO: 996514 - DNA, 33 bp, Homo sapien
tggagagaggagaagatcataagaactacagtg

SEQ ID NO: 996515 - DNA, 33 bp, Homo sapien
aagttttataggaatacgtaaaatgctcaaatg

SEQ ID NO: 996516 - DNA, 33 bp, Homo sapien
aagttttataggaatatgtaaaatgctcaaatg

SEQ ID NO: 996517 - DNA, 33 bp, Homo sapien
ctatagtatgtatgtacatcttgacagagcagg

SEQ ID NO: 996518 - DNA, 33 bp, Homo sapien
ctatagtatgtatgtagatcttgacagagcagg

SEQ ID NO: 996519 - DNA, 33 bp, Homo sapien
cactgatgagttgatcaagtcagaattttcaat

SEQ ID NO: 996520 - DNA, 33 bp, Homo sapien
cactgatgagttgatcgagtcagaattttcaat

SEQ ID NO: 996521 - DNA, 33 bp, Homo sapien
ctcttacattttgcaccgtattttagagctttc

SEQ ID NO: 996522 - DNA, 33 bp, Homo sapien
ctcttacattttgcactgtattttagagctttc

SEQ ID NO: 996523 - DNA, 33 bp, Homo sapien
tattagtatgctaatacggaagatcagtggagc

SEQ ID NO: 996524 - DNA, 33 bp, Homo sapien
tattagtatgctaatatggaagatcagtggagc

SEQ ID NO: 996525 - DNA, 33 bp, Homo sapien
aatccttcaacctacactgcttgctgatgtatc

SEQ ID NO: 996526 - DNA, 33 bp, Homo sapien
aatccttcaacctacattgcttgctgatgtatc

SEQ ID NO: 996527 - DNA, 33 bp, Homo sapien
tgaggtttctgggagaagttttgcctcaagtac

SEQ ID NO: 996528 - DNA, 33 bp, Homo sapien
tgaggtttctgggagacgttttgcctcaagtac

SEQ ID NO: 996529 - DNA, 33 bp, Homo sapien
ctctgagactgttttcaatgctagccttccttg

SEQ ID NO: 996530 - DNA, 33 bp, Homo sapien
ctctgagactgttttcgatgctagccttccttg

SEQ ID NO: 996531 - DNA, 33 bp, Homo sapien
tgcttggacagaagtcacccaacatttcacttg

SEQ ID NO: 996532 - DNA, 33 bp, Homo sapien
tgcttggacagaagtcgcccaacatttcacttg

SEQ ID NO: 996533 - DNA, 33 bp, Homo sapien
gcagggacaagtcacaatggtagaatgttgtaa

SEQ ID NO: 996534 - DNA, 33 bp, Homo sapien
gcagggacaagtcacagtggtagaatgttgtaa

SEQ ID NO: 996535 - DNA, 33 bp, Homo sapien
ggtctttgtgattccaaaatctgctgcttaacc

SEQ ID NO: 996536 - DNA, 33 bp, Homo sapien
ggtctttgtgattccataatctgctgcttaacc

SEQ ID NO: 996537 - DNA, 33 bp, Homo sapien
gtcactatgacataaccggaaagtgcagtcctc

SEQ ID NO: 996538 - DNA, 33 bp, Homo sapien
gtcactatgacataacgggaaagtgcagtcctc

SEQ ID NO: 996539 - DNA, 33 bp, Homo sapien
ataaatatgtgaaaacaaattactccaaccact

SEQ ID NO: 996540 - DNA, 33 bp, Homo sapien
ataaatatgtgaaaaccaattactccaaccact

SEQ ID NO: 996541 - DNA, 33 bp, Homo sapien
acatttcttattatgcagattcaaagcaaaaat

SEQ ID NO: 996542 - DNA, 33 bp, Homo sapien
acatttcttattatgcggattcaaagcaaaaat

SEQ ID NO: 996543 - DNA, 33 bp, Homo sapien
aatcaacagattaatgaatagaaaatatgatat

SEQ ID NO: 996544 - DNA, 33 bp, Homo sapien
aatcaacagattaatggatagaaaatatgatat

SEQ ID NO: 996545 - DNA, 33 bp, Homo sapien
cattcatcattgaataagctatgtatcaaatat

SEQ ID NO: 996546 - DNA, 33 bp, Homo sapien
cattcatcattgaataggctatgtatcaaatat

SEQ ID NO: 996547 - DNA, 33 bp, Homo sapien
tacttcaaactctaccactataagccctaaaga

SEQ ID NO: 996548 - DNA, 33 bp, Homo sapien
tacttcaaactctaccgctataagccctaaaga

SEQ ID NO: 996549 - DNA, 33 bp, Homo sapien
acctaactcccaagtaccttgaagcattaaata

SEQ ID NO: 996550 - DNA, 33 bp, Homo sapien
acctaactcccaagtatcttgaagcattaaata

SEQ ID NO: 996551 - DNA, 33 bp, Homo sapien
catgcaattaattcccaggagtagattctgaaa

SEQ ID NO: 996552 - DNA, 33 bp, Homo sapien
catgcaattaattcccgggagtagattctgaaa

SEQ ID NO: 996553 - DNA, 33 bp, Homo sapien
ttgtccgccaaagacaccaagttgattaccttt

SEQ ID NO: 996554 - DNA, 33 bp, Homo sapien
ttgtccgccaaagacagcaagttgattaccttt

SEQ ID NO: 996555 - DNA, 33 bp, Homo sapien
gggcatttccagaagacattagtgtttaaatca

SEQ ID NO: 996556 - DNA, 33 bp, Homo sapien
gggcatttccagaagagattagtgtttaaatca

SEQ ID NO: 996557 - DNA, 33 bp, Homo sapien
actttttagtatctagaagttcaatttggatcc

SEQ ID NO: 996558 - DNA, 33 bp, Homo sapien
actttttagtatctaggagttcaatttggatcc

SEQ ID NO: 996559 - DNA, 33 bp, Homo sapien
tttgttgttattgttacgaaacagctagtcact

SEQ ID NO: 996560 - DNA, 33 bp, Homo sapien
tttgttgttattgttatgaaacagctagtcact

SEQ ID NO: 996561 - DNA, 33 bp, Homo sapien
tgtgtcctaatcaatcactaaggaaaaacaaac

SEQ ID NO: 996562 - DNA, 33 bp, Homo sapien
tgtgtcctaatcaatcgctaaggaaaaacaaac

SEQ ID NO: 996563 - DNA, 33 bp, Homo sapien
gtggtgcattcaatccacatcctattctactta

SEQ ID NO: 996564 - DNA, 33 bp, Homo sapien
gtggtgcattcaatccgcatcctattctactta

SEQ ID NO: 996565 - DNA, 33 bp, Homo sapien
aagaatataatacacagtggaaatcccagaggc

SEQ ID NO: 996566 - DNA, 33 bp, Homo sapien
aagaatataatacacattggaaatcccagaggc

SEQ ID NO: 996567 - DNA, 33 bp, Homo sapien
acctaattttcctaagccctctagattgctcat

SEQ ID NO: 996568 - DNA, 33 bp, Homo sapien
acctaattttcctaagtcctctagattgctcat

SEQ ID NO: 996569 - DNA, 33 bp, Homo sapien
attttttgatgcctgaataaaaaaccagcttcc

SEQ ID NO: 996570 - DNA, 33 bp, Homo sapien
attttttgatgcctgagtaaaaaaccagcttcc

SEQ ID NO: 996571 - DNA, 33 bp, Homo sapien
taatcacaacctaacaatcttctctaacagagg

SEQ ID NO: 996572 - DNA, 33 bp, Homo sapien
taatcacaacctaacagtcttctctaacagagg

SEQ ID NO: 996573 - DNA, 33 bp, Homo sapien
tctgctttcattattaacttgtacatagctcca

SEQ ID NO: 996574 - DNA, 33 bp, Homo sapien
tctgctttcattattagcttgtacatagctcca

SEQ ID NO: 996575 - DNA, 33 bp, Homo sapien
aaatggcttttcaccaatcatctcataatggaa

SEQ ID NO: 996576 - DNA, 33 bp, Homo sapien
aaatggcttttcaccagtcatctcataatggaa

SEQ ID NO: 996577 - DNA, 33 bp, Homo sapien
ttgtccagatgtcagacggaggtttcaaaccaa

SEQ ID NO: 996578 - DNA, 33 bp, Homo sapien
ttgtccagatgtcagatggaggtttcaaaccaa

SEQ ID NO: 996579 - DNA, 33 bp, Homo sapien
taggaactgagattacacaggagaagagagatt

SEQ ID NO: 996580 - DNA, 33 bp, Homo sapien
taggaactgagattacgcaggagaagagagatt

SEQ ID NO: 996581 - DNA, 33 bp, Homo sapien
agcagaactgtatagaagcattgaaatgtgata

SEQ ID NO: 996582 - DNA, 33 bp, Homo sapien
agcagaactgtatagaggcattgaaatgtgata

SEQ ID NO: 996583 - DNA, 33 bp, Homo sapien
gccaaggtcagaggcccgatgaggaagaagaaa

SEQ ID NO: 996584 - DNA, 33 bp, Homo sapien
gccaaggtcagaggcctgatgaggaagaagaaa

SEQ ID NO: 996585 - DNA, 33 bp, Homo sapien
ttattgagataattgcacctacctggttttttt

SEQ ID NO: 996586 - DNA, 33 bp, Homo sapien
ttattgagataattgcgcctacctggttttttt

SEQ ID NO: 996587 - DNA, 33 bp, Homo sapien
cctaggaagcattttacctgtggcaatttcttc

SEQ ID NO: 996588 - DNA, 33 bp, Homo sapien
cctaggaagcattttatctgtggcaatttcttc

SEQ ID NO: 996589 - DNA, 33 bp, Homo sapien
ataatttcattctttccatgactgcatagtatt

SEQ ID NO: 996590 - DNA, 33 bp, Homo sapien
ataatttcattctttctatgactgcatagtatt

SEQ ID NO: 996591 - DNA, 33 bp, Homo sapien
aagtacaattgtaaacaaaacatcaattatgat

SEQ ID NO: 996592 - DNA, 33 bp, Homo sapien
aagtacaattgtaaacgaaacatcaattatgat

SEQ ID NO: 996593 - DNA, 33 bp, Homo sapien
ctctagtatgccacaacaatgttcatctagcca

SEQ ID NO: 996594 - DNA, 33 bp, Homo sapien
ctctagtatgccacaataatgttcatctagcca

SEQ ID NO: 996595 - DNA, 33 bp, Homo sapien
ggcaaatccagaggtacgagagatagtcaaagg

SEQ ID NO: 996596 - DNA, 33 bp, Homo sapien
ggcaaatccagaggtatgagagatagtcaaagg

SEQ ID NO: 996597 - DNA, 33 bp, Homo sapien
aaactgtgcacccccacggttttatgtaaagca

SEQ ID NO: 996598 - DNA, 33 bp, Homo sapien
aaactgtgcacccccatggttttatgtaaagca

SEQ ID NO: 996599 - DNA, 33 bp, Homo sapien
aattgtgggtaccaataacaaagttgctgacaa

SEQ ID NO: 996600 - DNA, 33 bp, Homo sapien
aattgtgggtaccaatgacaaagttgctgacaa

SEQ ID NO: 996601 - DNA, 33 bp, Homo sapien
aagcagccaggttaacagatttcaccttcagaa

SEQ ID NO: 996602 - DNA, 33 bp, Homo sapien
aagcagccaggttaacggatttcaccttcagaa

SEQ ID NO: 996603 - DNA, 33 bp, Homo sapien
gatgatttaggaattaccatcggacttgaattg

SEQ ID NO: 996604 - DNA, 33 bp, Homo sapien
gatgatttaggaattagcatcggacttgaattg

SEQ ID NO: 996605 - DNA, 33 bp, Homo sapien
tgtacccagtttcctgcacccatctacctacag

SEQ ID NO: 996606 - DNA, 33 bp, Homo sapien
tgtacccagtttcctgtacccatctacctacag

SEQ ID NO: 996607 - DNA, 33 bp, Homo sapien
acttgagtgctacgaaatgaactaataattata

SEQ ID NO: 996608 - DNA, 33 bp, Homo sapien
acttgagtgctacgaagtgaactaataattata

SEQ ID NO: 996609 - DNA, 33 bp, Homo sapien
agtctaatttacactgcagcgtaattcatctgt

SEQ ID NO: 996610 - DNA, 33 bp, Homo sapien
agtctaatttacactgtagcgtaattcatctgt

SEQ ID NO: 996611 - DNA, 33 bp, Homo sapien
tgcctcacagaaagaacgtgaactttggcatga

SEQ ID NO: 996612 - DNA, 33 bp, Homo sapien
tgcctcacagaaagaatgtgaactttggcatga

SEQ ID NO: 996613 - DNA, 33 bp, Homo sapien
gagaggctacagacacacacaataaaggaagct

SEQ ID NO: 996614 - DNA, 33 bp, Homo sapien
gagaggctacagacacgcacaataaaggaagct

SEQ ID NO: 996615 - DNA, 33 bp, Homo sapien
caaccatgcaatgtaacggagctctcttatttt

SEQ ID NO: 996616 - DNA, 33 bp, Homo sapien
caaccatgcaatgtaatggagctctcttatttt

SEQ ID NO: 996617 - DNA, 33 bp, Homo sapien
ttttatctagtccaaactccttgtgttggttat

SEQ ID NO: 996618 - DNA, 33 bp, Homo sapien
ttttatctagtccaaattccttgtgttggttat

SEQ ID NO: 996619 - DNA, 33 bp, Homo sapien
taacacatcatgatcaaccaacgtctttagttt

SEQ ID NO: 996620 - DNA, 33 bp, Homo sapien
taacacatcatgatcacccaacgtctttagttt

SEQ ID NO: 996621 - DNA, 33 bp, Homo sapien
gtattccaggcgtccacggtaagagtgcattgc

SEQ ID NO: 996622 - DNA, 33 bp, Homo sapien
gtattccaggcgtccatggtaagagtgcattgc

SEQ ID NO: 996623 - DNA, 33 bp, Homo sapien
gtctcaggagttaggacgctaaatggaaaacta

SEQ ID NO: 996624 - DNA, 33 bp, Homo sapien
gtctcaggagttaggatgctaaatggaaaacta

SEQ ID NO: 996625 - DNA, 33 bp, Homo sapien
aacagctgaaaaacagactgtgatccctccata

SEQ ID NO: 996626 - DNA, 33 bp, Homo sapien
aacagctgaaaaacaggctgtgatccctccata

SEQ ID NO: 996627 - DNA, 33 bp, Homo sapien
tttaagttcaggtattaaaacttcagggatatt

SEQ ID NO: 996628 - DNA, 33 bp, Homo sapien
tttaagttcaggtattcaaacttcagggatatt

SEQ ID NO: 996629 - DNA, 33 bp, Homo sapien
accgacagtatgtggaagaaattgcaactgtga

SEQ ID NO: 996630 - DNA, 33 bp, Homo sapien
accgacagtatgtggaggaaattgcaactgtga

SEQ ID NO: 996631 - DNA, 33 bp, Homo sapien
tatcaccaaactctccagagcctttttagttca

SEQ ID NO: 996632 - DNA, 33 bp, Homo sapien
tatcaccaaactctcctgagcctttttagttca

SEQ ID NO: 996633 - DNA, 33 bp, Homo sapien
tgtaaattactttttgcatcctgaaaatactaa

SEQ ID NO: 996634 - DNA, 33 bp, Homo sapien
tgtaaattactttttgtatcctgaaaatactaa

SEQ ID NO: 996635 - DNA, 33 bp, Homo sapien
tctataaagaaagctaagttctaccagttttta

SEQ ID NO: 996636 - DNA, 33 bp, Homo sapien
tctataaagaaagctaggttctaccagttttta

SEQ ID NO: 996637 - DNA, 33 bp, Homo sapien
aaggcaatcaaataaccatatctaatcggagca

SEQ ID NO: 996638 - DNA, 33 bp, Homo sapien
aaggcaatcaaataactatatctaatcggagca

SEQ ID NO: 996639 - DNA, 33 bp, Homo sapien
gtaatgcactcctggaaggtaagttaatatttt

SEQ ID NO: 996640 - DNA, 33 bp, Homo sapien
gtaatgcactcctggatggtaagttaatatttt

SEQ ID NO: 996641 - DNA, 33 bp, Homo sapien
atcacagttaggactacgtaagaaaacaaagaa

SEQ ID NO: 996642 - DNA, 33 bp, Homo sapien
atcacagttaggactatgtaagaaaacaaagaa

SEQ ID NO: 996643 - DNA, 33 bp, Homo sapien
actctctgtccagaagaaagataaggccagata

SEQ ID NO: 996644 - DNA, 33 bp, Homo sapien
actctctgtccagaaggaagataaggccagata

SEQ ID NO: 996645 - DNA, 33 bp, Homo sapien
catcccttgttctttacgcagaattctgacttg

SEQ ID NO: 996646 - DNA, 33 bp, Homo sapien
catcccttgttctttatgcagaattctgacttg

SEQ ID NO: 996647 - DNA, 33 bp, Homo sapien
aattccatatttctacactgtttgtcacaagct

SEQ ID NO: 996648 - DNA, 33 bp, Homo sapien
aattccatatttctaccctgtttgtcacaagct

SEQ ID NO: 996649 - DNA, 33 bp, Homo sapien
actttcctagtgcttcactttttgaatcataca

SEQ ID NO: 996650 - DNA, 33 bp, Homo sapien
actttcctagtgcttcgctttttgaatcataca

SEQ ID NO: 996651 - DNA, 33 bp, Homo sapien
cagaattcacccatacaccatacgtttgataat

SEQ ID NO: 996652 - DNA, 33 bp, Homo sapien
cagaattcacccatacgccatacgtttgataat

SEQ ID NO: 996653 - DNA, 33 bp, Homo sapien
gcttagtttttcaatgaaccaaagaaaggaaga

SEQ ID NO: 996654 - DNA, 33 bp, Homo sapien
gcttagtttttcaatggaccaaagaaaggaaga

SEQ ID NO: 996655 - DNA, 33 bp, Homo sapien
gcctaatatgctgtcactatttctttaggagca

SEQ ID NO: 996656 - DNA, 33 bp, Homo sapien
gcctaatatgctgtcattatttctttaggagca

SEQ ID NO: 996657 - DNA, 33 bp, Homo sapien
acttttcctgtgttcactctctcaagggaggcc

SEQ ID NO: 996658 - DNA, 33 bp, Homo sapien
acttttcctgtgttcattctctcaagggaggcc

SEQ ID NO: 996659 - DNA, 33 bp, Homo sapien
gacaaaacaattactaagatataaccgcaaaat

SEQ ID NO: 996660 - DNA, 33 bp, Homo sapien
gacaaaacaattactaggatataaccgcaaaat

SEQ ID NO: 996661 - DNA, 33 bp, Homo sapien
ccaggtttctggtataatagggcttctggcagg

SEQ ID NO: 996662 - DNA, 33 bp, Homo sapien
ccaggtttctggtatagtagggcttctggcagg

SEQ ID NO: 996663 - DNA, 33 bp, Homo sapien
tgtggttgattgacgagaatgaattccagtctc

SEQ ID NO: 996664 - DNA, 33 bp, Homo sapien
tgtggttgattgacgataatgaattccagtctc

SEQ ID NO: 996665 - DNA, 33 bp, Homo sapien
ctactaccttctgattcaaaatgttcttcactt

SEQ ID NO: 996666 - DNA, 33 bp, Homo sapien
ctactaccttctgattgaaaatgttcttcactt

SEQ ID NO: 996667 - DNA, 33 bp, Homo sapien
actttgtggtaaaagcaagtgaagaagttaggc

SEQ ID NO: 996668 - DNA, 33 bp, Homo sapien
actttgtggtaaaagcgagtgaagaagttaggc

SEQ ID NO: 996669 - DNA, 33 bp, Homo sapien
ttggaactgttctgccaaagttactattggttg

SEQ ID NO: 996670 - DNA, 33 bp, Homo sapien
ttggaactgttctgccgaagttactattggttg

SEQ ID NO: 996671 - DNA, 33 bp, Homo sapien
gtaaacatataggggggcaaaaatgtttgagaa

SEQ ID NO: 996672 - DNA, 33 bp, Homo sapien
gtaaacatatagggggtcaaaaatgtttgagaa

SEQ ID NO: 996673 - DNA, 33 bp, Homo sapien
ggcttgtttggccaacacccatgaaactctcaa

SEQ ID NO: 996674 - DNA, 33 bp, Homo sapien
ggcttgtttggccaacgcccatgaaactctcaa

SEQ ID NO: 996675 - DNA, 33 bp, Homo sapien
gtattgctcaacaatacatgcatagtggttctg

SEQ ID NO: 996676 - DNA, 33 bp, Homo sapien
gtattgctcaacaatatatgcatagtggttctg

SEQ ID NO: 996677 - DNA, 33 bp, Homo sapien
gaataaaccattcatactagtgtctaaaactgt

SEQ ID NO: 996678 - DNA, 33 bp, Homo sapien
gaataaaccattcatattagtgtctaaaactgt

SEQ ID NO: 996679 - DNA, 33 bp, Homo sapien
agagctgagaggaatcacatagctatctacttc

SEQ ID NO: 996680 - DNA, 33 bp, Homo sapien
agagctgagaggaatcgcatagctatctacttc

SEQ ID NO: 996681 - DNA, 33 bp, Homo sapien
gagcgctggtgtgagaggaagaattgtctagtc

SEQ ID NO: 996682 - DNA, 33 bp, Homo sapien
gagcgctggtgtgagatgaagaattgtctagtc

SEQ ID NO: 996683 - DNA, 33 bp, Homo sapien
gacaaaaggattatgaaagttgaactggagtta

SEQ ID NO: 996684 - DNA, 33 bp, Homo sapien
gacaaaaggattatgagagttgaactggagtta

SEQ ID NO: 996685 - DNA, 33 bp, Homo sapien
aagacgcctctccctgaaattctctccatttat

SEQ ID NO: 996686 - DNA, 33 bp, Homo sapien
aagacgcctctccctgcaattctctccatttat

SEQ ID NO: 996687 - DNA, 33 bp, Homo sapien
ccctagggaatttgctaaactgagaactattgt

SEQ ID NO: 996688 - DNA, 33 bp, Homo sapien
ccctagggaatttgctgaactgagaactattgt

SEQ ID NO: 996689 - DNA, 33 bp, Homo sapien
agatatttatccttgccaaatgaagtacacaaa

SEQ ID NO: 996690 - DNA, 33 bp, Homo sapien
agatatttatccttgcgaaatgaagtacacaaa

SEQ ID NO: 996691 - DNA, 33 bp, Homo sapien
gcagacggttttgagcagaccacggagttttga

SEQ ID NO: 996692 - DNA, 33 bp, Homo sapien
gcagacggttttgagcggaccacggagttttga

SEQ ID NO: 996693 - DNA, 33 bp, Homo sapien
acttaatagtcttttaaagcatttctcaggtaa

SEQ ID NO: 996694 - DNA, 33 bp, Homo sapien
acttaatagtcttttatagcatttctcaggtaa

SEQ ID NO: 996695 - DNA, 33 bp, Homo sapien
aggttaaattcttagaaatcttggagagtcagg

SEQ ID NO: 996696 - DNA, 33 bp, Homo sapien
aggttaaattcttagacatcttggagagtcagg

SEQ ID NO: 996697 - DNA, 33 bp, Homo sapien
tattctagccacttaaagttgaaaaaattatgt

SEQ ID NO: 996698 - DNA, 33 bp, Homo sapien
tattctagccacttaacgttgaaaaaattatgt

SEQ ID NO: 996699 - DNA, 33 bp, Homo sapien
cactatgagtttccaaaagcattttaacaaatg

SEQ ID NO: 996700 - DNA, 33 bp, Homo sapien
cactatgagtttccaagagcattttaacaaatg

SEQ ID NO: 996701 - DNA, 33 bp, Homo sapien
tggcaataacagtgtccacaacattatcttaag

SEQ ID NO: 996702 - DNA, 33 bp, Homo sapien
tggcaataacagtgtctacaacattatcttaag

SEQ ID NO: 996703 - DNA, 33 bp, Homo sapien
gtatttgtgttatagacagaataattggcggcc

SEQ ID NO: 996704 - DNA, 33 bp, Homo sapien
gtatttgtgttatagatagaataattggcggcc

SEQ ID NO: 996705 - DNA, 33 bp, Homo sapien
ttacatcaaaggcaagcatgttctggggttaga

SEQ ID NO: 996706 - DNA, 33 bp, Homo sapien
ttacatcaaaggcaagtatgttctggggttaga

SEQ ID NO: 996707 - DNA, 33 bp, Homo sapien
aagggttaacacaatagtagaaggataatgtga

SEQ ID NO: 996708 - DNA, 33 bp, Homo sapien
aagggttaacacaatattagaaggataatgtga

SEQ ID NO: 996709 - DNA, 33 bp, Homo sapien
gaaagcatattatgacagaggaggtatatgtga

SEQ ID NO: 996710 - DNA, 33 bp, Homo sapien
gaaagcatattatgacggaggaggtatatgtga

SEQ ID NO: 996711 - DNA, 33 bp, Homo sapien
gctggcctaatatgggaacaaatttcctgtctt

SEQ ID NO: 996712 - DNA, 33 bp, Homo sapien
gctggcctaatatgggtacaaatttcctgtctt

SEQ ID NO: 996713 - DNA, 33 bp, Homo sapien
tttcaaatggtgtgccaaagtttttgaaggaga

SEQ ID NO: 996714 - DNA, 33 bp, Homo sapien
tttcaaatggtgtgccgaagtttttgaaggaga

SEQ ID NO: 996715 - DNA, 33 bp, Homo sapien
gtgtaagcttttcacaactaaattttgctgaag

SEQ ID NO: 996716 - DNA, 33 bp, Homo sapien
gtgtaagcttttcacacctaaattttgctgaag

SEQ ID NO: 996717 - DNA, 33 bp, Homo sapien
gaaggggccacaggcactctttggactccgggg

SEQ ID NO: 996718 - DNA, 33 bp, Homo sapien
gaaggggccacaggcattctttggactccgggg

SEQ ID NO: 996719 - DNA, 33 bp, Homo sapien
aagagaaattggcgccaaaaaataagcagcaaa

SEQ ID NO: 996720 - DNA, 33 bp, Homo sapien
aagagaaattggcgccgaaaaataagcagcaaa

SEQ ID NO: 996721 - DNA, 33 bp, Homo sapien
taaaaatcaagggtgactaactggctactttaa

SEQ ID NO: 996722 - DNA, 33 bp, Homo sapien
taaaaatcaagggtgattaactggctactttaa

SEQ ID NO: 996723 - DNA, 33 bp, Homo sapien
cctgcttgtagacttacactatgtacagttgac

SEQ ID NO: 996724 - DNA, 33 bp, Homo sapien
cctgcttgtagacttatactatgtacagttgac

SEQ ID NO: 996725 - DNA, 33 bp, Homo sapien
agaatgtagacctatacgatgatccacttccac

SEQ ID NO: 996726 - DNA, 33 bp, Homo sapien
agaatgtagacctatatgatgatccacttccac

SEQ ID NO: 996727 - DNA, 33 bp, Homo sapien
atggagtaccgaagtaaatggcagaaacatagc

SEQ ID NO: 996728 - DNA, 33 bp, Homo sapien
atggagtaccgaagtagatggcagaaacatagc

SEQ ID NO: 996729 - DNA, 33 bp, Homo sapien
ccgtgaaaacagtgacacatggccccattacta

SEQ ID NO: 996730 - DNA, 33 bp, Homo sapien
ccgtgaaaacagtgacgcatggccccattacta

SEQ ID NO: 996731 - DNA, 33 bp, Homo sapien
tcttgtattttccctcacatccaacatttgcaa

SEQ ID NO: 996732 - DNA, 33 bp, Homo sapien
tcttgtattttccctcgcatccaacatttgcaa

SEQ ID NO: 996733 - DNA, 33 bp, Homo sapien
tggatttttgttgaaccaaacaatgtgtattcc

SEQ ID NO: 996734 - DNA, 33 bp, Homo sapien
tggatttttgttgaactaaacaatgtgtattcc

SEQ ID NO: 996735 - DNA, 33 bp, Homo sapien
ctgtgtcataaattcaagaataaatcactacat

SEQ ID NO: 996736 - DNA, 33 bp, Homo sapien
ctgtgtcataaattcaggaataaatcactacat

SEQ ID NO: 996737 - DNA, 33 bp, Homo sapien
gggagagaggtctacaagtgcccagaatatttt

SEQ ID NO: 996738 - DNA, 33 bp, Homo sapien
gggagagaggtctacaggtgcccagaatatttt

SEQ ID NO: 996739 - DNA, 33 bp, Homo sapien
atgtcgagggaaaacactggattgcagccccct

SEQ ID NO: 996740 - DNA, 33 bp, Homo sapien
atgtcgagggaaaacattggattgcagccccct

SEQ ID NO: 996741 - DNA, 33 bp, Homo sapien
caaatccaatgattgacatctccaagcctaata

SEQ ID NO: 996742 - DNA, 33 bp, Homo sapien
caaatccaatgattgatatctccaagcctaata

SEQ ID NO: 996743 - DNA, 33 bp, Homo sapien
tgtgtgcactctaaacaacaaccactctttgtc

SEQ ID NO: 996744 - DNA, 33 bp, Homo sapien
tgtgtgcactctaaacgacaaccactctttgtc

SEQ ID NO: 996745 - DNA, 33 bp, Homo sapien
aaaaagtcacccaaacactttctatacataaaa

SEQ ID NO: 996746 - DNA, 33 bp, Homo sapien
aaaaagtcacccaaacgctttctatacataaaa

SEQ ID NO: 996747 - DNA, 33 bp, Homo sapien
cccagttggtttagaaagtaaaacaagtgtccc

SEQ ID NO: 996748 - DNA, 33 bp, Homo sapien
cccagttggtttagaaggtaaaacaagtgtccc

SEQ ID NO: 996749 - DNA, 33 bp, Homo sapien
aaattttattcctaccaaatagtgctggtgaac

SEQ ID NO: 996750 - DNA, 33 bp, Homo sapien
aaattttattcctacccaatagtgctggtgaac

SEQ ID NO: 996751 - DNA, 33 bp, Homo sapien
taaagaattgtagcacaggatgagaaataaatc

SEQ ID NO: 996752 - DNA, 33 bp, Homo sapien
taaagaattgtagcacgggatgagaaataaatc

SEQ ID NO: 996753 - DNA, 33 bp, Homo sapien
taagtaatgagtgatacaatgcaatttgcttct

SEQ ID NO: 996754 - DNA, 33 bp, Homo sapien
taagtaatgagtgatataatgcaatttgcttct

SEQ ID NO: 996755 - DNA, 33 bp, Homo sapien
attgtgccatcaactcaaaggaagaaatatctt

SEQ ID NO: 996756 - DNA, 33 bp, Homo sapien
attgtgccatcaactcgaaggaagaaatatctt

SEQ ID NO: 996757 - DNA, 33 bp, Homo sapien
atctttgaaactttacaaggaatgccacaggtc

SEQ ID NO: 996758 - DNA, 33 bp, Homo sapien
atctttgaaactttacgaggaatgccacaggtc

SEQ ID NO: 996759 - DNA, 33 bp, Homo sapien
tactggcaagttttgactacttttttcaaatat

SEQ ID NO: 996760 - DNA, 33 bp, Homo sapien
tactggcaagttttgagtacttttttcaaatat

SEQ ID NO: 996761 - DNA, 33 bp, Homo sapien
aaaatgaatccaccacaagccaagggaagaagg

SEQ ID NO: 996762 - DNA, 33 bp, Homo sapien
aaaatgaatccaccacgagccaagggaagaagg

SEQ ID NO: 996763 - DNA, 33 bp, Homo sapien
attcaagagagtttgccactatttgtcatccta

SEQ ID NO: 996764 - DNA, 33 bp, Homo sapien
attcaagagagtttgctactatttgtcatccta

SEQ ID NO: 996765 - DNA, 33 bp, Homo sapien
ttccacttgtgataaacgatgtcacttcttcca

SEQ ID NO: 996766 - DNA, 33 bp, Homo sapien
ttccacttgtgataaatgatgtcacttcttcca

SEQ ID NO: 996767 - DNA, 33 bp, Homo sapien
ggttctaagtggaagacagaagcagaatagaga

SEQ ID NO: 996768 - DNA, 33 bp, Homo sapien
ggttctaagtggaagagagaagcagaatagaga

SEQ ID NO: 996769 - DNA, 33 bp, Homo sapien
cacgttgattttagcccgaggaaacctatttca

SEQ ID NO: 996770 - DNA, 33 bp, Homo sapien
cacgttgattttagcctgaggaaacctatttca

SEQ ID NO: 996771 - DNA, 33 bp, Homo sapien
cagatattcctttgaaatcctcttttggcatct

SEQ ID NO: 996772 - DNA, 33 bp, Homo sapien
cagatattcctttgaattcctcttttggcatct

SEQ ID NO: 996773 - DNA, 33 bp, Homo sapien
ccattaaaatacactccgaaagccattcatttg

SEQ ID NO: 996774 - DNA, 33 bp, Homo sapien
ccattaaaatacactctgaaagccattcatttg

SEQ ID NO: 996775 - DNA, 33 bp, Homo sapien
agagctgaagaactgaaattcagagagcttgtg

SEQ ID NO: 996776 - DNA, 33 bp, Homo sapien
agagctgaagaactgacattcagagagcttgtg

SEQ ID NO: 996777 - DNA, 33 bp, Homo sapien
tgtgactaaatgcacaatatgaggcgttggggt

SEQ ID NO: 996778 - DNA, 33 bp, Homo sapien
tgtgactaaatgcacagtatgaggcgttggggt

SEQ ID NO: 996779 - DNA, 33 bp, Homo sapien
cagctctggagaacacacttttactttagtcag

SEQ ID NO: 996780 - DNA, 33 bp, Homo sapien
cagctctggagaacacgcttttactttagtcag

SEQ ID NO: 996781 - DNA, 33 bp, Homo sapien
gcattgctgttttgaaatctttagaatccttgt

SEQ ID NO: 996782 - DNA, 33 bp, Homo sapien
gcattgctgttttgaagtctttagaatccttgt

SEQ ID NO: 996783 - DNA, 33 bp, Homo sapien
ataccaacagcctggaatcactggctgagatga

SEQ ID NO: 996784 - DNA, 33 bp, Homo sapien
ataccaacagcctggactcactggctgagatga

SEQ ID NO: 996785 - DNA, 33 bp, Homo sapien
agaacacatgcagcagactctattcttgctact

SEQ ID NO: 996786 - DNA, 33 bp, Homo sapien
agaacacatgcagcaggctctattcttgctact

SEQ ID NO: 996787 - DNA, 33 bp, Homo sapien
aatctttaaactcataaccttataatctctcaa

SEQ ID NO: 996788 - DNA, 33 bp, Homo sapien
aatctttaaactcatatccttataatctctcaa

SEQ ID NO: 996789 - DNA, 33 bp, Homo sapien
aagaaataaacgtccaacagatgcaagcagtga

SEQ ID NO: 996790 - DNA, 33 bp, Homo sapien
aagaaataaacgtccaccagatgcaagcagtga

SEQ ID NO: 996791 - DNA, 33 bp, Homo sapien
actagttgcaacagaaaccctaaggtccacaaa

SEQ ID NO: 996792 - DNA, 33 bp, Homo sapien
actagttgcaacagaagccctaaggtccacaaa

SEQ ID NO: 996793 - DNA, 33 bp, Homo sapien
ggcatgaaagctcctacagcattgataaatttc

SEQ ID NO: 996794 - DNA, 33 bp, Homo sapien
ggcatgaaagctcctatagcattgataaatttc

SEQ ID NO: 996795 - DNA, 33 bp, Homo sapien
tattgctcctgagctgcaaatctgtacatcatg

SEQ ID NO: 996796 - DNA, 33 bp, Homo sapien
tattgctcctgagctgtaaatctgtacatcatg

SEQ ID NO: 996797 - DNA, 33 bp, Homo sapien
atgagcccagatctgacgaaagagaaggagtat

SEQ ID NO: 996798 - DNA, 33 bp, Homo sapien
atgagcccagatctgatgaaagagaaggagtat

SEQ ID NO: 996799 - DNA, 33 bp, Homo sapien
gttcttttcaaaaatcacccaattgtaaaatag

SEQ ID NO: 996800 - DNA, 33 bp, Homo sapien
gttcttttcaaaaatcgcccaattgtaaaatag

SEQ ID NO: 996801 - DNA, 33 bp, Homo sapien
atatgggatatatggaggttttaaagctatagc

SEQ ID NO: 996802 - DNA, 33 bp, Homo sapien
atatgggatatatggatgttttaaagctatagc

SEQ ID NO: 996803 - DNA, 33 bp, Homo sapien
gagagttcaccctccaaccttctgccaggtgag

SEQ ID NO: 996804 - DNA, 33 bp, Homo sapien
gagagttcaccctccagccttctgccaggtgag

SEQ ID NO: 996805 - DNA, 33 bp, Homo sapien
ttacttcccacttggcaacactgtactatttat

SEQ ID NO: 996806 - DNA, 33 bp, Homo sapien
ttacttcccacttggcgacactgtactatttat

SEQ ID NO: 996807 - DNA, 33 bp, Homo sapien
attcccaatgtttgtaccctatatgctccaagg

SEQ ID NO: 996808 - DNA, 33 bp, Homo sapien
attcccaatgtttgtatcctatatgctccaagg

SEQ ID NO: 996809 - DNA, 33 bp, Homo sapien
tagaaaacagtacgcacgaacacaaaagaaatc

SEQ ID NO: 996810 - DNA, 33 bp, Homo sapien
tagaaaacagtacgcatgaacacaaaagaaatc

SEQ ID NO: 996811 - DNA, 33 bp, Homo sapien
acatatcaatgggaagactaccaaaaactttgt

SEQ ID NO: 996812 - DNA, 33 bp, Homo sapien
acatatcaatgggaagtctaccaaaaactttgt

SEQ ID NO: 996813 - DNA, 33 bp, Homo sapien
attaatttccctccaaattatactaacctggac

SEQ ID NO: 996814 - DNA, 33 bp, Homo sapien
attaatttccctccaatttatactaacctggac

SEQ ID NO: 996815 - DNA, 33 bp, Homo sapien
taaggatatctaggtggcaaaaatatatagatt

SEQ ID NO: 996816 - DNA, 33 bp, Homo sapien
taaggatatctaggtgtcaaaaatatatagatt

SEQ ID NO: 996817 - DNA, 33 bp, Homo sapien
cctacatctgtagtcacggcaggaggctctctt

SEQ ID NO: 996818 - DNA, 33 bp, Homo sapien
cctacatctgtagtcatggcaggaggctctctt

SEQ ID NO: 996819 - DNA, 33 bp, Homo sapien
ataaacactgcttgcaaatctccatctttgtcc

SEQ ID NO: 996820 - DNA, 33 bp, Homo sapien
ataaacactgcttgcatatctccatctttgtcc

SEQ ID NO: 996821 - DNA, 33 bp, Homo sapien
tgctctcaacgtaaccacacactctttggtggt

SEQ ID NO: 996822 - DNA, 33 bp, Homo sapien
tgctctcaacgtaaccgcacactctttggtggt

SEQ ID NO: 996823 - DNA, 33 bp, Homo sapien
cacacctgtaagatgaagctgatagacagagga

SEQ ID NO: 996824 - DNA, 33 bp, Homo sapien
cacacctgtaagatgaggctgatagacagagga

SEQ ID NO: 996825 - DNA, 33 bp, Homo sapien
ctaaaaacgacgacagaaggaaagtagtgtttc

SEQ ID NO: 996826 - DNA, 33 bp, Homo sapien
ctaaaaacgacgacaggaggaaagtagtgtttc

SEQ ID NO: 996827 - DNA, 33 bp, Homo sapien
cttacttcatggcagacggaattttagtggtgt

SEQ ID NO: 996828 - DNA, 33 bp, Homo sapien
cttacttcatggcagatggaattttagtggtgt

SEQ ID NO: 996829 - DNA, 33 bp, Homo sapien
attatacatccatctaccctcattttagctatt

SEQ ID NO: 996830 - DNA, 33 bp, Homo sapien
attatacatccatctatcctcattttagctatt

SEQ ID NO: 996831 - DNA, 33 bp, Homo sapien
cagaacttgagttagagtcatcagtgctgtctt

SEQ ID NO: 996832 - DNA, 33 bp, Homo sapien
cagaacttgagttagattcatcagtgctgtctt

SEQ ID NO: 996833 - DNA, 33 bp, Homo sapien
gcaaatccttctggcaaaagaaaaccaagaaga

SEQ ID NO: 996834 - DNA, 33 bp, Homo sapien
gcaaatccttctggcacaagaaaaccaagaaga

SEQ ID NO: 996835 - DNA, 33 bp, Homo sapien
ccagcgtggacctaacccactttttggaataaa

SEQ ID NO: 996836 - DNA, 33 bp, Homo sapien
ccagcgtggacctaactcactttttggaataaa

SEQ ID NO: 996837 - DNA, 33 bp, Homo sapien
ttaaaatctaggctgccatatgggattataaac

SEQ ID NO: 996838 - DNA, 33 bp, Homo sapien
ttaaaatctaggctgctatatgggattataaac

SEQ ID NO: 996839 - DNA, 33 bp, Homo sapien
agaagcagaaggttctcacactcatacaaactt

SEQ ID NO: 996840 - DNA, 33 bp, Homo sapien
agaagcagaaggttctgacactcatacaaactt

SEQ ID NO: 996841 - DNA, 33 bp, Homo sapien
acaatgactgcacatcaataaatggacctttta

SEQ ID NO: 996842 - DNA, 33 bp, Homo sapien
acaatgactgcacatcgataaatggacctttta

SEQ ID NO: 996843 - DNA, 33 bp, Homo sapien
tgaacgttggataaagacatctatggaaccaaa

SEQ ID NO: 996844 - DNA, 33 bp, Homo sapien
tgaacgttggataaagccatctatggaaccaaa

SEQ ID NO: 996845 - DNA, 33 bp, Homo sapien
cagataaataggtaaaaaaaaggtgacataaaa

SEQ ID NO: 996846 - DNA, 33 bp, Homo sapien
cagataaataggtaaacaaaaggtgacataaaa

SEQ ID NO: 996847 - DNA, 33 bp, Homo sapien
aaggcaccattttcaacgtagagactcagccct

SEQ ID NO: 996848 - DNA, 33 bp, Homo sapien
aaggcaccattttcaaggtagagactcagccct

SEQ ID NO: 996849 - DNA, 33 bp, Homo sapien
ttaggggtttacacaacggagaaggaagaaaga

SEQ ID NO: 996850 - DNA, 33 bp, Homo sapien
ttaggggtttacacaatggagaaggaagaaaga

SEQ ID NO: 996851 - DNA, 33 bp, Homo sapien
cagtgaaatactagagcccttatctgaccacct

SEQ ID NO: 996852 - DNA, 33 bp, Homo sapien
cagtgaaatactagagtccttatctgaccacct

SEQ ID NO: 996853 - DNA, 33 bp, Homo sapien
tcaaaaaggaggaccacgacactgtgagacagg

SEQ ID NO: 996854 - DNA, 33 bp, Homo sapien
tcaaaaaggaggaccatgacactgtgagacagg

SEQ ID NO: 996855 - DNA, 33 bp, Homo sapien
acaggggagatattgacaaatagggcacggact

SEQ ID NO: 996856 - DNA, 33 bp, Homo sapien
acaggggagatattgagaaatagggcacggact

SEQ ID NO: 996857 - DNA, 33 bp, Homo sapien
ttgaacttttccattccaatttgcattacctgt

SEQ ID NO: 996858 - DNA, 33 bp, Homo sapien
ttgaacttttccattctaatttgcattacctgt

SEQ ID NO: 996859 - DNA, 33 bp, Homo sapien
acaaaatgtactgagaggcagttggtctaggtt

SEQ ID NO: 996860 - DNA, 33 bp, Homo sapien
acaaaatgtactgagatgcagttggtctaggtt

SEQ ID NO: 996861 - DNA, 33 bp, Homo sapien
atgaagccctcatagaaatggagaaagtggagc

SEQ ID NO: 996862 - DNA, 33 bp, Homo sapien
atgaagccctcatagagatggagaaagtggagc

SEQ ID NO: 996863 - DNA, 33 bp, Homo sapien
gcttcacacatgttaaatctctctccgccttca

SEQ ID NO: 996864 - DNA, 33 bp, Homo sapien
gcttcacacatgttaactctctctccgccttca

SEQ ID NO: 996865 - DNA, 33 bp, Homo sapien
aatacttgtagactaaccacaaagaaaataaat

SEQ ID NO: 996866 - DNA, 33 bp, Homo sapien
aatacttgtagactaatcacaaagaaaataaat

SEQ ID NO: 996867 - DNA, 33 bp, Homo sapien
aagaggctaaagaaaccatttatttcactcaag

SEQ ID NO: 996868 - DNA, 33 bp, Homo sapien
aagaggctaaagaaacgatttatttcactcaag

SEQ ID NO: 996869 - DNA, 33 bp, Homo sapien
tttcactcaagggtgaggtttacaacaagtcat

SEQ ID NO: 996870 - DNA, 33 bp, Homo sapien
tttcactcaagggtgatgtttacaacaagtcat

SEQ ID NO: 996871 - DNA, 33 bp, Homo sapien
tagaatcctgaagaaacactaaaaccataggta

SEQ ID NO: 996872 - DNA, 33 bp, Homo sapien
tagaatcctgaagaaagactaaaaccataggta

SEQ ID NO: 996873 - DNA, 33 bp, Homo sapien
ttgggcattatcatgacagtttattgatccttt

SEQ ID NO: 996874 - DNA, 33 bp, Homo sapien
ttgggcattatcatgagagtttattgatccttt

SEQ ID NO: 996875 - DNA, 33 bp, Homo sapien
tagctctaaccttgatcactccaatatctcact

SEQ ID NO: 996876 - DNA, 33 bp, Homo sapien
tagctctaaccttgattactccaatatctcact

SEQ ID NO: 996877 - DNA, 33 bp, Homo sapien
gaaaaaatgtcaataccgagctttggttttaaa

SEQ ID NO: 996878 - DNA, 33 bp, Homo sapien
gaaaaaatgtcaatactgagctttggttttaaa

SEQ ID NO: 996879 - DNA, 33 bp, Homo sapien
cagcaggaaggtcaaacggtgcacgcttgggtt

SEQ ID NO: 996880 - DNA, 33 bp, Homo sapien
cagcaggaaggtcaaatggtgcacgcttgggtt

SEQ ID NO: 996881 - DNA, 33 bp, Homo sapien
ggttttggtgatgagaagaaggtgagcccatag

SEQ ID NO: 996882 - DNA, 33 bp, Homo sapien
ggttttggtgatgagacgaaggtgagcccatag

SEQ ID NO: 996883 - DNA, 33 bp, Homo sapien
cggcccattgtgaagactaaattacatacatat

SEQ ID NO: 996884 - DNA, 33 bp, Homo sapien
cggcccattgtgaagattaaattacatacatat

SEQ ID NO: 996885 - DNA, 33 bp, Homo sapien
ttaatgggtcaccaaacccccaaactctaccaa

SEQ ID NO: 996886 - DNA, 33 bp, Homo sapien
ttaatgggtcaccaaatccccaaactctaccaa

SEQ ID NO: 996887 - DNA, 33 bp, Homo sapien
gtaatgcctggacgtaataaagaataaagaggg

SEQ ID NO: 996888 - DNA, 33 bp, Homo sapien
gtaatgcctggacgtagtaaagaataaagaggg

SEQ ID NO: 996889 - DNA, 33 bp, Homo sapien
atgtttggaactactacgggagccacatcatta

SEQ ID NO: 996890 - DNA, 33 bp, Homo sapien
atgtttggaactactatgggagccacatcatta

SEQ ID NO: 996891 - DNA, 33 bp, Homo sapien
acgtcatgcctaagaccgacttgataatccata

SEQ ID NO: 996892 - DNA, 33 bp, Homo sapien
acgtcatgcctaagactgacttgataatccata

SEQ ID NO: 996893 - DNA, 33 bp, Homo sapien
ataaagctcaatgagacgtaatgttctgaaaca

SEQ ID NO: 996894 - DNA, 33 bp, Homo sapien
ataaagctcaatgagatgtaatgttctgaaaca

SEQ ID NO: 996895 - DNA, 33 bp, Homo sapien
ttggattcaaagagcaataggtgcaaatgttgg

SEQ ID NO: 996896 - DNA, 33 bp, Homo sapien
ttggattcaaagagcagtaggtgcaaatgttgg

SEQ ID NO: 996897 - DNA, 33 bp, Homo sapien
gtagaggaagcagtcaaatacgcaattgtttca

SEQ ID NO: 996898 - DNA, 33 bp, Homo sapien
gtagaggaagcagtcacatacgcaattgtttca

SEQ ID NO: 996899 - DNA, 33 bp, Homo sapien
aaccaggtaataagcaaagtattcagtaggtat

SEQ ID NO: 996900 - DNA, 33 bp, Homo sapien
aaccaggtaataagcagagtattcagtaggtat

SEQ ID NO: 996901 - DNA, 33 bp, Homo sapien
aggttcaatgtctcaccgacctaacaactattc

SEQ ID NO: 996902 - DNA, 33 bp, Homo sapien
aggttcaatgtctcactgacctaacaactattc

SEQ ID NO: 996903 - DNA, 33 bp, Homo sapien
gcatcagggttgcaaaagaatgaataaatacat

SEQ ID NO: 996904 - DNA, 33 bp, Homo sapien
gcatcagggttgcaaaggaatgaataaatacat

SEQ ID NO: 996905 - DNA, 33 bp, Homo sapien
agtgattaaagagatcagacagaaggcagcaga

SEQ ID NO: 996906 - DNA, 33 bp, Homo sapien
agtgattaaagagatcggacagaaggcagcaga

SEQ ID NO: 996907 - DNA, 33 bp, Homo sapien
ccagagcccatttcacactcaggcgatggggat

SEQ ID NO: 996908 - DNA, 33 bp, Homo sapien
ccagagcccatttcacgctcaggcgatggggat

SEQ ID NO: 996909 - DNA, 33 bp, Homo sapien
tcatttctggaaatggacactttcacgtacaaa

SEQ ID NO: 996910 - DNA, 33 bp, Homo sapien
tcatttctggaaatggccactttcacgtacaaa

SEQ ID NO: 996911 - DNA, 33 bp, Homo sapien
tgtccctgtgttgttaaatgatgttctgcagaa

SEQ ID NO: 996912 - DNA, 33 bp, Homo sapien
tgtccctgtgttgttagatgatgttctgcagaa

SEQ ID NO: 996913 - DNA, 33 bp, Homo sapien
ttataaaagtatagtacaaaccacctggcccat

SEQ ID NO: 996914 - DNA, 33 bp, Homo sapien
ttataaaagtatagtataaaccacctggcccat

SEQ ID NO: 996915 - DNA, 33 bp, Homo sapien
atttgaggccctgaaacgttaggtgacttcccc

SEQ ID NO: 996916 - DNA, 33 bp, Homo sapien
atttgaggccctgaaatgttaggtgacttcccc

SEQ ID NO: 996917 - DNA, 33 bp, Homo sapien
aaaagggtaacattctcaaaagaggacataccc

SEQ ID NO: 996918 - DNA, 33 bp, Homo sapien
aaaagggtaacattctgaaaagaggacataccc

SEQ ID NO: 996919 - DNA, 33 bp, Homo sapien
atgtactgattttaaaaaggagctagcatagtg

SEQ ID NO: 996920 - DNA, 33 bp, Homo sapien
atgtactgattttaaagaggagctagcatagtg

SEQ ID NO: 996921 - DNA, 33 bp, Homo sapien
ttgcttctgttgactccacgacacacttccaga

SEQ ID NO: 996922 - DNA, 33 bp, Homo sapien
ttgcttctgttgactctacgacacacttccaga

SEQ ID NO: 996923 - DNA, 33 bp, Homo sapien
tgtccttgaactaggagctatctgacaacagat

SEQ ID NO: 996924 - DNA, 33 bp, Homo sapien
tgtccttgaactaggatctatctgacaacagat

SEQ ID NO: 996925 - DNA, 33 bp, Homo sapien
tcagggtcacagagaagaaatagaattgtgcag

SEQ ID NO: 996926 - DNA, 33 bp, Homo sapien
tcagggtcacagagaataaatagaattgtgcag

SEQ ID NO: 996927 - DNA, 33 bp, Homo sapien
ggaatgaatcattcaacttcttggacctcttaa

SEQ ID NO: 996928 - DNA, 33 bp, Homo sapien
ggaatgaatcattcaatttcttggacctcttaa

SEQ ID NO: 996929 - DNA, 33 bp, Homo sapien
cctcttgtagtgattccagctccagagcacatc

SEQ ID NO: 996930 - DNA, 33 bp, Homo sapien
cctcttgtagtgattctagctccagagcacatc

SEQ ID NO: 996931 - DNA, 33 bp, Homo sapien
agaagcgaggtcaggcccttctgtaactaagta

SEQ ID NO: 996932 - DNA, 33 bp, Homo sapien
agaagcgaggtcaggctcttctgtaactaagta

SEQ ID NO: 996933 - DNA, 33 bp, Homo sapien
agatctctaggacttaccttacataactgaaac

SEQ ID NO: 996934 - DNA, 33 bp, Homo sapien
agatctctaggacttatcttacataactgaaac

SEQ ID NO: 996935 - DNA, 33 bp, Homo sapien
aatttctgattggttggattaggatcctgttcc

SEQ ID NO: 996936 - DNA, 33 bp, Homo sapien
aatttctgattggttgtattaggatcctgttcc

SEQ ID NO: 996937 - DNA, 33 bp, Homo sapien
cttcagatagtctgacggcactattgagtgaat

SEQ ID NO: 996938 - DNA, 33 bp, Homo sapien
cttcagatagtctgactgcactattgagtgaat

SEQ ID NO: 996939 - DNA, 33 bp, Homo sapien
ccctggtagagtggaccggttctctattgtagt

SEQ ID NO: 996940 - DNA, 33 bp, Homo sapien
ccctggtagagtggactggttctctattgtagt

SEQ ID NO: 996941 - DNA, 33 bp, Homo sapien
gatgggccccagaaaacgtagagcggagtcgat

SEQ ID NO: 996942 - DNA, 33 bp, Homo sapien
gatgggccccagaaaatgtagagcggagtcgat

SEQ ID NO: 996943 - DNA, 33 bp, Homo sapien
agggcatggaagactaccaaatggctttagaat

SEQ ID NO: 996944 - DNA, 33 bp, Homo sapien
agggcatggaagactatcaaatggctttagaat

SEQ ID NO: 996945 - DNA, 33 bp, Homo sapien
atttgaatcatacactaacaaaggctaatcaca

SEQ ID NO: 996946 - DNA, 33 bp, Homo sapien
atttgaatcatacactgacaaaggctaatcaca

SEQ ID NO: 996947 - DNA, 33 bp, Homo sapien
caccagacaacattggacaaactgcttatacta

SEQ ID NO: 996948 - DNA, 33 bp, Homo sapien
caccagacaacattggtcaaactgcttatacta

SEQ ID NO: 996949 - DNA, 33 bp, Homo sapien
agaaagtgatgttatacctcatgttgttatcct

SEQ ID NO: 996950 - DNA, 33 bp, Homo sapien
agaaagtgatgttatatctcatgttgttatcct

SEQ ID NO: 996951 - DNA, 33 bp, Homo sapien
agtgggtgtccaaatacatgatttcacccagcc

SEQ ID NO: 996952 - DNA, 33 bp, Homo sapien
agtgggtgtccaaatatatgatttcacccagcc

SEQ ID NO: 996953 - DNA, 33 bp, Homo sapien
ggtttcagagagattaagtgccagcctctatgc

SEQ ID NO: 996954 - DNA, 33 bp, Homo sapien
ggtttcagagagattacgtgccagcctctatgc

SEQ ID NO: 996955 - DNA, 33 bp, Homo sapien
attacagtgataataacaatagtgattttcctt

SEQ ID NO: 996956 - DNA, 33 bp, Homo sapien
attacagtgataataagaatagtgattttcctt

SEQ ID NO: 996957 - DNA, 33 bp, Homo sapien
ataaagccttcagaaaccttatagcagccattg

SEQ ID NO: 996958 - DNA, 33 bp, Homo sapien
ataaagccttcagaaatcttatagcagccattg

SEQ ID NO: 996959 - DNA, 33 bp, Homo sapien
tcaggtcgtccaaacaccgagtcctacatctgt

SEQ ID NO: 996960 - DNA, 33 bp, Homo sapien
tcaggtcgtccaaacatcgagtcctacatctgt

SEQ ID NO: 996961 - DNA, 33 bp, Homo sapien
ctgctatatgaccttaccagtcctctgtcaaga

SEQ ID NO: 996962 - DNA, 33 bp, Homo sapien
ctgctatatgaccttatcagtcctctgtcaaga

SEQ ID NO: 996963 - DNA, 33 bp, Homo sapien
cccttaagtttctccaccgtctcaactcatcct

SEQ ID NO: 996964 - DNA, 33 bp, Homo sapien
cccttaagtttctccatcgtctcaactcatcct

SEQ ID NO: 996965 - DNA, 33 bp, Homo sapien
acaagaagctagagcacaaggaagtaacaggat

SEQ ID NO: 996966 - DNA, 33 bp, Homo sapien
acaagaagctagagcagaaggaagtaacaggat

SEQ ID NO: 996967 - DNA, 33 bp, Homo sapien
taagtaggatattagacgtgctaggaaaaaaaa

SEQ ID NO: 996968 - DNA, 33 bp, Homo sapien
taagtaggatattagatgtgctaggaaaaaaaa

SEQ ID NO: 996969 - DNA, 33 bp, Homo sapien
caatgataatgtggcaataattaggatgacaat

SEQ ID NO: 996970 - DNA, 33 bp, Homo sapien
caatgataatgtggcagtaattaggatgacaat

SEQ ID NO: 996971 - DNA, 33 bp, Homo sapien
cacattatcattgaggaaaaaaaggatctaaat

SEQ ID NO: 996972 - DNA, 33 bp, Homo sapien
cacattatcattgagggaaaaaaggatctaaat

SEQ ID NO: 996973 - DNA, 33 bp, Homo sapien
gaaattcagtccttgccaagatttgacaacggc

SEQ ID NO: 996974 - DNA, 33 bp, Homo sapien
gaaattcagtccttgctaagatttgacaacggc

SEQ ID NO: 996975 - DNA, 33 bp, Homo sapien
acatagcctaagaacacgtatggtacaatgacc

SEQ ID NO: 996976 - DNA, 33 bp, Homo sapien
acatagcctaagaacatgtatggtacaatgacc

SEQ ID NO: 996977 - DNA, 33 bp, Homo sapien
acattatttaggagacagggagagttagtgaag

SEQ ID NO: 996978 - DNA, 33 bp, Homo sapien
acattatttaggagacggggagagttagtgaag

SEQ ID NO: 996979 - DNA, 33 bp, Homo sapien
ctggataatgaaacaaacaggaccttgatctct

SEQ ID NO: 996980 - DNA, 33 bp, Homo sapien
ctggataatgaaacaagcaggaccttgatctct

SEQ ID NO: 996981 - DNA, 33 bp, Homo sapien
gccagggaagctgccacgtctctagggtttgca

SEQ ID NO: 996982 - DNA, 33 bp, Homo sapien
gccagggaagctgccaggtctctagggtttgca

SEQ ID NO: 996983 - DNA, 33 bp, Homo sapien
caccttgaggatagcaaagaaacaaaaacaaag

SEQ ID NO: 996984 - DNA, 33 bp, Homo sapien
caccttgaggatagcagagaaacaaaaacaaag

SEQ ID NO: 996985 - DNA, 33 bp, Homo sapien
gctatggcatttgacacatagattgattagtat

SEQ ID NO: 996986 - DNA, 33 bp, Homo sapien
gctatggcatttgacatatagattgattagtat

SEQ ID NO: 996987 - DNA, 33 bp, Homo sapien
aaagagaaagcagtgaatagacattttttgggg

SEQ ID NO: 996988 - DNA, 33 bp, Homo sapien
aaagagaaagcagtgagtagacattttttgggg

SEQ ID NO: 996989 - DNA, 33 bp, Homo sapien
aggtctctcttccataagcctagaatgttctcc

SEQ ID NO: 996990 - DNA, 33 bp, Homo sapien
aggtctctcttccataggcctagaatgttctcc

SEQ ID NO: 996991 - DNA, 33 bp, Homo sapien
tcttcgccttgtctccacatatggtcttccctc

SEQ ID NO: 996992 - DNA, 33 bp, Homo sapien
tcttcgccttgtctccgcatatggtcttccctc

SEQ ID NO: 996993 - DNA, 33 bp, Homo sapien
attgcttcatgttgagacctcttgcctctacca

SEQ ID NO: 996994 - DNA, 33 bp, Homo sapien
attgcttcatgttgagtcctcttgcctctacca

SEQ ID NO: 996995 - DNA, 33 bp, Homo sapien
tatatacatgactgaaattagatggatttactt

SEQ ID NO: 996996 - DNA, 33 bp, Homo sapien
tatatacatgactgaagttagatggatttactt

SEQ ID NO: 996997 - DNA, 33 bp, Homo sapien
gttttgttgaagaaaaactcttctttgtcatgt

SEQ ID NO: 996998 - DNA, 33 bp, Homo sapien
gttttgttgaagaaaacctcttctttgtcatgt

SEQ ID NO: 996999 - DNA, 33 bp, Homo sapien
taactcaaaagtccacaatccaaactctcatct

SEQ ID NO: 997000 - DNA, 33 bp, Homo sapien
taactcaaaagtccacgatccaaactctcatct

SEQ ID NO: 997001 - DNA, 33 bp, Homo sapien
ctcaagcagccaggtaggaagcaaaaatgggtt

SEQ ID NO: 997002 - DNA, 33 bp, Homo sapien
ctcaagcagccaggtatgaagcaaaaatgggtt

SEQ ID NO: 997003 - DNA, 33 bp, Homo sapien
atttcgtgattgtgtacgctaagagttgcttgt

SEQ ID NO: 997004 - DNA, 33 bp, Homo sapien
atttcgtgattgtgtatgctaagagttgcttgt

SEQ ID NO: 997005 - DNA, 33 bp, Homo sapien
gatgaaagagtgtgaactaaattattgaagttg

SEQ ID NO: 997006 - DNA, 33 bp, Homo sapien
gatgaaagagtgtgaattaaattattgaagttg

SEQ ID NO: 997007 - DNA, 33 bp, Homo sapien
ctaatacaaggtaatcacttattgagatcctaa

SEQ ID NO: 997008 - DNA, 33 bp, Homo sapien
ctaatacaaggtaatcgcttattgagatcctaa

SEQ ID NO: 997009 - DNA, 33 bp, Homo sapien
catatacattgcaatacggtgaaaacgtcatag

SEQ ID NO: 997010 - DNA, 33 bp, Homo sapien
catatacattgcaatatggtgaaaacgtcatag

SEQ ID NO: 997011 - DNA, 33 bp, Homo sapien
agaaagctatgataaaagagtaactataagaat

SEQ ID NO: 997012 - DNA, 33 bp, Homo sapien
agaaagctatgataaaggagtaactataagaat

SEQ ID NO: 997013 - DNA, 33 bp, Homo sapien
atgtgaatgaggcaacgctgctgtttggatgga

SEQ ID NO: 997014 - DNA, 33 bp, Homo sapien
atgtgaatgaggcaactctgctgtttggatgga

SEQ ID NO: 997015 - DNA, 33 bp, Homo sapien
agtaaccatcataaaacgtacactgcatctatc

SEQ ID NO: 997016 - DNA, 33 bp, Homo sapien
agtaaccatcataaaaggtacactgcatctatc

SEQ ID NO: 997017 - DNA, 33 bp, Homo sapien
gctgctctttctagtacagcttttatcataata

SEQ ID NO: 997018 - DNA, 33 bp, Homo sapien
gctgctctttctagtatagcttttatcataata

SEQ ID NO: 997019 - DNA, 33 bp, Homo sapien
tgaaacccaacccagaaatacggccatccggat

SEQ ID NO: 997020 - DNA, 33 bp, Homo sapien
tgaaacccaacccagagatacggccatccggat

SEQ ID NO: 997021 - DNA, 33 bp, Homo sapien
aacaagaacaaatatccaggcagtgataaaaac

SEQ ID NO: 997022 - DNA, 33 bp, Homo sapien
aacaagaacaaatatctaggcagtgataaaaac

SEQ ID NO: 997023 - DNA, 33 bp, Homo sapien
ggtttgaaacggtctacggtgcaatgttgtgtt

SEQ ID NO: 997024 - DNA, 33 bp, Homo sapien
ggtttgaaacggtctatggtgcaatgttgtgtt

SEQ ID NO: 997025 - DNA, 33 bp, Homo sapien
gacacctgtttgagtacgtagcctatgttaagc

SEQ ID NO: 997026 - DNA, 33 bp, Homo sapien
gacacctgtttgagtatgtagcctatgttaagc

SEQ ID NO: 997027 - DNA, 33 bp, Homo sapien
agaagatttcatataactggttagtggcagact

SEQ ID NO: 997028 - DNA, 33 bp, Homo sapien
agaagatttcatataagtggttagtggcagact

SEQ ID NO: 997029 - DNA, 33 bp, Homo sapien
tatgtctcaccaagtgaatgagagcctctcaac

SEQ ID NO: 997030 - DNA, 33 bp, Homo sapien
tatgtctcaccaagtgtatgagagcctctcaac

SEQ ID NO: 997031 - DNA, 33 bp, Homo sapien
ctctgctaagaataaaagatcagaactgggatg

SEQ ID NO: 997032 - DNA, 33 bp, Homo sapien
ctctgctaagaataaaggatcagaactgggatg

SEQ ID NO: 997033 - DNA, 33 bp, Homo sapien
agagaccagtaagtgactaagagaacaggatac

SEQ ID NO: 997034 - DNA, 33 bp, Homo sapien
agagaccagtaagtgattaagagaacaggatac

SEQ ID NO: 997035 - DNA, 33 bp, Homo sapien
aggtgaaatcctagatcaactgaatgtcagggc

SEQ ID NO: 997036 - DNA, 33 bp, Homo sapien
aggtgaaatcctagattaactgaatgtcagggc

SEQ ID NO: 997037 - DNA, 33 bp, Homo sapien
ccattaagttctcaacactacagctgaggagtt

SEQ ID NO: 997038 - DNA, 33 bp, Homo sapien
ccattaagttctcaactctacagctgaggagtt

SEQ ID NO: 997039 - DNA, 33 bp, Homo sapien
gttctttagcaacttgaagaaaatctcagagtt

SEQ ID NO: 997040 - DNA, 33 bp, Homo sapien
gttctttagcaacttgcagaaaatctcagagtt

SEQ ID NO: 997041 - DNA, 33 bp, Homo sapien
ctgacgattagaggtaagtaatagttttgtttt

SEQ ID NO: 997042 - DNA, 33 bp, Homo sapien
ctgacgattagaggtatgtaatagttttgtttt

SEQ ID NO: 997043 - DNA, 33 bp, Homo sapien
tgtactaattcattcaatcctctcactaaatct

SEQ ID NO: 997044 - DNA, 33 bp, Homo sapien
tgtactaattcattcagtcctctcactaaatct

SEQ ID NO: 997045 - DNA, 33 bp, Homo sapien
tgttctttgtcatgaccaacaagacagtgacag

SEQ ID NO: 997046 - DNA, 33 bp, Homo sapien
tgttctttgtcatgacgaacaagacagtgacag

SEQ ID NO: 997047 - DNA, 33 bp, Homo sapien
tttaagctgcagggtaaccaatgtatcactgca

SEQ ID NO: 997048 - DNA, 33 bp, Homo sapien
tttaagctgcagggtagccaatgtatcactgca

SEQ ID NO: 997049 - DNA, 33 bp, Homo sapien
ggttcccccagttcaaatagttgaaagaattca

SEQ ID NO: 997050 - DNA, 33 bp, Homo sapien
ggttcccccagttcaagtagttgaaagaattca

SEQ ID NO: 997051 - DNA, 33 bp, Homo sapien
ttggacccaggtatcaaaaggtttctactctga

SEQ ID NO: 997052 - DNA, 33 bp, Homo sapien
ttggacccaggtatcacaaggtttctactctga

SEQ ID NO: 997053 - DNA, 33 bp, Homo sapien
aattcacaaagcttaacgttctgcaatggaaga

SEQ ID NO: 997054 - DNA, 33 bp, Homo sapien
aattcacaaagcttaatgttctgcaatggaaga

SEQ ID NO: 997055 - DNA, 33 bp, Homo sapien
cgtgtctttctaatgccatgaagcttgcagtgg

SEQ ID NO: 997056 - DNA, 33 bp, Homo sapien
cgtgtctttctaatgcgatgaagcttgcagtgg

SEQ ID NO: 997057 - DNA, 33 bp, Homo sapien
gtgaagatgcccaagccatttacccctacaatt

SEQ ID NO: 997058 - DNA, 33 bp, Homo sapien
gtgaagatgcccaagctatttacccctacaatt

SEQ ID NO: 997059 - DNA, 33 bp, Homo sapien
cagtgggtgttttttcaactcaaagaaggaatc

SEQ ID NO: 997060 - DNA, 33 bp, Homo sapien
cagtgggtgttttttccactcaaagaaggaatc

SEQ ID NO: 997061 - DNA, 33 bp, Homo sapien
taagaagctccatttaaaggttaagggtggtga

SEQ ID NO: 997062 - DNA, 33 bp, Homo sapien
taagaagctccatttataggttaagggtggtga

SEQ ID NO: 997063 - DNA, 33 bp, Homo sapien
aaaggatgtctgtgccaccagggagagatacac

SEQ ID NO: 997064 - DNA, 33 bp, Homo sapien
aaaggatgtctgtgcctccagggagagatacac

SEQ ID NO: 997065 - DNA, 33 bp, Homo sapien
ggcagagtggcttggcaagtgtatctctccctg

SEQ ID NO: 997066 - DNA, 33 bp, Homo sapien
ggcagagtggcttggcgagtgtatctctccctg

SEQ ID NO: 997067 - DNA, 33 bp, Homo sapien
aggctgggaggagagagaatagtggctttgagt

SEQ ID NO: 997068 - DNA, 33 bp, Homo sapien
aggctgggaggagagataatagtggctttgagt

SEQ ID NO: 997069 - DNA, 33 bp, Homo sapien
gctttatgaacctacccatcagcaggagagatt

SEQ ID NO: 997070 - DNA, 33 bp, Homo sapien
gctttatgaacctacctatcagcaggagagatt

SEQ ID NO: 997071 - DNA, 33 bp, Homo sapien
atgtcaaaactctgaagggctgaagcaatttat

SEQ ID NO: 997072 - DNA, 33 bp, Homo sapien
atgtcaaaactctgaatggctgaagcaatttat

SEQ ID NO: 997073 - DNA, 33 bp, Homo sapien
ttgaagatgcaaaaaacgaccccattcaaaaat

SEQ ID NO: 997074 - DNA, 33 bp, Homo sapien
ttgaagatgcaaaaaatgaccccattcaaaaat

SEQ ID NO: 997075 - DNA, 33 bp, Homo sapien
ttttaagcctgagatgaataattttctaccacc

SEQ ID NO: 997076 - DNA, 33 bp, Homo sapien
ttttaagcctgagatgtataattttctaccacc

SEQ ID NO: 997077 - DNA, 33 bp, Homo sapien
gcagttacacgttagaaattagcatcattcttt

SEQ ID NO: 997078 - DNA, 33 bp, Homo sapien
gcagttacacgttagagattagcatcattcttt

SEQ ID NO: 997079 - DNA, 33 bp, Homo sapien
ttagccagttttaaacactactttgtccacagt

SEQ ID NO: 997080 - DNA, 33 bp, Homo sapien
ttagccagttttaaacgctactttgtccacagt

SEQ ID NO: 997081 - DNA, 33 bp, Homo sapien
atttcaaaactgggccaaagcaaattaacatcc

SEQ ID NO: 997082 - DNA, 33 bp, Homo sapien
atttcaaaactgggccgaagcaaattaacatcc

SEQ ID NO: 997083 - DNA, 33 bp, Homo sapien
tccacatggttcccaaatggcatggtgaaagct

SEQ ID NO: 997084 - DNA, 33 bp, Homo sapien
tccacatggttcccaagtggcatggtgaaagct

SEQ ID NO: 997085 - DNA, 33 bp, Homo sapien
tcctgacaaggaaaaaatggcttagaatcaggg

SEQ ID NO: 997086 - DNA, 33 bp, Homo sapien
tcctgacaaggaaaaactggcttagaatcaggg

SEQ ID NO: 997087 - DNA, 33 bp, Homo sapien
cagggttggtgtacccactacaaggctagacag

SEQ ID NO: 997088 - DNA, 33 bp, Homo sapien
cagggttggtgtacccgctacaaggctagacag

SEQ ID NO: 997089 - DNA, 33 bp, Homo sapien
gctggagattagaagcaaactctttcctcacga

SEQ ID NO: 997090 - DNA, 33 bp, Homo sapien
gctggagattagaagccaactctttcctcacga

SEQ ID NO: 997091 - DNA, 33 bp, Homo sapien
gagacattaacacttaagggaagttttgtttgg

SEQ ID NO: 997092 - DNA, 33 bp, Homo sapien
gagacattaacacttacgggaagttttgtttgg

SEQ ID NO: 997093 - DNA, 33 bp, Homo sapien
aaaaaaaaagtaggaaaagctatgatgttaatg

SEQ ID NO: 997094 - DNA, 33 bp, Homo sapien
aaaaaaaaagtaggaagagctatgatgttaatg

SEQ ID NO: 997095 - DNA, 33 bp, Homo sapien
atgcaaatggggactaagtttcagaactcagat

SEQ ID NO: 997096 - DNA, 33 bp, Homo sapien
atgcaaatggggactacgtttcagaactcagat

SEQ ID NO: 997097 - DNA, 33 bp, Homo sapien
tccctatgtgttatcaaataaaataagctgagg

SEQ ID NO: 997098 - DNA, 33 bp, Homo sapien
tccctatgtgttatcagataaaataagctgagg

SEQ ID NO: 997099 - DNA, 33 bp, Homo sapien
tcgctggttacctgatcataagagctatatata

SEQ ID NO: 997100 - DNA, 33 bp, Homo sapien
tcgctggttacctgattataagagctatatata

SEQ ID NO: 997101 - DNA, 33 bp, Homo sapien
tgctggtgaaagtaagactactgtgttgccagt

SEQ ID NO: 997102 - DNA, 33 bp, Homo sapien
tgctggtgaaagtaagtctactgtgttgccagt

SEQ ID NO: 997103 - DNA, 33 bp, Homo sapien
gcgaggaagtcactagcagataggaatttttca

SEQ ID NO: 997104 - DNA, 33 bp, Homo sapien
gcgaggaagtcactaggagataggaatttttca

SEQ ID NO: 997105 - DNA, 33 bp, Homo sapien
tatcagtaactactgcgaaattctgaggtattt

SEQ ID NO: 997106 - DNA, 33 bp, Homo sapien
tatcagtaactactgctaaattctgaggtattt

SEQ ID NO: 997107 - DNA, 33 bp, Homo sapien
gctgctcaacaactaagaagtgaagagccaaat

SEQ ID NO: 997108 - DNA, 33 bp, Homo sapien
gctgctcaacaactaataagtgaagagccaaat

SEQ ID NO: 997109 - DNA, 33 bp, Homo sapien
caagggaaaaactggcaaatagtgttgagttta

SEQ ID NO: 997110 - DNA, 33 bp, Homo sapien
caagggaaaaactggcgaatagtgttgagttta

SEQ ID NO: 997111 - DNA, 33 bp, Homo sapien
tagaaatatctcaaaaatggagagcaaaggaga

SEQ ID NO: 997112 - DNA, 33 bp, Homo sapien
tagaaatatctcaaaattggagagcaaaggaga

SEQ ID NO: 997113 - DNA, 33 bp, Homo sapien
ggttaccagaagctcaaaagggtgaagagaagt

SEQ ID NO: 997114 - DNA, 33 bp, Homo sapien
ggttaccagaagctcagaagggtgaagagaagt

SEQ ID NO: 997115 - DNA, 33 bp, Homo sapien
ttgaagatggctaaaaactcttgtagtgaaacc

SEQ ID NO: 997116 - DNA, 33 bp, Homo sapien
ttgaagatggctaaaacctcttgtagtgaaacc

SEQ ID NO: 997117 - DNA, 33 bp, Homo sapien
ctgtttgatttaattgcatattgccaacactca

SEQ ID NO: 997118 - DNA, 33 bp, Homo sapien
ctgtttgatttaattgtatattgccaacactca

SEQ ID NO: 997119 - DNA, 33 bp, Homo sapien
ttatcggagtttacacaaacatctcttttctga

SEQ ID NO: 997120 - DNA, 33 bp, Homo sapien
ttatcggagtttacacgaacatctcttttctga

SEQ ID NO: 997121 - DNA, 33 bp, Homo sapien
ataggtgaatggaaaactggagattcaggatct

SEQ ID NO: 997122 - DNA, 33 bp, Homo sapien
ataggtgaatggaaaattggagattcaggatct

SEQ ID NO: 997123 - DNA, 33 bp, Homo sapien
ttacctcatgccaaacaccaggctaggtactga

SEQ ID NO: 997124 - DNA, 33 bp, Homo sapien
ttacctcatgccaaacgccaggctaggtactga

SEQ ID NO: 997125 - DNA, 33 bp, Homo sapien
cctcgaatcaatgaccacatctcctcacatcct

SEQ ID NO: 997126 - DNA, 33 bp, Homo sapien
cctcgaatcaatgaccgcatctcctcacatcct

SEQ ID NO: 997127 - DNA, 33 bp, Homo sapien
cattcactgtctactacgaacctactttgtgct

SEQ ID NO: 997128 - DNA, 33 bp, Homo sapien
cattcactgtctactatgaacctactttgtgct

SEQ ID NO: 997129 - DNA, 33 bp, Homo sapien
cactttagcaaagcacaaatctcttagtgttgt

SEQ ID NO: 997130 - DNA, 33 bp, Homo sapien
cactttagcaaagcaccaatctcttagtgttgt

SEQ ID NO: 997131 - DNA, 33 bp, Homo sapien
atagatgttcaataaaacatgtaacaaataagt

SEQ ID NO: 997132 - DNA, 33 bp, Homo sapien
atagatgttcaataaaccatgtaacaaataagt

SEQ ID NO: 997133 - DNA, 33 bp, Homo sapien
tttctaatgctcagaaatatatgctgtgaaacc

SEQ ID NO: 997134 - DNA, 33 bp, Homo sapien
tttctaatgctcagaagtatatgctgtgaaacc

SEQ ID NO: 997135 - DNA, 33 bp, Homo sapien
aatggcacataaccaacgtgtttctgtaaagaa

SEQ ID NO: 997136 - DNA, 33 bp, Homo sapien
aatggcacataaccaaggtgtttctgtaaagaa

SEQ ID NO: 997137 - DNA, 33 bp, Homo sapien
actgtaacaaatggcagtatataaacaggctaa

SEQ ID NO: 997138 - DNA, 33 bp, Homo sapien
actgtaacaaatggcattatataaacaggctaa

SEQ ID NO: 997139 - DNA, 33 bp, Homo sapien
ccactggggatttttaactgagctcccgagtca

SEQ ID NO: 997140 - DNA, 33 bp, Homo sapien
ccactggggatttttatctgagctcccgagtca

SEQ ID NO: 997141 - DNA, 33 bp, Homo sapien
ggaccagggttctcaacacctagaccatgactc

SEQ ID NO: 997142 - DNA, 33 bp, Homo sapien
ggaccagggttctcaatacctagaccatgactc

SEQ ID NO: 997143 - DNA, 33 bp, Homo sapien
gttgtatgggctaaaggaagcctaaagaatcat

SEQ ID NO: 997144 - DNA, 33 bp, Homo sapien
gttgtatgggctaaagtaagcctaaagaatcat

SEQ ID NO: 997145 - DNA, 33 bp, Homo sapien
gtgtctgtcaatgatacaaaagttgtcataaac

SEQ ID NO: 997146 - DNA, 33 bp, Homo sapien
gtgtctgtcaatgatataaaagttgtcataaac

SEQ ID NO: 997147 - DNA, 33 bp, Homo sapien
ttgcttgttgtggttacgtaatccttacactca

SEQ ID NO: 997148 - DNA, 33 bp, Homo sapien
ttgcttgttgtggttatgtaatccttacactca

SEQ ID NO: 997149 - DNA, 33 bp, Homo sapien
tcacctgccatccaataagctttgaggcgcgag

SEQ ID NO: 997150 - DNA, 33 bp, Homo sapien
tcacctgccatccaatgagctttgaggcgcgag

SEQ ID NO: 997151 - DNA, 33 bp, Homo sapien
tgagcagcacttgctcactttgtgtttgtgatt

SEQ ID NO: 997152 - DNA, 33 bp, Homo sapien
tgagcagcacttgctcgctttgtgtttgtgatt

SEQ ID NO: 997153 - DNA, 33 bp, Homo sapien
ctatcacacattgataccaccatctcctcacag

SEQ ID NO: 997154 - DNA, 33 bp, Homo sapien
ctatcacacattgatagcaccatctcctcacag

SEQ ID NO: 997155 - DNA, 33 bp, Homo sapien
cctacggccagcattaaatttatgcctcactat

SEQ ID NO: 997156 - DNA, 33 bp, Homo sapien
cctacggccagcattacatttatgcctcactat

SEQ ID NO: 997157 - DNA, 33 bp, Homo sapien
catgtcttcgaacaaacgggtgcaagacttccc

SEQ ID NO: 997158 - DNA, 33 bp, Homo sapien
catgtcttcgaacaaatgggtgcaagacttccc

SEQ ID NO: 997159 - DNA, 33 bp, Homo sapien
tcttaactgtctgtgacgaatctgataaaattt

SEQ ID NO: 997160 - DNA, 33 bp, Homo sapien
tcttaactgtctgtgatgaatctgataaaattt

SEQ ID NO: 997161 - DNA, 33 bp, Homo sapien
gaatagtgttagttaacgtgcattcagaatgcc

SEQ ID NO: 997162 - DNA, 33 bp, Homo sapien
gaatagtgttagttaatgtgcattcagaatgcc

SEQ ID NO: 997163 - DNA, 33 bp, Homo sapien
cacacacctcacagaaaaaaacgtctcagtgtc

SEQ ID NO: 997164 - DNA, 33 bp, Homo sapien
cacacacctcacagaagaaaacgtctcagtgtc

SEQ ID NO: 997165 - DNA, 33 bp, Homo sapien
ttccctgcatatgccaagttgattaattttatt

SEQ ID NO: 997166 - DNA, 33 bp, Homo sapien
ttccctgcatatgccatgttgattaattttatt

SEQ ID NO: 997167 - DNA, 33 bp, Homo sapien
gcagcaggaaggtcccaagcactttttgagtct

SEQ ID NO: 997168 - DNA, 33 bp, Homo sapien
gcagcaggaaggtcccgagcactttttgagtct

SEQ ID NO: 997169 - DNA, 33 bp, Homo sapien
cagggagtccgtgagagagtgggtttctttaca

SEQ ID NO: 997170 - DNA, 33 bp, Homo sapien
cagggagtccgtgagatagtgggtttctttaca

SEQ ID NO: 997171 - DNA, 33 bp, Homo sapien
ggcacctgtgcgttaaagtggttctgcacacct

SEQ ID NO: 997172 - DNA, 33 bp, Homo sapien
ggcacctgtgcgttaacgtggttctgcacacct

SEQ ID NO: 997173 - DNA, 33 bp, Homo sapien
ttctatcaatgaaaaaggaaatccaacatcttg

SEQ ID NO: 997174 - DNA, 33 bp, Homo sapien
ttctatcaatgaaaaatgaaatccaacatcttg

SEQ ID NO: 997175 - DNA, 33 bp, Homo sapien
agtcccttctatgcagaaattcacggctcagtg

SEQ ID NO: 997176 - DNA, 33 bp, Homo sapien
agtcccttctatgcaggaattcacggctcagtg

SEQ ID NO: 997177 - DNA, 33 bp, Homo sapien
catcacagcatcaaaacgaggacccatggagca

SEQ ID NO: 997178 - DNA, 33 bp, Homo sapien
catcacagcatcaaaaggaggacccatggagca

SEQ ID NO: 997179 - DNA, 33 bp, Homo sapien
ataccctcctagcaggaactactaatgataagt

SEQ ID NO: 997180 - DNA, 33 bp, Homo sapien
ataccctcctagcagggactactaatgataagt

SEQ ID NO: 997181 - DNA, 33 bp, Homo sapien
ttataatacagcaacggaggttttctataacac

SEQ ID NO: 997182 - DNA, 33 bp, Homo sapien
ttataatacagcaacgtaggttttctataacac

SEQ ID NO: 997183 - DNA, 33 bp, Homo sapien
gagtgatgtggatgaaactttactccatacaat

SEQ ID NO: 997184 - DNA, 33 bp, Homo sapien
gagtgatgtggatgaatctttactccatacaat

SEQ ID NO: 997185 - DNA, 33 bp, Homo sapien
agatgaagtctctctcacagagaataggtggca

SEQ ID NO: 997186 - DNA, 33 bp, Homo sapien
agatgaagtctctctcgcagagaataggtggca

SEQ ID NO: 997187 - DNA, 33 bp, Homo sapien
gctacaggtaattggaaaactggcgctggggtc

SEQ ID NO: 997188 - DNA, 33 bp, Homo sapien
gctacaggtaattggagaactggcgctggggtc

SEQ ID NO: 997189 - DNA, 33 bp, Homo sapien
caggccttttcccacaagattcctttctctgct

SEQ ID NO: 997190 - DNA, 33 bp, Homo sapien
caggccttttcccacacgattcctttctctgct

SEQ ID NO: 997191 - DNA, 33 bp, Homo sapien
ttaagacattcagcaacgtttgaaatcagaaga

SEQ ID NO: 997192 - DNA, 33 bp, Homo sapien
ttaagacattcagcaaggtttgaaatcagaaga

SEQ ID NO: 997193 - DNA, 33 bp, Homo sapien
gcttctgtgcttgtcacgccctcctcttattcc

SEQ ID NO: 997194 - DNA, 33 bp, Homo sapien
gcttctgtgcttgtcatgccctcctcttattcc

SEQ ID NO: 997195 - DNA, 33 bp, Homo sapien
caagagtaagaagaaacggccatcagataaata

SEQ ID NO: 997196 - DNA, 33 bp, Homo sapien
caagagtaagaagaaatggccatcagataaata

SEQ ID NO: 997197 - DNA, 33 bp, Homo sapien
gaaattaggtcaacacaaaaccacaggaggatg

SEQ ID NO: 997198 - DNA, 33 bp, Homo sapien
gaaattaggtcaacacgaaaccacaggaggatg

SEQ ID NO: 997199 - DNA, 33 bp, Homo sapien
ctaactatgtattttaaacaacaggattatttt

SEQ ID NO: 997200 - DNA, 33 bp, Homo sapien
ctaactatgtattttagacaacaggattatttt

SEQ ID NO: 997201 - DNA, 33 bp, Homo sapien
aggcacctagataaggaaaaacctactgcggaa

SEQ ID NO: 997202 - DNA, 33 bp, Homo sapien
aggcacctagataagggaaaacctactgcggaa

SEQ ID NO: 997203 - DNA, 33 bp, Homo sapien
tttaacaatgttagaaattacaggagatctagg

SEQ ID NO: 997204 - DNA, 33 bp, Homo sapien
tttaacaatgttagaagttacaggagatctagg

SEQ ID NO: 997205 - DNA, 33 bp, Homo sapien
caaagcagagagcagaacataagcaatctgggt

SEQ ID NO: 997206 - DNA, 33 bp, Homo sapien
caaagcagagagcagagcataagcaatctgggt

SEQ ID NO: 997207 - DNA, 33 bp, Homo sapien
tctgaaggatgagtaacgccaaagagtaggggt

SEQ ID NO: 997208 - DNA, 33 bp, Homo sapien
tctgaaggatgagtaatgccaaagagtaggggt

SEQ ID NO: 997209 - DNA, 33 bp, Homo sapien
gacatttgtacactgacgaagtagctgaataca

SEQ ID NO: 997210 - DNA, 33 bp, Homo sapien
gacatttgtacactgatgaagtagctgaataca

SEQ ID NO: 997211 - DNA, 33 bp, Homo sapien
cagagctagcaaagataacatcacaggagagcc

SEQ ID NO: 997212 - DNA, 33 bp, Homo sapien
cagagctagcaaagatgacatcacaggagagcc

SEQ ID NO: 997213 - DNA, 33 bp, Homo sapien
ttatgcttttccacagaagaaaagaggtccagg

SEQ ID NO: 997214 - DNA, 33 bp, Homo sapien
ttatgcttttccacaggagaaaagaggtccagg

SEQ ID NO: 997215 - DNA, 33 bp, Homo sapien
attgatcattgccatcacaatatgtccattaat

SEQ ID NO: 997216 - DNA, 33 bp, Homo sapien
attgatcattgccatcgcaatatgtccattaat

SEQ ID NO: 997217 - DNA, 33 bp, Homo sapien
aatggatgttttgtcacattgtggatactatat

SEQ ID NO: 997218 - DNA, 33 bp, Homo sapien
aatggatgttttgtcatattgtggatactatat

SEQ ID NO: 997219 - DNA, 33 bp, Homo sapien
acacatatagaccaaactgtaattctgagcaat

SEQ ID NO: 997220 - DNA, 33 bp, Homo sapien
acacatatagaccaaattgtaattctgagcaat

SEQ ID NO: 997221 - DNA, 33 bp, Homo sapien
gaaatcaggaaagatcccttttggaaacaccat

SEQ ID NO: 997222 - DNA, 33 bp, Homo sapien
gaaatcaggaaagatctcttttggaaacaccat

SEQ ID NO: 997223 - DNA, 33 bp, Homo sapien
caaagcacaatgcttaaatagtctgactagttt

SEQ ID NO: 997224 - DNA, 33 bp, Homo sapien
caaagcacaatgcttagatagtctgactagttt

SEQ ID NO: 997225 - DNA, 33 bp, Homo sapien
ttggtgattaaaagaacattggttgttgcctaa

SEQ ID NO: 997226 - DNA, 33 bp, Homo sapien
ttggtgattaaaagaagattggttgttgcctaa

SEQ ID NO: 997227 - DNA, 33 bp, Homo sapien
agctattgtgaggcatcactacatcagataact

SEQ ID NO: 997228 - DNA, 33 bp, Homo sapien
agctattgtgaggcatgactacatcagataact

SEQ ID NO: 997229 - DNA, 33 bp, Homo sapien
agctgcctgactaaaacgtatgtggtttgaaat

SEQ ID NO: 997230 - DNA, 33 bp, Homo sapien
agctgcctgactaaaatgtatgtggtttgaaat

SEQ ID NO: 997231 - DNA, 33 bp, Homo sapien
ctgaaacccagatacacgtgtacgactcttagt

SEQ ID NO: 997232 - DNA, 33 bp, Homo sapien
ctgaaacccagatacatgtgtacgactcttagt

SEQ ID NO: 997233 - DNA, 33 bp, Homo sapien
cttcatagattgaagaggacaacgattaagact

SEQ ID NO: 997234 - DNA, 33 bp, Homo sapien
cttcatagattgaagatgacaacgattaagact

SEQ ID NO: 997235 - DNA, 33 bp, Homo sapien
gcagttatgaccaatcaaaggaaatccagtggg

SEQ ID NO: 997236 - DNA, 33 bp, Homo sapien
gcagttatgaccaatcgaaggaaatccagtggg

SEQ ID NO: 997237 - DNA, 33 bp, Homo sapien
caagcatgaggtacaacgccatacactggactc

SEQ ID NO: 997238 - DNA, 33 bp, Homo sapien
caagcatgaggtacaatgccatacactggactc

SEQ ID NO: 997239 - DNA, 33 bp, Homo sapien
tgctgtatcccggcccagcaaatatttatagaa

SEQ ID NO: 997240 - DNA, 33 bp, Homo sapien
tgctgtatcccggcccggcaaatatttatagaa

SEQ ID NO: 997241 - DNA, 33 bp, Homo sapien
ttagattcaactaccaaatggcctgttctcctg

SEQ ID NO: 997242 - DNA, 33 bp, Homo sapien
ttagattcaactaccagatggcctgttctcctg

SEQ ID NO: 997243 - DNA, 33 bp, Homo sapien
tccccgtgaccaagcaatcattcctccaccttc

SEQ ID NO: 997244 - DNA, 33 bp, Homo sapien
tccccgtgaccaagcattcattcctccaccttc

SEQ ID NO: 997245 - DNA, 33 bp, Homo sapien
tcactgtgtctgcaccgctgagccccctcctct

SEQ ID NO: 997246 - DNA, 33 bp, Homo sapien
tcactgtgtctgcacctctgagccccctcctct

SEQ ID NO: 997247 - DNA, 33 bp, Homo sapien
taaggcaatcccaggcaacaagaggaaggctaa

SEQ ID NO: 997248 - DNA, 33 bp, Homo sapien
taaggcaatcccaggcgacaagaggaaggctaa

SEQ ID NO: 997249 - DNA, 33 bp, Homo sapien
ggaacatgaaatctaaagacactttcaccttaa

SEQ ID NO: 997250 - DNA, 33 bp, Homo sapien
ggaacatgaaatctaaggacactttcaccttaa

SEQ ID NO: 997251 - DNA, 33 bp, Homo sapien
catgggtttgtgcagaccacagattggccatct

SEQ ID NO: 997252 - DNA, 33 bp, Homo sapien
catgggtttgtgcagatcacagattggccatct

SEQ ID NO: 997253 - DNA, 33 bp, Homo sapien
catgaatactaaagccaaatgagaggtatgggg

SEQ ID NO: 997254 - DNA, 33 bp, Homo sapien
catgaatactaaagccgaatgagaggtatgggg

SEQ ID NO: 997255 - DNA, 33 bp, Homo sapien
tgctcatatgcagaaactaaggcactgggcgct

SEQ ID NO: 997256 - DNA, 33 bp, Homo sapien
tgctcatatgcagaaattaaggcactgggcgct

SEQ ID NO: 997257 - DNA, 33 bp, Homo sapien
agacagctctgatggacaggacttaaaattttg

SEQ ID NO: 997258 - DNA, 33 bp, Homo sapien
agacagctctgatggataggacttaaaattttg

SEQ ID NO: 997259 - DNA, 33 bp, Homo sapien
cagggccatttatcaacagagcgaattccctcc

SEQ ID NO: 997260 - DNA, 33 bp, Homo sapien
cagggccatttatcaatagagcgaattccctcc

SEQ ID NO: 997261 - DNA, 33 bp, Homo sapien
atgcagatgaactcccccctccaaacaacaatg

SEQ ID NO: 997262 - DNA, 33 bp, Homo sapien
atgcagatgaactcccgcctccaaacaacaatg

SEQ ID NO: 997263 - DNA, 33 bp, Homo sapien
agagagaaaatgaagaagattccaggccactta

SEQ ID NO: 997264 - DNA, 33 bp, Homo sapien
agagagaaaatgaagaggattccaggccactta

SEQ ID NO: 997265 - DNA, 33 bp, Homo sapien
tccaagtgaattatatcaagtgtagctatgacc

SEQ ID NO: 997266 - DNA, 33 bp, Homo sapien
tccaagtgaattatatgaagtgtagctatgacc

SEQ ID NO: 997267 - DNA, 33 bp, Homo sapien
tagaattaatcctgaaagccataggaaatcagg

SEQ ID NO: 997268 - DNA, 33 bp, Homo sapien
tagaattaatcctgaaggccataggaaatcagg

SEQ ID NO: 997269 - DNA, 33 bp, Homo sapien
tctgggatatatgaggaaacaggaaatgcagaa

SEQ ID NO: 997270 - DNA, 33 bp, Homo sapien
tctgggatatatgaggcaacaggaaatgcagaa

SEQ ID NO: 997271 - DNA, 33 bp, Homo sapien
ccgctctgactcagggacatctgacatgaccta

SEQ ID NO: 997272 - DNA, 33 bp, Homo sapien
ccgctctgactcaggggcatctgacatgaccta

SEQ ID NO: 997273 - DNA, 33 bp, Homo sapien
gcaggcatccctgaaacgtgtcccaccaaaagc

SEQ ID NO: 997274 - DNA, 33 bp, Homo sapien
gcaggcatccctgaaatgtgtcccaccaaaagc

SEQ ID NO: 997275 - DNA, 33 bp, Homo sapien
tatccccatttatacccgaggaccttgagcaca

SEQ ID NO: 997276 - DNA, 33 bp, Homo sapien
tatccccatttatacctgaggaccttgagcaca

SEQ ID NO: 997277 - DNA, 33 bp, Homo sapien
tgagttctgaaaagcccgattaaatactggcag

SEQ ID NO: 997278 - DNA, 33 bp, Homo sapien
tgagttctgaaaagcctgattaaatactggcag

SEQ ID NO: 997279 - DNA, 33 bp, Homo sapien
agcaatttttgctccaaccattttgctgttttt

SEQ ID NO: 997280 - DNA, 33 bp, Homo sapien
agcaatttttgctccagccattttgctgttttt

SEQ ID NO: 997281 - DNA, 33 bp, Homo sapien
ccctttcacccaatgcagatcttcgaggcttgt

SEQ ID NO: 997282 - DNA, 33 bp, Homo sapien
ccctttcacccaatgcggatcttcgaggcttgt

SEQ ID NO: 997283 - DNA, 33 bp, Homo sapien
ttttataaagcaaaccaatgtataaaagaggaa

SEQ ID NO: 997284 - DNA, 33 bp, Homo sapien
ttttataaagcaaaccgatgtataaaagaggaa

SEQ ID NO: 997285 - DNA, 33 bp, Homo sapien
cataccattcacctgccatagtgttccctcaga

SEQ ID NO: 997286 - DNA, 33 bp, Homo sapien
cataccattcacctgctatagtgttccctcaga

SEQ ID NO: 997287 - DNA, 33 bp, Homo sapien
ccttatatgtgaagtaacaaaattttgggtaga

SEQ ID NO: 997288 - DNA, 33 bp, Homo sapien
ccttatatgtgaagtagcaaaattttgggtaga

SEQ ID NO: 997289 - DNA, 33 bp, Homo sapien
tgtctatatgatgagaacagcagccagagagcc

SEQ ID NO: 997290 - DNA, 33 bp, Homo sapien
tgtctatatgatgagagcagcagccagagagcc

SEQ ID NO: 997291 - DNA, 33 bp, Homo sapien
cctctcttccaagtaaaccatcctgatacctcc

SEQ ID NO: 997292 - DNA, 33 bp, Homo sapien
cctctcttccaagtaacccatcctgatacctcc

SEQ ID NO: 997293 - DNA, 33 bp, Homo sapien
atcctaagaattctggacagagcaatgagaaag

SEQ ID NO: 997294 - DNA, 33 bp, Homo sapien
atcctaagaattctgggcagagcaatgagaaag

SEQ ID NO: 997295 - DNA, 33 bp, Homo sapien
gagccaacaagagcaacagctcaaggtctccta

SEQ ID NO: 997296 - DNA, 33 bp, Homo sapien
gagccaacaagagcaagagctcaaggtctccta

SEQ ID NO: 997297 - DNA, 33 bp, Homo sapien
catctgaaaataaaccacatattgacagagact

SEQ ID NO: 997298 - DNA, 33 bp, Homo sapien
catctgaaaataaaccgcatattgacagagact

SEQ ID NO: 997299 - DNA, 33 bp, Homo sapien
gactgagttcaggtgcaagtttctgagaatgta

SEQ ID NO: 997300 - DNA, 33 bp, Homo sapien
gactgagttcaggtgccagtttctgagaatgta

SEQ ID NO: 997301 - DNA, 33 bp, Homo sapien
tgaagagagtaaccacagcaggtcatctcaacc

SEQ ID NO: 997302 - DNA, 33 bp, Homo sapien
tgaagagagtaaccaccgcaggtcatctcaacc

SEQ ID NO: 997303 - DNA, 33 bp, Homo sapien
gccttccttgtggacactggagagaacagccta

SEQ ID NO: 997304 - DNA, 33 bp, Homo sapien
gccttccttgtggacagtggagagaacagccta

SEQ ID NO: 997305 - DNA, 33 bp, Homo sapien
cctggcatctggtaagcagtagaggttcacaaa

SEQ ID NO: 997306 - DNA, 33 bp, Homo sapien
cctggcatctggtaagtagtagaggttcacaaa

SEQ ID NO: 997307 - DNA, 33 bp, Homo sapien
catgcttaggaggaggacaggacatgattcaga

SEQ ID NO: 997308 - DNA, 33 bp, Homo sapien
catgcttaggaggagggcaggacatgattcaga

SEQ ID NO: 997309 - DNA, 33 bp, Homo sapien
cataacacgtaaagtcaaagccacctagaataa

SEQ ID NO: 997310 - DNA, 33 bp, Homo sapien
cataacacgtaaagtcgaagccacctagaataa

SEQ ID NO: 997311 - DNA, 33 bp, Homo sapien
tttttcatcatcattaaccagaatggtgtattc

SEQ ID NO: 997312 - DNA, 33 bp, Homo sapien
tttttcatcatcattatccagaatggtgtattc

SEQ ID NO: 997313 - DNA, 33 bp, Homo sapien
tttttctttaaaacgtcaatcttcagagtatat

SEQ ID NO: 997314 - DNA, 33 bp, Homo sapien
tttttctttaaaacgtgaatcttcagagtatat

SEQ ID NO: 997315 - DNA, 33 bp, Homo sapien
aaaggcagcacattctcacagggtaatctgggt

SEQ ID NO: 997316 - DNA, 33 bp, Homo sapien
aaaggcagcacattctgacagggtaatctgggt

SEQ ID NO: 997317 - DNA, 33 bp, Homo sapien
tgtgtgtgagcggcaactgatgttaaggaaggc

SEQ ID NO: 997318 - DNA, 33 bp, Homo sapien
tgtgtgtgagcggcaattgatgttaaggaaggc

SEQ ID NO: 997319 - DNA, 33 bp, Homo sapien
aacagatgcaaggcaaatgattcagtcgcttac

SEQ ID NO: 997320 - DNA, 33 bp, Homo sapien
aacagatgcaaggcaattgattcagtcgcttac

SEQ ID NO: 997321 - DNA, 33 bp, Homo sapien
ttattttgtaggttatcacctggactgattgtc

SEQ ID NO: 997322 - DNA, 33 bp, Homo sapien
ttattttgtaggttattacctggactgattgtc

SEQ ID NO: 997323 - DNA, 33 bp, Homo sapien
acagccacgtgcttaaaagaaacccatctgttt

SEQ ID NO: 997324 - DNA, 33 bp, Homo sapien
acagccacgtgcttaatagaaacccatctgttt

SEQ ID NO: 997325 - DNA, 33 bp, Homo sapien
catcatttctgagaaccgtctggcttaagtgga

SEQ ID NO: 997326 - DNA, 33 bp, Homo sapien
catcatttctgagaacggtctggcttaagtgga

SEQ ID NO: 997327 - DNA, 33 bp, Homo sapien
accactttctttgctcactcataagaagcaact

SEQ ID NO: 997328 - DNA, 33 bp, Homo sapien
accactttctttgctcgctcataagaagcaact

SEQ ID NO: 997329 - DNA, 33 bp, Homo sapien
gtgaaaggcaatgcaacgacagtttagaatgtg

SEQ ID NO: 997330 - DNA, 33 bp, Homo sapien
gtgaaaggcaatgcaatgacagtttagaatgtg

SEQ ID NO: 997331 - DNA, 33 bp, Homo sapien
gcagtgtatgagcgaacgcttttctccacagcc

SEQ ID NO: 997332 - DNA, 33 bp, Homo sapien
gcagtgtatgagcgaatgcttttctccacagcc

SEQ ID NO: 997333 - DNA, 33 bp, Homo sapien
ttttaccaaaaacatacgtgtacttatacgcca

SEQ ID NO: 997334 - DNA, 33 bp, Homo sapien
ttttaccaaaaacatatgtgtacttatacgcca

SEQ ID NO: 997335 - DNA, 33 bp, Homo sapien
ctcttagatactatgcccgctacctgggtgatg

SEQ ID NO: 997336 - DNA, 33 bp, Homo sapien
ctcttagatactatgcgcgctacctgggtgatg

SEQ ID NO: 997337 - DNA, 33 bp, Homo sapien
tgcagccccaggcaacacattaattgcagctta

SEQ ID NO: 997338 - DNA, 33 bp, Homo sapien
tgcagccccaggcaacgcattaattgcagctta

SEQ ID NO: 997339 - DNA, 33 bp, Homo sapien
cacaaagattttatgacgatgactctaaaagca

SEQ ID NO: 997340 - DNA, 33 bp, Homo sapien
cacaaagattttatgatgatgactctaaaagca

SEQ ID NO: 997341 - DNA, 33 bp, Homo sapien
atccaatcatcccctgaaatagtactgatagtc

SEQ ID NO: 997342 - DNA, 33 bp, Homo sapien
atccaatcatcccctggaatagtactgatagtc

SEQ ID NO: 997343 - DNA, 33 bp, Homo sapien
tatccattgatcttaccgagttcttcccagaga

SEQ ID NO: 997344 - DNA, 33 bp, Homo sapien
tatccattgatcttactgagttcttcccagaga

SEQ ID NO: 997345 - DNA, 33 bp, Homo sapien
ctgcatattcagttaccacccagaccaaggggc

SEQ ID NO: 997346 - DNA, 33 bp, Homo sapien
ctgcatattcagttactacccagaccaaggggc

SEQ ID NO: 997347 - DNA, 33 bp, Homo sapien
ggcagaaagcagagaactggaagggaagtcaca

SEQ ID NO: 997348 - DNA, 33 bp, Homo sapien
ggcagaaagcagagaattggaagggaagtcaca

SEQ ID NO: 997349 - DNA, 33 bp, Homo sapien
catcctctgtatcatacgtgaccatactcttta

SEQ ID NO: 997350 - DNA, 33 bp, Homo sapien
catcctctgtatcataggtgaccatactcttta

SEQ ID NO: 997351 - DNA, 33 bp, Homo sapien
aaaagtgagactcctccagatggactgaaacta

SEQ ID NO: 997352 - DNA, 33 bp, Homo sapien
aaaagtgagactcctctagatggactgaaacta

SEQ ID NO: 997353 - DNA, 33 bp, Homo sapien
gtgtgaagccacactaacacaaaagtgagactc

SEQ ID NO: 997354 - DNA, 33 bp, Homo sapien
gtgtgaagccacactagcacaaaagtgagactc

SEQ ID NO: 997355 - DNA, 33 bp, Homo sapien
actctagcctagacaccgtgacaatatgaccct

SEQ ID NO: 997356 - DNA, 33 bp, Homo sapien
actctagcctagacactgtgacaatatgaccct

SEQ ID NO: 997357 - DNA, 33 bp, Homo sapien
tctggaagtatttacactgatggatttatcatc

SEQ ID NO: 997358 - DNA, 33 bp, Homo sapien
tctggaagtatttacattgatggatttatcatc

SEQ ID NO: 997359 - DNA, 33 bp, Homo sapien
gtattctgcacagttacgaaaacaaaaataaat

SEQ ID NO: 997360 - DNA, 33 bp, Homo sapien
gtattctgcacagttatgaaaacaaaaataaat

SEQ ID NO: 997361 - DNA, 33 bp, Homo sapien
ttccccattaaataccaggcacctcatttctcc

SEQ ID NO: 997362 - DNA, 33 bp, Homo sapien
ttccccattaaatacccggcacctcatttctcc

SEQ ID NO: 997363 - DNA, 33 bp, Homo sapien
caggctgccagtggaaacaatatgcacgttgtg

SEQ ID NO: 997364 - DNA, 33 bp, Homo sapien
caggctgccagtggaagcaatatgcacgttgtg

SEQ ID NO: 997365 - DNA, 33 bp, Homo sapien
atctatggcatcctccacaaatgactcaggcga

SEQ ID NO: 997366 - DNA, 33 bp, Homo sapien
atctatggcatcctccgcaaatgactcaggcga

SEQ ID NO: 997367 - DNA, 33 bp, Homo sapien
tcagaggcacagatgacaactggacttcccatt

SEQ ID NO: 997368 - DNA, 33 bp, Homo sapien
tcagaggcacagatgataactggacttcccatt

SEQ ID NO: 997369 - DNA, 33 bp, Homo sapien
cactagctctgatttgcaaaacctttaactttt

SEQ ID NO: 997370 - DNA, 33 bp, Homo sapien
cactagctctgatttggaaaacctttaactttt

SEQ ID NO: 997371 - DNA, 33 bp, Homo sapien
ggttttctaactcagaataaaatctgaagcatt

SEQ ID NO: 997372 - DNA, 33 bp, Homo sapien
ggttttctaactcagagtaaaatctgaagcatt

SEQ ID NO: 997373 - DNA, 33 bp, Homo sapien
tggcgtctgttcttcccgaattgtcctcaatct

SEQ ID NO: 997374 - DNA, 33 bp, Homo sapien
tggcgtctgttcttcctgaattgtcctcaatct

SEQ ID NO: 997375 - DNA, 33 bp, Homo sapien
ctgtaggagcctgaaaagaatgggccgaagatg

SEQ ID NO: 997376 - DNA, 33 bp, Homo sapien
ctgtaggagcctgaaaggaatgggccgaagatg

SEQ ID NO: 997377 - DNA, 33 bp, Homo sapien
tatacatatggaaaaacgtaaaacatggaactt

SEQ ID NO: 997378 - DNA, 33 bp, Homo sapien
tatacatatggaaaaatgtaaaacatggaactt

SEQ ID NO: 997379 - DNA, 33 bp, Homo sapien
actgtagtacttccacaaccagaagcaaagggt

SEQ ID NO: 997380 - DNA, 33 bp, Homo sapien
actgtagtacttccaccaccagaagcaaagggt

SEQ ID NO: 997381 - DNA, 33 bp, Homo sapien
tcagttcaaaggcaccaagaaactgaggttttc

SEQ ID NO: 997382 - DNA, 33 bp, Homo sapien
tcagttcaaaggcaccgagaaactgaggttttc

SEQ ID NO: 997383 - DNA, 33 bp, Homo sapien
gagcactgctccatacaacagacagatggggtt

SEQ ID NO: 997384 - DNA, 33 bp, Homo sapien
gagcactgctccataccacagacagatggggtt

SEQ ID NO: 997385 - DNA, 33 bp, Homo sapien
gattgctctggggcataatacagttcacactcc

SEQ ID NO: 997386 - DNA, 33 bp, Homo sapien
gattgctctggggcatgatacagttcacactcc

SEQ ID NO: 997387 - DNA, 33 bp, Homo sapien
atgaggacaatctgtgcactggtctcatgaact

SEQ ID NO: 997388 - DNA, 33 bp, Homo sapien
atgaggacaatctgtgtactggtctcatgaact

SEQ ID NO: 997389 - DNA, 33 bp, Homo sapien
tcgtgcaaaatacccacgtaacaaaaatgcata

SEQ ID NO: 997390 - DNA, 33 bp, Homo sapien
tcgtgcaaaatacccatgtaacaaaaatgcata

SEQ ID NO: 997391 - DNA, 33 bp, Homo sapien
tacaatcgatccatcacagccctccttagtgag

SEQ ID NO: 997392 - DNA, 33 bp, Homo sapien
tacaatcgatccatcagagccctccttagtgag

SEQ ID NO: 997393 - DNA, 33 bp, Homo sapien
tttctcctgcaacagaagacatttactccactt

SEQ ID NO: 997394 - DNA, 33 bp, Homo sapien
tttctcctgcaacagatgacatttactccactt

SEQ ID NO: 997395 - DNA, 33 bp, Homo sapien
cttctatcagttgtaaggttaccacagggaact

SEQ ID NO: 997396 - DNA, 33 bp, Homo sapien
cttctatcagttgtaatgttaccacagggaact

SEQ ID NO: 997397 - DNA, 33 bp, Homo sapien
gattacatggagcccacatattcagaataatct

SEQ ID NO: 997398 - DNA, 33 bp, Homo sapien
gattacatggagcccagatattcagaataatct

SEQ ID NO: 997399 - DNA, 33 bp, Homo sapien
atatctcaagtgtatacgcctgtttttatttaa

SEQ ID NO: 997400 - DNA, 33 bp, Homo sapien
atatctcaagtgtatatgcctgtttttatttaa

SEQ ID NO: 997401 - DNA, 33 bp, Homo sapien
tttatagatgcagggacggatcaatacatagac

SEQ ID NO: 997402 - DNA, 33 bp, Homo sapien
tttatagatgcagggatggatcaatacatagac

SEQ ID NO: 997403 - DNA, 33 bp, Homo sapien
acactcatggatattacgattaacgataaaccg

SEQ ID NO: 997404 - DNA, 33 bp, Homo sapien
acactcatggatattatgattaacgataaaccg

SEQ ID NO: 997405 - DNA, 33 bp, Homo sapien
cttgagtgtgtctatgaagaaggacttggaggt

SEQ ID NO: 997406 - DNA, 33 bp, Homo sapien
cttgagtgtgtctatggagaaggacttggaggt

SEQ ID NO: 997407 - DNA, 33 bp, Homo sapien
ttctcattatcctcccaaaaaacgaagccccat

SEQ ID NO: 997408 - DNA, 33 bp, Homo sapien
ttctcattatcctcccgaaaaacgaagccccat

SEQ ID NO: 997409 - DNA, 33 bp, Homo sapien
gaaccaaggggccgataatagctgcagaaacaa

SEQ ID NO: 997410 - DNA, 33 bp, Homo sapien
gaaccaaggggccgatgatagctgcagaaacaa

SEQ ID NO: 997411 - DNA, 33 bp, Homo sapien
tgttaaattttatccaactttcaaggctctgtg

SEQ ID NO: 997412 - DNA, 33 bp, Homo sapien
tgttaaattttatccagctttcaaggctctgtg

SEQ ID NO: 997413 - DNA, 33 bp, Homo sapien
agaagtctggcatgtaagaagtgcccggtcagc

SEQ ID NO: 997414 - DNA, 33 bp, Homo sapien
agaagtctggcatgtaggaagtgcccggtcagc

SEQ ID NO: 997415 - DNA, 33 bp, Homo sapien
gcctgcgaggcaagtcaaggagctgagatctga

SEQ ID NO: 997416 - DNA, 33 bp, Homo sapien
gcctgcgaggcaagtcgaggagctgagatctga

SEQ ID NO: 997417 - DNA, 33 bp, Homo sapien
caccctggaacaaagacagagagatggtgtcat

SEQ ID NO: 997418 - DNA, 33 bp, Homo sapien
caccctggaacaaagagagagagatggtgtcat

SEQ ID NO: 997419 - DNA, 33 bp, Homo sapien
caaattgaaaagtctcaacgagctactgtggac

SEQ ID NO: 997420 - DNA, 33 bp, Homo sapien
caaattgaaaagtctcgacgagctactgtggac

SEQ ID NO: 997421 - DNA, 33 bp, Homo sapien
aaaagctctaagaagcaattcattcatccacat

SEQ ID NO: 997422 - DNA, 33 bp, Homo sapien
aaaagctctaagaagcgattcattcatccacat

SEQ ID NO: 997423 - DNA, 33 bp, Homo sapien
catgtattggctactaacataatacctactaaa

SEQ ID NO: 997424 - DNA, 33 bp, Homo sapien
catgtattggctactaccataatacctactaaa

SEQ ID NO: 997425 - DNA, 33 bp, Homo sapien
tgtcaatgcaaataagccctacatttaggcccc

SEQ ID NO: 997426 - DNA, 33 bp, Homo sapien
tgtcaatgcaaataagtcctacatttaggcccc

SEQ ID NO: 997427 - DNA, 33 bp, Homo sapien
tccagcagtttcattgcaagacttgtagtgaac

SEQ ID NO: 997428 - DNA, 33 bp, Homo sapien
tccagcagtttcattggaagacttgtagtgaac

SEQ ID NO: 997429 - DNA, 33 bp, Homo sapien
attggcaaagacagacagacttcttcttttttc

SEQ ID NO: 997430 - DNA, 33 bp, Homo sapien
attggcaaagacagacggacttcttcttttttc

SEQ ID NO: 997431 - DNA, 33 bp, Homo sapien
ccgtggcagttacagacggaaagaattttctgc

SEQ ID NO: 997432 - DNA, 33 bp, Homo sapien
ccgtggcagttacagatggaaagaattttctgc

SEQ ID NO: 997433 - DNA, 33 bp, Homo sapien
aaaaaaaggcaattccccctcagcagaggctaa

SEQ ID NO: 997434 - DNA, 33 bp, Homo sapien
aaaaaaaggcaattcctcctcagcagaggctaa

SEQ ID NO: 997435 - DNA, 33 bp, Homo sapien
acgtgcttatgagtaacgcctcttcccacctct

SEQ ID NO: 997436 - DNA, 33 bp, Homo sapien
acgtgcttatgagtaatgcctcttcccacctct

SEQ ID NO: 997437 - DNA, 33 bp, Homo sapien
atgtccagccaggcctcaggaagagacataggg

SEQ ID NO: 997438 - DNA, 33 bp, Homo sapien
atgtccagccaggccttaggaagagacataggg

SEQ ID NO: 997439 - DNA, 33 bp, Homo sapien
gtgccatgcttagacccagaacaggggttttct

SEQ ID NO: 997440 - DNA, 33 bp, Homo sapien
gtgccatgcttagacctagaacaggggttttct

SEQ ID NO: 997441 - DNA, 33 bp, Homo sapien
tatgtgccaaataaaactcacctaactgtactc

SEQ ID NO: 997442 - DNA, 33 bp, Homo sapien
tatgtgccaaataaaattcacctaactgtactc

SEQ ID NO: 997443 - DNA, 33 bp, Homo sapien
ctcaggagaaacttacaaggatggagggaagca

SEQ ID NO: 997444 - DNA, 33 bp, Homo sapien
ctcaggagaaacttacgaggatggagggaagca

SEQ ID NO: 997445 - DNA, 33 bp, Homo sapien
gtgcttccagagaacccaatctgacacagaagg

SEQ ID NO: 997446 - DNA, 33 bp, Homo sapien
gtgcttccagagaacctaatctgacacagaagg

SEQ ID NO: 997447 - DNA, 33 bp, Homo sapien
agtccttctgggaaatcactgaacatgagggaa

SEQ ID NO: 997448 - DNA, 33 bp, Homo sapien
agtccttctgggaaatgactgaacatgagggaa

SEQ ID NO: 997449 - DNA, 33 bp, Homo sapien
ttgcccgtttcctagcacttgactgggtgaggt

SEQ ID NO: 997450 - DNA, 33 bp, Homo sapien
ttgcccgtttcctagcgcttgactgggtgaggt

SEQ ID NO: 997451 - DNA, 33 bp, Homo sapien
aaaatgcaactcagaaagttcaagaggttttaa

SEQ ID NO: 997452 - DNA, 33 bp, Homo sapien
aaaatgcaactcagaaggttcaagaggttttaa

SEQ ID NO: 997453 - DNA, 33 bp, Homo sapien
atccagaaccataagacgacataccggcttgcc

SEQ ID NO: 997454 - DNA, 33 bp, Homo sapien
atccagaaccataagatgacataccggcttgcc

SEQ ID NO: 997455 - DNA, 33 bp, Homo sapien
cgggtcttgctctgcccatgttacagattaaga

SEQ ID NO: 997456 - DNA, 33 bp, Homo sapien
cgggtcttgctctgcctatgttacagattaaga

SEQ ID NO: 997457 - DNA, 33 bp, Homo sapien
agaccagcgggaaaacccacgagtgatgcaggg

SEQ ID NO: 997458 - DNA, 33 bp, Homo sapien
agaccagcgggaaaacgcacgagtgatgcaggg

SEQ ID NO: 997459 - DNA, 33 bp, Homo sapien
ggtactcacacctaacagaatctagccagccta

SEQ ID NO: 997460 - DNA, 33 bp, Homo sapien
ggtactcacacctaacggaatctagccagccta

SEQ ID NO: 997461 - DNA, 33 bp, Homo sapien
attgacttccatgtccagcctgtgtggtttttt

SEQ ID NO: 997462 - DNA, 33 bp, Homo sapien
attgacttccatgtccggcctgtgtggtttttt

SEQ ID NO: 997463 - DNA, 33 bp, Homo sapien
aaatgtaggtacttggaaaattattggtgaatt

SEQ ID NO: 997464 - DNA, 33 bp, Homo sapien
aaatgtaggtacttggcaaattattggtgaatt

SEQ ID NO: 997465 - DNA, 33 bp, Homo sapien
tccattgtgtgttgaaaatttacatatttttgt

SEQ ID NO: 997466 - DNA, 33 bp, Homo sapien
tccattgtgtgttgaacatttacatatttttgt

SEQ ID NO: 997467 - DNA, 33 bp, Homo sapien
atgaccactgatctaacagtaggagaccttttt

SEQ ID NO: 997468 - DNA, 33 bp, Homo sapien
atgaccactgatctaatagtaggagaccttttt

SEQ ID NO: 997469 - DNA, 33 bp, Homo sapien
tctaaataaagcacacgctctttgaacctggat

SEQ ID NO: 997470 - DNA, 33 bp, Homo sapien
tctaaataaagcacactctctttgaacctggat

SEQ ID NO: 997471 - DNA, 33 bp, Homo sapien
cttgccaagatggtcacgtcaattaataaaaga

SEQ ID NO: 997472 - DNA, 33 bp, Homo sapien
cttgccaagatggtcatgtcaattaataaaaga

SEQ ID NO: 997473 - DNA, 33 bp, Homo sapien
tctgagctggaggggacatgaatcaaaccacac

SEQ ID NO: 997474 - DNA, 33 bp, Homo sapien
tctgagctggaggggagatgaatcaaaccacac

SEQ ID NO: 997475 - DNA, 33 bp, Homo sapien
cctttcttcagcaaaagttagacacaccattct

SEQ ID NO: 997476 - DNA, 33 bp, Homo sapien
cctttcttcagcaaaatttagacacaccattct

SEQ ID NO: 997477 - DNA, 33 bp, Homo sapien
gcagagttctccaggacggcagataacaaccag

SEQ ID NO: 997478 - DNA, 33 bp, Homo sapien
gcagagttctccaggatggcagataacaaccag

SEQ ID NO: 997479 - DNA, 33 bp, Homo sapien
ttttctggcttcagccaacagcataaagagatc

SEQ ID NO: 997480 - DNA, 33 bp, Homo sapien
ttttctggcttcagcctacagcataaagagatc

SEQ ID NO: 997481 - DNA, 33 bp, Homo sapien
tgtgccgatggacagagagtgatgctggctact

SEQ ID NO: 997482 - DNA, 33 bp, Homo sapien
tgtgccgatggacagatagtgatgctggctact

SEQ ID NO: 997483 - DNA, 33 bp, Homo sapien
ggatgcccgtaagtagcagcggtgcctcggggt

SEQ ID NO: 997484 - DNA, 33 bp, Homo sapien
ggatgcccgtaagtagtagcggtgcctcggggt

SEQ ID NO: 997485 - DNA, 33 bp, Homo sapien
gatttgttacagcaaacatcctcacacacatgc

SEQ ID NO: 997486 - DNA, 33 bp, Homo sapien
gatttgttacagcaaatatcctcacacacatgc

SEQ ID NO: 997487 - DNA, 33 bp, Homo sapien
aacagcgtgcggggaaatcatgggttccgtata

SEQ ID NO: 997488 - DNA, 33 bp, Homo sapien
aacagcgtgcggggaagtcatgggttccgtata

SEQ ID NO: 997489 - DNA, 33 bp, Homo sapien
gtgtttcagacaaataagcccgtggacaaacat

SEQ ID NO: 997490 - DNA, 33 bp, Homo sapien
gtgtttcagacaaataggcccgtggacaaacat

SEQ ID NO: 997491 - DNA, 33 bp, Homo sapien
tgcgggcaggttcaagcaggaagaatgcacttt

SEQ ID NO: 997492 - DNA, 33 bp, Homo sapien
tgcgggcaggttcaaggaggaagaatgcacttt

SEQ ID NO: 997493 - DNA, 33 bp, Homo sapien
taaagtttgaggtttacgtctagcgtattattt

SEQ ID NO: 997494 - DNA, 33 bp, Homo sapien
taaagtttgaggtttatgtctagcgtattattt

SEQ ID NO: 997495 - DNA, 33 bp, Homo sapien
tacagagcaaagttaacaggagacgggccatgc

SEQ ID NO: 997496 - DNA, 33 bp, Homo sapien
tacagagcaaagttaataggagacgggccatgc

SEQ ID NO: 997497 - DNA, 33 bp, Homo sapien
aaaacagaggacccggacaagcatttgctaaca

SEQ ID NO: 997498 - DNA, 33 bp, Homo sapien
aaaacagaggacccgggcaagcatttgctaaca

SEQ ID NO: 997499 - DNA, 33 bp, Homo sapien
gtgtgtttttgcactgaacttgggtggataaaa

SEQ ID NO: 997500 - DNA, 33 bp, Homo sapien
gtgtgtttttgcactggacttgggtggataaaa

SEQ ID NO: 997501 - DNA, 33 bp, Homo sapien
gggatgttatgctcacaggctcatcagcagtgc

SEQ ID NO: 997502 - DNA, 33 bp, Homo sapien
gggatgttatgctcacgggctcatcagcagtgc

SEQ ID NO: 997503 - DNA, 33 bp, Homo sapien
ctaccatctcagaggaagactcccaaattatga

SEQ ID NO: 997504 - DNA, 33 bp, Homo sapien
ctaccatctcagaggaggactcccaaattatga

SEQ ID NO: 997505 - DNA, 33 bp, Homo sapien
aagccgcactgcctgcacataaacacttggcca

SEQ ID NO: 997506 - DNA, 33 bp, Homo sapien
aagccgcactgcctgcgcataaacacttggcca

SEQ ID NO: 997507 - DNA, 33 bp, Homo sapien
ttatgcctgtctttcaaaatgaaatattccacc

SEQ ID NO: 997508 - DNA, 33 bp, Homo sapien
ttatgcctgtctttcagaatgaaatattccacc

SEQ ID NO: 997509 - DNA, 33 bp, Homo sapien
acaggtggtttctcacagtctagtacctggtcc

SEQ ID NO: 997510 - DNA, 33 bp, Homo sapien
acaggtggtttctcacggtctagtacctggtcc

SEQ ID NO: 997511 - DNA, 33 bp, Homo sapien
aactattaaaaagaacagccagtgggtcacgtg

SEQ ID NO: 997512 - DNA, 33 bp, Homo sapien
aactattaaaaagaacggccagtgggtcacgtg

SEQ ID NO: 997513 - DNA, 33 bp, Homo sapien
ctcaggtgggcagccaaaatcctgctggtcacc

SEQ ID NO: 997514 - DNA, 33 bp, Homo sapien
ctcaggtgggcagccagaatcctgctggtcacc

SEQ ID NO: 997515 - DNA, 33 bp, Homo sapien
ggaagagaatgtaaaaggtagttacctgcagcc

SEQ ID NO: 997516 - DNA, 33 bp, Homo sapien
ggaagagaatgtaaaatgtagttacctgcagcc

SEQ ID NO: 997517 - DNA, 33 bp, Homo sapien
acctactgagcagttacgaatgggttctaaagc

SEQ ID NO: 997518 - DNA, 33 bp, Homo sapien
acctactgagcagttatgaatgggttctaaagc

SEQ ID NO: 997519 - DNA, 33 bp, Homo sapien
gtagatcaatgccagccatttcttgacgcttaa

SEQ ID NO: 997520 - DNA, 33 bp, Homo sapien
gtagatcaatgccagctatttcttgacgcttaa

SEQ ID NO: 997521 - DNA, 33 bp, Homo sapien
cctcaatagcttaaaacaaatctgatctatgtt

SEQ ID NO: 997522 - DNA, 33 bp, Homo sapien
cctcaatagcttaaaataaatctgatctatgtt

SEQ ID NO: 997523 - DNA, 33 bp, Homo sapien
caccctgcacagaaacaacaaacatttcagcat

SEQ ID NO: 997524 - DNA, 33 bp, Homo sapien
caccctgcacagaaacgacaaacatttcagcat

SEQ ID NO: 997525 - DNA, 33 bp, Homo sapien
taacaacaggttttaaatgtttcccatgctccc

SEQ ID NO: 997526 - DNA, 33 bp, Homo sapien
taacaacaggttttaagtgtttcccatgctccc

SEQ ID NO: 997527 - DNA, 33 bp, Homo sapien
gggaagaaattgattccaggaaagacttttggt

SEQ ID NO: 997528 - DNA, 33 bp, Homo sapien
gggaagaaattgattctaggaaagacttttggt

SEQ ID NO: 997529 - DNA, 33 bp, Homo sapien
gaagaagacataagacaatgataaccttgctgc

SEQ ID NO: 997530 - DNA, 33 bp, Homo sapien
gaagaagacataagacgatgataaccttgctgc

SEQ ID NO: 997531 - DNA, 33 bp, Homo sapien
tggtcagaggcctttaaattatgataacgcacc

SEQ ID NO: 997532 - DNA, 33 bp, Homo sapien
tggtcagaggcctttacattatgataacgcacc

SEQ ID NO: 997533 - DNA, 33 bp, Homo sapien
agaggagtctacacacaaaaagggccaagcact

SEQ ID NO: 997534 - DNA, 33 bp, Homo sapien
agaggagtctacacacgaaaagggccaagcact

SEQ ID NO: 997535 - DNA, 33 bp, Homo sapien
caagagaagatggaaaacttcttgctgatataa

SEQ ID NO: 997536 - DNA, 33 bp, Homo sapien
caagagaagatggaaaccttcttgctgatataa

SEQ ID NO: 997537 - DNA, 33 bp, Homo sapien
ttattgatttagcaaacgtgtatcaaaggccac

SEQ ID NO: 997538 - DNA, 33 bp, Homo sapien
ttattgatttagcaaatgtgtatcaaaggccac

SEQ ID NO: 997539 - DNA, 33 bp, Homo sapien
acaactatagtgggcacgtaggcatatttccct

SEQ ID NO: 997540 - DNA, 33 bp, Homo sapien
acaactatagtgggcatgtaggcatatttccct

SEQ ID NO: 997541 - DNA, 33 bp, Homo sapien
gctctcaaacaaatggaagaatgagtggtgaca

SEQ ID NO: 997542 - DNA, 33 bp, Homo sapien
gctctcaaacaaatgggagaatgagtggtgaca

SEQ ID NO: 997543 - DNA, 33 bp, Homo sapien
gaagctactttgttccccatacaccatatctgt

SEQ ID NO: 997544 - DNA, 33 bp, Homo sapien
gaagctactttgttcctcatacaccatatctgt

SEQ ID NO: 997545 - DNA, 33 bp, Homo sapien
aaatgcttcgtatacaaagaaattcaaaacaag

SEQ ID NO: 997546 - DNA, 33 bp, Homo sapien
aaatgcttcgtatacagagaaattcaaaacaag

SEQ ID NO: 997547 - DNA, 33 bp, Homo sapien
tataaaagagatcccacagagcccgtttgtcct

SEQ ID NO: 997548 - DNA, 33 bp, Homo sapien
tataaaagagatcccagagagcccgtttgtcct

SEQ ID NO: 997549 - DNA, 33 bp, Homo sapien
gtatggtggctcctcaaaagaaagattaaaaat

SEQ ID NO: 997550 - DNA, 33 bp, Homo sapien
gtatggtggctcctcagaagaaagattaaaaat

SEQ ID NO: 997551 - DNA, 33 bp, Homo sapien
actggagtacaggcacgcgtggactcaaaacat

SEQ ID NO: 997552 - DNA, 33 bp, Homo sapien
actggagtacaggcactcgtggactcaaaacat

SEQ ID NO: 997553 - DNA, 33 bp, Homo sapien
agtttcagatcaagaaaaaagacaaaagaatag

SEQ ID NO: 997554 - DNA, 33 bp, Homo sapien
agtttcagatcaagaacaaagacaaaagaatag

SEQ ID NO: 997555 - DNA, 33 bp, Homo sapien
catcagcacaaagagaagactcaccaggggaga

SEQ ID NO: 997556 - DNA, 33 bp, Homo sapien
catcagcacaaagagaggactcaccaggggaga

SEQ ID NO: 997557 - DNA, 33 bp, Homo sapien
tccagttaactcccaccgtcatctcgtctgttt

SEQ ID NO: 997558 - DNA, 33 bp, Homo sapien
tccagttaactcccactgtcatctcgtctgttt

SEQ ID NO: 997559 - DNA, 33 bp, Homo sapien
cttcatctcctgtaccaggctgtattgtccctc

SEQ ID NO: 997560 - DNA, 33 bp, Homo sapien
cttcatctcctgtaccgggctgtattgtccctc

SEQ ID NO: 997561 - DNA, 33 bp, Homo sapien
tttctttactcaaaatcatgtgtctaagctttt

SEQ ID NO: 997562 - DNA, 33 bp, Homo sapien
tttctttactcaaaattatgtgtctaagctttt

SEQ ID NO: 997563 - DNA, 33 bp, Homo sapien
aggttaaaatccaagaatacatgtttatcagag

SEQ ID NO: 997564 - DNA, 33 bp, Homo sapien
aggttaaaatccaagagtacatgtttatcagag

SEQ ID NO: 997565 - DNA, 33 bp, Homo sapien
ggtcatcgaccagtacagcatcccacaggtaag

SEQ ID NO: 997566 - DNA, 33 bp, Homo sapien
ggtcatcgaccagtacggcatcccacaggtaag

SEQ ID NO: 997567 - DNA, 33 bp, Homo sapien
atatgtatttgaacaactccctcccgatctgtt

SEQ ID NO: 997568 - DNA, 33 bp, Homo sapien
atatgtatttgaacaattccctcccgatctgtt

SEQ ID NO: 997569 - DNA, 33 bp, Homo sapien
ttcaactccaggaaaaaggtgcaggagaacaca

SEQ ID NO: 997570 - DNA, 33 bp, Homo sapien
ttcaactccaggaaaagggtgcaggagaacaca

SEQ ID NO: 997571 - DNA, 33 bp, Homo sapien
cccacctgtccatgccacatgtttatctagagt

SEQ ID NO: 997572 - DNA, 33 bp, Homo sapien
cccacctgtccatgccgcatgtttatctagagt

SEQ ID NO: 997573 - DNA, 33 bp, Homo sapien
atcccagtttacagataagactgatagaaagaa

SEQ ID NO: 997574 - DNA, 33 bp, Homo sapien
atcccagtttacagatgagactgatagaaagaa

SEQ ID NO: 997575 - DNA, 33 bp, Homo sapien
gttacctagaaatacacattgtacagtccaagc

SEQ ID NO: 997576 - DNA, 33 bp, Homo sapien
gttacctagaaatacatattgtacagtccaagc

SEQ ID NO: 997577 - DNA, 33 bp, Homo sapien
gtatataatgcagtaaagtaagaatttgctttg

SEQ ID NO: 997578 - DNA, 33 bp, Homo sapien
gtatataatgcagtaaggtaagaatttgctttg

SEQ ID NO: 997579 - DNA, 33 bp, Homo sapien
gctacctctagggtcacagaagtggatgagaga

SEQ ID NO: 997580 - DNA, 33 bp, Homo sapien
gctacctctagggtcagagaagtggatgagaga

SEQ ID NO: 997581 - DNA, 33 bp, Homo sapien
taatgtcagcattacacacaggctctcttttaa

SEQ ID NO: 997582 - DNA, 33 bp, Homo sapien
taatgtcagcattacatacaggctctcttttaa

SEQ ID NO: 997583 - DNA, 33 bp, Homo sapien
aaggggagggactttcacctctgtttttgagtt

SEQ ID NO: 997584 - DNA, 33 bp, Homo sapien
aaggggagggactttcgcctctgtttttgagtt

SEQ ID NO: 997585 - DNA, 33 bp, Homo sapien
agcacagaagccaacacagagaggcaagtcagc

SEQ ID NO: 997586 - DNA, 33 bp, Homo sapien
agcacagaagccaacagagagaggcaagtcagc

SEQ ID NO: 997587 - DNA, 33 bp, Homo sapien
tcacctttagagccccaagaggaacaacaatcc

SEQ ID NO: 997588 - DNA, 33 bp, Homo sapien
tcacctttagagccccgagaggaacaacaatcc

SEQ ID NO: 997589 - DNA, 33 bp, Homo sapien
ggttggacctcacaataaacagcagaacagaaa

SEQ ID NO: 997590 - DNA, 33 bp, Homo sapien
ggttggacctcacaatgaacagcagaacagaaa

SEQ ID NO: 997591 - DNA, 33 bp, Homo sapien
ctttgcaatgtgtctacgcaggagatttttgct

SEQ ID NO: 997592 - DNA, 33 bp, Homo sapien
ctttgcaatgtgtctatgcaggagatttttgct

SEQ ID NO: 997593 - DNA, 33 bp, Homo sapien
acagtcagtgcaaatcacaggttaactcttgtt

SEQ ID NO: 997594 - DNA, 33 bp, Homo sapien
acagtcagtgcaaatcgcaggttaactcttgtt

SEQ ID NO: 997595 - DNA, 33 bp, Homo sapien
catgtattagaagcaacgagcttgtgcgacaca

SEQ ID NO: 997596 - DNA, 33 bp, Homo sapien
catgtattagaagcaatgagcttgtgcgacaca

SEQ ID NO: 997597 - DNA, 33 bp, Homo sapien
aaaaacctggattaaccgtgaagaaaatagcaa

SEQ ID NO: 997598 - DNA, 33 bp, Homo sapien
aaaaacctggattaactgtgaagaaaatagcaa

SEQ ID NO: 997599 - DNA, 33 bp, Homo sapien
tagggaagttccctaaataccacactctggccc

SEQ ID NO: 997600 - DNA, 33 bp, Homo sapien
tagggaagttccctaagtaccacactctggccc

SEQ ID NO: 997601 - DNA, 33 bp, Homo sapien
tgggcacttgagtctacagctcagaaaagaaac

SEQ ID NO: 997602 - DNA, 33 bp, Homo sapien
tgggcacttgagtctatagctcagaaaagaaac

SEQ ID NO: 997603 - DNA, 33 bp, Homo sapien
gttatcttagcaaacacgaaaatgaaatattca

SEQ ID NO: 997604 - DNA, 33 bp, Homo sapien
gttatcttagcaaacatgaaaatgaaatattca

SEQ ID NO: 997605 - DNA, 33 bp, Homo sapien
tgactctaaagaccacaaagcatagtgaaagag

SEQ ID NO: 997606 - DNA, 33 bp, Homo sapien
tgactctaaagaccacgaagcatagtgaaagag

SEQ ID NO: 997607 - DNA, 33 bp, Homo sapien
caaggaaatgaaagatcagagtttgaatgattt

SEQ ID NO: 997608 - DNA, 33 bp, Homo sapien
caaggaaatgaaagatgagagtttgaatgattt

SEQ ID NO: 997609 - DNA, 33 bp, Homo sapien
gtatccttccacataaactatgacttctattcc

SEQ ID NO: 997610 - DNA, 33 bp, Homo sapien
gtatccttccacataagctatgacttctattcc

SEQ ID NO: 997611 - DNA, 33 bp, Homo sapien
atagagatagataacacaagaggcatctggtac

SEQ ID NO: 997612 - DNA, 33 bp, Homo sapien
atagagatagataacataagaggcatctggtac

SEQ ID NO: 997613 - DNA, 33 bp, Homo sapien
tgacaagtcatggaatgaagttctgaggagggg

SEQ ID NO: 997614 - DNA, 33 bp, Homo sapien
tgacaagtcatggaattaagttctgaggagggg

SEQ ID NO: 997615 - DNA, 33 bp, Homo sapien
gaaacctgtctgtatccatcatgagtcgcctct

SEQ ID NO: 997616 - DNA, 33 bp, Homo sapien
gaaacctgtctgtatctatcatgagtcgcctct

SEQ ID NO: 997617 - DNA, 33 bp, Homo sapien
cagcggcaaagcactgaaattccaactggctct

SEQ ID NO: 997618 - DNA, 33 bp, Homo sapien
cagcggcaaagcactggaattccaactggctct

SEQ ID NO: 997619 - DNA, 33 bp, Homo sapien
gatccgtagtcagacacctctaagggccttgaa

SEQ ID NO: 997620 - DNA, 33 bp, Homo sapien
gatccgtagtcagacagctctaagggccttgaa

SEQ ID NO: 997621 - DNA, 33 bp, Homo sapien
aggaaggaagaactaccgcatgacttagattta

SEQ ID NO: 997622 - DNA, 33 bp, Homo sapien
aggaaggaagaactactgcatgacttagattta

SEQ ID NO: 997623 - DNA, 33 bp, Homo sapien
attgtttataagagtaaaaactggcaataatca

SEQ ID NO: 997624 - DNA, 33 bp, Homo sapien
attgtttataagagtagaaactggcaataatca

SEQ ID NO: 997625 - DNA, 33 bp, Homo sapien
tggacacctgtagagccagagctggaaaggcag

SEQ ID NO: 997626 - DNA, 33 bp, Homo sapien
tggacacctgtagagcgagagctggaaaggcag

SEQ ID NO: 997627 - DNA, 33 bp, Homo sapien
ggactgtctctggaaaattcagacattattatt

SEQ ID NO: 997628 - DNA, 33 bp, Homo sapien
ggactgtctctggaaagttcagacattattatt

SEQ ID NO: 997629 - DNA, 33 bp, Homo sapien
aataaatagcaaaaaacctcatagtagtgacaa

SEQ ID NO: 997630 - DNA, 33 bp, Homo sapien
aataaatagcaaaaaatctcatagtagtgacaa

SEQ ID NO: 997631 - DNA, 33 bp, Homo sapien
caatccttgtaaaaataatgactatttcccagt

SEQ ID NO: 997632 - DNA, 33 bp, Homo sapien
caatccttgtaaaaattatgactatttcccagt

SEQ ID NO: 997633 - DNA, 33 bp, Homo sapien
ttccctgggttcccacagaagagagaaggtgga

SEQ ID NO: 997634 - DNA, 33 bp, Homo sapien
ttccctgggttcccacggaagagagaaggtgga

SEQ ID NO: 997635 - DNA, 33 bp, Homo sapien
agaaagcactttctaagtatgatgtcctgggaa

SEQ ID NO: 997636 - DNA, 33 bp, Homo sapien
agaaagcactttctaattatgatgtcctgggaa

SEQ ID NO: 997637 - DNA, 33 bp, Homo sapien
ggcgtagagttgttgaataaattgccctcagtt

SEQ ID NO: 997638 - DNA, 33 bp, Homo sapien
ggcgtagagttgttgagtaaattgccctcagtt

SEQ ID NO: 997639 - DNA, 33 bp, Homo sapien
gggaatttagtgagaacagtgacttgtccaaag

SEQ ID NO: 997640 - DNA, 33 bp, Homo sapien
gggaatttagtgagaagagtgacttgtccaaag

SEQ ID NO: 997641 - DNA, 33 bp, Homo sapien
aagtttgtgagttatgaacattatctgtgcagg

SEQ ID NO: 997642 - DNA, 33 bp, Homo sapien
aagtttgtgagttatgtacattatctgtgcagg

SEQ ID NO: 997643 - DNA, 33 bp, Homo sapien
tggagaaaggcatgaaactctcttctgagcatg

SEQ ID NO: 997644 - DNA, 33 bp, Homo sapien
tggagaaaggcatgaacctctcttctgagcatg

SEQ ID NO: 997645 - DNA, 33 bp, Homo sapien
attatatttgttttcaaaattggattaaccata

SEQ ID NO: 997646 - DNA, 33 bp, Homo sapien
attatatttgttttcagaattggattaaccata

SEQ ID NO: 997647 - DNA, 33 bp, Homo sapien
accttgattttatccagtcattgcatcaaagct

SEQ ID NO: 997648 - DNA, 33 bp, Homo sapien
accttgattttatccattcattgcatcaaagct

SEQ ID NO: 997649 - DNA, 33 bp, Homo sapien
tttactgacttcaccacggtgtacagaggaagg

SEQ ID NO: 997650 - DNA, 33 bp, Homo sapien
tttactgacttcaccagggtgtacagaggaagg

SEQ ID NO: 997651 - DNA, 33 bp, Homo sapien
agtttggtggtctttcactctgctttcctggtg

SEQ ID NO: 997652 - DNA, 33 bp, Homo sapien
agtttggtggtctttctctctgctttcctggtg

SEQ ID NO: 997653 - DNA, 33 bp, Homo sapien
gacattgcttggagtgaaagtttcatggctgta

SEQ ID NO: 997654 - DNA, 33 bp, Homo sapien
gacattgcttggagtgcaagtttcatggctgta

SEQ ID NO: 997655 - DNA, 33 bp, Homo sapien
gatgaatttggagaaaaaggcaagaacaaagcc

SEQ ID NO: 997656 - DNA, 33 bp, Homo sapien
gatgaatttggagaaacaggcaagaacaaagcc

SEQ ID NO: 997657 - DNA, 33 bp, Homo sapien
aaaaacaagataacttaaacctggtgaaaatta

SEQ ID NO: 997658 - DNA, 33 bp, Homo sapien
aaaaacaagataacttgaacctggtgaaaatta

SEQ ID NO: 997659 - DNA, 33 bp, Homo sapien
attggaggaaaaccataaacataagtctgaaag

SEQ ID NO: 997660 - DNA, 33 bp, Homo sapien
attggaggaaaaccatcaacataagtctgaaag

SEQ ID NO: 997661 - DNA, 33 bp, Homo sapien
caaaatagagagtcagaaaatatgtatgggaaa

SEQ ID NO: 997662 - DNA, 33 bp, Homo sapien
caaaatagagagtcaggaaatatgtatgggaaa

SEQ ID NO: 997663 - DNA, 33 bp, Homo sapien
agaatagtgagaaatacatttttattgtttata

SEQ ID NO: 997664 - DNA, 33 bp, Homo sapien
agaatagtgagaaatagatttttattgtttata

SEQ ID NO: 997665 - DNA, 33 bp, Homo sapien
aaggagtggactcagaaaatccttgaagaatta

SEQ ID NO: 997666 - DNA, 33 bp, Homo sapien
aaggagtggactcagagaatccttgaagaatta

SEQ ID NO: 997667 - DNA, 33 bp, Homo sapien
gaagagtgtgagtcaacaagatccactggggat

SEQ ID NO: 997668 - DNA, 33 bp, Homo sapien
gaagagtgtgagtcaagaagatccactggggat

SEQ ID NO: 997669 - DNA, 33 bp, Homo sapien
gagtggtaccactcacgattacacctggtgaca

SEQ ID NO: 997670 - DNA, 33 bp, Homo sapien
gagtggtaccactcactattacacctggtgaca

SEQ ID NO: 997671 - DNA, 33 bp, Homo sapien
tttgtgacatgattggcagcctccaaatctcaa

SEQ ID NO: 997672 - DNA, 33 bp, Homo sapien
tttgtgacatgattggtagcctccaaatctcaa

SEQ ID NO: 997673 - DNA, 33 bp, Homo sapien
agcaaatcacacagaaacctctcctccagctgg

SEQ ID NO: 997674 - DNA, 33 bp, Homo sapien
agcaaatcacacagaaccctctcctccagctgg

SEQ ID NO: 997675 - DNA, 33 bp, Homo sapien
agggtgaccgggaaaagaactactccagaaaac

SEQ ID NO: 997676 - DNA, 33 bp, Homo sapien
agggtgaccgggaaaataactactccagaaaac

SEQ ID NO: 997677 - DNA, 33 bp, Homo sapien
acatagaatgtgacgaagtaaggcatatctcag

SEQ ID NO: 997678 - DNA, 33 bp, Homo sapien
acatagaatgtgacgaggtaaggcatatctcag

SEQ ID NO: 997679 - DNA, 33 bp, Homo sapien
gtagttttccgaggacccttcccatcaaattca

SEQ ID NO: 997680 - DNA, 33 bp, Homo sapien
gtagttttccgaggactcttcccatcaaattca

SEQ ID NO: 997681 - DNA, 33 bp, Homo sapien
atcactctgtggctcacattctatttctactat

SEQ ID NO: 997682 - DNA, 33 bp, Homo sapien
atcactctgtggctcatattctatttctactat

SEQ ID NO: 997683 - DNA, 33 bp, Homo sapien
ctgaaggttgctatgaatatttttatttggtga

SEQ ID NO: 997684 - DNA, 33 bp, Homo sapien
ctgaaggttgctatgagtatttttatttggtga

SEQ ID NO: 997685 - DNA, 33 bp, Homo sapien
ctactggaatttgaacaatgttgggaggggact

SEQ ID NO: 997686 - DNA, 33 bp, Homo sapien
ctactggaatttgaaccatgttgggaggggact

SEQ ID NO: 997687 - DNA, 33 bp, Homo sapien
acttgaaccaaagcaaagctcctaaatatggaa

SEQ ID NO: 997688 - DNA, 33 bp, Homo sapien
acttgaaccaaagcaaggctcctaaatatggaa

SEQ ID NO: 997689 - DNA, 33 bp, Homo sapien
caattaagacagcatgacaattggtgcaaaaat

SEQ ID NO: 997690 - DNA, 33 bp, Homo sapien
caattaagacagcatggcaattggtgcaaaaat

SEQ ID NO: 997691 - DNA, 33 bp, Homo sapien
atgaaatatgacatcaagctagggagatttgag

SEQ ID NO: 997692 - DNA, 33 bp, Homo sapien
atgaaatatgacatcaggctagggagatttgag

SEQ ID NO: 997693 - DNA, 33 bp, Homo sapien
gttgctgtgataattggattatgaaacggagac

SEQ ID NO: 997694 - DNA, 33 bp, Homo sapien
gttgctgtgataattgtattatgaaacggagac

SEQ ID NO: 997695 - DNA, 33 bp, Homo sapien
tcactgagattacgtaacctcatggataacctg

SEQ ID NO: 997696 - DNA, 33 bp, Homo sapien
tcactgagattacgtaccctcatggataacctg

SEQ ID NO: 997697 - DNA, 33 bp, Homo sapien
aatgtcaatcaccttaaaaacattacggaagag

SEQ ID NO: 997698 - DNA, 33 bp, Homo sapien
aatgtcaatcaccttagaaacattacggaagag

SEQ ID NO: 997699 - DNA, 33 bp, Homo sapien
ttctcttctgtctgccacttagttgttgaccat

SEQ ID NO: 997700 - DNA, 33 bp, Homo sapien
ttctcttctgtctgccgcttagttgttgaccat

SEQ ID NO: 997701 - DNA, 33 bp, Homo sapien
attctaggtgtccaataaacacaatttgaatcc

SEQ ID NO: 997702 - DNA, 33 bp, Homo sapien
attctaggtgtccaatgaacacaatttgaatcc

SEQ ID NO: 997703 - DNA, 33 bp, Homo sapien
agtttgccacctcaaaatgctctaagacaagtg

SEQ ID NO: 997704 - DNA, 33 bp, Homo sapien
agtttgccacctcaaagtgctctaagacaagtg

SEQ ID NO: 997705 - DNA, 33 bp, Homo sapien
aagacaagtgaacaaacggttataacatagggt

SEQ ID NO: 997706 - DNA, 33 bp, Homo sapien
aagacaagtgaacaaatggttataacatagggt

SEQ ID NO: 997707 - DNA, 33 bp, Homo sapien
attgtgcatctctttacggcatttcacagatat

SEQ ID NO: 997708 - DNA, 33 bp, Homo sapien
attgtgcatctctttatggcatttcacagatat

SEQ ID NO: 997709 - DNA, 33 bp, Homo sapien
tattgttggaaatgtaaggacttttgagtttgg

SEQ ID NO: 997710 - DNA, 33 bp, Homo sapien
tattgttggaaatgtagggacttttgagtttgg

SEQ ID NO: 997711 - DNA, 33 bp, Homo sapien
ctccagtgttctgcataaaaaccaaactacttc

SEQ ID NO: 997712 - DNA, 33 bp, Homo sapien
ctccagtgttctgcatgaaaaccaaactacttc

SEQ ID NO: 997713 - DNA, 33 bp, Homo sapien
ttctggatgtattctcaaggcagcactaacaga

SEQ ID NO: 997714 - DNA, 33 bp, Homo sapien
ttctggatgtattctcgaggcagcactaacaga

SEQ ID NO: 997715 - DNA, 33 bp, Homo sapien
gagtgagctcaccaagaaagctggaggactatg

SEQ ID NO: 997716 - DNA, 33 bp, Homo sapien
gagtgagctcaccaaggaagctggaggactatg

SEQ ID NO: 997717 - DNA, 33 bp, Homo sapien
ttccttgattgttttcacagattaatatgaaat

SEQ ID NO: 997718 - DNA, 33 bp, Homo sapien
ttccttgattgttttcgcagattaatatgaaat

SEQ ID NO: 997719 - DNA, 33 bp, Homo sapien
aattaaactgtttataacttgtgtgtatatttg

SEQ ID NO: 997720 - DNA, 33 bp, Homo sapien
aattaaactgtttataccttgtgtgtatatttg

SEQ ID NO: 997721 - DNA, 33 bp, Homo sapien
acaaaaaaatagcatacggagaatgacaatgga

SEQ ID NO: 997722 - DNA, 33 bp, Homo sapien
acaaaaaaatagcatatggagaatgacaatgga

SEQ ID NO: 997723 - DNA, 33 bp, Homo sapien
tttgtagagtagaataacatagaacctgcactt

SEQ ID NO: 997724 - DNA, 33 bp, Homo sapien
tttgtagagtagaatagcatagaacctgcactt

SEQ ID NO: 997725 - DNA, 33 bp, Homo sapien
ccaaaatatcagtcaacagaaaattgtggcaat

SEQ ID NO: 997726 - DNA, 33 bp, Homo sapien
ccaaaatatcagtcaatagaaaattgtggcaat

SEQ ID NO: 997727 - DNA, 33 bp, Homo sapien
aattctgttaataaaacgccattgtcaagagac

SEQ ID NO: 997728 - DNA, 33 bp, Homo sapien
aattctgttaataaaatgccattgtcaagagac

SEQ ID NO: 997729 - DNA, 33 bp, Homo sapien
tgatacacaaaatacaatgaagtcagcaatagg

SEQ ID NO: 997730 - DNA, 33 bp, Homo sapien
tgatacacaaaatacagtgaagtcagcaatagg

SEQ ID NO: 997731 - DNA, 33 bp, Homo sapien
ctagaagaccttttacaaagttatgtggaactg

SEQ ID NO: 997732 - DNA, 33 bp, Homo sapien
ctagaagaccttttacgaagttatgtggaactg

SEQ ID NO: 997733 - DNA, 33 bp, Homo sapien
acttctaaataccacaggaagagaactaggagt

SEQ ID NO: 997734 - DNA, 33 bp, Homo sapien
acttctaaataccacatgaagagaactaggagt

SEQ ID NO: 997735 - DNA, 33 bp, Homo sapien
cccccacactaacccagctcctagcacaggaag

SEQ ID NO: 997736 - DNA, 33 bp, Homo sapien
cccccacactaacccatctcctagcacaggaag

SEQ ID NO: 997737 - DNA, 33 bp, Homo sapien
atcctcacgctgctataaggagatacctgagac

SEQ ID NO: 997738 - DNA, 33 bp, Homo sapien
atcctcacgctgctatgaggagatacctgagac

SEQ ID NO: 997739 - DNA, 33 bp, Homo sapien
gaaagtaatgactcaactggaaaaaaatcaagg

SEQ ID NO: 997740 - DNA, 33 bp, Homo sapien
gaaagtaatgactcaattggaaaaaaatcaagg

SEQ ID NO: 997741 - DNA, 33 bp, Homo sapien
tggattggatctacacaaaaatcctcaactact

SEQ ID NO: 997742 - DNA, 33 bp, Homo sapien
tggattggatctacaccaaaatcctcaactact

SEQ ID NO: 997743 - DNA, 33 bp, Homo sapien
ctgtttcccaggtacaataccagcttgctttca

SEQ ID NO: 997744 - DNA, 33 bp, Homo sapien
ctgtttcccaggtacagtaccagcttgctttca

SEQ ID NO: 997745 - DNA, 33 bp, Homo sapien
ggggctgcagtttaccagccaggcaaatgatac

SEQ ID NO: 997746 - DNA, 33 bp, Homo sapien
ggggctgcagtttaccggccaggcaaatgatac

SEQ ID NO: 997747 - DNA, 33 bp, Homo sapien
acatggacataaagaccggaacgataaacactg

SEQ ID NO: 997748 - DNA, 33 bp, Homo sapien
acatggacataaagactggaacgataaacactg

SEQ ID NO: 997749 - DNA, 33 bp, Homo sapien
ggcctggtggctggagaatgatagttttctctg

SEQ ID NO: 997750 - DNA, 33 bp, Homo sapien
ggcctggtggctggaggatgatagttttctctg

SEQ ID NO: 997751 - DNA, 33 bp, Homo sapien
gccaagcagaggtccactgcataacaactcttt

SEQ ID NO: 997752 - DNA, 33 bp, Homo sapien
gccaagcagaggtccagtgcataacaactcttt

SEQ ID NO: 997753 - DNA, 33 bp, Homo sapien
tccaaaaatgacaaaacttgaaggatacatggg

SEQ ID NO: 997754 - DNA, 33 bp, Homo sapien
tccaaaaatgacaaaatttgaaggatacatggg

SEQ ID NO: 997755 - DNA, 33 bp, Homo sapien
gggaccaggactatggaagagccagaggggtta

SEQ ID NO: 997756 - DNA, 33 bp, Homo sapien
gggaccaggactatgggagagccagaggggtta

SEQ ID NO: 997757 - DNA, 33 bp, Homo sapien
atcattctgacctcaacgtcacaggatcctggg

SEQ ID NO: 997758 - DNA, 33 bp, Homo sapien
atcattctgacctcaatgtcacaggatcctggg

SEQ ID NO: 997759 - DNA, 33 bp, Homo sapien
caatgtgaaatagttaccacaatcaagctcatt

SEQ ID NO: 997760 - DNA, 33 bp, Homo sapien
caatgtgaaatagttagcacaatcaagctcatt

SEQ ID NO: 997761 - DNA, 33 bp, Homo sapien
tagttaataactataactgaagtcaccatgctg

SEQ ID NO: 997762 - DNA, 33 bp, Homo sapien
tagttaataactataattgaagtcaccatgctg

SEQ ID NO: 997763 - DNA, 33 bp, Homo sapien
acaaaaacatgaagaacggcacagtgacaagca

SEQ ID NO: 997764 - DNA, 33 bp, Homo sapien
acaaaaacatgaagaatggcacagtgacaagca

SEQ ID NO: 997765 - DNA, 33 bp, Homo sapien
acacagtcccaagtaggcattggttctgagact

SEQ ID NO: 997766 - DNA, 33 bp, Homo sapien
acacagtcccaagtagtcattggttctgagact

SEQ ID NO: 997767 - DNA, 33 bp, Homo sapien
ttccatagtttaagaaagaagaagtaaagtgct

SEQ ID NO: 997768 - DNA, 33 bp, Homo sapien
ttccatagtttaagaaggaagaagtaaagtgct

SEQ ID NO: 997769 - DNA, 33 bp, Homo sapien
tcacctgtaaaaaatgcactaatggtctcttta

SEQ ID NO: 997770 - DNA, 33 bp, Homo sapien
tcacctgtaaaaaatggactaatggtctcttta

SEQ ID NO: 997771 - DNA, 33 bp, Homo sapien
atattaactacctgcaactagatgtggctactt

SEQ ID NO: 997772 - DNA, 33 bp, Homo sapien
atattaactacctgcagctagatgtggctactt

SEQ ID NO: 997773 - DNA, 33 bp, Homo sapien
tttcatcctgtcccataacttatttggcttgat

SEQ ID NO: 997774 - DNA, 33 bp, Homo sapien
tttcatcctgtcccatcacttatttggcttgat

SEQ ID NO: 997775 - DNA, 33 bp, Homo sapien
tcctgtggcaaaatgaacagtggagggttgaat

SEQ ID NO: 997776 - DNA, 33 bp, Homo sapien
tcctgtggcaaaatgagcagtggagggttgaat

SEQ ID NO: 997777 - DNA, 33 bp, Homo sapien
tcacacatactggaaaatcagcacgggcttatg

SEQ ID NO: 997778 - DNA, 33 bp, Homo sapien
tcacacatactggaaattcagcacgggcttatg

SEQ ID NO: 997779 - DNA, 33 bp, Homo sapien
gagagccaacagggtgaatattctagtctgcat

SEQ ID NO: 997780 - DNA, 33 bp, Homo sapien
gagagccaacagggtgtatattctagtctgcat

SEQ ID NO: 997781 - DNA, 33 bp, Homo sapien
agaaggccaagtggaacatgaaagaccttctga

SEQ ID NO: 997782 - DNA, 33 bp, Homo sapien
agaaggccaagtggaatatgaaagaccttctga

SEQ ID NO: 997783 - DNA, 33 bp, Homo sapien
ttctgtttccaaagacagagaaaaacccacatg

SEQ ID NO: 997784 - DNA, 33 bp, Homo sapien
ttctgtttccaaagacggagaaaaacccacatg

SEQ ID NO: 997785 - DNA, 33 bp, Homo sapien
acagtgaccagataacggtaattaaatgaatgt

SEQ ID NO: 997786 - DNA, 33 bp, Homo sapien
acagtgaccagataactgtaattaaatgaatgt

SEQ ID NO: 997787 - DNA, 33 bp, Homo sapien
gaatatccactgtgtgacaaactgttgttacat

SEQ ID NO: 997788 - DNA, 33 bp, Homo sapien
gaatatccactgtgtgtcaaactgttgttacat

SEQ ID NO: 997789 - DNA, 33 bp, Homo sapien
ataaaattggtgattactaaaacaggaataagg

SEQ ID NO: 997790 - DNA, 33 bp, Homo sapien
ataaaattggtgattattaaaacaggaataagg

SEQ ID NO: 997791 - DNA, 33 bp, Homo sapien
cattttagctcacaaaaatcatataaggtagtt

SEQ ID NO: 997792 - DNA, 33 bp, Homo sapien
cattttagctcacaaacatcatataaggtagtt

SEQ ID NO: 997793 - DNA, 33 bp, Homo sapien
cagcagagtatcctagaagaaaccttttggagt

SEQ ID NO: 997794 - DNA, 33 bp, Homo sapien
cagcagagtatcctagcagaaaccttttggagt

SEQ ID NO: 997795 - DNA, 33 bp, Homo sapien
atatgacatggctgtacaagaagtttcagacag

SEQ ID NO: 997796 - DNA, 33 bp, Homo sapien
atatgacatggctgtagaagaagtttcagacag

SEQ ID NO: 997797 - DNA, 33 bp, Homo sapien
cagctaacatatttaacggtggaaaactgaaac

SEQ ID NO: 997798 - DNA, 33 bp, Homo sapien
cagctaacatatttaatggtggaaaactgaaac

SEQ ID NO: 997799 - DNA, 33 bp, Homo sapien
aggatcactcggatgaaaaaatgccccttagcc

SEQ ID NO: 997800 - DNA, 33 bp, Homo sapien
aggatcactcggatgacaaaatgccccttagcc

SEQ ID NO: 997801 - DNA, 33 bp, Homo sapien
tggaggctattagaaccggccattagaatggcc

SEQ ID NO: 997802 - DNA, 33 bp, Homo sapien
tggaggctattagaactggccattagaatggcc

SEQ ID NO: 997803 - DNA, 33 bp, Homo sapien
gtagcttgtatatgtcaaatgtaattcacttcc

SEQ ID NO: 997804 - DNA, 33 bp, Homo sapien
gtagcttgtatatgtcgaatgtaattcacttcc

SEQ ID NO: 997805 - DNA, 33 bp, Homo sapien
atctatgaaacagatgaaattgaacttaataat

SEQ ID NO: 997806 - DNA, 33 bp, Homo sapien
atctatgaaacagatggaattgaacttaataat

SEQ ID NO: 997807 - DNA, 33 bp, Homo sapien
cttgtttgagaattgaaaataaatgttgtagac

SEQ ID NO: 997808 - DNA, 33 bp, Homo sapien
cttgtttgagaattgagaataaatgttgtagac

SEQ ID NO: 997809 - DNA, 33 bp, Homo sapien
ttctcacgttctctacagcacaaaagtttctca

SEQ ID NO: 997810 - DNA, 33 bp, Homo sapien
ttctcacgttctctaccgcacaaaagtttctca

SEQ ID NO: 997811 - DNA, 33 bp, Homo sapien
ctttgctttcctattacgaggaatgactttcct

SEQ ID NO: 997812 - DNA, 33 bp, Homo sapien
ctttgctttcctattatgaggaatgactttcct

SEQ ID NO: 997813 - DNA, 33 bp, Homo sapien
aaagtgctcatttctacgtggaggttttgcaca

SEQ ID NO: 997814 - DNA, 33 bp, Homo sapien
aaagtgctcatttctatgtggaggttttgcaca

SEQ ID NO: 997815 - DNA, 33 bp, Homo sapien
tagcaggacctaagtaagggatcagcaagaccc

SEQ ID NO: 997816 - DNA, 33 bp, Homo sapien
tagcaggacctaagtaggggatcagcaagaccc

SEQ ID NO: 997817 - DNA, 33 bp, Homo sapien
tacaggggctgtgatacagttcggatctgtgtc

SEQ ID NO: 997818 - DNA, 33 bp, Homo sapien
tacaggggctgtgatatagttcggatctgtgtc

SEQ ID NO: 997819 - DNA, 33 bp, Homo sapien
tctgtaaaatacaggcaaaagggtgtcctgcca

SEQ ID NO: 997820 - DNA, 33 bp, Homo sapien
tctgtaaaatacaggcgaaagggtgtcctgcca

SEQ ID NO: 997821 - DNA, 33 bp, Homo sapien
ctctgaaacttttatgaaaatcctgtcatgctc

SEQ ID NO: 997822 - DNA, 33 bp, Homo sapien
ctctgaaacttttatgcaaatcctgtcatgctc

SEQ ID NO: 997823 - DNA, 33 bp, Homo sapien
ctagcaagatatgtgacgagtggtgagtccaga

SEQ ID NO: 997824 - DNA, 33 bp, Homo sapien
ctagcaagatatgtgatgagtggtgagtccaga

SEQ ID NO: 997825 - DNA, 33 bp, Homo sapien
tgtttgccaagcgactcacctacaaatactttc

SEQ ID NO: 997826 - DNA, 33 bp, Homo sapien
tgtttgccaagcgacttacctacaaatactttc

SEQ ID NO: 997827 - DNA, 33 bp, Homo sapien
ccagcaggttgctagaagtaaggctgcctgatc

SEQ ID NO: 997828 - DNA, 33 bp, Homo sapien
ccagcaggttgctagaggtaaggctgcctgatc

SEQ ID NO: 997829 - DNA, 33 bp, Homo sapien
gcctggagatgatctacggtctctacccttatt

SEQ ID NO: 997830 - DNA, 33 bp, Homo sapien
gcctggagatgatctatggtctctacccttatt

SEQ ID NO: 997831 - DNA, 33 bp, Homo sapien
cagaataatcccatcaggtaccaagaatgcaac

SEQ ID NO: 997832 - DNA, 33 bp, Homo sapien
cagaataatcccatcatgtaccaagaatgcaac

SEQ ID NO: 997833 - DNA, 33 bp, Homo sapien
gtgttccttatgggtacgcagaaagaacaaaca

SEQ ID NO: 997834 - DNA, 33 bp, Homo sapien
gtgttccttatgggtaggcagaaagaacaaaca

SEQ ID NO: 997835 - DNA, 33 bp, Homo sapien
aagcaatcactgaagccctatgtgaaatgagta

SEQ ID NO: 997836 - DNA, 33 bp, Homo sapien
aagcaatcactgaagctctatgtgaaatgagta

SEQ ID NO: 997837 - DNA, 33 bp, Homo sapien
ggcttgtaagtgactaaatatcatacagaggga

SEQ ID NO: 997838 - DNA, 33 bp, Homo sapien
ggcttgtaagtgactagatatcatacagaggga

SEQ ID NO: 997839 - DNA, 33 bp, Homo sapien
accatgctggaccttcgcaaagccctctttagc

SEQ ID NO: 997840 - DNA, 33 bp, Homo sapien
accatgctggaccttctcaaagccctctttagc

SEQ ID NO: 997841 - DNA, 33 bp, Homo sapien
ttatgaagcattagagaccacatttctagtact

SEQ ID NO: 997842 - DNA, 33 bp, Homo sapien
ttatgaagcattagaggccacatttctagtact

SEQ ID NO: 997843 - DNA, 33 bp, Homo sapien
gaaaaccaaagcccccactcttcatcagatgca

SEQ ID NO: 997844 - DNA, 33 bp, Homo sapien
gaaaaccaaagcccccgctcttcatcagatgca

SEQ ID NO: 997845 - DNA, 33 bp, Homo sapien
gatgaccagatgaagaaaacaagaacaataaca

SEQ ID NO: 997846 - DNA, 33 bp, Homo sapien
gatgaccagatgaagagaacaagaacaataaca

SEQ ID NO: 997847 - DNA, 33 bp, Homo sapien
tttccagaaaattgcactcttctcttttaagaa

SEQ ID NO: 997848 - DNA, 33 bp, Homo sapien
tttccagaaaattgcagtcttctcttttaagaa

SEQ ID NO: 997849 - DNA, 33 bp, Homo sapien
atattcagtgacaacaacttttaggagcttgaa

SEQ ID NO: 997850 - DNA, 33 bp, Homo sapien
atattcagtgacaacagcttttaggagcttgaa

SEQ ID NO: 997851 - DNA, 33 bp, Homo sapien
gtaaataggtcaattacatgtcatattcaaaga

SEQ ID NO: 997852 - DNA, 33 bp, Homo sapien
gtaaataggtcaattatatgtcatattcaaaga

SEQ ID NO: 997853 - DNA, 33 bp, Homo sapien
gcctgttccttcacctaaaccatatgatgttgt

SEQ ID NO: 997854 - DNA, 33 bp, Homo sapien
gcctgttccttcacctgaaccatatgatgttgt

SEQ ID NO: 997855 - DNA, 33 bp, Homo sapien
ctcttctattgtggcactgaaacataaatttgt

SEQ ID NO: 997856 - DNA, 33 bp, Homo sapien
ctcttctattgtggcattgaaacataaatttgt

SEQ ID NO: 997857 - DNA, 33 bp, Homo sapien
atggtaggcagggccgaagcactgatggaagtt

SEQ ID NO: 997858 - DNA, 33 bp, Homo sapien
atggtaggcagggccgcagcactgatggaagtt

SEQ ID NO: 997859 - DNA, 33 bp, Homo sapien
acatatataccatagaagtggataaatatagcc

SEQ ID NO: 997860 - DNA, 33 bp, Homo sapien
acatatataccatagatgtggataaatatagcc

SEQ ID NO: 997861 - DNA, 33 bp, Homo sapien
cgtgggttttggagaaagtaaacattttagtcc

SEQ ID NO: 997862 - DNA, 33 bp, Homo sapien
cgtgggttttggagaaggtaaacattttagtcc

SEQ ID NO: 997863 - DNA, 33 bp, Homo sapien
caaagtttggcccacactaactgatcaaaaaat

SEQ ID NO: 997864 - DNA, 33 bp, Homo sapien
caaagtttggcccacagtaactgatcaaaaaat

SEQ ID NO: 997865 - DNA, 33 bp, Homo sapien
aacatgtatttacaaaagttacaaagaggccag

SEQ ID NO: 997866 - DNA, 33 bp, Homo sapien
aacatgtatttacaaaggttacaaagaggccag

SEQ ID NO: 997867 - DNA, 33 bp, Homo sapien
agggatttgaggggtacaaaaaagtggaggtga

SEQ ID NO: 997868 - DNA, 33 bp, Homo sapien
agggatttgaggggtagaaaaaagtggaggtga

SEQ ID NO: 997869 - DNA, 33 bp, Homo sapien
agacttcgaattgtgacattatgagatgacaag

SEQ ID NO: 997870 - DNA, 33 bp, Homo sapien
agacttcgaattgtgagattatgagatgacaag

SEQ ID NO: 997871 - DNA, 33 bp, Homo sapien
aacactttggaataaaccactatgggccatagg

SEQ ID NO: 997872 - DNA, 33 bp, Homo sapien
aacactttggaataaatcactatgggccatagg

SEQ ID NO: 997873 - DNA, 33 bp, Homo sapien
agggccagctatgtaaatgggatgacaactaga

SEQ ID NO: 997874 - DNA, 33 bp, Homo sapien
agggccagctatgtaagtgggatgacaactaga

SEQ ID NO: 997875 - DNA, 33 bp, Homo sapien
tttctcagagaaggtccagtcagattagggact

SEQ ID NO: 997876 - DNA, 33 bp, Homo sapien
tttctcagagaaggtcgagtcagattagggact

SEQ ID NO: 997877 - DNA, 33 bp, Homo sapien
cctaccttattctcagactctgatttctctttg

SEQ ID NO: 997878 - DNA, 33 bp, Homo sapien
cctaccttattctcagcctctgatttctctttg

SEQ ID NO: 997879 - DNA, 33 bp, Homo sapien
cttaaaatacacacaacggtttatactttacaa

SEQ ID NO: 997880 - DNA, 33 bp, Homo sapien
cttaaaatacacacaatggtttatactttacaa

SEQ ID NO: 997881 - DNA, 33 bp, Homo sapien
ccagagcagctttaaaccggaagctgagaggga

SEQ ID NO: 997882 - DNA, 33 bp, Homo sapien
ccagagcagctttaaatcggaagctgagaggga

SEQ ID NO: 997883 - DNA, 33 bp, Homo sapien
aacacatcttttgaaaattcagagaagaatgct

SEQ ID NO: 997884 - DNA, 33 bp, Homo sapien
aacacatcttttgaaagttcagagaagaatgct

SEQ ID NO: 997885 - DNA, 33 bp, Homo sapien
atgtcagcatcaatcacacctgtcctctaacta

SEQ ID NO: 997886 - DNA, 33 bp, Homo sapien
atgtcagcatcaatcatacctgtcctctaacta

SEQ ID NO: 997887 - DNA, 33 bp, Homo sapien
tctggtaaaaatgtctcactgttcctgaaaatt

SEQ ID NO: 997888 - DNA, 33 bp, Homo sapien
tctggtaaaaatgtcttactgttcctgaaaatt

SEQ ID NO: 997889 - DNA, 33 bp, Homo sapien
aatgggcagtcaggtacaacagtattacatttc

SEQ ID NO: 997890 - DNA, 33 bp, Homo sapien
aatgggcagtcaggtagaacagtattacatttc

SEQ ID NO: 997891 - DNA, 33 bp, Homo sapien
tccccgcactctagtaacatctacgccctactt

SEQ ID NO: 997892 - DNA, 33 bp, Homo sapien
tccccgcactctagtaccatctacgccctactt

SEQ ID NO: 997893 - DNA, 33 bp, Homo sapien
aactcattagaaaatacgctatggtgctaatac

SEQ ID NO: 997894 - DNA, 33 bp, Homo sapien
aactcattagaaaatatgctatggtgctaatac

SEQ ID NO: 997895 - DNA, 33 bp, Homo sapien
tctaaatcatggagaaagctttggtgatagttt

SEQ ID NO: 997896 - DNA, 33 bp, Homo sapien
tctaaatcatggagaaggctttggtgatagttt

SEQ ID NO: 997897 - DNA, 33 bp, Homo sapien
tcttaactcctattcaaaaactcatctaaaacc

SEQ ID NO: 997898 - DNA, 33 bp, Homo sapien
tcttaactcctattcacaaactcatctaaaacc

SEQ ID NO: 997899 - DNA, 33 bp, Homo sapien
atgaaggaacaatggaataagtcaagtcacata

SEQ ID NO: 997900 - DNA, 33 bp, Homo sapien
atgaaggaacaatggattaagtcaagtcacata

SEQ ID NO: 997901 - DNA, 33 bp, Homo sapien
agatgggtgtggcagagaggtctcacaggagcc

SEQ ID NO: 997902 - DNA, 33 bp, Homo sapien
agatgggtgtggcagataggtctcacaggagcc

SEQ ID NO: 997903 - DNA, 33 bp, Homo sapien
tccaacagcatggtagaagtttgcatccaggag

SEQ ID NO: 997904 - DNA, 33 bp, Homo sapien
tccaacagcatggtagcagtttgcatccaggag

SEQ ID NO: 997905 - DNA, 33 bp, Homo sapien
tcaagaagttcctaaagctgctgagtcttggca

SEQ ID NO: 997906 - DNA, 33 bp, Homo sapien
tcaagaagttcctaaatctgctgagtcttggca

SEQ ID NO: 997907 - DNA, 33 bp, Homo sapien
acttcttgagtgacaactgaacttgcccagagg

SEQ ID NO: 997908 - DNA, 33 bp, Homo sapien
acttcttgagtgacaattgaacttgcccagagg

SEQ ID NO: 997909 - DNA, 33 bp, Homo sapien
ttttataaagttttaaaccatgctgatatatag

SEQ ID NO: 997910 - DNA, 33 bp, Homo sapien
ttttataaagttttaagccatgctgatatatag

SEQ ID NO: 997911 - DNA, 33 bp, Homo sapien
ccacttggatatattgcaaacactttttgaatg

SEQ ID NO: 997912 - DNA, 33 bp, Homo sapien
ccacttggatatattggaaacactttttgaatg

SEQ ID NO: 997913 - DNA, 33 bp, Homo sapien
ctccatctttccaaccaagcttttagtcaatgt

SEQ ID NO: 997914 - DNA, 33 bp, Homo sapien
ctccatctttccaaccgagcttttagtcaatgt

SEQ ID NO: 997915 - DNA, 33 bp, Homo sapien
ccccagaatttgtaaacgctttggttccttatc

SEQ ID NO: 997916 - DNA, 33 bp, Homo sapien
ccccagaatttgtaaaggctttggttccttatc

SEQ ID NO: 997917 - DNA, 33 bp, Homo sapien
ctatttataaggccaaatctggagggttaaagg

SEQ ID NO: 997918 - DNA, 33 bp, Homo sapien
ctatttataaggccaagtctggagggttaaagg

SEQ ID NO: 997919 - DNA, 33 bp, Homo sapien
agactcaaaaattggccgaataaatatattcca

SEQ ID NO: 997920 - DNA, 33 bp, Homo sapien
agactcaaaaattggctgaataaatatattcca

SEQ ID NO: 997921 - DNA, 33 bp, Homo sapien
agtgctcagccaagaccatttataagcgaagtt

SEQ ID NO: 997922 - DNA, 33 bp, Homo sapien
agtgctcagccaagacgatttataagcgaagtt

SEQ ID NO: 997923 - DNA, 33 bp, Homo sapien
aatgggataaggtgtacaagtggcaggaggtgt

SEQ ID NO: 997924 - DNA, 33 bp, Homo sapien
aatgggataaggtgtataagtggcaggaggtgt

SEQ ID NO: 997925 - DNA, 33 bp, Homo sapien
catatattaatttataactttaccacagctcag

SEQ ID NO: 997926 - DNA, 33 bp, Homo sapien
catatattaatttatagctttaccacagctcag

SEQ ID NO: 997927 - DNA, 33 bp, Homo sapien
agtcatctgagtgttacggccactctcatcggt

SEQ ID NO: 997928 - DNA, 33 bp, Homo sapien
agtcatctgagtgttatggccactctcatcggt

SEQ ID NO: 997929 - DNA, 33 bp, Homo sapien
ttgatcattcacttacaattctgtgcaattaga

SEQ ID NO: 997930 - DNA, 33 bp, Homo sapien
ttgatcattcacttaccattctgtgcaattaga

SEQ ID NO: 997931 - DNA, 33 bp, Homo sapien
ttgtgcaattgctgaaactgtttattagctaaa

SEQ ID NO: 997932 - DNA, 33 bp, Homo sapien
ttgtgcaattgctgaatctgtttattagctaaa

SEQ ID NO: 997933 - DNA, 33 bp, Homo sapien
agcaaccttgaactaagcaagtgaaattggaaa

SEQ ID NO: 997934 - DNA, 33 bp, Homo sapien
agcaaccttgaactaatcaagtgaaattggaaa

SEQ ID NO: 997935 - DNA, 33 bp, Homo sapien
ctcatccacacatcaactctcatatagacttac

SEQ ID NO: 997936 - DNA, 33 bp, Homo sapien
ctcatccacacatcaattctcatatagacttac

SEQ ID NO: 997937 - DNA, 33 bp, Homo sapien
acttgcaaagcgtggccatgcttctttctgttg

SEQ ID NO: 997938 - DNA, 33 bp, Homo sapien
acttgcaaagcgtggctatgcttctttctgttg

SEQ ID NO: 997939 - DNA, 33 bp, Homo sapien
ggtgctgtctgggtacaagaccttacaaaatga

SEQ ID NO: 997940 - DNA, 33 bp, Homo sapien
ggtgctgtctgggtacgagaccttacaaaatga

SEQ ID NO: 997941 - DNA, 33 bp, Homo sapien
tggagaacttggaaacacagactagaaaatggc

SEQ ID NO: 997942 - DNA, 33 bp, Homo sapien
tggagaacttggaaacgcagactagaaaatggc

SEQ ID NO: 997943 - DNA, 33 bp, Homo sapien
gagtgcagattaacaacgtggggtgttgcctag

SEQ ID NO: 997944 - DNA, 33 bp, Homo sapien
gagtgcagattaacaatgtggggtgttgcctag

SEQ ID NO: 997945 - DNA, 33 bp, Homo sapien
gaagctaaatggactaaactgagcaatcctcgc

SEQ ID NO: 997946 - DNA, 33 bp, Homo sapien
gaagctaaatggactacactgagcaatcctcgc

SEQ ID NO: 997947 - DNA, 33 bp, Homo sapien
tcagggtcataaggcacgaagcagcaactctga

SEQ ID NO: 997948 - DNA, 33 bp, Homo sapien
tcagggtcataaggcatgaagcagcaactctga

SEQ ID NO: 997949 - DNA, 33 bp, Homo sapien
gctcacaagagctatcaaaaattggactaaaca

SEQ ID NO: 997950 - DNA, 33 bp, Homo sapien
gctcacaagagctatcgaaaattggactaaaca

SEQ ID NO: 997951 - DNA, 33 bp, Homo sapien
caaggctaaccccctacgatcagcagctggcaa

SEQ ID NO: 997952 - DNA, 33 bp, Homo sapien
caaggctaaccccctatgatcagcagctggcaa

SEQ ID NO: 997953 - DNA, 33 bp, Homo sapien
aagcggggggcctatcagaaagcaagggtttgt

SEQ ID NO: 997954 - DNA, 33 bp, Homo sapien
aagcggggggcctatcggaaagcaagggtttgt

SEQ ID NO: 997955 - DNA, 33 bp, Homo sapien
gaattggaagcttaaccgaagtctaaaggaggc

SEQ ID NO: 997956 - DNA, 33 bp, Homo sapien
gaattggaagcttaactgaagtctaaaggaggc

SEQ ID NO: 997957 - DNA, 33 bp, Homo sapien
aatcgcagtcacataaacttcaaaaacatggct

SEQ ID NO: 997958 - DNA, 33 bp, Homo sapien
aatcgcagtcacataagcttcaaaaacatggct

SEQ ID NO: 997959 - DNA, 33 bp, Homo sapien
gtcagtagacgagaaaagtggaaaataatccta

SEQ ID NO: 997960 - DNA, 33 bp, Homo sapien
gtcagtagacgagaaaggtggaaaataatccta

SEQ ID NO: 997961 - DNA, 33 bp, Homo sapien
attcttatcttcagcaactgttatactttaatt

SEQ ID NO: 997962 - DNA, 33 bp, Homo sapien
attcttatcttcagcacctgttatactttaatt

SEQ ID NO: 997963 - DNA, 33 bp, Homo sapien
ccaaaggaggctttcccagattagacatgactg

SEQ ID NO: 997964 - DNA, 33 bp, Homo sapien
ccaaaggaggctttcctagattagacatgactg

SEQ ID NO: 997965 - DNA, 33 bp, Homo sapien
tttgaactgagatctccgaaagctgggaaagac

SEQ ID NO: 997966 - DNA, 33 bp, Homo sapien
tttgaactgagatctctgaaagctgggaaagac

SEQ ID NO: 997967 - DNA, 33 bp, Homo sapien
agtgagtggctctagggcattttctcctggctc

SEQ ID NO: 997968 - DNA, 33 bp, Homo sapien
agtgagtggctctaggtcattttctcctggctc

SEQ ID NO: 997969 - DNA, 33 bp, Homo sapien
acaagttccagatcacagtacctagcagtgacc

SEQ ID NO: 997970 - DNA, 33 bp, Homo sapien
acaagttccagatcacggtacctagcagtgacc

SEQ ID NO: 997971 - DNA, 33 bp, Homo sapien
cttgaccagtctcgtgaagtgtcctgaaggaag

SEQ ID NO: 997972 - DNA, 33 bp, Homo sapien
cttgaccagtctcgtggagtgtcctgaaggaag

SEQ ID NO: 997973 - DNA, 33 bp, Homo sapien
agtaaaactggcagaacgaggcggttgccttgt

SEQ ID NO: 997974 - DNA, 33 bp, Homo sapien
agtaaaactggcagaatgaggcggttgccttgt

SEQ ID NO: 997975 - DNA, 33 bp, Homo sapien
catgcctcaagtcataagttccctttcctttac

SEQ ID NO: 997976 - DNA, 33 bp, Homo sapien
catgcctcaagtcataggttccctttcctttac

SEQ ID NO: 997977 - DNA, 33 bp, Homo sapien
ttatggctgagtaatacataccacactttcttt

SEQ ID NO: 997978 - DNA, 33 bp, Homo sapien
ttatggctgagtaatatataccacactttcttt

SEQ ID NO: 997979 - DNA, 33 bp, Homo sapien
ggagagatggtaaagcccatgcaggaagaaggg

SEQ ID NO: 997980 - DNA, 33 bp, Homo sapien
ggagagatggtaaagctcatgcaggaagaaggg

SEQ ID NO: 997981 - DNA, 33 bp, Homo sapien
gctctctgggttgaataaacatatagcccactg

SEQ ID NO: 997982 - DNA, 33 bp, Homo sapien
gctctctgggttgaatgaacatatagcccactg

SEQ ID NO: 997983 - DNA, 33 bp, Homo sapien
catatgtctggtgcaactctccatgtaagatat

SEQ ID NO: 997984 - DNA, 33 bp, Homo sapien
catatgtctggtgcaattctccatgtaagatat

SEQ ID NO: 997985 - DNA, 33 bp, Homo sapien
aataagtgagtctcaaatctttatctcagccct

SEQ ID NO: 997986 - DNA, 33 bp, Homo sapien
aataagtgagtctcaagtctttatctcagccct

SEQ ID NO: 997987 - DNA, 33 bp, Homo sapien
gtcaataccttacctaaaactaaaatgtgaaat

SEQ ID NO: 997988 - DNA, 33 bp, Homo sapien
gtcaataccttacctacaactaaaatgtgaaat

SEQ ID NO: 997989 - DNA, 33 bp, Homo sapien
caagaaaaaagctaaacgagacaaatattgtag

SEQ ID NO: 997990 - DNA, 33 bp, Homo sapien
caagaaaaaagctaaaggagacaaatattgtag

SEQ ID NO: 997991 - DNA, 33 bp, Homo sapien
aggtagccgttttctacggaaacttcacactaa

SEQ ID NO: 997992 - DNA, 33 bp, Homo sapien
aggtagccgttttctatggaaacttcacactaa

SEQ ID NO: 997993 - DNA, 33 bp, Homo sapien
catctactgctacccaaaagttgccatcagctc

SEQ ID NO: 997994 - DNA, 33 bp, Homo sapien
catctactgctacccagaagttgccatcagctc

SEQ ID NO: 997995 - DNA, 33 bp, Homo sapien
cagacagcaagttataacctagtgactaggaca

SEQ ID NO: 997996 - DNA, 33 bp, Homo sapien
cagacagcaagttataccctagtgactaggaca

SEQ ID NO: 997997 - DNA, 33 bp, Homo sapien
tttgtcatcgtatgaaaaacatagtgtacttag

SEQ ID NO: 997998 - DNA, 33 bp, Homo sapien
tttgtcatcgtatgaacaacatagtgtacttag

SEQ ID NO: 997999 - DNA, 33 bp, Homo sapien
cttacctcaagtatccagaagttgtcaattctt

SEQ ID NO: 998000 - DNA, 33 bp, Homo sapien
cttacctcaagtatccggaagttgtcaattctt

SEQ ID NO: 998001 - DNA, 33 bp, Homo sapien
agtgtgtcttacagtgaaatgacagttcagaca

SEQ ID NO: 998002 - DNA, 33 bp, Homo sapien
agtgtgtcttacagtggaatgacagttcagaca

SEQ ID NO: 998003 - DNA, 33 bp, Homo sapien
ctccaagacacctggccccattgcttagatagc

SEQ ID NO: 998004 - DNA, 33 bp, Homo sapien
ctccaagacacctggctccattgcttagatagc

SEQ ID NO: 998005 - DNA, 33 bp, Homo sapien
tagatattaaattatcagacagaagatatcatg

SEQ ID NO: 998006 - DNA, 33 bp, Homo sapien
tagatattaaattatcggacagaagatatcatg

SEQ ID NO: 998007 - DNA, 33 bp, Homo sapien
aactgcaaatttttcaccaattaaagaagaata

SEQ ID NO: 998008 - DNA, 33 bp, Homo sapien
aactgcaaatttttcatcaattaaagaagaata

SEQ ID NO: 998009 - DNA, 33 bp, Homo sapien
ccttgtggggcatgcaagaataggatacccctt

SEQ ID NO: 998010 - DNA, 33 bp, Homo sapien
ccttgtggggcatgcaggaataggatacccctt

SEQ ID NO: 998011 - DNA, 33 bp, Homo sapien
ggaggccacatggcaaactgatcacacatctcc

SEQ ID NO: 998012 - DNA, 33 bp, Homo sapien
ggaggccacatggcaacctgatcacacatctcc

SEQ ID NO: 998013 - DNA, 33 bp, Homo sapien
tgtcattatcaagagccagaaacatttcagctt

SEQ ID NO: 998014 - DNA, 33 bp, Homo sapien
tgtcattatcaagagctagaaacatttcagctt

SEQ ID NO: 998015 - DNA, 33 bp, Homo sapien
ttttagttactaataaacactacttcaatttag

SEQ ID NO: 998016 - DNA, 33 bp, Homo sapien
ttttagttactaataagcactacttcaatttag

SEQ ID NO: 998017 - DNA, 33 bp, Homo sapien
ctatgttggtcatagccgattctctcctctgct

SEQ ID NO: 998018 - DNA, 33 bp, Homo sapien
ctatgttggtcatagctgattctctcctctgct

SEQ ID NO: 998019 - DNA, 33 bp, Homo sapien
gttttctgaaaacatacgtcctgttgaaagttt

SEQ ID NO: 998020 - DNA, 33 bp, Homo sapien
gttttctgaaaacatatgtcctgttgaaagttt

SEQ ID NO: 998021 - DNA, 33 bp, Homo sapien
tcagcacagtgtaggacgcaattctcagtgtct

SEQ ID NO: 998022 - DNA, 33 bp, Homo sapien
tcagcacagtgtaggatgcaattctcagtgtct

SEQ ID NO: 998023 - DNA, 33 bp, Homo sapien
aaacacaaaacgaaggacctctggttctgtagc

SEQ ID NO: 998024 - DNA, 33 bp, Homo sapien
aaacacaaaacgaagggcctctggttctgtagc

SEQ ID NO: 998025 - DNA, 33 bp, Homo sapien
cagaaggtaaaggacacggaactgaagcactag

SEQ ID NO: 998026 - DNA, 33 bp, Homo sapien
cagaaggtaaaggacatggaactgaagcactag

SEQ ID NO: 998027 - DNA, 33 bp, Homo sapien
ccaggatgtagaaatgcatgctcagttttgaga

SEQ ID NO: 998028 - DNA, 33 bp, Homo sapien
ccaggatgtagaaatgtatgctcagttttgaga

SEQ ID NO: 998029 - DNA, 33 bp, Homo sapien
gcatgattctggaaaccaacagatagaaatagg

SEQ ID NO: 998030 - DNA, 33 bp, Homo sapien
gcatgattctggaaacgaacagatagaaatagg

SEQ ID NO: 998031 - DNA, 33 bp, Homo sapien
gctagtgaaacacagaaaaatgaagctaaccta

SEQ ID NO: 998032 - DNA, 33 bp, Homo sapien
gctagtgaaacacagagaaatgaagctaaccta

SEQ ID NO: 998033 - DNA, 33 bp, Homo sapien
atgaggaagctggtgaagtaaggaaaggtgaga

SEQ ID NO: 998034 - DNA, 33 bp, Homo sapien
atgaggaagctggtgatgtaaggaaaggtgaga

SEQ ID NO: 998035 - DNA, 33 bp, Homo sapien
atctctccacatgtgcagagcatcagtttttgc

SEQ ID NO: 998036 - DNA, 33 bp, Homo sapien
atctctccacatgtgcggagcatcagtttttgc

SEQ ID NO: 998037 - DNA, 33 bp, Homo sapien
tttcacttcctattccacatccaggaggatggc

SEQ ID NO: 998038 - DNA, 33 bp, Homo sapien
tttcacttcctattccgcatccaggaggatggc

SEQ ID NO: 998039 - DNA, 33 bp, Homo sapien
ggggcaggggagtaaacgatgccaatgggtaca

SEQ ID NO: 998040 - DNA, 33 bp, Homo sapien
ggggcaggggagtaaaggatgccaatgggtaca

SEQ ID NO: 998041 - DNA, 33 bp, Homo sapien
tagttttaggctacaacttcagacacacttaaa

SEQ ID NO: 998042 - DNA, 33 bp, Homo sapien
tagttttaggctacaatttcagacacacttaaa

SEQ ID NO: 998043 - DNA, 33 bp, Homo sapien
ggagcaccactaagaccgggccccaaccagatg

SEQ ID NO: 998044 - DNA, 33 bp, Homo sapien
ggagcaccactaagactgggccccaaccagatg

SEQ ID NO: 998045 - DNA, 33 bp, Homo sapien
ctggaactcagtaaagacttggtctgggggtgt

SEQ ID NO: 998046 - DNA, 33 bp, Homo sapien
ctggaactcagtaaagtcttggtctgggggtgt

SEQ ID NO: 998047 - DNA, 33 bp, Homo sapien
acccagatgatcaagccgaaaatcctctacttg

SEQ ID NO: 998048 - DNA, 33 bp, Homo sapien
acccagatgatcaagctgaaaatcctctacttg

SEQ ID NO: 998049 - DNA, 33 bp, Homo sapien
ggtttcctgagtaaaaacagagtctaacagccc

SEQ ID NO: 998050 - DNA, 33 bp, Homo sapien
ggtttcctgagtaaaagcagagtctaacagccc

SEQ ID NO: 998051 - DNA, 33 bp, Homo sapien
ttctaacaaagcccaggacatggccaactcagc

SEQ ID NO: 998052 - DNA, 33 bp, Homo sapien
ttctaacaaagcccagtacatggccaactcagc

SEQ ID NO: 998053 - DNA, 33 bp, Homo sapien
tggcagggaaagaaggcaatgtctctgtctgaa

SEQ ID NO: 998054 - DNA, 33 bp, Homo sapien
tggcagggaaagaaggtaatgtctctgtctgaa

SEQ ID NO: 998055 - DNA, 33 bp, Homo sapien
cccctgaagttgacataacttacctctgggatg

SEQ ID NO: 998056 - DNA, 33 bp, Homo sapien
cccctgaagttgacatgacttacctctgggatg

SEQ ID NO: 998057 - DNA, 33 bp, Homo sapien
ctacttgactagccaactcattccacctcttga

SEQ ID NO: 998058 - DNA, 33 bp, Homo sapien
ctacttgactagccaattcattccacctcttga

SEQ ID NO: 998059 - DNA, 33 bp, Homo sapien
tgttttctctctatgacggtagagtattggcct

SEQ ID NO: 998060 - DNA, 33 bp, Homo sapien
tgttttctctctatgatggtagagtattggcct

SEQ ID NO: 998061 - DNA, 33 bp, Homo sapien
gtttttcatagcaaacgcccagctggtaaagta

SEQ ID NO: 998062 - DNA, 33 bp, Homo sapien
gtttttcatagcaaactcccagctggtaaagta

SEQ ID NO: 998063 - DNA, 33 bp, Homo sapien
tctgtcttgccagtcacgttttccaatattttt

SEQ ID NO: 998064 - DNA, 33 bp, Homo sapien
tctgtcttgccagtcatgttttccaatattttt

SEQ ID NO: 998065 - DNA, 33 bp, Homo sapien
tgaacacatggctttcaatgcccagggattttc

SEQ ID NO: 998066 - DNA, 33 bp, Homo sapien
tgaacacatggctttcgatgcccagggattttc

SEQ ID NO: 998067 - DNA, 33 bp, Homo sapien
gatcttcctatcaaagaaagaccagccctctac

SEQ ID NO: 998068 - DNA, 33 bp, Homo sapien
gatcttcctatcaaagcaagaccagccctctac

SEQ ID NO: 998069 - DNA, 33 bp, Homo sapien
gcataagaggacaaaaaggaactccactgcaga

SEQ ID NO: 998070 - DNA, 33 bp, Homo sapien
gcataagaggacaaaagggaactccactgcaga

SEQ ID NO: 998071 - DNA, 33 bp, Homo sapien
gcttcctttttttccacaggtattgatcccaaa

SEQ ID NO: 998072 - DNA, 33 bp, Homo sapien
gcttcctttttttccagaggtattgatcccaaa

SEQ ID NO: 998073 - DNA, 33 bp, Homo sapien
ttctgtatttccttcagaaagcaagctccacta

SEQ ID NO: 998074 - DNA, 33 bp, Homo sapien
ttctgtatttccttcataaagcaagctccacta

SEQ ID NO: 998075 - DNA, 33 bp, Homo sapien
tccttgagttaaggaaacagcagaggagaaaaa

SEQ ID NO: 998076 - DNA, 33 bp, Homo sapien
tccttgagttaaggaaccagcagaggagaaaaa

SEQ ID NO: 998077 - DNA, 33 bp, Homo sapien
gagacctatttaaccacaagctctggtttctcc

SEQ ID NO: 998078 - DNA, 33 bp, Homo sapien
gagacctatttaaccataagctctggtttctcc

SEQ ID NO: 998079 - DNA, 33 bp, Homo sapien
ttcctgttcttgatcccacaacttggggctttt

SEQ ID NO: 998080 - DNA, 33 bp, Homo sapien
ttcctgttcttgatcctacaacttggggctttt

SEQ ID NO: 998081 - DNA, 33 bp, Homo sapien
cacaaagtgaatttaagtatgcaagaggtggat

SEQ ID NO: 998082 - DNA, 33 bp, Homo sapien
cacaaagtgaatttaattatgcaagaggtggat

SEQ ID NO: 998083 - DNA, 33 bp, Homo sapien
gccatttcaggcacaacgtaggcagtgggtgtg

SEQ ID NO: 998084 - DNA, 33 bp, Homo sapien
gccatttcaggcacaatgtaggcagtgggtgtg

SEQ ID NO: 998085 - DNA, 33 bp, Homo sapien
tcctaccagcaatatacgagagggtggtgaatt

SEQ ID NO: 998086 - DNA, 33 bp, Homo sapien
tcctaccagcaatatatgagagggtggtgaatt

SEQ ID NO: 998087 - DNA, 33 bp, Homo sapien
gaactggaaggaggcaaagaactagaacctgca

SEQ ID NO: 998088 - DNA, 33 bp, Homo sapien
gaactggaaggaggcagagaactagaacctgca

SEQ ID NO: 998089 - DNA, 33 bp, Homo sapien
atccaaactttatgcacccgacttcaggagttc

SEQ ID NO: 998090 - DNA, 33 bp, Homo sapien
atccaaactttatgcatccgacttcaggagttc

SEQ ID NO: 998091 - DNA, 33 bp, Homo sapien
cccaggacgatccctaacaactttgatttcatc

SEQ ID NO: 998092 - DNA, 33 bp, Homo sapien
cccaggacgatccctagcaactttgatttcatc

SEQ ID NO: 998093 - DNA, 33 bp, Homo sapien
gcaaaggattcagacaatagccttcctcggccc

SEQ ID NO: 998094 - DNA, 33 bp, Homo sapien
gcaaaggattcagacagtagccttcctcggccc

SEQ ID NO: 998095 - DNA, 33 bp, Homo sapien
tcattacagcaattaaacctgcctaagggaatg

SEQ ID NO: 998096 - DNA, 33 bp, Homo sapien
tcattacagcaattaagcctgcctaagggaatg

SEQ ID NO: 998097 - DNA, 33 bp, Homo sapien
ctgcttcctgttagagccttgatcaactgctag

SEQ ID NO: 998098 - DNA, 33 bp, Homo sapien
ctgcttcctgttagaggcttgatcaactgctag

SEQ ID NO: 998099 - DNA, 33 bp, Homo sapien
gatatctttctgtctacgctcccatcttttgcc

SEQ ID NO: 998100 - DNA, 33 bp, Homo sapien
gatatctttctgtctatgctcccatcttttgcc

SEQ ID NO: 998101 - DNA, 33 bp, Homo sapien
tgccagggccaaccaaagactttctccaaagat

SEQ ID NO: 998102 - DNA, 33 bp, Homo sapien
tgccagggccaaccaatgactttctccaaagat

SEQ ID NO: 998103 - DNA, 33 bp, Homo sapien
tctccaaagatgcaaaatatccaagaatgcagg

SEQ ID NO: 998104 - DNA, 33 bp, Homo sapien
tctccaaagatgcaaagtatccaagaatgcagg

SEQ ID NO: 998105 - DNA, 33 bp, Homo sapien
attgccatcctcgccacgctttattgaccccac

SEQ ID NO: 998106 - DNA, 33 bp, Homo sapien
attgccatcctcgccatgctttattgaccccac

SEQ ID NO: 998107 - DNA, 33 bp, Homo sapien
tggagaatggtcctgacggccaactgtgtacag

SEQ ID NO: 998108 - DNA, 33 bp, Homo sapien
tggagaatggtcctgatggccaactgtgtacag

SEQ ID NO: 998109 - DNA, 33 bp, Homo sapien
ctgctgggtaatttgcagatgctgtaatgaagg

SEQ ID NO: 998110 - DNA, 33 bp, Homo sapien
ctgctgggtaatttgcggatgctgtaatgaagg

SEQ ID NO: 998111 - DNA, 33 bp, Homo sapien
actactaaacacttgacacgtctattgtgtctc

SEQ ID NO: 998112 - DNA, 33 bp, Homo sapien
actactaaacacttgatacgtctattgtgtctc

SEQ ID NO: 998113 - DNA, 33 bp, Homo sapien
gaagcagtgcaggtggaaagaacagatctgata

SEQ ID NO: 998114 - DNA, 33 bp, Homo sapien
gaagcagtgcaggtggcaagaacagatctgata

SEQ ID NO: 998115 - DNA, 33 bp, Homo sapien
gtagagtgagatgtaaatgccacaaatgcatac

SEQ ID NO: 998116 - DNA, 33 bp, Homo sapien
gtagagtgagatgtaagtgccacaaatgcatac

SEQ ID NO: 998117 - DNA, 33 bp, Homo sapien
cagaaattttgaaggacgtacctggtcttccaa

SEQ ID NO: 998118 - DNA, 33 bp, Homo sapien
cagaaattttgaaggatgtacctggtcttccaa

SEQ ID NO: 998119 - DNA, 33 bp, Homo sapien
gggaaatctatcttgacgggcaggattttagat

SEQ ID NO: 998120 - DNA, 33 bp, Homo sapien
gggaaatctatcttgatgggcaggattttagat

SEQ ID NO: 998121 - DNA, 33 bp, Homo sapien
cagcaagctaagtgaccatgaacatgtgacagg

SEQ ID NO: 998122 - DNA, 33 bp, Homo sapien
cagcaagctaagtgacgatgaacatgtgacagg

SEQ ID NO: 998123 - DNA, 33 bp, Homo sapien
gacacgtgacacaagacggcctctaagctcttc

SEQ ID NO: 998124 - DNA, 33 bp, Homo sapien
gacacgtgacacaagatggcctctaagctcttc

SEQ ID NO: 998125 - DNA, 33 bp, Homo sapien
agtcattgtaaaaatggcaaagcccacttggaa

SEQ ID NO: 998126 - DNA, 33 bp, Homo sapien
agtcattgtaaaaatgtcaaagcccacttggaa

SEQ ID NO: 998127 - DNA, 33 bp, Homo sapien
cacctgggatttgccgcaacgcccattctgcat

SEQ ID NO: 998128 - DNA, 33 bp, Homo sapien
cacctgggatttgccgtaacgcccattctgcat

SEQ ID NO: 998129 - DNA, 33 bp, Homo sapien
tgtagctaaggtataagagaagcaagattaacc

SEQ ID NO: 998130 - DNA, 33 bp, Homo sapien
tgtagctaaggtataatagaagcaagattaacc

SEQ ID NO: 998131 - DNA, 33 bp, Homo sapien
gggacaggctcgatgccaatagttacagggctt

SEQ ID NO: 998132 - DNA, 33 bp, Homo sapien
gggacaggctcgatgcgaatagttacagggctt

SEQ ID NO: 998133 - DNA, 33 bp, Homo sapien
tagtcacaaagagcaaaattctcttcttcctct

SEQ ID NO: 998134 - DNA, 33 bp, Homo sapien
tagtcacaaagagcaagattctcttcttcctct

SEQ ID NO: 998135 - DNA, 33 bp, Homo sapien
caccagggcctgtgcaacctataaccacaaccc

SEQ ID NO: 998136 - DNA, 33 bp, Homo sapien
caccagggcctgtgcatcctataaccacaaccc

SEQ ID NO: 998137 - DNA, 33 bp, Homo sapien
cactggtgtccagcagaagacagagtgagcact

SEQ ID NO: 998138 - DNA, 33 bp, Homo sapien
cactggtgtccagcaggagacagagtgagcact

SEQ ID NO: 998139 - DNA, 33 bp, Homo sapien
ccctgggtggaagaaacgaacacgggccttagc

SEQ ID NO: 998140 - DNA, 33 bp, Homo sapien
ccctgggtggaagaaatgaacacgggccttagc

SEQ ID NO: 998141 - DNA, 33 bp, Homo sapien
tcttcctagtactcctaaagaccaagctgcttg

SEQ ID NO: 998142 - DNA, 33 bp, Homo sapien
tcttcctagtactcctgaagaccaagctgcttg

SEQ ID NO: 998143 - DNA, 33 bp, Homo sapien
ttgttagtagtgaccacgcggtgcagcttagca

SEQ ID NO: 998144 - DNA, 33 bp, Homo sapien
ttgttagtagtgaccatgcggtgcagcttagca

SEQ ID NO: 998145 - DNA, 33 bp, Homo sapien
aggctacacgggtcacacctgacttccctgctg

SEQ ID NO: 998146 - DNA, 33 bp, Homo sapien
aggctacacgggtcacgcctgacttccctgctg

SEQ ID NO: 998147 - DNA, 33 bp, Homo sapien
aacccctgccttctggaattcagccacacccac

SEQ ID NO: 998148 - DNA, 33 bp, Homo sapien
aacccctgccttctgggattcagccacacccac

SEQ ID NO: 998149 - DNA, 33 bp, Homo sapien
ggagtcacagtaaataactgctagggagacagc

SEQ ID NO: 998150 - DNA, 33 bp, Homo sapien
ggagtcacagtaaatacctgctagggagacagc

SEQ ID NO: 998151 - DNA, 33 bp, Homo sapien
caatgttctgggtaacaccacatctgaagacaa

SEQ ID NO: 998152 - DNA, 33 bp, Homo sapien
caatgttctgggtaactccacatctgaagacaa

SEQ ID NO: 998153 - DNA, 33 bp, Homo sapien
aggatgtatagatatgcagcagtagtcagcaca

SEQ ID NO: 998154 - DNA, 33 bp, Homo sapien
aggatgtatagatatgtagcagtagtcagcaca

SEQ ID NO: 998155 - DNA, 33 bp, Homo sapien
agccaatgacagcctacggaagtgatgccaggt

SEQ ID NO: 998156 - DNA, 33 bp, Homo sapien
agccaatgacagcctatggaagtgatgccaggt

SEQ ID NO: 998157 - DNA, 33 bp, Homo sapien
tctgtctagttcaccacagttcttagcatcatc

SEQ ID NO: 998158 - DNA, 33 bp, Homo sapien
tctgtctagttcaccatagttcttagcatcatc

SEQ ID NO: 998159 - DNA, 33 bp, Homo sapien
attttgataggtaacaatagattaattaacatg

SEQ ID NO: 998160 - DNA, 33 bp, Homo sapien
attttgataggtaacagtagattaattaacatg

SEQ ID NO: 998161 - DNA, 33 bp, Homo sapien
aggtgataatcactgaagctaatccttcctgta

SEQ ID NO: 998162 - DNA, 33 bp, Homo sapien
aggtgataatcactgaggctaatccttcctgta

SEQ ID NO: 998163 - DNA, 33 bp, Homo sapien
ttgttaatggatgaaaaatggttgtggatggga

SEQ ID NO: 998164 - DNA, 33 bp, Homo sapien
ttgttaatggatgaaagatggttgtggatggga

SEQ ID NO: 998165 - DNA, 33 bp, Homo sapien
tttcatcagtgtgccaagaatgatgtcactatg

SEQ ID NO: 998166 - DNA, 33 bp, Homo sapien
tttcatcagtgtgccaggaatgatgtcactatg

SEQ ID NO: 998167 - DNA, 33 bp, Homo sapien
gaaagctggtatccacagtgaaatccttgctca

SEQ ID NO: 998168 - DNA, 33 bp, Homo sapien
gaaagctggtatccacggtgaaatccttgctca

SEQ ID NO: 998169 - DNA, 33 bp, Homo sapien
ttctctctgggaaaccacacagggagagcctct

SEQ ID NO: 998170 - DNA, 33 bp, Homo sapien
ttctctctgggaaaccgcacagggagagcctct

SEQ ID NO: 998171 - DNA, 33 bp, Homo sapien
cccttccctgcagcccagataagctcagcctag

SEQ ID NO: 998172 - DNA, 33 bp, Homo sapien
cccttccctgcagcccggataagctcagcctag

SEQ ID NO: 998173 - DNA, 33 bp, Homo sapien
taaaaatcaaaacgccaatgaagattaacctga

SEQ ID NO: 998174 - DNA, 33 bp, Homo sapien
taaaaatcaaaacgcccatgaagattaacctga

SEQ ID NO: 998175 - DNA, 33 bp, Homo sapien
tcatacaagtcccacaacccctgaggcgaagcc

SEQ ID NO: 998176 - DNA, 33 bp, Homo sapien
tcatacaagtcccacagcccctgaggcgaagcc

SEQ ID NO: 998177 - DNA, 33 bp, Homo sapien
ccaatgtttctcaaaccgtgtaaccacacaaca

SEQ ID NO: 998178 - DNA, 33 bp, Homo sapien
ccaatgtttctcaaactgtgtaaccacacaaca

SEQ ID NO: 998179 - DNA, 33 bp, Homo sapien
tgaggtggctgaaggaccagaactggtgcaggg

SEQ ID NO: 998180 - DNA, 33 bp, Homo sapien
tgaggtggctgaaggatcagaactggtgcaggg

SEQ ID NO: 998181 - DNA, 33 bp, Homo sapien
ggtgattgaaccaaaccctgttctttcattctc

SEQ ID NO: 998182 - DNA, 33 bp, Homo sapien
ggtgattgaaccaaactctgttctttcattctc

SEQ ID NO: 998183 - DNA, 33 bp, Homo sapien
gcaggtatgaaacctacgtccgccatgaggatc

SEQ ID NO: 998184 - DNA, 33 bp, Homo sapien
gcaggtatgaaacctatgtccgccatgaggatc

SEQ ID NO: 998185 - DNA, 33 bp, Homo sapien
cagtcactatgctgtcaccacatccattttatt

SEQ ID NO: 998186 - DNA, 33 bp, Homo sapien
cagtcactatgctgtctccacatccattttatt

SEQ ID NO: 998187 - DNA, 33 bp, Homo sapien
ggtgtccacctggaccagaatcacagaacctca

SEQ ID NO: 998188 - DNA, 33 bp, Homo sapien
ggtgtccacctggaccggaatcacagaacctca

SEQ ID NO: 998189 - DNA, 33 bp, Homo sapien
caaaaatacgccattgaatgaaacaacacattg

SEQ ID NO: 998190 - DNA, 33 bp, Homo sapien
caaaaatacgccattggatgaaacaacacattg

SEQ ID NO: 998191 - DNA, 33 bp, Homo sapien
tcactttggctgttagaaagctcagaactaaac

SEQ ID NO: 998192 - DNA, 33 bp, Homo sapien
tcactttggctgttaggaagctcagaactaaac

SEQ ID NO: 998193 - DNA, 33 bp, Homo sapien
cataaagccttcgacccgaggatcctggcctgg

SEQ ID NO: 998194 - DNA, 33 bp, Homo sapien
cataaagccttcgacctgaggatcctggcctgg

SEQ ID NO: 998195 - DNA, 33 bp, Homo sapien
agaatgaattgtcttacgtggcctgaagaccta

SEQ ID NO: 998196 - DNA, 33 bp, Homo sapien
agaatgaattgtcttatgtggcctgaagaccta

SEQ ID NO: 998197 - DNA, 33 bp, Homo sapien
gtcatagatggatttacggatcacaggccactc

SEQ ID NO: 998198 - DNA, 33 bp, Homo sapien
gtcatagatggatttatggatcacaggccactc

SEQ ID NO: 998199 - DNA, 33 bp, Homo sapien
acctcaactccaggaccggtacatcccttctgt

SEQ ID NO: 998200 - DNA, 33 bp, Homo sapien
acctcaactccaggactggtacatcccttctgt

SEQ ID NO: 998201 - DNA, 33 bp, Homo sapien
gccaggtgccaaaagacggagagggcattgtac

SEQ ID NO: 998202 - DNA, 33 bp, Homo sapien
gccaggtgccaaaagatggagagggcattgtac

SEQ ID NO: 998203 - DNA, 33 bp, Homo sapien
gcaacccagtacagaacggcatgggtcacctga

SEQ ID NO: 998204 - DNA, 33 bp, Homo sapien
gcaacccagtacagaatggcatgggtcacctga

SEQ ID NO: 998205 - DNA, 33 bp, Homo sapien
tatttgcagccaccccacatcgtttgtattcct

SEQ ID NO: 998206 - DNA, 33 bp, Homo sapien
tatttgcagccaccccgcatcgtttgtattcct

SEQ ID NO: 998207 - DNA, 33 bp, Homo sapien
tcttcagaagctgcaagaagcttcagaatccct

SEQ ID NO: 998208 - DNA, 33 bp, Homo sapien
tcttcagaagctgcaataagcttcagaatccct

SEQ ID NO: 998209 - DNA, 33 bp, Homo sapien
cactgtttcttcccataactaattgcatgcatg

SEQ ID NO: 998210 - DNA, 33 bp, Homo sapien
cactgtttcttcccatgactaattgcatgcatg

SEQ ID NO: 998211 - DNA, 33 bp, Homo sapien
taccatcaccgtgacacacatgcaagagccctc

SEQ ID NO: 998212 - DNA, 33 bp, Homo sapien
taccatcaccgtgacagacatgcaagagccctc

SEQ ID NO: 998213 - DNA, 33 bp, Homo sapien
tggctccccactgaacccgatgatcaatcatca

SEQ ID NO: 998214 - DNA, 33 bp, Homo sapien
tggctccccactgaactcgatgatcaatcatca

SEQ ID NO: 998215 - DNA, 33 bp, Homo sapien
tcacaatcgagagtcaagtgcccatgtgatgac

SEQ ID NO: 998216 - DNA, 33 bp, Homo sapien
tcacaatcgagagtcacgtgcccatgtgatgac

SEQ ID NO: 998217 - DNA, 33 bp, Homo sapien
agaggaaacaatagtgcatggtagcaggggctg

SEQ ID NO: 998218 - DNA, 33 bp, Homo sapien
agaggaaacaatagtgtatggtagcaggggctg

SEQ ID NO: 998219 - DNA, 33 bp, Homo sapien
tgttcccactgccttacgtcgtcccccagaaaa

SEQ ID NO: 998220 - DNA, 33 bp, Homo sapien
tgttcccactgccttatgtcgtcccccagaaaa

SEQ ID NO: 998221 - DNA, 33 bp, Homo sapien
ctcactggcaggggacgagctgacaccgttatt

SEQ ID NO: 998222 - DNA, 33 bp, Homo sapien
ctcactggcaggggactagctgacaccgttatt

SEQ ID NO: 998223 - DNA, 33 bp, Homo sapien
ccaaatgtgttctagacgtacaaggccaggcca

SEQ ID NO: 998224 - DNA, 33 bp, Homo sapien
ccaaatgtgttctagatgtacaaggccaggcca

SEQ ID NO: 998225 - DNA, 33 bp, Homo sapien
ctcctcatgctcacaaatctcttaagccctttc

SEQ ID NO: 998226 - DNA, 33 bp, Homo sapien
ctcctcatgctcacaagtctcttaagccctttc

SEQ ID NO: 998227 - DNA, 33 bp, Homo sapien
cctgggccacctccccaacaacaggtcaccctg

SEQ ID NO: 998228 - DNA, 33 bp, Homo sapien
cctgggccacctcccccacaacaggtcaccctg

SEQ ID NO: 998229 - DNA, 33 bp, Homo sapien
tggaaactatgctgtgcagagcgaggacacttt

SEQ ID NO: 998230 - DNA, 33 bp, Homo sapien
tggaaactatgctgtgtagagcgaggacacttt

SEQ ID NO: 998231 - DNA, 33 bp, Homo sapien
gcgcgctcacacaacacggttctcgccagtcaa

SEQ ID NO: 998232 - DNA, 33 bp, Homo sapien
gcgcgctcacacaacatggttctcgccagtcaa

SEQ ID NO: 998233 - DNA, 33 bp, Homo sapien
tccttattgtatttgacgggtctagaaggatca

SEQ ID NO: 998234 - DNA, 33 bp, Homo sapien
tccttattgtatttgatgggtctagaaggatca

SEQ ID NO: 998235 - DNA, 33 bp, Homo sapien
tgaaatatgaataggagaatgtctgtaatgata

SEQ ID NO: 998236 - DNA, 33 bp, Homo sapien
tgaaatatgaataggataatgtctgtaatgata

SEQ ID NO: 998237 - DNA, 33 bp, Homo sapien
tgtctgtaatgatatgaaattgacaattaggga

SEQ ID NO: 998238 - DNA, 33 bp, Homo sapien
tgtctgtaatgatatgcaattgacaattaggga

SEQ ID NO: 998239 - DNA, 33 bp, Homo sapien
ctgggcattgacccaaaaagtgttcttatttgg

SEQ ID NO: 998240 - DNA, 33 bp, Homo sapien
ctgggcattgacccaacaagtgttcttatttgg

SEQ ID NO: 998241 - DNA, 33 bp, Homo sapien
taaatatgaaaacttacgcaggtttggagtgaa

SEQ ID NO: 998242 - DNA, 33 bp, Homo sapien
taaatatgaaaacttatgcaggtttggagtgaa

SEQ ID NO: 998243 - DNA, 33 bp, Homo sapien
gctcaggctttttatcacttgcctacgaaatgg

SEQ ID NO: 998244 - DNA, 33 bp, Homo sapien
gctcaggctttttatcgcttgcctacgaaatgg

SEQ ID NO: 998245 - DNA, 33 bp, Homo sapien
agtcaaccgaggacaacgccctgccaaacagag

SEQ ID NO: 998246 - DNA, 33 bp, Homo sapien
agtcaaccgaggacaatgccctgccaaacagag

SEQ ID NO: 998247 - DNA, 33 bp, Homo sapien
cccagtggttagcacacgagtcaggccagttgg

SEQ ID NO: 998248 - DNA, 33 bp, Homo sapien
cccagtggttagcacatgagtcaggccagttgg

SEQ ID NO: 998249 - DNA, 33 bp, Homo sapien
gcctctgttcttctcactatgtgattacagatg

SEQ ID NO: 998250 - DNA, 33 bp, Homo sapien
gcctctgttcttctcattatgtgattacagatg

SEQ ID NO: 998251 - DNA, 33 bp, Homo sapien
ttcttcacttgcattcgatttgaaacaactaag

SEQ ID NO: 998252 - DNA, 33 bp, Homo sapien
ttcttcacttgcattctatttgaaacaactaag

SEQ ID NO: 998253 - DNA, 33 bp, Homo sapien
acaccaagcctgagacacaggccaaactgcctg

SEQ ID NO: 998254 - DNA, 33 bp, Homo sapien
acaccaagcctgagacgcaggccaaactgcctg

SEQ ID NO: 998255 - DNA, 33 bp, Homo sapien
atgcgaagaacccacacggagatgatcaggctc

SEQ ID NO: 998256 - DNA, 33 bp, Homo sapien
atgcgaagaacccacatggagatgatcaggctc

SEQ ID NO: 998257 - DNA, 33 bp, Homo sapien
ggggtgggaaaaaataccagtattatcaccgat

SEQ ID NO: 998258 - DNA, 33 bp, Homo sapien
ggggtgggaaaaaatagcagtattatcaccgat

SEQ ID NO: 998259 - DNA, 33 bp, Homo sapien
tgaatgtgaatggatacgggatggaaaatctca

SEQ ID NO: 998260 - DNA, 33 bp, Homo sapien
tgaatgtgaatggatatgggatggaaaatctca

SEQ ID NO: 998261 - DNA, 33 bp, Homo sapien
taaaacttcgtctttacgttgactttttgctct

SEQ ID NO: 998262 - DNA, 33 bp, Homo sapien
taaaacttcgtctttatgttgactttttgctct

SEQ ID NO: 998263 - DNA, 33 bp, Homo sapien
gtcggagttccagttccccacagctgatactcc

SEQ ID NO: 998264 - DNA, 33 bp, Homo sapien
gtcggagttccagttcgccacagctgatactcc

SEQ ID NO: 998265 - DNA, 33 bp, Homo sapien
ggggcaggaatgagaacgtggtcgtcccttctg

SEQ ID NO: 998266 - DNA, 33 bp, Homo sapien
ggggcaggaatgagaatgtggtcgtcccttctg

SEQ ID NO: 998267 - DNA, 33 bp, Homo sapien
ctgagcagcaccagggaaaagtcgaaggcggta

SEQ ID NO: 998268 - DNA, 33 bp, Homo sapien
ctgagcagcaccagggcaaagtcgaaggcggta

SEQ ID NO: 998269 - DNA, 33 bp, Homo sapien
cagcagcccagttccacctccaactgactgcat

SEQ ID NO: 998270 - DNA, 33 bp, Homo sapien
cagcagcccagttccagctccaactgactgcat

SEQ ID NO: 998271 - DNA, 33 bp, Homo sapien
gaggacctgatgcctacacccactccttagagt

SEQ ID NO: 998272 - DNA, 33 bp, Homo sapien
gaggacctgatgcctatacccactccttagagt

SEQ ID NO: 998273 - DNA, 33 bp, Homo sapien
tgacaacttttcacagccattttgccttcaatt

SEQ ID NO: 998274 - DNA, 33 bp, Homo sapien
tgacaacttttcacagtcattttgccttcaatt

SEQ ID NO: 998275 - DNA, 33 bp, Homo sapien
aataatagagtggataacagtgctatagagtat

SEQ ID NO: 998276 - DNA, 33 bp, Homo sapien
aataatagagtggatatcagtgctatagagtat

SEQ ID NO: 998277 - DNA, 33 bp, Homo sapien
aacagatggcaatgtggaggactcaaatctact

SEQ ID NO: 998278 - DNA, 33 bp, Homo sapien
aacagatggcaatgtgtaggactcaaatctact

SEQ ID NO: 998279 - DNA, 33 bp, Homo sapien
ttcagggagaaagaaaatggacagtttgtacac

SEQ ID NO: 998280 - DNA, 33 bp, Homo sapien
ttcagggagaaagaaattggacagtttgtacac

SEQ ID NO: 998281 - DNA, 33 bp, Homo sapien
aactgtcgttcggcaaagtgaggtacgttgctc

SEQ ID NO: 998282 - DNA, 33 bp, Homo sapien
aactgtcgttcggcaaggtgaggtacgttgctc

SEQ ID NO: 998283 - DNA, 33 bp, Homo sapien
ctctgcctctctccccaacttgagtaaactggt

SEQ ID NO: 998284 - DNA, 33 bp, Homo sapien
ctctgcctctctccccgacttgagtaaactggt

SEQ ID NO: 998285 - DNA, 33 bp, Homo sapien
gggagaagtcgggctgaagagacgtggctcaca

SEQ ID NO: 998286 - DNA, 33 bp, Homo sapien
gggagaagtcgggctgcagagacgtggctcaca

SEQ ID NO: 998287 - DNA, 33 bp, Homo sapien
gggaagaaaacacatcacgcatgaagaagggga

SEQ ID NO: 998288 - DNA, 33 bp, Homo sapien
gggaagaaaacacatcgcgcatgaagaagggga

SEQ ID NO: 998289 - DNA, 33 bp, Homo sapien
acagggttttcatctaactgaagccccaaacac

SEQ ID NO: 998290 - DNA, 33 bp, Homo sapien
acagggttttcatctatctgaagccccaaacac

SEQ ID NO: 998291 - DNA, 33 bp, Homo sapien
ccatctgacttaaaaagataaatgctcccttcc

SEQ ID NO: 998292 - DNA, 33 bp, Homo sapien
ccatctgacttaaaaatataaatgctcccttcc

SEQ ID NO: 998293 - DNA, 33 bp, Homo sapien
ctatctgctcaatggccatccagtttggggact

SEQ ID NO: 998294 - DNA, 33 bp, Homo sapien
ctatctgctcaatggctatccagtttggggact

SEQ ID NO: 998295 - DNA, 33 bp, Homo sapien
ttactctacaagctatcagaactgctaaacaaa

SEQ ID NO: 998296 - DNA, 33 bp, Homo sapien
ttactctacaagctattagaactgctaaacaaa

SEQ ID NO: 998297 - DNA, 33 bp, Homo sapien
tacatttgtcataatacgttgaacttgacagtt

SEQ ID NO: 998298 - DNA, 33 bp, Homo sapien
tacatttgtcataatatgttgaacttgacagtt

SEQ ID NO: 998299 - DNA, 33 bp, Homo sapien
gaaaaggtgtgtggaaaaagttgaatccagacc

SEQ ID NO: 998300 - DNA, 33 bp, Homo sapien
gaaaaggtgtgtggaagaagttgaatccagacc

SEQ ID NO: 998301 - DNA, 33 bp, Homo sapien
attttgcctgtattctcaatctcacaggtcttg

SEQ ID NO: 998302 - DNA, 33 bp, Homo sapien
attttgcctgtattctgaatctcacaggtcttg

SEQ ID NO: 998303 - DNA, 33 bp, Homo sapien
aaggcttacaggcgaaagcatggaaatcatttc

SEQ ID NO: 998304 - DNA, 33 bp, Homo sapien
aaggcttacaggcgaaggcatggaaatcatttc

SEQ ID NO: 998305 - DNA, 33 bp, Homo sapien
tttacttttcctttccaattctgaaacaaatgt

SEQ ID NO: 998306 - DNA, 33 bp, Homo sapien
tttacttttcctttccgattctgaaacaaatgt

SEQ ID NO: 998307 - DNA, 33 bp, Homo sapien
actcttttaatgaatgaatgactctcatccctg

SEQ ID NO: 998308 - DNA, 33 bp, Homo sapien
actcttttaatgaatgcatgactctcatccctg

SEQ ID NO: 998309 - DNA, 33 bp, Homo sapien
ggggaggctgaagcccactctcaaactcatagc

SEQ ID NO: 998310 - DNA, 33 bp, Homo sapien
ggggaggctgaagcccgctctcaaactcatagc

SEQ ID NO: 998311 - DNA, 33 bp, Homo sapien
ggaaggaaagactgcacagaaggcagtgcctga

SEQ ID NO: 998312 - DNA, 33 bp, Homo sapien
ggaaggaaagactgcatagaaggcagtgcctga

SEQ ID NO: 998313 - DNA, 33 bp, Homo sapien
ggaagcagtatgtcagcaccccagatgcccatg

SEQ ID NO: 998314 - DNA, 33 bp, Homo sapien
ggaagcagtatgtcagtaccccagatgcccatg

SEQ ID NO: 998315 - DNA, 33 bp, Homo sapien
gcaggtttgttaaataggtgagaggagtcttaa

SEQ ID NO: 998316 - DNA, 33 bp, Homo sapien
gcaggtttgttaaatatgtgagaggagtcttaa

SEQ ID NO: 998317 - DNA, 33 bp, Homo sapien
cggagagcagggactacgtggccttcagggcaa

SEQ ID NO: 998318 - DNA, 33 bp, Homo sapien
cggagagcagggactatgtggccttcagggcaa

SEQ ID NO: 998319 - DNA, 33 bp, Homo sapien
aagaggaaagctaccaatcttcctgatggatac

SEQ ID NO: 998320 - DNA, 33 bp, Homo sapien
aagaggaaagctaccagtcttcctgatggatac

SEQ ID NO: 998321 - DNA, 33 bp, Homo sapien
ctaagctgaaattaaaacctgcaactgtctagc

SEQ ID NO: 998322 - DNA, 33 bp, Homo sapien
ctaagctgaaattaaagcctgcaactgtctagc

SEQ ID NO: 998323 - DNA, 33 bp, Homo sapien
gttgaattattgaccaccgcccatgcaatttcc

SEQ ID NO: 998324 - DNA, 33 bp, Homo sapien
gttgaattattgaccatcgcccatgcaatttcc

SEQ ID NO: 998325 - DNA, 33 bp, Homo sapien
cctgtgtgtgttcacaatcctgactccctgtgg

SEQ ID NO: 998326 - DNA, 33 bp, Homo sapien
cctgtgtgtgttcacagtcctgactccctgtgg

SEQ ID NO: 998327 - DNA, 33 bp, Homo sapien
tatttccctagaaacaatactcatgatactcat

SEQ ID NO: 998328 - DNA, 33 bp, Homo sapien
tatttccctagaaacactactcatgatactcat

SEQ ID NO: 998329 - DNA, 33 bp, Homo sapien
acagcctcctcatccaatgaaagaatggcagtt

SEQ ID NO: 998330 - DNA, 33 bp, Homo sapien
acagcctcctcatccagtgaaagaatggcagtt

SEQ ID NO: 998331 - DNA, 33 bp, Homo sapien
tgcgttttgcattcgaacaagctaagtagcaat

SEQ ID NO: 998332 - DNA, 33 bp, Homo sapien
tgcgttttgcattcgagcaagctaagtagcaat

SEQ ID NO: 998333 - DNA, 33 bp, Homo sapien
gttttatgagagctacaatcgcagcagcagcag

SEQ ID NO: 998334 - DNA, 33 bp, Homo sapien
gttttatgagagctacgatcgcagcagcagcag

SEQ ID NO: 998335 - DNA, 33 bp, Homo sapien
cagtgtccattagtcacatttcctgcttctctc

SEQ ID NO: 998336 - DNA, 33 bp, Homo sapien
cagtgtccattagtcatatttcctgcttctctc

SEQ ID NO: 998337 - DNA, 33 bp, Homo sapien
catcagagacactataagaagattacagaacga

SEQ ID NO: 998338 - DNA, 33 bp, Homo sapien
catcagagacactatacgaagattacagaacga

SEQ ID NO: 998339 - DNA, 33 bp, Homo sapien
tttggggtgcctcagcaactaactgataatacc

SEQ ID NO: 998340 - DNA, 33 bp, Homo sapien
tttggggtgcctcagcgactaactgataatacc

SEQ ID NO: 998341 - DNA, 33 bp, Homo sapien
caggatatcacggaaacagcgtgaactttggat

SEQ ID NO: 998342 - DNA, 33 bp, Homo sapien
caggatatcacggaaatagcgtgaactttggat

SEQ ID NO: 998343 - DNA, 33 bp, Homo sapien
gacaccttcttctttcactacagcttttctgaa

SEQ ID NO: 998344 - DNA, 33 bp, Homo sapien
gacaccttcttctttcgctacagcttttctgaa

SEQ ID NO: 998345 - DNA, 33 bp, Homo sapien
gtgaattcagacgaaacaaacagccctgcagtt

SEQ ID NO: 998346 - DNA, 33 bp, Homo sapien
gtgaattcagacgaaagaaacagccctgcagtt

SEQ ID NO: 998347 - DNA, 33 bp, Homo sapien
ctccaacttgctacgaaccattacctaaaagat

SEQ ID NO: 998348 - DNA, 33 bp, Homo sapien
ctccaacttgctacgatccattacctaaaagat

SEQ ID NO: 998349 - DNA, 33 bp, Homo sapien
tgaagactgtgatcaaacacttaagagcagggt

SEQ ID NO: 998350 - DNA, 33 bp, Homo sapien
tgaagactgtgatcaagcacttaagagcagggt

SEQ ID NO: 998351 - DNA, 33 bp, Homo sapien
aagagagaaaataaacccattcaaacttaacag

SEQ ID NO: 998352 - DNA, 33 bp, Homo sapien
aagagagaaaataaactcattcaaacttaacag

SEQ ID NO: 998353 - DNA, 33 bp, Homo sapien
gcaaaacgtaaactccacatttctctagcatgt

SEQ ID NO: 998354 - DNA, 33 bp, Homo sapien
gcaaaacgtaaactccgcatttctctagcatgt

SEQ ID NO: 998355 - DNA, 33 bp, Homo sapien
gatgtaaaagtacttcagaaaaacacaaatcag

SEQ ID NO: 998356 - DNA, 33 bp, Homo sapien
gatgtaaaagtacttcggaaaaacacaaatcag

SEQ ID NO: 998357 - DNA, 33 bp, Homo sapien
tgaaaggagcactagacatggagtcgaagcccc

SEQ ID NO: 998358 - DNA, 33 bp, Homo sapien
tgaaaggagcactagatatggagtcgaagcccc

SEQ ID NO: 998359 - DNA, 33 bp, Homo sapien
aaatgaacatcaattccccaaagaaagccacag

SEQ ID NO: 998360 - DNA, 33 bp, Homo sapien
aaatgaacatcaattctccaaagaaagccacag

SEQ ID NO: 998361 - DNA, 33 bp, Homo sapien
ctggtgaccataattcaaggcctgatttggttt

SEQ ID NO: 998362 - DNA, 33 bp, Homo sapien
ctggtgaccataattcgaggcctgatttggttt

SEQ ID NO: 998363 - DNA, 33 bp, Homo sapien
tttataagagcaaaacagcatttatttggtcaa

SEQ ID NO: 998364 - DNA, 33 bp, Homo sapien
tttataagagcaaaacggcatttatttggtcaa

SEQ ID NO: 998365 - DNA, 33 bp, Homo sapien
tgctaactccagaacacgaggacaaactgagct

SEQ ID NO: 998366 - DNA, 33 bp, Homo sapien
tgctaactccagaacatgaggacaaactgagct

SEQ ID NO: 998367 - DNA, 33 bp, Homo sapien
tgacagacggcgtttacgtctccatgtttcctt

SEQ ID NO: 998368 - DNA, 33 bp, Homo sapien
tgacagacggcgtttatgtctccatgtttcctt

SEQ ID NO: 998369 - DNA, 33 bp, Homo sapien
gcaaagggtacaaaacactggtcgctttggtat

SEQ ID NO: 998370 - DNA, 33 bp, Homo sapien
gcaaagggtacaaaacgctggtcgctttggtat

SEQ ID NO: 998371 - DNA, 33 bp, Homo sapien
aggaggaaggagaacacaagacaataactgaaa

SEQ ID NO: 998372 - DNA, 33 bp, Homo sapien
aggaggaaggagaacataagacaataactgaaa

SEQ ID NO: 998373 - DNA, 33 bp, Homo sapien
aatactgccatcttaccagctctttgaacatgg

SEQ ID NO: 998374 - DNA, 33 bp, Homo sapien
aatactgccatcttactagctctttgaacatgg

SEQ ID NO: 998375 - DNA, 33 bp, Homo sapien
agacactccactctataacaataccaagaagta

SEQ ID NO: 998376 - DNA, 33 bp, Homo sapien
agacactccactctatgacaataccaagaagta

SEQ ID NO: 998377 - DNA, 33 bp, Homo sapien
tgtgctggacaacccgaagcgacagaggcaacg

SEQ ID NO: 998378 - DNA, 33 bp, Homo sapien
tgtgctggacaacccgcagcgacagaggcaacg

SEQ ID NO: 998379 - DNA, 33 bp, Homo sapien
tcccctctgatgccaaacaaccaaggtatttat

SEQ ID NO: 998380 - DNA, 33 bp, Homo sapien
tcccctctgatgccaaccaaccaaggtatttat

SEQ ID NO: 998381 - DNA, 33 bp, Homo sapien
gtgggaaccactgtgcaattttgaatgtgcggc

SEQ ID NO: 998382 - DNA, 33 bp, Homo sapien
gtgggaaccactgtgcgattttgaatgtgcggc

SEQ ID NO: 998383 - DNA, 33 bp, Homo sapien
ggggacaaatgccagcagatgacaaatagaggc

SEQ ID NO: 998384 - DNA, 33 bp, Homo sapien
ggggacaaatgccagcggatgacaaatagaggc

SEQ ID NO: 998385 - DNA, 33 bp, Homo sapien
atttcttgactcatgaacgttaaagatatttaa

SEQ ID NO: 998386 - DNA, 33 bp, Homo sapien
atttcttgactcatgatcgttaaagatatttaa

SEQ ID NO: 998387 - DNA, 33 bp, Homo sapien
gaaaaatgtggggtggacaaagagaagcagcta

SEQ ID NO: 998388 - DNA, 33 bp, Homo sapien
gaaaaatgtggggtgggcaaagagaagcagcta

SEQ ID NO: 998389 - DNA, 33 bp, Homo sapien
gctaataaggtgtccccgaaggtccctgccagc

SEQ ID NO: 998390 - DNA, 33 bp, Homo sapien
gctaataaggtgtccctgaaggtccctgccagc

SEQ ID NO: 998391 - DNA, 33 bp, Homo sapien
tgttttgaaatcctgacgtcccatttctgtgct

SEQ ID NO: 998392 - DNA, 33 bp, Homo sapien
tgttttgaaatcctgatgtcccatttctgtgct

SEQ ID NO: 998393 - DNA, 33 bp, Homo sapien
ctgggccaatttattaccctgtttggaccttga

SEQ ID NO: 998394 - DNA, 33 bp, Homo sapien
ctgggccaatttattatcctgtttggaccttga

SEQ ID NO: 998395 - DNA, 33 bp, Homo sapien
cagtctacatctccaactgtcactcttctgtag

SEQ ID NO: 998396 - DNA, 33 bp, Homo sapien
cagtctacatctccaattgtcactcttctgtag

SEQ ID NO: 998397 - DNA, 33 bp, Homo sapien
agctgatagaaaccagactaacttaggcaaaaa

SEQ ID NO: 998398 - DNA, 33 bp, Homo sapien
agctgatagaaaccaggctaacttaggcaaaaa

SEQ ID NO: 998399 - DNA, 33 bp, Homo sapien
gcagccagtggtctaacgagtcatggctatgtc

SEQ ID NO: 998400 - DNA, 33 bp, Homo sapien
gcagccagtggtctaatgagtcatggctatgtc

SEQ ID NO: 998401 - DNA, 33 bp, Homo sapien
gaccacttaactctcacgtatggtgatcccaac

SEQ ID NO: 998402 - DNA, 33 bp, Homo sapien
gaccacttaactctcatgtatggtgatcccaac

SEQ ID NO: 998403 - DNA, 33 bp, Homo sapien
gctacctggatgtatacgcagaatgaagaaaag

SEQ ID NO: 998404 - DNA, 33 bp, Homo sapien
gctacctggatgtatatgcagaatgaagaaaag

SEQ ID NO: 998405 - DNA, 33 bp, Homo sapien
actgtattctgtccccacgccatacgtataagc

SEQ ID NO: 998406 - DNA, 33 bp, Homo sapien
actgtattctgtccccgcgccatacgtataagc

SEQ ID NO: 998407 - DNA, 33 bp, Homo sapien
ccgttgctacttccaaacagtcctcctcagaac

SEQ ID NO: 998408 - DNA, 33 bp, Homo sapien
ccgttgctacttccaagcagtcctcctcagaac

SEQ ID NO: 998409 - DNA, 33 bp, Homo sapien
ctgccacaaagtcaagaagcaccttttgaggga

SEQ ID NO: 998410 - DNA, 33 bp, Homo sapien
ctgccacaaagtcaaggagcaccttttgaggga

SEQ ID NO: 998411 - DNA, 33 bp, Homo sapien
tgtccatccatttaacagtatttcttcacacct

SEQ ID NO: 998412 - DNA, 33 bp, Homo sapien
tgtccatccatttaacggtatttcttcacacct

SEQ ID NO: 998413 - DNA, 33 bp, Homo sapien
ggaccaactaaatacgcaactgatgaccgacaa

SEQ ID NO: 998414 - DNA, 33 bp, Homo sapien
ggaccaactaaatacgtaactgatgaccgacaa

SEQ ID NO: 998415 - DNA, 33 bp, Homo sapien
cctgagtggccgtgacagcagtgaccattggtg

SEQ ID NO: 998416 - DNA, 33 bp, Homo sapien
cctgagtggccgtgacggcagtgaccattggtg

SEQ ID NO: 998417 - DNA, 33 bp, Homo sapien
gtacttagggagacaacgctctttcaagaaaac

SEQ ID NO: 998418 - DNA, 33 bp, Homo sapien
gtacttagggagacaatgctctttcaagaaaac

SEQ ID NO: 998419 - DNA, 33 bp, Homo sapien
ccttctagttcacttgcatcttgcagacacaag

SEQ ID NO: 998420 - DNA, 33 bp, Homo sapien
ccttctagttcacttggatcttgcagacacaag

SEQ ID NO: 998421 - DNA, 33 bp, Homo sapien
gcctgtgtctcctttacggtggaaagtcgctga

SEQ ID NO: 998422 - DNA, 33 bp, Homo sapien
gcctgtgtctcctttatggtggaaagtcgctga

SEQ ID NO: 998423 - DNA, 33 bp, Homo sapien
cctgctctatccaacaatccttgtacacagaga

SEQ ID NO: 998424 - DNA, 33 bp, Homo sapien
cctgctctatccaacactccttgtacacagaga

SEQ ID NO: 998425 - DNA, 33 bp, Homo sapien
acttttcatttgtataaggtagctgtttaggag

SEQ ID NO: 998426 - DNA, 33 bp, Homo sapien
acttttcatttgtatacggtagctgtttaggag

SEQ ID NO: 998427 - DNA, 33 bp, Homo sapien
gaattcctcacttacaaagcagccaagcatgga

SEQ ID NO: 998428 - DNA, 33 bp, Homo sapien
gaattcctcacttacagagcagccaagcatgga

SEQ ID NO: 998429 - DNA, 33 bp, Homo sapien
cgcagggtgcacagcccggcaatccggagacgt

SEQ ID NO: 998430 - DNA, 33 bp, Homo sapien
cgcagggtgcacagcctggcaatccggagacgt

SEQ ID NO: 998431 - DNA, 33 bp, Homo sapien
acgagactgaataaaactgttcaaactgtgctc

SEQ ID NO: 998432 - DNA, 33 bp, Homo sapien
acgagactgaataaaagtgttcaaactgtgctc

SEQ ID NO: 998433 - DNA, 33 bp, Homo sapien
tggctttctaccccaactacgaggactgccaga

SEQ ID NO: 998434 - DNA, 33 bp, Homo sapien
tggctttctaccccaattacgaggactgccaga

SEQ ID NO: 998435 - DNA, 33 bp, Homo sapien
gcacgtggaacttctcaaaggtctgtggccagt

SEQ ID NO: 998436 - DNA, 33 bp, Homo sapien
gcacgtggaacttctcgaaggtctgtggccagt

SEQ ID NO: 998437 - DNA, 33 bp, Homo sapien
tcgaaagaaccaaaatcacatcaccttccaaca

SEQ ID NO: 998438 - DNA, 33 bp, Homo sapien
tcgaaagaaccaaaatgacatcaccttccaaca

SEQ ID NO: 998439 - DNA, 33 bp, Homo sapien
tggccaaagggcatgacattactaggactggtt

SEQ ID NO: 998440 - DNA, 33 bp, Homo sapien
tggccaaagggcatgatattactaggactggtt

SEQ ID NO: 998441 - DNA, 33 bp, Homo sapien
acaccacaccaaagtaagcggtttcccaggaag

SEQ ID NO: 998442 - DNA, 33 bp, Homo sapien
acaccacaccaaagtaggcggtttcccaggaag

SEQ ID NO: 998443 - DNA, 33 bp, Homo sapien
tctaaaagtacagctacgcccagttttacaaaa

SEQ ID NO: 998444 - DNA, 33 bp, Homo sapien
tctaaaagtacagctatgcccagttttacaaaa

SEQ ID NO: 998445 - DNA, 33 bp, Homo sapien
ccctctgtgtttctgccgcactgagaaaggtgc

SEQ ID NO: 998446 - DNA, 33 bp, Homo sapien
ccctctgtgtttctgctgcactgagaaaggtgc

SEQ ID NO: 998447 - DNA, 33 bp, Homo sapien
ggatgggacaatgaacacaaaagacccttctct

SEQ ID NO: 998448 - DNA, 33 bp, Homo sapien
ggatgggacaatgaacgcaaaagacccttctct

SEQ ID NO: 998449 - DNA, 33 bp, Homo sapien
gggtcacattgcagacacggtacttcctcttca

SEQ ID NO: 998450 - DNA, 33 bp, Homo sapien
gggtcacattgcagacgcggtacttcctcttca

SEQ ID NO: 998451 - DNA, 33 bp, Homo sapien
ccgggcagcttgtgagcccttcaactgctcccc

SEQ ID NO: 998452 - DNA, 33 bp, Homo sapien
ccgggcagcttgtgagtccttcaactgctcccc

SEQ ID NO: 998453 - DNA, 33 bp, Homo sapien
tctagggaccatcaccactgctttttgtgactg

SEQ ID NO: 998454 - DNA, 33 bp, Homo sapien
tctagggaccatcaccgctgctttttgtgactg

SEQ ID NO: 998455 - DNA, 33 bp, Homo sapien
tccacgtataggaaaccctttgacaggcaaaaa

SEQ ID NO: 998456 - DNA, 33 bp, Homo sapien
tccacgtataggaaactctttgacaggcaaaaa

SEQ ID NO: 998457 - DNA, 33 bp, Homo sapien
gtctagaactacagacacggtaatcatgtgcct

SEQ ID NO: 998458 - DNA, 33 bp, Homo sapien
gtctagaactacagacgcggtaatcatgtgcct

SEQ ID NO: 998459 - DNA, 33 bp, Homo sapien
attcgaattgtgtctaaatctgtccacttcacc

SEQ ID NO: 998460 - DNA, 33 bp, Homo sapien
attcgaattgtgtctacatctgtccacttcacc

SEQ ID NO: 998461 - DNA, 33 bp, Homo sapien
ccattccccaacctccactgcgcaggccaagca

SEQ ID NO: 998462 - DNA, 33 bp, Homo sapien
ccattccccaacctccgctgcgcaggccaagca

SEQ ID NO: 998463 - DNA, 33 bp, Homo sapien
gctcatggtgaaaataggccgctttcaggagcg

SEQ ID NO: 998464 - DNA, 33 bp, Homo sapien
gctcatggtgaaaatatgccgctttcaggagcg

SEQ ID NO: 998465 - DNA, 33 bp, Homo sapien
gggggcagcatcaaaacaggactcaccagtgag

SEQ ID NO: 998466 - DNA, 33 bp, Homo sapien
gggggcagcatcaaaagaggactcaccagtgag

SEQ ID NO: 998467 - DNA, 33 bp, Homo sapien
ctttgagaagagctgaacttcactgtggtttat

SEQ ID NO: 998468 - DNA, 33 bp, Homo sapien
ctttgagaagagctgaccttcactgtggtttat

SEQ ID NO: 998469 - DNA, 33 bp, Homo sapien
cttactaatttaaaaaacagttcacaatagctc

SEQ ID NO: 998470 - DNA, 33 bp, Homo sapien
cttactaatttaaaaagcagttcacaatagctc

SEQ ID NO: 998471 - DNA, 33 bp, Homo sapien
atgctgctctcctaccaacagtcctgggtgaga

SEQ ID NO: 998472 - DNA, 33 bp, Homo sapien
atgctgctctcctaccgacagtcctgggtgaga

SEQ ID NO: 998473 - DNA, 33 bp, Homo sapien
tcaggagtcattataaagctgcagtaatcaaga

SEQ ID NO: 998474 - DNA, 33 bp, Homo sapien
tcaggagtcattataaggctgcagtaatcaaga

SEQ ID NO: 998475 - DNA, 33 bp, Homo sapien
cactagaaacgagtcaagaagctcaactgaatc

SEQ ID NO: 998476 - DNA, 33 bp, Homo sapien
cactagaaacgagtcaggaagctcaactgaatc

SEQ ID NO: 998477 - DNA, 33 bp, Homo sapien
ttaataaagtctaaacagcgcaaatggagacga

SEQ ID NO: 998478 - DNA, 33 bp, Homo sapien
ttaataaagtctaaacggcgcaaatggagacga

SEQ ID NO: 998479 - DNA, 33 bp, Homo sapien
aagcatacatttcagaagcattaggtacattca

SEQ ID NO: 998480 - DNA, 33 bp, Homo sapien
aagcatacatttcagaggcattaggtacattca

SEQ ID NO: 998481 - DNA, 33 bp, Homo sapien
tgaactggaggacacccctgtgcaaccaacatg

SEQ ID NO: 998482 - DNA, 33 bp, Homo sapien
tgaactggaggacacctctgtgcaaccaacatg

SEQ ID NO: 998483 - DNA, 33 bp, Homo sapien
acacacaaagacacgacgtgcttaccctccatg

SEQ ID NO: 998484 - DNA, 33 bp, Homo sapien
acacacaaagacacgatgtgcttaccctccatg

SEQ ID NO: 998485 - DNA, 33 bp, Homo sapien
aattcctaaaatctatcacactgagaggaaaat

SEQ ID NO: 998486 - DNA, 33 bp, Homo sapien
aattcctaaaatctattacactgagaggaaaat

SEQ ID NO: 998487 - DNA, 33 bp, Homo sapien
gagagcttctacaaccaacacacactaccttcc

SEQ ID NO: 998488 - DNA, 33 bp, Homo sapien
gagagcttctacaaccgacacacactaccttcc

SEQ ID NO: 998489 - DNA, 33 bp, Homo sapien
gctgtctaaaaatctgaatctccagcgcagacc

SEQ ID NO: 998490 - DNA, 33 bp, Homo sapien
gctgtctaaaaatctgcatctccagcgcagacc

SEQ ID NO: 998491 - DNA, 33 bp, Homo sapien
acacacagaatacacactaaattgtaacttttt

SEQ ID NO: 998492 - DNA, 33 bp, Homo sapien
acacacagaatacacagtaaattgtaacttttt

SEQ ID NO: 998493 - DNA, 33 bp, Homo sapien
gtagattttggagtcacgcagttccaccattac

SEQ ID NO: 998494 - DNA, 33 bp, Homo sapien
gtagattttggagtcatgcagttccaccattac

SEQ ID NO: 998495 - DNA, 33 bp, Homo sapien
attgctcatggtaagcacacacactgtgttagc

SEQ ID NO: 998496 - DNA, 33 bp, Homo sapien
attgctcatggtaagcgcacacactgtgttagc

SEQ ID NO: 998497 - DNA, 33 bp, Homo sapien
gggctcattttgttgcaatataaaaatcaaata

SEQ ID NO: 998498 - DNA, 33 bp, Homo sapien
gggctcattttgttgccatataaaaatcaaata

SEQ ID NO: 998499 - DNA, 33 bp, Homo sapien
tactatgaattagccaaggcaagtgtacttaac

SEQ ID NO: 998500 - DNA, 33 bp, Homo sapien
tactatgaattagccagggcaagtgtacttaac

SEQ ID NO: 998501 - DNA, 33 bp, Homo sapien
gcagccttagagtctcgcttaatcctctgatta

SEQ ID NO: 998502 - DNA, 33 bp, Homo sapien
gcagccttagagtctctcttaatcctctgatta

SEQ ID NO: 998503 - DNA, 33 bp, Homo sapien
gtggggtgaggctgcaatcaactgtatgccagc

SEQ ID NO: 998504 - DNA, 33 bp, Homo sapien
gtggggtgaggctgcagtcaactgtatgccagc

SEQ ID NO: 998505 - DNA, 33 bp, Homo sapien
tactccaagaagtcacaattaagcttataagga

SEQ ID NO: 998506 - DNA, 33 bp, Homo sapien
tactccaagaagtcacgattaagcttataagga

SEQ ID NO: 998507 - DNA, 33 bp, Homo sapien
agtataaagtgcgacactggaagaagaaaacgt

SEQ ID NO: 998508 - DNA, 33 bp, Homo sapien
agtataaagtgcgacagtggaagaagaaaacgt

SEQ ID NO: 998509 - DNA, 33 bp, Homo sapien
tgagtatgacagagtggaataagagaattatag

SEQ ID NO: 998510 - DNA, 33 bp, Homo sapien
tgagtatgacagagtgtaataagagaattatag

SEQ ID NO: 998511 - DNA, 33 bp, Homo sapien
actataaaatgtatcacatggaaagtgaggtgg

SEQ ID NO: 998512 - DNA, 33 bp, Homo sapien
actataaaatgtatcatatggaaagtgaggtgg

SEQ ID NO: 998513 - DNA, 33 bp, Homo sapien
taaaacattctatgaaataacggagatagaagt

SEQ ID NO: 998514 - DNA, 33 bp, Homo sapien
taaaacattctatgaagtaacggagatagaagt

SEQ ID NO: 998515 - DNA, 33 bp, Homo sapien
catttgaagaatgttacgggcgtaaagtctaac

SEQ ID NO: 998516 - DNA, 33 bp, Homo sapien
catttgaagaatgttatgggcgtaaagtctaac

SEQ ID NO: 998517 - DNA, 33 bp, Homo sapien
ctatgcaatgttaagaaacaatctggactccaa

SEQ ID NO: 998518 - DNA, 33 bp, Homo sapien
ctatgcaatgttaagagacaatctggactccaa

SEQ ID NO: 998519 - DNA, 33 bp, Homo sapien
tactcttttctcaccacgcaaagtggaaatggc

SEQ ID NO: 998520 - DNA, 33 bp, Homo sapien
tactcttttctcaccatgcaaagtggaaatggc

SEQ ID NO: 998521 - DNA, 33 bp, Homo sapien
aaggaactccttgatacaaatacaatacttgca

SEQ ID NO: 998522 - DNA, 33 bp, Homo sapien
aaggaactccttgatagaaatacaatacttgca

SEQ ID NO: 998523 - DNA, 33 bp, Homo sapien
cttttctacaaagttgaagactcctcaaatgat

SEQ ID NO: 998524 - DNA, 33 bp, Homo sapien
cttttctacaaagttggagactcctcaaatgat

SEQ ID NO: 998525 - DNA, 33 bp, Homo sapien
aatgttcatggcataaacagtgacaagtcactt

SEQ ID NO: 998526 - DNA, 33 bp, Homo sapien
aatgttcatggcataagcagtgacaagtcactt

SEQ ID NO: 998527 - DNA, 33 bp, Homo sapien
atagatacacaagagacatgaagatgttatcat

SEQ ID NO: 998528 - DNA, 33 bp, Homo sapien
atagatacacaagagatatgaagatgttatcat

SEQ ID NO: 998529 - DNA, 33 bp, Homo sapien
tggcttgagagcaaaaaaggaataaaagacgat

SEQ ID NO: 998530 - DNA, 33 bp, Homo sapien
tggcttgagagcaaaagaggaataaaagacgat

SEQ ID NO: 998531 - DNA, 33 bp, Homo sapien
gctatggtgaattcaacgccaactgtgattttt

SEQ ID NO: 998532 - DNA, 33 bp, Homo sapien
gctatggtgaattcaatgccaactgtgattttt

SEQ ID NO: 998533 - DNA, 33 bp, Homo sapien
ccacatccttaccaaaagacagggtactgctat

SEQ ID NO: 998534 - DNA, 33 bp, Homo sapien
ccacatccttaccaaatgacagggtactgctat

SEQ ID NO: 998535 - DNA, 33 bp, Homo sapien
attaggatatcatctcaaacacttttctttcct

SEQ ID NO: 998536 - DNA, 33 bp, Homo sapien
attaggatatcatctccaacacttttctttcct

SEQ ID NO: 998537 - DNA, 33 bp, Homo sapien
ggcacccacgttaagagagcgagcttagttgat

SEQ ID NO: 998538 - DNA, 33 bp, Homo sapien
ggcacccacgttaagatagcgagcttagttgat

SEQ ID NO: 998539 - DNA, 33 bp, Homo sapien
taagaccagtttccacagaaaagaacacttcag

SEQ ID NO: 998540 - DNA, 33 bp, Homo sapien
taagaccagtttccacggaaaagaacacttcag

SEQ ID NO: 998541 - DNA, 33 bp, Homo sapien
atagaggactgcttacgctttttcacttatgtt

SEQ ID NO: 998542 - DNA, 33 bp, Homo sapien
atagaggactgcttactctttttcacttatgtt

SEQ ID NO: 998543 - DNA, 33 bp, Homo sapien
acccagagcctttacaacctgatcagtggtttt

SEQ ID NO: 998544 - DNA, 33 bp, Homo sapien
acccagagcctttacagcctgatcagtggtttt

SEQ ID NO: 998545 - DNA, 33 bp, Homo sapien
cacaacatcctgtacaacaggaaagaaacacta

SEQ ID NO: 998546 - DNA, 33 bp, Homo sapien
cacaacatcctgtacatcaggaaagaaacacta

SEQ ID NO: 998547 - DNA, 33 bp, Homo sapien
agagaacaaagaaagacgtgaactgacactcat

SEQ ID NO: 998548 - DNA, 33 bp, Homo sapien
agagaacaaagaaagatgtgaactgacactcat

SEQ ID NO: 998549 - DNA, 33 bp, Homo sapien
agtgccaagatgatagaagcgaggcactgcacc

SEQ ID NO: 998550 - DNA, 33 bp, Homo sapien
agtgccaagatgataggagcgaggcactgcacc

SEQ ID NO: 998551 - DNA, 33 bp, Homo sapien
accaaagtaaaggtcaaaaaagctccagttggt

SEQ ID NO: 998552 - DNA, 33 bp, Homo sapien
accaaagtaaaggtcagaaaagctccagttggt

SEQ ID NO: 998553 - DNA, 33 bp, Homo sapien
gttacttgtcactaaaaggttaggctccaatca

SEQ ID NO: 998554 - DNA, 33 bp, Homo sapien
gttacttgtcactaaatggttaggctccaatca

SEQ ID NO: 998555 - DNA, 33 bp, Homo sapien
attccctgagatacaaaaatactgcaattagaa

SEQ ID NO: 998556 - DNA, 33 bp, Homo sapien
attccctgagatacaagaatactgcaattagaa

SEQ ID NO: 998557 - DNA, 33 bp, Homo sapien
aacaagaaggttcaaaatgatggtaggttcagc

SEQ ID NO: 998558 - DNA, 33 bp, Homo sapien
aacaagaaggttcaaagtgatggtaggttcagc

SEQ ID NO: 998559 - DNA, 33 bp, Homo sapien
gggaattctgccccaaatcattcattatctcct

SEQ ID NO: 998560 - DNA, 33 bp, Homo sapien
gggaattctgccccaagtcattcattatctcct

SEQ ID NO: 998561 - DNA, 33 bp, Homo sapien
tgtctgattttttccactgaaagtctggaatta

SEQ ID NO: 998562 - DNA, 33 bp, Homo sapien
tgtctgattttttccattgaaagtctggaatta

SEQ ID NO: 998563 - DNA, 33 bp, Homo sapien
catagtggcttcttccaaaagtgtacagttttc

SEQ ID NO: 998564 - DNA, 33 bp, Homo sapien
catagtggcttcttcccaaagtgtacagttttc

SEQ ID NO: 998565 - DNA, 33 bp, Homo sapien
tctgataaataagaacaatgtccacaggcacca

SEQ ID NO: 998566 - DNA, 33 bp, Homo sapien
tctgataaataagaacgatgtccacaggcacca

SEQ ID NO: 998567 - DNA, 33 bp, Homo sapien
ggagactctatttctaaggatcggttctttgat

SEQ ID NO: 998568 - DNA, 33 bp, Homo sapien
ggagactctatttctagggatcggttctttgat

SEQ ID NO: 998569 - DNA, 33 bp, Homo sapien
taaatgaggtgcaaagcctgggaaggcacttct

SEQ ID NO: 998570 - DNA, 33 bp, Homo sapien
taaatgaggtgcaaagtctgggaaggcacttct

SEQ ID NO: 998571 - DNA, 33 bp, Homo sapien
aatgggcaagccgctacggatagttgctggcat

SEQ ID NO: 998572 - DNA, 33 bp, Homo sapien
aatgggcaagccgctatggatagttgctggcat

SEQ ID NO: 998573 - DNA, 33 bp, Homo sapien
atcctggccggcacccactggctgctccagctt

SEQ ID NO: 998574 - DNA, 33 bp, Homo sapien
atcctggccggcacccgctggctgctccagctt

SEQ ID NO: 998575 - DNA, 33 bp, Homo sapien
agcaaatgcatgctgaacaaaggccgactcggg

SEQ ID NO: 998576 - DNA, 33 bp, Homo sapien
agcaaatgcatgctgagcaaaggccgactcggg

SEQ ID NO: 998577 - DNA, 33 bp, Homo sapien
tttctctctacgtggcacagaagggcaccgtct

SEQ ID NO: 998578 - DNA, 33 bp, Homo sapien
tttctctctacgtggcgcagaagggcaccgtct

SEQ ID NO: 998579 - DNA, 33 bp, Homo sapien
agactcactcaccaaccgcttctggaagcacct

SEQ ID NO: 998580 - DNA, 33 bp, Homo sapien
agactcactcaccaactgcttctggaagcacct

SEQ ID NO: 998581 - DNA, 33 bp, Homo sapien
gcacagggaaagcaccgaacacagcacaggacg

SEQ ID NO: 998582 - DNA, 33 bp, Homo sapien
gcacagggaaagcacctaacacagcacaggacg

SEQ ID NO: 998583 - DNA, 33 bp, Homo sapien
attcagtcgataacacagctcacacccactagg

SEQ ID NO: 998584 - DNA, 33 bp, Homo sapien
attcagtcgataacacggctcacacccactagg

SEQ ID NO: 998585 - DNA, 33 bp, Homo sapien
cctcactgttcctagacgtcacctcctgctgct

SEQ ID NO: 998586 - DNA, 33 bp, Homo sapien
cctcactgttcctagatgtcacctcctgctgct

SEQ ID NO: 998587 - DNA, 33 bp, Homo sapien
ttgtagacatttttgacgtgccttttgataagt

SEQ ID NO: 998588 - DNA, 33 bp, Homo sapien
ttgtagacatttttgatgtgccttttgataagt

SEQ ID NO: 998589 - DNA, 33 bp, Homo sapien
gactccattggccttgaatcaggttttctgata

SEQ ID NO: 998590 - DNA, 33 bp, Homo sapien
gactccattggccttgtatcaggttttctgata

SEQ ID NO: 998591 - DNA, 33 bp, Homo sapien
atgagagtagcagttcccaggatgttccgctac

SEQ ID NO: 998592 - DNA, 33 bp, Homo sapien
atgagagtagcagttctcaggatgttccgctac

SEQ ID NO: 998593 - DNA, 33 bp, Homo sapien
cacacaggatgtgtccaaatggagctgtgctgt

SEQ ID NO: 998594 - DNA, 33 bp, Homo sapien
cacacaggatgtgtcccaatggagctgtgctgt

SEQ ID NO: 998595 - DNA, 33 bp, Homo sapien
aggaaaaggaacagtaagtacaaagcaaggcaa

SEQ ID NO: 998596 - DNA, 33 bp, Homo sapien
aggaaaaggaacagtaggtacaaagcaaggcaa

SEQ ID NO: 998597 - DNA, 33 bp, Homo sapien
atgggaccttggctgacagaaaacgcacagcca

SEQ ID NO: 998598 - DNA, 33 bp, Homo sapien
atgggaccttggctgatagaaaacgcacagcca

SEQ ID NO: 998599 - DNA, 33 bp, Homo sapien
tatgttaccagtcacaaagaggagcgcccgctg

SEQ ID NO: 998600 - DNA, 33 bp, Homo sapien
tatgttaccagtcacagagaggagcgcccgctg

SEQ ID NO: 998601 - DNA, 33 bp, Homo sapien
catcaaccttacttccaacagtgtggcttcatc

SEQ ID NO: 998602 - DNA, 33 bp, Homo sapien
catcaaccttacttccgacagtgtggcttcatc

SEQ ID NO: 998603 - DNA, 33 bp, Homo sapien
ggctcattctccagcacgatgacacaaaaggga

SEQ ID NO: 998604 - DNA, 33 bp, Homo sapien
ggctcattctccagcatgatgacacaaaaggga

SEQ ID NO: 998605 - DNA, 33 bp, Homo sapien
acacatgtaactagcaaccagatgaggaaacag

SEQ ID NO: 998606 - DNA, 33 bp, Homo sapien
acacatgtaactagcacccagatgaggaaacag

SEQ ID NO: 998607 - DNA, 33 bp, Homo sapien
caaactggaaaggaacactgaaggtagtccggc

SEQ ID NO: 998608 - DNA, 33 bp, Homo sapien
caaactggaaaggaacgctgaaggtagtccggc

SEQ ID NO: 998609 - DNA, 33 bp, Homo sapien
atggcttgcttctgtacacaaattggtaacaag

SEQ ID NO: 998610 - DNA, 33 bp, Homo sapien
atggcttgcttctgtagacaaattggtaacaag

SEQ ID NO: 998611 - DNA, 33 bp, Homo sapien
aagcaaagcacagggaaacagaaaggagagaca

SEQ ID NO: 998612 - DNA, 33 bp, Homo sapien
aagcaaagcacagggagacagaaaggagagaca

SEQ ID NO: 998613 - DNA, 33 bp, Homo sapien
aacaaccagcgctggcacggacgttaggagaag

SEQ ID NO: 998614 - DNA, 33 bp, Homo sapien
aacaaccagcgctggcgcggacgttaggagaag

SEQ ID NO: 998615 - DNA, 33 bp, Homo sapien
aaatattccagggctacgcggtctcttagccca

SEQ ID NO: 998616 - DNA, 33 bp, Homo sapien
aaatattccagggctatgcggtctcttagccca

SEQ ID NO: 998617 - DNA, 33 bp, Homo sapien
gcaagaaggagaggaaaaacactgccagagaaa

SEQ ID NO: 998618 - DNA, 33 bp, Homo sapien
gcaagaaggagaggaagaacactgccagagaaa

SEQ ID NO: 998619 - DNA, 33 bp, Homo sapien
catttattctggggtacgaaaaagcaacgcgtt

SEQ ID NO: 998620 - DNA, 33 bp, Homo sapien
catttattctggggtatgaaaaagcaacgcgtt

SEQ ID NO: 998621 - DNA, 33 bp, Homo sapien
tgacatgaagagtttaaatcacggatgaatttg

SEQ ID NO: 998622 - DNA, 33 bp, Homo sapien
tgacatgaagagtttagatcacggatgaatttg

SEQ ID NO: 998623 - DNA, 33 bp, Homo sapien
agcacatactgtgccacggattttcccacatta

SEQ ID NO: 998624 - DNA, 33 bp, Homo sapien
agcacatactgtgccatggattttcccacatta

SEQ ID NO: 998625 - DNA, 33 bp, Homo sapien
atccacgtgcacagacgggggaaaaacttgagt

SEQ ID NO: 998626 - DNA, 33 bp, Homo sapien
atccacgtgcacagactggggaaaaacttgagt

SEQ ID NO: 998627 - DNA, 33 bp, Homo sapien
caacgaaaagcaaaaaatgtgaaaactgtggca

SEQ ID NO: 998628 - DNA, 33 bp, Homo sapien
caacgaaaagcaaaaagtgtgaaaactgtggca

SEQ ID NO: 998629 - DNA, 33 bp, Homo sapien
attttgccatttaagaaagcctcaagcatggag

SEQ ID NO: 998630 - DNA, 33 bp, Homo sapien
attttgccatttaagatagcctcaagcatggag

SEQ ID NO: 998631 - DNA, 33 bp, Homo sapien
gcacaatcaaatccgtcacactggagcagtggg

SEQ ID NO: 998632 - DNA, 33 bp, Homo sapien
gcacaatcaaatccgtgacactggagcagtggg

SEQ ID NO: 998633 - DNA, 33 bp, Homo sapien
aggcatcccgtcagccactgggtagaaaggcag

SEQ ID NO: 998634 - DNA, 33 bp, Homo sapien
aggcatcccgtcagccgctgggtagaaaggcag

SEQ ID NO: 998635 - DNA, 33 bp, Homo sapien
gcctgtcttgcctggacgcaccactgctctcct

SEQ ID NO: 998636 - DNA, 33 bp, Homo sapien
gcctgtcttgcctggatgcaccactgctctcct

SEQ ID NO: 998637 - DNA, 33 bp, Homo sapien
tctggtttaataaacactgatgtccggctcctt

SEQ ID NO: 998638 - DNA, 33 bp, Homo sapien
tctggtttaataaacagtgatgtccggctcctt

SEQ ID NO: 998639 - DNA, 33 bp, Homo sapien
gtcttgaaaatgacccaggaccattctgaacgt

SEQ ID NO: 998640 - DNA, 33 bp, Homo sapien
gtcttgaaaatgacccgggaccattctgaacgt

SEQ ID NO: 998641 - DNA, 33 bp, Homo sapien
ttacaggaaaataaaactatggatcaatctcca

SEQ ID NO: 998642 - DNA, 33 bp, Homo sapien
ttacaggaaaataaaattatggatcaatctcca

SEQ ID NO: 998643 - DNA, 33 bp, Homo sapien
tggggccatcagtcgcactgacttctgggtccc

SEQ ID NO: 998644 - DNA, 33 bp, Homo sapien
tggggccatcagtcgcgctgacttctgggtccc

SEQ ID NO: 998645 - DNA, 33 bp, Homo sapien
accccgttcacaccagaatcagcattcacgact

SEQ ID NO: 998646 - DNA, 33 bp, Homo sapien
accccgttcacaccagtatcagcattcacgact

SEQ ID NO: 998647 - DNA, 33 bp, Homo sapien
gtttacgcgcccttgacgtttttcaaacagaaa

SEQ ID NO: 998648 - DNA, 33 bp, Homo sapien
gtttacgcgcccttgatgtttttcaaacagaaa

SEQ ID NO: 998649 - DNA, 33 bp, Homo sapien
cctatcacagaaacccacgtgtccatcaccaac

SEQ ID NO: 998650 - DNA, 33 bp, Homo sapien
cctatcacagaaacccgcgtgtccatcaccaac

SEQ ID NO: 998651 - DNA, 33 bp, Homo sapien
tgtgatgtccaaaggcacggaaaggaccctcca

SEQ ID NO: 998652 - DNA, 33 bp, Homo sapien
tgtgatgtccaaaggcgcggaaaggaccctcca

SEQ ID NO: 998653 - DNA, 33 bp, Homo sapien
aacgagaagtatgtgaagcgtgtccgctggatg

SEQ ID NO: 998654 - DNA, 33 bp, Homo sapien
aacgagaagtatgtgacgcgtgtccgctggatg

SEQ ID NO: 998655 - DNA, 33 bp, Homo sapien
tcagaaagaatgggaaacggtcattactcccac

SEQ ID NO: 998656 - DNA, 33 bp, Homo sapien
tcagaaagaatgggaagcggtcattactcccac

SEQ ID NO: 998657 - DNA, 33 bp, Homo sapien
tgccaagtgccagtcccgacgtgtagacttggg

SEQ ID NO: 998658 - DNA, 33 bp, Homo sapien
tgccaagtgccagtcctgacgtgtagacttggg

SEQ ID NO: 998659 - DNA, 33 bp, Homo sapien
ccccccttacctgacactcaataactgcttagt

SEQ ID NO: 998660 - DNA, 33 bp, Homo sapien
ccccccttacctgacattcaataactgcttagt

SEQ ID NO: 998661 - DNA, 33 bp, Homo sapien
acagcgggtgtgtctgcagagtgcacttccggt

SEQ ID NO: 998662 - DNA, 33 bp, Homo sapien
acagcgggtgtgtctgtagagtgcacttccggt

SEQ ID NO: 998663 - DNA, 33 bp, Homo sapien
gttcccaaatagttcacaagctagaaaatacgt

SEQ ID NO: 998664 - DNA, 33 bp, Homo sapien
gttcccaaatagttcataagctagaaaatacgt

SEQ ID NO: 998665 - DNA, 33 bp, Homo sapien
ggaggagtataaagagactctaagagacccctg

SEQ ID NO: 998666 - DNA, 33 bp, Homo sapien
ggaggagtataaagaggctctaagagacccctg

SEQ ID NO: 998667 - DNA, 33 bp, Homo sapien
ctactctatagaacgaagaacaaccagaaatgg

SEQ ID NO: 998668 - DNA, 33 bp, Homo sapien
ctactctatagaacgatgaacaaccagaaatgg

SEQ ID NO: 998669 - DNA, 33 bp, Homo sapien
tttacaccagttgttaaaagtttgctaggaaag

SEQ ID NO: 998670 - DNA, 33 bp, Homo sapien
tttacaccagttgttagaagtttgctaggaaag

SEQ ID NO: 998671 - DNA, 33 bp, Homo sapien
ttttttcccagagcgaatcaaaagttcacgtgc

SEQ ID NO: 998672 - DNA, 33 bp, Homo sapien
ttttttcccagagcgattcaaaagttcacgtgc

SEQ ID NO: 998673 - DNA, 33 bp, Homo sapien
ttgtgcatggacacccacttgtctgccgtgtgc

SEQ ID NO: 998674 - DNA, 33 bp, Homo sapien
ttgtgcatggacacccgcttgtctgccgtgtgc

SEQ ID NO: 998675 - DNA, 33 bp, Homo sapien
aaatcccttctgcaatcacgtgaaggcatctaa

SEQ ID NO: 998676 - DNA, 33 bp, Homo sapien
aaatcccttctgcaatgacgtgaaggcatctaa

SEQ ID NO: 998677 - DNA, 33 bp, Homo sapien
ctgctgcatttctccacgcagaagacaaacggc

SEQ ID NO: 998678 - DNA, 33 bp, Homo sapien
ctgctgcatttctccaggcagaagacaaacggc

SEQ ID NO: 998679 - DNA, 33 bp, Homo sapien
ttgaaaacatgtctagcccactactgaactatt

SEQ ID NO: 998680 - DNA, 33 bp, Homo sapien
ttgaaaacatgtctagtccactactgaactatt

SEQ ID NO: 998681 - DNA, 33 bp, Homo sapien
gctggaaaagtcatcacaaactgagcacactgt

SEQ ID NO: 998682 - DNA, 33 bp, Homo sapien
gctggaaaagtcatcataaactgagcacactgt

SEQ ID NO: 998683 - DNA, 33 bp, Homo sapien
ccctccctttcctttcaaactgggatcaatggt

SEQ ID NO: 998684 - DNA, 33 bp, Homo sapien
ccctccctttcctttcgaactgggatcaatggt

SEQ ID NO: 998685 - DNA, 33 bp, Homo sapien
tgtctcattggcctcaaagaagcgaatgctcac

SEQ ID NO: 998686 - DNA, 33 bp, Homo sapien
tgtctcattggcctcagagaagcgaatgctcac

SEQ ID NO: 998687 - DNA, 33 bp, Homo sapien
cccagaggtcaactacaagtcctgcttttcccg

SEQ ID NO: 998688 - DNA, 33 bp, Homo sapien
cccagaggtcaactacgagtcctgcttttcccg

SEQ ID NO: 998689 - DNA, 33 bp, Homo sapien
cacacccactcctttacatctgctgtaaggctg

SEQ ID NO: 998690 - DNA, 33 bp, Homo sapien
cacacccactcctttatatctgctgtaaggctg

SEQ ID NO: 998691 - DNA, 33 bp, Homo sapien
gtttgtgatctgtttaactgattagtgtctgct

SEQ ID NO: 998692 - DNA, 33 bp, Homo sapien
gtttgtgatctgtttatctgattagtgtctgct

SEQ ID NO: 998693 - DNA, 33 bp, Homo sapien
cggagggacctgaagccaccgtgctaagtgaaa

SEQ ID NO: 998694 - DNA, 33 bp, Homo sapien
cggagggacctgaagctaccgtgctaagtgaaa

SEQ ID NO: 998695 - DNA, 33 bp, Homo sapien
tcagtgatgggctgcgcatatgacagtggtcct

SEQ ID NO: 998696 - DNA, 33 bp, Homo sapien
tcagtgatgggctgcgtatatgacagtggtcct

SEQ ID NO: 998697 - DNA, 33 bp, Homo sapien
agattccaaatagctgaaaaatggctgttgccc

SEQ ID NO: 998698 - DNA, 33 bp, Homo sapien
agattccaaatagctggaaaatggctgttgccc

SEQ ID NO: 998699 - DNA, 33 bp, Homo sapien
tgtcacactggtgatcaagtttctgacatgtga

SEQ ID NO: 998700 - DNA, 33 bp, Homo sapien
tgtcacactggtgatcgagtttctgacatgtga

SEQ ID NO: 998701 - DNA, 33 bp, Homo sapien
agggcatcttgtctcaacatctgctcttacaca

SEQ ID NO: 998702 - DNA, 33 bp, Homo sapien
agggcatcttgtctcaccatctgctcttacaca

SEQ ID NO: 998703 - DNA, 33 bp, Homo sapien
agcctaagaggacaagactagagtaagccctga

SEQ ID NO: 998704 - DNA, 33 bp, Homo sapien
agcctaagaggacaaggctagagtaagccctga

SEQ ID NO: 998705 - DNA, 33 bp, Homo sapien
tttctcgtcagcgttaccacaaaaccacgttga

SEQ ID NO: 998706 - DNA, 33 bp, Homo sapien
tttctcgtcagcgttatcacaaaaccacgttga

SEQ ID NO: 998707 - DNA, 33 bp, Homo sapien
gctcacctactaagccccaatcctggtcacaca

SEQ ID NO: 998708 - DNA, 33 bp, Homo sapien
gctcacctactaagcctcaatcctggtcacaca

SEQ ID NO: 998709 - DNA, 33 bp, Homo sapien
ttgggttagactttggaaagcacttcctctctg

SEQ ID NO: 998710 - DNA, 33 bp, Homo sapien
ttgggttagactttgggaagcacttcctctctg

SEQ ID NO: 998711 - DNA, 33 bp, Homo sapien
gcatttaaatatgggccaagagtatggagggta

SEQ ID NO: 998712 - DNA, 33 bp, Homo sapien
gcatttaaatatgggcgaagagtatggagggta

SEQ ID NO: 998713 - DNA, 33 bp, Homo sapien
tccgtcactcacaagcaagggccagtgccgcgg

SEQ ID NO: 998714 - DNA, 33 bp, Homo sapien
tccgtcactcacaagcgagggccagtgccgcgg

SEQ ID NO: 998715 - DNA, 33 bp, Homo sapien
actgtcagaactttcacggatggcatttcatca

SEQ ID NO: 998716 - DNA, 33 bp, Homo sapien
actgtcagaactttcatggatggcatttcatca

SEQ ID NO: 998717 - DNA, 33 bp, Homo sapien
gctggcttgtcctctcaccccaagctgtgtcat

SEQ ID NO: 998718 - DNA, 33 bp, Homo sapien
gctggcttgtcctctcgccccaagctgtgtcat

SEQ ID NO: 998719 - DNA, 33 bp, Homo sapien
tgtagagcagggacaacgacattcatctcgagt

SEQ ID NO: 998720 - DNA, 33 bp, Homo sapien
tgtagagcagggacaatgacattcatctcgagt

SEQ ID NO: 998721 - DNA, 33 bp, Homo sapien
actggcacacaagggaaaatgtcaggtgaccac

SEQ ID NO: 998722 - DNA, 33 bp, Homo sapien
actggcacacaagggagaatgtcaggtgaccac

SEQ ID NO: 998723 - DNA, 33 bp, Homo sapien
ccacgtctctgcgtaaaatcctccagtggtccc

SEQ ID NO: 998724 - DNA, 33 bp, Homo sapien
ccacgtctctgcgtaagatcctccagtggtccc

SEQ ID NO: 998725 - DNA, 33 bp, Homo sapien
accacagtgcttgaccaagttcacaaatctgtt

SEQ ID NO: 998726 - DNA, 33 bp, Homo sapien
accacagtgcttgaccgagttcacaaatctgtt

SEQ ID NO: 998727 - DNA, 33 bp, Homo sapien
ttcaagctgaaaaaaacggtgccacggtcagga

SEQ ID NO: 998728 - DNA, 33 bp, Homo sapien
ttcaagctgaaaaaaatggtgccacggtcagga

SEQ ID NO: 998729 - DNA, 33 bp, Homo sapien
tgctcatggcatcacaaatttagtattccttta

SEQ ID NO: 998730 - DNA, 33 bp, Homo sapien
tgctcatggcatcacacatttagtattccttta

SEQ ID NO: 998731 - DNA, 33 bp, Homo sapien
tgtcttcttgttctatcaattgcttgtgttgct

SEQ ID NO: 998732 - DNA, 33 bp, Homo sapien
tgtcttcttgttctattaattgcttgtgttgct

SEQ ID NO: 998733 - DNA, 33 bp, Homo sapien
tcactggcacggtgcccgatgctttccacggat

SEQ ID NO: 998734 - DNA, 33 bp, Homo sapien
tcactggcacggtgccggatgctttccacggat

SEQ ID NO: 998735 - DNA, 33 bp, Homo sapien
tgggaggtacatctacagactcaactacttcta

SEQ ID NO: 998736 - DNA, 33 bp, Homo sapien
tgggaggtacatctacggactcaactacttcta

SEQ ID NO: 998737 - DNA, 33 bp, Homo sapien
atttctttttcttttgaaatcttatgcatgtgt

SEQ ID NO: 998738 - DNA, 33 bp, Homo sapien
atttctttttcttttggaatcttatgcatgtgt

SEQ ID NO: 998739 - DNA, 33 bp, Homo sapien
tcccattacaatgcccccaacctgcctgtgtcc

SEQ ID NO: 998740 - DNA, 33 bp, Homo sapien
tcccattacaatgccctcaacctgcctgtgtcc

SEQ ID NO: 998741 - DNA, 33 bp, Homo sapien
agccttgtgggttaccaagcaatttccatccag

SEQ ID NO: 998742 - DNA, 33 bp, Homo sapien
agccttgtgggttacccagcaatttccatccag

SEQ ID NO: 998743 - DNA, 33 bp, Homo sapien
ggtgcaatgggagcaaattacccctgtgggcac

SEQ ID NO: 998744 - DNA, 33 bp, Homo sapien
ggtgcaatgggagcaagttacccctgtgggcac

SEQ ID NO: 998745 - DNA, 33 bp, Homo sapien
agcagtatgttatttgaagctctgactggctta

SEQ ID NO: 998746 - DNA, 33 bp, Homo sapien
agcagtatgttatttggagctctgactggctta

SEQ ID NO: 998747 - DNA, 33 bp, Homo sapien
tggaggggaccacaaagccagagcagacgggca

SEQ ID NO: 998748 - DNA, 33 bp, Homo sapien
tggaggggaccacaaatccagagcagacgggca

SEQ ID NO: 998749 - DNA, 33 bp, Homo sapien
gatggactcatctcacagaatacgcagcaaagg

SEQ ID NO: 998750 - DNA, 33 bp, Homo sapien
gatggactcatctcactgaatacgcagcaaagg

SEQ ID NO: 998751 - DNA, 33 bp, Homo sapien
ttggtccagggtgtgaacgcatgacccagtgtg

SEQ ID NO: 998752 - DNA, 33 bp, Homo sapien
ttggtccagggtgtgagcgcatgacccagtgtg

SEQ ID NO: 998753 - DNA, 33 bp, Homo sapien
actgaggaacagaggacgcgccggacccttctt

SEQ ID NO: 998754 - DNA, 33 bp, Homo sapien
actgaggaacagaggatgcgccggacccttctt

SEQ ID NO: 998755 - DNA, 33 bp, Homo sapien
agcttcctgtcccaaacgcttgctcataactct

SEQ ID NO: 998756 - DNA, 33 bp, Homo sapien
agcttcctgtcccaaatgcttgctcataactct

SEQ ID NO: 998757 - DNA, 33 bp, Homo sapien
atccctcctgcaccaccgtcaagacaaccctgg

SEQ ID NO: 998758 - DNA, 33 bp, Homo sapien
atccctcctgcaccacggtcaagacaaccctgg

SEQ ID NO: 998759 - DNA, 33 bp, Homo sapien
ccacctgaagactatacgccctgcatccctggc

SEQ ID NO: 998760 - DNA, 33 bp, Homo sapien
ccacctgaagactatatgccctgcatccctggc

SEQ ID NO: 998761 - DNA, 33 bp, Homo sapien
aacgtcatgaagtcaccgggggctgtctctagg

SEQ ID NO: 998762 - DNA, 33 bp, Homo sapien
aacgtcatgaagtcactgggggctgtctctagg

SEQ ID NO: 998763 - DNA, 33 bp, Homo sapien
cctcccttgagggggacgggccagaacaatgaa

SEQ ID NO: 998764 - DNA, 33 bp, Homo sapien
cctcccttgagggggatgggccagaacaatgaa

SEQ ID NO: 998765 - DNA, 33 bp, Homo sapien
acccattgccttgtgcacactgtgagcctgtga

SEQ ID NO: 998766 - DNA, 33 bp, Homo sapien
acccattgccttgtgcgcactgtgagcctgtga

SEQ ID NO: 998767 - DNA, 33 bp, Homo sapien
aggtatcataacgatccccatcttagagatgag

SEQ ID NO: 998768 - DNA, 33 bp, Homo sapien
aggtatcataacgatctccatcttagagatgag

SEQ ID NO: 998769 - DNA, 33 bp, Homo sapien
gtccctctggcctcaaagtcctttgcaaagaca

SEQ ID NO: 998770 - DNA, 33 bp, Homo sapien
gtccctctggcctcaatgtcctttgcaaagaca

SEQ ID NO: 998771 - DNA, 33 bp, Homo sapien
cgctggacctcacatcacagggcctgaccctct

SEQ ID NO: 998772 - DNA, 33 bp, Homo sapien
cgctggacctcacatcgcagggcctgaccctct

SEQ ID NO: 998773 - DNA, 33 bp, Homo sapien
gattgacctgagcttacaggctgggcgtgaagt

SEQ ID NO: 998774 - DNA, 33 bp, Homo sapien
gattgacctgagcttataggctgggcgtgaagt

SEQ ID NO: 998775 - DNA, 33 bp, Homo sapien
atggccgagtcatctacctaaacaggcctcccc

SEQ ID NO: 998776 - DNA, 33 bp, Homo sapien
atggccgagtcatctatctaaacaggcctcccc

SEQ ID NO: 998777 - DNA, 33 bp, Homo sapien
ccacccaggaggtttcgaattcggaccacagca

SEQ ID NO: 998778 - DNA, 33 bp, Homo sapien
ccacccaggaggtttctaattcggaccacagca

SEQ ID NO: 998779 - DNA, 33 bp, Homo sapien
acagtggacagtaggaactcaatcagaaagctc

SEQ ID NO: 998780 - DNA, 33 bp, Homo sapien
acagtggacagtaggatctcaatcagaaagctc

SEQ ID NO: 998781 - DNA, 33 bp, Homo sapien
ggcagatgaaagctgacgagttgaataaatgag

SEQ ID NO: 998782 - DNA, 33 bp, Homo sapien
ggcagatgaaagctgaggagttgaataaatgag

SEQ ID NO: 998783 - DNA, 33 bp, Homo sapien
tgaagggtctcgggcaagtgtcttagtctcctt

SEQ ID NO: 998784 - DNA, 33 bp, Homo sapien
tgaagggtctcgggcacgtgtcttagtctcctt

SEQ ID NO: 998785 - DNA, 33 bp, Homo sapien
ccactccatcacgtaacgacagagaccatggat

SEQ ID NO: 998786 - DNA, 33 bp, Homo sapien
ccactccatcacgtaatgacagagaccatggat

SEQ ID NO: 998787 - DNA, 33 bp, Homo sapien
gggacttctccggacactcagctgacctctcgc

SEQ ID NO: 998788 - DNA, 33 bp, Homo sapien
gggacttctccggacattcagctgacctctcgc

SEQ ID NO: 998789 - DNA, 33 bp, Homo sapien
cttagggaacatgggacaaacccacagcgagat

SEQ ID NO: 998790 - DNA, 33 bp, Homo sapien
cttagggaacatgggagaaacccacagcgagat

SEQ ID NO: 998791 - DNA, 33 bp, Homo sapien
gggccgtcagagtctcacagctcccgggtgtga

SEQ ID NO: 998792 - DNA, 33 bp, Homo sapien
gggccgtcagagtctcgcagctcccgggtgtga

SEQ ID NO: 998793 - DNA, 33 bp, Homo sapien
ggagtgatggtaacaacggccgagggctcctga

SEQ ID NO: 998794 - DNA, 33 bp, Homo sapien
ggagtgatggtaacaatggccgagggctcctga

SEQ ID NO: 998795 - DNA, 33 bp, Homo sapien
ctgagcagatgccagcaagaagttagttgttcc

SEQ ID NO: 998796 - DNA, 33 bp, Homo sapien
ctgagcagatgccagcgagaagttagttgttcc

SEQ ID NO: 998797 - DNA, 33 bp, Homo sapien
ccaggcttcagagctacgattcatctatcttta

SEQ ID NO: 998798 - DNA, 33 bp, Homo sapien
ccaggcttcagagctaggattcatctatcttta

SEQ ID NO: 998799 - DNA, 33 bp, Homo sapien
tgtaacctcaaggaccaggattctgccagtgcc

SEQ ID NO: 998800 - DNA, 33 bp, Homo sapien
tgtaacctcaaggacccggattctgccagtgcc

SEQ ID NO: 998801 - DNA, 33 bp, Homo sapien
acagcacccccaagccgcaggagtttcaacaac

SEQ ID NO: 998802 - DNA, 33 bp, Homo sapien
acagcacccccaagcctcaggagtttcaacaac

SEQ ID NO: 998803 - DNA, 33 bp, Homo sapien
agctggtcagttgtgacgttttggatggcatct

SEQ ID NO: 998804 - DNA, 33 bp, Homo sapien
agctggtcagttgtgatgttttggatggcatct

SEQ ID NO: 998805 - DNA, 33 bp, Homo sapien
gcagatattgaaatacagagtgcgctcttctct

SEQ ID NO: 998806 - DNA, 33 bp, Homo sapien
gcagatattgaaatacggagtgcgctcttctct

SEQ ID NO: 998807 - DNA, 33 bp, Homo sapien
tcccagataggaaaacagttcctggagtgagcc

SEQ ID NO: 998808 - DNA, 33 bp, Homo sapien
tcccagataggaaaactgttcctggagtgagcc

SEQ ID NO: 998809 - DNA, 33 bp, Homo sapien
aagggacctaagaaacaccggggatggaaatgc

SEQ ID NO: 998810 - DNA, 33 bp, Homo sapien
aagggacctaagaaacgccggggatggaaatgc

SEQ ID NO: 998811 - DNA, 33 bp, Homo sapien
acgctctgcggctgaaacttcaactctgtcgag

SEQ ID NO: 998812 - DNA, 33 bp, Homo sapien
acgctctgcggctgaaccttcaactctgtcgag

SEQ ID NO: 998813 - DNA, 33 bp, Homo sapien
ggcattcctggcagaaagaactgtagatgcaaa

SEQ ID NO: 998814 - DNA, 33 bp, Homo sapien
ggcattcctggcagaaggaactgtagatgcaaa

SEQ ID NO: 998815 - DNA, 33 bp, Homo sapien
gaattttggaagccaccgaatgcaggaagtgtc

SEQ ID NO: 998816 - DNA, 33 bp, Homo sapien
gaattttggaagccactgaatgcaggaagtgtc

SEQ ID NO: 998817 - DNA, 33 bp, Homo sapien
ttattgggaatccccaagccacagaaagctatg

SEQ ID NO: 998818 - DNA, 33 bp, Homo sapien
ttattgggaatccccatgccacagaaagctatg

SEQ ID NO: 998819 - DNA, 33 bp, Homo sapien
cttccatttcttccgaagtgctcggcgatttct

SEQ ID NO: 998820 - DNA, 33 bp, Homo sapien
cttccatttcttccgaggtgctcggcgatttct

SEQ ID NO: 998821 - DNA, 33 bp, Homo sapien
ctggttgttcaaaaaacgtctaaggggcgccag

SEQ ID NO: 998822 - DNA, 33 bp, Homo sapien
ctggttgttcaaaaaatgtctaaggggcgccag

SEQ ID NO: 998823 - DNA, 33 bp, Homo sapien
atatgcacattttacaaagaggaatgctgagct

SEQ ID NO: 998824 - DNA, 33 bp, Homo sapien
atatgcacattttacacagaggaatgctgagct

SEQ ID NO: 998825 - DNA, 33 bp, Homo sapien
gcagccagaaccctgaagaatgccagtgtctgt

SEQ ID NO: 998826 - DNA, 33 bp, Homo sapien
gcagccagaaccctgaggaatgccagtgtctgt

SEQ ID NO: 998827 - DNA, 33 bp, Homo sapien
ctcgccattacctttgcagtgctaccatctcct

SEQ ID NO: 998828 - DNA, 33 bp, Homo sapien
ctcgccattacctttgtagtgctaccatctcct

SEQ ID NO: 998829 - DNA, 33 bp, Homo sapien
ggttcttgagatagaacgtgatcctggattatc

SEQ ID NO: 998830 - DNA, 33 bp, Homo sapien
ggttcttgagatagaaggtgatcctggattatc

SEQ ID NO: 998831 - DNA, 33 bp, Homo sapien
gggatgcagacgaagacaaagtggctaccgcca

SEQ ID NO: 998832 - DNA, 33 bp, Homo sapien
gggatgcagacgaagagaaagtggctaccgcca

SEQ ID NO: 998833 - DNA, 33 bp, Homo sapien
tcagtcctatggcccacctcatccagcggccat

SEQ ID NO: 998834 - DNA, 33 bp, Homo sapien
tcagtcctatggcccagctcatccagcggccat

SEQ ID NO: 998835 - DNA, 33 bp, Homo sapien
acaatcaagtctgtaaataagcatctagggaca

SEQ ID NO: 998836 - DNA, 33 bp, Homo sapien
acaatcaagtctgtaagtaagcatctagggaca

SEQ ID NO: 998837 - DNA, 33 bp, Homo sapien
ctaacactgggttgccagatccacatttggcct

SEQ ID NO: 998838 - DNA, 33 bp, Homo sapien
ctaacactgggttgcctgatccacatttggcct

SEQ ID NO: 998839 - DNA, 33 bp, Homo sapien
aggaagatcgtctctacgtgaccagtgcagaca

SEQ ID NO: 998840 - DNA, 33 bp, Homo sapien
aggaagatcgtctctatgtgaccagtgcagaca

SEQ ID NO: 998841 - DNA, 33 bp, Homo sapien
gcttaaaatgagaagcaatgtctcctggtgcac

SEQ ID NO: 998842 - DNA, 33 bp, Homo sapien
gcttaaaatgagaagcgatgtctcctggtgcac

SEQ ID NO: 998843 - DNA, 33 bp, Homo sapien
gaggaacggaatgcgaacgttgtctctgttact

SEQ ID NO: 998844 - DNA, 33 bp, Homo sapien
gaggaacggaatgcgagcgttgtctctgttact

SEQ ID NO: 998845 - DNA, 33 bp, Homo sapien
cagctggaagctcctgaagtttctaaaatgcct

SEQ ID NO: 998846 - DNA, 33 bp, Homo sapien
cagctggaagctcctggagtttctaaaatgcct

SEQ ID NO: 998847 - DNA, 33 bp, Homo sapien
gctgtggcgttttccaatcaatcatctgtgggt

SEQ ID NO: 998848 - DNA, 33 bp, Homo sapien
gctgtggcgttttccagtcaatcatctgtgggt

SEQ ID NO: 998849 - DNA, 33 bp, Homo sapien
atttaaaagcctccccacgtgtctgctgcacag

SEQ ID NO: 998850 - DNA, 33 bp, Homo sapien
atttaaaagcctccccgcgtgtctgctgcacag

SEQ ID NO: 998851 - DNA, 33 bp, Homo sapien
cccctggacttccagacgttgaaggctgggccc

SEQ ID NO: 998852 - DNA, 33 bp, Homo sapien
cccctggacttccagatgttgaaggctgggccc

SEQ ID NO: 998853 - DNA, 33 bp, Homo sapien
tggctttggctgtgccactccaagctctgccct

SEQ ID NO: 998854 - DNA, 33 bp, Homo sapien
tggctttggctgtgcctctccaagctctgccct

SEQ ID NO: 998855 - DNA, 33 bp, Homo sapien
gcggctgtaacgaaacaacaccgaaagtgccgt

SEQ ID NO: 998856 - DNA, 33 bp, Homo sapien
gcggctgtaacgaaacgacaccgaaagtgccgt

SEQ ID NO: 998857 - DNA, 33 bp, Homo sapien
gatacactcttatgaactgaagtccctgcttta

SEQ ID NO: 998858 - DNA, 33 bp, Homo sapien
gatacactcttatgaattgaagtccctgcttta

SEQ ID NO: 998859 - DNA, 33 bp, Homo sapien
agaggagtatgagcagacagttggttatacagt

SEQ ID NO: 998860 - DNA, 33 bp, Homo sapien
agaggagtatgagcaggcagttggttatacagt

SEQ ID NO: 998861 - DNA, 33 bp, Homo sapien
atcatttccaggccaaacttctgcaaaagtccc

SEQ ID NO: 998862 - DNA, 33 bp, Homo sapien
atcatttccaggccaatcttctgcaaaagtccc

SEQ ID NO: 998863 - DNA, 33 bp, Homo sapien
gcaggactagaatcaacttcaggtcttatctga

SEQ ID NO: 998864 - DNA, 33 bp, Homo sapien
gcaggactagaatcaagttcaggtcttatctga

SEQ ID NO: 998865 - DNA, 33 bp, Homo sapien
cagtctgtaacagagcaagaggagacgggaagg

SEQ ID NO: 998866 - DNA, 33 bp, Homo sapien
cagtctgtaacagagcgagaggagacgggaagg

SEQ ID NO: 998867 - DNA, 33 bp, Homo sapien
tgcagccagttgcctcaccttcgcacagagctg

SEQ ID NO: 998868 - DNA, 33 bp, Homo sapien
tgcagccagttgcctcgccttcgcacagagctg

SEQ ID NO: 998869 - DNA, 33 bp, Homo sapien
gcggctccgctctctcactatagatcagatttg

SEQ ID NO: 998870 - DNA, 33 bp, Homo sapien
gcggctccgctctctcgctatagatcagatttg

SEQ ID NO: 998871 - DNA, 33 bp, Homo sapien
ttttagagacttgcaaaatttgaatcctaaagg

SEQ ID NO: 998872 - DNA, 33 bp, Homo sapien
ttttagagacttgcaatatttgaatcctaaagg

SEQ ID NO: 998873 - DNA, 33 bp, Homo sapien
ttctgggcaccatcctaaatgtcacatgtattc

SEQ ID NO: 998874 - DNA, 33 bp, Homo sapien
ttctgggcaccatcctgaatgtcacatgtattc

SEQ ID NO: 998875 - DNA, 33 bp, Homo sapien
ctgatattcaaaaaaacgttgaggatattaaag

SEQ ID NO: 998876 - DNA, 33 bp, Homo sapien
ctgatattcaaaaaaatgttgaggatattaaag

SEQ ID NO: 998877 - DNA, 33 bp, Homo sapien
cacaggcaggcaaacaactgctcgttctatgcc

SEQ ID NO: 998878 - DNA, 33 bp, Homo sapien
cacaggcaggcaaacatctgctcgttctatgcc

SEQ ID NO: 998879 - DNA, 33 bp, Homo sapien
ttcttattcaacattacgagattcatccatgat

SEQ ID NO: 998880 - DNA, 33 bp, Homo sapien
ttcttattcaacattatgagattcatccatgat

SEQ ID NO: 998881 - DNA, 33 bp, Homo sapien
ttctcctgttgatgaacgttagctttccattgc

SEQ ID NO: 998882 - DNA, 33 bp, Homo sapien
ttctcctgttgatgaatgttagctttccattgc

SEQ ID NO: 998883 - DNA, 33 bp, Homo sapien
aaatgaaggaaggagacacagccgtgtaatgca

SEQ ID NO: 998884 - DNA, 33 bp, Homo sapien
aaatgaaggaaggagagacagccgtgtaatgca

SEQ ID NO: 998885 - DNA, 33 bp, Homo sapien
ggtgaaggtccctccaagaagtgacaggtcacc

SEQ ID NO: 998886 - DNA, 33 bp, Homo sapien
ggtgaaggtccctccaggaagtgacaggtcacc

SEQ ID NO: 998887 - DNA, 33 bp, Homo sapien
cccacgctgttgaacacgggcacggcccgtgag

SEQ ID NO: 998888 - DNA, 33 bp, Homo sapien
cccacgctgttgaacatgggcacggcccgtgag

SEQ ID NO: 998889 - DNA, 33 bp, Homo sapien
acatgagcagctctaacgaccaccaaacagtgg

SEQ ID NO: 998890 - DNA, 33 bp, Homo sapien
acatgagcagctctaatgaccaccaaacagtgg

SEQ ID NO: 998891 - DNA, 33 bp, Homo sapien
gaaaaactacggaaatcagaaccatgtgtcaac

SEQ ID NO: 998892 - DNA, 33 bp, Homo sapien
gaaaaactacggaaattagaaccatgtgtcaac

SEQ ID NO: 998893 - DNA, 33 bp, Homo sapien
tcccccaggtgagcgaaaaggccactggaaggc

SEQ ID NO: 998894 - DNA, 33 bp, Homo sapien
tcccccaggtgagcgagaaggccactggaaggc

SEQ ID NO: 998895 - DNA, 33 bp, Homo sapien
tctttactcacggatgcatagtctgccttccag

SEQ ID NO: 998896 - DNA, 33 bp, Homo sapien
tctttactcacggatgtatagtctgccttccag

SEQ ID NO: 998897 - DNA, 33 bp, Homo sapien
ctcagatatttcttgacagcaattgcaaataga

SEQ ID NO: 998898 - DNA, 33 bp, Homo sapien
ctcagatatttcttgatagcaattgcaaataga

SEQ ID NO: 998899 - DNA, 33 bp, Homo sapien
gagtgccactgacgtgcagtttgagctccactg

SEQ ID NO: 998900 - DNA, 33 bp, Homo sapien
gagtgccactgacgtgtagtttgagctccactg

SEQ ID NO: 998901 - DNA, 33 bp, Homo sapien
ttggtaaaatagtccactcatttgtttacttca

SEQ ID NO: 998902 - DNA, 33 bp, Homo sapien
ttggtaaaatagtccattcatttgtttacttca

SEQ ID NO: 998903 - DNA, 33 bp, Homo sapien
gccactggtcactcacaagttcattcaagaatt

SEQ ID NO: 998904 - DNA, 33 bp, Homo sapien
gccactggtcactcacgagttcattcaagaatt

SEQ ID NO: 998905 - DNA, 33 bp, Homo sapien
ttttctgctgttgtgtcaaagaagcctcagaat

SEQ ID NO: 998906 - DNA, 33 bp, Homo sapien
ttttctgctgttgtgtgaaagaagcctcagaat

SEQ ID NO: 998907 - DNA, 33 bp, Homo sapien
ctccatctcaaaaaaaaaaagagattccatcag

SEQ ID NO: 998908 - DNA, 33 bp, Homo sapien
ctccatctcaaaaaaataaagagattccatcag

SEQ ID NO: 998909 - DNA, 33 bp, Homo sapien
tccttgaactttataacttaccctgcaaactgc

SEQ ID NO: 998910 - DNA, 33 bp, Homo sapien
tccttgaactttataatttaccctgcaaactgc

SEQ ID NO: 998911 - DNA, 33 bp, Homo sapien
ctgggctggaacccaccgcagacgtgaactctg

SEQ ID NO: 998912 - DNA, 33 bp, Homo sapien
ctgggctggaacccactgcagacgtgaactctg

SEQ ID NO: 998913 - DNA, 33 bp, Homo sapien
gacagtgtttccctccaatgtttgctgtgtggg

SEQ ID NO: 998914 - DNA, 33 bp, Homo sapien
gacagtgtttccctccgatgtttgctgtgtggg

SEQ ID NO: 998915 - DNA, 33 bp, Homo sapien
aaggtgcagtcccatcccctgtgtggtcatccc

SEQ ID NO: 998916 - DNA, 33 bp, Homo sapien
aaggtgcagtcccatctcctgtgtggtcatccc

SEQ ID NO: 998917 - DNA, 33 bp, Homo sapien
aatgtgtgtagattgaccgtggctgggttcttc

SEQ ID NO: 998918 - DNA, 33 bp, Homo sapien
aatgtgtgtagattgagcgtggctgggttcttc

SEQ ID NO: 998919 - DNA, 33 bp, Homo sapien
gtgctgctctcagatacggctgataattgctgc

SEQ ID NO: 998920 - DNA, 33 bp, Homo sapien
gtgctgctctcagatatggctgataattgctgc

SEQ ID NO: 998921 - DNA, 33 bp, Homo sapien
ccaaatatggataacacgttgagttaaataaga

SEQ ID NO: 998922 - DNA, 33 bp, Homo sapien
ccaaatatggataacaggttgagttaaataaga

SEQ ID NO: 998923 - DNA, 33 bp, Homo sapien
acaaccaaactcataaatatctcgcacacaatt

SEQ ID NO: 998924 - DNA, 33 bp, Homo sapien
acaaccaaactcataagtatctcgcacacaatt

SEQ ID NO: 998925 - DNA, 33 bp, Homo sapien
ccaggagctctaagtgaaaacccaagactttcg

SEQ ID NO: 998926 - DNA, 33 bp, Homo sapien
ccaggagctctaagtggaaacccaagactttcg

SEQ ID NO: 998927 - DNA, 33 bp, Homo sapien
tatgagagaggggagaggtaggttcaagagaga

SEQ ID NO: 998928 - DNA, 33 bp, Homo sapien
tatgagagaggggagatgtaggttcaagagaga

SEQ ID NO: 998929 - DNA, 33 bp, Homo sapien
tagcaaaagatgtgatcaagttaagggtgtttc

SEQ ID NO: 998930 - DNA, 33 bp, Homo sapien
tagcaaaagatgtgatgaagttaagggtgtttc

SEQ ID NO: 998931 - DNA, 33 bp, Homo sapien
aggcctctctgactacaccagaaagaaggataa

SEQ ID NO: 998932 - DNA, 33 bp, Homo sapien
aggcctctctgactacgccagaaagaaggataa

SEQ ID NO: 998933 - DNA, 33 bp, Homo sapien
tagggactttgcttaaacggctgtagcagggaa

SEQ ID NO: 998934 - DNA, 33 bp, Homo sapien
tagggactttgcttaatcggctgtagcagggaa

SEQ ID NO: 998935 - DNA, 33 bp, Homo sapien
cagcatcgcctaccgacgtccttctaccatcca

SEQ ID NO: 998936 - DNA, 33 bp, Homo sapien
cagcatcgcctaccgatgtccttctaccatcca

SEQ ID NO: 998937 - DNA, 33 bp, Homo sapien
tgggaccaccaagatgcagaaggtagctgaagc

SEQ ID NO: 998938 - DNA, 33 bp, Homo sapien
tgggaccaccaagatggagaaggtagctgaagc

SEQ ID NO: 998939 - DNA, 33 bp, Homo sapien
tcttggtggtcccaaaatgctacagccaactgt

SEQ ID NO: 998940 - DNA, 33 bp, Homo sapien
tcttggtggtcccaaagtgctacagccaactgt

SEQ ID NO: 998941 - DNA, 33 bp, Homo sapien
ggctgagatgccaccaatggccagatgcaggag

SEQ ID NO: 998942 - DNA, 33 bp, Homo sapien
ggctgagatgccaccactggccagatgcaggag

SEQ ID NO: 998943 - DNA, 33 bp, Homo sapien
tcctgcccacagataggatgggactgagtctgg

SEQ ID NO: 998944 - DNA, 33 bp, Homo sapien
tcctgcccacagatagtatgggactgagtctgg

SEQ ID NO: 998945 - DNA, 33 bp, Homo sapien
actttgacagataatgcagtccaggttcccaga

SEQ ID NO: 998946 - DNA, 33 bp, Homo sapien
actttgacagataatgtagtccaggttcccaga

SEQ ID NO: 998947 - DNA, 33 bp, Homo sapien
ttgcccagtagctctacgtttcttcctgttctt

SEQ ID NO: 998948 - DNA, 33 bp, Homo sapien
ttgcccagtagctctatgtttcttcctgttctt

SEQ ID NO: 998949 - DNA, 33 bp, Homo sapien
tctgccctgcaaactaaaaccctcttgatctcc

SEQ ID NO: 998950 - DNA, 33 bp, Homo sapien
tctgccctgcaaactataaccctcttgatctcc

SEQ ID NO: 998951 - DNA, 33 bp, Homo sapien
gggtcaggcttcagcaaataaatgttagagggg

SEQ ID NO: 998952 - DNA, 33 bp, Homo sapien
gggtcaggcttcagcacataaatgttagagggg

SEQ ID NO: 998953 - DNA, 33 bp, Homo sapien
tctcaagagcaaaggccgcctcttacttgtatt

SEQ ID NO: 998954 - DNA, 33 bp, Homo sapien
tctcaagagcaaaggctgcctcttacttgtatt

SEQ ID NO: 998955 - DNA, 33 bp, Homo sapien
ccttcttttcctctcaaggcctctcttttgctt

SEQ ID NO: 998956 - DNA, 33 bp, Homo sapien
ccttcttttcctctcagggcctctcttttgctt

SEQ ID NO: 998957 - DNA, 33 bp, Homo sapien
gaatcattggatctagaactttgcattcagcaa

SEQ ID NO: 998958 - DNA, 33 bp, Homo sapien
gaatcattggatctaggactttgcattcagcaa

SEQ ID NO: 998959 - DNA, 33 bp, Homo sapien
tcatggaaatcatcacacttgcctgccggtgaa

SEQ ID NO: 998960 - DNA, 33 bp, Homo sapien
tcatggaaatcatcactcttgcctgccggtgaa

SEQ ID NO: 998961 - DNA, 33 bp, Homo sapien
cagccagtgctgtagggcaagggcactcaaccc

SEQ ID NO: 998962 - DNA, 33 bp, Homo sapien
cagccagtgctgtaggtcaagggcactcaaccc

SEQ ID NO: 998963 - DNA, 33 bp, Homo sapien
gagaaatcgtaagccaaatgctgaaaagtgagc

SEQ ID NO: 998964 - DNA, 33 bp, Homo sapien
gagaaatcgtaagccacatgctgaaaagtgagc

SEQ ID NO: 998965 - DNA, 33 bp, Homo sapien
gggacctgatgtgtctaaacactgcacttgagg

SEQ ID NO: 998966 - DNA, 33 bp, Homo sapien
gggacctgatgtgtctgaacactgcacttgagg

SEQ ID NO: 998967 - DNA, 33 bp, Homo sapien
tgaaaattaaataagagaatgcatgtgtgttcc

SEQ ID NO: 998968 - DNA, 33 bp, Homo sapien
tgaaaattaaataagataatgcatgtgtgttcc

SEQ ID NO: 998969 - DNA, 33 bp, Homo sapien
tacccgcaatcaaccccagcctgacaatattaa

SEQ ID NO: 998970 - DNA, 33 bp, Homo sapien
tacccgcaatcaacccgagcctgacaatattaa

SEQ ID NO: 998971 - DNA, 33 bp, Homo sapien
gtgtgagtttagccacagggctgaggaatccat

SEQ ID NO: 998972 - DNA, 33 bp, Homo sapien
gtgtgagtttagccacggggctgaggaatccat

SEQ ID NO: 998973 - DNA, 33 bp, Homo sapien
gcttcttcagttcaaacattccctttctgcttg

SEQ ID NO: 998974 - DNA, 33 bp, Homo sapien
gcttcttcagttcaaatattccctttctgcttg

SEQ ID NO: 998975 - DNA, 33 bp, Homo sapien
caccgcagccggacgcacgggggtcttttcctg

SEQ ID NO: 998976 - DNA, 33 bp, Homo sapien
caccgcagccggacgcgcgggggtcttttcctg

SEQ ID NO: 998977 - DNA, 33 bp, Homo sapien
ctcatcacagttccaaattcagctcaggaggca

SEQ ID NO: 998978 - DNA, 33 bp, Homo sapien
ctcatcacagttccaagttcagctcaggaggca

SEQ ID NO: 998979 - DNA, 33 bp, Homo sapien
aaaggaggattccacaaaattgtttcttaggcc

SEQ ID NO: 998980 - DNA, 33 bp, Homo sapien
aaaggaggattccacagaattgtttcttaggcc

SEQ ID NO: 998981 - DNA, 33 bp, Homo sapien
gaattgattaaaacaacacggagaagcaaacgg

SEQ ID NO: 998982 - DNA, 33 bp, Homo sapien
gaattgattaaaacaatacggagaagcaaacgg

SEQ ID NO: 998983 - DNA, 33 bp, Homo sapien
caagcagtccatagtaagtatcgagaaacctca

SEQ ID NO: 998984 - DNA, 33 bp, Homo sapien
caagcagtccatagtaggtatcgagaaacctca

SEQ ID NO: 998985 - DNA, 33 bp, Homo sapien
cacacttaggaggggcaacggctccaaccatca

SEQ ID NO: 998986 - DNA, 33 bp, Homo sapien
cacacttaggaggggcgacggctccaaccatca

SEQ ID NO: 998987 - DNA, 33 bp, Homo sapien
accctgctgggatctacgtaatctctccctact

SEQ ID NO: 998988 - DNA, 33 bp, Homo sapien
accctgctgggatctatgtaatctctccctact

SEQ ID NO: 998989 - DNA, 33 bp, Homo sapien
aatcgctgcttcaaagacaactaccacatgcca

SEQ ID NO: 998990 - DNA, 33 bp, Homo sapien
aatcgctgcttcaaagtcaactaccacatgcca

SEQ ID NO: 998991 - DNA, 33 bp, Homo sapien
cccagcacctttcaccactgttgggcagcccca

SEQ ID NO: 998992 - DNA, 33 bp, Homo sapien
cccagcacctttcaccgctgttgggcagcccca

SEQ ID NO: 998993 - DNA, 33 bp, Homo sapien
gggtctttaaagcacaaaagagcggttcacaca

SEQ ID NO: 998994 - DNA, 33 bp, Homo sapien
gggtctttaaagcacagaagagcggttcacaca

SEQ ID NO: 998995 - DNA, 33 bp, Homo sapien
gcttctgacctctagaaccgggagacagaatag

SEQ ID NO: 998996 - DNA, 33 bp, Homo sapien
gcttctgacctctagagccgggagacagaatag

SEQ ID NO: 998997 - DNA, 33 bp, Homo sapien
gaagtcatcgggaagacgtatgtgtgggcggcc

SEQ ID NO: 998998 - DNA, 33 bp, Homo sapien
gaagtcatcgggaagatgtatgtgtgggcggcc

SEQ ID NO: 998999 - DNA, 33 bp, Homo sapien
agaggtaggaggaatccgaaaataaatcgtgtt

SEQ ID NO: 999000 - DNA, 33 bp, Homo sapien
agaggtaggaggaatctgaaaataaatcgtgtt

SEQ ID NO: 999001 - DNA, 33 bp, Homo sapien
ttttcgagaaatggacacaaaacaaataaagaa

SEQ ID NO: 999002 - DNA, 33 bp, Homo sapien
ttttcgagaaatggacgcaaaacaaataaagaa

SEQ ID NO: 999003 - DNA, 33 bp, Homo sapien
tgcaggtccccataccaactgagctttggttcc

SEQ ID NO: 999004 - DNA, 33 bp, Homo sapien
tgcaggtccccataccgactgagctttggttcc

SEQ ID NO: 999005 - DNA, 33 bp, Homo sapien
aaaatctcctgctcccacctgatggtcagaaac

SEQ ID NO: 999006 - DNA, 33 bp, Homo sapien
aaaatctcctgctcccgcctgatggtcagaaac

SEQ ID NO: 999007 - DNA, 33 bp, Homo sapien
aaggatgaagccagacacaagcatctactcagg

SEQ ID NO: 999008 - DNA, 33 bp, Homo sapien
aaggatgaagccagacgcaagcatctactcagg

SEQ ID NO: 999009 - DNA, 33 bp, Homo sapien
aggaaaggcctgcttcaaggaccagtgaggacg

SEQ ID NO: 999010 - DNA, 33 bp, Homo sapien
aggaaaggcctgcttcgaggaccagtgaggacg

SEQ ID NO: 999011 - DNA, 33 bp, Homo sapien
tttcatgtgtccggcaaccggttccacaggccc

SEQ ID NO: 999012 - DNA, 33 bp, Homo sapien
tttcatgtgtccggcacccggttccacaggccc

SEQ ID NO: 999013 - DNA, 33 bp, Homo sapien
tggcaggcagtggggacctgcacagcttctctc

SEQ ID NO: 999014 - DNA, 33 bp, Homo sapien
tggcaggcagtggggatctgcacagcttctctc

SEQ ID NO: 999015 - DNA, 33 bp, Homo sapien
tccctgacatttgtaccacagtgaacaagaacg

SEQ ID NO: 999016 - DNA, 33 bp, Homo sapien
tccctgacatttgtacgacagtgaacaagaacg

SEQ ID NO: 999017 - DNA, 33 bp, Homo sapien
gctgccccctggctaaaagcggtctgtcctacc

SEQ ID NO: 999018 - DNA, 33 bp, Homo sapien
gctgccccctggctaagagcggtctgtcctacc

SEQ ID NO: 999019 - DNA, 33 bp, Homo sapien
ggtcctggaaccagaacaagtcaagctcgaatt

SEQ ID NO: 999020 - DNA, 33 bp, Homo sapien
ggtcctggaaccagaataagtcaagctcgaatt

SEQ ID NO: 999021 - DNA, 33 bp, Homo sapien
gagcatccctttcaaacggaagggccggatcct

SEQ ID NO: 999022 - DNA, 33 bp, Homo sapien
gagcatccctttcaaatggaagggccggatcct

SEQ ID NO: 999023 - DNA, 33 bp, Homo sapien
accctgttgccaggccacctcattcaggaacct

SEQ ID NO: 999024 - DNA, 33 bp, Homo sapien
accctgttgccaggccgcctcattcaggaacct

SEQ ID NO: 999025 - DNA, 33 bp, Homo sapien
ggtccattgcaggccaagtgacggcatcagctg

SEQ ID NO: 999026 - DNA, 33 bp, Homo sapien
ggtccattgcaggccaggtgacggcatcagctg

SEQ ID NO: 999027 - DNA, 33 bp, Homo sapien
aaagcaagcaagcaacggcgtaaggaatggctg

SEQ ID NO: 999028 - DNA, 33 bp, Homo sapien
aaagcaagcaagcaactgcgtaaggaatggctg

SEQ ID NO: 999029 - DNA, 33 bp, Homo sapien
ccaggcatttacgggacgtgacaatgcaccaca

SEQ ID NO: 999030 - DNA, 33 bp, Homo sapien
ccaggcatttacgggatgtgacaatgcaccaca

SEQ ID NO: 999031 - DNA, 33 bp, Homo sapien
caggttgtggtttgcacacgttacctgtgttgg

SEQ ID NO: 999032 - DNA, 33 bp, Homo sapien
caggttgtggtttgcatacgttacctgtgttgg

SEQ ID NO: 999033 - DNA, 33 bp, Homo sapien
ggataaatttagataacggatgtacaacacatg

SEQ ID NO: 999034 - DNA, 33 bp, Homo sapien
ggataaatttagataatggatgtacaacacatg

SEQ ID NO: 999035 - DNA, 33 bp, Homo sapien
atgcagcaatggccaaaatctacctacagtctc

SEQ ID NO: 999036 - DNA, 33 bp, Homo sapien
atgcagcaatggccaacatctacctacagtctc

SEQ ID NO: 999037 - DNA, 33 bp, Homo sapien
aaacgggagcttaaataaaatggtaagtaccaa

SEQ ID NO: 999038 - DNA, 33 bp, Homo sapien
aaacgggagcttaaatgaaatggtaagtaccaa

SEQ ID NO: 999039 - DNA, 33 bp, Homo sapien
caaattaaaaccaaaacgaagtatcgcctcaca

SEQ ID NO: 999040 - DNA, 33 bp, Homo sapien
caaattaaaaccaaaatgaagtatcgcctcaca

SEQ ID NO: 999041 - DNA, 33 bp, Homo sapien
atcatgctagggtcacacaatgtcatcttctgc

SEQ ID NO: 999042 - DNA, 33 bp, Homo sapien
atcatgctagggtcacgcaatgtcatcttctgc

SEQ ID NO: 999043 - DNA, 33 bp, Homo sapien
atatgcagtattttcaatagtatccaatcatgt

SEQ ID NO: 999044 - DNA, 33 bp, Homo sapien
atatgcagtattttcattagtatccaatcatgt

SEQ ID NO: 999045 - DNA, 33 bp, Homo sapien
gcacaacaatttgatccgacactcaccaaagta

SEQ ID NO: 999046 - DNA, 33 bp, Homo sapien
gcacaacaatttgatctgacactcaccaaagta

SEQ ID NO: 999047 - DNA, 33 bp, Homo sapien
tcacaggcaccaaagactcccgtgctgcagggg

SEQ ID NO: 999048 - DNA, 33 bp, Homo sapien
tcacaggcaccaaagattcccgtgctgcagggg

SEQ ID NO: 999049 - DNA, 33 bp, Homo sapien
tgggtggccgctctgcccctctaacacccctgt

SEQ ID NO: 999050 - DNA, 33 bp, Homo sapien
tgggtggccgctctgctcctctaacacccctgt

SEQ ID NO: 999051 - DNA, 33 bp, Homo sapien
gggacttctgaacctacaaaatcttgcaaatcc

SEQ ID NO: 999052 - DNA, 33 bp, Homo sapien
gggacttctgaacctataaaatcttgcaaatcc

SEQ ID NO: 999053 - DNA, 33 bp, Homo sapien
gcgtcacagcctctcacgcgtcacgctggagtt

SEQ ID NO: 999054 - DNA, 33 bp, Homo sapien
gcgtcacagcctctcatgcgtcacgctggagtt

SEQ ID NO: 999055 - DNA, 33 bp, Homo sapien
gcgttcggattttccacggacataatcacactg

SEQ ID NO: 999056 - DNA, 33 bp, Homo sapien
gcgttcggattttccatggacataatcacactg

SEQ ID NO: 999057 - DNA, 33 bp, Homo sapien
cgcagtatggcatgaaaaaaaagagtaggattg

SEQ ID NO: 999058 - DNA, 33 bp, Homo sapien
cgcagtatggcatgaacaaaaagagtaggattg

SEQ ID NO: 999059 - DNA, 33 bp, Homo sapien
taagatacttagagcaaaagatggaatgcttcc

SEQ ID NO: 999060 - DNA, 33 bp, Homo sapien
taagatacttagagcagaagatggaatgcttcc

SEQ ID NO: 999061 - DNA, 33 bp, Homo sapien
aatgtccttagttggcaacttcgtcaatgtgga

SEQ ID NO: 999062 - DNA, 33 bp, Homo sapien
aatgtccttagttggcgacttcgtcaatgtgga

SEQ ID NO: 999063 - DNA, 33 bp, Homo sapien
gattatagaatgctgaatattctaacagacact

SEQ ID NO: 999064 - DNA, 33 bp, Homo sapien
gattatagaatgctgactattctaacagacact

SEQ ID NO: 999065 - DNA, 33 bp, Homo sapien
aaaaatctacagaacactatgaggacagcaagt

SEQ ID NO: 999066 - DNA, 33 bp, Homo sapien
aaaaatctacagaacattatgaggacagcaagt

SEQ ID NO: 999067 - DNA, 33 bp, Homo sapien
atcgtcgaaggctctcgagtgacccgcgcacgt

SEQ ID NO: 999068 - DNA, 33 bp, Homo sapien
atcgtcgaaggctctctagtgacccgcgcacgt

SEQ ID NO: 999069 - DNA, 33 bp, Homo sapien
tctctggttggaaggacgtttctctgataatga

SEQ ID NO: 999070 - DNA, 33 bp, Homo sapien
tctctggttggaaggatgtttctctgataatga

SEQ ID NO: 999071 - DNA, 33 bp, Homo sapien
tcccaggcctcagcagccaatcagggccgtcag

SEQ ID NO: 999072 - DNA, 33 bp, Homo sapien
tcccaggcctcagcagtcaatcagggccgtcag

SEQ ID NO: 999073 - DNA, 33 bp, Homo sapien
gtgtgtgcccaggcgcaaacatgggaacggtag

SEQ ID NO: 999074 - DNA, 33 bp, Homo sapien
gtgtgtgcccaggcgcgaacatgggaacggtag

SEQ ID NO: 999075 - DNA, 33 bp, Homo sapien
cccaaggtgtttaacacggagcaggagtgacaa

SEQ ID NO: 999076 - DNA, 33 bp, Homo sapien
cccaaggtgtttaacatggagcaggagtgacaa

SEQ ID NO: 999077 - DNA, 33 bp, Homo sapien
tgtggcaggaaagaaaagggcagctgtgcccag

SEQ ID NO: 999078 - DNA, 33 bp, Homo sapien
tgtggcaggaaagaaacgggcagctgtgcccag

SEQ ID NO: 999079 - DNA, 33 bp, Homo sapien
accaaatcaaactggacgctatccccagatcct

SEQ ID NO: 999080 - DNA, 33 bp, Homo sapien
accaaatcaaactggatgctatccccagatcct

SEQ ID NO: 999081 - DNA, 33 bp, Homo sapien
gcaacccgtgcttttacggatgctgcctggatt

SEQ ID NO: 999082 - DNA, 33 bp, Homo sapien
gcaacccgtgcttttagggatgctgcctggatt

SEQ ID NO: 999083 - DNA, 33 bp, Homo sapien
ctggattttgcacaccccacctctgcttacagc

SEQ ID NO: 999084 - DNA, 33 bp, Homo sapien
ctggattttgcacacctcacctctgcttacagc

SEQ ID NO: 999085 - DNA, 33 bp, Homo sapien
tcctctgcagctcgaaatacccgagacccagct

SEQ ID NO: 999086 - DNA, 33 bp, Homo sapien
tcctctgcagctcgaagtacccgagacccagct

SEQ ID NO: 999087 - DNA, 33 bp, Homo sapien
gggaaggaacaggtccaaaggctctcgttcttg

SEQ ID NO: 999088 - DNA, 33 bp, Homo sapien
gggaaggaacaggtcccaaggctctcgttcttg

SEQ ID NO: 999089 - DNA, 33 bp, Homo sapien
ttcctcaagcgccccaagtggacgtctagaatg

SEQ ID NO: 999090 - DNA, 33 bp, Homo sapien
ttcctcaagcgccccaggtggacgtctagaatg

SEQ ID NO: 999091 - DNA, 33 bp, Homo sapien
gcatggatgaggaagacgagcaaatgacagggg

SEQ ID NO: 999092 - DNA, 33 bp, Homo sapien
gcatggatgaggaagaggagcaaatgacagggg

SEQ ID NO: 999093 - DNA, 33 bp, Homo sapien
gagcagggaggagggagatgaagtgcgtctgtc

SEQ ID NO: 999094 - DNA, 33 bp, Homo sapien
gagcagggaggagggatatgaagtgcgtctgtc

SEQ ID NO: 999095 - DNA, 33 bp, Homo sapien
gagctaaggaacacagaatgatgccctcagggt

SEQ ID NO: 999096 - DNA, 33 bp, Homo sapien
gagctaaggaacacagcatgatgccctcagggt

SEQ ID NO: 999097 - DNA, 33 bp, Homo sapien
aaaaggaagatgaacacgggatttgacacagat

SEQ ID NO: 999098 - DNA, 33 bp, Homo sapien
aaaaggaagatgaacatgggatttgacacagat

SEQ ID NO: 999099 - DNA, 33 bp, Homo sapien
gcaaccctaacttccacgtgaccagacctgtac

SEQ ID NO: 999100 - DNA, 33 bp, Homo sapien
gcaaccctaacttccatgtgaccagacctgtac

SEQ ID NO: 999101 - DNA, 33 bp, Homo sapien
aatccagggataaaagcagctctcgaaggttaa

SEQ ID NO: 999102 - DNA, 33 bp, Homo sapien
aatccagggataaaagtagctctcgaaggttaa

SEQ ID NO: 999103 - DNA, 33 bp, Homo sapien
tttattttctctcctacattgtcagcgtggccc

SEQ ID NO: 999104 - DNA, 33 bp, Homo sapien
tttattttctctcctagattgtcagcgtggccc

SEQ ID NO: 999105 - DNA, 33 bp, Homo sapien
aaggatgttccctttgaagtcactcagagcctc

SEQ ID NO: 999106 - DNA, 33 bp, Homo sapien
aaggatgttccctttgcagtcactcagagcctc

SEQ ID NO: 999107 - DNA, 33 bp, Homo sapien
catgaagatgtttctacacaaactcaagcatga

SEQ ID NO: 999108 - DNA, 33 bp, Homo sapien
catgaagatgtttctatacaaactcaagcatga

SEQ ID NO: 999109 - DNA, 33 bp, Homo sapien
tctgcctcctggtccccgcagatcgcccagacc

SEQ ID NO: 999110 - DNA, 33 bp, Homo sapien
tctgcctcctggtccctgcagatcgcccagacc

SEQ ID NO: 999111 - DNA, 33 bp, Homo sapien
ccctggggagctgggaaagttcctaagagaata

SEQ ID NO: 999112 - DNA, 33 bp, Homo sapien
ccctggggagctgggagagttcctaagagaata

SEQ ID NO: 999113 - DNA, 33 bp, Homo sapien
gcctgcggttgtgtaacgggccgccacctggga

SEQ ID NO: 999114 - DNA, 33 bp, Homo sapien
gcctgcggttgtgtaatgggccgccacctggga

SEQ ID NO: 999115 - DNA, 33 bp, Homo sapien
agtccgtctttgtgaacctggatctggcatcca

SEQ ID NO: 999116 - DNA, 33 bp, Homo sapien
agtccgtctttgtgaagctggatctggcatcca

SEQ ID NO: 999117 - DNA, 33 bp, Homo sapien
gggactcccctgcttccccgctcaagtctgcct

SEQ ID NO: 999118 - DNA, 33 bp, Homo sapien
gggactcccctgcttctccgctcaagtctgcct

SEQ ID NO: 999119 - DNA, 33 bp, Homo sapien
tcccacgataactcacacactcctgagatagca

SEQ ID NO: 999120 - DNA, 33 bp, Homo sapien
tcccacgataactcacgcactcctgagatagca

SEQ ID NO: 999121 - DNA, 33 bp, Homo sapien
actgagagcagtaccccggcaaggttgaccctc

SEQ ID NO: 999122 - DNA, 33 bp, Homo sapien
actgagagcagtaccctggcaaggttgaccctc

SEQ ID NO: 999123 - DNA, 33 bp, Homo sapien
catgcttttctcctgaaagtaagtaagtctcac

SEQ ID NO: 999124 - DNA, 33 bp, Homo sapien
catgcttttctcctgagagtaagtaagtctcac

SEQ ID NO: 999125 - DNA, 33 bp, Homo sapien
tcatgggggaatggaacgaggagcaagtcacgt

SEQ ID NO: 999126 - DNA, 33 bp, Homo sapien
tcatgggggaatggaaggaggagcaagtcacgt

SEQ ID NO: 999127 - DNA, 33 bp, Homo sapien
aagctggtactaagcactcataggagatttttt

SEQ ID NO: 999128 - DNA, 33 bp, Homo sapien
aagctggtactaagcattcataggagatttttt

SEQ ID NO: 999129 - DNA, 33 bp, Homo sapien
accctcgtaatactaacgaaaggccaccaagtt

SEQ ID NO: 999130 - DNA, 33 bp, Homo sapien
accctcgtaatactaatgaaaggccaccaagtt

SEQ ID NO: 999131 - DNA, 33 bp, Homo sapien
gggctgtggagtaaaacggctccggactccaaa

SEQ ID NO: 999132 - DNA, 33 bp, Homo sapien
gggctgtggagtaaaatggctccggactccaaa

SEQ ID NO: 999133 - DNA, 33 bp, Homo sapien
gtggttgttctagggaccaccatttacatttta

SEQ ID NO: 999134 - DNA, 33 bp, Homo sapien
gtggttgttctagggatcaccatttacatttta

SEQ ID NO: 999135 - DNA, 33 bp, Homo sapien
atcataaatatggtctaagaactaaaggacatg

SEQ ID NO: 999136 - DNA, 33 bp, Homo sapien
atcataaatatggtctgagaactaaaggacatg

SEQ ID NO: 999137 - DNA, 33 bp, Homo sapien
tgacccggacagaggcaataaatacggagcacc

SEQ ID NO: 999138 - DNA, 33 bp, Homo sapien
tgacccggacagaggcgataaatacggagcacc

SEQ ID NO: 999139 - DNA, 33 bp, Homo sapien
ttttgttatcgcaatcaaaactgactgagacag

SEQ ID NO: 999140 - DNA, 33 bp, Homo sapien
ttttgttatcgcaatccaaactgactgagacag

SEQ ID NO: 999141 - DNA, 33 bp, Homo sapien
tcatggtcaccccagaagacaggccttcctttc

SEQ ID NO: 999142 - DNA, 33 bp, Homo sapien
tcatggtcaccccagaggacaggccttcctttc

SEQ ID NO: 999143 - DNA, 33 bp, Homo sapien
agcaaaagctccaaagaaaaattataggcttgt

SEQ ID NO: 999144 - DNA, 33 bp, Homo sapien
agcaaaagctccaaaggaaaattataggcttgt

SEQ ID NO: 999145 - DNA, 33 bp, Homo sapien
gcatggagacgtgtccacgaggagctgtgtctg

SEQ ID NO: 999146 - DNA, 33 bp, Homo sapien
gcatggagacgtgtccgcgaggagctgtgtctg

SEQ ID NO: 999147 - DNA, 33 bp, Homo sapien
ggtggagagattcttacgtttatcagggtgagc

SEQ ID NO: 999148 - DNA, 33 bp, Homo sapien
ggtggagagattcttatgtttatcagggtgagc

SEQ ID NO: 999149 - DNA, 33 bp, Homo sapien
tcatctcagcctttaccgggccctcctgagtgc

SEQ ID NO: 999150 - DNA, 33 bp, Homo sapien
tcatctcagcctttactgggccctcctgagtgc

SEQ ID NO: 999151 - DNA, 33 bp, Homo sapien
gtagaactggaggacaagagtcgacgtgagttc

SEQ ID NO: 999152 - DNA, 33 bp, Homo sapien
gtagaactggaggacaggagtcgacgtgagttc

SEQ ID NO: 999153 - DNA, 33 bp, Homo sapien
tgtcatgcttagacaacgatgctcgcctagaaa

SEQ ID NO: 999154 - DNA, 33 bp, Homo sapien
tgtcatgcttagacaaggatgctcgcctagaaa

SEQ ID NO: 999155 - DNA, 33 bp, Homo sapien
atgtggctgcttggaaattagccatgtagacct

SEQ ID NO: 999156 - DNA, 33 bp, Homo sapien
atgtggctgcttggaacttagccatgtagacct

SEQ ID NO: 999157 - DNA, 33 bp, Homo sapien
gactcaaagttccaccaaaaacaaatacaaggg

SEQ ID NO: 999158 - DNA, 33 bp, Homo sapien
gactcaaagttccaccgaaaacaaatacaaggg

SEQ ID NO: 999159 - DNA, 33 bp, Homo sapien
ggtaccattacttgcaaaagcgtctcgaccttg

SEQ ID NO: 999160 - DNA, 33 bp, Homo sapien
ggtaccattacttgcagaagcgtctcgaccttg

SEQ ID NO: 999161 - DNA, 33 bp, Homo sapien
tgaattgtttcctcacagactgatgtggctggc

SEQ ID NO: 999162 - DNA, 33 bp, Homo sapien
tgaattgtttcctcacggactgatgtggctggc

SEQ ID NO: 999163 - DNA, 33 bp, Homo sapien
tccaaccttatttgtaccctcattctctgagca

SEQ ID NO: 999164 - DNA, 33 bp, Homo sapien
tccaaccttatttgtatcctcattctctgagca

SEQ ID NO: 999165 - DNA, 33 bp, Homo sapien
ctgctgcataattagccgccccaaagcccactg

SEQ ID NO: 999166 - DNA, 33 bp, Homo sapien
ctgctgcataattagctgccccaaagcccactg

SEQ ID NO: 999167 - DNA, 33 bp, Homo sapien
tttctctttttggaacccgggtattattcttat

SEQ ID NO: 999168 - DNA, 33 bp, Homo sapien
tttctctttttggaactcgggtattattcttat

SEQ ID NO: 999169 - DNA, 33 bp, Homo sapien
attttgttttgtagaaagctctagaattagcag

SEQ ID NO: 999170 - DNA, 33 bp, Homo sapien
attttgttttgtagaacgctctagaattagcag

SEQ ID NO: 999171 - DNA, 33 bp, Homo sapien
aaacagctatgaaaccagcatttagtgatgggg

SEQ ID NO: 999172 - DNA, 33 bp, Homo sapien
aaacagctatgaaaccggcatttagtgatgggg

SEQ ID NO: 999173 - DNA, 33 bp, Homo sapien
accctagaatgagttccatgacaagacctcctc

SEQ ID NO: 999174 - DNA, 33 bp, Homo sapien
accctagaatgagttcgatgacaagacctcctc

SEQ ID NO: 999175 - DNA, 33 bp, Homo sapien
agggcagatgggctgaaagtagggaaggaggct

SEQ ID NO: 999176 - DNA, 33 bp, Homo sapien
agggcagatgggctgacagtagggaaggaggct

SEQ ID NO: 999177 - DNA, 33 bp, Homo sapien
ctctgctgggcctagacgttgagttcatacccc

SEQ ID NO: 999178 - DNA, 33 bp, Homo sapien
ctctgctgggcctagatgttgagttcatacccc

SEQ ID NO: 999179 - DNA, 33 bp, Homo sapien
tgaatgctttaccttacacaacctcatacaggc

SEQ ID NO: 999180 - DNA, 33 bp, Homo sapien
tgaatgctttaccttatacaacctcatacaggc

SEQ ID NO: 999181 - DNA, 33 bp, Homo sapien
tggtaaggaggaggacaatgacatggacggcaa

SEQ ID NO: 999182 - DNA, 33 bp, Homo sapien
tggtaaggaggaggacgatgacatggacggcaa

SEQ ID NO: 999183 - DNA, 33 bp, Homo sapien
tgtcacgcttagacaacgatgctcgcctagaaa

SEQ ID NO: 999184 - DNA, 33 bp, Homo sapien
tgtcacgcttagacaaggatgctcgcctagaaa

SEQ ID NO: 999185 - DNA, 33 bp, Homo sapien
ccttgaatcagtaataacaaaagcagtgagtct

SEQ ID NO: 999186 - DNA, 33 bp, Homo sapien
ccttgaatcagtaataccaaaagcagtgagtct

SEQ ID NO: 999187 - DNA, 33 bp, Homo sapien
ttcaaggctacttagagattgtcttttcttgta

SEQ ID NO: 999188 - DNA, 33 bp, Homo sapien
ttcaaggctacttagatattgtcttttcttgta

SEQ ID NO: 999189 - DNA, 33 bp, Homo sapien
aagtgctaacatctggaaaacagtgtaggatct

SEQ ID NO: 999190 - DNA, 33 bp, Homo sapien
aagtgctaacatctggcaaacagtgtaggatct

SEQ ID NO: 999191 - DNA, 33 bp, Homo sapien
caccccttcaaaatgaataactgttacaatgac

SEQ ID NO: 999192 - DNA, 33 bp, Homo sapien
caccccttcaaaatgagtaactgttacaatgac

SEQ ID NO: 999193 - DNA, 33 bp, Homo sapien
gagattgtcatacagcacctaatatgatacgga

SEQ ID NO: 999194 - DNA, 33 bp, Homo sapien
gagattgtcatacagcgcctaatatgatacgga

SEQ ID NO: 999195 - DNA, 33 bp, Homo sapien
ttatacaggctcacctcaaggcaaatacaagac

SEQ ID NO: 999196 - DNA, 33 bp, Homo sapien
ttatacaggctcaccttaaggcaaatacaagac

SEQ ID NO: 999197 - DNA, 33 bp, Homo sapien
tgtttctggtgttatagaggagacaagacccag

SEQ ID NO: 999198 - DNA, 33 bp, Homo sapien
tgtttctggtgttatataggagacaagacccag

SEQ ID NO: 999199 - DNA, 33 bp, Homo sapien
caaactgcacaactcactataaaacctgctgac

SEQ ID NO: 999200 - DNA, 33 bp, Homo sapien
caaactgcacaactcagtataaaacctgctgac

SEQ ID NO: 999201 - DNA, 33 bp, Homo sapien
aaggtcaagtgagagccgatgcttgtgctgtgg

SEQ ID NO: 999202 - DNA, 33 bp, Homo sapien
aaggtcaagtgagagctgatgcttgtgctgtgg

SEQ ID NO: 999203 - DNA, 33 bp, Homo sapien
gataagtgcaagtaaaactgaaaaatgctgttg

SEQ ID NO: 999204 - DNA, 33 bp, Homo sapien
gataagtgcaagtaaagctgaaaaatgctgttg

SEQ ID NO: 999205 - DNA, 33 bp, Homo sapien
tggcgtccttataaaaaaggtctctgtgagctg

SEQ ID NO: 999206 - DNA, 33 bp, Homo sapien
tggcgtccttataaaagaggtctctgtgagctg

SEQ ID NO: 999207 - DNA, 33 bp, Homo sapien
aggttctcccagtacccgctctgcccagtccag

SEQ ID NO: 999208 - DNA, 33 bp, Homo sapien
aggttctcccagtaccggctctgcccagtccag

SEQ ID NO: 999209 - DNA, 33 bp, Homo sapien
aagagggattccagagaaagaagagctccctgt

SEQ ID NO: 999210 - DNA, 33 bp, Homo sapien
aagagggattccagaggaagaagagctccctgt

SEQ ID NO: 999211 - DNA, 33 bp, Homo sapien
cagccagctggacataaataaagctttgagttt

SEQ ID NO: 999212 - DNA, 33 bp, Homo sapien
cagccagctggacatagataaagctttgagttt

SEQ ID NO: 999213 - DNA, 33 bp, Homo sapien
cttaatactatcaaaccggcaacaactggattt

SEQ ID NO: 999214 - DNA, 33 bp, Homo sapien
cttaatactatcaaactggcaacaactggattt

SEQ ID NO: 999215 - DNA, 33 bp, Homo sapien
ttctagcagatccaacaataactgaagtgtcag

SEQ ID NO: 999216 - DNA, 33 bp, Homo sapien
ttctagcagatccaacgataactgaagtgtcag

SEQ ID NO: 999217 - DNA, 33 bp, Homo sapien
agctcctgttgaaggcagaactgtcactagaag

SEQ ID NO: 999218 - DNA, 33 bp, Homo sapien
agctcctgttgaaggcggaactgtcactagaag

SEQ ID NO: 999219 - DNA, 33 bp, Homo sapien
cccttgtaatgttcacaggttggggacacaggc

SEQ ID NO: 999220 - DNA, 33 bp, Homo sapien
cccttgtaatgttcacgggttggggacacaggc

SEQ ID NO: 999221 - DNA, 33 bp, Homo sapien
ttctcacatgtggcacgctacacggactggggt

SEQ ID NO: 999222 - DNA, 33 bp, Homo sapien
ttctcacatgtggcactctacacggactggggt

SEQ ID NO: 999223 - DNA, 33 bp, Homo sapien
gggagtgtgccctacaaaccgtagagtctctca

SEQ ID NO: 999224 - DNA, 33 bp, Homo sapien
gggagtgtgccctacagaccgtagagtctctca

SEQ ID NO: 999225 - DNA, 33 bp, Homo sapien
ccgggtccagctgtcacggaatccaaaaccaag

SEQ ID NO: 999226 - DNA, 33 bp, Homo sapien
ccgggtccagctgtcatggaatccaaaaccaag

SEQ ID NO: 999227 - DNA, 33 bp, Homo sapien
ttaaattgcggaccagcccgggtgcagaggccc

SEQ ID NO: 999228 - DNA, 33 bp, Homo sapien
ttaaattgcggaccaggccgggtgcagaggccc

SEQ ID NO: 999229 - DNA, 33 bp, Homo sapien
ttcctctggatgttaaatgctactttctttgtt

SEQ ID NO: 999230 - DNA, 33 bp, Homo sapien
ttcctctggatgttaagtgctactttctttgtt

SEQ ID NO: 999231 - DNA, 33 bp, Homo sapien
ttctccttgcttggtaccgtgcaataaatatca

SEQ ID NO: 999232 - DNA, 33 bp, Homo sapien
ttctccttgcttggtatcgtgcaataaatatca

SEQ ID NO: 999233 - DNA, 33 bp, Homo sapien
ttacatatgcaaaagaaatactgcggcttttag

SEQ ID NO: 999234 - DNA, 33 bp, Homo sapien
ttacatatgcaaaagagatactgcggcttttag

SEQ ID NO: 999235 - DNA, 33 bp, Homo sapien
ttccttgttctctaacagcaccaatgccattag

SEQ ID NO: 999236 - DNA, 33 bp, Homo sapien
ttccttgttctctaacggcaccaatgccattag

SEQ ID NO: 999237 - DNA, 33 bp, Homo sapien
tctttcatgtaaggacacaggatatgcattttg

SEQ ID NO: 999238 - DNA, 33 bp, Homo sapien
tctttcatgtaaggacgcaggatatgcattttg

SEQ ID NO: 999239 - DNA, 33 bp, Homo sapien
tcattgtgggtcctaaacctgtcgccaccaagt

SEQ ID NO: 999240 - DNA, 33 bp, Homo sapien
tcattgtgggtcctaagcctgtcgccaccaagt

SEQ ID NO: 999241 - DNA, 33 bp, Homo sapien
gagcttcaagtgttcacagcaggacctcaagag

SEQ ID NO: 999242 - DNA, 33 bp, Homo sapien
gagcttcaagtgttcatagcaggacctcaagag

SEQ ID NO: 999243 - DNA, 33 bp, Homo sapien
ggttgtctgttctaagcatgtgttctgaaatgg

SEQ ID NO: 999244 - DNA, 33 bp, Homo sapien
ggttgtctgttctaagtatgtgttctgaaatgg

SEQ ID NO: 999245 - DNA, 33 bp, Homo sapien
caagataagattgacaaaagggccagggtccct

SEQ ID NO: 999246 - DNA, 33 bp, Homo sapien
caagataagattgacagaagggccagggtccct

SEQ ID NO: 999247 - DNA, 33 bp, Homo sapien
ttaacagcaagattacaaacaaaattttagcaa

SEQ ID NO: 999248 - DNA, 33 bp, Homo sapien
ttaacagcaagattaccaacaaaattttagcaa

SEQ ID NO: 999249 - DNA, 33 bp, Homo sapien
acccaactgtacaatcacctgggcctgatatct

SEQ ID NO: 999250 - DNA, 33 bp, Homo sapien
acccaactgtacaatcgcctgggcctgatatct

SEQ ID NO: 999251 - DNA, 33 bp, Homo sapien
attgctgaccagactcacggaagtccaacggca

SEQ ID NO: 999252 - DNA, 33 bp, Homo sapien
attgctgaccagactcgcggaagtccaacggca

SEQ ID NO: 999253 - DNA, 33 bp, Homo sapien
ccaatccttcatgagacgtaacctgctggaggt

SEQ ID NO: 999254 - DNA, 33 bp, Homo sapien
ccaatccttcatgagatgtaacctgctggaggt

SEQ ID NO: 999255 - DNA, 33 bp, Homo sapien
gccgcctcgtcctgtcgagaactggccgcacct

SEQ ID NO: 999256 - DNA, 33 bp, Homo sapien
gccgcctcgtcctgtctagaactggccgcacct

SEQ ID NO: 999257 - DNA, 33 bp, Homo sapien
atttagaggtttatcccgagtctatgcaagtga

SEQ ID NO: 999258 - DNA, 33 bp, Homo sapien
atttagaggtttatcctgagtctatgcaagtga

SEQ ID NO: 999259 - DNA, 33 bp, Homo sapien
ttgctgatgtaaaataacaaactcttgtgaatc

SEQ ID NO: 999260 - DNA, 33 bp, Homo sapien
ttgctgatgtaaaatagcaaactcttgtgaatc

SEQ ID NO: 999261 - DNA, 33 bp, Homo sapien
tggtctcctcctcttcaacctcatcctcatctt

SEQ ID NO: 999262 - DNA, 33 bp, Homo sapien
tggtctcctcctcttccacctcatcctcatctt

SEQ ID NO: 999263 - DNA, 33 bp, Homo sapien
tgagtttcgctttgaacatagtaacatagattc

SEQ ID NO: 999264 - DNA, 33 bp, Homo sapien
tgagtttcgctttgaagatagtaacatagattc

SEQ ID NO: 999265 - DNA, 33 bp, Homo sapien
ttggaagaaaccgagcaaagcatataatgaatg

SEQ ID NO: 999266 - DNA, 33 bp, Homo sapien
ttggaagaaaccgagcgaagcatataatgaatg

SEQ ID NO: 999267 - DNA, 33 bp, Homo sapien
atgcctgtgcccaggacgccgggaggatctcag

SEQ ID NO: 999268 - DNA, 33 bp, Homo sapien
atgcctgtgcccaggatgccgggaggatctcag

SEQ ID NO: 999269 - DNA, 33 bp, Homo sapien
tgagcagtctcagaaacggactagggtacactg

SEQ ID NO: 999270 - DNA, 33 bp, Homo sapien
tgagcagtctcagaaatggactagggtacactg

SEQ ID NO: 999271 - DNA, 33 bp, Homo sapien
gtgccaaatgatagggacaaaaaagatggcaga

SEQ ID NO: 999272 - DNA, 33 bp, Homo sapien
gtgccaaatgataggggcaaaaaagatggcaga

SEQ ID NO: 999273 - DNA, 33 bp, Homo sapien
gagcaaggatggaggacgaacccacagagacac

SEQ ID NO: 999274 - DNA, 33 bp, Homo sapien
gagcaaggatggaggatgaacccacagagacac

SEQ ID NO: 999275 - DNA, 33 bp, Homo sapien
cacagacgcactcttcacaaggacaggtccagg

SEQ ID NO: 999276 - DNA, 33 bp, Homo sapien
cacagacgcactcttcccaaggacaggtccagg

SEQ ID NO: 999277 - DNA, 33 bp, Homo sapien
taaatatgtccctaaccacagtaagctgtatag

SEQ ID NO: 999278 - DNA, 33 bp, Homo sapien
taaatatgtccctaacgacagtaagctgtatag

SEQ ID NO: 999279 - DNA, 33 bp, Homo sapien
gggttccctccttctacaggcagtaagcagcta

SEQ ID NO: 999280 - DNA, 33 bp, Homo sapien
gggttccctccttctataggcagtaagcagcta

SEQ ID NO: 999281 - DNA, 33 bp, Homo sapien
gatgttccagccaggcagagaggagaaaatcag

SEQ ID NO: 999282 - DNA, 33 bp, Homo sapien
gatgttccagccaggcggagaggagaaaatcag

SEQ ID NO: 999283 - DNA, 33 bp, Homo sapien
taagtgcaccaagagcagcaagggacttagagc

SEQ ID NO: 999284 - DNA, 33 bp, Homo sapien
taagtgcaccaagagctgcaagggacttagagc

SEQ ID NO: 999285 - DNA, 33 bp, Homo sapien
gtgtgctggtgcgagacgcgtttccatgatgga

SEQ ID NO: 999286 - DNA, 33 bp, Homo sapien
gtgtgctggtgcgagatgcgtttccatgatgga

SEQ ID NO: 999287 - DNA, 33 bp, Homo sapien
gtccgggcagattggacgcacagactgtccaga

SEQ ID NO: 999288 - DNA, 33 bp, Homo sapien
gtccgggcagattggatgcacagactgtccaga

SEQ ID NO: 999289 - DNA, 33 bp, Homo sapien
cttgcacaatgtatcacggccctttcacatgga

SEQ ID NO: 999290 - DNA, 33 bp, Homo sapien
cttgcacaatgtatcatggccctttcacatgga

SEQ ID NO: 999291 - DNA, 33 bp, Homo sapien
gatatttcaccataaaagtctccatttctggct

SEQ ID NO: 999292 - DNA, 33 bp, Homo sapien
gatatttcaccataaaggtctccatttctggct

SEQ ID NO: 999293 - DNA, 33 bp, Homo sapien
agggcacagggtgagaccagctttcgtcctgag

SEQ ID NO: 999294 - DNA, 33 bp, Homo sapien
agggcacagggtgagatcagctttcgtcctgag

SEQ ID NO: 999295 - DNA, 33 bp, Homo sapien
cccgcaccatcgtgtcaacacgcgccagccctt

SEQ ID NO: 999296 - DNA, 33 bp, Homo sapien
cccgcaccatcgtgtccacacgcgccagccctt

SEQ ID NO: 999297 - DNA, 33 bp, Homo sapien
gcgcttctggatttcactctggatccccccctt

SEQ ID NO: 999298 - DNA, 33 bp, Homo sapien
gcgcttctggatttcattctggatccccccctt

SEQ ID NO: 999299 - DNA, 33 bp, Homo sapien
gaaactgtacttcagtaaagctgcttttttttt

SEQ ID NO: 999300 - DNA, 33 bp, Homo sapien
gaaactgtacttcagttaagctgcttttttttt

SEQ ID NO: 999301 - DNA, 33 bp, Homo sapien
ggtgctttccctcaacagtgatctaaccctttg

SEQ ID NO: 999302 - DNA, 33 bp, Homo sapien
ggtgctttccctcaacggtgatctaaccctttg

SEQ ID NO: 999303 - DNA, 33 bp, Homo sapien
tgagtctctttagacaacagtgacctgaggggt

SEQ ID NO: 999304 - DNA, 33 bp, Homo sapien
tgagtctctttagacagcagtgacctgaggggt

SEQ ID NO: 999305 - DNA, 33 bp, Homo sapien
agaacaccacacggcaaggaaaaagaatgagtt

SEQ ID NO: 999306 - DNA, 33 bp, Homo sapien
agaacaccacacggcagggaaaaagaatgagtt

SEQ ID NO: 999307 - DNA, 33 bp, Homo sapien
taaagcaaatcaacaacgacgcagggcaaaggc

SEQ ID NO: 999308 - DNA, 33 bp, Homo sapien
taaagcaaatcaacaatgacgcagggcaaaggc

SEQ ID NO: 999309 - DNA, 33 bp, Homo sapien
atactgcaaatgcgataaaatatcatataaaca

SEQ ID NO: 999310 - DNA, 33 bp, Homo sapien
atactgcaaatgcgatgaaatatcatataaaca

SEQ ID NO: 999311 - DNA, 33 bp, Homo sapien
ctctgcattctagaacacttctgcccaggaggg

SEQ ID NO: 999312 - DNA, 33 bp, Homo sapien
ctctgcattctagaacgcttctgcccaggaggg

SEQ ID NO: 999313 - DNA, 33 bp, Homo sapien
gtgttgtcattaaacaccaggtagtgtggaaca

SEQ ID NO: 999314 - DNA, 33 bp, Homo sapien
gtgttgtcattaaacatcaggtagtgtggaaca

SEQ ID NO: 999315 - DNA, 33 bp, Homo sapien
ccagcaccctgcggtacatctctgacctgcacc

SEQ ID NO: 999316 - DNA, 33 bp, Homo sapien
ccagcaccctgcggtagatctctgacctgcacc

SEQ ID NO: 999317 - DNA, 33 bp, Homo sapien
ccagggctctgtaatacacactcgagcaaacca

SEQ ID NO: 999318 - DNA, 33 bp, Homo sapien
ccagggctctgtaatagacactcgagcaaacca

SEQ ID NO: 999319 - DNA, 33 bp, Homo sapien
tggaagaatttgaggaaaccccctggagtgacc

SEQ ID NO: 999320 - DNA, 33 bp, Homo sapien
tggaagaatttgaggacaccccctggagtgacc

SEQ ID NO: 999321 - DNA, 33 bp, Homo sapien
tgcccttcctcacaggcagagaaacacacaggc

SEQ ID NO: 999322 - DNA, 33 bp, Homo sapien
tgcccttcctcacaggtagagaaacacacaggc

SEQ ID NO: 999323 - DNA, 33 bp, Homo sapien
atgtccgcacctgctgcaaggagcggctttgcc

SEQ ID NO: 999324 - DNA, 33 bp, Homo sapien
atgtccgcacctgctgtaaggagcggctttgcc

SEQ ID NO: 999325 - DNA, 33 bp, Homo sapien
caggtgcggacatactcaggcctttgcccaacg

SEQ ID NO: 999326 - DNA, 33 bp, Homo sapien
caggtgcggacatactgaggcctttgcccaacg

SEQ ID NO: 999327 - DNA, 33 bp, Homo sapien
acaccttagggttgaccccacacagccagggct

SEQ ID NO: 999328 - DNA, 33 bp, Homo sapien
acaccttagggttgactccacacagccagggct

SEQ ID NO: 999329 - DNA, 33 bp, Homo sapien
attcctaccaacagcaagttcgtggcagtttag

SEQ ID NO: 999330 - DNA, 33 bp, Homo sapien
attcctaccaacagcatgttcgtggcagtttag

SEQ ID NO: 999331 - DNA, 33 bp, Homo sapien
gcttttctggcccgccaagctctcgttctgtgc

SEQ ID NO: 999332 - DNA, 33 bp, Homo sapien
gcttttctggcccgccgagctctcgttctgtgc

SEQ ID NO: 999333 - DNA, 33 bp, Homo sapien
ggccattctgctcactaaattttttggttatgg

SEQ ID NO: 999334 - DNA, 33 bp, Homo sapien
ggccattctgctcactgaattttttggttatgg

SEQ ID NO: 999335 - DNA, 33 bp, Homo sapien
gcgttggttaggcccaggcgtttctgcttttgg

SEQ ID NO: 999336 - DNA, 33 bp, Homo sapien
gcgttggttaggcccatgcgtttctgcttttgg

SEQ ID NO: 999337 - DNA, 33 bp, Homo sapien
cccagtccctcaatggccactttctataaacaa

SEQ ID NO: 999338 - DNA, 33 bp, Homo sapien
cccagtccctcaatggtcactttctataaacaa

SEQ ID NO: 999339 - DNA, 33 bp, Homo sapien
tgcctggcctcttttaccttatagcaaaaatta

SEQ ID NO: 999340 - DNA, 33 bp, Homo sapien
tgcctggcctcttttatcttatagcaaaaatta

SEQ ID NO: 999341 - DNA, 33 bp, Homo sapien
tgcgggcgcccacctcaaaggccgagtgcagga

SEQ ID NO: 999342 - DNA, 33 bp, Homo sapien
tgcgggcgcccacctcgaaggccgagtgcagga

SEQ ID NO: 999343 - DNA, 33 bp, Homo sapien
aaaaagctatattcaactcctaacccccaactt

SEQ ID NO: 999344 - DNA, 33 bp, Homo sapien
aaaaagctatattcaagtcctaacccccaactt

SEQ ID NO: 999345 - DNA, 33 bp, Homo sapien
ctcttagattcctggcccctaatgtacacaccc

SEQ ID NO: 999346 - DNA, 33 bp, Homo sapien
ctcttagattcctggctcctaatgtacacaccc

SEQ ID NO: 999347 - DNA, 33 bp, Homo sapien
ggctccagctacccagaaccgtgcattaaaata

SEQ ID NO: 999348 - DNA, 33 bp, Homo sapien
ggctccagctacccaggaccgtgcattaaaata

SEQ ID NO: 999349 - DNA, 33 bp, Homo sapien
ttatgtgaatctgggacagcctttctctgttcc

SEQ ID NO: 999350 - DNA, 33 bp, Homo sapien
ttatgtgaatctgggatagcctttctctgttcc

SEQ ID NO: 999351 - DNA, 33 bp, Homo sapien
gatgcctaactaggtccgaattaaacgtgaagg

SEQ ID NO: 999352 - DNA, 33 bp, Homo sapien
gatgcctaactaggtctgaattaaacgtgaagg

SEQ ID NO: 999353 - DNA, 33 bp, Homo sapien
acacatcacaaaagacaacacggaaaagcaata

SEQ ID NO: 999354 - DNA, 33 bp, Homo sapien
acacatcacaaaagacgacacggaaaagcaata

SEQ ID NO: 999355 - DNA, 33 bp, Homo sapien
acagagagttcccaagaaaggagaaaatgtgaa

SEQ ID NO: 999356 - DNA, 33 bp, Homo sapien
acagagagttcccaaggaaggagaaaatgtgaa

SEQ ID NO: 999357 - DNA, 33 bp, Homo sapien
gagacttacggtttaccaaaggggtgcgatggg

SEQ ID NO: 999358 - DNA, 33 bp, Homo sapien
gagacttacggtttacgaaaggggtgcgatggg

SEQ ID NO: 999359 - DNA, 33 bp, Homo sapien
agagcctttgtaataccgaacctcattcaagga

SEQ ID NO: 999360 - DNA, 33 bp, Homo sapien
agagcctttgtaatactgaacctcattcaagga

SEQ ID NO: 999361 - DNA, 33 bp, Homo sapien
tgtctgcttatccagccagaaataaaaatctgc

SEQ ID NO: 999362 - DNA, 33 bp, Homo sapien
tgtctgcttatccagcgagaaataaaaatctgc

SEQ ID NO: 999363 - DNA, 33 bp, Homo sapien
gttagaaggaaagacaactaagagcagcagcct

SEQ ID NO: 999364 - DNA, 33 bp, Homo sapien
gttagaaggaaagacagctaagagcagcagcct

SEQ ID NO: 999365 - DNA, 33 bp, Homo sapien
gtgtccctgcggcacaaaaagcgctgagtcagc

SEQ ID NO: 999366 - DNA, 33 bp, Homo sapien
gtgtccctgcggcacagaaagcgctgagtcagc

SEQ ID NO: 999367 - DNA, 33 bp, Homo sapien
catcccataagatacactgatatattctcagga

SEQ ID NO: 999368 - DNA, 33 bp, Homo sapien
catcccataagatacagtgatatattctcagga

SEQ ID NO: 999369 - DNA, 33 bp, Homo sapien
gtgttgagttttctgaagtcctcttatctgcta

SEQ ID NO: 999370 - DNA, 33 bp, Homo sapien
gtgttgagttttctgaggtcctcttatctgcta

SEQ ID NO: 999371 - DNA, 33 bp, Homo sapien
gccctatttaagtagaagtgtctgtattaaatt

SEQ ID NO: 999372 - DNA, 33 bp, Homo sapien
gccctatttaagtagaggtgtctgtattaaatt

SEQ ID NO: 999373 - DNA, 33 bp, Homo sapien
caactcacatcactcactccttttttgttgaag

SEQ ID NO: 999374 - DNA, 33 bp, Homo sapien
caactcacatcactcattccttttttgttgaag

SEQ ID NO: 999375 - DNA, 33 bp, Homo sapien
ctgagcttcatctgacagggcctgacttaatta

SEQ ID NO: 999376 - DNA, 33 bp, Homo sapien
ctgagcttcatctgacggggcctgacttaatta

SEQ ID NO: 999377 - DNA, 33 bp, Homo sapien
ttgcagttgttagaagaatgggagctgagccat

SEQ ID NO: 999378 - DNA, 33 bp, Homo sapien
ttgcagttgttagaaggatgggagctgagccat

SEQ ID NO: 999379 - DNA, 33 bp, Homo sapien
ccgacgatccagccacagaagggaaacactgga

SEQ ID NO: 999380 - DNA, 33 bp, Homo sapien
ccgacgatccagccacggaagggaaacactgga

SEQ ID NO: 999381 - DNA, 33 bp, Homo sapien
acactcaccctgaaaaatacactgtcacatggg

SEQ ID NO: 999382 - DNA, 33 bp, Homo sapien
acactcaccctgaaaagtacactgtcacatggg

SEQ ID NO: 999383 - DNA, 33 bp, Homo sapien
tcctcgggctccaggacgtcgtagtgggggaca

SEQ ID NO: 999384 - DNA, 33 bp, Homo sapien
tcctcgggctccaggatgtcgtagtgggggaca

SEQ ID NO: 999385 - DNA, 33 bp, Homo sapien
tgtaaacagcagaaagaaaccaacaacacagag

SEQ ID NO: 999386 - DNA, 33 bp, Homo sapien
tgtaaacagcagaaaggaaccaacaacacagag

SEQ ID NO: 999387 - DNA, 33 bp, Homo sapien
tgagggtgaagttggccagacagagaaaaggtc

SEQ ID NO: 999388 - DNA, 33 bp, Homo sapien
tgagggtgaagttggcgagacagagaaaaggtc

SEQ ID NO: 999389 - DNA, 33 bp, Homo sapien
ccatgcggatgctggcaatatgactggagtcca

SEQ ID NO: 999390 - DNA, 33 bp, Homo sapien
ccatgcggatgctggcgatatgactggagtcca

SEQ ID NO: 999391 - DNA, 33 bp, Homo sapien
gacaacaaggtggacaacatgtgcatggtattt

SEQ ID NO: 999392 - DNA, 33 bp, Homo sapien
gacaacaaggtggacagcatgtgcatggtattt

SEQ ID NO: 999393 - DNA, 33 bp, Homo sapien
gaaaggggggaccagacactacttacttgccca

SEQ ID NO: 999394 - DNA, 33 bp, Homo sapien
gaaaggggggaccagagactacttacttgccca

SEQ ID NO: 999395 - DNA, 33 bp, Homo sapien
tgaatatccaattgtcacagaaccatttgctgg

SEQ ID NO: 999396 - DNA, 33 bp, Homo sapien
tgaatatccaattgtcccagaaccatttgctgg

SEQ ID NO: 999397 - DNA, 33 bp, Homo sapien
ctaaccaggctttgtcactgcagagctggcctc

SEQ ID NO: 999398 - DNA, 33 bp, Homo sapien
ctaaccaggctttgtcgctgcagagctggcctc

SEQ ID NO: 999399 - DNA, 33 bp, Homo sapien
gtcagttttattctctcaatgtggcttctccat

SEQ ID NO: 999400 - DNA, 33 bp, Homo sapien
gtcagttttattctctgaatgtggcttctccat

SEQ ID NO: 999401 - DNA, 33 bp, Homo sapien
ctgttattctgaaaaaacttcccactgccgaat

SEQ ID NO: 999402 - DNA, 33 bp, Homo sapien
ctgttattctgaaaaaccttcccactgccgaat

SEQ ID NO: 999403 - DNA, 33 bp, Homo sapien
aggtgagaagctggggccacctaatcgctgggc

SEQ ID NO: 999404 - DNA, 33 bp, Homo sapien
aggtgagaagctggggtcacctaatcgctgggc

SEQ ID NO: 999405 - DNA, 33 bp, Homo sapien
gggaaatctttctagacaattcaaagcaggatg

SEQ ID NO: 999406 - DNA, 33 bp, Homo sapien
gggaaatctttctagagaattcaaagcaggatg

SEQ ID NO: 999407 - DNA, 33 bp, Homo sapien
ttttatctatattaccacacctaactttctttt

SEQ ID NO: 999408 - DNA, 33 bp, Homo sapien
ttttatctatattaccccacctaactttctttt

SEQ ID NO: 999409 - DNA, 33 bp, Homo sapien
ctccactcatctgcggaatctgtcatcatctgt

SEQ ID NO: 999410 - DNA, 33 bp, Homo sapien
ctccactcatctgcggcatctgtcatcatctgt

SEQ ID NO: 999411 - DNA, 33 bp, Homo sapien
tgggatgtccttcagacgcacgaggcagaggcc

SEQ ID NO: 999412 - DNA, 33 bp, Homo sapien
tgggatgtccttcagatgcacgaggcagaggcc

SEQ ID NO: 999413 - DNA, 33 bp, Homo sapien
caggagagagacggcgaaaagcgccaagccaac

SEQ ID NO: 999414 - DNA, 33 bp, Homo sapien
caggagagagacggcggaaagcgccaagccaac

SEQ ID NO: 999415 - DNA, 33 bp, Homo sapien
aagcagtgctggctcacatacactagctgcagg

SEQ ID NO: 999416 - DNA, 33 bp, Homo sapien
aagcagtgctggctcatatacactagctgcagg

SEQ ID NO: 999417 - DNA, 33 bp, Homo sapien
taggcatgaacttggaagaaccaacaagctgaa

SEQ ID NO: 999418 - DNA, 33 bp, Homo sapien
taggcatgaacttggaggaaccaacaagctgaa

SEQ ID NO: 999419 - DNA, 33 bp, Homo sapien
ctacactgagctcccgcagtctggtttcggtct

SEQ ID NO: 999420 - DNA, 33 bp, Homo sapien
ctacactgagctcccgtagtctggtttcggtct

SEQ ID NO: 999421 - DNA, 33 bp, Homo sapien
tcattcccgtgctgtcaccacatgatgtcatcc

SEQ ID NO: 999422 - DNA, 33 bp, Homo sapien
tcattcccgtgctgtcgccacatgatgtcatcc

SEQ ID NO: 999423 - DNA, 33 bp, Homo sapien
tgggtctgagagggaccggcacgttgtccaagg

SEQ ID NO: 999424 - DNA, 33 bp, Homo sapien
tgggtctgagagggactggcacgttgtccaagg

SEQ ID NO: 999425 - DNA, 33 bp, Homo sapien
tgttcttcaggatgaactggaaatggaccaaga

SEQ ID NO: 999426 - DNA, 33 bp, Homo sapien
tgttcttcaggatgaagtggaaatggaccaaga

SEQ ID NO: 999427 - DNA, 33 bp, Homo sapien
tgtgcagcctccaccacgataacctcaaagggc

SEQ ID NO: 999428 - DNA, 33 bp, Homo sapien
tgtgcagcctccaccatgataacctcaaagggc

SEQ ID NO: 999429 - DNA, 33 bp, Homo sapien
cctggcactggtgcacacacacctaaagggagg

SEQ ID NO: 999430 - DNA, 33 bp, Homo sapien
cctggcactggtgcacgcacacctaaagggagg

SEQ ID NO: 999431 - DNA, 33 bp, Homo sapien
tctccgtgcttggtgacgctctggagaatagta

SEQ ID NO: 999432 - DNA, 33 bp, Homo sapien
tctccgtgcttggtgatgctctggagaatagta

SEQ ID NO: 999433 - DNA, 33 bp, Homo sapien
tactgctgccaggaaaccactgcttgcaggtcc

SEQ ID NO: 999434 - DNA, 33 bp, Homo sapien
tactgctgccaggaaatcactgcttgcaggtcc

SEQ ID NO: 999435 - DNA, 33 bp, Homo sapien
tgcactgcggtcctacagaggagcagcacgtgt

SEQ ID NO: 999436 - DNA, 33 bp, Homo sapien
tgcactgcggtcctacggaggagcagcacgtgt

SEQ ID NO: 999437 - DNA, 33 bp, Homo sapien
tttattccttaacctcgacaacagtctaaattc

SEQ ID NO: 999438 - DNA, 33 bp, Homo sapien
tttattccttaacctctacaacagtctaaattc

SEQ ID NO: 999439 - DNA, 33 bp, Homo sapien
gcagagctaagctaacaattgcttctctcatcc

SEQ ID NO: 999440 - DNA, 33 bp, Homo sapien
gcagagctaagctaacgattgcttctctcatcc

SEQ ID NO: 999441 - DNA, 33 bp, Homo sapien
caggatgttagcacaactcactcccgtgtcccc

SEQ ID NO: 999442 - DNA, 33 bp, Homo sapien
caggatgttagcacaattcactcccgtgtcccc

SEQ ID NO: 999443 - DNA, 33 bp, Homo sapien
tttcaacagcatccccagcctccacaaatcctt

SEQ ID NO: 999444 - DNA, 33 bp, Homo sapien
tttcaacagcatccccggcctccacaaatcctt

SEQ ID NO: 999445 - DNA, 33 bp, Homo sapien
gccccttcttcaaggccgagagaactttgagcg

SEQ ID NO: 999446 - DNA, 33 bp, Homo sapien
gccccttcttcaaggctgagagaactttgagcg

SEQ ID NO: 999447 - DNA, 33 bp, Homo sapien
ttcacattatggatagcaagtataagttaaagg

SEQ ID NO: 999448 - DNA, 33 bp, Homo sapien
ttcacattatggataggaagtataagttaaagg

SEQ ID NO: 999449 - DNA, 33 bp, Homo sapien
gtggataaaacatggccctccacttccctgttt

SEQ ID NO: 999450 - DNA, 33 bp, Homo sapien
gtggataaaacatggctctccacttccctgttt

SEQ ID NO: 999451 - DNA, 33 bp, Homo sapien
ggggtatatttttcacaagcctttctgaataaa

SEQ ID NO: 999452 - DNA, 33 bp, Homo sapien
ggggtatatttttcacgagcctttctgaataaa

SEQ ID NO: 999453 - DNA, 33 bp, Homo sapien
gagccagcactttacacggtggaagcaggagga

SEQ ID NO: 999454 - DNA, 33 bp, Homo sapien
gagccagcactttacatggtggaagcaggagga

SEQ ID NO: 999455 - DNA, 33 bp, Homo sapien
agcgaaccctcactgggaactgaatcggctggc

SEQ ID NO: 999456 - DNA, 33 bp, Homo sapien
agcgaaccctcactggtaactgaatcggctggc

SEQ ID NO: 999457 - DNA, 33 bp, Homo sapien
ctcacctgccaggcaccctccaaccaagtctat

SEQ ID NO: 999458 - DNA, 33 bp, Homo sapien
ctcacctgccaggcactctccaaccaagtctat

SEQ ID NO: 999459 - DNA, 33 bp, Homo sapien
ctgcagcaggcaggataaggcacggtctctccc

SEQ ID NO: 999460 - DNA, 33 bp, Homo sapien
ctgcagcaggcaggatgaggcacggtctctccc

SEQ ID NO: 999461 - DNA, 33 bp, Homo sapien
tgtcccttaaccatgacccaatgaggagatccc

SEQ ID NO: 999462 - DNA, 33 bp, Homo sapien
tgtcccttaaccatgatccaatgaggagatccc

SEQ ID NO: 999463 - DNA, 33 bp, Homo sapien
tgattggttttgtcatcagtcatattcatgttt

SEQ ID NO: 999464 - DNA, 33 bp, Homo sapien
tgattggttttgtcatgagtcatattcatgttt

SEQ ID NO: 999465 - DNA, 33 bp, Homo sapien
gccttgcagccgcccacgaagtctgcatgtgat

SEQ ID NO: 999466 - DNA, 33 bp, Homo sapien
gccttgcagccgcccaggaagtctgcatgtgat

SEQ ID NO: 999467 - DNA, 33 bp, Homo sapien
agcatcagatactgaaagatattggcccagagc

SEQ ID NO: 999468 - DNA, 33 bp, Homo sapien
agcatcagatactgaaggatattggcccagagc

SEQ ID NO: 999469 - DNA, 33 bp, Homo sapien
acgagcgctgctagaccgagtaggttaaaataa

SEQ ID NO: 999470 - DNA, 33 bp, Homo sapien
acgagcgctgctagactgagtaggttaaaataa

SEQ ID NO: 999471 - DNA, 33 bp, Homo sapien
aaattgtttcaagctaaattaacttacaaatgt

SEQ ID NO: 999472 - DNA, 33 bp, Homo sapien
aaattgtttcaagctagattaacttacaaatgt

SEQ ID NO: 999473 - DNA, 33 bp, Homo sapien
gttcattactcatcctaaaattacctcaactgt

SEQ ID NO: 999474 - DNA, 33 bp, Homo sapien
gttcattactcatcctgaaattacctcaactgt

SEQ ID NO: 999475 - DNA, 33 bp, Homo sapien
aatactttgcatttgtcaatccaatcaagttga

SEQ ID NO: 999476 - DNA, 33 bp, Homo sapien
aatactttgcatttgttaatccaatcaagttga

SEQ ID NO: 999477 - DNA, 33 bp, Homo sapien
ctacctttttgggatagaacatcaaaggccagg

SEQ ID NO: 999478 - DNA, 33 bp, Homo sapien
ctacctttttgggatataacatcaaaggccagg

SEQ ID NO: 999479 - DNA, 33 bp, Homo sapien
tacagttcttgaaaccaaatcagaaccatttct

SEQ ID NO: 999480 - DNA, 33 bp, Homo sapien
tacagttcttgaaaccgaatcagaaccatttct

SEQ ID NO: 999481 - DNA, 33 bp, Homo sapien
gaagggaagggtccatcatcctggaagatctgg

SEQ ID NO: 999482 - DNA, 33 bp, Homo sapien
gaagggaagggtccattatcctggaagatctgg

SEQ ID NO: 999483 - DNA, 33 bp, Homo sapien
agagcccagctagcagcagaagttaatgtaaaa

SEQ ID NO: 999484 - DNA, 33 bp, Homo sapien
agagcccagctagcaggagaagttaatgtaaaa

SEQ ID NO: 999485 - DNA, 33 bp, Homo sapien
tcatttggtgccgacgccctagaatcacacagg

SEQ ID NO: 999486 - DNA, 33 bp, Homo sapien
tcatttggtgccgacggcctagaatcacacagg

SEQ ID NO: 999487 - DNA, 33 bp, Homo sapien
aatgccactgggagacagccaccaggacaccca

SEQ ID NO: 999488 - DNA, 33 bp, Homo sapien
aatgccactgggagacggccaccaggacaccca

SEQ ID NO: 999489 - DNA, 33 bp, Homo sapien
cagtcaggaatgcacaatctcttctccacacag

SEQ ID NO: 999490 - DNA, 33 bp, Homo sapien
cagtcaggaatgcacagtctcttctccacacag

SEQ ID NO: 999491 - DNA, 33 bp, Homo sapien
agtcaagtctcaactccctcctcctcagcattt

SEQ ID NO: 999492 - DNA, 33 bp, Homo sapien
agtcaagtctcaactctctcctcctcagcattt

SEQ ID NO: 999493 - DNA, 33 bp, Homo sapien
tctatcacaactgctcaattctgtggtacaaaa

SEQ ID NO: 999494 - DNA, 33 bp, Homo sapien
tctatcacaactgctcgattctgtggtacaaaa

SEQ ID NO: 999495 - DNA, 33 bp, Homo sapien
tgtattctaggtctgacaaataaccatggggta

SEQ ID NO: 999496 - DNA, 33 bp, Homo sapien
tgtattctaggtctgataaataaccatggggta

SEQ ID NO: 999497 - DNA, 33 bp, Homo sapien
cagaatatcttttacaccagaaagaccaaatct

SEQ ID NO: 999498 - DNA, 33 bp, Homo sapien
cagaatatcttttacagcagaaagaccaaatct

SEQ ID NO: 999499 - DNA, 33 bp, Homo sapien
acattgagcacagtaccggaataccctataatt

SEQ ID NO: 999500 - DNA, 33 bp, Homo sapien
acattgagcacagtactggaataccctataatt

SEQ ID NO: 999501 - DNA, 33 bp, Homo sapien
attaaataccacaaggaaatcttggagttattg

SEQ ID NO: 999502 - DNA, 33 bp, Homo sapien
attaaataccacaagggaatcttggagttattg

SEQ ID NO: 999503 - DNA, 33 bp, Homo sapien
aagcagaagccaaaggaaaaccggagcctaatc

SEQ ID NO: 999504 - DNA, 33 bp, Homo sapien
aagcagaagccaaagggaaaccggagcctaatc

SEQ ID NO: 999505 - DNA, 33 bp, Homo sapien
gcggaggattttgacaagagattcctgaggatt

SEQ ID NO: 999506 - DNA, 33 bp, Homo sapien
gcggaggattttgacaggagattcctgaggatt

SEQ ID NO: 999507 - DNA, 33 bp, Homo sapien
atcagccttcatatcacatcctaggtacagtga

SEQ ID NO: 999508 - DNA, 33 bp, Homo sapien
atcagccttcatatcatatcctaggtacagtga

SEQ ID NO: 999509 - DNA, 33 bp, Homo sapien
agaatgagccaataaactaactgtccactagga

SEQ ID NO: 999510 - DNA, 33 bp, Homo sapien
agaatgagccaataaattaactgtccactagga

SEQ ID NO: 999511 - DNA, 33 bp, Homo sapien
ctacatattctatcgtaaaggatgtgtcaagga

SEQ ID NO: 999512 - DNA, 33 bp, Homo sapien
ctacatattctatcgtcaaggatgtgtcaagga

SEQ ID NO: 999513 - DNA, 33 bp, Homo sapien
ggatcatgcacactaacgaaggactgaaaggac

SEQ ID NO: 999514 - DNA, 33 bp, Homo sapien
ggatcatgcacactaaggaaggactgaaaggac

SEQ ID NO: 999515 - DNA, 33 bp, Homo sapien; identical to SEQ ID NO: 999513

SEQ ID NO: 999516 - DNA, 33 bp, Homo sapien; identical to SEQ ID NO: 999514

SEQ ID NO: 999517 - DNA, 33 bp, Homo sapien
ctctgagttcacatgagatctgcttgtttaaaa

SEQ ID NO: 999518 - DNA, 33 bp, Homo sapien
ctctgagttcacatgatatctgcttgtttaaaa

SEQ ID NO: 999519 - DNA, 33 bp, Homo sapien
ttcacagacacgagtacgcaaacatgtacaaga

SEQ ID NO: 999520 - DNA, 33 bp, Homo sapien
ttcacagacacgagtatgcaaacatgtacaaga

SEQ ID NO: 999521 - DNA, 33 bp, Homo sapien
tggtaagcatgtaaaagggtggtaaatatatag

SEQ ID NO: 999522 - DNA, 33 bp, Homo sapien
tggtaagcatgtaaaatggtggtaaatatatag

SEQ ID NO: 999523 - DNA, 33 bp, Homo sapien
tcagatgtcctgagtacaattcttactattggg

SEQ ID NO: 999524 - DNA, 33 bp, Homo sapien
tcagatgtcctgagtagaattcttactattggg

SEQ ID NO: 999525 - DNA, 33 bp, Homo sapien
attaaattgctcacaacgtttatataatatcgg

SEQ ID NO: 999526 - DNA, 33 bp, Homo sapien
attaaattgctcacaatgtttatataatatcgg

SEQ ID NO: 999527 - DNA, 33 bp, Homo sapien
aaattctactgataggcatttatcctacatatt

SEQ ID NO: 999528 - DNA, 33 bp, Homo sapien
aaattctactgatagggatttatcctacatatt

SEQ ID NO: 999529 - DNA, 33 bp, Homo sapien
acaagagtcgttaaaaagatacatcgttaggta

SEQ ID NO: 999530 - DNA, 33 bp, Homo sapien
acaagagtcgttaaaatgatacatcgttaggta

SEQ ID NO: 999531 - DNA, 33 bp, Homo sapien
agaaccgtgagtcaaagaaatgtcttattttat

SEQ ID NO: 999532 - DNA, 33 bp, Homo sapien
agaaccgtgagtcaaataaatgtcttattttat

SEQ ID NO: 999533 - DNA, 33 bp, Homo sapien
gaaggccaaaatatccacttcaagacttctgag

SEQ ID NO: 999534 - DNA, 33 bp, Homo sapien
gaaggccaaaatatccgcttcaagacttctgag

SEQ ID NO: 999535 - DNA, 33 bp, Homo sapien
ttcctgaggacagcccaacttctctagagtgct

SEQ ID NO: 999536 - DNA, 33 bp, Homo sapien
ttcctgaggacagcccgacttctctagagtgct

SEQ ID NO: 999537 - DNA, 33 bp, Homo sapien
ttctcccattccagaactaacactagacagcag

SEQ ID NO: 999538 - DNA, 33 bp, Homo sapien
ttctcccattccagaattaacactagacagcag

SEQ ID NO: 999539 - DNA, 33 bp, Homo sapien
aaacaagctcaacagagtccgtggaaggccagg

SEQ ID NO: 999540 - DNA, 33 bp, Homo sapien
aaacaagctcaacagattccgtggaaggccagg

SEQ ID NO: 999541 - DNA, 33 bp, Homo sapien
taaaggaaaaaactaacatgttgaagcatttat

SEQ ID NO: 999542 - DNA, 33 bp, Homo sapien
taaaggaaaaaactaatatgttgaagcatttat

SEQ ID NO: 999543 - DNA, 33 bp, Homo sapien
aggtcttttgtccaacaataaactctgcgaagt

SEQ ID NO: 999544 - DNA, 33 bp, Homo sapien
aggtcttttgtccaacgataaactctgcgaagt

SEQ ID NO: 999545 - DNA, 33 bp, Homo sapien
aagtcagtgatgttttatatactgtcagcagca

SEQ ID NO: 999546 - DNA, 33 bp, Homo sapien
aagtcagtgatgttttctatactgtcagcagca

SEQ ID NO: 999547 - DNA, 33 bp, Homo sapien
tccacactcaattccaaatttatcatagtacta

SEQ ID NO: 999548 - DNA, 33 bp, Homo sapien
tccacactcaattccatatttatcatagtacta

SEQ ID NO: 999549 - DNA, 33 bp, Homo sapien
tcctaatccaatgttcacaggctaccaccctca

SEQ ID NO: 999550 - DNA, 33 bp, Homo sapien
tcctaatccaatgttcgcaggctaccaccctca

SEQ ID NO: 999551 - DNA, 33 bp, Homo sapien
aactacacaaaaagagaatcatacttgatgaaa

SEQ ID NO: 999552 - DNA, 33 bp, Homo sapien
aactacacaaaaagagtatcatacttgatgaaa

SEQ ID NO: 999553 - DNA, 33 bp, Homo sapien
aactgatctttcaatccaactaaacacttccta

SEQ ID NO: 999554 - DNA, 33 bp, Homo sapien
aactgatctttcaatcgaactaaacacttccta

SEQ ID NO: 999555 - DNA, 33 bp, Homo sapien
tgaggccagaaaatgaataattcccaactcttg

SEQ ID NO: 999556 - DNA, 33 bp, Homo sapien
tgaggccagaaaatgagtaattcccaactcttg

SEQ ID NO: 999557 - DNA, 33 bp, Homo sapien
cctttcatcattaccacgttgtttctaagtctc

SEQ ID NO: 999558 - DNA, 33 bp, Homo sapien
cctttcatcattaccatgttgtttctaagtctc

SEQ ID NO: 999559 - DNA, 33 bp, Homo sapien
ctttaagaagcattaccgaagagagagacattt

SEQ ID NO: 999560 - DNA, 33 bp, Homo sapien
ctttaagaagcattactgaagagagagacattt

SEQ ID NO: 999561 - DNA, 33 bp, Homo sapien
tacaaagctagtgataagtattaatgacagaca

SEQ ID NO: 999562 - DNA, 33 bp, Homo sapien
tacaaagctagtgatacgtattaatgacagaca

SEQ ID NO: 999563 - DNA, 33 bp, Homo sapien
tccaggctataccacaagagatgctaatacagg

SEQ ID NO: 999564 - DNA, 33 bp, Homo sapien
tccaggctataccacacgagatgctaatacagg

SEQ ID NO: 999565 - DNA, 33 bp, Homo sapien
ttgatcacagaaaaaggctttggcttggttgtg

SEQ ID NO: 999566 - DNA, 33 bp, Homo sapien
ttgatcacagaaaaagtctttggcttggttgtg

SEQ ID NO: 999567 - DNA, 33 bp, Homo sapien
aacctaacctcttcaacataagcagcagaacca

SEQ ID NO: 999568 - DNA, 33 bp, Homo sapien
aacctaacctcttcaagataagcagcagaacca

SEQ ID NO: 999569 - DNA, 33 bp, Homo sapien
cagcaaacttaccaaacgaatgcttacagatat

SEQ ID NO: 999570 - DNA, 33 bp, Homo sapien
cagcaaacttaccaaatgaatgcttacagatat

SEQ ID NO: 999571 - DNA, 33 bp, Homo sapien
aagtgcaaaagaacaacagaatcagaagaataa

SEQ ID NO: 999572 - DNA, 33 bp, Homo sapien
aagtgcaaaagaacaatagaatcagaagaataa

SEQ ID NO: 999573 - DNA, 33 bp, Homo sapien
ctaagaatagcccaacaccttgaaagatgaagt

SEQ ID NO: 999574 - DNA, 33 bp, Homo sapien
ctaagaatagcccaaccccttgaaagatgaagt

SEQ ID NO: 999575 - DNA, 33 bp, Homo sapien
aatgacaataaagaaacgtctgctctgtgtgca

SEQ ID NO: 999576 - DNA, 33 bp, Homo sapien
aatgacaataaagaaatgtctgctctgtgtgca

SEQ ID NO: 999577 - DNA, 33 bp, Homo sapien
aagtggtatctgtaaaatagaggaacgaactgt

SEQ ID NO: 999578 - DNA, 33 bp, Homo sapien
aagtggtatctgtaaactagaggaacgaactgt

SEQ ID NO: 999579 - DNA, 33 bp, Homo sapien
ccaagtaaatgtgaggaccactctccaaaaggt

SEQ ID NO: 999580 - DNA, 33 bp, Homo sapien
ccaagtaaatgtgagggccactctccaaaaggt

SEQ ID NO: 999581 - DNA, 33 bp, Homo sapien
attttttcagttacataatcagtcatttaggtg

SEQ ID NO: 999582 - DNA, 33 bp, Homo sapien
attttttcagttacatcatcagtcatttaggtg

SEQ ID NO: 999583 - DNA, 33 bp, Homo sapien
ttgtcttatgctttgacgaaattgcaaacactg

SEQ ID NO: 999584 - DNA, 33 bp, Homo sapien
ttgtcttatgctttgatgaaattgcaaacactg

SEQ ID NO: 999585 - DNA, 33 bp, Homo sapien
tttgtatatgattaaaaggaggggtccaatttc

SEQ ID NO: 999586 - DNA, 33 bp, Homo sapien
tttgtatatgattaaagggaggggtccaatttc

SEQ ID NO: 999587 - DNA, 33 bp, Homo sapien
tatctagtccactgtcaatgggcatctaggttg

SEQ ID NO: 999588 - DNA, 33 bp, Homo sapien
tatctagtccactgtcgatgggcatctaggttg

SEQ ID NO: 999589 - DNA, 33 bp, Homo sapien
ccgagctgaagctaaactatgaccctagtgtaa

SEQ ID NO: 999590 - DNA, 33 bp, Homo sapien
ccgagctgaagctaaagtatgaccctagtgtaa

SEQ ID NO: 999591 - DNA, 33 bp, Homo sapien
tgtattaggcctggagaataattaaatgtgagg

SEQ ID NO: 999592 - DNA, 33 bp, Homo sapien
tgtattaggcctggagtataattaaatgtgagg

SEQ ID NO: 999593 - DNA, 33 bp, Homo sapien
gtgtctactaaagttacgcaggtaaggtcattg

SEQ ID NO: 999594 - DNA, 33 bp, Homo sapien
gtgtctactaaagttaggcaggtaaggtcattg

SEQ ID NO: 999595 - DNA, 33 bp, Homo sapien
cattaagaaaaatagcacttaagtcagtggtgt

SEQ ID NO: 999596 - DNA, 33 bp, Homo sapien
cattaagaaaaatagcgcttaagtcagtggtgt

SEQ ID NO: 999597 - DNA, 33 bp, Homo sapien
gaaagaatgaaatagcacatggggttatgtata

SEQ ID NO: 999598 - DNA, 33 bp, Homo sapien
gaaagaatgaaatagcgcatggggttatgtata

SEQ ID NO: 999599 - DNA, 33 bp, Homo sapien
aaacaagcagaacccaatctcagtggtttaaag

SEQ ID NO: 999600 - DNA, 33 bp, Homo sapien
aaacaagcagaacccagtctcagtggtttaaag

SEQ ID NO: 999601 - DNA, 33 bp, Homo sapien
ctctccttcatcaccaagagaattttagtggtg

SEQ ID NO: 999602 - DNA, 33 bp, Homo sapien
ctctccttcatcaccatgagaattttagtggtg

SEQ ID NO: 999603 - DNA, 33 bp, Homo sapien
aaagaaaactggtcaccgatgatgacttttttt

SEQ ID NO: 999604 - DNA, 33 bp, Homo sapien
aaagaaaactggtcactgatgatgacttttttt

SEQ ID NO: 999605 - DNA, 33 bp, Homo sapien
cgtaatccagtcataacagtgtttcattctatt

SEQ ID NO: 999606 - DNA, 33 bp, Homo sapien
cgtaatccagtcataatagtgtttcattctatt

SEQ ID NO: 999607 - DNA, 33 bp, Homo sapien
gcacacattccaatagaatttacagcaataaca

SEQ ID NO: 999608 - DNA, 33 bp, Homo sapien
gcacacattccaatagcatttacagcaataaca

SEQ ID NO: 999609 - DNA, 33 bp, Homo sapien
ctaaccacttcgtttgcagttatttctggttca

SEQ ID NO: 999610 - DNA, 33 bp, Homo sapien
ctaaccacttcgtttggagttatttctggttca

SEQ ID NO: 999611 - DNA, 33 bp, Homo sapien
acaaaagtcaatacgacgtttgtcaaaatagga

SEQ ID NO: 999612 - DNA, 33 bp, Homo sapien
acaaaagtcaatacgatgtttgtcaaaatagga

SEQ ID NO: 999613 - DNA, 33 bp, Homo sapien
attcctggtactggtaagctaaaccatgttttg

SEQ ID NO: 999614 - DNA, 33 bp, Homo sapien
attcctggtactggtaggctaaaccatgttttg

SEQ ID NO: 999615 - DNA, 33 bp, Homo sapien
tccttaaaagaaattccaggcaaactcatttaa

SEQ ID NO: 999616 - DNA, 33 bp, Homo sapien
tccttaaaagaaattctaggcaaactcatttaa

SEQ ID NO: 999617 - DNA, 33 bp, Homo sapien
tttttatgccactaaacgttgttcagttatgac

SEQ ID NO: 999618 - DNA, 33 bp, Homo sapien
tttttatgccactaaatgttgttcagttatgac

SEQ ID NO: 999619 - DNA, 33 bp, Homo sapien
aggatagcacagtatgaaaaggccatgcttatc

SEQ ID NO: 999620 - DNA, 33 bp, Homo sapien
aggatagcacagtatggaaaggccatgcttatc

SEQ ID NO: 999621 - DNA, 33 bp, Homo sapien
aggtcatctttggaaaatccagcgggcctgaat

SEQ ID NO: 999622 - DNA, 33 bp, Homo sapien
aggtcatctttggaaagtccagcgggcctgaat

SEQ ID NO: 999623 - DNA, 33 bp, Homo sapien
tgtgcaacttgatgataagaaggtggttttgag

SEQ ID NO: 999624 - DNA, 33 bp, Homo sapien
tgtgcaacttgatgatgagaaggtggttttgag

SEQ ID NO: 999625 - DNA, 33 bp, Homo sapien
ttcatttaactcaatacagcctaaagactgttt

SEQ ID NO: 999626 - DNA, 33 bp, Homo sapien
ttcatttaactcaatatagcctaaagactgttt

SEQ ID NO: 999627 - DNA, 33 bp, Homo sapien
accttcgtaggtcttacagacagtttcttgcct

SEQ ID NO: 999628 - DNA, 33 bp, Homo sapien
accttcgtaggtcttagagacagtttcttgcct

SEQ ID NO: 999629 - DNA, 33 bp, Homo sapien
atacgtttatatatcaataccttcgtaggtctt

SEQ ID NO: 999630 - DNA, 33 bp, Homo sapien
atacgtttatatatcattaccttcgtaggtctt

SEQ ID NO: 999631 - DNA, 33 bp, Homo sapien
atttgtataaccctgacatttccagtcaagttg

SEQ ID NO: 999632 - DNA, 33 bp, Homo sapien
atttgtataaccctgatatttccagtcaagttg

SEQ ID NO: 999633 - DNA, 33 bp, Homo sapien
ccctgcaaagtttctcaaccaacagtgcagata

SEQ ID NO: 999634 - DNA, 33 bp, Homo sapien
ccctgcaaagtttctccaccaacagtgcagata

SEQ ID NO: 999635 - DNA, 33 bp, Homo sapien
aagtaacagcagatgacagtttcaaatcaagtc

SEQ ID NO: 999636 - DNA, 33 bp, Homo sapien
aagtaacagcagatgagagtttcaaatcaagtc

SEQ ID NO: 999637 - DNA, 33 bp, Homo sapien
ctaataattattgaaacgttcaacttcatgcac

SEQ ID NO: 999638 - DNA, 33 bp, Homo sapien
ctaataattattgaaaggttcaacttcatgcac

SEQ ID NO: 999639 - DNA, 33 bp, Homo sapien
tgtgaatccactggtgaacattgatggtataaa

SEQ ID NO: 999640 - DNA, 33 bp, Homo sapien
tgtgaatccactggtggacattgatggtataaa

SEQ ID NO: 999641 - DNA, 33 bp, Homo sapien
taatcactccaaagctcagcattaaagcatccg

SEQ ID NO: 999642 - DNA, 33 bp, Homo sapien
taatcactccaaagctgagcattaaagcatccg

SEQ ID NO: 999643 - DNA, 33 bp, Homo sapien
tctgaatgccatattacattttgcagtcttgcc

SEQ ID NO: 999644 - DNA, 33 bp, Homo sapien
tctgaatgccatattatattttgcagtcttgcc

SEQ ID NO: 999645 - DNA, 33 bp, Homo sapien
ttgctgttgtgagtctcaagtgaagctgtctca

SEQ ID NO: 999646 - DNA, 33 bp, Homo sapien
ttgctgttgtgagtctgaagtgaagctgtctca

SEQ ID NO: 999647 - DNA, 33 bp, Homo sapien
aaggtttgactaacctcacaaaacgaagtgaaa

SEQ ID NO: 999648 - DNA, 33 bp, Homo sapien
aaggtttgactaacctgacaaaacgaagtgaaa

SEQ ID NO: 999649 - DNA, 33 bp, Homo sapien
aatagttggcataccaatgggagaaagaataat

SEQ ID NO: 999650 - DNA, 33 bp, Homo sapien
aatagttggcataccagtgggagaaagaataat

SEQ ID NO: 999651 - DNA, 33 bp, Homo sapien
ctaagaaatttattccccaattaggcagcattt

SEQ ID NO: 999652 - DNA, 33 bp, Homo sapien
ctaagaaatttattcctcaattaggcagcattt

SEQ ID NO: 999653 - DNA, 33 bp, Homo sapien
gaatatggtacccataagcacaaggcacaagaa

SEQ ID NO: 999654 - DNA, 33 bp, Homo sapien
gaatatggtacccataggcacaaggcacaagaa

SEQ ID NO: 999655 - DNA, 33 bp, Homo sapien
atgggtaagaactacaaaatgacttttcttggt

SEQ ID NO: 999656 - DNA, 33 bp, Homo sapien
atgggtaagaactacagaatgacttttcttggt

SEQ ID NO: 999657 - DNA, 33 bp, Homo sapien
gagtaatcagatagataagaggtaaaaggattc

SEQ ID NO: 999658 - DNA, 33 bp, Homo sapien
gagtaatcagatagatgagaggtaaaaggattc

SEQ ID NO: 999659 - DNA, 33 bp, Homo sapien
tccgtgagctcatggaatcagaaacccacagcc

SEQ ID NO: 999660 - DNA, 33 bp, Homo sapien
tccgtgagctcatggagtcagaaacccacagcc

SEQ ID NO: 999661 - DNA, 33 bp, Homo sapien
actcctatgctaaagaagtttccagaataatgt

SEQ ID NO: 999662 - DNA, 33 bp, Homo sapien
actcctatgctaaagaggtttccagaataatgt

SEQ ID NO: 999663 - DNA, 33 bp, Homo sapien
cacatgtgtcccaagcgatgtacccaggctgac

SEQ ID NO: 999664 - DNA, 33 bp, Homo sapien
cacatgtgtcccaagctatgtacccaggctgac

SEQ ID NO: 999665 - DNA, 33 bp, Homo sapien
ggaaagtcattagatacactgtcacaacttcat

SEQ ID NO: 999666 - DNA, 33 bp, Homo sapien
ggaaagtcattagatatactgtcacaacttcat

SEQ ID NO: 999667 - DNA, 33 bp, Homo sapien
ttgccgggaccacagactaagaacaagaaaaac

SEQ ID NO: 999668 - DNA, 33 bp, Homo sapien
ttgccgggaccacagagtaagaacaagaaaaac

SEQ ID NO: 999669 - DNA, 33 bp, Homo sapien
tgaggatgaccaggaaaccttacctagacagtt

SEQ ID NO: 999670 - DNA, 33 bp, Homo sapien
tgaggatgaccaggaagccttacctagacagtt

SEQ ID NO: 999671 - DNA, 33 bp, Homo sapien
tggccctgagtaactacagtgcaggtgccttct

SEQ ID NO: 999672 - DNA, 33 bp, Homo sapien
tggccctgagtaactagagtgcaggtgccttct

SEQ ID NO: 999673 - DNA, 33 bp, Homo sapien
aaacttgactgttctacaataaagctgaactcc

SEQ ID NO: 999674 - DNA, 33 bp, Homo sapien
aaacttgactgttctataataaagctgaactcc

SEQ ID NO: 999675 - DNA, 33 bp, Homo sapien
tggaaattccaaagaaggtatcaaaatctagac

SEQ ID NO: 999676 - DNA, 33 bp, Homo sapien
tggaaattccaaagaatgtatcaaaatctagac

SEQ ID NO: 999677 - DNA, 33 bp, Homo sapien
atatatcacttgagcacacttattaacatggcc

SEQ ID NO: 999678 - DNA, 33 bp, Homo sapien
atatatcacttgagcatacttattaacatggcc

SEQ ID NO: 999679 - DNA, 33 bp, Homo sapien
ccttctggcctggttaacaagatcatgtgaatc

SEQ ID NO: 999680 - DNA, 33 bp, Homo sapien
ccttctggcctggttagcaagatcatgtgaatc

SEQ ID NO: 999681 - DNA, 33 bp, Homo sapien
gtctgtaattctaccccgagagtatctgtctgc

SEQ ID NO: 999682 - DNA, 33 bp, Homo sapien
gtctgtaattctacccggagagtatctgtctgc

SEQ ID NO: 999683 - DNA, 33 bp, Homo sapien
ttgtgagagtttggaacgagagtctgaacccag

SEQ ID NO: 999684 - DNA, 33 bp, Homo sapien
ttgtgagagtttggaatgagagtctgaacccag

SEQ ID NO: 999685 - DNA, 33 bp, Homo sapien
agttttctttagttcgaccattcatgcttcctc

SEQ ID NO: 999686 - DNA, 33 bp, Homo sapien
agttttctttagttcggccattcatgcttcctc

SEQ ID NO: 999687 - DNA, 33 bp, Homo sapien
ttgtctgaagtagcctaagaagtcaggtcccag

SEQ ID NO: 999688 - DNA, 33 bp, Homo sapien
ttgtctgaagtagcctgagaagtcaggtcccag

SEQ ID NO: 999689 - DNA, 33 bp, Homo sapien
cctaaaaatatgagtacgaaggatgtgatggca

SEQ ID NO: 999690 - DNA, 33 bp, Homo sapien
cctaaaaatatgagtatgaaggatgtgatggca

SEQ ID NO: 999691 - DNA, 33 bp, Homo sapien
ctgtccatgcttcccaaacttcactgttcttac

SEQ ID NO: 999692 - DNA, 33 bp, Homo sapien
ctgtccatgcttcccagacttcactgttcttac

SEQ ID NO: 999693 - DNA, 33 bp, Homo sapien
aaaatctgcattttgacaaatcctcaggtgacg

SEQ ID NO: 999694 - DNA, 33 bp, Homo sapien
aaaatctgcattttgagaaatcctcaggtgacg

SEQ ID NO: 999695 - DNA, 33 bp, Homo sapien
ttcctaacagtggtaccagatttggactaagtt

SEQ ID NO: 999696 - DNA, 33 bp, Homo sapien
ttcctaacagtggtactagatttggactaagtt

SEQ ID NO: 999697 - DNA, 33 bp, Homo sapien
tgtgtaccgtaccgtgcaggagacagggaaaac

SEQ ID NO: 999698 - DNA, 33 bp, Homo sapien
tgtgtaccgtaccgtgtaggagacagggaaaac

SEQ ID NO: 999699 - DNA, 33 bp, Homo sapien
ttatctgtattctgagcccacaaatcagaggca

SEQ ID NO: 999700 - DNA, 33 bp, Homo sapien
ttatctgtattctgagtccacaaatcagaggca

SEQ ID NO: 999701 - DNA, 33 bp, Homo sapien
taatgccacaaacatcaagtaggaactgggttg

SEQ ID NO: 999702 - DNA, 33 bp, Homo sapien
taatgccacaaacatcgagtaggaactgggttg

SEQ ID NO: 999703 - DNA, 33 bp, Homo sapien
ggcctgattttgattaacgttgtcagaagcgga

SEQ ID NO: 999704 - DNA, 33 bp, Homo sapien
ggcctgattttgattaccgttgtcagaagcgga

SEQ ID NO: 999705 - DNA, 33 bp, Homo sapien
gctgcgggactccgcgaatttaccttccagggg

SEQ ID NO: 999706 - DNA, 33 bp, Homo sapien
gctgcgggactccgcgtatttaccttccagggg

SEQ ID NO: 999707 - DNA, 33 bp, Homo sapien
tgagggtatcaaagcaagcggacttccgcctga

SEQ ID NO: 999708 - DNA, 33 bp, Homo sapien
tgagggtatcaaagcacgcggacttccgcctga

SEQ ID NO: 999709 - DNA, 33 bp, Homo sapien
ctattgctatataaaacctcaacccaggcctta

SEQ ID NO: 999710 - DNA, 33 bp, Homo sapien
ctattgctatataaaatctcaacccaggcctta

SEQ ID NO: 999711 - DNA, 33 bp, Homo sapien
agagacagaatttgaacgtgagtctgactgatt

SEQ ID NO: 999712 - DNA, 33 bp, Homo sapien
agagacagaatttgaatgtgagtctgactgatt

SEQ ID NO: 999713 - DNA, 33 bp, Homo sapien
aatttaggaaagactgaatcagacccctatcca

SEQ ID NO: 999714 - DNA, 33 bp, Homo sapien
aatttaggaaagactgcatcagacccctatcca

SEQ ID NO: 999715 - DNA, 33 bp, Homo sapien
cctaatgggacatcatcacatcacagctctgtg

SEQ ID NO: 999716 - DNA, 33 bp, Homo sapien
cctaatgggacatcatgacatcacagctctgtg

SEQ ID NO: 999717 - DNA, 33 bp, Homo sapien
actattttccttatggccaacagcatttagact

SEQ ID NO: 999718 - DNA, 33 bp, Homo sapien
actattttccttatggtcaacagcatttagact

SEQ ID NO: 999719 - DNA, 33 bp, Homo sapien
atgtctgcctatctaccgtaacaagtacaccat

SEQ ID NO: 999720 - DNA, 33 bp, Homo sapien
atgtctgcctatctactgtaacaagtacaccat

SEQ ID NO: 999721 - DNA, 33 bp, Homo sapien
caacgtctctaatacacggctcccctgcctatg

SEQ ID NO: 999722 - DNA, 33 bp, Homo sapien
caacgtctctaatacatggctcccctgcctatg

SEQ ID NO: 999723 - DNA, 33 bp, Homo sapien
agcactgtgatgctgcgacagttgacctgataa

SEQ ID NO: 999724 - DNA, 33 bp, Homo sapien
agcactgtgatgctgctacagttgacctgataa

SEQ ID NO: 999725 - DNA, 33 bp, Homo sapien
catagtcaccgacatacccttgaaaccccctgg

SEQ ID NO: 999726 - DNA, 33 bp, Homo sapien
catagtcaccgacatatccttgaaaccccctgg

SEQ ID NO: 999727 - DNA, 33 bp, Homo sapien
gctagctgtgtggcctcacctaacttctctgaa

SEQ ID NO: 999728 - DNA, 33 bp, Homo sapien
gctagctgtgtggccttacctaacttctctgaa

SEQ ID NO: 999729 - DNA, 33 bp, Homo sapien
cttattcttggaaacactgagagtaactatccc

SEQ ID NO: 999730 - DNA, 33 bp, Homo sapien
cttattcttggaaacagtgagagtaactatccc

SEQ ID NO: 999731 - DNA, 33 bp, Homo sapien
aattagttatctgctaaatacttggaattgtgt

SEQ ID NO: 999732 - DNA, 33 bp, Homo sapien
aattagttatctgctacatacttggaattgtgt

SEQ ID NO: 999733 - DNA, 33 bp, Homo sapien
tgcttcaagtacaaggcaaaagatttgcaggag

SEQ ID NO: 999734 - DNA, 33 bp, Homo sapien
tgcttcaagtacaaggtaaaagatttgcaggag

SEQ ID NO: 999735 - DNA, 33 bp, Homo sapien
tctgctccctagccaacttctagagactcctta

SEQ ID NO: 999736 - DNA, 33 bp, Homo sapien
tctgctccctagccaatttctagagactcctta

SEQ ID NO: 999737 - DNA, 33 bp, Homo sapien
aagataccgaaaataaatgaactaatatatagg

SEQ ID NO: 999738 - DNA, 33 bp, Homo sapien
aagataccgaaaataagtgaactaatatatagg

SEQ ID NO: 999739 - DNA, 33 bp, Homo sapien
actgaattttacctgacgggaaaggagttaaga

SEQ ID NO: 999740 - DNA, 33 bp, Homo sapien
actgaattttacctgaggggaaaggagttaaga

SEQ ID NO: 999741 - DNA, 33 bp, Homo sapien
atactcaatatcgatacaaaaggttcactctgg

SEQ ID NO: 999742 - DNA, 33 bp, Homo sapien
atactcaatatcgatataaaaggttcactctgg

SEQ ID NO: 999743 - DNA, 33 bp, Homo sapien
gtttaattgcctgattaaatatggttttggcag

SEQ ID NO: 999744 - DNA, 33 bp, Homo sapien
gtttaattgcctgatttaatatggttttggcag

SEQ ID NO: 999745 - DNA, 33 bp, Homo sapien
atttgactgctttagacctgtgaaaatgactgt

SEQ ID NO: 999746 - DNA, 33 bp, Homo sapien
atttgactgctttagatctgtgaaaatgactgt

SEQ ID NO: 999747 - DNA, 33 bp, Homo sapien
tttttggaatatcttgaaagtgcgtaaaactgc

SEQ ID NO: 999748 - DNA, 33 bp, Homo sapien
tttttggaatatcttggaagtgcgtaaaactgc

SEQ ID NO: 999749 - DNA, 33 bp, Homo sapien
tgcctaaagtcacaaactggcaaatctaaactc

SEQ ID NO: 999750 - DNA, 33 bp, Homo sapien
tgcctaaagtcacaaattggcaaatctaaactc

SEQ ID NO: 999751 - DNA, 33 bp, Homo sapien
ttttcatcttctggaagtgggctggaatttgtt

SEQ ID NO: 999752 - DNA, 33 bp, Homo sapien
ttttcatcttctggaattgggctggaatttgtt

SEQ ID NO: 999753 - DNA, 33 bp, Homo sapien
ttcatgtgtgacctcacaggtactatgatcatc

SEQ ID NO: 999754 - DNA, 33 bp, Homo sapien
ttcatgtgtgacctcagaggtactatgatcatc

SEQ ID NO: 999755 - DNA, 33 bp, Homo sapien
tctcttttaggacaagaaagcgagagagaagcg

SEQ ID NO: 999756 - DNA, 33 bp, Homo sapien
tctcttttaggacaaggaagcgagagagaagcg

SEQ ID NO: 999757 - DNA, 33 bp, Homo sapien
aaaaaattgaaaatccccaagcttcagaagaca

SEQ ID NO: 999758 - DNA, 33 bp, Homo sapien
aaaaaattgaaaatccgcaagcttcagaagaca

SEQ ID NO: 999759 - DNA, 33 bp, Homo sapien
tagttttccatctgcactgacagcataatgcac

SEQ ID NO: 999760 - DNA, 33 bp, Homo sapien
tagttttccatctgcagtgacagcataatgcac

SEQ ID NO: 999761 - DNA, 33 bp, Homo sapien
tattttaccccgcaacaatgtgtaaatctaaag

SEQ ID NO: 999762 - DNA, 33 bp, Homo sapien
tattttaccccgcaacgatgtgtaaatctaaag

SEQ ID NO: 999763 - DNA, 33 bp, Homo sapien
gtgactgtatgacataagaactatgaagcgggg

SEQ ID NO: 999764 - DNA, 33 bp, Homo sapien
gtgactgtatgacataggaactatgaagcgggg

SEQ ID NO: 999765 - DNA, 33 bp, Homo sapien
aatgaaagcagtcccaagaagaaccgggcttat

SEQ ID NO: 999766 - DNA, 33 bp, Homo sapien
aatgaaagcagtcccaggaagaaccgggcttat

SEQ ID NO: 999767 - DNA, 33 bp, Homo sapien
caagccaagactcaaactcatttttatgaaggc

SEQ ID NO: 999768 - DNA, 33 bp, Homo sapien
caagccaagactcaaagtcatttttatgaaggc

SEQ ID NO: 999769 - DNA, 33 bp, Homo sapien
tgctctcctctgactacgtggtgagtcttagtc

SEQ ID NO: 999770 - DNA, 33 bp, Homo sapien
tgctctcctctgactatgtggtgagtcttagtc

SEQ ID NO: 999771 - DNA, 33 bp, Homo sapien
gctaaagtccttgttccattaagataattctgt

SEQ ID NO: 999772 - DNA, 33 bp, Homo sapien
gctaaagtccttgttcgattaagataattctgt

SEQ ID NO: 999773 - DNA, 33 bp, Homo sapien
aaaggctggcaaaatacgtatcattgttgaagc

SEQ ID NO: 999774 - DNA, 33 bp, Homo sapien
aaaggctggcaaaatatgtatcattgttgaagc

SEQ ID NO: 999775 - DNA, 33 bp, Homo sapien
catgtacattttctgaaatagggaatgagagat

SEQ ID NO: 999776 - DNA, 33 bp, Homo sapien
catgtacattttctgacatagggaatgagagat

SEQ ID NO: 999777 - DNA, 33 bp, Homo sapien
tgttaggaaatcacctcaaagccttctgggtca

SEQ ID NO: 999778 - DNA, 33 bp, Homo sapien
tgttaggaaatcacctgaaagccttctgggtca

SEQ ID NO: 999779 - DNA, 33 bp, Homo sapien
aggaagagtatgtgaacaacagagtatgtgtga

SEQ ID NO: 999780 - DNA, 33 bp, Homo sapien
aggaagagtatgtgaagaacagagtatgtgtga

SEQ ID NO: 999781 - DNA, 33 bp, Homo sapien
cttctaagacgaagaaagatgacacgtaactac

SEQ ID NO: 999782 - DNA, 33 bp, Homo sapien
cttctaagacgaagaaggatgacacgtaactac

SEQ ID NO: 999783 - DNA, 33 bp, Homo sapien
aataatcctctaatggaataaatggggagaaga

SEQ ID NO: 999784 - DNA, 33 bp, Homo sapien
aataatcctctaatgggataaatggggagaaga

SEQ ID NO: 999785 - DNA, 33 bp, Homo sapien
tcaattagatgctgacgctcaagaatatgaatt

SEQ ID NO: 999786 - DNA, 33 bp, Homo sapien
tcaattagatgctgactctcaagaatatgaatt

SEQ ID NO: 999787 - DNA, 33 bp, Homo sapien
atgtcaatgagactcaaatgagttgacctggaa

SEQ ID NO: 999788 - DNA, 33 bp, Homo sapien
atgtcaatgagactcacatgagttgacctggaa

SEQ ID NO: 999789 - DNA, 33 bp, Homo sapien
atggaaatgtgggaagaccgttatgccagaaac

SEQ ID NO: 999790 - DNA, 33 bp, Homo sapien
atggaaatgtgggaagtccgttatgccagaaac

SEQ ID NO: 999791 - DNA, 33 bp, Homo sapien
gatggtcactatactgaatggacttctgaacta

SEQ ID NO: 999792 - DNA, 33 bp, Homo sapien
gatggtcactatactggatggacttctgaacta

SEQ ID NO: 999793 - DNA, 33 bp, Homo sapien
cagtttctttgcttggaaaatgtgtgcacacgc

SEQ ID NO: 999794 - DNA, 33 bp, Homo sapien
cagtttctttgcttgggaaatgtgtgcacacgc

SEQ ID NO: 999795 - DNA, 33 bp, Homo sapien
tttctttcccaaatgaatagccacctgcaattt

SEQ ID NO: 999796 - DNA, 33 bp, Homo sapien
tttctttcccaaatgagtagccacctgcaattt

SEQ ID NO: 999797 - DNA, 33 bp, Homo sapien
tagtcctttgtgcaaaacgtaaatgcagaaact

SEQ ID NO: 999798 - DNA, 33 bp, Homo sapien
tagtcctttgtgcaaagcgtaaatgcagaaact

SEQ ID NO: 999799 - DNA, 33 bp, Homo sapien
taatattgtgtagctgccacctctctctagttc

SEQ ID NO: 999800 - DNA, 33 bp, Homo sapien
taatattgtgtagctgtcacctctctctagttc

SEQ ID NO: 999801 - DNA, 33 bp, Homo sapien
ttttgacattccttcaataactattcctgagtt

SEQ ID NO: 999802 - DNA, 33 bp, Homo sapien
ttttgacattccttcagtaactattcctgagtt

SEQ ID NO: 999803 - DNA, 33 bp, Homo sapien
gtaaactttggcatatcaaaatccacttgaaag

SEQ ID NO: 999804 - DNA, 33 bp, Homo sapien
gtaaactttggcatatgaaaatccacttgaaag

SEQ ID NO: 999805 - DNA, 33 bp, Homo sapien
ggcaaagaaaaaaagcaccgaaatggatgtggt

SEQ ID NO: 999806 - DNA, 33 bp, Homo sapien
ggcaaagaaaaaaagcgccgaaatggatgtggt

SEQ ID NO: 999807 - DNA, 33 bp, Homo sapien
aacattacaatacaaccaggtaaaggtaccaag

SEQ ID NO: 999808 - DNA, 33 bp, Homo sapien
aacattacaatacaacgaggtaaaggtaccaag

SEQ ID NO: 999809 - DNA, 33 bp, Homo sapien
ttgaaaaattgttcacaaaggttgtcagttatt

SEQ ID NO: 999810 - DNA, 33 bp, Homo sapien
ttgaaaaattgttcacgaaggttgtcagttatt

SEQ ID NO: 999811 - DNA, 33 bp, Homo sapien
tgtccctatatggtgactacttgtgcttttctt

SEQ ID NO: 999812 - DNA, 33 bp, Homo sapien
tgtccctatatggtgagtacttgtgcttttctt

SEQ ID NO: 999813 - DNA, 33 bp, Homo sapien
gagcagatggcaaacaactacttttatggcttg

SEQ ID NO: 999814 - DNA, 33 bp, Homo sapien
gagcagatggcaaacagctacttttatggcttg

SEQ ID NO: 999815 - DNA, 33 bp, Homo sapien
tcaggcactgtactacacactttgttcatctat

SEQ ID NO: 999816 - DNA, 33 bp, Homo sapien
tcaggcactgtactacgcactttgttcatctat

SEQ ID NO: 999817 - DNA, 33 bp, Homo sapien
gctagacacaatgctacggagacagggattaat

SEQ ID NO: 999818 - DNA, 33 bp, Homo sapien
gctagacacaatgctagggagacagggattaat

SEQ ID NO: 999819 - DNA, 33 bp, Homo sapien
tgtgtctagcctttaacagtcacttaataaagg

SEQ ID NO: 999820 - DNA, 33 bp, Homo sapien
tgtgtctagcctttaatagtcacttaataaagg

SEQ ID NO: 999821 - DNA, 33 bp, Homo sapien
tttgaccatacctagtcaaacttaaattgaagg

SEQ ID NO: 999822 - DNA, 33 bp, Homo sapien
tttgaccatacctagttaaacttaaattgaagg

SEQ ID NO: 999823 - DNA, 33 bp, Homo sapien
cactgccactttctaacgtttgaccatacctag

SEQ ID NO: 999824 - DNA, 33 bp, Homo sapien
cactgccactttctaatgtttgaccatacctag

SEQ ID NO: 999825 - DNA, 33 bp, Homo sapien
tcaataattatcttctcaaccagtttttaaaat

SEQ ID NO: 999826 - DNA, 33 bp, Homo sapien
tcaataattatcttcttaaccagtttttaaaat

SEQ ID NO: 999827 - DNA, 33 bp, Homo sapien
agataattattgagagcatggaaaagataatta

SEQ ID NO: 999828 - DNA, 33 bp, Homo sapien
agataattattgagagtatggaaaagataatta

SEQ ID NO: 999829 - DNA, 33 bp, Homo sapien
gccaaggtgagaggcacgggaggacattttcat

SEQ ID NO: 999830 - DNA, 33 bp, Homo sapien
gccaaggtgagaggcaggggaggacattttcat

SEQ ID NO: 999831 - DNA, 33 bp, Homo sapien
tcacagtctcagtgaaatggctttgtgtgtgca

SEQ ID NO: 999832 - DNA, 33 bp, Homo sapien
tcacagtctcagtgaattggctttgtgtgtgca

SEQ ID NO: 999833 - DNA, 33 bp, Homo sapien
ggccagcaatgtggaaaatggagttattattca

SEQ ID NO: 999834 - DNA, 33 bp, Homo sapien
ggccagcaatgtggaagatggagttattattca

SEQ ID NO: 999835 - DNA, 33 bp, Homo sapien
ttgcctgaatgcaaaactctgacaagcatctca

SEQ ID NO: 999836 - DNA, 33 bp, Homo sapien
ttgcctgaatgcaaaagtctgacaagcatctca

SEQ ID NO: 999837 - DNA, 33 bp, Homo sapien
agactaataccacgcacagatggaagtactctt

SEQ ID NO: 999838 - DNA, 33 bp, Homo sapien
agactaataccacgcagagatggaagtactctt

SEQ ID NO: 999839 - DNA, 33 bp, Homo sapien
actggatgaaatcaataaagtactagataaaat

SEQ ID NO: 999840 - DNA, 33 bp, Homo sapien
actggatgaaatcaatgaagtactagataaaat

SEQ ID NO: 999841 - DNA, 33 bp, Homo sapien
aacatggctcttggcaacatctatttaaaaact

SEQ ID NO: 999842 - DNA, 33 bp, Homo sapien
aacatggctcttggcagcatctatttaaaaact

SEQ ID NO: 999843 - DNA, 33 bp, Homo sapien
ggatgaaaaggtgttacaagaaatggcaagaga

SEQ ID NO: 999844 - DNA, 33 bp, Homo sapien
ggatgaaaaggtgttagaagaaatggcaagaga

SEQ ID NO: 999845 - DNA, 33 bp, Homo sapien
cctgtcttaaccttcacctaccagcttaccctg

SEQ ID NO: 999846 - DNA, 33 bp, Homo sapien
cctgtcttaaccttcagctaccagcttaccctg

SEQ ID NO: 999847 - DNA, 33 bp, Homo sapien
gttgcgggggagagtaactcatgaagctgtttt

SEQ ID NO: 999848 - DNA, 33 bp, Homo sapien
gttgcgggggagagtatctcatgaagctgtttt

SEQ ID NO: 999849 - DNA, 33 bp, Homo sapien
cctaataatacaaacactctcccaggaactgca

SEQ ID NO: 999850 - DNA, 33 bp, Homo sapien
cctaataatacaaacattctcccaggaactgca

SEQ ID NO: 999851 - DNA, 33 bp, Homo sapien
acttagtataaatgccaacaaaatgatttctgg

SEQ ID NO: 999852 - DNA, 33 bp, Homo sapien
acttagtataaatgcccacaaaatgatttctgg

SEQ ID NO: 999853 - DNA, 33 bp, Homo sapien
tgttctcagtgtcatcaccacttagtataaatg

SEQ ID NO: 999854 - DNA, 33 bp, Homo sapien
tgttctcagtgtcatcgccacttagtataaatg

SEQ ID NO: 999855 - DNA, 33 bp, Homo sapien
tgtaagctgcattccaagatattactggaccaa

SEQ ID NO: 999856 - DNA, 33 bp, Homo sapien
tgtaagctgcattccaggatattactggaccaa

SEQ ID NO: 999857 - DNA, 33 bp, Homo sapien
aagtagtgcctgattacagctacacactatagc

SEQ ID NO: 999858 - DNA, 33 bp, Homo sapien
aagtagtgcctgattatagctacacactatagc

SEQ ID NO: 999859 - DNA, 33 bp, Homo sapien
ctactgttctgtgccacagtgaacaaacacatg

SEQ ID NO: 999860 - DNA, 33 bp, Homo sapien
ctactgttctgtgccagagtgaacaaacacatg

SEQ ID NO: 999861 - DNA, 33 bp, Homo sapien
gtcaaaaacgagatcaataccagcttaacacat

SEQ ID NO: 999862 - DNA, 33 bp, Homo sapien
gtcaaaaacgagatcagtaccagcttaacacat

SEQ ID NO: 999863 - DNA, 33 bp, Homo sapien
ctttcaagctgcatcgcaactgtcatcccatgg

SEQ ID NO: 999864 - DNA, 33 bp, Homo sapien
ctttcaagctgcatcgtaactgtcatcccatgg

SEQ ID NO: 999865 - DNA, 33 bp, Homo sapien
tttcccttgctggagaataaaagaggaatcgca

SEQ ID NO: 999866 - DNA, 33 bp, Homo sapien
tttcccttgctggagagtaaaagaggaatcgca

SEQ ID NO: 999867 - DNA, 33 bp, Homo sapien
ccacctctaaataaagcaacagggccaccacta

SEQ ID NO: 999868 - DNA, 33 bp, Homo sapien
ccacctctaaataaaggaacagggccaccacta

SEQ ID NO: 999869 - DNA, 33 bp, Homo sapien
ttaaatagccagaatacagtcacacaaactagt

SEQ ID NO: 999870 - DNA, 33 bp, Homo sapien
ttaaatagccagaatatagtcacacaaactagt

SEQ ID NO: 999871 - DNA, 33 bp, Homo sapien
tgctttaacaattgaacgggttccgaaaactgt

SEQ ID NO: 999872 - DNA, 33 bp, Homo sapien
tgctttaacaattgaaggggttccgaaaactgt

SEQ ID NO: 999873 - DNA, 33 bp, Homo sapien
atacaacactaaaaatcatacatatgtccttag

SEQ ID NO: 999874 - DNA, 33 bp, Homo sapien
atacaacactaaaaatgatacatatgtccttag

SEQ ID NO: 999875 - DNA, 33 bp, Homo sapien
cagaaaatttttcaggaattttgaagcaatgaa

SEQ ID NO: 999876 - DNA, 33 bp, Homo sapien
cagaaaatttttcaggtattttgaagcaatgaa

SEQ ID NO: 999877 - DNA, 33 bp, Homo sapien
aacacagccaactctggattatataaaaagaca

SEQ ID NO: 999878 - DNA, 33 bp, Homo sapien
aacacagccaactctgtattatataaaaagaca

SEQ ID NO: 999879 - DNA, 33 bp, Homo sapien
cttagggaaaatgccaataagtcacagaagaaa

SEQ ID NO: 999880 - DNA, 33 bp, Homo sapien
cttagggaaaatgccagtaagtcacagaagaaa

SEQ ID NO: 999881 - DNA, 33 bp, Homo sapien
aaggtaacttgtggaaagaacaagcattccttt

SEQ ID NO: 999882 - DNA, 33 bp, Homo sapien
aaggtaacttgtggaacgaacaagcattccttt

SEQ ID NO: 999883 - DNA, 33 bp, Homo sapien
gagtttattttgttcaccactgtagtgcccagc

SEQ ID NO: 999884 - DNA, 33 bp, Homo sapien
gagtttattttgttcatcactgtagtgcccagc

SEQ ID NO: 999885 - DNA, 33 bp, Homo sapien
gctggttgtccttagccattccaatctctaaga

SEQ ID NO: 999886 - DNA, 33 bp, Homo sapien
gctggttgtccttagctattccaatctctaaga

SEQ ID NO: 999887 - DNA, 33 bp, Homo sapien
cattgcaaggaaaaccgcattcaagcttcagcg

SEQ ID NO: 999888 - DNA, 33 bp, Homo sapien
cattgcaaggaaaacctcattcaagcttcagcg

SEQ ID NO: 999889 - DNA, 33 bp, Homo sapien
gcctggcagtgtcaagcctgaaacaaagcaata

SEQ ID NO: 999890 - DNA, 33 bp, Homo sapien
gcctggcagtgtcaagtctgaaacaaagcaata

SEQ ID NO: 999891 - DNA, 33 bp, Homo sapien
ttcagccacacctagacccctaagatcatagac

SEQ ID NO: 999892 - DNA, 33 bp, Homo sapien
ttcagccacacctagagccctaagatcatagac

SEQ ID NO: 999893 - DNA, 33 bp, Homo sapien
gatgtcctatcacctcactattgggaagggggc

SEQ ID NO: 999894 - DNA, 33 bp, Homo sapien
gatgtcctatcacctcgctattgggaagggggc

SEQ ID NO: 999895 - DNA, 33 bp, Homo sapien
ctgtccaatttcatggaaagtaaccaactggtt

SEQ ID NO: 999896 - DNA, 33 bp, Homo sapien
ctgtccaatttcatgggaagtaaccaactggtt

SEQ ID NO: 999897 - DNA, 33 bp, Homo sapien
accttctctgatcaacgcttaaattgatgaata

SEQ ID NO: 999898 - DNA, 33 bp, Homo sapien
accttctctgatcaactcttaaattgatgaata

SEQ ID NO: 999899 - DNA, 33 bp, Homo sapien
ctgcacatgacaattacagtatttgaatattct

SEQ ID NO: 999900 - DNA, 33 bp, Homo sapien
ctgcacatgacaattagagtatttgaatattct

SEQ ID NO: 999901 - DNA, 33 bp, Homo sapien
tactagatctgtcttacaagaaatgttaaagat

SEQ ID NO: 999902 - DNA, 33 bp, Homo sapien
tactagatctgtcttagaagaaatgttaaagat

SEQ ID NO: 999903 - DNA, 33 bp, Homo sapien
ttttatgcatttttgaaattcctaccattgcat

SEQ ID NO: 999904 - DNA, 33 bp, Homo sapien
ttttatgcatttttgagattcctaccattgcat

SEQ ID NO: 999905 - DNA, 33 bp, Homo sapien
aatcaagcctgctctactaattctgtgcagtct

SEQ ID NO: 999906 - DNA, 33 bp, Homo sapien
aatcaagcctgctctagtaattctgtgcagtct

SEQ ID NO: 999907 - DNA, 33 bp, Homo sapien
ctcactggtcctaaacaggcaggtggatatact

SEQ ID NO: 999908 - DNA, 33 bp, Homo sapien
ctcactggtcctaaaccggcaggtggatatact

SEQ ID NO: 999909 - DNA, 33 bp, Homo sapien
aaagtgctttacggctaacatagctcctctaag

SEQ ID NO: 999910 - DNA, 33 bp, Homo sapien
aaagtgctttacggcttacatagctcctctaag

SEQ ID NO: 999911 - DNA, 33 bp, Homo sapien
gcggtctcagctgcaagtatctcctctgggtag

SEQ ID NO: 999912 - DNA, 33 bp, Homo sapien
gcggtctcagctgcaattatctcctctgggtag

SEQ ID NO: 999913 - DNA, 33 bp, Homo sapien
gaagaaaggattttgcccaaggcaccagaagaa

SEQ ID NO: 999914 - DNA, 33 bp, Homo sapien
gaagaaaggattttgctcaaggcaccagaagaa

SEQ ID NO: 999915 - DNA, 33 bp, Homo sapien
gtcttttaaggtaggaccatcagatagcatcgt

SEQ ID NO: 999916 - DNA, 33 bp, Homo sapien
gtcttttaaggtaggatcatcagatagcatcgt

SEQ ID NO: 999917 - DNA, 33 bp, Homo sapien
ttggggttgcacttagaagcccatggcattttg

SEQ ID NO: 999918 - DNA, 33 bp, Homo sapien
ttggggttgcacttaggagcccatggcattttg

SEQ ID NO: 999919 - DNA, 33 bp, Homo sapien
gcagaaattctaggcacaggaaagagcatatgc

SEQ ID NO: 999920 - DNA, 33 bp, Homo sapien
gcagaaattctaggcagaggaaagagcatatgc

SEQ ID NO: 999921 - DNA, 33 bp, Homo sapien
tctgtcttcagagcatcaagatgtttttcaaag

SEQ ID NO: 999922 - DNA, 33 bp, Homo sapien
tctgtcttcagagcattaagatgtttttcaaag

SEQ ID NO: 999923 - DNA, 33 bp, Homo sapien
tatgtaccaaaaaagaagatggtccttcatgaa

SEQ ID NO: 999924 - DNA, 33 bp, Homo sapien
tatgtaccaaaaaagacgatggtccttcatgaa

SEQ ID NO: 999925 - DNA, 33 bp, Homo sapien
actggaattctgatgcaaacaccctattaaaga

SEQ ID NO: 999926 - DNA, 33 bp, Homo sapien
actggaattctgatgcgaacaccctattaaaga

SEQ ID NO: 999927 - DNA, 33 bp, Homo sapien
tgtaagttttcaagaccattagataaggatttg

SEQ ID NO: 999928 - DNA, 33 bp, Homo sapien
tgtaagttttcaagacgattagataaggatttg

SEQ ID NO: 999929 - DNA, 33 bp, Homo sapien
gagtctgacctgcaaacaccatccccagtgtgt

SEQ ID NO: 999930 - DNA, 33 bp, Homo sapien
gagtctgacctgcaaagaccatccccagtgtgt

SEQ ID NO: 999931 - DNA, 33 bp, Homo sapien
acttggcagacggcaacggcaacacagccctcc

SEQ ID NO: 999932 - DNA, 33 bp, Homo sapien
acttggcagacggcaatggcaacacagccctcc

SEQ ID NO: 999933 - DNA, 33 bp, Homo sapien
atgactgctgtccttgcagaagtgtgtggttag

SEQ ID NO: 999934 - DNA, 33 bp, Homo sapien
atgactgctgtccttgtagaagtgtgtggttag

SEQ ID NO: 999935 - DNA, 33 bp, Homo sapien
gcatctatgcagagcaaagtccgcaaagtccga

SEQ ID NO: 999936 - DNA, 33 bp, Homo sapien
gcatctatgcagagcagagtccgcaaagtccga

SEQ ID NO: 999937 - DNA, 33 bp, Homo sapien
ggagccccgaagcgcacacgaattcacctgctt

SEQ ID NO: 999938 - DNA, 33 bp, Homo sapien
ggagccccgaagcgcagacgaattcacctgctt

SEQ ID NO: 999939 - DNA, 33 bp, Homo sapien
tgctcttgagaataaacgatttttggaatctag

SEQ ID NO: 999940 - DNA, 33 bp, Homo sapien
tgctcttgagaataaatgatttttggaatctag

SEQ ID NO: 999941 - DNA, 33 bp, Homo sapien
tccccctatttcacgacacctgaagcaagagaa

SEQ ID NO: 999942 - DNA, 33 bp, Homo sapien
tccccctatttcacgagacctgaagcaagagaa

SEQ ID NO: 999943 - DNA, 33 bp, Homo sapien
gcctcaataaactgcaactgtaccaatgggcat

SEQ ID NO: 999944 - DNA, 33 bp, Homo sapien
gcctcaataaactgcagctgtaccaatgggcat

SEQ ID NO: 999945 - DNA, 33 bp, Homo sapien
tggtccttacaagcacagaaaaatggatctgtg

SEQ ID NO: 999946 - DNA, 33 bp, Homo sapien
tggtccttacaagcacggaaaaatggatctgtg

SEQ ID NO: 999947 - DNA, 33 bp, Homo sapien
caaaatccgggccggaactattattgggagagg

SEQ ID NO: 999948 - DNA, 33 bp, Homo sapien
caaaatccgggccggagctattattgggagagg

SEQ ID NO: 999949 - DNA, 33 bp, Homo sapien
cactagggccaggatacgtgcaactagatatat

SEQ ID NO: 999950 - DNA, 33 bp, Homo sapien
cactagggccaggatatgtgcaactagatatat

SEQ ID NO: 999951 - DNA, 33 bp, Homo sapien
taaaagaatacaggacgcaggagagaaccacac

SEQ ID NO: 999952 - DNA, 33 bp, Homo sapien
taaaagaatacaggactcaggagagaaccacac

SEQ ID NO: 999953 - DNA, 33 bp, Homo sapien
tgctgtcacggcttcccgactatgcaggtcctc

SEQ ID NO: 999954 - DNA, 33 bp, Homo sapien
tgctgtcacggcttcctgactatgcaggtcctc

SEQ ID NO: 999955 - DNA, 33 bp, Homo sapien
gtacctaccctcagccaaacatgcagccaagag

SEQ ID NO: 999956 - DNA, 33 bp, Homo sapien
gtacctaccctcagccgaacatgcagccaagag

SEQ ID NO: 999957 - DNA, 33 bp, Homo sapien
actcttgcagagacggcatgtttcttgaatcgg

SEQ ID NO: 999958 - DNA, 33 bp, Homo sapien
actcttgcagagacggtatgtttcttgaatcgg

SEQ ID NO: 999959 - DNA, 33 bp, Homo sapien
gctatagcccatttgtcaaaaccctaaagtctt

SEQ ID NO: 999960 - DNA, 33 bp, Homo sapien
gctatagcccatttgtgaaaaccctaaagtctt

SEQ ID NO: 999961 - DNA, 33 bp, Homo sapien
attcctggtatccttacatgaagagggagaatg

SEQ ID NO: 999962 - DNA, 33 bp, Homo sapien
attcctggtatccttatatgaagagggagaatg

SEQ ID NO: 999963 - DNA, 33 bp, Homo sapien
cttagcactctgaaatcagctcgtgtttatgtt

SEQ ID NO: 999964 - DNA, 33 bp, Homo sapien
cttagcactctgaaatgagctcgtgtttatgtt

SEQ ID NO: 999965 - DNA, 33 bp, Homo sapien
atactgcttaagagggcaaatgtaaatacaaaa

SEQ ID NO: 999966 - DNA, 33 bp, Homo sapien
atactgcttaagagggtaaatgtaaatacaaaa

SEQ ID NO: 999967 - DNA, 33 bp, Homo sapien
gagatttctaaaagcacatttcgatcaggcaca

SEQ ID NO: 999968 - DNA, 33 bp, Homo sapien
gagatttctaaaagcatatttcgatcaggcaca

SEQ ID NO: 999969 - DNA, 33 bp, Homo sapien
cacttgtaatagcaaacgttgatggggaattgg

SEQ ID NO: 999970 - DNA, 33 bp, Homo sapien
cacttgtaatagcaaatgttgatggggaattgg

SEQ ID NO: 999971 - DNA, 33 bp, Homo sapien
aattggcatattcccccgagactcctttttgac

SEQ ID NO: 999972 - DNA, 33 bp, Homo sapien
aattggcatattcccctgagactcctttttgac

SEQ ID NO: 999973 - DNA, 33 bp, Homo sapien
atgaggccacagcataagcagggatgaataatt

SEQ ID NO: 999974 - DNA, 33 bp, Homo sapien
atgaggccacagcataggcagggatgaataatt

SEQ ID NO: 999975 - DNA, 33 bp, Homo sapien
ttaaagtgcaagaaaacgggcaagaattacaaa

SEQ ID NO: 999976 - DNA, 33 bp, Homo sapien
ttaaagtgcaagaaaatgggcaagaattacaaa

SEQ ID NO: 999977 - DNA, 33 bp, Homo sapien
tcaaaggtcttgggccaaggacgctgacagggc

SEQ ID NO: 999978 - DNA, 33 bp, Homo sapien
tcaaaggtcttgggccgaggacgctgacagggc

SEQ ID NO: 999979 - DNA, 33 bp, Homo sapien
acactgttatgcatgaatattagacctgatggg

SEQ ID NO: 999980 - DNA, 33 bp, Homo sapien
acactgttatgcatgagtattagacctgatggg

SEQ ID NO: 999981 - DNA, 33 bp, Homo sapien
taacagttataataaagtcccacacctttgtcc

SEQ ID NO: 999982 - DNA, 33 bp, Homo sapien
taacagttataataaattcccacacctttgtcc

SEQ ID NO: 999983 - DNA, 33 bp, Homo sapien
acagagggctgaatcacgcaggcctggacaaag

SEQ ID NO: 999984 - DNA, 33 bp, Homo sapien
acagagggctgaatcatgcaggcctggacaaag

SEQ ID NO: 999985 - DNA, 33 bp, Homo sapien
gagaccaggagagaggaaggagatgtggtcaga

SEQ ID NO: 999986 - DNA, 33 bp, Homo sapien
gagaccaggagagagggaggagatgtggtcaga

SEQ ID NO: 999987 - DNA, 33 bp, Homo sapien
ttagatccccatatccaagaataacatttggtc

SEQ ID NO: 999988 - DNA, 33 bp, Homo sapien
ttagatccccatatcccagaataacatttggtc

SEQ ID NO: 999989 - DNA, 33 bp, Homo sapien
gcctgggcaacaaatcaagacaaaatctcaaaa

SEQ ID NO: 999990 - DNA, 33 bp, Homo sapien
gcctgggcaacaaatcgagacaaaatctcaaaa

SEQ ID NO: 999991 - DNA, 33 bp, Homo sapien
cttgcattcctaacacacttcataatctgtacg

SEQ ID NO: 999992 - DNA, 33 bp, Homo sapien
cttgcattcctaacacgcttcataatctgtacg

SEQ ID NO: 999993 - DNA, 33 bp, Homo sapien
gaggactgagaggataagtaaagggatgaagta

SEQ ID NO: 999994 - DNA, 33 bp, Homo sapien
gaggactgagaggatatgtaaagggatgaagta

SEQ ID NO: 999995 - DNA, 33 bp, Homo sapien
cttcattcatccactacaaacatggaaacaatg

SEQ ID NO: 999996 - DNA, 33 bp, Homo sapien
cttcattcatccactataaacatggaaacaatg

SEQ ID NO: 999997 - DNA, 33 bp, Homo sapien
acaacaagatgtgtgacgcctacgaaagtcttt

SEQ ID NO: 999998 - DNA, 33 bp, Homo sapien
acaacaagatgtgtgatgcctacgaaagtcttt

SEQ ID NO: 999999 - DNA, 33 bp, Homo sapien
ttcatagaggagttatgactggtgtcaaaggaa

SEQ ID NO: 1000000 - DNA, 33 bp, Homo sapien
ttcatagaggagttattactggtgtcaaaggaa

SEQ ID NO: 1000001 - DNA, 33 bp, Homo sapien
agctggcttgaactgacgataaggtgtacagct

SEQ ID NO: 1000002 - DNA, 33 bp, Homo sapien
agctggcttgaactgatgataaggtgtacagct

SEQ ID NO: 1000003 - DNA, 33 bp, Homo sapien
tcaacaatgaagaaaaccacaatggaaccatac

SEQ ID NO: 1000004 - DNA, 33 bp, Homo sapien
tcaacaatgaagaaaatcacaatggaaccatac

SEQ ID NO: 1000005 - DNA, 33 bp, Homo sapien
taaaacttgtttctggccagattcattgatgtt

SEQ ID NO: 1000006 - DNA, 33 bp, Homo sapien
taaaacttgtttctggtcagattcattgatgtt

SEQ ID NO: 1000007 - DNA, 33 bp, Homo sapien
aagagcttcttgggtacgtcaggtcctttccag

SEQ ID NO: 1000008 - DNA, 33 bp, Homo sapien
aagagcttcttgggtatgtcaggtcctttccag

SEQ ID NO: 1000009 - DNA, 33 bp, Homo sapien
tgtggctaggggcttccatatcggacagtacag

SEQ ID NO: 1000010 - DNA, 33 bp, Homo sapien
tgtggctaggggcttcgatatcggacagtacag

SEQ ID NO: 1000011 - DNA, 33 bp, Homo sapien
gtgagagtcgttctgaactctgcatagcctaaa

SEQ ID NO: 1000012 - DNA, 33 bp, Homo sapien
gtgagagtcgttctgatctctgcatagcctaaa

SEQ ID NO: 1000013 - DNA, 33 bp, Homo sapien
ttaaatcctccttgaccctgaaccctctatctt

SEQ ID NO: 1000014 - DNA, 33 bp, Homo sapien
ttaaatcctccttgacgctgaaccctctatctt

SEQ ID NO: 1000015 - DNA, 33 bp, Homo sapien
agccaaaacccataagcaacccagatgttcatc

SEQ ID NO: 1000016 - DNA, 33 bp, Homo sapien
agccaaaacccataagtaacccagatgttcatc

SEQ ID NO: 1000017 - DNA, 33 bp, Homo sapien
aatattggtatctataggaagggctaaagtaac

SEQ ID NO: 1000018 - DNA, 33 bp, Homo sapien
aatattggtatctatatgaagggctaaagtaac

SEQ ID NO: 1000019 - DNA, 33 bp, Homo sapien
taaaggtaacgtcccaatctcagagtcctgagt

SEQ ID NO: 1000020 - DNA, 33 bp, Homo sapien
taaaggtaacgtcccagtctcagagtcctgagt

SEQ ID NO: 1000021 - DNA, 33 bp, Homo sapien
gtgtatcagcccaataacgtccttgagactctc

SEQ ID NO: 1000022 - DNA, 33 bp, Homo sapien
gtgtatcagcccaatagcgtccttgagactctc

SEQ ID NO: 1000023 - DNA, 33 bp, Homo sapien
ggagtctgtgacctaaaaagtattaagaaccac

SEQ ID NO: 1000024 - DNA, 33 bp, Homo sapien
ggagtctgtgacctaagaagtattaagaaccac

SEQ ID NO: 1000025 - DNA, 33 bp, Homo sapien
agtgcgcccggccaaaactcactatcttaaggt

SEQ ID NO: 1000026 - DNA, 33 bp, Homo sapien
agtgcgcccggccaaagctcactatcttaaggt

SEQ ID NO: 1000027 - DNA, 33 bp, Homo sapien
gttgggtaaacatcaccactatcaaattttaaa

SEQ ID NO: 1000028 - DNA, 33 bp, Homo sapien
gttgggtaaacatcactactatcaaattttaaa

SEQ ID NO: 1000029 - DNA, 33 bp, Homo sapien
cacatactcctacaaacatacaggttttaagat

SEQ ID NO: 1000030 - DNA, 33 bp, Homo sapien
cacatactcctacaaatatacaggttttaagat

SEQ ID NO: 1000031 - DNA, 33 bp, Homo sapien
ggccaaaaagaggtgccacatgtgattggcaga

SEQ ID NO: 1000032 - DNA, 33 bp, Homo sapien
ggccaaaaagaggtgctacatgtgattggcaga

SEQ ID NO: 1000033 - DNA, 33 bp, Homo sapien
acagtctgtctttggagcttaagaacttgacct

SEQ ID NO: 1000034 - DNA, 33 bp, Homo sapien
acagtctgtctttggatcttaagaacttgacct

SEQ ID NO: 1000035 - DNA, 33 bp, Homo sapien
tgactactaactttaagcactcacatgggagtg

SEQ ID NO: 1000036 - DNA, 33 bp, Homo sapien
tgactactaactttaatcactcacatgggagtg

SEQ ID NO: 1000037 - DNA, 33 bp, Homo sapien
tacctccaaggacttccctgtggtcacattctg

SEQ ID NO: 1000038 - DNA, 33 bp, Homo sapien
tacctccaaggacttctctgtggtcacattctg

SEQ ID NO: 1000039 - DNA, 33 bp, Homo sapien
aacagcagaatcaaagcaaagggagtataaagg

SEQ ID NO: 1000040 - DNA, 33 bp, Homo sapien
aacagcagaatcaaaggaaagggagtataaagg

SEQ ID NO: 1000041 - DNA, 33 bp, Homo sapien
ttattattcattataacaacacagcacattctc

SEQ ID NO: 1000042 - DNA, 33 bp, Homo sapien
ttattattcattataataacacagcacattctc

SEQ ID NO: 1000043 - DNA, 33 bp, Homo sapien
tgtgtgcactgtaacacggacttttaaaactgc

SEQ ID NO: 1000044 - DNA, 33 bp, Homo sapien
tgtgtgcactgtaacagggacttttaaaactgc

SEQ ID NO: 1000045 - DNA, 33 bp, Homo sapien
aaaataaattttgttgcagatctcagccagacc

SEQ ID NO: 1000046 - DNA, 33 bp, Homo sapien
aaaataaattttgttgtagatctcagccagacc

SEQ ID NO: 1000047 - DNA, 33 bp, Homo sapien
cttgtagcctagttagaaattcatggacaaaac

SEQ ID NO: 1000048 - DNA, 33 bp, Homo sapien
cttgtagcctagttaggaattcatggacaaaac

SEQ ID NO: 1000049 - DNA, 33 bp, Homo sapien
tgtatagattgttgtaataaggaaacagagacg

SEQ ID NO: 1000050 - DNA, 33 bp, Homo sapien
tgtatagattgttgtagtaaggaaacagagacg

SEQ ID NO: 1000051 - DNA, 33 bp, Homo sapien
attttttactctgtcaataatgccctttagcct

SEQ ID NO: 1000052 - DNA, 33 bp, Homo sapien
attttttactctgtcagtaatgccctttagcct

SEQ ID NO: 1000053 - DNA, 33 bp, Homo sapien
cagctcaacagtgaccgaattccttttcttacc

SEQ ID NO: 1000054 - DNA, 33 bp, Homo sapien
cagctcaacagtgacctaattccttttcttacc

SEQ ID NO: 1000055 - DNA, 33 bp, Homo sapien
acgataaggcacctcgaaggaatgcattcatgt

SEQ ID NO: 1000056 - DNA, 33 bp, Homo sapien
acgataaggcacctcgcaggaatgcattcatgt

SEQ ID NO: 1000057 - DNA, 33 bp, Homo sapien
atgtgaagtctcctacaatgtcttaaaaattgg

SEQ ID NO: 1000058 - DNA, 33 bp, Homo sapien
atgtgaagtctcctactatgtcttaaaaattgg

SEQ ID NO: 1000059 - DNA, 33 bp, Homo sapien
aggttctgctgtcaggcacatggtgaggatgta

SEQ ID NO: 1000060 - DNA, 33 bp, Homo sapien
aggttctgctgtcaggtacatggtgaggatgta

SEQ ID NO: 1000061 - DNA, 33 bp, Homo sapien
tgtaacaacctcgcaaaactaataatatgcttc

SEQ ID NO: 1000062 - DNA, 33 bp, Homo sapien
tgtaacaacctcgcaagactaataatatgcttc

SEQ ID NO: 1000063 - DNA, 33 bp, Homo sapien
taatgctactgtgtcacataataggtaatgtaa

SEQ ID NO: 1000064 - DNA, 33 bp, Homo sapien
taatgctactgtgtcagataataggtaatgtaa

SEQ ID NO: 1000065 - DNA, 33 bp, Homo sapien
gaggcagggtggggacaagtgtttgatcacaac

SEQ ID NO: 1000066 - DNA, 33 bp, Homo sapien
gaggcagggtggggacgagtgtttgatcacaac

SEQ ID NO: 1000067 - DNA, 33 bp, Homo sapien
aatgactcaaacaaaaaacctttccattataca

SEQ ID NO: 1000068 - DNA, 33 bp, Homo sapien
aatgactcaaacaaaacacctttccattataca

SEQ ID NO: 1000069 - DNA, 33 bp, Homo sapien
ctagctagtactgcacagctggaaacggggaag

SEQ ID NO: 1000070 - DNA, 33 bp, Homo sapien
ctagctagtactgcacggctggaaacggggaag

SEQ ID NO: 1000071 - DNA, 33 bp, Homo sapien
tgctttccttgcagggcagtgcacatttcttgg

SEQ ID NO: 1000072 - DNA, 33 bp, Homo sapien
tgctttccttgcagggtagtgcacatttcttgg

SEQ ID NO: 1000073 - DNA, 33 bp, Homo sapien
agctctagagagatacaaacttaacgctgaaga

SEQ ID NO: 1000074 - DNA, 33 bp, Homo sapien
agctctagagagatacgaacttaacgctgaaga

SEQ ID NO: 1000075 - DNA, 33 bp, Homo sapien
ttttatgcagccatgccatgtttagtaaacaac

SEQ ID NO: 1000076 - DNA, 33 bp, Homo sapien
ttttatgcagccatgcgatgtttagtaaacaac

SEQ ID NO: 1000077 - DNA, 33 bp, Homo sapien
tcactggcaagcaagaagcatgttttatacgtt

SEQ ID NO: 1000078 - DNA, 33 bp, Homo sapien
tcactggcaagcaagaggcatgttttatacgtt

SEQ ID NO: 1000079 - DNA, 33 bp, Homo sapien
tttttttttattccttcaagctaagcaaataaa

SEQ ID NO: 1000080 - DNA, 33 bp, Homo sapien
tttttttttattcctttaagctaagcaaataaa

SEQ ID NO: 1000081 - DNA, 33 bp, Homo sapien
aacaaatttgtttgaacgggcgcaagttatcag

SEQ ID NO: 1000082 - DNA, 33 bp, Homo sapien
aacaaatttgtttgaatgggcgcaagttatcag

SEQ ID NO: 1000083 - DNA, 33 bp, Homo sapien
tgttcatttggtgctcaattaaccagtacaaaa

SEQ ID NO: 1000084 - DNA, 33 bp, Homo sapien
tgttcatttggtgctcgattaaccagtacaaaa

SEQ ID NO: 1000085 - DNA, 33 bp, Homo sapien
tagtaattgttggaaagtttattgctgtgtgaa

SEQ ID NO: 1000086 - DNA, 33 bp, Homo sapien
tagtaattgttggaaattttattgctgtgtgaa

SEQ ID NO: 1000087 - DNA, 33 bp, Homo sapien
cagctgcatcgttttacattcttaccatagtat

SEQ ID NO: 1000088 - DNA, 33 bp, Homo sapien
cagctgcatcgttttatattcttaccatagtat

SEQ ID NO: 1000089 - DNA, 33 bp, Homo sapien
agcgaaaccctgagacacacactgcatccagca

SEQ ID NO: 1000090 - DNA, 33 bp, Homo sapien
agcgaaaccctgagacccacactgcatccagca

SEQ ID NO: 1000091 - DNA, 33 bp, Homo sapien
ataagttgctggagtacgtggttggtcgacacc

SEQ ID NO: 1000092 - DNA, 33 bp, Homo sapien
ataagttgctggagtatgtggttggtcgacacc

SEQ ID NO: 1000093 - DNA, 33 bp, Homo sapien
tccacgacattgccaaagccagatggattcgaa

SEQ ID NO: 1000094 - DNA, 33 bp, Homo sapien
tccacgacattgccaacgccagatggattcgaa

SEQ ID NO: 1000095 - DNA, 33 bp, Homo sapien
agaaagatacataagcaacggtaaaaggtctac

SEQ ID NO: 1000096 - DNA, 33 bp, Homo sapien
agaaagatacataagccacggtaaaaggtctac

SEQ ID NO: 1000097 - DNA, 33 bp, Homo sapien
gtctgatttatttcaccgaatgcttcactggaa

SEQ ID NO: 1000098 - DNA, 33 bp, Homo sapien
gtctgatttatttcactgaatgcttcactggaa

SEQ ID NO: 1000099 - DNA, 33 bp, Homo sapien
aagtcaagacctttaaatggtgtttgtgagcat

SEQ ID NO: 1000100 - DNA, 33 bp, Homo sapien
aagtcaagacctttaattggtgtttgtgagcat

SEQ ID NO: 1000101 - DNA, 33 bp, Homo sapien
tgagtggcctcttcaccctgttgatagtgacca

SEQ ID NO: 1000102 - DNA, 33 bp, Homo sapien
tgagtggcctcttcactctgttgatagtgacca

SEQ ID NO: 1000103 - DNA, 33 bp, Homo sapien
aaataactttgtatgacgctctaaaataggagt

SEQ ID NO: 1000104 - DNA, 33 bp, Homo sapien
aaataactttgtatgatgctctaaaataggagt

SEQ ID NO: 1000105 - DNA, 33 bp, Homo sapien
tgtaggagtgtacaaaataaaaccagaaatttt

SEQ ID NO: 1000106 - DNA, 33 bp, Homo sapien
tgtaggagtgtacaaagtaaaaccagaaatttt

SEQ ID NO: 1000107 - DNA, 33 bp, Homo sapien
ttcgtagcaacatcataagtttatttgtgcatg

SEQ ID NO: 1000108 - DNA, 33 bp, Homo sapien
ttcgtagcaacatcatgagtttatttgtgcatg

SEQ ID NO: 1000109 - DNA, 33 bp, Homo sapien
agtaggtgccagttaaaaataataaagtagacc

SEQ ID NO: 1000110 - DNA, 33 bp, Homo sapien
agtaggtgccagttaagaataataaagtagacc

SEQ ID NO: 1000111 - DNA, 33 bp, Homo sapien
gtgcctgacaatgcaacgactggattcacagac

SEQ ID NO: 1000112 - DNA, 33 bp, Homo sapien
gtgcctgacaatgcaaggactggattcacagac

SEQ ID NO: 1000113 - DNA, 33 bp, Homo sapien
aagaagctaacatagaatccagctccggctgag

SEQ ID NO: 1000114 - DNA, 33 bp, Homo sapien
aagaagctaacatagagtccagctccggctgag

SEQ ID NO: 1000115 - DNA, 33 bp, Homo sapien
ttgatgccttagacttcaaagctgtctttttgc

SEQ ID NO: 1000116 - DNA, 33 bp, Homo sapien
ttgatgccttagacttgaaagctgtctttttgc

SEQ ID NO: 1000117 - DNA, 33 bp, Homo sapien
gcaaaataaccatgtaccagtccacaaagaaag

SEQ ID NO: 1000118 - DNA, 33 bp, Homo sapien
gcaaaataaccatgtagcagtccacaaagaaag

SEQ ID NO: 1000119 - DNA, 33 bp, Homo sapien
tgcagaattttatatacgtggagtcaagcttac

SEQ ID NO: 1000120 - DNA, 33 bp, Homo sapien
tgcagaattttatatatgtggagtcaagcttac

SEQ ID NO: 1000121 - DNA, 33 bp, Homo sapien
agaagcagcttaagcaccagtggagagggagta

SEQ ID NO: 1000122 - DNA, 33 bp, Homo sapien
agaagcagcttaagcagcagtggagagggagta

SEQ ID NO: 1000123 - DNA, 33 bp, Homo sapien
cccacatctcagcaacacttattttccgttcac

SEQ ID NO: 1000124 - DNA, 33 bp, Homo sapien
cccacatctcagcaacgcttattttccgttcac

SEQ ID NO: 1000125 - DNA, 33 bp, Homo sapien
taaaaattcaaaaatcaaaatgatgcttttcgc

SEQ ID NO: 1000126 - DNA, 33 bp, Homo sapien
taaaaattcaaaaatctaaatgatgcttttcgc

SEQ ID NO: 1000127 - DNA, 33 bp, Homo sapien
agtgatccatctgacaaattacctcaagcaaga

SEQ ID NO: 1000128 - DNA, 33 bp, Homo sapien
agtgatccatctgacacattacctcaagcaaga

SEQ ID NO: 1000129 - DNA, 33 bp, Homo sapien
aatctcttgattacaacaactaggcagacataa

SEQ ID NO: 1000130 - DNA, 33 bp, Homo sapien
aatctcttgattacaagaactaggcagacataa

SEQ ID NO: 1000131 - DNA, 33 bp, Homo sapien
taatcagtgggaaaaacgtggaacactaatccc

SEQ ID NO: 1000132 - DNA, 33 bp, Homo sapien
taatcagtgggaaaaatgtggaacactaatccc

SEQ ID NO: 1000133 - DNA, 33 bp, Homo sapien
tgagaaaagctaacacaatgtcacaggaatcaa

SEQ ID NO: 1000134 - DNA, 33 bp, Homo sapien
tgagaaaagctaacacgatgtcacaggaatcaa

SEQ ID NO: 1000135 - DNA, 33 bp, Homo sapien
tccttgacaagtaaccagaagtgcatgatgcac

SEQ ID NO: 1000136 - DNA, 33 bp, Homo sapien
tccttgacaagtaaccggaagtgcatgatgcac

SEQ ID NO: 1000137 - DNA, 33 bp, Homo sapien
ctagagaacagtttgagcattgaaaggaatact

SEQ ID NO: 1000138 - DNA, 33 bp, Homo sapien
ctagagaacagtttgatcattgaaaggaatact

SEQ ID NO: 1000139 - DNA, 33 bp, Homo sapien
aaacactcggtgcatacgtgagatctctggatt

SEQ ID NO: 1000140 - DNA, 33 bp, Homo sapien
aaacactcggtgcatatgtgagatctctggatt

SEQ ID NO: 1000141 - DNA, 33 bp, Homo sapien
caaaatcggaatgacacagagaacattagcgtg

SEQ ID NO: 1000142 - DNA, 33 bp, Homo sapien
caaaatcggaatgacagagagaacattagcgtg

SEQ ID NO: 1000143 - DNA, 33 bp, Homo sapien
cttgtgtcactgcctaaagagctgccaaaccca

SEQ ID NO: 1000144 - DNA, 33 bp, Homo sapien
cttgtgtcactgcctagagagctgccaaaccca

SEQ ID NO: 1000145 - DNA, 33 bp, Homo sapien
ctctgtaaatccctgaccttttcaaaaaataaa

SEQ ID NO: 1000146 - DNA, 33 bp, Homo sapien
ctctgtaaatccctgagcttttcaaaaaataaa

SEQ ID NO: 1000147 - DNA, 33 bp, Homo sapien
gttctgccagctttgaacttgggtcacagacct

SEQ ID NO: 1000148 - DNA, 33 bp, Homo sapien
gttctgccagctttgagcttgggtcacagacct

SEQ ID NO: 1000149 - DNA, 33 bp, Homo sapien
cagttagttgcagtcaataagaaatttgcttgt

SEQ ID NO: 1000150 - DNA, 33 bp, Homo sapien
cagttagttgcagtcagtaagaaatttgcttgt

SEQ ID NO: 1000151 - DNA, 33 bp, Homo sapien
gtaacaaatggtctcacctgaaaaaatacacat

SEQ ID NO: 1000152 - DNA, 33 bp, Homo sapien
gtaacaaatggtctcatctgaaaaaatacacat

SEQ ID NO: 1000153 - DNA, 33 bp, Homo sapien
gaagggatgaagcccactgcttgtctaactctt

SEQ ID NO: 1000154 - DNA, 33 bp, Homo sapien
gaagggatgaagcccattgcttgtctaactctt

SEQ ID NO: 1000155 - DNA, 33 bp, Homo sapien
aaatgagtcctttaatcagagtgagtgagccta

SEQ ID NO: 1000156 - DNA, 33 bp, Homo sapien
aaatgagtcctttaattagagtgagtgagccta

SEQ ID NO: 1000157 - DNA, 33 bp, Homo sapien
gtgtgtgcctgttaacactacctgatctttacc

SEQ ID NO: 1000158 - DNA, 33 bp, Homo sapien
gtgtgtgcctgttaaccctacctgatctttacc

SEQ ID NO: 1000159 - DNA, 33 bp, Homo sapien
ttctgtagtttcccgccagcttctaattccagc

SEQ ID NO: 1000160 - DNA, 33 bp, Homo sapien
ttctgtagtttcccgctagcttctaattccagc

SEQ ID NO: 1000161 - DNA, 33 bp, Homo sapien
ccatttccatgaacaacgattaagagaatgggc

SEQ ID NO: 1000162 - DNA, 33 bp, Homo sapien
ccatttccatgaacaatgattaagagaatgggc

SEQ ID NO: 1000163 - DNA, 33 bp, Homo sapien
tggagtggccctgatgaaaatgaacttagatcc

SEQ ID NO: 1000164 - DNA, 33 bp, Homo sapien
tggagtggccctgatgcaaatgaacttagatcc

SEQ ID NO: 1000165 - DNA, 33 bp, Homo sapien
tttgcccttatgggacgctaatgacaacaaaat

SEQ ID NO: 1000166 - DNA, 33 bp, Homo sapien
tttgcccttatgggactctaatgacaacaaaat

SEQ ID NO: 1000167 - DNA, 33 bp, Homo sapien
cagggcaggcgatgacccatgcgggacgcggga

SEQ ID NO: 1000168 - DNA, 33 bp, Homo sapien
cagggcaggcgatgacgcatgcgggacgcggga

SEQ ID NO: 1000169 - DNA, 33 bp, Homo sapien
tagcaaatggctataacgctctaagactgcaga

SEQ ID NO: 1000170 - DNA, 33 bp, Homo sapien
tagcaaatggctataatgctctaagactgcaga

SEQ ID NO: 1000171 - DNA, 33 bp, Homo sapien
attcagctttgtccaaccacgtgaaatgaagat

SEQ ID NO: 1000172 - DNA, 33 bp, Homo sapien
attcagctttgtccaatcacgtgaaatgaagat

SEQ ID NO: 1000173 - DNA, 33 bp, Homo sapien
aagagtcacgtatctcacttttaataccgccac

SEQ ID NO: 1000174 - DNA, 33 bp, Homo sapien
aagagtcacgtatctcgcttttaataccgccac

SEQ ID NO: 1000175 - DNA, 33 bp, Homo sapien
cgaggctgagttttcaatagggactagaattct

SEQ ID NO: 1000176 - DNA, 33 bp, Homo sapien
cgaggctgagttttcagtagggactagaattct

SEQ ID NO: 1000177 - DNA, 33 bp, Homo sapien
gaaatcaggtgagccactaagaattctagtccc

SEQ ID NO: 1000178 - DNA, 33 bp, Homo sapien
gaaatcaggtgagccagtaagaattctagtccc

SEQ ID NO: 1000179 - DNA, 33 bp, Homo sapien
tagggctgtattatgcaatttcaagtcatgttg

SEQ ID NO: 1000180 - DNA, 33 bp, Homo sapien
tagggctgtattatgccatttcaagtcatgttg

SEQ ID NO: 1000181 - DNA, 33 bp, Homo sapien
attacgggtgctgaaactatatcacctggtcct

SEQ ID NO: 1000182 - DNA, 33 bp, Homo sapien
attacgggtgctgaaattatatcacctggtcct

SEQ ID NO: 1000183 - DNA, 33 bp, Homo sapien
actttaccaataacataaacagtcgattaacaa

SEQ ID NO: 1000184 - DNA, 33 bp, Homo sapien
actttaccaataacatgaacagtcgattaacaa

SEQ ID NO: 1000185 - DNA, 33 bp, Homo sapien
aaacagtaaatcctgaaaatgccttctctgttt

SEQ ID NO: 1000186 - DNA, 33 bp, Homo sapien
aaacagtaaatcctgacaatgccttctctgttt

SEQ ID NO: 1000187 - DNA, 33 bp, Homo sapien
tctgattctattcaaacgtagtgaagttgaact

SEQ ID NO: 1000188 - DNA, 33 bp, Homo sapien
tctgattctattcaaatgtagtgaagttgaact

SEQ ID NO: 1000189 - DNA, 33 bp, Homo sapien
acagtagccttccagacgataaatgtttgaaga

SEQ ID NO: 1000190 - DNA, 33 bp, Homo sapien
acagtagccttccagatgataaatgtttgaaga

SEQ ID NO: 1000191 - DNA, 33 bp, Homo sapien
ggcctttcaaatactacgacatggtctaagcac

SEQ ID NO: 1000192 - DNA, 33 bp, Homo sapien
ggcctttcaaatactatgacatggtctaagcac

SEQ ID NO: 1000193 - DNA, 33 bp, Homo sapien
actaaaaggtagcttcacccagatctggcagtc

SEQ ID NO: 1000194 - DNA, 33 bp, Homo sapien
actaaaaggtagcttcgcccagatctggcagtc

SEQ ID NO: 1000195 - DNA, 33 bp, Homo sapien
gagtaaagagaagctacaaggggaaggaaaata

SEQ ID NO: 1000196 - DNA, 33 bp, Homo sapien
gagtaaagagaagctataaggggaaggaaaata

SEQ ID NO: 1000197 - DNA, 33 bp, Homo sapien
tggtagagacagaagcaaaaaggtacacagaaa

SEQ ID NO: 1000198 - DNA, 33 bp, Homo sapien
tggtagagacagaagccaaaaggtacacagaaa

SEQ ID NO: 1000199 - DNA, 33 bp, Homo sapien
ctcttagaatgcaaggaccatgtcttattcatc

SEQ ID NO: 1000200 - DNA, 33 bp, Homo sapien
ctcttagaatgcaaggtccatgtcttattcatc

SEQ ID NO: 1000201 - DNA, 33 bp, Homo sapien
acaggaaccctgccaaaatgtacccttttctaa

SEQ ID NO: 1000202 - DNA, 33 bp, Homo sapien
acaggaaccctgccaagatgtacccttttctaa

SEQ ID NO: 1000203 - DNA, 33 bp, Homo sapien
gggagctgattggctacaaaggaacacgaagac

SEQ ID NO: 1000204 - DNA, 33 bp, Homo sapien
gggagctgattggctataaaggaacacgaagac

SEQ ID NO: 1000205 - DNA, 33 bp, Homo sapien
atcattcgcaatagtaagagattataatcagtc

SEQ ID NO: 1000206 - DNA, 33 bp, Homo sapien
atcattcgcaatagtaggagattataatcagtc

SEQ ID NO: 1000207 - DNA, 33 bp, Homo sapien
tagtgtagcattgtaaaagaatatccttgctct

SEQ ID NO: 1000208 - DNA, 33 bp, Homo sapien
tagtgtagcattgtaagagaatatccttgctct

SEQ ID NO: 1000209 - DNA, 33 bp, Homo sapien
ctttttttggaagcagccatcttaatgggtatg

SEQ ID NO: 1000210 - DNA, 33 bp, Homo sapien
ctttttttggaagcagtcatcttaatgggtatg

SEQ ID NO: 1000211 - DNA, 33 bp, Homo sapien
cccatgatcacctcaccatctcactctgaaatc

SEQ ID NO: 1000212 - DNA, 33 bp, Homo sapien
cccatgatcacctcactatctcactctgaaatc

SEQ ID NO: 1000213 - DNA, 33 bp, Homo sapien
tcaatgttactgtacactgatgttgatatagaa

SEQ ID NO: 1000214 - DNA, 33 bp, Homo sapien
tcaatgttactgtacagtgatgttgatatagaa

SEQ ID NO: 1000215 - DNA, 33 bp, Homo sapien
tgttgatattggctgacgacataaagccatgtt

SEQ ID NO: 1000216 - DNA, 33 bp, Homo sapien
tgttgatattggctgatgacataaagccatgtt

SEQ ID NO: 1000217 - DNA, 33 bp, Homo sapien
gtgtgtctctggtcacaatattttcatcagcca

SEQ ID NO: 1000218 - DNA, 33 bp, Homo sapien
gtgtgtctctggtcacgatattttcatcagcca

SEQ ID NO: 1000219 - DNA, 33 bp, Homo sapien
agggacatttgaaataacaaaaccaccaacaaa

SEQ ID NO: 1000220 - DNA, 33 bp, Homo sapien
agggacatttgaaatagcaaaaccaccaacaaa

SEQ ID NO: 1000221 - DNA, 33 bp, Homo sapien
tttcagctctcatattaaaaacaagtgtccttt

SEQ ID NO: 1000222 - DNA, 33 bp, Homo sapien
tttcagctctcatattgaaaacaagtgtccttt

SEQ ID NO: 1000223 - DNA, 33 bp, Homo sapien
ctcacttgctcacttaaattttttcataacctt

SEQ ID NO: 1000224 - DNA, 33 bp, Homo sapien
ctcacttgctcacttatattttttcataacctt

SEQ ID NO: 1000225 - DNA, 33 bp, Homo sapien
ctctgcaccaggatgcaagaggctaggccccac

SEQ ID NO: 1000226 - DNA, 33 bp, Homo sapien
ctctgcaccaggatgcgagaggctaggccccac

SEQ ID NO: 1000227 - DNA, 33 bp, Homo sapien
tttgtaaagcaagaacggactaggaacccctgt

SEQ ID NO: 1000228 - DNA, 33 bp, Homo sapien
tttgtaaagcaagaactgactaggaacccctgt

SEQ ID NO: 1000229 - DNA, 33 bp, Homo sapien
cctctgagtccgataactaagaagagtgaccat

SEQ ID NO: 1000230 - DNA, 33 bp, Homo sapien
cctctgagtccgataattaagaagagtgaccat

SEQ ID NO: 1000231 - DNA, 33 bp, Homo sapien
ctgatgtcctctgatcaacaagtaaagtgaaaa

SEQ ID NO: 1000232 - DNA, 33 bp, Homo sapien
ctgatgtcctctgatcgacaagtaaagtgaaaa

SEQ ID NO: 1000233 - DNA, 33 bp, Homo sapien
ctgtgacaacaagacaccatattcttattttgt

SEQ ID NO: 1000234 - DNA, 33 bp, Homo sapien
ctgtgacaacaagacagcatattcttattttgt

SEQ ID NO: 1000235 - DNA, 33 bp, Homo sapien
ctttaggtgaaaccataaaaccacatggactgt

SEQ ID NO: 1000236 - DNA, 33 bp, Homo sapien
ctttaggtgaaaccatgaaaccacatggactgt

SEQ ID NO: 1000237 - DNA, 33 bp, Homo sapien
tattgcttgaactttgcagaaatatataaaagt

SEQ ID NO: 1000238 - DNA, 33 bp, Homo sapien
tattgcttgaactttggagaaatatataaaagt

SEQ ID NO: 1000239 - DNA, 33 bp, Homo sapien
caggtaggttcaggcaataggtatgaggtatct

SEQ ID NO: 1000240 - DNA, 33 bp, Homo sapien
caggtaggttcaggcagtaggtatgaggtatct

SEQ ID NO: 1000241 - DNA, 33 bp, Homo sapien
aattgccaaatgacaacaaaagacagccagaga

SEQ ID NO: 1000242 - DNA, 33 bp, Homo sapien
aattgccaaatgacaataaaagacagccagaga

SEQ ID NO: 1000243 - DNA, 33 bp, Homo sapien
tttatggtttccatagcagaaaaagagaaccag

SEQ ID NO: 1000244 - DNA, 33 bp, Homo sapien
tttatggtttccatagtagaaaaagagaaccag

SEQ ID NO: 1000245 - DNA, 33 bp, Homo sapien
ccacagaaagtacaagcagcagctattgacaga

SEQ ID NO: 1000246 - DNA, 33 bp, Homo sapien
ccacagaaagtacaagtagcagctattgacaga

SEQ ID NO: 1000247 - DNA, 33 bp, Homo sapien
catgcacaattagacaactatccatgaatgaaa

SEQ ID NO: 1000248 - DNA, 33 bp, Homo sapien
catgcacaattagacagctatccatgaatgaaa

SEQ ID NO: 1000249 - DNA, 33 bp, Homo sapien
tcccaggttatctgccaaattgtcgctgaattt

SEQ ID NO: 1000250 - DNA, 33 bp, Homo sapien
tcccaggttatctgccgaattgtcgctgaattt

SEQ ID NO: 1000251 - DNA, 33 bp, Homo sapien
ctggattctgtgacaaaataaatcctgggatac

SEQ ID NO: 1000252 - DNA, 33 bp, Homo sapien
ctggattctgtgacaagataaatcctgggatac

SEQ ID NO: 1000253 - DNA, 33 bp, Homo sapien
caaaactattgtcaagccaactgttagtagtga

SEQ ID NO: 1000254 - DNA, 33 bp, Homo sapien
caaaactattgtcaagtcaactgttagtagtga

SEQ ID NO: 1000255 - DNA, 33 bp, Homo sapien
tttaggactactacacccataataggcatttag

SEQ ID NO: 1000256 - DNA, 33 bp, Homo sapien
tttaggactactacacgcataataggcatttag

SEQ ID NO: 1000257 - DNA, 33 bp, Homo sapien
aaagtggagaaagccaactgaaattgaaaacta

SEQ ID NO: 1000258 - DNA, 33 bp, Homo sapien
aaagtggagaaagccagctgaaattgaaaacta

SEQ ID NO: 1000259 - DNA, 33 bp, Homo sapien
caaaatcaggcatagacaaaatgtaaataaatg

SEQ ID NO: 1000260 - DNA, 33 bp, Homo sapien
caaaatcaggcatagagaaaatgtaaataaatg

SEQ ID NO: 1000261 - DNA, 33 bp, Homo sapien
ctttcttctttgaaagcagtcaataacagtgca

SEQ ID NO: 1000262 - DNA, 33 bp, Homo sapien
ctttcttctttgaaagtagtcaataacagtgca

SEQ ID NO: 1000263 - DNA, 33 bp, Homo sapien
gtcatttcttcatagcaagctacaaagctggtg

SEQ ID NO: 1000264 - DNA, 33 bp, Homo sapien
gtcatttcttcatagcgagctacaaagctggtg

SEQ ID NO: 1000265 - DNA, 33 bp, Homo sapien
agagatccaatgactacgccaccatttgcttat

SEQ ID NO: 1000266 - DNA, 33 bp, Homo sapien
agagatccaatgactatgccaccatttgcttat

SEQ ID NO: 1000267 - DNA, 33 bp, Homo sapien
gacaaaatctagttgactactggttgttcccat

SEQ ID NO: 1000268 - DNA, 33 bp, Homo sapien
gacaaaatctagttgattactggttgttcccat

SEQ ID NO: 1000269 - DNA, 33 bp, Homo sapien
aacaaatctgtgtttaaaataagcgtaccaaat

SEQ ID NO: 1000270 - DNA, 33 bp, Homo sapien
aacaaatctgtgtttataataagcgtaccaaat

SEQ ID NO: 1000271 - DNA, 33 bp, Homo sapien
caaaataaaaggtgtagagcaatttcagcggat

SEQ ID NO: 1000272 - DNA, 33 bp, Homo sapien
caaaataaaaggtgtatagcaatttcagcggat

SEQ ID NO: 1000273 - DNA, 33 bp, Homo sapien
aacacatatatccttgacaaagcatagctttct

SEQ ID NO: 1000274 - DNA, 33 bp, Homo sapien
aacacatatatccttggcaaagcatagctttct

SEQ ID NO: 1000275 - DNA, 33 bp, Homo sapien
ataccttttagccatgaaaattcaatcttatct

SEQ ID NO: 1000276 - DNA, 33 bp, Homo sapien
ataccttttagccatgtaaattcaatcttatct

SEQ ID NO: 1000277 - DNA, 33 bp, Homo sapien
aaacattggaaaaatacgcaacacttcatcagg

SEQ ID NO: 1000278 - DNA, 33 bp, Homo sapien
aaacattggaaaaatatgcaacacttcatcagg

SEQ ID NO: 1000279 - DNA, 33 bp, Homo sapien
cataccatgtgcatagcattttattgtatggtt

SEQ ID NO: 1000280 - DNA, 33 bp, Homo sapien
cataccatgtgcatagtattttattgtatggtt

SEQ ID NO: 1000281 - DNA, 33 bp, Homo sapien
agtgggagcttgacacagagccaggagaggatg

SEQ ID NO: 1000282 - DNA, 33 bp, Homo sapien
agtgggagcttgacaccgagccaggagaggatg

SEQ ID NO: 1000283 - DNA, 33 bp, Homo sapien
taggacgtgtgtagtacaccaagaaaatgcctg

SEQ ID NO: 1000284 - DNA, 33 bp, Homo sapien
taggacgtgtgtagtagaccaagaaaatgcctg

SEQ ID NO: 1000285 - DNA, 33 bp, Homo sapien
cacattggcttttatgcaggattgagcaaactt

SEQ ID NO: 1000286 - DNA, 33 bp, Homo sapien
cacattggcttttatggaggattgagcaaactt

SEQ ID NO: 1000287 - DNA, 33 bp, Homo sapien
tggaaagatgaaggacactacttgaagctcctt

SEQ ID NO: 1000288 - DNA, 33 bp, Homo sapien
tggaaagatgaaggacgctacttgaagctcctt

SEQ ID NO: 1000289 - DNA, 33 bp, Homo sapien
tgctgtttttcataccactcatgtctgatcatc

SEQ ID NO: 1000290 - DNA, 33 bp, Homo sapien
tgctgtttttcatacccctcatgtctgatcatc

SEQ ID NO: 1000291 - DNA, 33 bp, Homo sapien
ttcatgaggtgatactaaacaggagatttgtga

SEQ ID NO: 1000292 - DNA, 33 bp, Homo sapien
ttcatgaggtgatactgaacaggagatttgtga

SEQ ID NO: 1000293 - DNA, 33 bp, Homo sapien
gccatttgcatttaaaaccttattagactacca

SEQ ID NO: 1000294 - DNA, 33 bp, Homo sapien
gccatttgcatttaaagccttattagactacca

SEQ ID NO: 1000295 - DNA, 33 bp, Homo sapien
caaatcattggcactcaagagtttcaagaattc

SEQ ID NO: 1000296 - DNA, 33 bp, Homo sapien
caaatcattggcactcgagagtttcaagaattc

SEQ ID NO: 1000297 - DNA, 33 bp, Homo sapien
tcccagtagttcctgaagaagttctcagacatg

SEQ ID NO: 1000298 - DNA, 33 bp, Homo sapien
tcccagtagttcctgaggaagttctcagacatg

SEQ ID NO: 1000299 - DNA, 33 bp, Homo sapien
atgatatacttcataactgtagtggccatctgt

SEQ ID NO: 1000300 - DNA, 33 bp, Homo sapien
atgatatacttcataattgtagtggccatctgt

SEQ ID NO: 1000301 - DNA, 33 bp, Homo sapien
gcaacaactcacttccactagaatattcacctc

SEQ ID NO: 1000302 - DNA, 33 bp, Homo sapien
gcaacaactcacttccgctagaatattcacctc

SEQ ID NO: 1000303 - DNA, 33 bp, Homo sapien
atacatttgaacaaagaaaagttggaaacaact

SEQ ID NO: 1000304 - DNA, 33 bp, Homo sapien
atacatttgaacaaaggaaagttggaaacaact

SEQ ID NO: 1000305 - DNA, 33 bp, Homo sapien
cttttgtgtttcttaaaaagctgctctattagg

SEQ ID NO: 1000306 - DNA, 33 bp, Homo sapien
cttttgtgtttcttaataagctgctctattagg

SEQ ID NO: 1000307 - DNA, 33 bp, Homo sapien
aagtctgtctttacacaactcagtggtacaacc

SEQ ID NO: 1000308 - DNA, 33 bp, Homo sapien
aagtctgtctttacacgactcagtggtacaacc

SEQ ID NO: 1000309 - DNA, 33 bp, Homo sapien
gatactatactagtgaatcaatcttctggaatc

SEQ ID NO: 1000310 - DNA, 33 bp, Homo sapien
gatactatactagtgagtcaatcttctggaatc

SEQ ID NO: 1000311 - DNA, 33 bp, Homo sapien
agtagcagaaaacgcagtctttcacattccagt

SEQ ID NO: 1000312 - DNA, 33 bp, Homo sapien
agtagcagaaaacgcattctttcacattccagt

SEQ ID NO: 1000313 - DNA, 33 bp, Homo sapien
aaaaattgaacagagccgctaaaaggtattgaa

SEQ ID NO: 1000314 - DNA, 33 bp, Homo sapien
aaaaattgaacagagctgctaaaaggtattgaa

SEQ ID NO: 1000315 - DNA, 33 bp, Homo sapien
tgtgaaccatagtcaaagaagtttgaaagttaa

SEQ ID NO: 1000316 - DNA, 33 bp, Homo sapien
tgtgaaccatagtcaaggaagtttgaaagttaa

SEQ ID NO: 1000317 - DNA, 33 bp, Homo sapien
cagttactggtaattcgcaggaaacagaactct

SEQ ID NO: 1000318 - DNA, 33 bp, Homo sapien
cagttactggtaattctcaggaaacagaactct

SEQ ID NO: 1000319 - DNA, 33 bp, Homo sapien
gctgatagccatccataataaagactgtattct

SEQ ID NO: 1000320 - DNA, 33 bp, Homo sapien
gctgatagccatccatgataaagactgtattct

SEQ ID NO: 1000321 - DNA, 33 bp, Homo sapien
aaaaatcctctgctgaatagagcctacaattcc

SEQ ID NO: 1000322 - DNA, 33 bp, Homo sapien
aaaaatcctctgctgactagagcctacaattcc

SEQ ID NO: 1000323 - DNA, 33 bp, Homo sapien
gccatgaagctattcaaagggcaacagaaatgc

SEQ ID NO: 1000324 - DNA, 33 bp, Homo sapien
gccatgaagctattcagagggcaacagaaatgc

SEQ ID NO: 1000325 - DNA, 33 bp, Homo sapien
ttcctatgtgcagtaaatgctgccttcacaatc

SEQ ID NO: 1000326 - DNA, 33 bp, Homo sapien
ttcctatgtgcagtaagtgctgccttcacaatc

SEQ ID NO: 1000327 - DNA, 33 bp, Homo sapien
gaatgtgcaagctataacaactaactctttacc

SEQ ID NO: 1000328 - DNA, 33 bp, Homo sapien
gaatgtgcaagctatagcaactaactctttacc

SEQ ID NO: 1000329 - DNA, 33 bp, Homo sapien
gagtgtctgtctgcgaaaatgattttgcatcgt

SEQ ID NO: 1000330 - DNA, 33 bp, Homo sapien
gagtgtctgtctgcgacaatgattttgcatcgt

SEQ ID NO: 1000331 - DNA, 33 bp, Homo sapien
ttatcagcctctgtaaatgtaagaaataaatta

SEQ ID NO: 1000332 - DNA, 33 bp, Homo sapien
ttatcagcctctgtaagtgtaagaaataaatta

SEQ ID NO: 1000333 - DNA, 33 bp, Homo sapien
ttgtttagcctaggaccgagggttttccattgg

SEQ ID NO: 1000334 - DNA, 33 bp, Homo sapien
ttgtttagcctaggactgagggttttccattgg

SEQ ID NO: 1000335 - DNA, 33 bp, Homo sapien
tggtggccagaagttacgctgaggacagagttc

SEQ ID NO: 1000336 - DNA, 33 bp, Homo sapien
tggtggccagaagttatgctgaggacagagttc

SEQ ID NO: 1000337 - DNA, 33 bp, Homo sapien
ctacaatacccatggagcagagtgtaatcacct

SEQ ID NO: 1000338 - DNA, 33 bp, Homo sapien
ctacaatacccatggatcagagtgtaatcacct

SEQ ID NO: 1000339 - DNA, 33 bp, Homo sapien
gagactgagagtctaactacaggacagcaagtg

SEQ ID NO: 1000340 - DNA, 33 bp, Homo sapien
gagactgagagtctaattacaggacagcaagtg

SEQ ID NO: 1000341 - DNA, 33 bp, Homo sapien
aggttccaatgtaatcaacttgccagtgagttg

SEQ ID NO: 1000342 - DNA, 33 bp, Homo sapien
aggttccaatgtaatcgacttgccagtgagttg

SEQ ID NO: 1000343 - DNA, 33 bp, Homo sapien
tccacagaacctaacactgaagatggaaaacat

SEQ ID NO: 1000344 - DNA, 33 bp, Homo sapien
tccacagaacctaacattgaagatggaaaacat

SEQ ID NO: 1000345 - DNA, 33 bp, Homo sapien
cttttctcctggtcaacataacatcacataggc

SEQ ID NO: 1000346 - DNA, 33 bp, Homo sapien
cttttctcctggtcaagataacatcacataggc

SEQ ID NO: 1000347 - DNA, 33 bp, Homo sapien
cctcagtgctctgtgaaggtctttcaggaagtg

SEQ ID NO: 1000348 - DNA, 33 bp, Homo sapien
cctcagtgctctgtgacggtctttcaggaagtg

SEQ ID NO: 1000349 - DNA, 33 bp, Homo sapien
gacacatttactctgacgtggagggtctattct

SEQ ID NO: 1000350 - DNA, 33 bp, Homo sapien
gacacatttactctgatgtggagggtctattct

SEQ ID NO: 1000351 - DNA, 33 bp, Homo sapien
cgcaccagttatattacattttatggttggtat

SEQ ID NO: 1000352 - DNA, 33 bp, Homo sapien
cgcaccagttatattagattttatggttggtat

SEQ ID NO: 1000353 - DNA, 33 bp, Homo sapien
acactcccccaatcatgaaaagcttgtatcatt

SEQ ID NO: 1000354 - DNA, 33 bp, Homo sapien
acactcccccaatcattaaaagcttgtatcatt

SEQ ID NO: 1000355 - DNA, 33 bp, Homo sapien
tgggtgactttgggaacctcacttggtctctct

SEQ ID NO: 1000356 - DNA, 33 bp, Homo sapien
tgggtgactttgggaagctcacttggtctctct

SEQ ID NO: 1000357 - DNA, 33 bp, Homo sapien
tcatttttaaccacaaagaccagagagaccaag

SEQ ID NO: 1000358 - DNA, 33 bp, Homo sapien
tcatttttaaccacaaggaccagagagaccaag

SEQ ID NO: 1000359 - DNA, 33 bp, Homo sapien
gggtctttccaccacaccgagtcctacaggagg

SEQ ID NO: 1000360 - DNA, 33 bp, Homo sapien
gggtctttccaccacagcgagtcctacaggagg

SEQ ID NO: 1000361 - DNA, 33 bp, Homo sapien
ctttaacttacactctcaacttccaatagagca

SEQ ID NO: 1000362 - DNA, 33 bp, Homo sapien
ctttaacttacactctgaacttccaatagagca

SEQ ID NO: 1000363 - DNA, 33 bp, Homo sapien
cagcaattctactgcaggtattggataaatttg

SEQ ID NO: 1000364 - DNA, 33 bp, Homo sapien
cagcaattctactgcatgtattggataaatttg

SEQ ID NO: 1000365 - DNA, 33 bp, Homo sapien
aactgaagagagaaccactgctttggtcatgtt

SEQ ID NO: 1000366 - DNA, 33 bp, Homo sapien
aactgaagagagaaccgctgctttggtcatgtt

SEQ ID NO: 1000367 - DNA, 33 bp, Homo sapien
aactcttgctgaacacaaagatccattttcatt

SEQ ID NO: 1000368 - DNA, 33 bp, Homo sapien
aactcttgctgaacacgaagatccattttcatt

SEQ ID NO: 1000369 - DNA, 33 bp, Homo sapien
tctctgctgtaggaaacggccaggatggatttt

SEQ ID NO: 1000370 - DNA, 33 bp, Homo sapien
tctctgctgtaggaaatggccaggatggatttt

SEQ ID NO: 1000371 - DNA, 33 bp, Homo sapien
tcaagctctaggattaagtgcttattattagtc

SEQ ID NO: 1000372 - DNA, 33 bp, Homo sapien
tcaagctctaggattacgtgcttattattagtc

SEQ ID NO: 1000373 - DNA, 33 bp, Homo sapien
gtagatataagaggacaagcatcccgtaaagag

SEQ ID NO: 1000374 - DNA, 33 bp, Homo sapien
gtagatataagaggacgagcatcccgtaaagag

SEQ ID NO: 1000375 - DNA, 33 bp, Homo sapien
atatttggtattgttaagaagtatggtggccat

SEQ ID NO: 1000376 - DNA, 33 bp, Homo sapien
atatttggtattgttaggaagtatggtggccat

SEQ ID NO: 1000377 - DNA, 33 bp, Homo sapien
aaaatcagaaaaaatcgaaacctctatcttcat

SEQ ID NO: 1000378 - DNA, 33 bp, Homo sapien
aaaatcagaaaaaatctaaacctctatcttcat

SEQ ID NO: 1000379 - DNA, 33 bp, Homo sapien
ggatattgagagctgacgccttctacccaaagg

SEQ ID NO: 1000380 - DNA, 33 bp, Homo sapien
ggatattgagagctgatgccttctacccaaagg

SEQ ID NO: 1000381 - DNA, 33 bp, Homo sapien
ggaaatccactctttaccttgttggaggtcagg

SEQ ID NO: 1000382 - DNA, 33 bp, Homo sapien
ggaaatccactctttagcttgttggaggtcagg

SEQ ID NO: 1000383 - DNA, 33 bp, Homo sapien
tgtttcagcttttacaaggcagaactggacttc

SEQ ID NO: 1000384 - DNA, 33 bp, Homo sapien
tgtttcagcttttacagggcagaactggacttc

SEQ ID NO: 1000385 - DNA, 33 bp, Homo sapien
gctgaccagggtaagaaatagtttcctgtgtct

SEQ ID NO: 1000386 - DNA, 33 bp, Homo sapien
gctgaccagggtaagacatagtttcctgtgtct

SEQ ID NO: 1000387 - DNA, 33 bp, Homo sapien
ccccactgctacttggaacttaacctgggatca

SEQ ID NO: 1000388 - DNA, 33 bp, Homo sapien
ccccactgctacttgggacttaacctgggatca

SEQ ID NO: 1000389 - DNA, 33 bp, Homo sapien
tcatcatcttaccctcaaggcctgcttctttgc

SEQ ID NO: 1000390 - DNA, 33 bp, Homo sapien
tcatcatcttaccctcgaggcctgcttctttgc

SEQ ID NO: 1000391 - DNA, 33 bp, Homo sapien
acagcattaatacagaagaattggttttgatgg

SEQ ID NO: 1000392 - DNA, 33 bp, Homo sapien
acagcattaatacagaggaattggttttgatgg

SEQ ID NO: 1000393 - DNA, 33 bp, Homo sapien
aagttgttcctccacacacacaaaaagcatcca

SEQ ID NO: 1000394 - DNA, 33 bp, Homo sapien
aagttgttcctccacatacacaaaaagcatcca

SEQ ID NO: 1000395 - DNA, 33 bp, Homo sapien
agacacgatggaggaaataacttagtctgttaa

SEQ ID NO: 1000396 - DNA, 33 bp, Homo sapien
agacacgatggaggaagtaacttagtctgttaa

SEQ ID NO: 1000397 - DNA, 33 bp, Homo sapien
gtcttaaccatcataaagtgtgcaaacaacacg

SEQ ID NO: 1000398 - DNA, 33 bp, Homo sapien
gtcttaaccatcataaggtgtgcaaacaacacg

SEQ ID NO: 1000399 - DNA, 33 bp, Homo sapien
agtgtaggttgacttaagatggggaagcagagg

SEQ ID NO: 1000400 - DNA, 33 bp, Homo sapien
agtgtaggttgacttaggatggggaagcagagg

SEQ ID NO: 1000401 - DNA, 33 bp, Homo sapien
tcattgtgttaaaaaagtactggacaaatggat

SEQ ID NO: 1000402 - DNA, 33 bp, Homo sapien
tcattgtgttaaaaaattactggacaaatggat

SEQ ID NO: 1000403 - DNA, 33 bp, Homo sapien
ctaacatgcagcccggaagatccagtgtcaggt

SEQ ID NO: 1000404 - DNA, 33 bp, Homo sapien
ctaacatgcagcccggcagatccagtgtcaggt

SEQ ID NO: 1000405 - DNA, 33 bp, Homo sapien
cccttaggcctctagcagaatttgtggaaaatg

SEQ ID NO: 1000406 - DNA, 33 bp, Homo sapien
cccttaggcctctagcggaatttgtggaaaatg

SEQ ID NO: 1000407 - DNA, 33 bp, Homo sapien
tatagtattctttcataactgggatacctgtct

SEQ ID NO: 1000408 - DNA, 33 bp, Homo sapien
tatagtattctttcatgactgggatacctgtct

SEQ ID NO: 1000409 - DNA, 33 bp, Homo sapien
ttgcataatattcagcccttagttggtgctgcc

SEQ ID NO: 1000410 - DNA, 33 bp, Homo sapien
ttgcataatattcagctcttagttggtgctgcc

SEQ ID NO: 1000411 - DNA, 33 bp, Homo sapien
tttgactacacacataactatatccacatcaac

SEQ ID NO: 1000412 - DNA, 33 bp, Homo sapien
tttgactacacacatacctatatccacatcaac

SEQ ID NO: 1000413 - DNA, 33 bp, Homo sapien
ttgaaacactctggaaataatgcatatgttgct

SEQ ID NO: 1000414 - DNA, 33 bp, Homo sapien
ttgaaacactctggaagtaatgcatatgttgct

SEQ ID NO: 1000415 - DNA, 33 bp, Homo sapien
tctcagaccacacacaaagagttacagtttgaa

SEQ ID NO: 1000416 - DNA, 33 bp, Homo sapien
tctcagaccacacacatagagttacagtttgaa

SEQ ID NO: 1000417 - DNA, 33 bp, Homo sapien
gaggatcttgttcaaactgtgggctctcagacc

SEQ ID NO: 1000418 - DNA, 33 bp, Homo sapien
gaggatcttgttcaaattgtgggctctcagacc

SEQ ID NO: 1000419 - DNA, 33 bp, Homo sapien
caccaaacctcttggcaccttaatcttggactt

SEQ ID NO: 1000420 - DNA, 33 bp, Homo sapien
caccaaacctcttggcgccttaatcttggactt

SEQ ID NO: 1000421 - DNA, 33 bp, Homo sapien
tgttggagcttaggggccatattaatgacaaag

SEQ ID NO: 1000422 - DNA, 33 bp, Homo sapien
tgttggagcttagggggcatattaatgacaaag

SEQ ID NO: 1000423 - DNA, 33 bp, Homo sapien
cttagtgctgtggtcacgaaaaaggaatgttga

SEQ ID NO: 1000424 - DNA, 33 bp, Homo sapien
cttagtgctgtggtcatgaaaaaggaatgttga

SEQ ID NO: 1000425 - DNA, 33 bp, Homo sapien
tcaaatagcctcatctaaaaataattacagtaa

SEQ ID NO: 1000426 - DNA, 33 bp, Homo sapien
tcaaatagcctcatctgaaaataattacagtaa

SEQ ID NO: 1000427 - DNA, 33 bp, Homo sapien
acatacagcatgtttgaaacagttggcctcaac

SEQ ID NO: 1000428 - DNA, 33 bp, Homo sapien
acatacagcatgtttggaacagttggcctcaac

SEQ ID NO: 1000429 - DNA, 33 bp, Homo sapien
atgcttttcccacatacattatcagagccagaa

SEQ ID NO: 1000430 - DNA, 33 bp, Homo sapien
atgcttttcccacatatattatcagagccagaa

SEQ ID NO: 1000431 - DNA, 33 bp, Homo sapien
tctccagataatctgagatttcctaaagcggag

SEQ ID NO: 1000432 - DNA, 33 bp, Homo sapien
tctccagataatctgatatttcctaaagcggag

SEQ ID NO: 1000433 - DNA, 33 bp, Homo sapien
ttcaagtggaagtacacgcaagttaataactac

SEQ ID NO: 1000434 - DNA, 33 bp, Homo sapien
ttcaagtggaagtacatgcaagttaataactac

SEQ ID NO: 1000435 - DNA, 33 bp, Homo sapien
ggacatagaatgtagacgagtaagtgaaagaca

SEQ ID NO: 1000436 - DNA, 33 bp, Homo sapien
ggacatagaatgtagatgagtaagtgaaagaca

SEQ ID NO: 1000437 - DNA, 33 bp, Homo sapien
aattgactcgaccccaaataaaattgccaagtg

SEQ ID NO: 1000438 - DNA, 33 bp, Homo sapien
aattgactcgaccccagataaaattgccaagtg

SEQ ID NO: 1000439 - DNA, 33 bp, Homo sapien
aagccccatctgcaaacaccttcactttcgggt

SEQ ID NO: 1000440 - DNA, 33 bp, Homo sapien
aagccccatctgcaaagaccttcactttcgggt

SEQ ID NO: 1000441 - DNA, 33 bp, Homo sapien
gctgcacattcataaacttctgggtttcctgga

SEQ ID NO: 1000442 - DNA, 33 bp, Homo sapien
gctgcacattcataaatttctgggtttcctgga

SEQ ID NO: 1000443 - DNA, 33 bp, Homo sapien
ttttggaatttacaacaggtactcaacaatgcc

SEQ ID NO: 1000444 - DNA, 33 bp, Homo sapien
ttttggaatttacaaccggtactcaacaatgcc

SEQ ID NO: 1000445 - DNA, 33 bp, Homo sapien
tcttcagtctttcaaggaacatagagacatgct

SEQ ID NO: 1000446 - DNA, 33 bp, Homo sapien
tcttcagtctttcaagtaacatagagacatgct

SEQ ID NO: 1000447 - DNA, 33 bp, Homo sapien
cctgacacaaaggtggccaattgtgtccatcca

SEQ ID NO: 1000448 - DNA, 33 bp, Homo sapien
cctgacacaaaggtggtcaattgtgtccatcca

SEQ ID NO: 1000449 - DNA, 33 bp, Homo sapien
ggtctggagaaaaacactcccgaatgaggggac

SEQ ID NO: 1000450 - DNA, 33 bp, Homo sapien
ggtctggagaaaaacattcccgaatgaggggac

SEQ ID NO: 1000451 - DNA, 33 bp, Homo sapien
tggtataaaaggactcccactctgcaagagttt

SEQ ID NO: 1000452 - DNA, 33 bp, Homo sapien
tggtataaaaggactcgcactctgcaagagttt

SEQ ID NO: 1000453 - DNA, 33 bp, Homo sapien
ggctctttgggaagacagatggatccccggagg

SEQ ID NO: 1000454 - DNA, 33 bp, Homo sapien
ggctctttgggaagacggatggatccccggagg

SEQ ID NO: 1000455 - DNA, 33 bp, Homo sapien
gaagttctaagggcaacgaaaagcctaaagagc

SEQ ID NO: 1000456 - DNA, 33 bp, Homo sapien
gaagttctaagggcaatgaaaagcctaaagagc

SEQ ID NO: 1000457 - DNA, 33 bp, Homo sapien
tggagaattattcagacccaaatattaatagag

SEQ ID NO: 1000458 - DNA, 33 bp, Homo sapien
tggagaattattcagatccaaatattaatagag

SEQ ID NO: 1000459 - DNA, 33 bp, Homo sapien
cagggttgggatgagacaacgcctcatgcacct

SEQ ID NO: 1000460 - DNA, 33 bp, Homo sapien
cagggttgggatgagataacgcctcatgcacct

SEQ ID NO: 1000461 - DNA, 33 bp, Homo sapien
taaagaacatcaatgagaaaactgttatttagc

SEQ ID NO: 1000462 - DNA, 33 bp, Homo sapien
taaagaacatcaatgataaaactgttatttagc

SEQ ID NO: 1000463 - DNA, 33 bp, Homo sapien
ctccaatgtgcttagacaattgaattctttaga

SEQ ID NO: 1000464 - DNA, 33 bp, Homo sapien
ctccaatgtgcttagataattgaattctttaga

SEQ ID NO: 1000465 - DNA, 33 bp, Homo sapien
tctgcaggcccagaaggctcagggagaaagcaa

SEQ ID NO: 1000466 - DNA, 33 bp, Homo sapien
tctgcaggcccagaagtctcagggagaaagcaa

SEQ ID NO: 1000467 - DNA, 33 bp, Homo sapien
gaggtgatggtccacactaagtaaagcagagat

SEQ ID NO: 1000468 - DNA, 33 bp, Homo sapien
gaggtgatggtccacagtaagtaaagcagagat

SEQ ID NO: 1000469 - DNA, 33 bp, Homo sapien
gagttgttttctgatgaagtatactcactatag

SEQ ID NO: 1000470 - DNA, 33 bp, Homo sapien
gagttgttttctgatggagtatactcactatag

SEQ ID NO: 1000471 - DNA, 33 bp, Homo sapien
gtatactcactataggaagctattggttttgag

SEQ ID NO: 1000472 - DNA, 33 bp, Homo sapien
gtatactcactataggcagctattggttttgag

SEQ ID NO: 1000473 - DNA, 33 bp, Homo sapien
tgttggattttaagtgcaccctacatgcattct

SEQ ID NO: 1000474 - DNA, 33 bp, Homo sapien
tgttggattttaagtgtaccctacatgcattct

SEQ ID NO: 1000475 - DNA, 33 bp, Homo sapien
atgtaatgatttgagaaggaaacaggttttttt

SEQ ID NO: 1000476 - DNA, 33 bp, Homo sapien
atgtaatgatttgagagggaaacaggttttttt

SEQ ID NO: 1000477 - DNA, 33 bp, Homo sapien
gtatcacctgggcaatcaaataatctggacacc

SEQ ID NO: 1000478 - DNA, 33 bp, Homo sapien
gtatcacctgggcaatgaaataatctggacacc

SEQ ID NO: 1000479 - DNA, 33 bp, Homo sapien
taataaatatttgagacggtggatatgttaact

SEQ ID NO: 1000480 - DNA, 33 bp, Homo sapien
taataaatatttgagatggtggatatgttaact

SEQ ID NO: 1000481 - DNA, 33 bp, Homo sapien
taggtgaaggtagttacaaatcagcatattttc

SEQ ID NO: 1000482 - DNA, 33 bp, Homo sapien
taggtgaaggtagttataaatcagcatattttc

SEQ ID NO: 1000483 - DNA, 33 bp, Homo sapien
agaacagaggcttcataaataacatcacacatc

SEQ ID NO: 1000484 - DNA, 33 bp, Homo sapien
agaacagaggcttcatcaataacatcacacatc

SEQ ID NO: 1000485 - DNA, 33 bp, Homo sapien
cacagcacctttagaaagtacaatgttttcctg

SEQ ID NO: 1000486 - DNA, 33 bp, Homo sapien
cacagcacctttagaatgtacaatgttttcctg

SEQ ID NO: 1000487 - DNA, 33 bp, Homo sapien
tggattagagaaaggggaacccatgtccattac

SEQ ID NO: 1000488 - DNA, 33 bp, Homo sapien
tggattagagaaagggtaacccatgtccattac

SEQ ID NO: 1000489 - DNA, 33 bp, Homo sapien
tacacagacagttccccgaagaacaagcacagc

SEQ ID NO: 1000490 - DNA, 33 bp, Homo sapien
tacacagacagttccctgaagaacaagcacagc

SEQ ID NO: 1000491 - DNA, 33 bp, Homo sapien
ttaactgctatgtttcgaggattcagaatatgc

SEQ ID NO: 1000492 - DNA, 33 bp, Homo sapien
ttaactgctatgtttctaggattcagaatatgc

SEQ ID NO: 1000493 - DNA, 33 bp, Homo sapien
tccctactattgaaatcatcctgttggttcact

SEQ ID NO: 1000494 - DNA, 33 bp, Homo sapien
tccctactattgaaattatcctgttggttcact

SEQ ID NO: 1000495 - DNA, 33 bp, Homo sapien
tgctaaggctgaattgcatccgttcgaaattca

SEQ ID NO: 1000496 - DNA, 33 bp, Homo sapien
tgctaaggctgaattgtatccgttcgaaattca

SEQ ID NO: 1000497 - DNA, 33 bp, Homo sapien
aggaagctgaaagagacgctgggtaatggtgtt

SEQ ID NO: 1000498 - DNA, 33 bp, Homo sapien
aggaagctgaaagagaggctgggtaatggtgtt

SEQ ID NO: 1000499 - DNA, 33 bp, Homo sapien
aagtctccgtttcagccatgaggtcactattat

SEQ ID NO: 1000500 - DNA, 33 bp, Homo sapien
aagtctccgtttcagctatgaggtcactattat

SEQ ID NO: 1000501 - DNA, 33 bp, Homo sapien
gtgtagggctggagacaaaatggagagtccacc

SEQ ID NO: 1000502 - DNA, 33 bp, Homo sapien
gtgtagggctggagacgaaatggagagtccacc

SEQ ID NO: 1000503 - DNA, 33 bp, Homo sapien
ggaactgaggagaatcaagacaggcttcatttg

SEQ ID NO: 1000504 - DNA, 33 bp, Homo sapien
ggaactgaggagaatcgagacaggcttcatttg

SEQ ID NO: 1000505 - DNA, 33 bp, Homo sapien
aaaagtggatgataaaaaagtcaaatagccaca

SEQ ID NO: 1000506 - DNA, 33 bp, Homo sapien
aaaagtggatgataaagaagtcaaatagccaca

SEQ ID NO: 1000507 - DNA, 33 bp, Homo sapien
cagttcaggaggataaacaggtatgcaggagcc

SEQ ID NO: 1000508 - DNA, 33 bp, Homo sapien
cagttcaggaggataatcaggtatgcaggagcc

SEQ ID NO: 1000509 - DNA, 33 bp, Homo sapien
agcttgggaaacatcaaaatattaattcaaact

SEQ ID NO: 1000510 - DNA, 33 bp, Homo sapien
agcttgggaaacatcacaatattaattcaaact

SEQ ID NO: 1000511 - DNA, 33 bp, Homo sapien
gtttccacttaaacatgacttcacaatatcatc

SEQ ID NO: 1000512 - DNA, 33 bp, Homo sapien
gtttccacttaaacattacttcacaatatcatc

SEQ ID NO: 1000513 - DNA, 33 bp, Homo sapien
tgatagacaagttgggaaaatagatatcaaaca

SEQ ID NO: 1000514 - DNA, 33 bp, Homo sapien
tgatagacaagttggggaaatagatatcaaaca

SEQ ID NO: 1000515 - DNA, 33 bp, Homo sapien
cattctgtcaaggcaggattttgggtgtgggca

SEQ ID NO: 1000516 - DNA, 33 bp, Homo sapien
cattctgtcaaggcagtattttgggtgtgggca

SEQ ID NO: 1000517 - DNA, 33 bp, Homo sapien
aggggactgggtgatgaaattgcacggttccct

SEQ ID NO: 1000518 - DNA, 33 bp, Homo sapien
aggggactgggtgatggaattgcacggttccct

SEQ ID NO: 1000519 - DNA, 33 bp, Homo sapien
aaatgatggataaataacttagctcctttgccc

SEQ ID NO: 1000520 - DNA, 33 bp, Homo sapien
aaatgatggataaataccttagctcctttgccc

SEQ ID NO: 1000521 - DNA, 33 bp, Homo sapien
tgaccaataactcataccaagtgatggataaat

SEQ ID NO: 1000522 - DNA, 33 bp, Homo sapien
tgaccaataactcatatcaagtgatggataaat

SEQ ID NO: 1000523 - DNA, 33 bp, Homo sapien
aagtacagatgagaaccggtttgtctcccaaat

SEQ ID NO: 1000524 - DNA, 33 bp, Homo sapien
aagtacagatgagaactggtttgtctcccaaat

SEQ ID NO: 1000525 - DNA, 33 bp, Homo sapien
taaaaattatcagaagacatcacagttattcaa

SEQ ID NO: 1000526 - DNA, 33 bp, Homo sapien
taaaaattatcagaaggcatcacagttattcaa

SEQ ID NO: 1000527 - DNA, 33 bp, Homo sapien
agttgatcaggtaacacagatgaataaaatagt

SEQ ID NO: 1000528 - DNA, 33 bp, Homo sapien
agttgatcaggtaacatagatgaataaaatagt

SEQ ID NO: 1000529 - DNA, 33 bp, Homo sapien
ttctaggagcaatgagcaatttagactacatag

SEQ ID NO: 1000530 - DNA, 33 bp, Homo sapien
ttctaggagcaatgaggaatttagactacatag

SEQ ID NO: 1000531 - DNA, 33 bp, Homo sapien
gttgagttattaccaaacagacataatttaatt

SEQ ID NO: 1000532 - DNA, 33 bp, Homo sapien
gttgagttattaccaagcagacataatttaatt

SEQ ID NO: 1000533 - DNA, 33 bp, Homo sapien
cagctaactggctatggaaccttgagaaatctt

SEQ ID NO: 1000534 - DNA, 33 bp, Homo sapien
cagctaactggctatgtaaccttgagaaatctt

SEQ ID NO: 1000535 - DNA, 33 bp, Homo sapien
aaatatctttcctttgcatcaaacagaacagca

SEQ ID NO: 1000536 - DNA, 33 bp, Homo sapien
aaatatctttcctttgtatcaaacagaacagca

SEQ ID NO: 1000537 - DNA, 33 bp, Homo sapien
cttccagtctttgttcacatatcagcttttgaa

SEQ ID NO: 1000538 - DNA, 33 bp, Homo sapien
cttccagtctttgttcgcatatcagcttttgaa

SEQ ID NO: 1000539 - DNA, 33 bp, Homo sapien
gtagaatgtttgcaaagtaaacaaagcatttca

SEQ ID NO: 1000540 - DNA, 33 bp, Homo sapien
gtagaatgtttgcaaattaaacaaagcatttca

SEQ ID NO: 1000541 - DNA, 33 bp, Homo sapien
aaagtgatgttgcaccaactgctaaatggcatt

SEQ ID NO: 1000542 - DNA, 33 bp, Homo sapien
aaagtgatgttgcaccgactgctaaatggcatt

SEQ ID NO: 1000543 - DNA, 33 bp, Homo sapien
gtgcagcatgctgaaacggagtctttttggaat

SEQ ID NO: 1000544 - DNA, 33 bp, Homo sapien
gtgcagcatgctgaaagggagtctttttggaat

SEQ ID NO: 1000545 - DNA, 33 bp, Homo sapien
taatgcttatagaccacaggttattggatatga

SEQ ID NO: 1000546 - DNA, 33 bp, Homo sapien
taatgcttatagaccataggttattggatatga

SEQ ID NO: 1000547 - DNA, 33 bp, Homo sapien
gtttggctagaagagccagtgatgggagggcaa

SEQ ID NO: 1000548 - DNA, 33 bp, Homo sapien
gtttggctagaagagctagtgatgggagggcaa

SEQ ID NO: 1000549 - DNA, 33 bp, Homo sapien
agggagagtcaaagtacagcattgcatcctctt

SEQ ID NO: 1000550 - DNA, 33 bp, Homo sapien
agggagagtcaaagtagagcattgcatcctctt

SEQ ID NO: 1000551 - DNA, 33 bp, Homo sapien
gctctggggtgcttcacagatccattaggtacc

SEQ ID NO: 1000552 - DNA, 33 bp, Homo sapien
gctctggggtgcttcagagatccattaggtacc

SEQ ID NO: 1000553 - DNA, 33 bp, Homo sapien
ttttggactcattggccgataataacaggaagc

SEQ ID NO: 1000554 - DNA, 33 bp, Homo sapien
ttttggactcattggctgataataacaggaagc

SEQ ID NO: 1000555 - DNA, 33 bp, Homo sapien
aagtatcaacttccagaaatttgttttcaagta

SEQ ID NO: 1000556 - DNA, 33 bp, Homo sapien
aagtatcaacttccaggaatttgttttcaagta

SEQ ID NO: 1000557 - DNA, 33 bp, Homo sapien
tctttgttttcagaaactctctgttaatctcct

SEQ ID NO: 1000558 - DNA, 33 bp, Homo sapien
tctttgttttcagaaagtctctgttaatctcct

SEQ ID NO: 1000559 - DNA, 33 bp, Homo sapien
tttctgaaaacaaagacaggtatgacagacttt

SEQ ID NO: 1000560 - DNA, 33 bp, Homo sapien
tttctgaaaacaaagagaggtatgacagacttt

SEQ ID NO: 1000561 - DNA, 33 bp, Homo sapien
attaacaggttgatagacatttgcattatttca

SEQ ID NO: 1000562 - DNA, 33 bp, Homo sapien
attaacaggttgataggcatttgcattatttca

SEQ ID NO: 1000563 - DNA, 33 bp, Homo sapien
agaaagaaatctaaaactgtatagctggagaat

SEQ ID NO: 1000564 - DNA, 33 bp, Homo sapien
agaaagaaatctaaaagtgtatagctggagaat

SEQ ID NO: 1000565 - DNA, 33 bp, Homo sapien
atgtttagattgaaaccatcaactcttccagga

SEQ ID NO: 1000566 - DNA, 33 bp, Homo sapien
atgtttagattgaaactatcaactcttccagga

SEQ ID NO: 1000567 - DNA, 33 bp, Homo sapien
gcttatctttgtcagtcaaaagaaagtttgctg

SEQ ID NO: 1000568 - DNA, 33 bp, Homo sapien
gcttatctttgtcagtgaaaagaaagtttgctg

SEQ ID NO: 1000569 - DNA, 33 bp, Homo sapien
gtggtgagagttgtccaatttggtcaagcagga

SEQ ID NO: 1000570 - DNA, 33 bp, Homo sapien
gtggtgagagttgtcccatttggtcaagcagga

SEQ ID NO: 1000571 - DNA, 33 bp, Homo sapien
aaaaacagagtgaagacaaaacatttgtacatc

SEQ ID NO: 1000572 - DNA, 33 bp, Homo sapien
aaaaacagagtgaagagaaaacatttgtacatc

SEQ ID NO: 1000573 - DNA, 33 bp, Homo sapien
gaggcagagaagaaccaagagacagttgaagga

SEQ ID NO: 1000574 - DNA, 33 bp, Homo sapien
gaggcagagaagaaccgagagacagttgaagga

SEQ ID NO: 1000575 - DNA, 33 bp, Homo sapien
aacattgtggtctacaaaagagaatcaatgaat

SEQ ID NO: 1000576 - DNA, 33 bp, Homo sapien
aacattgtggtctacataagagaatcaatgaat

SEQ ID NO: 1000577 - DNA, 33 bp, Homo sapien
tttgttgaatagagtacgctttctccattgaat

SEQ ID NO: 1000578 - DNA, 33 bp, Homo sapien
tttgttgaatagagtaggctttctccattgaat

SEQ ID NO: 1000579 - DNA, 33 bp, Homo sapien
aacatttgagttgtttccatattttagctattg

SEQ ID NO: 1000580 - DNA, 33 bp, Homo sapien
aacatttgagttgttttcatattttagctattg

SEQ ID NO: 1000581 - DNA, 33 bp, Homo sapien
agctgaagttcagaacactagaagcactagtct

SEQ ID NO: 1000582 - DNA, 33 bp, Homo sapien
agctgaagttcagaacgctagaagcactagtct

SEQ ID NO: 1000583 - DNA, 33 bp, Homo sapien
aaaggggtgaagaacaaagaataagagctgaag

SEQ ID NO: 1000584 - DNA, 33 bp, Homo sapien
aaaggggtgaagaacatagaataagagctgaag

SEQ ID NO: 1000585 - DNA, 33 bp, Homo sapien
gcctagataacagatgaacctttccactatgcc

SEQ ID NO: 1000586 - DNA, 33 bp, Homo sapien
gcctagataacagatggacctttccactatgcc

SEQ ID NO: 1000587 - DNA, 33 bp, Homo sapien
gcaagggctgtgaacacgggcatttgttcctag

SEQ ID NO: 1000588 - DNA, 33 bp, Homo sapien
gcaagggctgtgaacatgggcatttgttcctag

SEQ ID NO: 1000589 - DNA, 33 bp, Homo sapien
ttggagagaaaggtaacacagtgggtgagaata

SEQ ID NO: 1000590 - DNA, 33 bp, Homo sapien
ttggagagaaaggtaatacagtgggtgagaata

SEQ ID NO: 1000591 - DNA, 33 bp, Homo sapien
tttaagtagaagctgacgaaaatatctttctca

SEQ ID NO: 1000592 - DNA, 33 bp, Homo sapien
tttaagtagaagctgatgaaaatatctttctca

SEQ ID NO: 1000593 - DNA, 33 bp, Homo sapien
cccatagtgtctccacggagaaaaagatgagac

SEQ ID NO: 1000594 - DNA, 33 bp, Homo sapien
cccatagtgtctccactgagaaaaagatgagac

SEQ ID NO: 1000595 - DNA, 33 bp, Homo sapien
aaacataggtcaaaaaacagctccctaatgtgt

SEQ ID NO: 1000596 - DNA, 33 bp, Homo sapien
aaacataggtcaaaaagcagctccctaatgtgt

SEQ ID NO: 1000597 - DNA, 33 bp, Homo sapien
ccatgcattttagcaaaaagaaaagacatgagt

SEQ ID NO: 1000598 - DNA, 33 bp, Homo sapien
ccatgcattttagcaacaagaaaagacatgagt

SEQ ID NO: 1000599 - DNA, 33 bp, Homo sapien
cataaagatcttaatcacactcatttatgctta

SEQ ID NO: 1000600 - DNA, 33 bp, Homo sapien
cataaagatcttaatcccactcatttatgctta

SEQ ID NO: 1000601 - DNA, 33 bp, Homo sapien
tttcaaaattggttgaaactacacattaaacct

SEQ ID NO: 1000602 - DNA, 33 bp, Homo sapien
tttcaaaattggttgatactacacattaaacct

SEQ ID NO: 1000603 - DNA, 33 bp, Homo sapien
aaatatacattgctcaataacaccccaaatttt

SEQ ID NO: 1000604 - DNA, 33 bp, Homo sapien
aaatatacattgctcagtaacaccccaaatttt

SEQ ID NO: 1000605 - DNA, 33 bp, Homo sapien
tgcaaatgtaggccacacaattaatgggaaata

SEQ ID NO: 1000606 - DNA, 33 bp, Homo sapien
tgcaaatgtaggccacgcaattaatgggaaata

SEQ ID NO: 1000607 - DNA, 33 bp, Homo sapien
gatacaaattcattgtcacaaggcatttagtag

SEQ ID NO: 1000608 - DNA, 33 bp, Homo sapien
gatacaaattcattgtgacaaggcatttagtag

SEQ ID NO: 1000609 - DNA, 33 bp, Homo sapien
agaagaatcggatcacacatgacctcggagaat

SEQ ID NO: 1000610 - DNA, 33 bp, Homo sapien
agaagaatcggatcacgcatgacctcggagaat

SEQ ID NO: 1000611 - DNA, 33 bp, Homo sapien
ttcttctggtacaccaaggcatacggaaagccc

SEQ ID NO: 1000612 - DNA, 33 bp, Homo sapien
ttcttctggtacaccacggcatacggaaagccc

SEQ ID NO: 1000613 - DNA, 33 bp, Homo sapien
gaacttggaatttttgaaaatgcagattgggaa

SEQ ID NO: 1000614 - DNA, 33 bp, Homo sapien
gaacttggaatttttggaaatgcagattgggaa

SEQ ID NO: 1000615 - DNA, 33 bp, Homo sapien
agcactgagatggtcaatgacagaaactagctg

SEQ ID NO: 1000616 - DNA, 33 bp, Homo sapien
agcactgagatggtcagtgacagaaactagctg

SEQ ID NO: 1000617 - DNA, 33 bp, Homo sapien
ataccttcgaaaataacccctgacatgctacta

SEQ ID NO: 1000618 - DNA, 33 bp, Homo sapien
ataccttcgaaaataatccctgacatgctacta

SEQ ID NO: 1000619 - DNA, 33 bp, Homo sapien
accgcatttaaattcaccttatcggattgggct

SEQ ID NO: 1000620 - DNA, 33 bp, Homo sapien
accgcatttaaattcagcttatcggattgggct

SEQ ID NO: 1000621 - DNA, 33 bp, Homo sapien
cataactgaaactttacaccaattgaacaacaa

SEQ ID NO: 1000622 - DNA, 33 bp, Homo sapien
cataactgaaactttataccaattgaacaacaa

SEQ ID NO: 1000623 - DNA, 33 bp, Homo sapien
attgtactattttccccataaatggtctctttt

SEQ ID NO: 1000624 - DNA, 33 bp, Homo sapien
attgtactattttccctataaatggtctctttt

SEQ ID NO: 1000625 - DNA, 33 bp, Homo sapien
agatatgggtgtgtcaatcctccgtggcgcact

SEQ ID NO: 1000626 - DNA, 33 bp, Homo sapien
agatatgggtgtgtcagtcctccgtggcgcact

SEQ ID NO: 1000627 - DNA, 33 bp, Homo sapien
gcagctgagttttgacaacagaacatggtcaga

SEQ ID NO: 1000628 - DNA, 33 bp, Homo sapien
gcagctgagttttgactacagaacatggtcaga

SEQ ID NO: 1000629 - DNA, 33 bp, Homo sapien
ttgtcagatcttacaaagccaaatggtgtcatg

SEQ ID NO: 1000630 - DNA, 33 bp, Homo sapien
ttgtcagatcttacaaggccaaatggtgtcatg

SEQ ID NO: 1000631 - DNA, 33 bp, Homo sapien
tcatgaataaagtggccatgggtggcaaggatg

SEQ ID NO: 1000632 - DNA, 33 bp, Homo sapien
tcatgaataaagtggctatgggtggcaaggatg

SEQ ID NO: 1000633 - DNA, 33 bp, Homo sapien
aaaatgtcagaaccctaaagctcaaactctcat

SEQ ID NO: 1000634 - DNA, 33 bp, Homo sapien
aaaatgtcagaaccctgaagctcaaactctcat

SEQ ID NO: 1000635 - DNA, 33 bp, Homo sapien
caccttcttccatccaccttgcgatttctcttc

SEQ ID NO: 1000636 - DNA, 33 bp, Homo sapien
caccttcttccatccagcttgcgatttctcttc

SEQ ID NO: 1000637 - DNA, 33 bp, Homo sapien
atcaattttctcggatcaaatcagccaaatgcc

SEQ ID NO: 1000638 - DNA, 33 bp, Homo sapien
atcaattttctcggattaaatcagccaaatgcc

SEQ ID NO: 1000639 - DNA, 33 bp, Homo sapien
actgggctggtcatagcaggcaagatgactgac

SEQ ID NO: 1000640 - DNA, 33 bp, Homo sapien
actgggctggtcatagtaggcaagatgactgac

SEQ ID NO: 1000641 - DNA, 33 bp, Homo sapien
gaagttttgagtggaacagtgatctgagtgaat

SEQ ID NO: 1000642 - DNA, 33 bp, Homo sapien
gaagttttgagtggaagagtgatctgagtgaat

SEQ ID NO: 1000643 - DNA, 33 bp, Homo sapien
agctacacaaaagaaaaaagcctggtcatatat

SEQ ID NO: 1000644 - DNA, 33 bp, Homo sapien
agctacacaaaagaaagaagcctggtcatatat

SEQ ID NO: 1000645 - DNA, 33 bp, Homo sapien
gtctggtaagaacaaacatttccagaccacctg

SEQ ID NO: 1000646 - DNA, 33 bp, Homo sapien
gtctggtaagaacaaatatttccagaccacctg

SEQ ID NO: 1000647 - DNA, 33 bp, Homo sapien
ctgtggaggccaaatgcaggccacagggaattg

SEQ ID NO: 1000648 - DNA, 33 bp, Homo sapien
ctgtggaggccaaatggaggccacagggaattg

SEQ ID NO: 1000649 - DNA, 33 bp, Homo sapien
agctactcaggtaaatcaatgacaagtgagcct

SEQ ID NO: 1000650 - DNA, 33 bp, Homo sapien
agctactcaggtaaattaatgacaagtgagcct

SEQ ID NO: 1000651 - DNA, 33 bp, Homo sapien
aaacataggaaaagaactgaacaggctctttgc

SEQ ID NO: 1000652 - DNA, 33 bp, Homo sapien
aaacataggaaaagaattgaacaggctctttgc

SEQ ID NO: 1000653 - DNA, 33 bp, Homo sapien
aatgtaatgtctaaaaggatgaaaatgcacaca

SEQ ID NO: 1000654 - DNA, 33 bp, Homo sapien
aatgtaatgtctaaaatgatgaaaatgcacaca

SEQ ID NO: 1000655 - DNA, 33 bp, Homo sapien
gagaactgtaagatcaaagaaaattgttttgtg

SEQ ID NO: 1000656 - DNA, 33 bp, Homo sapien
gagaactgtaagatcagagaaaattgttttgtg

SEQ ID NO: 1000657 - DNA, 33 bp, Homo sapien
tttagggttttacatacattagatcaagtcatg

SEQ ID NO: 1000658 - DNA, 33 bp, Homo sapien
tttagggttttacatatattagatcaagtcatg

SEQ ID NO: 1000659 - DNA, 33 bp, Homo sapien
cctccctgtctgcaccacttttctttgtgtatc

SEQ ID NO: 1000660 - DNA, 33 bp, Homo sapien
cctccctgtctgcaccgcttttctttgtgtatc

SEQ ID NO: 1000661 - DNA, 33 bp, Homo sapien
ctgacacaccagatgcaaattgagcaccaacat

SEQ ID NO: 1000662 - DNA, 33 bp, Homo sapien
ctgacacaccagatgccaattgagcaccaacat

SEQ ID NO: 1000663 - DNA, 33 bp, Homo sapien
atttgtttatttggtacagcaacaatagaaaaa

SEQ ID NO: 1000664 - DNA, 33 bp, Homo sapien
atttgtttatttggtagagcaacaatagaaaaa

SEQ ID NO: 1000665 - DNA, 33 bp, Homo sapien
tattcttgagaatttccagtctcttatgccttg

SEQ ID NO: 1000666 - DNA, 33 bp, Homo sapien
tattcttgagaatttctagtctcttatgccttg

SEQ ID NO: 1000667 - DNA, 33 bp, Homo sapien
cagcatcagaatctaacaggaagtcagtgttct

SEQ ID NO: 1000668 - DNA, 33 bp, Homo sapien
cagcatcagaatctaagaggaagtcagtgttct

SEQ ID NO: 1000669 - DNA, 33 bp, Homo sapien
ctaggctcttgacaacggaccctacttctatcc

SEQ ID NO: 1000670 - DNA, 33 bp, Homo sapien
ctaggctcttgacaactgaccctacttctatcc

SEQ ID NO: 1000671 - DNA, 33 bp, Homo sapien
ctgctgtagaaggaagacaggattatcaggacc

SEQ ID NO: 1000672 - DNA, 33 bp, Homo sapien
ctgctgtagaaggaagtcaggattatcaggacc

SEQ ID NO: 1000673 - DNA, 33 bp, Homo sapien
caaagctccattctcaactgtcattatttggcc

SEQ ID NO: 1000674 - DNA, 33 bp, Homo sapien
caaagctccattctcacctgtcattatttggcc

SEQ ID NO: 1000675 - DNA, 33 bp, Homo sapien; identical to SEQ ID NO: 1000673

SEQ ID NO: 1000676 - DNA, 33 bp, Homo sapien; identical to SEQ ID NO: 1000674

SEQ ID NO: 1000677 - DNA, 33 bp, Homo sapien
cagctttgttgctggcaagaggctatgttcctt

SEQ ID NO: 1000678 - DNA, 33 bp, Homo sapien
cagctttgttgctggcgagaggctatgttcctt

SEQ ID NO: 1000679 - DNA, 33 bp, Homo sapien
gaactcacaaaactcaataataaacagacaaat

SEQ ID NO: 1000680 - DNA, 33 bp, Homo sapien
gaactcacaaaactcagtaataaacagacaaat

SEQ ID NO: 1000681 - DNA, 33 bp, Homo sapien
tatgcttgacctttcacagaagtggaatcatac

SEQ ID NO: 1000682 - DNA, 33 bp, Homo sapien
tatgcttgacctttcatagaagtggaatcatac

SEQ ID NO: 1000683 - DNA, 33 bp, Homo sapien
tgtaaagatacatcccagaatacccatgtgaga

SEQ ID NO: 1000684 - DNA, 33 bp, Homo sapien
tgtaaagatacatcccggaatacccatgtgaga

SEQ ID NO: 1000685 - DNA, 33 bp, Homo sapien
gcctgaagtagtaagtaaaaatagaatggtagc

SEQ ID NO: 1000686 - DNA, 33 bp, Homo sapien
gcctgaagtagtaagtgaaaatagaatggtagc

SEQ ID NO: 1000687 - DNA, 33 bp, Homo sapien
aatatgcagagaaaatcagtgagtgagtaaggt

SEQ ID NO: 1000688 - DNA, 33 bp, Homo sapien
aatatgcagagaaaattagtgagtgagtaaggt

SEQ ID NO: 1000689 - DNA, 33 bp, Homo sapien
tgacacagcttttaaaacttttattctataagt

SEQ ID NO: 1000690 - DNA, 33 bp, Homo sapien
tgacacagcttttaaatcttttattctataagt

SEQ ID NO: 1000691 - DNA, 33 bp, Homo sapien
taaaagctgtgtcaaccattcaacagttaacat

SEQ ID NO: 1000692 - DNA, 33 bp, Homo sapien
taaaagctgtgtcaactattcaacagttaacat

SEQ ID NO: 1000693 - DNA, 33 bp, Homo sapien
ttgcaaggttcatgcactctgtaacatgaatta

SEQ ID NO: 1000694 - DNA, 33 bp, Homo sapien
ttgcaaggttcatgcattctgtaacatgaatta

SEQ ID NO: 1000695 - DNA, 33 bp, Homo sapien
gacttctactccccagccataggcaaccactaa

SEQ ID NO: 1000696 - DNA, 33 bp, Homo sapien
gacttctactccccagtcataggcaaccactaa

SEQ ID NO: 1000697 - DNA, 33 bp, Homo sapien
attaaggatacagggcacttgtaaatcaaggga

SEQ ID NO: 1000698 - DNA, 33 bp, Homo sapien
attaaggatacagggcgcttgtaaatcaaggga

SEQ ID NO: 1000699 - DNA, 33 bp, Homo sapien
tctccacagctagaatcactttataggccaagt

SEQ ID NO: 1000700 - DNA, 33 bp, Homo sapien
tctccacagctagaatgactttataggccaagt

SEQ ID NO: 1000701 - DNA, 33 bp, Homo sapien
aagttgggccagtttccgattccttttcctcat

SEQ ID NO: 1000702 - DNA, 33 bp, Homo sapien
aagttgggccagtttctgattccttttcctcat

SEQ ID NO: 1000703 - DNA, 33 bp, Homo sapien
tgacacatacccaaagcctctcagcagaagttt

SEQ ID NO: 1000704 - DNA, 33 bp, Homo sapien
tgacacatacccaaaggctctcagcagaagttt

SEQ ID NO: 1000705 - DNA, 33 bp, Homo sapien
accctagaaagcatgcgccattctgagttttat

SEQ ID NO: 1000706 - DNA, 33 bp, Homo sapien
accctagaaagcatgctccattctgagttttat

SEQ ID NO: 1000707 - DNA, 33 bp, Homo sapien
cctcttcatcccaggagattgcattctcagcac

SEQ ID NO: 1000708 - DNA, 33 bp, Homo sapien
cctcttcatcccaggatattgcattctcagcac

SEQ ID NO: 1000709 - DNA, 33 bp, Homo sapien
atcagaaacagcatttaaaaaaatcccacagta

SEQ ID NO: 1000710 - DNA, 33 bp, Homo sapien
atcagaaacagcattttaaaaaatcccacagta

SEQ ID NO: 1000711 - DNA, 33 bp, Homo sapien
attcttgaaatgaaaaattacagagatggagaa

SEQ ID NO: 1000712 - DNA, 33 bp, Homo sapien
attcttgaaatgaaaagttacagagatggagaa

SEQ ID NO: 1000713 - DNA, 33 bp, Homo sapien
atttaagattcctccaggttttgtcacttgata

SEQ ID NO: 1000714 - DNA, 33 bp, Homo sapien
atttaagattcctccatgttttgtcacttgata

SEQ ID NO: 1000715 - DNA, 33 bp, Homo sapien
gagataccaacatttgcagagactttctcagtt

SEQ ID NO: 1000716 - DNA, 33 bp, Homo sapien
gagataccaacatttgtagagactttctcagtt

SEQ ID NO: 1000717 - DNA, 33 bp, Homo sapien
gaatgtgactattactaaggaattactgcacaa

SEQ ID NO: 1000718 - DNA, 33 bp, Homo sapien
gaatgtgactattactgaggaattactgcacaa

SEQ ID NO: 1000719 - DNA, 33 bp, Homo sapien
atttcacggagacaacaagttgacctgccagcg

SEQ ID NO: 1000720 - DNA, 33 bp, Homo sapien
atttcacggagacaaccagttgacctgccagcg

SEQ ID NO: 1000721 - DNA, 33 bp, Homo sapien
ctttcaacaattttggcattagcaaagtctact

SEQ ID NO: 1000722 - DNA, 33 bp, Homo sapien
ctttcaacaattttggtattagcaaagtctact

SEQ ID NO: 1000723 - DNA, 33 bp, Homo sapien
tttcattcagtggccaactcttgtaagcaagca

SEQ ID NO: 1000724 - DNA, 33 bp, Homo sapien
tttcattcagtggccatctcttgtaagcaagca

SEQ ID NO: 1000725 - DNA, 33 bp, Homo sapien
ttcgcaaattcacttaaaaacatagccagttaa

SEQ ID NO: 1000726 - DNA, 33 bp, Homo sapien
ttcgcaaattcacttacaaacatagccagttaa

SEQ ID NO: 1000727 - DNA, 33 bp, Homo sapien
ttatgtgccaagcaccagactaagtacttttca

SEQ ID NO: 1000728 - DNA, 33 bp, Homo sapien
ttatgtgccaagcaccggactaagtacttttca

SEQ ID NO: 1000729 - DNA, 33 bp, Homo sapien
gaggaattgatactaagacctctgtaaactagg

SEQ ID NO: 1000730 - DNA, 33 bp, Homo sapien
gaggaattgatactaatacctctgtaaactagg

SEQ ID NO: 1000731 - DNA, 33 bp, Homo sapien
gtgtgaacatacagagccctggccctattcaca

SEQ ID NO: 1000732 - DNA, 33 bp, Homo sapien
gtgtgaacatacagagtcctggccctattcaca

SEQ ID NO: 1000733 - DNA, 33 bp, Homo sapien
ggggttttcagatggaagaggtcatatataaac

SEQ ID NO: 1000734 - DNA, 33 bp, Homo sapien
ggggttttcagatggatgaggtcatatataaac

SEQ ID NO: 1000735 - DNA, 33 bp, Homo sapien
gggcttattttatgcaaaaccgtataaactcat

SEQ ID NO: 1000736 - DNA, 33 bp, Homo sapien
gggcttattttatgcagaaccgtataaactcat

SEQ ID NO: 1000737 - DNA, 33 bp, Homo sapien
tactttgtgccatacacctaaaaatcattttat

SEQ ID NO: 1000738 - DNA, 33 bp, Homo sapien
tactttgtgccatacagctaaaaatcattttat

SEQ ID NO: 1000739 - DNA, 33 bp, Homo sapien
tattttcctaatgaacagtcacgttgaacatct

SEQ ID NO: 1000740 - DNA, 33 bp, Homo sapien
tattttcctaatgaacggtcacgttgaacatct

SEQ ID NO: 1000741 - DNA, 33 bp, Homo sapien
gtggcatgaaacaaaacctctcctgtgtttcaa

SEQ ID NO: 1000742 - DNA, 33 bp, Homo sapien
gtggcatgaaacaaaatctctcctgtgtttcaa

SEQ ID NO: 1000743 - DNA, 33 bp, Homo sapien
cccaacctctgccccaatgacatatttgctcat

SEQ ID NO: 1000744 - DNA, 33 bp, Homo sapien
cccaacctctgccccagtgacatatttgctcat

SEQ ID NO: 1000745 - DNA, 33 bp, Homo sapien
caatgaagcctttggaactccatgttcaagagc

SEQ ID NO: 1000746 - DNA, 33 bp, Homo sapien
caatgaagcctttggacctccatgttcaagagc

SEQ ID NO: 1000747 - DNA, 33 bp, Homo sapien
cccctgcatccatccaataaaaggagaaagcaa

SEQ ID NO: 1000748 - DNA, 33 bp, Homo sapien
cccctgcatccatccagtaaaaggagaaagcaa

SEQ ID NO: 1000749 - DNA, 33 bp, Homo sapien
cagtaagatgttggctcagaagaatgctttgtg

SEQ ID NO: 1000750 - DNA, 33 bp, Homo sapien
cagtaagatgttggctgagaagaatgctttgtg

SEQ ID NO: 1000751 - DNA, 33 bp, Homo sapien
tgaaaggcattcatagccaacatgcccccaaat

SEQ ID NO: 1000752 - DNA, 33 bp, Homo sapien
tgaaaggcattcatagtcaacatgcccccaaat

SEQ ID NO: 1000753 - DNA, 33 bp, Homo sapien
gtccatagcagatcaaaaatggaatagaatatg

SEQ ID NO: 1000754 - DNA, 33 bp, Homo sapien
gtccatagcagatcaagaatggaatagaatatg

SEQ ID NO: 1000755 - DNA, 33 bp, Homo sapien
tattaagagaatagcacattgtgggtaatattt

SEQ ID NO: 1000756 - DNA, 33 bp, Homo sapien
tattaagagaatagcagattgtgggtaatattt

SEQ ID NO: 1000757 - DNA, 33 bp, Homo sapien
ataatgactgttgacactggaacagcaaacatt

SEQ ID NO: 1000758 - DNA, 33 bp, Homo sapien
ataatgactgttgacattggaacagcaaacatt

SEQ ID NO: 1000759 - DNA, 33 bp, Homo sapien
ccaaattgaaagccacactatataatgactgtt

SEQ ID NO: 1000760 - DNA, 33 bp, Homo sapien
ccaaattgaaagccacgctatataatgactgtt

SEQ ID NO: 1000761 - DNA, 33 bp, Homo sapien
gctgtaggagcaaagcaactgaggaatcctcac

SEQ ID NO: 1000762 - DNA, 33 bp, Homo sapien
gctgtaggagcaaagccactgaggaatcctcac

SEQ ID NO: 1000763 - DNA, 33 bp, Homo sapien
ccaagttctctcttcaagtaaagaattttgctc

SEQ ID NO: 1000764 - DNA, 33 bp, Homo sapien
ccaagttctctcttcaggtaaagaattttgctc

SEQ ID NO: 1000765 - DNA, 33 bp, Homo sapien
ggaatagctgcttcctaaatgtaaatgaagatg

SEQ ID NO: 1000766 - DNA, 33 bp, Homo sapien
ggaatagctgcttcctgaatgtaaatgaagatg

SEQ ID NO: 1000767 - DNA, 33 bp, Homo sapien
ggggaaacatgtaaaaagatggtgagtaggaca

SEQ ID NO: 1000768 - DNA, 33 bp, Homo sapien
ggggaaacatgtaaaaggatggtgagtaggaca

SEQ ID NO: 1000769 - DNA, 33 bp, Homo sapien
gatctcctgggtgccaaacatattcttgcctgc

SEQ ID NO: 1000770 - DNA, 33 bp, Homo sapien
gatctcctgggtgccagacatattcttgcctgc

SEQ ID NO: 1000771 - DNA, 33 bp, Homo sapien
cagtctccaggacacaacagataatttgaacta

SEQ ID NO: 1000772 - DNA, 33 bp, Homo sapien
cagtctccaggacacagcagataatttgaacta

SEQ ID NO: 1000773 - DNA, 33 bp, Homo sapien
gcccctatgaacagctcactgaggaaaaaagga

SEQ ID NO: 1000774 - DNA, 33 bp, Homo sapien
gcccctatgaacagctgactgaggaaaaaagga

SEQ ID NO: 1000775 - DNA, 33 bp, Homo sapien
ttctttgtggtaggaaaagtataatgaaataat

SEQ ID NO: 1000776 - DNA, 33 bp, Homo sapien
ttctttgtggtaggaagagtataatgaaataat

SEQ ID NO: 1000777 - DNA, 33 bp, Homo sapien
ctctcttctcctgcaacggaacggcagagaatg

SEQ ID NO: 1000778 - DNA, 33 bp, Homo sapien
ctctcttctcctgcaatggaacggcagagaatg

SEQ ID NO: 1000779 - DNA, 33 bp, Homo sapien
agacaggattagtaaactgaaagacagatcaac

SEQ ID NO: 1000780 - DNA, 33 bp, Homo sapien
agacaggattagtaaagtgaaagacagatcaac

SEQ ID NO: 1000781 - DNA, 33 bp, Homo sapien
ttcattatatgggttaaacaccaaatgagtgta

SEQ ID NO: 1000782 - DNA, 33 bp, Homo sapien
ttcattatatgggttagacaccaaatgagtgta

SEQ ID NO: 1000783 - DNA, 33 bp, Homo sapien
actctatctacctgaccaaagataagaccaata

SEQ ID NO: 1000784 - DNA, 33 bp, Homo sapien
actctatctacctgacgaaagataagaccaata

SEQ ID NO: 1000785 - DNA, 33 bp, Homo sapien
gcacacagtgaagtgaagtctatgtatcagtag

SEQ ID NO: 1000786 - DNA, 33 bp, Homo sapien
gcacacagtgaagtgatgtctatgtatcagtag

SEQ ID NO: 1000787 - DNA, 33 bp, Homo sapien
gtcctttgtctttactaaaagcttctgccactc

SEQ ID NO: 1000788 - DNA, 33 bp, Homo sapien
gtcctttgtctttactgaaagcttctgccactc

SEQ ID NO: 1000789 - DNA, 33 bp, Homo sapien
aggggtgaaagagatacaaaatagaagagaaaa

SEQ ID NO: 1000790 - DNA, 33 bp, Homo sapien
aggggtgaaagagatagaaaatagaagagaaaa

SEQ ID NO: 1000791 - DNA, 33 bp, Homo sapien
aaacctgacaccactaaatctcttccccttata

SEQ ID NO: 1000792 - DNA, 33 bp, Homo sapien
aaacctgacaccactatatctcttccccttata

SEQ ID NO: 1000793 - DNA, 33 bp, Homo sapien
ggtgttcataacttgtgaatggctgatatagca

SEQ ID NO: 1000794 - DNA, 33 bp, Homo sapien
ggtgttcataacttgttaatggctgatatagca

SEQ ID NO: 1000795 - DNA, 33 bp, Homo sapien
taaactgtgcaatttaccatgcctcactttgca

SEQ ID NO: 1000796 - DNA, 33 bp, Homo sapien
taaactgtgcaatttagcatgcctcactttgca

SEQ ID NO: 1000797 - DNA, 33 bp, Homo sapien
ggtttaggtcagtgtgaagtcgtccagatgctg

SEQ ID NO: 1000798 - DNA, 33 bp, Homo sapien
ggtttaggtcagtgtggagtcgtccagatgctg

SEQ ID NO: 1000799 - DNA, 33 bp, Homo sapien
gaatccgtctagagacacttgaaatgagatgct

SEQ ID NO: 1000800 - DNA, 33 bp, Homo sapien
gaatccgtctagagacccttgaaatgagatgct

SEQ ID NO: 1000801 - DNA, 33 bp, Homo sapien
aactaagagtcaggcaccattttaagtctgata

SEQ ID NO: 1000802 - DNA, 33 bp, Homo sapien
aactaagagtcaggcagcattttaagtctgata

SEQ ID NO: 1000803 - DNA, 33 bp, Homo sapien
ttgaattagtttaaatcagttccagaagactta

SEQ ID NO: 1000804 - DNA, 33 bp, Homo sapien
ttgaattagtttaaatgagttccagaagactta

SEQ ID NO: 1000805 - DNA, 33 bp, Homo sapien
atttgatccattcagtcaaacaactaattcccc

SEQ ID NO: 1000806 - DNA, 33 bp, Homo sapien
atttgatccattcagtgaaacaactaattcccc

SEQ ID NO: 1000807 - DNA, 33 bp, Homo sapien
ctcaagaggctacctacacaggttgtggcagga

SEQ ID NO: 1000808 - DNA, 33 bp, Homo sapien
ctcaagaggctacctatacaggttgtggcagga

SEQ ID NO: 1000809 - DNA, 33 bp, Homo sapien
tctttttgtttttcacaattttgattctcccct

SEQ ID NO: 1000810 - DNA, 33 bp, Homo sapien
tctttttgtttttcacgattttgattctcccct

SEQ ID NO: 1000811 - DNA, 33 bp, Homo sapien
tatggcaggatgacctcaaaccattcaacacag

SEQ ID NO: 1000812 - DNA, 33 bp, Homo sapien
tatggcaggatgaccttaaaccattcaacacag

SEQ ID NO: 1000813 - DNA, 33 bp, Homo sapien
accattcaacacaggagcatgctaccacataat

SEQ ID NO: 1000814 - DNA, 33 bp, Homo sapien
accattcaacacaggatcatgctaccacataat

SEQ ID NO: 1000815 - DNA, 33 bp, Homo sapien
cccaatgtactttatccaatacctataatgaaa

SEQ ID NO: 1000816 - DNA, 33 bp, Homo sapien
cccaatgtactttatctaatacctataatgaaa

SEQ ID NO: 1000817 - DNA, 33 bp, Homo sapien
acagatgtcactcaccagagagtttgaattgag

SEQ ID NO: 1000818 - DNA, 33 bp, Homo sapien
acagatgtcactcaccggagagtttgaattgag

SEQ ID NO: 1000819 - DNA, 33 bp, Homo sapien
ccattcctggctgacgcaagaataggaatttag

SEQ ID NO: 1000820 - DNA, 33 bp, Homo sapien
ccattcctggctgacgtaagaataggaatttag

SEQ ID NO: 1000821 - DNA, 33 bp, Homo sapien
tctcttatgccaccataaactagagctgtgggt

SEQ ID NO: 1000822 - DNA, 33 bp, Homo sapien
tctcttatgccaccatgaactagagctgtgggt

SEQ ID NO: 1000823 - DNA, 33 bp, Homo sapien
gtgctaagacactttacccatatatcttaactg

SEQ ID NO: 1000824 - DNA, 33 bp, Homo sapien
gtgctaagacactttatccatatatcttaactg

SEQ ID NO: 1000825 - DNA, 33 bp, Homo sapien
tatgaaaaaacaatgcaactcaaaattgagaaa

SEQ ID NO: 1000826 - DNA, 33 bp, Homo sapien
tatgaaaaaacaatgccactcaaaattgagaaa

SEQ ID NO: 1000827 - DNA, 33 bp, Homo sapien
caatggacagcactagaaaatgagcaaaatatg

SEQ ID NO: 1000828 - DNA, 33 bp, Homo sapien
caatggacagcactaggaaatgagcaaaatatg

SEQ ID NO: 1000829 - DNA, 33 bp, Homo sapien
ctttcctagttagcacacatacagcttatcttc

SEQ ID NO: 1000830 - DNA, 33 bp, Homo sapien
ctttcctagttagcacgcatacagcttatcttc

SEQ ID NO: 1000831 - DNA, 33 bp, Homo sapien
tttctgaacactttcactccctagttacacagg

SEQ ID NO: 1000832 - DNA, 33 bp, Homo sapien
tttctgaacactttcattccctagttacacagg

SEQ ID NO: 1000833 - DNA, 33 bp, Homo sapien
gcccatcacagtatcacatttgctcctactaca

SEQ ID NO: 1000834 - DNA, 33 bp, Homo sapien
gcccatcacagtatcagatttgctcctactaca

SEQ ID NO: 1000835 - DNA, 33 bp, Homo sapien
caatgtgccaagataaccactgtctaggagagc

SEQ ID NO: 1000836 - DNA, 33 bp, Homo sapien
caatgtgccaagataatcactgtctaggagagc

SEQ ID NO: 1000837 - DNA, 33 bp, Homo sapien
cttggcacattgccacggtcaagagcgacacct

SEQ ID NO: 1000838 - DNA, 33 bp, Homo sapien
cttggcacattgccactgtcaagagcgacacct

SEQ ID NO: 1000839 - DNA, 33 bp, Homo sapien
ttgaatcagagagtatcaggtgaagaaaaatga

SEQ ID NO: 1000840 - DNA, 33 bp, Homo sapien
ttgaatcagagagtattaggtgaagaaaaatga

SEQ ID NO: 1000841 - DNA, 33 bp, Homo sapien
ccatactctaaaaaaactgcaaatggaactgca

SEQ ID NO: 1000842 - DNA, 33 bp, Homo sapien
ccatactctaaaaaaattgcaaatggaactgca

SEQ ID NO: 1000843 - DNA, 33 bp, Homo sapien
gatttctcacttatgaaatgcagtaattgccag

SEQ ID NO: 1000844 - DNA, 33 bp, Homo sapien
gatttctcacttatgagatgcagtaattgccag

SEQ ID NO: 1000845 - DNA, 33 bp, Homo sapien
atataaattgtttcatgaggtccttacagataa

SEQ ID NO: 1000846 - DNA, 33 bp, Homo sapien
atataaattgtttcattaggtccttacagataa

SEQ ID NO: 1000847 - DNA, 33 bp, Homo sapien
aagggtacaaaaagccaacattgaattctagga

SEQ ID NO: 1000848 - DNA, 33 bp, Homo sapien
aagggtacaaaaagccgacattgaattctagga

SEQ ID NO: 1000849 - DNA, 33 bp, Homo sapien
gagattattgctgccacatcttttttacagata

SEQ ID NO: 1000850 - DNA, 33 bp, Homo sapien
gagattattgctgccatatcttttttacagata

SEQ ID NO: 1000851 - DNA, 33 bp, Homo sapien
gaagcagcaacgcaaacacaagctcttctgaag

SEQ ID NO: 1000852 - DNA, 33 bp, Homo sapien
gaagcagcaacgcaaagacaagctcttctgaag

SEQ ID NO: 1000853 - DNA, 33 bp, Homo sapien
aaaatctgaagaagaggagtattgtgtgatgtg

SEQ ID NO: 1000854 - DNA, 33 bp, Homo sapien
aaaatctgaagaagagtagtattgtgtgatgtg

SEQ ID NO: 1000855 - DNA, 33 bp, Homo sapien
gaattcgctaagaaaacggagaagatttcagaa

SEQ ID NO: 1000856 - DNA, 33 bp, Homo sapien
gaattcgctaagaaaatggagaagatttcagaa

SEQ ID NO: 1000857 - DNA, 33 bp, Homo sapien
ccgactaaagcacttacgaattcgctaagaaaa

SEQ ID NO: 1000858 - DNA, 33 bp, Homo sapien
ccgactaaagcacttatgaattcgctaagaaaa

SEQ ID NO: 1000859 - DNA, 33 bp, Homo sapien
tcaaccctctttcacaagcattctctccaaaat

SEQ ID NO: 1000860 - DNA, 33 bp, Homo sapien
tcaaccctctttcacaggcattctctccaaaat

SEQ ID NO: 1000861 - DNA, 33 bp, Homo sapien
tgaccttatcacctataaactgtgtgacctatt

SEQ ID NO: 1000862 - DNA, 33 bp, Homo sapien
tgaccttatcacctatcaactgtgtgacctatt

SEQ ID NO: 1000863 - DNA, 33 bp, Homo sapien
ttcattataccattgaaaagtgtgttacttcgc

SEQ ID NO: 1000864 - DNA, 33 bp, Homo sapien
ttcattataccattgagaagtgtgttacttcgc

SEQ ID NO: 1000865 - DNA, 33 bp, Homo sapien
gtttaggtgtacaaaaaccaggataccaaaaag

SEQ ID NO: 1000866 - DNA, 33 bp, Homo sapien
gtttaggtgtacaaaacccaggataccaaaaag

SEQ ID NO: 1000867 - DNA, 33 bp, Homo sapien
ctctgactcctaatcccatgccttttgaatcac

SEQ ID NO: 1000868 - DNA, 33 bp, Homo sapien
ctctgactcctaatcctatgccttttgaatcac

SEQ ID NO: 1000869 - DNA, 33 bp, Homo sapien
tatcataatcattcccaatttactggccaatac

SEQ ID NO: 1000870 - DNA, 33 bp, Homo sapien
tatcataatcattccctatttactggccaatac

SEQ ID NO: 1000871 - DNA, 33 bp, Homo sapien
attcctgaacctactcaatttctttcctttttc

SEQ ID NO: 1000872 - DNA, 33 bp, Homo sapien
attcctgaacctactctatttctttcctttttc

SEQ ID NO: 1000873 - DNA, 33 bp, Homo sapien
aacaaaattataaacacagtggataggatagat

SEQ ID NO: 1000874 - DNA, 33 bp, Homo sapien
aacaaaattataaacagagtggataggatagat

SEQ ID NO: 1000875 - DNA, 33 bp, Homo sapien
caaggggaagatggaacagaaagagggcttgta

SEQ ID NO: 1000876 - DNA, 33 bp, Homo sapien
caaggggaagatggaagagaaagagggcttgta

SEQ ID NO: 1000877 - DNA, 33 bp, Homo sapien
tcttctgttttaacacacaatactgtatccatc

SEQ ID NO: 1000878 - DNA, 33 bp, Homo sapien
tcttctgttttaacacccaatactgtatccatc

SEQ ID NO: 1000879 - DNA, 33 bp, Homo sapien
tctgcagctgtttctccaccccagacattaacc

SEQ ID NO: 1000880 - DNA, 33 bp, Homo sapien
tctgcagctgtttctctaccccagacattaacc

SEQ ID NO: 1000881 - DNA, 33 bp, Homo sapien
tttcagggatcataaaagcctggatagctcagg

SEQ ID NO: 1000882 - DNA, 33 bp, Homo sapien
tttcagggatcataaaggcctggatagctcagg

SEQ ID NO: 1000883 - DNA, 33 bp, Homo sapien
gaagtataataccaggaactataatagaattca

SEQ ID NO: 1000884 - DNA, 33 bp, Homo sapien
gaagtataataccagggactataatagaattca

SEQ ID NO: 1000885 - DNA, 33 bp, Homo sapien
tctttttaatgagaaaccaatggaagcattttt

SEQ ID NO: 1000886 - DNA, 33 bp, Homo sapien
tctttttaatgagaaatcaatggaagcattttt

SEQ ID NO: 1000887 - DNA, 33 bp, Homo sapien
caccttagtcacaactcactctcttctccacct

SEQ ID NO: 1000888 - DNA, 33 bp, Homo sapien
caccttagtcacaactgactctcttctccacct

SEQ ID NO: 1000889 - DNA, 33 bp, Homo sapien
cgcacagaactggcacacattgaccaaatgaca

SEQ ID NO: 1000890 - DNA, 33 bp, Homo sapien
cgcacagaactggcacgcattgaccaaatgaca

SEQ ID NO: 1000891 - DNA, 33 bp, Homo sapien
ttggaatactttgaaacgaccatctgggctctc

SEQ ID NO: 1000892 - DNA, 33 bp, Homo sapien
ttggaatactttgaaatgaccatctgggctctc

SEQ ID NO: 1000893 - DNA, 33 bp, Homo sapien
acatccaatgatgtgagtaggagaagcagacaa

SEQ ID NO: 1000894 - DNA, 33 bp, Homo sapien
acatccaatgatgtgattaggagaagcagacaa

SEQ ID NO: 1000895 - DNA, 33 bp, Homo sapien
gatgatctgggaagaaaaatttcattggagcac

SEQ ID NO: 1000896 - DNA, 33 bp, Homo sapien
gatgatctgggaagaacaatttcattggagcac

SEQ ID NO: 1000897 - DNA, 33 bp, Homo sapien
aaatttagagcaaactcagagtggtaattcaat

SEQ ID NO: 1000898 - DNA, 33 bp, Homo sapien
aaatttagagcaaactgagagtggtaattcaat

SEQ ID NO: 1000899 - DNA, 33 bp, Homo sapien
tttctgctaacagagaaaaagcagctttcagcg

SEQ ID NO: 1000900 - DNA, 33 bp, Homo sapien
tttctgctaacagagacaaagcagctttcagcg

SEQ ID NO: 1000901 - DNA, 33 bp, Homo sapien
tagttccagggtataggagatgactccccagat

SEQ ID NO: 1000902 - DNA, 33 bp, Homo sapien
tagttccagggtatagtagatgactccccagat

SEQ ID NO: 1000903 - DNA, 33 bp, Homo sapien
ctctccaccatacctacagccacctgtgataga

SEQ ID NO: 1000904 - DNA, 33 bp, Homo sapien
ctctccaccatacctatagccacctgtgataga

SEQ ID NO: 1000905 - DNA, 33 bp, Homo sapien
tagccctgtagctcaactggtatgtcacacagg

SEQ ID NO: 1000906 - DNA, 33 bp, Homo sapien
tagccctgtagctcaattggtatgtcacacagg

SEQ ID NO: 1000907 - DNA, 33 bp, Homo sapien
gtatattcttcactgccataatccagccaggtt

SEQ ID NO: 1000908 - DNA, 33 bp, Homo sapien
gtatattcttcactgcgataatccagccaggtt

SEQ ID NO: 1000909 - DNA, 33 bp, Homo sapien
agagaacggtggttaccaggaactgcagggagg

SEQ ID NO: 1000910 - DNA, 33 bp, Homo sapien
agagaacggtggttacgaggaactgcagggagg

SEQ ID NO: 1000911 - DNA, 33 bp, Homo sapien
gagtaattttcaacaccatccttccaaaagtac

SEQ ID NO: 1000912 - DNA, 33 bp, Homo sapien
gagtaattttcaacactatccttccaaaagtac

SEQ ID NO: 1000913 - DNA, 33 bp, Homo sapien
tttgccgaggctgtccaacttcctcaaattcta

SEQ ID NO: 1000914 - DNA, 33 bp, Homo sapien
tttgccgaggctgtcccacttcctcaaattcta

SEQ ID NO: 1000915 - DNA, 33 bp, Homo sapien
ctgcttcttcctggtcacctattctcaatcctt

SEQ ID NO: 1000916 - DNA, 33 bp, Homo sapien
ctgcttcttcctggtcgcctattctcaatcctt

SEQ ID NO: 1000917 - DNA, 33 bp, Homo sapien
agccctcatgacataacctcctcttaaatactc

SEQ ID NO: 1000918 - DNA, 33 bp, Homo sapien
agccctcatgacataatctcctcttaaatactc

SEQ ID NO: 1000919 - DNA, 33 bp, Homo sapien
ggcaatgtgtctcccaaactggaattcagggat

SEQ ID NO: 1000920 - DNA, 33 bp, Homo sapien
ggcaatgtgtctcccagactggaattcagggat

SEQ ID NO: 1000921 - DNA, 33 bp, Homo sapien
tatggtttctaaggataacactggaagatgaaa

SEQ ID NO: 1000922 - DNA, 33 bp, Homo sapien
tatggtttctaaggattacactggaagatgaaa

SEQ ID NO: 1000923 - DNA, 33 bp, Homo sapien
aggctctgcagtattaaagcgagtgaagcagag

SEQ ID NO: 1000924 - DNA, 33 bp, Homo sapien
aggctctgcagtattacagcgagtgaagcagag

SEQ ID NO: 1000925 - DNA, 33 bp, Homo sapien
taattaccatcccagaactaaagcatgacattg

SEQ ID NO: 1000926 - DNA, 33 bp, Homo sapien
taattaccatcccagagctaaagcatgacattg

SEQ ID NO: 1000927 - DNA, 33 bp, Homo sapien
gatggtggtgtgagtacgtgattttcagttatt

SEQ ID NO: 1000928 - DNA, 33 bp, Homo sapien
gatggtggtgtgagtatgtgattttcagttatt

SEQ ID NO: 1000929 - DNA, 33 bp, Homo sapien
ggctcatagttctaaaagctttataggaagcat

SEQ ID NO: 1000930 - DNA, 33 bp, Homo sapien
ggctcatagttctaaaggctttataggaagcat

SEQ ID NO: 1000931 - DNA, 33 bp, Homo sapien
ctgaagcttgcctcaaaacccaatcagaggacc

SEQ ID NO: 1000932 - DNA, 33 bp, Homo sapien
ctgaagcttgcctcaacacccaatcagaggacc

SEQ ID NO: 1000933 - DNA, 33 bp, Homo sapien
gacctccactgtaaaaatcctcctctgctccac

SEQ ID NO: 1000934 - DNA, 33 bp, Homo sapien
gacctccactgtaaaagtcctcctctgctccac

SEQ ID NO: 1000935 - DNA, 33 bp, Homo sapien
gctctatcctcactgcaactgtcatttttaaag

SEQ ID NO: 1000936 - DNA, 33 bp, Homo sapien
gctctatcctcactgcgactgtcatttttaaag

SEQ ID NO: 1000937 - DNA, 33 bp, Homo sapien
agatccaaatggaaagaccaggtaggaagctag

SEQ ID NO: 1000938 - DNA, 33 bp, Homo sapien
agatccaaatggaaaggccaggtaggaagctag

SEQ ID NO: 1000939 - DNA, 33 bp, Homo sapien
ttctcagcattctccaccgtggctgaatgaggt

SEQ ID NO: 1000940 - DNA, 33 bp, Homo sapien
ttctcagcattctccatcgtggctgaatgaggt

SEQ ID NO: 1000941 - DNA, 33 bp, Homo sapien
ttttccatcgtacatcacacacatttttgatcg

SEQ ID NO: 1000942 - DNA, 33 bp, Homo sapien
ttttccatcgtacatcgcacacatttttgatcg

SEQ ID NO: 1000943 - DNA, 33 bp, Homo sapien
atttccattttacagacagatacagttctggag

SEQ ID NO: 1000944 - DNA, 33 bp, Homo sapien
atttccattttacagatagatacagttctggag

SEQ ID NO: 1000945 - DNA, 33 bp, Homo sapien
ctcggtaagtgttaagcctgggattcaaacccc

SEQ ID NO: 1000946 - DNA, 33 bp, Homo sapien
ctcggtaagtgttaaggctgggattcaaacccc

SEQ ID NO: 1000947 - DNA, 33 bp, Homo sapien
ctacattgttccagggaccccacaccactggaa

SEQ ID NO: 1000948 - DNA, 33 bp, Homo sapien
ctacattgttccagggcccccacaccactggaa

SEQ ID NO: 1000949 - DNA, 33 bp, Homo sapien
acagagttcccaaaaggcaccacatcctcaagc

SEQ ID NO: 1000950 - DNA, 33 bp, Homo sapien
acagagttcccaaaagtcaccacatcctcaagc

SEQ ID NO: 1000951 - DNA, 33 bp, Homo sapien
gatgctctctgtgacccaatcagtctagcactg

SEQ ID NO: 1000952 - DNA, 33 bp, Homo sapien
gatgctctctgtgaccgaatcagtctagcactg

SEQ ID NO: 1000953 - DNA, 33 bp, Homo sapien
gagcttatctgaaatgcaaatctatcgttataa

SEQ ID NO: 1000954 - DNA, 33 bp, Homo sapien
gagcttatctgaaatgtaaatctatcgttataa

SEQ ID NO: 1000955 - DNA, 33 bp, Homo sapien
ttcaaagttgcatcgacagattctgggtgaaga

SEQ ID NO: 1000956 - DNA, 33 bp, Homo sapien
ttcaaagttgcatcgatagattctgggtgaaga

SEQ ID NO: 1000957 - DNA, 33 bp, Homo sapien
tagagaaaagtttgcccaaaggtactgttagtt

SEQ ID NO: 1000958 - DNA, 33 bp, Homo sapien
tagagaaaagtttgcctaaaggtactgttagtt

SEQ ID NO: 1000959 - DNA, 33 bp, Homo sapien
tttctgattgcaaaaccgattcccatatattga

SEQ ID NO: 1000960 - DNA, 33 bp, Homo sapien
tttctgattgcaaaactgattcccatatattga

SEQ ID NO: 1000961 - DNA, 33 bp, Homo sapien
acctgggttcttttcccaactccatcacttagt

SEQ ID NO: 1000962 - DNA, 33 bp, Homo sapien
acctgggttcttttcctaactccatcacttagt

SEQ ID NO: 1000963 - DNA, 33 bp, Homo sapien
aaaatcactgggacagcaataaaacacctgggt

SEQ ID NO: 1000964 - DNA, 33 bp, Homo sapien
aaaatcactgggacaggaataaaacacctgggt

SEQ ID NO: 1000965 - DNA, 33 bp, Homo sapien
accatatatatatctcgcagtctaacctttctc

SEQ ID NO: 1000966 - DNA, 33 bp, Homo sapien
accatatatatatctctcagtctaacctttctc

SEQ ID NO: 1000967 - DNA, 33 bp, Homo sapien
ttaaagactgacattaaaaccggacccaggaaa

SEQ ID NO: 1000968 - DNA, 33 bp, Homo sapien
ttaaagactgacattagaaccggacccaggaaa

SEQ ID NO: 1000969 - DNA, 33 bp, Homo sapien
atctgcaagctgaatagccagtgaaagatgtgt

SEQ ID NO: 1000970 - DNA, 33 bp, Homo sapien
atctgcaagctgaatatccagtgaaagatgtgt

SEQ ID NO: 1000971 - DNA, 33 bp, Homo sapien
tattatctacaatttccacccagtttgtcttca

SEQ ID NO: 1000972 - DNA, 33 bp, Homo sapien
tattatctacaatttctacccagtttgtcttca

SEQ ID NO: 1000973 - DNA, 33 bp, Homo sapien
ctctacacaaagatccaatctgctacccaccca

SEQ ID NO: 1000974 - DNA, 33 bp, Homo sapien
ctctacacaaagatccgatctgctacccaccca

SEQ ID NO: 1000975 - DNA, 33 bp, Homo sapien
taggaggaacacaggcagcatttgataaagcaa

SEQ ID NO: 1000976 - DNA, 33 bp, Homo sapien
taggaggaacacaggcggcatttgataaagcaa

SEQ ID NO: 1000977 - DNA, 33 bp, Homo sapien
ccccagatgcctcagacagtaagtggtagagtc

SEQ ID NO: 1000978 - DNA, 33 bp, Homo sapien
ccccagatgcctcagagagtaagtggtagagtc

SEQ ID NO: 1000979 - DNA, 33 bp, Homo sapien
ggttaggatgccaatacacctttttgtgaggga

SEQ ID NO: 1000980 - DNA, 33 bp, Homo sapien
ggttaggatgccaatatacctttttgtgaggga

SEQ ID NO: 1000981 - DNA, 33 bp, Homo sapien
cttaagtgattttctcaagatcccacagctggt

SEQ ID NO: 1000982 - DNA, 33 bp, Homo sapien
cttaagtgattttctccagatcccacagctggt

SEQ ID NO: 1000983 - DNA, 33 bp, Homo sapien
gcaggaaggaaaccataagaattctgacagccc

SEQ ID NO: 1000984 - DNA, 33 bp, Homo sapien
gcaggaaggaaaccatgagaattctgacagccc

SEQ ID NO: 1000985 - DNA, 33 bp, Homo sapien
gattacttttcagctccaaataactagtacgtt

SEQ ID NO: 1000986 - DNA, 33 bp, Homo sapien
gattacttttcagctctaaataactagtacgtt

SEQ ID NO: 1000987 - DNA, 33 bp, Homo sapien
gctatatttccagggtaaaatgaatcctgcata

SEQ ID NO: 1000988 - DNA, 33 bp, Homo sapien
gctatatttccagggtgaaatgaatcctgcata

SEQ ID NO: 1000989 - DNA, 33 bp, Homo sapien
ccctaatcctgtggcaaaggtcactcaaaccct

SEQ ID NO: 1000990 - DNA, 33 bp, Homo sapien
ccctaatcctgtggcagaggtcactcaaaccct

SEQ ID NO: 1000991 - DNA, 33 bp, Homo sapien
cgacagggctaggtacaacttcaatacaagtca

SEQ ID NO: 1000992 - DNA, 33 bp, Homo sapien
cgacagggctaggtaccacttcaatacaagtca

SEQ ID NO: 1000993 - DNA, 33 bp, Homo sapien
tctctcacacacaccaacttagggatattgatg

SEQ ID NO: 1000994 - DNA, 33 bp, Homo sapien
tctctcacacacaccagcttagggatattgatg

SEQ ID NO: 1000995 - DNA, 33 bp, Homo sapien
atccagtatctctccacgtctaacaacttccag

SEQ ID NO: 1000996 - DNA, 33 bp, Homo sapien
atccagtatctctccaggtctaacaacttccag

SEQ ID NO: 1000997 - DNA, 33 bp, Homo sapien
ctttgtggttgctgggaagtccccattggtctt

SEQ ID NO: 1000998 - DNA, 33 bp, Homo sapien
ctttgtggttgctgggcagtccccattggtctt

SEQ ID NO: 1000999 - DNA, 33 bp, Homo sapien
atgaggctgtttagaaagtcctctttagttgca

SEQ ID NO: 1001000 - DNA, 33 bp, Homo sapien
atgaggctgtttagaaggtcctctttagttgca

SEQ ID NO: 1001001 - DNA, 33 bp, Homo sapien
attccaaatgataaagacaattggcaaatgcaa

SEQ ID NO: 1001002 - DNA, 33 bp, Homo sapien
attccaaatgataaaggcaattggcaaatgcaa

SEQ ID NO: 1001003 - DNA, 33 bp, Homo sapien
ttaagtgggaggcaaaatgagataaaactaagt

SEQ ID NO: 1001004 - DNA, 33 bp, Homo sapien
ttaagtgggaggcaaattgagataaaactaagt

SEQ ID NO: 1001005 - DNA, 33 bp, Homo sapien
tggctcttgagcatcaaatcagaaaaagggatg

SEQ ID NO: 1001006 - DNA, 33 bp, Homo sapien
tggctcttgagcatcagatcagaaaaagggatg

SEQ ID NO: 1001007 - DNA, 33 bp, Homo sapien
tatagcaatcttgttagaggaaaagcaccaacc

SEQ ID NO: 1001008 - DNA, 33 bp, Homo sapien
tatagcaatcttgttataggaaaagcaccaacc

SEQ ID NO: 1001009 - DNA, 33 bp, Homo sapien
tacccacataaagcaacataagttagtaaattg

SEQ ID NO: 1001010 - DNA, 33 bp, Homo sapien
tacccacataaagcaagataagttagtaaattg

SEQ ID NO: 1001011 - DNA, 33 bp, Homo sapien
taagccaagtctaggaatcagttaatctttgag

SEQ ID NO: 1001012 - DNA, 33 bp, Homo sapien
taagccaagtctaggagtcagttaatctttgag

SEQ ID NO: 1001013 - DNA, 33 bp, Homo sapien
agaggagatgaataaactcctagaaacactcac

SEQ ID NO: 1001014 - DNA, 33 bp, Homo sapien
agaggagatgaataaattcctagaaacactcac

SEQ ID NO: 1001015 - DNA, 33 bp, Homo sapien
tcagtcttgtggcaaaaatcaggtggaagatgt

SEQ ID NO: 1001016 - DNA, 33 bp, Homo sapien
tcagtcttgtggcaaacatcaggtggaagatgt

SEQ ID NO: 1001017 - DNA, 33 bp, Homo sapien
gaggtgagctcagaagccaagaatgaaggaata

SEQ ID NO: 1001018 - DNA, 33 bp, Homo sapien
gaggtgagctcagaaggcaagaatgaaggaata

SEQ ID NO: 1001019 - DNA, 33 bp, Homo sapien
atagaatgccttcaagaattgtgtacctgaatg

SEQ ID NO: 1001020 - DNA, 33 bp, Homo sapien
atagaatgccttcaaggattgtgtacctgaatg

SEQ ID NO: 1001021 - DNA, 33 bp, Homo sapien
catgactatacctcacggcaagagagactggga

SEQ ID NO: 1001022 - DNA, 33 bp, Homo sapien
catgactatacctcactgcaagagagactggga

SEQ ID NO: 1001023 - DNA, 33 bp, Homo sapien
caaaatttatttgttccaccctctggcacacag

SEQ ID NO: 1001024 - DNA, 33 bp, Homo sapien
caaaatttatttgttctaccctctggcacacag

SEQ ID NO: 1001025 - DNA, 33 bp, Homo sapien
gcggcgtaatgtatccagaaagagtcctactgg

SEQ ID NO: 1001026 - DNA, 33 bp, Homo sapien
gcggcgtaatgtatccggaaagagtcctactgg

SEQ ID NO: 1001027 - DNA, 33 bp, Homo sapien
tcgttgtcacaataccaaggagtgatgctccaa

SEQ ID NO: 1001028 - DNA, 33 bp, Homo sapien
tcgttgtcacaataccgaggagtgatgctccaa

SEQ ID NO: 1001029 - DNA, 33 bp, Homo sapien
agcattttttcagtcacctacttagcctggaag

SEQ ID NO: 1001030 - DNA, 33 bp, Homo sapien
agcattttttcagtcagctacttagcctggaag

SEQ ID NO: 1001031 - DNA, 33 bp, Homo sapien
ctatcttgggaaaatacagactgctccagtggg

SEQ ID NO: 1001032 - DNA, 33 bp, Homo sapien
ctatcttgggaaaatatagactgctccagtggg

SEQ ID NO: 1001033 - DNA, 33 bp, Homo sapien
ttcttcctcctgctaacacactgctgccctctc

SEQ ID NO: 1001034 - DNA, 33 bp, Homo sapien
ttcttcctcctgctaatacactgctgccctctc

SEQ ID NO: 1001035 - DNA, 33 bp, Homo sapien
ctcttgaaaatcctgactaatacaacagggtgc

SEQ ID NO: 1001036 - DNA, 33 bp, Homo sapien
ctcttgaaaatcctgagtaatacaacagggtgc

SEQ ID NO: 1001037 - DNA, 33 bp, Homo sapien
gcaacaggaatagagaagaaagatagatcccca

SEQ ID NO: 1001038 - DNA, 33 bp, Homo sapien
gcaacaggaatagagatgaaagatagatcccca

SEQ ID NO: 1001039 - DNA, 33 bp, Homo sapien
acatttaataaatgcccacaaaataccaaatgc

SEQ ID NO: 1001040 - DNA, 33 bp, Homo sapien
acatttaataaatgcctacaaaataccaaatgc

SEQ ID NO: 1001041 - DNA, 33 bp, Homo sapien
gcttttcataagtaacaagatgactcacatcat

SEQ ID NO: 1001042 - DNA, 33 bp, Homo sapien
gcttttcataagtaacgagatgactcacatcat

SEQ ID NO: 1001043 - DNA, 33 bp, Homo sapien
ttaaaaacctttcaaacgtgcaaattatctatt

SEQ ID NO: 1001044 - DNA, 33 bp, Homo sapien
ttaaaaacctttcaaatgtgcaaattatctatt

SEQ ID NO: 1001045 - DNA, 33 bp, Homo sapien
gaaatggaagtggaaaaaaaatgtaccatagca

SEQ ID NO: 1001046 - DNA, 33 bp, Homo sapien
gaaatggaagtggaaagaaaatgtaccatagca

SEQ ID NO: 1001047 - DNA, 33 bp, Homo sapien
cctttcccatcctgtacgtagactttccaaggg

SEQ ID NO: 1001048 - DNA, 33 bp, Homo sapien
cctttcccatcctgtatgtagactttccaaggg

SEQ ID NO: 1001049 - DNA, 33 bp, Homo sapien
ttggctttgctttaaggatctgcatcaggaatt

SEQ ID NO: 1001050 - DNA, 33 bp, Homo sapien
ttggctttgctttaagtatctgcatcaggaatt

SEQ ID NO: 1001051 - DNA, 33 bp, Homo sapien
ggtgaaattgtatatacgataagctagacttaa

SEQ ID NO: 1001052 - DNA, 33 bp, Homo sapien
ggtgaaattgtatatatgataagctagacttaa

SEQ ID NO: 1001053 - DNA, 33 bp, Homo sapien
gaattctattaagtgaaatctgaaaacatattt

SEQ ID NO: 1001054 - DNA, 33 bp, Homo sapien
gaattctattaagtgatatctgaaaacatattt

SEQ ID NO: 1001055 - DNA, 33 bp, Homo sapien
ttcagtgtccatataacacaggcacatagacca

SEQ ID NO: 1001056 - DNA, 33 bp, Homo sapien
ttcagtgtccatataagacaggcacatagacca

SEQ ID NO: 1001057 - DNA, 33 bp, Homo sapien
cagaccactcagctggaagatgcttctgatggc

SEQ ID NO: 1001058 - DNA, 33 bp, Homo sapien
cagaccactcagctgggagatgcttctgatggc

SEQ ID NO: 1001059 - DNA, 33 bp, Homo sapien
aagaggagtgaggctcacttcagctctgtcaca

SEQ ID NO: 1001060 - DNA, 33 bp, Homo sapien
aagaggagtgaggctcgcttcagctctgtcaca

SEQ ID NO: 1001061 - DNA, 33 bp, Homo sapien
ctgccctgcctcctacgcaattattttggagag

SEQ ID NO: 1001062 - DNA, 33 bp, Homo sapien
ctgccctgcctcctactcaattattttggagag

SEQ ID NO: 1001063 - DNA, 33 bp, Homo sapien
tcccactagcaaatggaatgggcatttctgctt

SEQ ID NO: 1001064 - DNA, 33 bp, Homo sapien
tcccactagcaaatgggatgggcatttctgctt

SEQ ID NO: 1001065 - DNA, 33 bp, Homo sapien
gattatttccagtccaagtaaaatggacaacaa

SEQ ID NO: 1001066 - DNA, 33 bp, Homo sapien
gattatttccagtccacgtaaaatggacaacaa

SEQ ID NO: 1001067 - DNA, 33 bp, Homo sapien
acatattcttagctaacggagaataaccaatgg

SEQ ID NO: 1001068 - DNA, 33 bp, Homo sapien
acatattcttagctaatggagaataaccaatgg

SEQ ID NO: 1001069 - DNA, 33 bp, Homo sapien
tctgttgtacccaagaatctacaggtccttttt

SEQ ID NO: 1001070 - DNA, 33 bp, Homo sapien
tctgttgtacccaagagtctacaggtccttttt

SEQ ID NO: 1001071 - DNA, 33 bp, Homo sapien
tcaacaaaaagctgtacgtcctgtggaagttac

SEQ ID NO: 1001072 - DNA, 33 bp, Homo sapien
tcaacaaaaagctgtatgtcctgtggaagttac

SEQ ID NO: 1001073 - DNA, 33 bp, Homo sapien
tggtctctggagagaaataaaactctgactcag

SEQ ID NO: 1001074 - DNA, 33 bp, Homo sapien
tggtctctggagagaactaaaactctgactcag

SEQ ID NO: 1001075 - DNA, 33 bp, Homo sapien
tatatcagataagccacgtacattgtgagaaaa

SEQ ID NO: 1001076 - DNA, 33 bp, Homo sapien
tatatcagataagccaggtacattgtgagaaaa

SEQ ID NO: 1001077 - DNA, 33 bp, Homo sapien
caattggtagtcacaacagtcgtgatttgctaa

SEQ ID NO: 1001078 - DNA, 33 bp, Homo sapien
caattggtagtcacaatagtcgtgatttgctaa

SEQ ID NO: 1001079 - DNA, 33 bp, Homo sapien
atgtccaccaagataaagtccgaacttgccaat

SEQ ID NO: 1001080 - DNA, 33 bp, Homo sapien
atgtccaccaagataaggtccgaacttgccaat

SEQ ID NO: 1001081 - DNA, 33 bp, Homo sapien
tgacctaagggttcacaaaactcaacttctgct

SEQ ID NO: 1001082 - DNA, 33 bp, Homo sapien
tgacctaagggttcaccaaactcaacttctgct

SEQ ID NO: 1001083 - DNA, 33 bp, Homo sapien
tctttatcctagcagtcaagaatggactggaag

SEQ ID NO: 1001084 - DNA, 33 bp, Homo sapien
tctttatcctagcagttaagaatggactggaag

SEQ ID NO: 1001085 - DNA, 33 bp, Homo sapien
tgttagaaaccctttacagcaaagcatcctcta

SEQ ID NO: 1001086 - DNA, 33 bp, Homo sapien
tgttagaaaccctttagagcaaagcatcctcta

SEQ ID NO: 1001087 - DNA, 33 bp, Homo sapien
caaagaaaaaaaggtcagaaacagtggaaggga

SEQ ID NO: 1001088 - DNA, 33 bp, Homo sapien
caaagaaaaaaaggtcggaaacagtggaaggga

SEQ ID NO: 1001089 - DNA, 33 bp, Homo sapien
agaccggaactataccacaggttctgctgggta

SEQ ID NO: 1001090 - DNA, 33 bp, Homo sapien
agaccggaactataccgcaggttctgctgggta

SEQ ID NO: 1001091 - DNA, 33 bp, Homo sapien
agtgtggcactatcatctactacccattctaga

SEQ ID NO: 1001092 - DNA, 33 bp, Homo sapien
agtgtggcactatcatttactacccattctaga

SEQ ID NO: 1001093 - DNA, 33 bp, Homo sapien
aagaatgtgtctaaggaaggttgaacctagtag

SEQ ID NO: 1001094 - DNA, 33 bp, Homo sapien
aagaatgtgtctaaggcaggttgaacctagtag

SEQ ID NO: 1001095 - DNA, 33 bp, Homo sapien
atgcagtatggcctcaccttaatgtgattacat

SEQ ID NO: 1001096 - DNA, 33 bp, Homo sapien
atgcagtatggcctcatcttaatgtgattacat

SEQ ID NO: 1001097 - DNA, 33 bp, Homo sapien
agtactgaatggtaaaagtagctccaactgcga

SEQ ID NO: 1001098 - DNA, 33 bp, Homo sapien
agtactgaatggtaaaggtagctccaactgcga

SEQ ID NO: 1001099 - DNA, 33 bp, Homo sapien
tagttgaggtccaggaaggttctcggaaagtgt

SEQ ID NO: 1001100 - DNA, 33 bp, Homo sapien
tagttgaggtccaggagggttctcggaaagtgt

SEQ ID NO: 1001101 - DNA, 33 bp, Homo sapien
ctttgacaactattacgcgtttgccaagaaatc

SEQ ID NO: 1001102 - DNA, 33 bp, Homo sapien
ctttgacaactattactcgtttgccaagaaatc

SEQ ID NO: 1001103 - DNA, 33 bp, Homo sapien
gggaagaagaactacacataatccaaagtgtca

SEQ ID NO: 1001104 - DNA, 33 bp, Homo sapien
gggaagaagaactacagataatccaaagtgtca

SEQ ID NO: 1001105 - DNA, 33 bp, Homo sapien
gtctctaagcacctaaagaaatgtcctggtgtg

SEQ ID NO: 1001106 - DNA, 33 bp, Homo sapien
gtctctaagcacctaatgaaatgtcctggtgtg

SEQ ID NO: 1001107 - DNA, 33 bp, Homo sapien
ttgagacacagcatgaagttgatgtgagtacat

SEQ ID NO: 1001108 - DNA, 33 bp, Homo sapien
ttgagacacagcatgaggttgatgtgagtacat

SEQ ID NO: 1001109 - DNA, 33 bp, Homo sapien
atatatagtattcttaaccagtaacagcccacg

SEQ ID NO: 1001110 - DNA, 33 bp, Homo sapien
atatatagtattcttatccagtaacagcccacg

SEQ ID NO: 1001111 - DNA, 33 bp, Homo sapien
ttgaaccactcacagaccaagcatttccaaaca

SEQ ID NO: 1001112 - DNA, 33 bp, Homo sapien
ttgaaccactcacagatcaagcatttccaaaca

SEQ ID NO: 1001113 - DNA, 33 bp, Homo sapien
agcagtcattcgttacggattatattcaagtgt

SEQ ID NO: 1001114 - DNA, 33 bp, Homo sapien
agcagtcattcgttactgattatattcaagtgt

SEQ ID NO: 1001115 - DNA, 33 bp, Homo sapien
gtatctttgagtgtgacaaagaaaaaagctctg

SEQ ID NO: 1001116 - DNA, 33 bp, Homo sapien
gtatctttgagtgtgataaagaaaaaagctctg

SEQ ID NO: 1001117 - DNA, 33 bp, Homo sapien
tgttaagaccttcccccagtcctgtactggacg

SEQ ID NO: 1001118 - DNA, 33 bp, Homo sapien
tgttaagaccttccccgagtcctgtactggacg

SEQ ID NO: 1001119 - DNA, 33 bp, Homo sapien
aacaaggaaatctctaagattgacattttctga

SEQ ID NO: 1001120 - DNA, 33 bp, Homo sapien
aacaaggaaatctctatgattgacattttctga

SEQ ID NO: 1001121 - DNA, 33 bp, Homo sapien
accctggactgtccctcaacaacaaccagatac

SEQ ID NO: 1001122 - DNA, 33 bp, Homo sapien
accctggactgtccctgaacaacaaccagatac

SEQ ID NO: 1001123 - DNA, 33 bp, Homo sapien
agtaaaatcacttcttcaacattgtttaacttc

SEQ ID NO: 1001124 - DNA, 33 bp, Homo sapien
agtaaaatcacttctttaacattgtttaacttc

SEQ ID NO: 1001125 - DNA, 33 bp, Homo sapien
gccgtgtcaaggttaactaaatattaatgacac

SEQ ID NO: 1001126 - DNA, 33 bp, Homo sapien
gccgtgtcaaggttaagtaaatattaatgacac

SEQ ID NO: 1001127 - DNA, 33 bp, Homo sapien
ggtttttcctggtgaaataatagactatcattg

SEQ ID NO: 1001128 - DNA, 33 bp, Homo sapien
ggtttttcctggtgaactaatagactatcattg

SEQ ID NO: 1001129 - DNA, 33 bp, Homo sapien
aaacaaccttaagtaactccaacaatgatagtc

SEQ ID NO: 1001130 - DNA, 33 bp, Homo sapien
aaacaaccttaagtaattccaacaatgatagtc

SEQ ID NO: 1001131 - DNA, 33 bp, Homo sapien
ccattccacttcctccacattctcattagtgct

SEQ ID NO: 1001132 - DNA, 33 bp, Homo sapien
ccattccacttcctccgcattctcattagtgct

SEQ ID NO: 1001133 - DNA, 33 bp, Homo sapien
cctgcatttacaaaaccgtggcctttatatacc

SEQ ID NO: 1001134 - DNA, 33 bp, Homo sapien
cctgcatttacaaaactgtggcctttatatacc

SEQ ID NO: 1001135 - DNA, 33 bp, Homo sapien
attttaatatttttcacggcattcttttgagga

SEQ ID NO: 1001136 - DNA, 33 bp, Homo sapien
attttaatatttttcatggcattcttttgagga

SEQ ID NO: 1001137 - DNA, 33 bp, Homo sapien
gctttgtgggccataaagtgtctgccacacctg

SEQ ID NO: 1001138 - DNA, 33 bp, Homo sapien
gctttgtgggccataatgtgtctgccacacctg

SEQ ID NO: 1001139 - DNA, 33 bp, Homo sapien
tggatctgctaaaactcagctaatttggaatca

SEQ ID NO: 1001140 - DNA, 33 bp, Homo sapien
tggatctgctaaaactgagctaatttggaatca

SEQ ID NO: 1001141 - DNA, 33 bp, Homo sapien
gttttcagaccctataacagatacctcaagcaa

SEQ ID NO: 1001142 - DNA, 33 bp, Homo sapien
gttttcagaccctataccagatacctcaagcaa

SEQ ID NO: 1001143 - DNA, 33 bp, Homo sapien
tgttcttccatctttacgcttggtgcccttgtg

SEQ ID NO: 1001144 - DNA, 33 bp, Homo sapien
tgttcttccatctttatgcttggtgcccttgtg

SEQ ID NO: 1001145 - DNA, 33 bp, Homo sapien
tttatttcagaggattaaaacatttaagtgact

SEQ ID NO: 1001146 - DNA, 33 bp, Homo sapien
tttatttcagaggattgaaacatttaagtgact

SEQ ID NO: 1001147 - DNA, 33 bp, Homo sapien
tatttcttcattttcagtaacgccagcccagga

SEQ ID NO: 1001148 - DNA, 33 bp, Homo sapien
tatttcttcattttcattaacgccagcccagga

SEQ ID NO: 1001149 - DNA, 33 bp, Homo sapien
tttataaaattactaacgttggcaatctaaaaa

SEQ ID NO: 1001150 - DNA, 33 bp, Homo sapien
tttataaaattactaatgttggcaatctaaaaa

SEQ ID NO: 1001151 - DNA, 33 bp, Homo sapien
attagataccaaaggcaaacaggtcttgtcacc

SEQ ID NO: 1001152 - DNA, 33 bp, Homo sapien
attagataccaaaggcgaacaggtcttgtcacc

SEQ ID NO: 1001153 - DNA, 33 bp, Homo sapien
ctattttatacacaacggttcaaccacaaataa

SEQ ID NO: 1001154 - DNA, 33 bp, Homo sapien
ctattttatacacaactgttcaaccacaaataa

SEQ ID NO: 1001155 - DNA, 33 bp, Homo sapien
catcagttgccaaattaaagtagcactggattg

SEQ ID NO: 1001156 - DNA, 33 bp, Homo sapien
catcagttgccaaattgaagtagcactggattg

SEQ ID NO: 1001157 - DNA, 33 bp, Homo sapien
ctaaattccaccaactaaacagattctctaaag

SEQ ID NO: 1001158 - DNA, 33 bp, Homo sapien
ctaaattccaccaactgaacagattctctaaag

SEQ ID NO: 1001159 - DNA, 33 bp, Homo sapien
tgataggcccctaaacagctccagtgggcactg

SEQ ID NO: 1001160 - DNA, 33 bp, Homo sapien
tgataggcccctaaacggctccagtgggcactg

SEQ ID NO: 1001161 - DNA, 33 bp, Homo sapien
acatagaaactccatgccaggaacccaggacaa

SEQ ID NO: 1001162 - DNA, 33 bp, Homo sapien
acatagaaactccatgtcaggaacccaggacaa

SEQ ID NO: 1001163 - DNA, 33 bp, Homo sapien
tcagaatttaggtagacggaatgcctgctctta

SEQ ID NO: 1001164 - DNA, 33 bp, Homo sapien
tcagaatttaggtagatggaatgcctgctctta

SEQ ID NO: 1001165 - DNA, 33 bp, Homo sapien
aatgatgactgccttacggtgctagaaacagca

SEQ ID NO: 1001166 - DNA, 33 bp, Homo sapien
aatgatgactgccttatggtgctagaaacagca

SEQ ID NO: 1001167 - DNA, 33 bp, Homo sapien
aatactaggtgctaatcagtaaggtaaaatgtg

SEQ ID NO: 1001168 - DNA, 33 bp, Homo sapien
aatactaggtgctaatgagtaaggtaaaatgtg

SEQ ID NO: 1001169 - DNA, 33 bp, Homo sapien
atcttttaatggagcaaactattacagagaaat

SEQ ID NO: 1001170 - DNA, 33 bp, Homo sapien
atcttttaatggagcagactattacagagaaat

SEQ ID NO: 1001171 - DNA, 33 bp, Homo sapien
tccacctcttaatgaagaattacatttctttat

SEQ ID NO: 1001172 - DNA, 33 bp, Homo sapien
tccacctcttaatgaataattacatttctttat

SEQ ID NO: 1001173 - DNA, 33 bp, Homo sapien
tgcatgcctgcaggaaaaacaatggggctagca

SEQ ID NO: 1001174 - DNA, 33 bp, Homo sapien
tgcatgcctgcaggaagaacaatggggctagca

SEQ ID NO: 1001175 - DNA, 33 bp, Homo sapien
ataaatcctggattacaaagacctgagaactag

SEQ ID NO: 1001176 - DNA, 33 bp, Homo sapien
ataaatcctggattacgaagacctgagaactag

SEQ ID NO: 1001177 - DNA, 33 bp, Homo sapien
agccccgtctccaggaacagtaaaattaacagc

SEQ ID NO: 1001178 - DNA, 33 bp, Homo sapien
agccccgtctccaggatcagtaaaattaacagc

SEQ ID NO: 1001179 - DNA, 33 bp, Homo sapien
gctcaaattcttaataaaagtgaactgactggc

SEQ ID NO: 1001180 - DNA, 33 bp, Homo sapien
gctcaaattcttaatagaagtgaactgactggc

SEQ ID NO: 1001181 - DNA, 33 bp, Homo sapien
aaacaccagtccctcaatgacaaattttagtta

SEQ ID NO: 1001182 - DNA, 33 bp, Homo sapien
aaacaccagtccctcagtgacaaattttagtta

SEQ ID NO: 1001183 - DNA, 33 bp, Homo sapien
ttcagcctccaagatacgcgggacaatttcctt

SEQ ID NO: 1001184 - DNA, 33 bp, Homo sapien
ttcagcctccaagatatgcgggacaatttcctt

SEQ ID NO: 1001185 - DNA, 33 bp, Homo sapien
ccaatgtgcaaatccacagaagcaacatgcaca

SEQ ID NO: 1001186 - DNA, 33 bp, Homo sapien
ccaatgtgcaaatccatagaagcaacatgcaca

SEQ ID NO: 1001187 - DNA, 33 bp, Homo sapien
gagatgtagagttagacggtaaagagtagagtc

SEQ ID NO: 1001188 - DNA, 33 bp, Homo sapien
gagatgtagagttagatggtaaagagtagagtc

SEQ ID NO: 1001189 - DNA, 33 bp, Homo sapien
gagagcatggctatataagttcactgatgggta

SEQ ID NO: 1001190 - DNA, 33 bp, Homo sapien
gagagcatggctatatgagttcactgatgggta

SEQ ID NO: 1001191 - DNA, 33 bp, Homo sapien
ttttccccaagccaatcagatggctgacctgca

SEQ ID NO: 1001192 - DNA, 33 bp, Homo sapien
ttttccccaagccaatgagatggctgacctgca

SEQ ID NO: 1001193 - DNA, 33 bp, Homo sapien
agaccatgtcatctccaaatgtgcacgagtgac

SEQ ID NO: 1001194 - DNA, 33 bp, Homo sapien
agaccatgtcatctccgaatgtgcacgagtgac

SEQ ID NO: 1001195 - DNA, 33 bp, Homo sapien
cacgtaacgagggatacctgtatttagagatag

SEQ ID NO: 1001196 - DNA, 33 bp, Homo sapien
cacgtaacgagggatagctgtatttagagatag

SEQ ID NO: 1001197 - DNA, 33 bp, Homo sapien
tctgttgaccagaatacctaatagatagtgctg

SEQ ID NO: 1001198 - DNA, 33 bp, Homo sapien
tctgttgaccagaatagctaatagatagtgctg

SEQ ID NO: 1001199 - DNA, 33 bp, Homo sapien
accctcactaattatcaattttcgcctggtcct

SEQ ID NO: 1001200 - DNA, 33 bp, Homo sapien
accctcactaattatcgattttcgcctggtcct

SEQ ID NO: 1001201 - DNA, 33 bp, Homo sapien
ctcacaagctcctagaatcaccttctgaaattt

SEQ ID NO: 1001202 - DNA, 33 bp, Homo sapien
ctcacaagctcctagagtcaccttctgaaattt

SEQ ID NO: 1001203 - DNA, 33 bp, Homo sapien
aaattaatcataaatcactgccataaaaatttc

SEQ ID NO: 1001204 - DNA, 33 bp, Homo sapien
aaattaatcataaatcgctgccataaaaatttc

SEQ ID NO: 1001205 - DNA, 33 bp, Homo sapien
ggatcttgaacctaaactgtgaatctctttgtg

SEQ ID NO: 1001206 - DNA, 33 bp, Homo sapien
ggatcttgaacctaaattgtgaatctctttgtg

SEQ ID NO: 1001207 - DNA, 33 bp, Homo sapien
atttgaaagcaggttcaatagcaacaaatgctt

SEQ ID NO: 1001208 - DNA, 33 bp, Homo sapien
atttgaaagcaggttctatagcaacaaatgctt

SEQ ID NO: 1001209 - DNA, 33 bp, Homo sapien
tatggacttagcgtaacaatcctccagttacag

SEQ ID NO: 1001210 - DNA, 33 bp, Homo sapien
tatggacttagcgtaataatcctccagttacag

SEQ ID NO: 1001211 - DNA, 33 bp, Homo sapien
ctatgtgtgtcttcaccgtatacctctcaaagt

SEQ ID NO: 1001212 - DNA, 33 bp, Homo sapien
ctatgtgtgtcttcactgtatacctctcaaagt

SEQ ID NO: 1001213 - DNA, 33 bp, Homo sapien
taaaatgtatgtgatgcatacacattgccacag

SEQ ID NO: 1001214 - DNA, 33 bp, Homo sapien
taaaatgtatgtgatgtatacacattgccacag

SEQ ID NO: 1001215 - DNA, 33 bp, Homo sapien
gaaagagtcgcttatgcatgttgagggcaagaa

SEQ ID NO: 1001216 - DNA, 33 bp, Homo sapien
gaaagagtcgcttatgtatgttgagggcaagaa

SEQ ID NO: 1001217 - DNA, 33 bp, Homo sapien
agataatagaaaatgacgttgggaaagagtcgc

SEQ ID NO: 1001218 - DNA, 33 bp, Homo sapien
agataatagaaaatgatgttgggaaagagtcgc

SEQ ID NO: 1001219 - DNA, 33 bp, Homo sapien
ctcccatgaattttctaaaacctggggctgaaa

SEQ ID NO: 1001220 - DNA, 33 bp, Homo sapien
ctcccatgaattttctgaaacctggggctgaaa

SEQ ID NO: 1001221 - DNA, 33 bp, Homo sapien
aagcaaagttttcaaacagcagggccttgagtc

SEQ ID NO: 1001222 - DNA, 33 bp, Homo sapien
aagcaaagttttcaaatagcagggccttgagtc

SEQ ID NO: 1001223 - DNA, 33 bp, Homo sapien
acatttaaaaagtccacataatttatactcatt

SEQ ID NO: 1001224 - DNA, 33 bp, Homo sapien
acatttaaaaagtccagataatttatactcatt

SEQ ID NO: 1001225 - DNA, 33 bp, Homo sapien
cagttctcacatcgtacaaggtcttttggggac

SEQ ID NO: 1001226 - DNA, 33 bp, Homo sapien
cagttctcacatcgtataaggtcttttggggac

SEQ ID NO: 1001227 - DNA, 33 bp, Homo sapien
agtaatgtgaataagtaaagtgagctttcatga

SEQ ID NO: 1001228 - DNA, 33 bp, Homo sapien
agtaatgtgaataagtgaagtgagctttcatga

SEQ ID NO: 1001229 - DNA, 33 bp, Homo sapien
gcaagtgacttttcaaaataacaaatcaatttg

SEQ ID NO: 1001230 - DNA, 33 bp, Homo sapien
gcaagtgacttttcaacataacaaatcaatttg

SEQ ID NO: 1001231 - DNA, 33 bp, Homo sapien
ggttactcaaggtcacaatgactgagcaaactc

SEQ ID NO: 1001232 - DNA, 33 bp, Homo sapien
ggttactcaaggtcacgatgactgagcaaactc

SEQ ID NO: 1001233 - DNA, 33 bp, Homo sapien
cttttccatgtgcttgcatattgtcaagaaaga

SEQ ID NO: 1001234 - DNA, 33 bp, Homo sapien
cttttccatgtgcttgtatattgtcaagaaaga

SEQ ID NO: 1001235 - DNA, 33 bp, Homo sapien
tgttctttgtctgaataaactgtgttaaatgta

SEQ ID NO: 1001236 - DNA, 33 bp, Homo sapien
tgttctttgtctgaatcaactgtgttaaatgta

SEQ ID NO: 1001237 - DNA, 33 bp, Homo sapien
tcatggtccgtctagacaatgggatagttggtg

SEQ ID NO: 1001238 - DNA, 33 bp, Homo sapien
tcatggtccgtctagagaatgggatagttggtg

SEQ ID NO: 1001239 - DNA, 33 bp, Homo sapien
ttacttttgtaagtaactgcaaactgtcttcca

SEQ ID NO: 1001240 - DNA, 33 bp, Homo sapien
ttacttttgtaagtaattgcaaactgtcttcca

SEQ ID NO: 1001241 - DNA, 33 bp, Homo sapien
ttcatactgaaataaaattataccacttcataa

SEQ ID NO: 1001242 - DNA, 33 bp, Homo sapien
ttcatactgaaataaagttataccacttcataa

SEQ ID NO: 1001243 - DNA, 33 bp, Homo sapien
agaaaaaacacaccaaactcattgtgggaagga

SEQ ID NO: 1001244 - DNA, 33 bp, Homo sapien
agaaaaaacacaccaatctcattgtgggaagga

SEQ ID NO: 1001245 - DNA, 33 bp, Homo sapien
ttcggagaggttttagcacaaatttctggtcaa

SEQ ID NO: 1001246 - DNA, 33 bp, Homo sapien
ttcggagaggttttaggacaaatttctggtcaa

SEQ ID NO: 1001247 - DNA, 33 bp, Homo sapien
tagccctctactttgaaaaggcagactgcaagt

SEQ ID NO: 1001248 - DNA, 33 bp, Homo sapien
tagccctctactttgataaggcagactgcaagt

SEQ ID NO: 1001249 - DNA, 33 bp, Homo sapien
tgaacacttctttaaaaaacatcttccttcaga

SEQ ID NO: 1001250 - DNA, 33 bp, Homo sapien
tgaacacttctttaaataacatcttccttcaga

SEQ ID NO: 1001251 - DNA, 33 bp, Homo sapien
cctgtttgttagataaaattaggaaacttgaaa

SEQ ID NO: 1001252 - DNA, 33 bp, Homo sapien
cctgtttgttagataagattaggaaacttgaaa

SEQ ID NO: 1001253 - DNA, 33 bp, Homo sapien
gaacatagaatgattaacagaaaagctttgaac

SEQ ID NO: 1001254 - DNA, 33 bp, Homo sapien
gaacatagaatgattagcagaaaagctttgaac

SEQ ID NO: 1001255 - DNA, 33 bp, Homo sapien
gacttaataaagagccacatgagtcgcctcagc

SEQ ID NO: 1001256 - DNA, 33 bp, Homo sapien
gacttaataaagagccgcatgagtcgcctcagc

SEQ ID NO: 1001257 - DNA, 33 bp, Homo sapien
gagaagggggcagctgaaagaatgacttaataa

SEQ ID NO: 1001258 - DNA, 33 bp, Homo sapien
gagaagggggcagctggaagaatgacttaataa

SEQ ID NO: 1001259 - DNA, 33 bp, Homo sapien
catgtcccttcttaggcagctgagaggatgaaa

SEQ ID NO: 1001260 - DNA, 33 bp, Homo sapien
catgtcccttcttaggtagctgagaggatgaaa

SEQ ID NO: 1001261 - DNA, 33 bp, Homo sapien
tcaacagccagtgaagcactgaatcctgccaac

SEQ ID NO: 1001262 - DNA, 33 bp, Homo sapien
tcaacagccagtgaagtactgaatcctgccaac

SEQ ID NO: 1001263 - DNA, 33 bp, Homo sapien
gacaaatgactgtttacactctgcaaaccattc

SEQ ID NO: 1001264 - DNA, 33 bp, Homo sapien
gacaaatgactgtttagactctgcaaaccattc

SEQ ID NO: 1001265 - DNA, 33 bp, Homo sapien
agatagtgataagcaccagaaagaacaatcaag

SEQ ID NO: 1001266 - DNA, 33 bp, Homo sapien
agatagtgataagcactagaaagaacaatcaag

SEQ ID NO: 1001267 - DNA, 33 bp, Homo sapien
tctataaaacgactccgcggcctgtcctcaatg

SEQ ID NO: 1001268 - DNA, 33 bp, Homo sapien
tctataaaacgactcctcggcctgtcctcaatg

SEQ ID NO: 1001269 - DNA, 33 bp, Homo sapien
atagatgcacagagataagtgaggtgctgggtt

SEQ ID NO: 1001270 - DNA, 33 bp, Homo sapien
atagatgcacagagatgagtgaggtgctgggtt

SEQ ID NO: 1001271 - DNA, 33 bp, Homo sapien
gactcctatggcttgcacttagtagtctacttt

SEQ ID NO: 1001272 - DNA, 33 bp, Homo sapien
gactcctatggcttgcgcttagtagtctacttt

SEQ ID NO: 1001273 - DNA, 33 bp, Homo sapien
atgacctgtaagctccaaaatgtttattgtgta

SEQ ID NO: 1001274 - DNA, 33 bp, Homo sapien
atgacctgtaagctcccaaatgtttattgtgta

SEQ ID NO: 1001275 - DNA, 33 bp, Homo sapien
ttagtagaatttttaaactggctttccatggat

SEQ ID NO: 1001276 - DNA, 33 bp, Homo sapien
ttagtagaatttttaacctggctttccatggat

SEQ ID NO: 1001277 - DNA, 33 bp, Homo sapien
gttttgtttttgtacactatgcttttaaacctc

SEQ ID NO: 1001278 - DNA, 33 bp, Homo sapien
gttttgtttttgtacattatgcttttaaacctc

SEQ ID NO: 1001279 - DNA, 33 bp, Homo sapien
gagccagcttattgcaccttagaaagttatagg

SEQ ID NO: 1001280 - DNA, 33 bp, Homo sapien
gagccagcttattgcatcttagaaagttatagg

SEQ ID NO: 1001281 - DNA, 33 bp, Homo sapien
tgttgatctgttgatccagtggtttccatgtgg

SEQ ID NO: 1001282 - DNA, 33 bp, Homo sapien
tgttgatctgttgatctagtggtttccatgtgg

SEQ ID NO: 1001283 - DNA, 33 bp, Homo sapien
acctattctgatcaatcagttaattttttaatt

SEQ ID NO: 1001284 - DNA, 33 bp, Homo sapien
acctattctgatcaatgagttaattttttaatt

SEQ ID NO: 1001285 - DNA, 33 bp, Homo sapien
aaggctcttgattggaggtagtacacagtgcac

SEQ ID NO: 1001286 - DNA, 33 bp, Homo sapien
aaggctcttgattggatgtagtacacagtgcac

SEQ ID NO: 1001287 - DNA, 33 bp, Homo sapien
ttgtgttgtcagttaaccattaacaaaatgacc

SEQ ID NO: 1001288 - DNA, 33 bp, Homo sapien
ttgtgttgtcagttaatcattaacaaaatgacc

SEQ ID NO: 1001289 - DNA, 33 bp, Homo sapien
ctaaacttagtgatgaagaagtaagttagagtc

SEQ ID NO: 1001290 - DNA, 33 bp, Homo sapien
ctaaacttagtgatgaggaagtaagttagagtc

SEQ ID NO: 1001291 - DNA, 33 bp, Homo sapien
tacatgactgtggacccactaaatgaagcaata

SEQ ID NO: 1001292 - DNA, 33 bp, Homo sapien
tacatgactgtggacctactaaatgaagcaata

SEQ ID NO: 1001293 - DNA, 33 bp, Homo sapien
atactacaatctagtcggaaaaaatctcattta

SEQ ID NO: 1001294 - DNA, 33 bp, Homo sapien
atactacaatctagtctgaaaaaatctcattta

SEQ ID NO: 1001295 - DNA, 33 bp, Homo sapien
gatatcatctttcccaaagaacagatttggtct

SEQ ID NO: 1001296 - DNA, 33 bp, Homo sapien
gatatcatctttcccagagaacagatttggtct

SEQ ID NO: 1001297 - DNA, 33 bp, Homo sapien
gccctggggccttccactcatgaagcaatggat

SEQ ID NO: 1001298 - DNA, 33 bp, Homo sapien
gccctggggccttccagtcatgaagcaatggat

SEQ ID NO: 1001299 - DNA, 33 bp, Homo sapien
gggcaatgggaaactcagactctctcacagctt

SEQ ID NO: 1001300 - DNA, 33 bp, Homo sapien
gggcaatgggaaactcggactctctcacagctt

SEQ ID NO: 1001301 - DNA, 33 bp, Homo sapien
gagagggctacaagccaaggaatgccagcaact

SEQ ID NO: 1001302 - DNA, 33 bp, Homo sapien
gagagggctacaagccgaggaatgccagcaact

SEQ ID NO: 1001303 - DNA, 33 bp, Homo sapien
tggcccttgttctccaatgcctttagacttttt

SEQ ID NO: 1001304 - DNA, 33 bp, Homo sapien
tggcccttgttctccactgcctttagacttttt

SEQ ID NO: 1001305 - DNA, 33 bp, Homo sapien
tttagaggatgctggaaggggtagtagtagttg

SEQ ID NO: 1001306 - DNA, 33 bp, Homo sapien
tttagaggatgctggagggggtagtagtagttg

SEQ ID NO: 1001307 - DNA, 33 bp, Homo sapien
aggttaggtactgggcacgtgaatcctgaactg

SEQ ID NO: 1001308 - DNA, 33 bp, Homo sapien
aggttaggtactgggcgcgtgaatcctgaactg

SEQ ID NO: 1001309 - DNA, 33 bp, Homo sapien
agataacacaattggaatatttagacatgtttt

SEQ ID NO: 1001310 - DNA, 33 bp, Homo sapien
agataacacaattggactatttagacatgtttt

SEQ ID NO: 1001311 - DNA, 33 bp, Homo sapien
gagcaaggatgataacacagaagcactagctaa

SEQ ID NO: 1001312 - DNA, 33 bp, Homo sapien
gagcaaggatgataacgcagaagcactagctaa

SEQ ID NO: 1001313 - DNA, 33 bp, Homo sapien
tatctggaagggatatcagtgagttagcccaag

SEQ ID NO: 1001314 - DNA, 33 bp, Homo sapien
tatctggaagggatattagtgagttagcccaag

SEQ ID NO: 1001315 - DNA, 33 bp, Homo sapien
gcctgtccctctggtcacttcttacccaatgta

SEQ ID NO: 1001316 - DNA, 33 bp, Homo sapien
gcctgtccctctggtcgcttcttacccaatgta

SEQ ID NO: 1001317 - DNA, 33 bp, Homo sapien
tatcttgaacactttacgtgaataggggaagaa

SEQ ID NO: 1001318 - DNA, 33 bp, Homo sapien
tatcttgaacactttatgtgaataggggaagaa

SEQ ID NO: 1001319 - DNA, 33 bp, Homo sapien
gctaaccacttaacaccgaaaatggtaacacag

SEQ ID NO: 1001320 - DNA, 33 bp, Homo sapien
gctaaccacttaacactgaaaatggtaacacag

SEQ ID NO: 1001321 - DNA, 33 bp, Homo sapien
cttttacaaagtgaccaatgctaatgcactgca

SEQ ID NO: 1001322 - DNA, 33 bp, Homo sapien
cttttacaaagtgaccgatgctaatgcactgca

SEQ ID NO: 1001323 - DNA, 33 bp, Homo sapien
ccccgctcgaaactccaaacgcacattatgttt

SEQ ID NO: 1001324 - DNA, 33 bp, Homo sapien
ccccgctcgaaactcccaacgcacattatgttt

SEQ ID NO: 1001325 - DNA, 33 bp, Homo sapien
agtgtgtacttcatcacagtctggaagtgacaa

SEQ ID NO: 1001326 - DNA, 33 bp, Homo sapien
agtgtgtacttcatcagagtctggaagtgacaa

SEQ ID NO: 1001327 - DNA, 33 bp, Homo sapien
catgcagatatcctcactctatgtttcaatcaa

SEQ ID NO: 1001328 - DNA, 33 bp, Homo sapien
catgcagatatcctcattctatgtttcaatcaa

SEQ ID NO: 1001329 - DNA, 33 bp, Homo sapien
gcatgggtgaacctgacaattttaaactcccaa

SEQ ID NO: 1001330 - DNA, 33 bp, Homo sapien
gcatgggtgaacctgagaattttaaactcccaa

SEQ ID NO: 1001331 - DNA, 33 bp, Homo sapien
taggccagatgtagtacattcagtagagaattt

SEQ ID NO: 1001332 - DNA, 33 bp, Homo sapien
taggccagatgtagtatattcagtagagaattt

SEQ ID NO: 1001333 - DNA, 33 bp, Homo sapien
agatctagaaatttcaagatgatggtgtacgtg

SEQ ID NO: 1001334 - DNA, 33 bp, Homo sapien
agatctagaaatttcaggatgatggtgtacgtg

SEQ ID NO: 1001335 - DNA, 33 bp, Homo sapien
cttctcaattctgacaatatactgtgaaagcaa

SEQ ID NO: 1001336 - DNA, 33 bp, Homo sapien
cttctcaattctgacattatactgtgaaagcaa

SEQ ID NO: 1001337 - DNA, 33 bp, Homo sapien
atggacagaatgcagcggagttttttgctaggg

SEQ ID NO: 1001338 - DNA, 33 bp, Homo sapien
atggacagaatgcagctgagttttttgctaggg

SEQ ID NO: 1001339 - DNA, 33 bp, Homo sapien
gccttcactgtccctacctctatcagtattttg

SEQ ID NO: 1001340 - DNA, 33 bp, Homo sapien
gccttcactgtccctatctctatcagtattttg

SEQ ID NO: 1001341 - DNA, 33 bp, Homo sapien
agtgtggtgttgccataaagatacctgaagatg

SEQ ID NO: 1001342 - DNA, 33 bp, Homo sapien
agtgtggtgttgccatgaagatacctgaagatg

SEQ ID NO: 1001343 - DNA, 33 bp, Homo sapien
gcttttggagcagaaactaggttttttaaaagg

SEQ ID NO: 1001344 - DNA, 33 bp, Homo sapien
gcttttggagcagaaagtaggttttttaaaagg

SEQ ID NO: 1001345 - DNA, 33 bp, Homo sapien
gccctgcaacagctaactctctatgcccaacgt

SEQ ID NO: 1001346 - DNA, 33 bp, Homo sapien
gccctgcaacagctaagtctctatgcccaacgt

SEQ ID NO: 1001347 - DNA, 33 bp, Homo sapien
accagagggaagacaagctggctccaggttctt

SEQ ID NO: 1001348 - DNA, 33 bp, Homo sapien
accagagggaagacaatctggctccaggttctt

SEQ ID NO: 1001349 - DNA, 33 bp, Homo sapien
attatgttgagtcaaagcaataccttttgataa

SEQ ID NO: 1001350 - DNA, 33 bp, Homo sapien
attatgttgagtcaaatcaataccttttgataa

SEQ ID NO: 1001351 - DNA, 33 bp, Homo sapien
gggaagaatgaggcaccatctgaaggagacaca

SEQ ID NO: 1001352 - DNA, 33 bp, Homo sapien
gggaagaatgaggcactatctgaaggagacaca

SEQ ID NO: 1001353 - DNA, 33 bp, Homo sapien
aaaaataaacctgtaactgtactggctcttgct

SEQ ID NO: 1001354 - DNA, 33 bp, Homo sapien
aaaaataaacctgtaattgtactggctcttgct

SEQ ID NO: 1001355 - DNA, 33 bp, Homo sapien
ctggaccttagttgtacggtcacccctatctac

SEQ ID NO: 1001356 - DNA, 33 bp, Homo sapien
ctggaccttagttgtatggtcacccctatctac

SEQ ID NO: 1001357 - DNA, 33 bp, Homo sapien
cctgggcagagttaggaaaacaggtcctcaaaa

SEQ ID NO: 1001358 - DNA, 33 bp, Homo sapien
cctgggcagagttaggtaaacaggtcctcaaaa

SEQ ID NO: 1001359 - DNA, 33 bp, Homo sapien
gtaaaagatgtctacaatgaaaattacaaaaca

SEQ ID NO: 1001360 - DNA, 33 bp, Homo sapien
gtaaaagatgtctacagtgaaaattacaaaaca

SEQ ID NO: 1001361 - DNA, 33 bp, Homo sapien
acaaatagtaaacaaaacaatgcacacatcttt

SEQ ID NO: 1001362 - DNA, 33 bp, Homo sapien
acaaatagtaaacaaagcaatgcacacatcttt

SEQ ID NO: 1001363 - DNA, 33 bp, Homo sapien
ggatatatgaagactgaaaccagtaagatggtg

SEQ ID NO: 1001364 - DNA, 33 bp, Homo sapien
ggatatatgaagactggaaccagtaagatggtg

SEQ ID NO: 1001365 - DNA, 33 bp, Homo sapien
tccaaatttgaaacggaagagaaaaaggagaga

SEQ ID NO: 1001366 - DNA, 33 bp, Homo sapien
tccaaatttgaaacgggagagaaaaaggagaga

SEQ ID NO: 1001367 - DNA, 33 bp, Homo sapien
caagtatgtggacacaatggctctaggacatag

SEQ ID NO: 1001368 - DNA, 33 bp, Homo sapien
caagtatgtggacacagtggctctaggacatag

SEQ ID NO: 1001369 - DNA, 33 bp, Homo sapien
atgtacacctgagctacaataaagaaggactgg

SEQ ID NO: 1001370 - DNA, 33 bp, Homo sapien
atgtacacctgagctagaataaagaaggactgg

SEQ ID NO: 1001371 - DNA, 33 bp, Homo sapien
tttaactattagtgaaactccaacagtggactc

SEQ ID NO: 1001372 - DNA, 33 bp, Homo sapien
tttaactattagtgaagctccaacagtggactc

SEQ ID NO: 1001373 - DNA, 33 bp, Homo sapien
agcacattagaagctacgttcattttttatggg

SEQ ID NO: 1001374 - DNA, 33 bp, Homo sapien
agcacattagaagctatgttcattttttatggg

SEQ ID NO: 1001375 - DNA, 33 bp, Homo sapien
cactaatccactaatcaactcatgagggcaaag

SEQ ID NO: 1001376 - DNA, 33 bp, Homo sapien
cactaatccactaatccactcatgagggcaaag

SEQ ID NO: 1001377 - DNA, 33 bp, Homo sapien
tccctattgtatgtgacctcaaaatacttagac

SEQ ID NO: 1001378 - DNA, 33 bp, Homo sapien
tccctattgtatgtgatctcaaaatacttagac

SEQ ID NO: 1001379 - DNA, 33 bp, Homo sapien
tggttgctgtgagcctaacccttattctttgtt

SEQ ID NO: 1001380 - DNA, 33 bp, Homo sapien
tggttgctgtgagccttacccttattctttgtt

SEQ ID NO: 1001381 - DNA, 33 bp, Homo sapien
agaaaagcaccagaggaatgtaggattgctgct

SEQ ID NO: 1001382 - DNA, 33 bp, Homo sapien
agaaaagcaccagaggtatgtaggattgctgct

SEQ ID NO: 1001383 - DNA, 33 bp, Homo sapien
tgcctccttgcctgagaaaggcttaagaaaagc

SEQ ID NO: 1001384 - DNA, 33 bp, Homo sapien
tgcctccttgcctgaggaaggcttaagaaaagc

SEQ ID NO: 1001385 - DNA, 33 bp, Homo sapien
gacaattgagcagtaaagacaatctgtccagat

SEQ ID NO: 1001386 - DNA, 33 bp, Homo sapien
gacaattgagcagtaaggacaatctgtccagat

SEQ ID NO: 1001387 - DNA, 33 bp, Homo sapien
taacactttgggttccaacagaaaatctggagt

SEQ ID NO: 1001388 - DNA, 33 bp, Homo sapien
taacactttgggttccgacagaaaatctggagt

SEQ ID NO: 1001389 - DNA, 33 bp, Homo sapien
gttctggtgactacagaaggcggtgacagaaag

SEQ ID NO: 1001390 - DNA, 33 bp, Homo sapien
gttctggtgactacaggaggcggtgacagaaag

SEQ ID NO: 1001391 - DNA, 33 bp, Homo sapien
gagataagctgaccaacagactttttctttcgt

SEQ ID NO: 1001392 - DNA, 33 bp, Homo sapien
gagataagctgaccaatagactttttctttcgt

SEQ ID NO: 1001393 - DNA, 33 bp, Homo sapien
tctcaatctggggaagaaagttaaggaggtgat

SEQ ID NO: 1001394 - DNA, 33 bp, Homo sapien
tctcaatctggggaagtaagttaaggaggtgat

SEQ ID NO: 1001395 - DNA, 33 bp, Homo sapien
aaaaccagtgtctacgcatgtgttgaacaaagc

SEQ ID NO: 1001396 - DNA, 33 bp, Homo sapien
aaaaccagtgtctacggatgtgttgaacaaagc

SEQ ID NO: 1001397 - DNA, 33 bp, Homo sapien
tgccaaagcaggtaacacttacagtactcagaa

SEQ ID NO: 1001398 - DNA, 33 bp, Homo sapien
tgccaaagcaggtaacgcttacagtactcagaa

SEQ ID NO: 1001399 - DNA, 33 bp, Homo sapien
tagtacatattaagaacgcaacagtgggtagca

SEQ ID NO: 1001400 - DNA, 33 bp, Homo sapien
tagtacatattaagaatgcaacagtgggtagca

SEQ ID NO: 1001401 - DNA, 33 bp, Homo sapien
tcatctggttttgatacagaaggaggatgacac

SEQ ID NO: 1001402 - DNA, 33 bp, Homo sapien
tcatctggttttgatatagaaggaggatgacac

SEQ ID NO: 1001403 - DNA, 33 bp, Homo sapien
gtggttaaagttcacactatttcccaaatctat

SEQ ID NO: 1001404 - DNA, 33 bp, Homo sapien
gtggttaaagttcacagtatttcccaaatctat

SEQ ID NO: 1001405 - DNA, 33 bp, Homo sapien
gaagcattatctactacgatgtctcatggttaa

SEQ ID NO: 1001406 - DNA, 33 bp, Homo sapien
gaagcattatctactatgatgtctcatggttaa

SEQ ID NO: 1001407 - DNA, 33 bp, Homo sapien
aaagtgtagaagtcaaatatttttaacatatag

SEQ ID NO: 1001408 - DNA, 33 bp, Homo sapien
aaagtgtagaagtcaagtatttttaacatatag

SEQ ID NO: 1001409 - DNA, 33 bp, Homo sapien
ttattcattccttcatcagtttatggacacttc

SEQ ID NO: 1001410 - DNA, 33 bp, Homo sapien
ttattcattccttcattagtttatggacacttc

SEQ ID NO: 1001411 - DNA, 33 bp, Homo sapien
tccaatgcatttcccacaaaaataccaccatct

SEQ ID NO: 1001412 - DNA, 33 bp, Homo sapien
tccaatgcatttcccataaaaataccaccatct

SEQ ID NO: 1001413 - DNA, 33 bp, Homo sapien
ggctttccttactggtcacatacatgacacagc

SEQ ID NO: 1001414 - DNA, 33 bp, Homo sapien
ggctttccttactggtgacatacatgacacagc

SEQ ID NO: 1001415 - DNA, 33 bp, Homo sapien
tgggctgggccataaggctcccaagagtttcta

SEQ ID NO: 1001416 - DNA, 33 bp, Homo sapien
tgggctgggccataagtctcccaagagtttcta

SEQ ID NO: 1001417 - DNA, 33 bp, Homo sapien
aatttttgtcggtatacagtaggtgtatatatt

SEQ ID NO: 1001418 - DNA, 33 bp, Homo sapien
aatttttgtcggtatatagtaggtgtatatatt

SEQ ID NO: 1001419 - DNA, 33 bp, Homo sapien
ctaatttttgtacacagtaaccatctccacttc

SEQ ID NO: 1001420 - DNA, 33 bp, Homo sapien
ctaatttttgtacacattaaccatctccacttc

SEQ ID NO: 1001421 - DNA, 33 bp, Homo sapien
gtttccattgctcaacacatttttgaaattcca

SEQ ID NO: 1001422 - DNA, 33 bp, Homo sapien
gtttccattgctcaacgcatttttgaaattcca

SEQ ID NO: 1001423 - DNA, 33 bp, Homo sapien
aaacacttggaataaacggcaacatacaggtgc

SEQ ID NO: 1001424 - DNA, 33 bp, Homo sapien
aaacacttggaataaatggcaacatacaggtgc

SEQ ID NO: 1001425 - DNA, 33 bp, Homo sapien
gtttggcttaacttacactatctaagagctgga

SEQ ID NO: 1001426 - DNA, 33 bp, Homo sapien
gtttggcttaacttacgctatctaagagctgga

SEQ ID NO: 1001427 - DNA, 33 bp, Homo sapien
aaatgttgaatcaaacaatttcttcttacaatt

SEQ ID NO: 1001428 - DNA, 33 bp, Homo sapien
aaatgttgaatcaaaccatttcttcttacaatt

SEQ ID NO: 1001429 - DNA, 33 bp, Homo sapien
cactaggaatcttagaaccaaatttgtgtctcc

SEQ ID NO: 1001430 - DNA, 33 bp, Homo sapien
cactaggaatcttagagccaaatttgtgtctcc

SEQ ID NO: 1001431 - DNA, 33 bp, Homo sapien
ctaactcaaatcctaccacttctgggaagcctt

SEQ ID NO: 1001432 - DNA, 33 bp, Homo sapien
ctaactcaaatcctactacttctgggaagcctt

SEQ ID NO: 1001433 - DNA, 33 bp, Homo sapien
caaggatcaatgtccacgtttctctctgcctag

SEQ ID NO: 1001434 - DNA, 33 bp, Homo sapien
caaggatcaatgtccatgtttctctctgcctag

SEQ ID NO: 1001435 - DNA, 33 bp, Homo sapien
gtttaatgatctcagaagtataagataagctat

SEQ ID NO: 1001436 - DNA, 33 bp, Homo sapien
gtttaatgatctcagaggtataagataagctat

SEQ ID NO: 1001437 - DNA, 33 bp, Homo sapien
tgtcatgacacccggacgttcacaaccctcagg

SEQ ID NO: 1001438 - DNA, 33 bp, Homo sapien
tgtcatgacacccggatgttcacaaccctcagg

SEQ ID NO: 1001439 - DNA, 33 bp, Homo sapien
atgggtcactaatgtacaaaagtgtcatgacac

SEQ ID NO: 1001440 - DNA, 33 bp, Homo sapien
atgggtcactaatgtagaaaagtgtcatgacac

SEQ ID NO: 1001441 - DNA, 33 bp, Homo sapien
agtttcagctccttcactgaaatccaaacacat

SEQ ID NO: 1001442 - DNA, 33 bp, Homo sapien
agtttcagctccttcattgaaatccaaacacat

SEQ ID NO: 1001443 - DNA, 33 bp, Homo sapien
tggaaagccctacaagaagcagggagtagccta

SEQ ID NO: 1001444 - DNA, 33 bp, Homo sapien
tggaaagccctacaaggagcagggagtagccta

SEQ ID NO: 1001445 - DNA, 33 bp, Homo sapien
ctgatgggcacaaacaaacagcattcttagtta

SEQ ID NO: 1001446 - DNA, 33 bp, Homo sapien
ctgatgggcacaaacagacagcattcttagtta

SEQ ID NO: 1001447 - DNA, 33 bp, Homo sapien
tttcctgccaaaatgccaaagtttgtttctata

SEQ ID NO: 1001448 - DNA, 33 bp, Homo sapien
tttcctgccaaaatgctaaagtttgtttctata

SEQ ID NO: 1001449 - DNA, 33 bp, Homo sapien
caaagacgtaatttacagctcgttttgggctaa

SEQ ID NO: 1001450 - DNA, 33 bp, Homo sapien
caaagacgtaatttactgctcgttttgggctaa

SEQ ID NO: 1001451 - DNA, 33 bp, Homo sapien
gagagctgaaggcgcacaagattactcgtggaa

SEQ ID NO: 1001452 - DNA, 33 bp, Homo sapien
gagagctgaaggcgcagaagattactcgtggaa

SEQ ID NO: 1001453 - DNA, 33 bp, Homo sapien
ctttatgggacagaaacgtgacagataacatct

SEQ ID NO: 1001454 - DNA, 33 bp, Homo sapien
ctttatgggacagaaatgtgacagataacatct

SEQ ID NO: 1001455 - DNA, 33 bp, Homo sapien
ggattccactgaaatccattgacaggtaaatgg

SEQ ID NO: 1001456 - DNA, 33 bp, Homo sapien
ggattccactgaaatctattgacaggtaaatgg

SEQ ID NO: 1001457 - DNA, 33 bp, Homo sapien
ttcatcttctttaatcactgttttcatcacatc

SEQ ID NO: 1001458 - DNA, 33 bp, Homo sapien
ttcatcttctttaatcgctgttttcatcacatc

SEQ ID NO: 1001459 - DNA, 33 bp, Homo sapien
gctgggtttccatgtaactgtgtggacaaaaca

SEQ ID NO: 1001460 - DNA, 33 bp, Homo sapien
gctgggtttccatgtagctgtgtggacaaaaca

SEQ ID NO: 1001461 - DNA, 33 bp, Homo sapien
gtgagtgattttaaaaaacattaaatgtgcaaa

SEQ ID NO: 1001462 - DNA, 33 bp, Homo sapien
gtgagtgattttaaaagacattaaatgtgcaaa

SEQ ID NO: 1001463 - DNA, 33 bp, Homo sapien
catctgctctggcaagaaagtgcacaaagcaca

SEQ ID NO: 1001464 - DNA, 33 bp, Homo sapien
catctgctctggcaaggaagtgcacaaagcaca

SEQ ID NO: 1001465 - DNA, 33 bp, Homo sapien
cagctgcagctcctacactctccaggagactag

SEQ ID NO: 1001466 - DNA, 33 bp, Homo sapien
cagctgcagctcctacgctctccaggagactag

SEQ ID NO: 1001467 - DNA, 33 bp, Homo sapien
agggtcttggttctaactgagctcacattctaa

SEQ ID NO: 1001468 - DNA, 33 bp, Homo sapien
agggtcttggttctaattgagctcacattctaa

SEQ ID NO: 1001469 - DNA, 33 bp, Homo sapien
tgaggtcccaagtgaacagagaggcctttggac

SEQ ID NO: 1001470 - DNA, 33 bp, Homo sapien
tgaggtcccaagtgaagagagaggcctttggac

SEQ ID NO: 1001471 - DNA, 33 bp, Homo sapien
gcgtaagtcagggaaacatatacattaacaaat

SEQ ID NO: 1001472 - DNA, 33 bp, Homo sapien
gcgtaagtcagggaaagatatacattaacaaat

SEQ ID NO: 1001473 - DNA, 33 bp, Homo sapien
ctatactgggcagaagaacattgctgtatggga

SEQ ID NO: 1001474 - DNA, 33 bp, Homo sapien
ctatactgggcagaagcacattgctgtatggga

SEQ ID NO: 1001475 - DNA, 33 bp, Homo sapien
caacatgatttcaggaaaattaaatgcctggat

SEQ ID NO: 1001476 - DNA, 33 bp, Homo sapien
caacatgatttcaggagaattaaatgcctggat

SEQ ID NO: 1001477 - DNA, 33 bp, Homo sapien
tgtattcaggatgtaacagaaccacaatggttt

SEQ ID NO: 1001478 - DNA, 33 bp, Homo sapien
tgtattcaggatgtaatagaaccacaatggttt

SEQ ID NO: 1001479 - DNA, 33 bp, Homo sapien
aggctggaatcatctacgaggtaatggataaca

SEQ ID NO: 1001480 - DNA, 33 bp, Homo sapien
aggctggaatcatctatgaggtaatggataaca

SEQ ID NO: 1001481 - DNA, 33 bp, Homo sapien
acacgtgcccttcctgcagaccatgttcagtta

SEQ ID NO: 1001482 - DNA, 33 bp, Homo sapien
acacgtgcccttcctggagaccatgttcagtta

SEQ ID NO: 1001483 - DNA, 33 bp, Homo sapien
ttgttttgatagaaagacaacaggtcatgggct

SEQ ID NO: 1001484 - DNA, 33 bp, Homo sapien
ttgttttgatagaaaggcaacaggtcatgggct

SEQ ID NO: 1001485 - DNA, 33 bp, Homo sapien
gaggagttgaggggcaaacaataaatgtgaaag

SEQ ID NO: 1001486 - DNA, 33 bp, Homo sapien
gaggagttgaggggcagacaataaatgtgaaag

SEQ ID NO: 1001487 - DNA, 33 bp, Homo sapien
atcctcattatctgtaataagagtcaccaccaa

SEQ ID NO: 1001488 - DNA, 33 bp, Homo sapien
atcctcattatctgtagtaagagtcaccaccaa

SEQ ID NO: 1001489 - DNA, 33 bp, Homo sapien
ccaaaaaggcctgtcaatcagctataaatgggt

SEQ ID NO: 1001490 - DNA, 33 bp, Homo sapien
ccaaaaaggcctgtcagtcagctataaatgggt

SEQ ID NO: 1001491 - DNA, 33 bp, Homo sapien
tctcaaaagtgttctccctgtgattaaggctgg

SEQ ID NO: 1001492 - DNA, 33 bp, Homo sapien
tctcaaaagtgttctctctgtgattaaggctgg

SEQ ID NO: 1001493 - DNA, 33 bp, Homo sapien
tgagaacagactaacacattttgtggtatacat

SEQ ID NO: 1001494 - DNA, 33 bp, Homo sapien
tgagaacagactaacatattttgtggtatacat

SEQ ID NO: 1001495 - DNA, 33 bp, Homo sapien
taatctgcccttaccaatagagtcctctgtaga

SEQ ID NO: 1001496 - DNA, 33 bp, Homo sapien
taatctgcccttaccagtagagtcctctgtaga

SEQ ID NO: 1001497 - DNA, 33 bp, Homo sapien
catgtattagactggcaaaaattaggaagctgg

SEQ ID NO: 1001498 - DNA, 33 bp, Homo sapien
catgtattagactggcgaaaattaggaagctgg

SEQ ID NO: 1001499 - DNA, 33 bp, Homo sapien
cttaatttcaaaattacgttcatatgtgccaat

SEQ ID NO: 1001500 - DNA, 33 bp, Homo sapien
cttaatttcaaaattatgttcatatgtgccaat

SEQ ID NO: 1001501 - DNA, 33 bp, Homo sapien
gccagggaattcagaaagcagtacctactccaa

SEQ ID NO: 1001502 - DNA, 33 bp, Homo sapien
gccagggaattcagaatgcagtacctactccaa

SEQ ID NO: 1001503 - DNA, 33 bp, Homo sapien
tttcaaatacatccaacgcttgagagacctttg

SEQ ID NO: 1001504 - DNA, 33 bp, Homo sapien
tttcaaatacatccaatgcttgagagacctttg

SEQ ID NO: 1001505 - DNA, 33 bp, Homo sapien
ttacatgggtgttcaacgaatgattttttaaac

SEQ ID NO: 1001506 - DNA, 33 bp, Homo sapien
ttacatgggtgttcaatgaatgattttttaaac

SEQ ID NO: 1001507 - DNA, 33 bp, Homo sapien
agttaagtgctgaccacgtggctggcactctcc

SEQ ID NO: 1001508 - DNA, 33 bp, Homo sapien
agttaagtgctgaccatgtggctggcactctcc

SEQ ID NO: 1001509 - DNA, 33 bp, Homo sapien
gattgtaacacaattcacaatcaagatttgtct

SEQ ID NO: 1001510 - DNA, 33 bp, Homo sapien
gattgtaacacaattcgcaatcaagatttgtct

SEQ ID NO: 1001511 - DNA, 33 bp, Homo sapien
aggagctgccagaagaagaaaatcagttaatat

SEQ ID NO: 1001512 - DNA, 33 bp, Homo sapien
aggagctgccagaagaggaaaatcagttaatat

SEQ ID NO: 1001513 - DNA, 33 bp, Homo sapien
aaattctgagacgtaacaactaggaggaaaaat

SEQ ID NO: 1001514 - DNA, 33 bp, Homo sapien
aaattctgagacgtaagaactaggaggaaaaat

SEQ ID NO: 1001515 - DNA, 33 bp, Homo sapien
ccaagctgctaatcacaaaagtgcatgatactt

SEQ ID NO: 1001516 - DNA, 33 bp, Homo sapien
ccaagctgctaatcaccaaagtgcatgatactt

SEQ ID NO: 1001517 - DNA, 33 bp, Homo sapien
gggtaactgaaaccaaagaaatgactccagtat

SEQ ID NO: 1001518 - DNA, 33 bp, Homo sapien
gggtaactgaaaccaaggaaatgactccagtat

SEQ ID NO: 1001519 - DNA, 33 bp, Homo sapien
ggactgttgaagaataaaggtcaggtgatgaag

SEQ ID NO: 1001520 - DNA, 33 bp, Homo sapien
ggactgttgaagaatataggtcaggtgatgaag

SEQ ID NO: 1001521 - DNA, 33 bp, Homo sapien
ccacaagtctggaaggaatctttctattgcctg

SEQ ID NO: 1001522 - DNA, 33 bp, Homo sapien
ccacaagtctggaagggatctttctattgcctg

SEQ ID NO: 1001523 - DNA, 33 bp, Homo sapien
tcttttttgtaggtcaaagtcactacattaact

SEQ ID NO: 1001524 - DNA, 33 bp, Homo sapien
tcttttttgtaggtcatagtcactacattaact

SEQ ID NO: 1001525 - DNA, 33 bp, Homo sapien
aacttatcataaaaggaaacaaggagcttgaga

SEQ ID NO: 1001526 - DNA, 33 bp, Homo sapien
aacttatcataaaagggaacaaggagcttgaga

SEQ ID NO: 1001527 - DNA, 33 bp, Homo sapien
cgtgaaactctgccaacatagaaactgcccgac

SEQ ID NO: 1001528 - DNA, 33 bp, Homo sapien
cgtgaaactctgccaagatagaaactgcccgac

SEQ ID NO: 1001529 - DNA, 33 bp, Homo sapien
aaaatgaccaacaaaacgcacaaaaatatgaaa

SEQ ID NO: 1001530 - DNA, 33 bp, Homo sapien
aaaatgaccaacaaaatgcacaaaaatatgaaa

SEQ ID NO: 1001531 - DNA, 33 bp, Homo sapien
tcattattcatggtaactgtgttttataaagtc

SEQ ID NO: 1001532 - DNA, 33 bp, Homo sapien
tcattattcatggtaattgtgttttataaagtc

SEQ ID NO: 1001533 - DNA, 33 bp, Homo sapien
actggggcctatcagacgtgggaatggaggaaa

SEQ ID NO: 1001534 - DNA, 33 bp, Homo sapien
actggggcctatcagaggtgggaatggaggaaa

SEQ ID NO: 1001535 - DNA, 33 bp, Homo sapien
atgtttttttggtgaacttactcctttatcatt

SEQ ID NO: 1001536 - DNA, 33 bp, Homo sapien
atgtttttttggtgaatttactcctttatcatt

SEQ ID NO: 1001537 - DNA, 33 bp, Homo sapien
aaaatcagtaagggtagagctgaactcaacgat

SEQ ID NO: 1001538 - DNA, 33 bp, Homo sapien
aaaatcagtaagggtatagctgaactcaacgat

SEQ ID NO: 1001539 - DNA, 33 bp, Homo sapien
cttcatagagcagcaagttatagttttaatgaa

SEQ ID NO: 1001540 - DNA, 33 bp, Homo sapien
cttcatagagcagcaatttatagttttaatgaa

SEQ ID NO: 1001541 - DNA, 33 bp, Homo sapien
ctggggtcctaaataaaagtgaaatgcagtcta

SEQ ID NO: 1001542 - DNA, 33 bp, Homo sapien
ctggggtcctaaataacagtgaaatgcagtcta

SEQ ID NO: 1001543 - DNA, 33 bp, Homo sapien
agcagtcttaaaaaaaatagatgcttaattagg

SEQ ID NO: 1001544 - DNA, 33 bp, Homo sapien
agcagtcttaaaaaaagtagatgcttaattagg

SEQ ID NO: 1001545 - DNA, 33 bp, Homo sapien
actggtaggctatgaacagaactaaaaatataa

SEQ ID NO: 1001546 - DNA, 33 bp, Homo sapien
actggtaggctatgaagagaactaaaaatataa

SEQ ID NO: 1001547 - DNA, 33 bp, Homo sapien
aagtctctctgacaccagcctttagtttagacg

SEQ ID NO: 1001548 - DNA, 33 bp, Homo sapien
aagtctctctgacaccggcctttagtttagacg

SEQ ID NO: 1001549 - DNA, 33 bp, Homo sapien
aaggtcagaaagggaaagtctttacatctgttc

SEQ ID NO: 1001550 - DNA, 33 bp, Homo sapien
aaggtcagaaagggaatgtctttacatctgttc

SEQ ID NO: 1001551 - DNA, 33 bp, Homo sapien
gaaacacaggagtctaaaagtggcccacggaga

SEQ ID NO: 1001552 - DNA, 33 bp, Homo sapien
gaaacacaggagtctagaagtggcccacggaga

SEQ ID NO: 1001553 - DNA, 33 bp, Homo sapien
aacttgctgattagtcactgtgttgtagtaatt

SEQ ID NO: 1001554 - DNA, 33 bp, Homo sapien
aacttgctgattagtccctgtgttgtagtaatt

SEQ ID NO: 1001555 - DNA, 33 bp, Homo sapien
ctcttaaacaaaggacactgaatatagttccta

SEQ ID NO: 1001556 - DNA, 33 bp, Homo sapien
ctcttaaacaaaggacgctgaatatagttccta

SEQ ID NO: 1001557 - DNA, 33 bp, Homo sapien
gttctcttgctttaggacatttatttattagat

SEQ ID NO: 1001558 - DNA, 33 bp, Homo sapien
gttctcttgctttaggtcatttatttattagat

SEQ ID NO: 1001559 - DNA, 33 bp, Homo sapien
tttaaaaatagcaatgccatgtaaaatttaatt

SEQ ID NO: 1001560 - DNA, 33 bp, Homo sapien
tttaaaaatagcaatgtcatgtaaaatttaatt

SEQ ID NO: 1001561 - DNA, 33 bp, Homo sapien
cagtatttacttctcagagcaggaaaatagaaa

SEQ ID NO: 1001562 - DNA, 33 bp, Homo sapien
cagtatttacttctcatagcaggaaaatagaaa

SEQ ID NO: 1001563 - DNA, 33 bp, Homo sapien
tatcaacacaggaacaactctatctaggccaac

SEQ ID NO: 1001564 - DNA, 33 bp, Homo sapien
tatcaacacaggaacagctctatctaggccaac

SEQ ID NO: 1001565 - DNA, 33 bp, Homo sapien
aggaaacaaaactcaacgctacaaaacaaagaa

SEQ ID NO: 1001566 - DNA, 33 bp, Homo sapien
aggaaacaaaactcaatgctacaaaacaaagaa

SEQ ID NO: 1001567 - DNA, 33 bp, Homo sapien
ggcggaaaggccagtcccagttcacacgctccg

SEQ ID NO: 1001568 - DNA, 33 bp, Homo sapien
ggcggaaaggccagtctcagttcacacgctccg

SEQ ID NO: 1001569 - DNA, 33 bp, Homo sapien
acactgcccatgctgcccacttaagagtccgcg

SEQ ID NO: 1001570 - DNA, 33 bp, Homo sapien
acactgcccatgctgctcacttaagagtccgcg

SEQ ID NO: 1001571 - DNA, 33 bp, Homo sapien
acagcttcatgaaatccagtgtagctttgttcc

SEQ ID NO: 1001572 - DNA, 33 bp, Homo sapien
acagcttcatgaaatctagtgtagctttgttcc

SEQ ID NO: 1001573 - DNA, 33 bp, Homo sapien
ccagaagatgcacaaacatgaccaacatcaatc

SEQ ID NO: 1001574 - DNA, 33 bp, Homo sapien
ccagaagatgcacaaagatgaccaacatcaatc

SEQ ID NO: 1001575 - DNA, 33 bp, Homo sapien
caaggaatttatgaaaaagacctcaaaagctta

SEQ ID NO: 1001576 - DNA, 33 bp, Homo sapien
caaggaatttatgaaagagacctcaaaagctta

SEQ ID NO: 1001577 - DNA, 33 bp, Homo sapien
tggctttagtttagcccgaagaattaaaagaat

SEQ ID NO: 1001578 - DNA, 33 bp, Homo sapien
tggctttagtttagcctgaagaattaaaagaat

SEQ ID NO: 1001579 - DNA, 33 bp, Homo sapien
aggtaccaggaatgaacagatggaaagaaaatg

SEQ ID NO: 1001580 - DNA, 33 bp, Homo sapien
aggtaccaggaatgaagagatggaaagaaaatg

SEQ ID NO: 1001581 - DNA, 33 bp, Homo sapien
tcatcactgccgtcaacacagtcttcatcccca

SEQ ID NO: 1001582 - DNA, 33 bp, Homo sapien
tcatcactgccgtcaatacagtcttcatcccca

SEQ ID NO: 1001583 - DNA, 33 bp, Homo sapien
ataggcatttctcacaatgatcttttaatagat

SEQ ID NO: 1001584 - DNA, 33 bp, Homo sapien
ataggcatttctcacagtgatcttttaatagat

SEQ ID NO: 1001585 - DNA, 33 bp, Homo sapien
gagagatcaggtgtagaacaaggtctgccatga

SEQ ID NO: 1001586 - DNA, 33 bp, Homo sapien
gagagatcaggtgtagcacaaggtctgccatga

SEQ ID NO: 1001587 - DNA, 33 bp, Homo sapien
tccaaatgaagagagagaaccatacggcaattt

SEQ ID NO: 1001588 - DNA, 33 bp, Homo sapien
tccaaatgaagagagataaccatacggcaattt

SEQ ID NO: 1001589 - DNA, 33 bp, Homo sapien
attttaacattagcaggcagttatggatattag

SEQ ID NO: 1001590 - DNA, 33 bp, Homo sapien
attttaacattagcagtcagttatggatattag

SEQ ID NO: 1001591 - DNA, 33 bp, Homo sapien
cttcttatctagaaaactgaaagtaacagcctt

SEQ ID NO: 1001592 - DNA, 33 bp, Homo sapien
cttcttatctagaaaattgaaagtaacagcctt

SEQ ID NO: 1001593 - DNA, 33 bp, Homo sapien
tcacaggccttgaactcacttgccttgaccaat

SEQ ID NO: 1001594 - DNA, 33 bp, Homo sapien
tcacaggccttgaacttacttgccttgaccaat

SEQ ID NO: 1001595 - DNA, 33 bp, Homo sapien
ttacataggtaaaaaccgaggctacaaacaatc

SEQ ID NO: 1001596 - DNA, 33 bp, Homo sapien
ttacataggtaaaaactgaggctacaaacaatc

SEQ ID NO: 1001597 - DNA, 33 bp, Homo sapien
atgcgacatccagctcaatctttgtacagtact

SEQ ID NO: 1001598 - DNA, 33 bp, Homo sapien
atgcgacatccagctcgatctttgtacagtact

SEQ ID NO: 1001599 - DNA, 33 bp, Homo sapien
gttacggggaagcacaaacatttcttaaacttt

SEQ ID NO: 1001600 - DNA, 33 bp, Homo sapien
gttacggggaagcacacacatttcttaaacttt

SEQ ID NO: 1001601 - DNA, 33 bp, Homo sapien
aaaacacataaccaggaaaaggaattacattga

SEQ ID NO: 1001602 - DNA, 33 bp, Homo sapien
aaaacacataaccagggaaaggaattacattga

SEQ ID NO: 1001603 - DNA, 33 bp, Homo sapien
ctaaacacacaaaaacgaagtaacaggtgtgat

SEQ ID NO: 1001604 - DNA, 33 bp, Homo sapien
ctaaacacacaaaaactaagtaacaggtgtgat

SEQ ID NO: 1001605 - DNA, 33 bp, Homo sapien
aaacttccttgcctgacgacattatgctaactt

SEQ ID NO: 1001606 - DNA, 33 bp, Homo sapien
aaacttccttgcctgaggacattatgctaactt

SEQ ID NO: 1001607 - DNA, 33 bp, Homo sapien
ttcaagcaatgggaagcctgctttcttcaaggg

SEQ ID NO: 1001608 - DNA, 33 bp, Homo sapien
ttcaagcaatgggaaggctgctttcttcaaggg

SEQ ID NO: 1001609 - DNA, 33 bp, Homo sapien
gcaaatgacttagtcactccaggcttgtttctt

SEQ ID NO: 1001610 - DNA, 33 bp, Homo sapien
gcaaatgacttagtcagtccaggcttgtttctt

SEQ ID NO: 1001611 - DNA, 33 bp, Homo sapien
atcatttcatagagcaaatagttctcttgaagc

SEQ ID NO: 1001612 - DNA, 33 bp, Homo sapien
atcatttcatagagcagatagttctcttgaagc

SEQ ID NO: 1001613 - DNA, 33 bp, Homo sapien
tacatttgcatttgtgaacctctgtgattctgt

SEQ ID NO: 1001614 - DNA, 33 bp, Homo sapien
tacatttgcatttgtgcacctctgtgattctgt

SEQ ID NO: 1001615 - DNA, 33 bp, Homo sapien
ccaagagcaaaatcaaagtttaagcttgatatt

SEQ ID NO: 1001616 - DNA, 33 bp, Homo sapien
ccaagagcaaaatcaaggtttaagcttgatatt

SEQ ID NO: 1001617 - DNA, 33 bp, Homo sapien
tggagagggcacaaagcagatggcagctaatat

SEQ ID NO: 1001618 - DNA, 33 bp, Homo sapien
tggagagggcacaaaggagatggcagctaatat

SEQ ID NO: 1001619 - DNA, 33 bp, Homo sapien
ttttggggactaaccaggtttttggaatgcttc

SEQ ID NO: 1001620 - DNA, 33 bp, Homo sapien
ttttggggactaaccatgtttttggaatgcttc

SEQ ID NO: 1001621 - DNA, 33 bp, Homo sapien
tatgcaagtgtcttcaggggaaagtgataggtt

SEQ ID NO: 1001622 - DNA, 33 bp, Homo sapien
tatgcaagtgtcttcatgggaaagtgataggtt

SEQ ID NO: 1001623 - DNA, 33 bp, Homo sapien
ttaatttgaatttttaccactgtgtctgtttca

SEQ ID NO: 1001624 - DNA, 33 bp, Homo sapien
ttaatttgaatttttagcactgtgtctgtttca

SEQ ID NO: 1001625 - DNA, 33 bp, Homo sapien
aattgagagtagattacatacgaggaactattt

SEQ ID NO: 1001626 - DNA, 33 bp, Homo sapien
aattgagagtagattatatacgaggaactattt

SEQ ID NO: 1001627 - DNA, 33 bp, Homo sapien
tattactcagttatcacgtttttgggaacacag

SEQ ID NO: 1001628 - DNA, 33 bp, Homo sapien
tattactcagttatcaggtttttgggaacacag

SEQ ID NO: 1001629 - DNA, 33 bp, Homo sapien
tttattcactgaatgggatgtaacagtcatttt

SEQ ID NO: 1001630 - DNA, 33 bp, Homo sapien
tttattcactgaatggtatgtaacagtcatttt

SEQ ID NO: 1001631 - DNA, 33 bp, Homo sapien
tgtgtgtaaatataaactctgaatctcttgtat

SEQ ID NO: 1001632 - DNA, 33 bp, Homo sapien
tgtgtgtaaatataaagtctgaatctcttgtat

SEQ ID NO: 1001633 - DNA, 33 bp, Homo sapien
atataaagaaaagatacacttggaaagcaatta

SEQ ID NO: 1001634 - DNA, 33 bp, Homo sapien
atataaagaaaagatagacttggaaagcaatta

SEQ ID NO: 1001635 - DNA, 33 bp, Homo sapien
gctggatatgcaaacacgatggagacacagttg

SEQ ID NO: 1001636 - DNA, 33 bp, Homo sapien
gctggatatgcaaacatgatggagacacagttg

SEQ ID NO: 1001637 - DNA, 33 bp, Homo sapien
aggaatggtaggaagacgtttttagggcctcac

SEQ ID NO: 1001638 - DNA, 33 bp, Homo sapien
aggaatggtaggaagatgtttttagggcctcac

SEQ ID NO: 1001639 - DNA, 33 bp, Homo sapien
ttcagtggcaggatgacacgatgttcttctgaa

SEQ ID NO: 1001640 - DNA, 33 bp, Homo sapien
ttcagtggcaggatgatacgatgttcttctgaa

SEQ ID NO: 1001641 - DNA, 33 bp, Homo sapien
ccctatagtagataaaccatgtgtacagatgag

SEQ ID NO: 1001642 - DNA, 33 bp, Homo sapien
ccctatagtagataaatcatgtgtacagatgag

SEQ ID NO: 1001643 - DNA, 33 bp, Homo sapien
actctgcaaactggaaacttaaccattctgctg

SEQ ID NO: 1001644 - DNA, 33 bp, Homo sapien
actctgcaaactggaagcttaaccattctgctg

SEQ ID NO: 1001645 - DNA, 33 bp, Homo sapien
ttgctgtgggcaaaaggaattaaatcagtgtgg

SEQ ID NO: 1001646 - DNA, 33 bp, Homo sapien
ttgctgtgggcaaaagtaattaaatcagtgtgg

SEQ ID NO: 1001647 - DNA, 33 bp, Homo sapien
tgtttctaggacctgtaaatgctgtggttaaac

SEQ ID NO: 1001648 - DNA, 33 bp, Homo sapien
tgtttctaggacctgtgaatgctgtggttaaac

SEQ ID NO: 1001649 - DNA, 33 bp, Homo sapien
taggaaatgataatcgacatacctcagtgccaa

SEQ ID NO: 1001650 - DNA, 33 bp, Homo sapien
taggaaatgataatcggcatacctcagtgccaa

SEQ ID NO: 1001651 - DNA, 33 bp, Homo sapien
aacaagccatttgtcacacataacttgaatgtg

SEQ ID NO: 1001652 - DNA, 33 bp, Homo sapien
aacaagccatttgtcatacataacttgaatgtg

SEQ ID NO: 1001653 - DNA, 33 bp, Homo sapien
ctactcagaagtaataccttttgctcttatttt

SEQ ID NO: 1001654 - DNA, 33 bp, Homo sapien
ctactcagaagtaatatcttttgctcttatttt

SEQ ID NO: 1001655 - DNA, 33 bp, Homo sapien
aatgcaagttcgatcacgtggcagcttaaaaaa

SEQ ID NO: 1001656 - DNA, 33 bp, Homo sapien
aatgcaagttcgatcatgtggcagcttaaaaaa

SEQ ID NO: 1001657 - DNA, 33 bp, Homo sapien
gtatgtgtttgctgtcccatttaaatgtctctc

SEQ ID NO: 1001658 - DNA, 33 bp, Homo sapien
gtatgtgtttgctgtctcatttaaatgtctctc

SEQ ID NO: 1001659 - DNA, 33 bp, Homo sapien
gtggcccctgagctcaaagaaggtttatatcat

SEQ ID NO: 1001660 - DNA, 33 bp, Homo sapien
gtggcccctgagctcacagaaggtttatatcat

SEQ ID NO: 1001661 - DNA, 33 bp, Homo sapien
aatccatagactgaaacagactcacaagaaaga

SEQ ID NO: 1001662 - DNA, 33 bp, Homo sapien
aatccatagactgaaatagactcacaagaaaga

SEQ ID NO: 1001663 - DNA, 33 bp, Homo sapien
ataacagtctctcacgcaacagtgcaatcaaat

SEQ ID NO: 1001664 - DNA, 33 bp, Homo sapien
ataacagtctctcacgtaacagtgcaatcaaat

SEQ ID NO: 1001665 - DNA, 33 bp, Homo sapien
ttattttggaagttaacagcaaattctggaaag

SEQ ID NO: 1001666 - DNA, 33 bp, Homo sapien
ttattttggaagttaagagcaaattctggaaag

SEQ ID NO: 1001667 - DNA, 33 bp, Homo sapien
gccctctaacgatgaacgctgcccaacaataat

SEQ ID NO: 1001668 - DNA, 33 bp, Homo sapien
gccctctaacgatgaaggctgcccaacaataat

SEQ ID NO: 1001669 - DNA, 33 bp, Homo sapien
tgggaaaagtcagaaaatgtctccccagctgca

SEQ ID NO: 1001670 - DNA, 33 bp, Homo sapien
tgggaaaagtcagaaattgtctccccagctgca

SEQ ID NO: 1001671 - DNA, 33 bp, Homo sapien
atttgtaccactgagaaggaaaaagcaagaatc

SEQ ID NO: 1001672 - DNA, 33 bp, Homo sapien
atttgtaccactgagagggaaaaagcaagaatc

SEQ ID NO: 1001673 - DNA, 33 bp, Homo sapien
aagaaaatagccatgcaccgaagtgtaatattt

SEQ ID NO: 1001674 - DNA, 33 bp, Homo sapien
aagaaaatagccatgcgccgaagtgtaatattt

SEQ ID NO: 1001675 - DNA, 33 bp, Homo sapien
aaatgtacattgctgacgtttaaaattgtaaat

SEQ ID NO: 1001676 - DNA, 33 bp, Homo sapien
aaatgtacattgctgatgtttaaaattgtaaat

SEQ ID NO: 1001677 - DNA, 33 bp, Homo sapien
tggcatattagcatgaccgttgataggcagctt

SEQ ID NO: 1001678 - DNA, 33 bp, Homo sapien
tggcatattagcatgatcgttgataggcagctt

SEQ ID NO: 1001679 - DNA, 33 bp, Homo sapien
gatctggtaagaacaaatgaacccatgtcttgt

SEQ ID NO: 1001680 - DNA, 33 bp, Homo sapien
gatctggtaagaacaactgaacccatgtcttgt

SEQ ID NO: 1001681 - DNA, 33 bp, Homo sapien
tgtttaattatagtcaccaagagctcaaagtca

SEQ ID NO: 1001682 - DNA, 33 bp, Homo sapien
tgtttaattatagtcatcaagagctcaaagtca

SEQ ID NO: 1001683 - DNA, 33 bp, Homo sapien
agataatgcatacaagaaataagaaaaggacac

SEQ ID NO: 1001684 - DNA, 33 bp, Homo sapien
agataatgcatacaagcaataagaaaaggacac

SEQ ID NO: 1001685 - DNA, 33 bp, Homo sapien
cctaactcatgggctactaccaggagcaaatca

SEQ ID NO: 1001686 - DNA, 33 bp, Homo sapien
cctaactcatgggctattaccaggagcaaatca

SEQ ID NO: 1001687 - DNA, 33 bp, Homo sapien
agcctgtggtgtccacgcttacggtagtttgct

SEQ ID NO: 1001688 - DNA, 33 bp, Homo sapien
agcctgtggtgtccactcttacggtagtttgct

SEQ ID NO: 1001689 - DNA, 33 bp, Homo sapien
gattgtattgatgatactaagcttgtgaagcag

SEQ ID NO: 1001690 - DNA, 33 bp, Homo sapien
gattgtattgatgatagtaagcttgtgaagcag

SEQ ID NO: 1001691 - DNA, 33 bp, Homo sapien
atgtttgtaaaactaaatggacgatgaaaacct

SEQ ID NO: 1001692 - DNA, 33 bp, Homo sapien
atgtttgtaaaactaagtggacgatgaaaacct

SEQ ID NO: 1001693 - DNA, 33 bp, Homo sapien
aatttttctggctgtaactctaacactttgtcc

SEQ ID NO: 1001694 - DNA, 33 bp, Homo sapien
aatttttctggctgtacctctaacactttgtcc

SEQ ID NO: 1001695 - DNA, 33 bp, Homo sapien
caattcacaggaaagaatacaaagacagcacaa

SEQ ID NO: 1001696 - DNA, 33 bp, Homo sapien
caattcacaggaaagagtacaaagacagcacaa

SEQ ID NO: 1001697 - DNA, 33 bp, Homo sapien
acagcaaagtgggtgcagaagtgagcccatggt

SEQ ID NO: 1001698 - DNA, 33 bp, Homo sapien
acagcaaagtgggtgcggaagtgagcccatggt

SEQ ID NO: 1001699 - DNA, 33 bp, Homo sapien
ccatacagacattcccagactaagccatttgca

SEQ ID NO: 1001700 - DNA, 33 bp, Homo sapien
ccatacagacattcccggactaagccatttgca

SEQ ID NO: 1001701 - DNA, 33 bp, Homo sapien
gtggaaggccagacaacgtgtactgaagaggcc

SEQ ID NO: 1001702 - DNA, 33 bp, Homo sapien
gtggaaggccagacaatgtgtactgaagaggcc

SEQ ID NO: 1001703 - DNA, 33 bp, Homo sapien
tattcttaatacagtacggaaaataagtattca

SEQ ID NO: 1001704 - DNA, 33 bp, Homo sapien
tattcttaatacagtagggaaaataagtattca

SEQ ID NO: 1001705 - DNA, 33 bp, Homo sapien
cacatcctcttaataccccactccagtctagta

SEQ ID NO: 1001706 - DNA, 33 bp, Homo sapien
cacatcctcttaatacgccactccagtctagta

SEQ ID NO: 1001707 - DNA, 33 bp, Homo sapien
tacttctgatgaattacaactcactactagaga

SEQ ID NO: 1001708 - DNA, 33 bp, Homo sapien
tacttctgatgaattagaactcactactagaga

SEQ ID NO: 1001709 - DNA, 33 bp, Homo sapien
atcaatatatcattaaccaaatcttccctgtgt

SEQ ID NO: 1001710 - DNA, 33 bp, Homo sapien
atcaatatatcattaatcaaatcttccctgtgt

SEQ ID NO: 1001711 - DNA, 33 bp, Homo sapien
aaatatattttacggaggatctttccattttaa

SEQ ID NO: 1001712 - DNA, 33 bp, Homo sapien
aaatatattttacggatgatctttccattttaa

SEQ ID NO: 1001713 - DNA, 33 bp, Homo sapien
ctaggtattctaatggccaaatctctcttttca

SEQ ID NO: 1001714 - DNA, 33 bp, Homo sapien
ctaggtattctaatgggcaaatctctcttttca

SEQ ID NO: 1001715 - DNA, 33 bp, Homo sapien
ggaatattggcaggtaacacgtacacctaccac

SEQ ID NO: 1001716 - DNA, 33 bp, Homo sapien
ggaatattggcaggtagcacgtacacctaccac

SEQ ID NO: 1001717 - DNA, 33 bp, Homo sapien
tggacttcttgcaatacaataggataaatttct

SEQ ID NO: 1001718 - DNA, 33 bp, Homo sapien
tggacttcttgcaatataataggataaatttct

SEQ ID NO: 1001719 - DNA, 33 bp, Homo sapien
gttgagagcttgaaagaacaaaaaggtagagga

SEQ ID NO: 1001720 - DNA, 33 bp, Homo sapien
gttgagagcttgaaaggacaaaaaggtagagga

SEQ ID NO: 1001721 - DNA, 33 bp, Homo sapien
actggaataaacacaaacctacattacttcatt

SEQ ID NO: 1001722 - DNA, 33 bp, Homo sapien
actggaataaacacaaccctacattacttcatt

SEQ ID NO: 1001723 - DNA, 33 bp, Homo sapien
atgttcttcgctggcaataggtgatgagtctgt

SEQ ID NO: 1001724 - DNA, 33 bp, Homo sapien
atgttcttcgctggcattaggtgatgagtctgt

SEQ ID NO: 1001725 - DNA, 33 bp, Homo sapien
ccttcaggtatcacaaatgtggtgaagtcttgg

SEQ ID NO: 1001726 - DNA, 33 bp, Homo sapien
ccttcaggtatcacaactgtggtgaagtcttgg

SEQ ID NO: 1001727 - DNA, 33 bp, Homo sapien
gatatcagcctggtaaataagtcagggaaagac

SEQ ID NO: 1001728 - DNA, 33 bp, Homo sapien
gatatcagcctggtaagtaagtcagggaaagac

SEQ ID NO: 1001729 - DNA, 33 bp, Homo sapien
tccttcttttatttgacgtaagcaagtgtctat

SEQ ID NO: 1001730 - DNA, 33 bp, Homo sapien
tccttcttttatttgatgtaagcaagtgtctat

SEQ ID NO: 1001731 - DNA, 33 bp, Homo sapien
tgcacaaatgaatgaacgacatcggtggaaaac

SEQ ID NO: 1001732 - DNA, 33 bp, Homo sapien
tgcacaaatgaatgaatgacatcggtggaaaac

SEQ ID NO: 1001733 - DNA, 33 bp, Homo sapien
tatgtaactccaggaacgaggaaacaaaagcaa

SEQ ID NO: 1001734 - DNA, 33 bp, Homo sapien
tatgtaactccaggaatgaggaaacaaaagcaa

SEQ ID NO: 1001735 - DNA, 33 bp, Homo sapien
tgccacattctcaacaccctttgtggctatagc

SEQ ID NO: 1001736 - DNA, 33 bp, Homo sapien
tgccacattctcaacatcctttgtggctatagc

SEQ ID NO: 1001737 - DNA, 33 bp, Homo sapien
gcttgtattttccttacgctatggttagatatt

SEQ ID NO: 1001738 - DNA, 33 bp, Homo sapien
gcttgtattttccttatgctatggttagatatt

SEQ ID NO: 1001739 - DNA, 33 bp, Homo sapien
gggctcctctgacctcacatgggcacggtgcca

SEQ ID NO: 1001740 - DNA, 33 bp, Homo sapien
gggctcctctgacctcgcatgggcacggtgcca

SEQ ID NO: 1001741 - DNA, 33 bp, Homo sapien
gtacctgaggacccgcaacctactcctgtaccc

SEQ ID NO: 1001742 - DNA, 33 bp, Homo sapien
gtacctgaggacccgcgacctactcctgtaccc

SEQ ID NO: 1001743 - DNA, 33 bp, Homo sapien
ggcagaattctttccccctttgccagaggaaaa

SEQ ID NO: 1001744 - DNA, 33 bp, Homo sapien
ggcagaattctttcccgctttgccagaggaaaa

SEQ ID NO: 1001745 - DNA, 33 bp, Homo sapien
aaagtttcctgtgctccgagaaaatagtcaggt

SEQ ID NO: 1001746 - DNA, 33 bp, Homo sapien
aaagtttcctgtgctctgagaaaatagtcaggt

SEQ ID NO: 1001747 - DNA, 33 bp, Homo sapien
gtgtgattctggatacattttgaaaatagaacc

SEQ ID NO: 1001748 - DNA, 33 bp, Homo sapien
gtgtgattctggatacgttttgaaaatagaacc

SEQ ID NO: 1001749 - DNA, 33 bp, Homo sapien
gggggagcttttacctcaataatcattgttctg

SEQ ID NO: 1001750 - DNA, 33 bp, Homo sapien
gggggagcttttaccttaataatcattgttctg

SEQ ID NO: 1001751 - DNA, 33 bp, Homo sapien
ctgtgatcgtgaccaaataatgtaaatttctct

SEQ ID NO: 1001752 - DNA, 33 bp, Homo sapien
ctgtgatcgtgaccaagtaatgtaaatttctct

SEQ ID NO: 1001753 - DNA, 33 bp, Homo sapien
cagcaggtgttttcaaataaagcatggcagata

SEQ ID NO: 1001754 - DNA, 33 bp, Homo sapien
cagcaggtgttttcaattaaagcatggcagata

SEQ ID NO: 1001755 - DNA, 33 bp, Homo sapien
gtggcaaaattttacacagaagttagactgttt

SEQ ID NO: 1001756 - DNA, 33 bp, Homo sapien
gtggcaaaattttacagagaagttagactgttt

SEQ ID NO: 1001757 - DNA, 33 bp, Homo sapien
atgtatttcttctgaaagccaaatatgacaggg

SEQ ID NO: 1001758 - DNA, 33 bp, Homo sapien
atgtatttcttctgaatgccaaatatgacaggg

SEQ ID NO: 1001759 - DNA, 33 bp, Homo sapien
caaaatggaaggactcagacaggctgtaaatac

SEQ ID NO: 1001760 - DNA, 33 bp, Homo sapien
caaaatggaaggactctgacaggctgtaaatac

SEQ ID NO: 1001761 - DNA, 33 bp, Homo sapien
cgaggcccaagcaaacccacatcatattcttgt

SEQ ID NO: 1001762 - DNA, 33 bp, Homo sapien
cgaggcccaagcaaacgcacatcatattcttgt

SEQ ID NO: 1001763 - DNA, 33 bp, Homo sapien
cacatgagacctccttgaaaaaatgctgaacca

SEQ ID NO: 1001764 - DNA, 33 bp, Homo sapien
cacatgagacctcctttaaaaaatgctgaacca

SEQ ID NO: 1001765 - DNA, 33 bp, Homo sapien
tggcttctagccttgaccggattgctcattggt

SEQ ID NO: 1001766 - DNA, 33 bp, Homo sapien
tggcttctagccttgatcggattgctcattggt

SEQ ID NO: 1001767 - DNA, 33 bp, Homo sapien
aagcctaatataccgaatatactgtctcataca

SEQ ID NO: 1001768 - DNA, 33 bp, Homo sapien
aagcctaatataccgactatactgtctcataca

SEQ ID NO: 1001769 - DNA, 33 bp, Homo sapien
aatcattaaactgctcacactgctgaaggcatc

SEQ ID NO: 1001770 - DNA, 33 bp, Homo sapien
aatcattaaactgctcgcactgctgaaggcatc

SEQ ID NO: 1001771 - DNA, 33 bp, Homo sapien
gaacagagaaagcaaaatgtgtaacgttacaga

SEQ ID NO: 1001772 - DNA, 33 bp, Homo sapien
gaacagagaaagcaaagtgtgtaacgttacaga

SEQ ID NO: 1001773 - DNA, 33 bp, Homo sapien
ttagattagggagacagatttgactgttgcctc

SEQ ID NO: 1001774 - DNA, 33 bp, Homo sapien
ttagattagggagacatatttgactgttgcctc

SEQ ID NO: 1001775 - DNA, 33 bp, Homo sapien
aaccaaatatctagccaatggattttagaaaat

SEQ ID NO: 1001776 - DNA, 33 bp, Homo sapien
aaccaaatatctagccgatggattttagaaaat

SEQ ID NO: 1001777 - DNA, 33 bp, Homo sapien
ccttcccccaggtaaaatcatacgttcttgccc

SEQ ID NO: 1001778 - DNA, 33 bp, Homo sapien
ccttcccccaggtaaagtcatacgttcttgccc

SEQ ID NO: 1001779 - DNA, 33 bp, Homo sapien
ctgggtaaagctaggaggactgatgtaaattaa

SEQ ID NO: 1001780 - DNA, 33 bp, Homo sapien
ctgggtaaagctaggatgactgatgtaaattaa

SEQ ID NO: 1001781 - DNA, 33 bp, Homo sapien
tatctgcaaattttaaaaacttggcaatataat

SEQ ID NO: 1001782 - DNA, 33 bp, Homo sapien
tatctgcaaattttaacaacttggcaatataat

SEQ ID NO: 1001783 - DNA, 33 bp, Homo sapien
aaaatacttgttgatcgaaagcatttttctact

SEQ ID NO: 1001784 - DNA, 33 bp, Homo sapien
aaaatacttgttgatctaaagcatttttctact

SEQ ID NO: 1001785 - DNA, 33 bp, Homo sapien
agaggataaagaaaaaatgacagtaaatcaaag

SEQ ID NO: 1001786 - DNA, 33 bp, Homo sapien
agaggataaagaaaaagtgacagtaaatcaaag

SEQ ID NO: 1001787 - DNA, 33 bp, Homo sapien
agcaggatagattggccgaggggggagttaagc

SEQ ID NO: 1001788 - DNA, 33 bp, Homo sapien
agcaggatagattggctgaggggggagttaagc

SEQ ID NO: 1001789 - DNA, 33 bp, Homo sapien
aaattgcaacaagaaagaaaaatgtacaaattt

SEQ ID NO: 1001790 - DNA, 33 bp, Homo sapien
aaattgcaacaagaaataaaaatgtacaaattt

SEQ ID NO: 1001791 - DNA, 33 bp, Homo sapien
agcctattcttagagtaaaattcttttccgtgc

SEQ ID NO: 1001792 - DNA, 33 bp, Homo sapien
agcctattcttagagtgaaattcttttccgtgc

SEQ ID NO: 1001793 - DNA, 33 bp, Homo sapien
acacatcctctacagaagctaaaaccaaagata

SEQ ID NO: 1001794 - DNA, 33 bp, Homo sapien
acacatcctctacagacgctaaaaccaaagata

SEQ ID NO: 1001795 - DNA, 33 bp, Homo sapien
ccaaagttctaatgaaatccaaagcatcatagt

SEQ ID NO: 1001796 - DNA, 33 bp, Homo sapien
ccaaagttctaatgaattccaaagcatcatagt

SEQ ID NO: 1001797 - DNA, 33 bp, Homo sapien
ttcagctttaaatcaaattctcttttggttata

SEQ ID NO: 1001798 - DNA, 33 bp, Homo sapien
ttcagctttaaatcaagttctcttttggttata

SEQ ID NO: 1001799 - DNA, 33 bp, Homo sapien
tgtatatgttcataaacgtgtgtgatcatatac

SEQ ID NO: 1001800 - DNA, 33 bp, Homo sapien
tgtatatgttcataaatgtgtgtgatcatatac

SEQ ID NO: 1001801 - DNA, 33 bp, Homo sapien
ttattcatatctttacccaattgcactctacat

SEQ ID NO: 1001802 - DNA, 33 bp, Homo sapien
ttattcatatctttactcaattgcactctacat

SEQ ID NO: 1001803 - DNA, 33 bp, Homo sapien
agtgatggtagatatgactcttttttggcttat

SEQ ID NO: 1001804 - DNA, 33 bp, Homo sapien
agtgatggtagatatggctcttttttggcttat

SEQ ID NO: 1001805 - DNA, 33 bp, Homo sapien
atacccagtgagggaacactttgaccaatggga

SEQ ID NO: 1001806 - DNA, 33 bp, Homo sapien
atacccagtgagggaatactttgaccaatggga

SEQ ID NO: 1001807 - DNA, 33 bp, Homo sapien
gatataacaaagtgccaaatggaaattttggca

SEQ ID NO: 1001808 - DNA, 33 bp, Homo sapien
gatataacaaagtgcccaatggaaattttggca

SEQ ID NO: 1001809 - DNA, 33 bp, Homo sapien
tttattgctacataataaatagctcttcatgag

SEQ ID NO: 1001810 - DNA, 33 bp, Homo sapien
tttattgctacataatgaatagctcttcatgag

SEQ ID NO: 1001811 - DNA, 33 bp, Homo sapien
gaacgtctgaaatgacaccatactgtatacttt

SEQ ID NO: 1001812 - DNA, 33 bp, Homo sapien
gaacgtctgaaatgacgccatactgtatacttt

SEQ ID NO: 1001813 - DNA, 33 bp, Homo sapien
gcgaccattacctttacctggttataagatatt

SEQ ID NO: 1001814 - DNA, 33 bp, Homo sapien
gcgaccattacctttatctggttataagatatt

SEQ ID NO: 1001815 - DNA, 33 bp, Homo sapien
agctgaggctctgagacacatagtgacctggcc

SEQ ID NO: 1001816 - DNA, 33 bp, Homo sapien
agctgaggctctgagagacatagtgacctggcc

SEQ ID NO: 1001817 - DNA, 33 bp, Homo sapien
ttggcagtaatacttacgagtcctctaatatgc

SEQ ID NO: 1001818 - DNA, 33 bp, Homo sapien
ttggcagtaatacttatgagtcctctaatatgc

SEQ ID NO: 1001819 - DNA, 33 bp, Homo sapien
gagaactactgcaaagcaatacattgttacaca

SEQ ID NO: 1001820 - DNA, 33 bp, Homo sapien
gagaactactgcaaaggaatacattgttacaca

SEQ ID NO: 1001821 - DNA, 33 bp, Homo sapien
agtgatgagtgccaggacagcttacttacatcc

SEQ ID NO: 1001822 - DNA, 33 bp, Homo sapien
agtgatgagtgccaggtcagcttacttacatcc

SEQ ID NO: 1001823 - DNA, 33 bp, Homo sapien
agttttacctctgacactactactccttgtatg

SEQ ID NO: 1001824 - DNA, 33 bp, Homo sapien
agttttacctctgacattactactccttgtatg

SEQ ID NO: 1001825 - DNA, 33 bp, Homo sapien
taaagacagtagctaaagttgggtagggtttct

SEQ ID NO: 1001826 - DNA, 33 bp, Homo sapien
taaagacagtagctaacgttgggtagggtttct

SEQ ID NO: 1001827 - DNA, 33 bp, Homo sapien
tatgttctacttcacccggaagctaatagtcac

SEQ ID NO: 1001828 - DNA, 33 bp, Homo sapien
tatgttctacttcacctggaagctaatagtcac

SEQ ID NO: 1001829 - DNA, 33 bp, Homo sapien
acactaaggctcacaaatattaagaaaattgcc

SEQ ID NO: 1001830 - DNA, 33 bp, Homo sapien
acactaaggctcacaactattaagaaaattgcc

SEQ ID NO: 1001831 - DNA, 33 bp, Homo sapien
tattcccatttttcagcaaagacactaaggctc

SEQ ID NO: 1001832 - DNA, 33 bp, Homo sapien
tattcccatttttcaggaaagacactaaggctc

SEQ ID NO: 1001833 - DNA, 33 bp, Homo sapien
aatgtcagctttgtaactgtaagaacttctatt

SEQ ID NO: 1001834 - DNA, 33 bp, Homo sapien
aatgtcagctttgtaattgtaagaacttctatt

SEQ ID NO: 1001835 - DNA, 33 bp, Homo sapien
tattgagagtcagttacgtgccaagtacttctt

SEQ ID NO: 1001836 - DNA, 33 bp, Homo sapien
tattgagagtcagttatgtgccaagtacttctt

SEQ ID NO: 1001837 - DNA, 33 bp, Homo sapien
aatggatagatgaacaagaattaaccttgcaga

SEQ ID NO: 1001838 - DNA, 33 bp, Homo sapien
aatggatagatgaacaggaattaaccttgcaga

SEQ ID NO: 1001839 - DNA, 33 bp, Homo sapien
ttctcatattcacatacgtctaggaggcattat

SEQ ID NO: 1001840 - DNA, 33 bp, Homo sapien
ttctcatattcacatatgtctaggaggcattat

SEQ ID NO: 1001841 - DNA, 33 bp, Homo sapien
aaaggccacgaataagacatctgaaggagctta

SEQ ID NO: 1001842 - DNA, 33 bp, Homo sapien
aaaggccacgaataaggcatctgaaggagctta

SEQ ID NO: 1001843 - DNA, 33 bp, Homo sapien
gctcttattatgaatgacaataaaaccacactc

SEQ ID NO: 1001844 - DNA, 33 bp, Homo sapien
gctcttattatgaatggcaataaaaccacactc

SEQ ID NO: 1001845 - DNA, 33 bp, Homo sapien
tctctcctttccgtaactgtctctgtggggcac

SEQ ID NO: 1001846 - DNA, 33 bp, Homo sapien
tctctcctttccgtaattgtctctgtggggcac

SEQ ID NO: 1001847 - DNA, 33 bp, Homo sapien
tgggcttaaatccatcactgactagccatgtgg

SEQ ID NO: 1001848 - DNA, 33 bp, Homo sapien
tgggcttaaatccatcgctgactagccatgtgg

SEQ ID NO: 1001849 - DNA, 33 bp, Homo sapien
ctatcctaccagtagaaactgtgctagtatctt

SEQ ID NO: 1001850 - DNA, 33 bp, Homo sapien
ctatcctaccagtagacactgtgctagtatctt

SEQ ID NO: 1001851 - DNA, 33 bp, Homo sapien
atcctgttttttataccataccacatatattat

SEQ ID NO: 1001852 - DNA, 33 bp, Homo sapien
atcctgttttttatactataccacatatattat

SEQ ID NO: 1001853 - DNA, 33 bp, Homo sapien
atccaataaaaaatcccagcagactcagtgata

SEQ ID NO: 1001854 - DNA, 33 bp, Homo sapien
atccaataaaaaatcctagcagactcagtgata

SEQ ID NO: 1001855 - DNA, 33 bp, Homo sapien
gcatgggtacaacctaaggacctttccaaacat

SEQ ID NO: 1001856 - DNA, 33 bp, Homo sapien
gcatgggtacaacctagggacctttccaaacat

SEQ ID NO: 1001857 - DNA, 33 bp, Homo sapien
gatgctgtacagtctacgagtctggacaaatgt

SEQ ID NO: 1001858 - DNA, 33 bp, Homo sapien
gatgctgtacagtctatgagtctggacaaatgt

SEQ ID NO: 1001859 - DNA, 33 bp, Homo sapien
ccccttgcttggcaaagttgtaaacccaggttt

SEQ ID NO: 1001860 - DNA, 33 bp, Homo sapien
ccccttgcttggcaaatttgtaaacccaggttt

SEQ ID NO: 1001861 - DNA, 33 bp, Homo sapien
tcaggcggccagtatacggtacttggtgaagcc

SEQ ID NO: 1001862 - DNA, 33 bp, Homo sapien
tcaggcggccagtatatggtacttggtgaagcc

SEQ ID NO: 1001863 - DNA, 33 bp, Homo sapien
tgacataaaatggtgaaaatttgaagcaactgg

SEQ ID NO: 1001864 - DNA, 33 bp, Homo sapien
tgacataaaatggtgagaatttgaagcaactgg

SEQ ID NO: 1001865 - DNA, 33 bp, Homo sapien
tcaagcccatttcaaacaagctaaaaaccttga

SEQ ID NO: 1001866 - DNA, 33 bp, Homo sapien
tcaagcccatttcaaagaagctaaaaaccttga

SEQ ID NO: 1001867 - DNA, 33 bp, Homo sapien
aactacctcaaactaaagcccctgcacaacaaa

SEQ ID NO: 1001868 - DNA, 33 bp, Homo sapien
aactacctcaaactaaggcccctgcacaacaaa

SEQ ID NO: 1001869 - DNA, 33 bp, Homo sapien
aaaaacagaagtagacaaattgaactacctcaa

SEQ ID NO: 1001870 - DNA, 33 bp, Homo sapien
aaaaacagaagtagacgaattgaactacctcaa

SEQ ID NO: 1001871 - DNA, 33 bp, Homo sapien
taaatttgcatgatacaaaaaccaacatacaaa

SEQ ID NO: 1001872 - DNA, 33 bp, Homo sapien
taaatttgcatgatacgaaaaccaacatacaaa

SEQ ID NO: 1001873 - DNA, 33 bp, Homo sapien
taagtgtttttctcaacgaattgccctataagt

SEQ ID NO: 1001874 - DNA, 33 bp, Homo sapien
taagtgtttttctcaatgaattgccctataagt

SEQ ID NO: 1001875 - DNA, 33 bp, Homo sapien
attattattctggaaaattctaaccaattcagt

SEQ ID NO: 1001876 - DNA, 33 bp, Homo sapien
attattattctggaaagttctaaccaattcagt

SEQ ID NO: 1001877 - DNA, 33 bp, Homo sapien
aaaaggattcattagacattgtttttcagctct

SEQ ID NO: 1001878 - DNA, 33 bp, Homo sapien
aaaaggattcattagagattgtttttcagctct

SEQ ID NO: 1001879 - DNA, 33 bp, Homo sapien
cttgcagacaaacagtaaaagaaaaggattcat

SEQ ID NO: 1001880 - DNA, 33 bp, Homo sapien
cttgcagacaaacagtgaaagaaaaggattcat

SEQ ID NO: 1001881 - DNA, 33 bp, Homo sapien
ggcaatatgttatttaagcagaagtgtactgtc

SEQ ID NO: 1001882 - DNA, 33 bp, Homo sapien
ggcaatatgttatttaggcagaagtgtactgtc

SEQ ID NO: 1001883 - DNA, 33 bp, Homo sapien
taaggcttaaatgaaacacaatgacctacatgt

SEQ ID NO: 1001884 - DNA, 33 bp, Homo sapien
taaggcttaaatgaaatacaatgacctacatgt

SEQ ID NO: 1001885 - DNA, 33 bp, Homo sapien
ggatttggaaacattacgcagcctgtctagtct

SEQ ID NO: 1001886 - DNA, 33 bp, Homo sapien
ggatttggaaacattatgcagcctgtctagtct

SEQ ID NO: 1001887 - DNA, 33 bp, Homo sapien
tcttcacaataaagcagtaagttgactaataca

SEQ ID NO: 1001888 - DNA, 33 bp, Homo sapien
tcttcacaataaagcattaagttgactaataca

SEQ ID NO: 1001889 - DNA, 33 bp, Homo sapien
ggaaaggaataatggactaggtgatgaataggg

SEQ ID NO: 1001890 - DNA, 33 bp, Homo sapien
ggaaaggaataatggagtaggtgatgaataggg

SEQ ID NO: 1001891 - DNA, 33 bp, Homo sapien
gcaatatccatttatgcatctgttcccattgct

SEQ ID NO: 1001892 - DNA, 33 bp, Homo sapien
gcaatatccatttatgtatctgttcccattgct

SEQ ID NO: 1001893 - DNA, 33 bp, Homo sapien
ttcatttcaagcatcactgagttgtgaaggtaa

SEQ ID NO: 1001894 - DNA, 33 bp, Homo sapien
ttcatttcaagcatcattgagttgtgaaggtaa

SEQ ID NO: 1001895 - DNA, 33 bp, Homo sapien
taagtatcgagtaacaaagatgtgatgataagg

SEQ ID NO: 1001896 - DNA, 33 bp, Homo sapien
taagtatcgagtaacagagatgtgatgataagg

SEQ ID NO: 1001897 - DNA, 33 bp, Homo sapien
gcatggtataaaattacccccagatatggccac

SEQ ID NO: 1001898 - DNA, 33 bp, Homo sapien
gcatggtataaaattatccccagatatggccac

SEQ ID NO: 1001899 - DNA, 33 bp, Homo sapien
atagtacaggtgaccacaatttttttttaattt

SEQ ID NO: 1001900 - DNA, 33 bp, Homo sapien
atagtacaggtgaccagaatttttttttaattt

SEQ ID NO: 1001901 - DNA, 33 bp, Homo sapien
ggctcacttacactcacaagttcaagactaccc

SEQ ID NO: 1001902 - DNA, 33 bp, Homo sapien
ggctcacttacactcagaagttcaagactaccc

SEQ ID NO: 1001903 - DNA, 33 bp, Homo sapien
tttcatattagggttaaagtgatgttctgttgt

SEQ ID NO: 1001904 - DNA, 33 bp, Homo sapien
tttcatattagggttagagtgatgttctgttgt

SEQ ID NO: 1001905 - DNA, 33 bp, Homo sapien
tactctcagcagactacgaaagaaggaggtgac

SEQ ID NO: 1001906 - DNA, 33 bp, Homo sapien
tactctcagcagactatgaaagaaggaggtgac

SEQ ID NO: 1001907 - DNA, 33 bp, Homo sapien
gctgtgctagtctacccgcagtcttcacaaatg

SEQ ID NO: 1001908 - DNA, 33 bp, Homo sapien
gctgtgctagtctacctgcagtcttcacaaatg

SEQ ID NO: 1001909 - DNA, 33 bp, Homo sapien
ttgctgagtgggtgagaagtccacttgtgctgg

SEQ ID NO: 1001910 - DNA, 33 bp, Homo sapien
ttgctgagtgggtgaggagtccacttgtgctgg

SEQ ID NO: 1001911 - DNA, 33 bp, Homo sapien
caccttttggagtctccagttctattattccat

SEQ ID NO: 1001912 - DNA, 33 bp, Homo sapien
caccttttggagtctctagttctattattccat

SEQ ID NO: 1001913 - DNA, 33 bp, Homo sapien
tttaaaatagatttagcagtataagtgcagtca

SEQ ID NO: 1001914 - DNA, 33 bp, Homo sapien
tttaaaatagatttaggagtataagtgcagtca

SEQ ID NO: 1001915 - DNA, 33 bp, Homo sapien
caaaccatgctagacactatttttctgatacgt

SEQ ID NO: 1001916 - DNA, 33 bp, Homo sapien
caaaccatgctagacagtatttttctgatacgt

SEQ ID NO: 1001917 - DNA, 33 bp, Homo sapien
tcttccactaggtcggaaattctaccttacact

SEQ ID NO: 1001918 - DNA, 33 bp, Homo sapien
tcttccactaggtcgggaattctaccttacact

SEQ ID NO: 1001919 - DNA, 33 bp, Homo sapien
gaatgaccctcaaatacatgtcagtcttctgtg

SEQ ID NO: 1001920 - DNA, 33 bp, Homo sapien
gaatgaccctcaaatatatgtcagtcttctgtg

SEQ ID NO: 1001921 - DNA, 33 bp, Homo sapien
gaatccattctcttaaccaatttaatatggttt

SEQ ID NO: 1001922 - DNA, 33 bp, Homo sapien
gaatccattctcttaagcaatttaatatggttt

SEQ ID NO: 1001923 - DNA, 33 bp, Homo sapien
ttagctagttcataaaaagccagggctggtgct

SEQ ID NO: 1001924 - DNA, 33 bp, Homo sapien
ttagctagttcataaagagccagggctggtgct

SEQ ID NO: 1001925 - DNA, 33 bp, Homo sapien
tagattaaaaacttaacgttcattgcctgtagt

SEQ ID NO: 1001926 - DNA, 33 bp, Homo sapien
tagattaaaaacttaatgttcattgcctgtagt

SEQ ID NO: 1001927 - DNA, 33 bp, Homo sapien
gatgtcaaggctagcagatcaaaaaagcggaga

SEQ ID NO: 1001928 - DNA, 33 bp, Homo sapien
gatgtcaaggctagcatatcaaaaaagcggaga

SEQ ID NO: 1001929 - DNA, 33 bp, Homo sapien
ttgacatctaagaaacagaattcatatactgaa

SEQ ID NO: 1001930 - DNA, 33 bp, Homo sapien
ttgacatctaagaaacggaattcatatactgaa

SEQ ID NO: 1001931 - DNA, 33 bp, Homo sapien
ccggaactgcgggggaaattctgttgtttgacg

SEQ ID NO: 1001932 - DNA, 33 bp, Homo sapien
ccggaactgcgggggagattctgttgtttgacg

SEQ ID NO: 1001933 - DNA, 33 bp, Homo sapien
gggaacaactgagtcacgtcttctcttacaggg

SEQ ID NO: 1001934 - DNA, 33 bp, Homo sapien
gggaacaactgagtcaggtcttctcttacaggg

SEQ ID NO: 1001935 - DNA, 33 bp, Homo sapien
actggcctaaaggtaaatctgcaaccatatgat

SEQ ID NO: 1001936 - DNA, 33 bp, Homo sapien
actggcctaaaggtaagtctgcaaccatatgat

SEQ ID NO: 1001937 - DNA, 33 bp, Homo sapien
gatcattcttgttggtcaaaaaaattaataaga

SEQ ID NO: 1001938 - DNA, 33 bp, Homo sapien
gatcattcttgttggttaaaaaaattaataaga

SEQ ID NO: 1001939 - DNA, 33 bp, Homo sapien
tgaacgatgccgttgaagtcatgcaatgtgatg

SEQ ID NO: 1001940 - DNA, 33 bp, Homo sapien
tgaacgatgccgttgaggtcatgcaatgtgatg

SEQ ID NO: 1001941 - DNA, 33 bp, Homo sapien
taaaatgtccttagctgaatttaccataattta

SEQ ID NO: 1001942 - DNA, 33 bp, Homo sapien
taaaatgtccttagcttaatttaccataattta

SEQ ID NO: 1001943 - DNA, 33 bp, Homo sapien
tcatccactcaaaaaaacattaactataacaag

SEQ ID NO: 1001944 - DNA, 33 bp, Homo sapien
tcatccactcaaaaaaccattaactataacaag

SEQ ID NO: 1001945 - DNA, 33 bp, Homo sapien
gtggtaaaccatcctgcacaaaatacctccgca

SEQ ID NO: 1001946 - DNA, 33 bp, Homo sapien
gtggtaaaccatcctgtacaaaatacctccgca

SEQ ID NO: 1001947 - DNA, 33 bp, Homo sapien
ctgcctttgtcacagaccttggttccccattca

SEQ ID NO: 1001948 - DNA, 33 bp, Homo sapien
ctgcctttgtcacagatcttggttccccattca

SEQ ID NO: 1001949 - DNA, 33 bp, Homo sapien
cccccgaattcaaagacagtgagaagcagatgt

SEQ ID NO: 1001950 - DNA, 33 bp, Homo sapien
cccccgaattcaaagatagtgagaagcagatgt

SEQ ID NO: 1001951 - DNA, 33 bp, Homo sapien
ggacagagtctgaacacgatattcaatgaggaa

SEQ ID NO: 1001952 - DNA, 33 bp, Homo sapien
ggacagagtctgaacatgatattcaatgaggaa

SEQ ID NO: 1001953 - DNA, 33 bp, Homo sapien
tcctaactcctaattgcaatccactttgagcca

SEQ ID NO: 1001954 - DNA, 33 bp, Homo sapien
tcctaactcctaattgtaatccactttgagcca

SEQ ID NO: 1001955 - DNA, 33 bp, Homo sapien
tttctctgaggaaaaaatgagctgtacatttat

SEQ ID NO: 1001956 - DNA, 33 bp, Homo sapien
tttctctgaggaaaaattgagctgtacatttat

SEQ ID NO: 1001957 - DNA, 33 bp, Homo sapien
gataacattttgagtacggagagagaatacaga

SEQ ID NO: 1001958 - DNA, 33 bp, Homo sapien
gataacattttgagtatggagagagaatacaga

SEQ ID NO: 1001959 - DNA, 33 bp, Homo sapien
tagtaaataaaatctgcagtgttgtttggagcc

SEQ ID NO: 1001960 - DNA, 33 bp, Homo sapien
tagtaaataaaatctggagtgttgtttggagcc

SEQ ID NO: 1001961 - DNA, 33 bp, Homo sapien
taaaacaaaactgataccagcaaaatatgaaag

SEQ ID NO: 1001962 - DNA, 33 bp, Homo sapien
taaaacaaaactgatagcagcaaaatatgaaag

SEQ ID NO: 1001963 - DNA, 33 bp, Homo sapien
gaatattgctcattgaagacttacggattatag

SEQ ID NO: 1001964 - DNA, 33 bp, Homo sapien
gaatattgctcattgatgacttacggattatag

SEQ ID NO: 1001965 - DNA, 33 bp, Homo sapien
accttttcctcgcttgcaaaaccatgtatcagt

SEQ ID NO: 1001966 - DNA, 33 bp, Homo sapien
accttttcctcgcttgtaaaaccatgtatcagt

SEQ ID NO: 1001967 - DNA, 33 bp, Homo sapien
tggcggggattctcatgaacaccatgtggctaa

SEQ ID NO: 1001968 - DNA, 33 bp, Homo sapien
tggcggggattctcattaacaccatgtggctaa

SEQ ID NO: 1001969 - DNA, 33 bp, Homo sapien
caataggattttcactaaagttgtttttcttag

SEQ ID NO: 1001970 - DNA, 33 bp, Homo sapien
caataggattttcactcaagttgtttttcttag

SEQ ID NO: 1001971 - DNA, 33 bp, Homo sapien
ctaaagatttttggcagatgaacactaaaacaa

SEQ ID NO: 1001972 - DNA, 33 bp, Homo sapien
ctaaagatttttggcatatgaacactaaaacaa

SEQ ID NO: 1001973 - DNA, 33 bp, Homo sapien
gtgaaatcaacttatgaatgactagaacgctat

SEQ ID NO: 1001974 - DNA, 33 bp, Homo sapien
gtgaaatcaacttatggatgactagaacgctat

SEQ ID NO: 1001975 - DNA, 33 bp, Homo sapien
ataatagcagttgatacagcgctacaaagaggt

SEQ ID NO: 1001976 - DNA, 33 bp, Homo sapien
ataatagcagttgatatagcgctacaaagaggt

SEQ ID NO: 1001977 - DNA, 33 bp, Homo sapien
ttcacagtgttctgaaagagaggagtttgaccc

SEQ ID NO: 1001978 - DNA, 33 bp, Homo sapien
ttcacagtgttctgaaggagaggagtttgaccc

SEQ ID NO: 1001979 - DNA, 33 bp, Homo sapien
tttactggggctgttacatctacaggttggctt

SEQ ID NO: 1001980 - DNA, 33 bp, Homo sapien
tttactggggctgttatatctacaggttggctt

SEQ ID NO: 1001981 - DNA, 33 bp, Homo sapien
tgtgtaaagattctctaaacaatttctcattcc

SEQ ID NO: 1001982 - DNA, 33 bp, Homo sapien
tgtgtaaagattctctgaacaatttctcattcc

SEQ ID NO: 1001983 - DNA, 33 bp, Homo sapien
agactcaacttttcaacagacctgttttatctt

SEQ ID NO: 1001984 - DNA, 33 bp, Homo sapien
agactcaacttttcaagagacctgttttatctt

SEQ ID NO: 1001985 - DNA, 33 bp, Homo sapien
aactaagcaacatcatcagcacaaaatataaaa

SEQ ID NO: 1001986 - DNA, 33 bp, Homo sapien
aactaagcaacatcattagcacaaaatataaaa

SEQ ID NO: 1001987 - DNA, 33 bp, Homo sapien
cctcttcttgcccgatgatagatgtaaagctaa

SEQ ID NO: 1001988 - DNA, 33 bp, Homo sapien
cctcttcttgcccgattatagatgtaaagctaa

SEQ ID NO: 1001989 - DNA, 33 bp, Homo sapien
taattatctaacacttgaacacttccagttatt

SEQ ID NO: 1001990 - DNA, 33 bp, Homo sapien
taattatctaacactttaacacttccagttatt

SEQ ID NO: 1001991 - DNA, 33 bp, Homo sapien
gctgtgtttgatcccaatagccattctcaaaat

SEQ ID NO: 1001992 - DNA, 33 bp, Homo sapien
gctgtgtttgatcccagtagccattctcaaaat

SEQ ID NO: 1001993 - DNA, 33 bp, Homo sapien
ctgacatatttttcaaatctaagatctatgatt

SEQ ID NO: 1001994 - DNA, 33 bp, Homo sapien
ctgacatatttttcaattctaagatctatgatt

SEQ ID NO: 1001995 - DNA, 33 bp, Homo sapien
agtgctattctctcacaaaaggaaaatcatacc

SEQ ID NO: 1001996 - DNA, 33 bp, Homo sapien
agtgctattctctcacgaaaggaaaatcatacc

SEQ ID NO: 1001997 - DNA, 33 bp, Homo sapien
acttaattaataatcgcacatggtatgctgaga

SEQ ID NO: 1001998 - DNA, 33 bp, Homo sapien
acttaattaataatcgtacatggtatgctgaga

SEQ ID NO: 1001999 - DNA, 33 bp, Homo sapien
aactcactcacagcaaaagtcatggcatggggg

SEQ ID NO: 1002000 - DNA, 33 bp, Homo sapien
aactcactcacagcaacagtcatggcatggggg

SEQ ID NO: 1002001 - DNA, 33 bp, Homo sapien
aaaactttttattgcccagtaacttcatcattt

SEQ ID NO: 1002002 - DNA, 33 bp, Homo sapien
aaaactttttattgcctagtaacttcatcattt

SEQ ID NO: 1002003 - DNA, 33 bp, Homo sapien
aaacttgacttgtaaacctaaggaaggatcaag

SEQ ID NO: 1002004 - DNA, 33 bp, Homo sapien
aaacttgacttgtaaatctaaggaaggatcaag

SEQ ID NO: 1002005 - DNA, 33 bp, Homo sapien
tctcgttctttgttaccggtgcatagtattcca

SEQ ID NO: 1002006 - DNA, 33 bp, Homo sapien
tctcgttctttgttacgggtgcatagtattcca

SEQ ID NO: 1002007 - DNA, 33 bp, Homo sapien
cagagtatgaaatgtacgcctaattttctcacg

SEQ ID NO: 1002008 - DNA, 33 bp, Homo sapien
cagagtatgaaatgtatgcctaattttctcacg

SEQ ID NO: 1002009 - DNA, 33 bp, Homo sapien
gagaagttatgtactgcagttgagaaatctata

SEQ ID NO: 1002010 - DNA, 33 bp, Homo sapien
gagaagttatgtactggagttgagaaatctata

SEQ ID NO: 1002011 - DNA, 33 bp, Homo sapien
ctaccacactgaattaacagcaagttagtgttt

SEQ ID NO: 1002012 - DNA, 33 bp, Homo sapien
ctaccacactgaattatcagcaagttagtgttt

SEQ ID NO: 1002013 - DNA, 33 bp, Homo sapien
tagaaaataaggcggaagtaggaatgcggagaa

SEQ ID NO: 1002014 - DNA, 33 bp, Homo sapien
tagaaaataaggcggaggtaggaatgcggagaa

SEQ ID NO: 1002015 - DNA, 33 bp, Homo sapien
taagaaaagaaagaagccagagtcaatgaaaag

SEQ ID NO: 1002016 - DNA, 33 bp, Homo sapien
taagaaaagaaagaagtcagagtcaatgaaaag

SEQ ID NO: 1002017 - DNA, 33 bp, Homo sapien
tgtaataactcaacaccagaagtgtgcatgaca

SEQ ID NO: 1002018 - DNA, 33 bp, Homo sapien
tgtaataactcaacacgagaagtgtgcatgaca

SEQ ID NO: 1002019 - DNA, 33 bp, Homo sapien
gtgttggtatactccaggatgataacctctgct

SEQ ID NO: 1002020 - DNA, 33 bp, Homo sapien
gtgttggtatactccatgatgataacctctgct

SEQ ID NO: 1002021 - DNA, 33 bp, Homo sapien
cttcttggctactttgcaataagatgcagaatg

SEQ ID NO: 1002022 - DNA, 33 bp, Homo sapien
cttcttggctactttggaataagatgcagaatg

SEQ ID NO: 1002023 - DNA, 33 bp, Homo sapien
agccttctgttctctactaacccaaattatttt

SEQ ID NO: 1002024 - DNA, 33 bp, Homo sapien
agccttctgttctctagtaacccaaattatttt

SEQ ID NO: 1002025 - DNA, 33 bp, Homo sapien
tctttattcaaatagaggaaggaatactatggg

SEQ ID NO: 1002026 - DNA, 33 bp, Homo sapien
tctttattcaaatagatgaaggaatactatggg

SEQ ID NO: 1002027 - DNA, 33 bp, Homo sapien
gtcatcagagaaatacagattaaaaccacaatg

SEQ ID NO: 1002028 - DNA, 33 bp, Homo sapien
gtcatcagagaaatacggattaaaaccacaatg

SEQ ID NO: 1002029 - DNA, 33 bp, Homo sapien
tccaggttaaatttcactgaaagctaccttcta

SEQ ID NO: 1002030 - DNA, 33 bp, Homo sapien
tccaggttaaatttcattgaaagctaccttcta

SEQ ID NO: 1002031 - DNA, 33 bp, Homo sapien
tcttatacaaagatagccccaaatccataacat

SEQ ID NO: 1002032 - DNA, 33 bp, Homo sapien
tcttatacaaagataggcccaaatccataacat

SEQ ID NO: 1002033 - DNA, 33 bp, Homo sapien
atgcagttggtatgaccataatctgcatttaca

SEQ ID NO: 1002034 - DNA, 33 bp, Homo sapien
atgcagttggtatgactataatctgcatttaca

SEQ ID NO: 1002035 - DNA, 33 bp, Homo sapien
ttgtttttttaacctacccatatgcagtattag

SEQ ID NO: 1002036 - DNA, 33 bp, Homo sapien
ttgtttttttaacctagccatatgcagtattag

SEQ ID NO: 1002037 - DNA, 33 bp, Homo sapien
ccccgtccctggcagaaatggtgatcgggtacg

SEQ ID NO: 1002038 - DNA, 33 bp, Homo sapien
ccccgtccctggcagagatggtgatcgggtacg

SEQ ID NO: 1002039 - DNA, 33 bp, Homo sapien
agttcttaccgccttacagtgattataaagatt

SEQ ID NO: 1002040 - DNA, 33 bp, Homo sapien
agttcttaccgccttagagtgattataaagatt

SEQ ID NO: 1002041 - DNA, 33 bp, Homo sapien
atatatcagacttcaacgtaatgttgacccttg

SEQ ID NO: 1002042 - DNA, 33 bp, Homo sapien
atatatcagacttcaatgtaatgttgacccttg

SEQ ID NO: 1002043 - DNA, 33 bp, Homo sapien
attacctttccagaaacgatgcctcaagtttta

SEQ ID NO: 1002044 - DNA, 33 bp, Homo sapien
attacctttccagaaatgatgcctcaagtttta

SEQ ID NO: 1002045 - DNA, 33 bp, Homo sapien
ttctccacaatactgaactgagagatctgaaaa

SEQ ID NO: 1002046 - DNA, 33 bp, Homo sapien
ttctccacaatactgacctgagagatctgaaaa

SEQ ID NO: 1002047 - DNA, 33 bp, Homo sapien
tagtgtatgaaatacaagacaatgcaaggtagc

SEQ ID NO: 1002048 - DNA, 33 bp, Homo sapien
tagtgtatgaaatacaggacaatgcaaggtagc

SEQ ID NO: 1002049 - DNA, 33 bp, Homo sapien
ttggtcaagatttctgaaggttcttggtaattc

SEQ ID NO: 1002050 - DNA, 33 bp, Homo sapien
ttggtcaagatttctggaggttcttggtaattc

SEQ ID NO: 1002051 - DNA, 33 bp, Homo sapien
gtcagcagtgttacaaaagaacttctttcagat

SEQ ID NO: 1002052 - DNA, 33 bp, Homo sapien
gtcagcagtgttacaagagaacttctttcagat

SEQ ID NO: 1002053 - DNA, 33 bp, Homo sapien
tccaacactaataaccaggaaaatcacagctag

SEQ ID NO: 1002054 - DNA, 33 bp, Homo sapien
tccaacactaataaccgggaaaatcacagctag

SEQ ID NO: 1002055 - DNA, 33 bp, Homo sapien
ttttgaaacattgttaagatggcagcttaaaat

SEQ ID NO: 1002056 - DNA, 33 bp, Homo sapien
ttttgaaacattgttaggatggcagcttaaaat

SEQ ID NO: 1002057 - DNA, 33 bp, Homo sapien
aggcaagcagataaacaagcagtagctggaaca

SEQ ID NO: 1002058 - DNA, 33 bp, Homo sapien
aggcaagcagataaacgagcagtagctggaaca

SEQ ID NO: 1002059 - DNA, 33 bp, Homo sapien
taagtgttttggtgacacaaggccctgaccctt

SEQ ID NO: 1002060 - DNA, 33 bp, Homo sapien
taagtgttttggtgacccaaggccctgaccctt

SEQ ID NO: 1002061 - DNA, 33 bp, Homo sapien
cagtttatttcagccacggcacttgatgttctc

SEQ ID NO: 1002062 - DNA, 33 bp, Homo sapien
cagtttatttcagccagggcacttgatgttctc

SEQ ID NO: 1002063 - DNA, 33 bp, Homo sapien
atcagtactctgaaaacggtcattccattgttt

SEQ ID NO: 1002064 - DNA, 33 bp, Homo sapien
atcagtactctgaaaatggtcattccattgttt

SEQ ID NO: 1002065 - DNA, 33 bp, Homo sapien
attacatgattccaaaatgcttcatgacccagg

SEQ ID NO: 1002066 - DNA, 33 bp, Homo sapien
attacatgattccaaattgcttcatgacccagg

SEQ ID NO: 1002067 - DNA, 33 bp, Homo sapien
ttaacgaattctctaacgctgagtatttctagt

SEQ ID NO: 1002068 - DNA, 33 bp, Homo sapien
ttaacgaattctctaatgctgagtatttctagt

SEQ ID NO: 1002069 - DNA, 33 bp, Homo sapien
agagcaacacaattaactaagaaagtgcacact

SEQ ID NO: 1002070 - DNA, 33 bp, Homo sapien
agagcaacacaattaattaagaaagtgcacact

SEQ ID NO: 1002071 - DNA, 33 bp, Homo sapien
cctcagatctgcattacggtagcagttgattat

SEQ ID NO: 1002072 - DNA, 33 bp, Homo sapien
cctcagatctgcattatggtagcagttgattat

SEQ ID NO: 1002073 - DNA, 33 bp, Homo sapien
aacacttcaacttacacggcattagctggagtt

SEQ ID NO: 1002074 - DNA, 33 bp, Homo sapien
aacacttcaacttacatggcattagctggagtt

SEQ ID NO: 1002075 - DNA, 33 bp, Homo sapien
ttccatctgaccaagaggttacagcctactcca

SEQ ID NO: 1002076 - DNA, 33 bp, Homo sapien
ttccatctgaccaagatgttacagcctactcca

SEQ ID NO: 1002077 - DNA, 33 bp, Homo sapien
tttttcacaagtttccaagtggtgctgatactt

SEQ ID NO: 1002078 - DNA, 33 bp, Homo sapien
tttttcacaagtttcccagtggtgctgatactt

SEQ ID NO: 1002079 - DNA, 33 bp, Homo sapien
ctcgcacacaattaataaatgaacgagcttgga

SEQ ID NO: 1002080 - DNA, 33 bp, Homo sapien
ctcgcacacaattaattaatgaacgagcttgga

SEQ ID NO: 1002081 - DNA, 33 bp, Homo sapien
atgggaatgaattttacaggtacactgggctta

SEQ ID NO: 1002082 - DNA, 33 bp, Homo sapien
atgggaatgaattttagaggtacactgggctta

SEQ ID NO: 1002083 - DNA, 33 bp, Homo sapien
tcactcagatgaaaaaagatcttggtgatagta

SEQ ID NO: 1002084 - DNA, 33 bp, Homo sapien
tcactcagatgaaaaaggatcttggtgatagta

SEQ ID NO: 1002085 - DNA, 33 bp, Homo sapien
catctgagaacagaccggcttaaaaacaaaagc

SEQ ID NO: 1002086 - DNA, 33 bp, Homo sapien
catctgagaacagacctgcttaaaaacaaaagc

SEQ ID NO: 1002087 - DNA, 33 bp, Homo sapien
ttaaaaacacataaaaacatggctctaggaaca

SEQ ID NO: 1002088 - DNA, 33 bp, Homo sapien
ttaaaaacacataaaagcatggctctaggaaca

SEQ ID NO: 1002089 - DNA, 33 bp, Homo sapien
gaaaggtatgaaatgacctaaaaagaattcctg

SEQ ID NO: 1002090 - DNA, 33 bp, Homo sapien
gaaaggtatgaaatgagctaaaaagaattcctg

SEQ ID NO: 1002091 - DNA, 33 bp, Homo sapien
gactaccataataagcacccatttggaaaagag

SEQ ID NO: 1002092 - DNA, 33 bp, Homo sapien
gactaccataataagcgcccatttggaaaagag

SEQ ID NO: 1002093 - DNA, 33 bp, Homo sapien
accttcattgacatcacgttggtatcttgaaat

SEQ ID NO: 1002094 - DNA, 33 bp, Homo sapien
accttcattgacatcatgttggtatcttgaaat

SEQ ID NO: 1002095 - DNA, 33 bp, Homo sapien
attgggcaggcaactagcatggtttgccacaat

SEQ ID NO: 1002096 - DNA, 33 bp, Homo sapien
attgggcaggcaactatcatggtttgccacaat

SEQ ID NO: 1002097 - DNA, 33 bp, Homo sapien
caacaagtgaaaccacaaagaagggtacacaac

SEQ ID NO: 1002098 - DNA, 33 bp, Homo sapien
caacaagtgaaaccacgaagaagggtacacaac

SEQ ID NO: 1002099 - DNA, 33 bp, Homo sapien
aatgggctcacaacccgacaaagagtgagagga

SEQ ID NO: 1002100 - DNA, 33 bp, Homo sapien
aatgggctcacaaccctacaaagagtgagagga

SEQ ID NO: 1002101 - DNA, 33 bp, Homo sapien
ctaagggaaccatttacgaccacagccctttct

SEQ ID NO: 1002102 - DNA, 33 bp, Homo sapien
ctaagggaaccatttaggaccacagccctttct

SEQ ID NO: 1002103 - DNA, 33 bp, Homo sapien
gcgtttccaatttccacgctgttgagctaggtg

SEQ ID NO: 1002104 - DNA, 33 bp, Homo sapien
gcgtttccaatttccatgctgttgagctaggtg

SEQ ID NO: 1002105 - DNA, 33 bp, Homo sapien
ggtcagcattttgatacgacagcaccctagttt

SEQ ID NO: 1002106 - DNA, 33 bp, Homo sapien
ggtcagcattttgatatgacagcaccctagttt

SEQ ID NO: 1002107 - DNA, 33 bp, Homo sapien
agagtatatgatgtgcccaaataccgtgtcact

SEQ ID NO: 1002108 - DNA, 33 bp, Homo sapien
agagtatatgatgtgctcaaataccgtgtcact

SEQ ID NO: 1002109 - DNA, 33 bp, Homo sapien
ctgatctgttaaacctaagcatggatttcttta

SEQ ID NO: 1002110 - DNA, 33 bp, Homo sapien
ctgatctgttaaacctgagcatggatttcttta

SEQ ID NO: 1002111 - DNA, 33 bp, Homo sapien
gtccacagaccagcaaaaatagcacaacctcag

SEQ ID NO: 1002112 - DNA, 33 bp, Homo sapien
gtccacagaccagcaacaatagcacaacctcag

SEQ ID NO: 1002113 - DNA, 33 bp, Homo sapien
atgtgtagaaataaaacatgaccgcaatttaag

SEQ ID NO: 1002114 - DNA, 33 bp, Homo sapien
atgtgtagaaataaaatatgaccgcaatttaag

SEQ ID NO: 1002115 - DNA, 33 bp, Homo sapien
cagctagtattgcactcaatgggaaaaaccgac

SEQ ID NO: 1002116 - DNA, 33 bp, Homo sapien
cagctagtattgcactgaatgggaaaaaccgac

SEQ ID NO: 1002117 - DNA, 33 bp, Homo sapien
ctgcctcagaccaaaaatcacatattcacatat

SEQ ID NO: 1002118 - DNA, 33 bp, Homo sapien
ctgcctcagaccaaaagtcacatattcacatat

SEQ ID NO: 1002119 - DNA, 33 bp, Homo sapien
atgcaatatcagaatcaagagacaacaaaaaag

SEQ ID NO: 1002120 - DNA, 33 bp, Homo sapien
atgcaatatcagaatcgagagacaacaaaaaag

SEQ ID NO: 1002121 - DNA, 33 bp, Homo sapien
agtgttccatgaataacactgttcgggtctaag

SEQ ID NO: 1002122 - DNA, 33 bp, Homo sapien
agtgttccatgaataagactgttcgggtctaag

SEQ ID NO: 1002123 - DNA, 33 bp, Homo sapien
ttatagacttgtcaggaatgctataaaaatacc

SEQ ID NO: 1002124 - DNA, 33 bp, Homo sapien
ttatagacttgtcagggatgctataaaaatacc

SEQ ID NO: 1002125 - DNA, 33 bp, Homo sapien
gtcacacagttaataagtagctgacctgagatg

SEQ ID NO: 1002126 - DNA, 33 bp, Homo sapien
gtcacacagttaataattagctgacctgagatg

SEQ ID NO: 1002127 - DNA, 33 bp, Homo sapien
tctgatccccaccaacagaatgctccctaaacc

SEQ ID NO: 1002128 - DNA, 33 bp, Homo sapien
tctgatccccaccaacggaatgctccctaaacc

SEQ ID NO: 1002129 - DNA, 33 bp, Homo sapien
gtgtactacaaagacaatgaagagtaaggtgat

SEQ ID NO: 1002130 - DNA, 33 bp, Homo sapien
gtgtactacaaagacagtgaagagtaaggtgat

SEQ ID NO: 1002131 - DNA, 33 bp, Homo sapien
gtccttggttttgcacaggagattgactgaaaa

SEQ ID NO: 1002132 - DNA, 33 bp, Homo sapien
gtccttggttttgcaccggagattgactgaaaa

SEQ ID NO: 1002133 - DNA, 33 bp, Homo sapien
agagctactcctaaaaacaatgaccattggtac

SEQ ID NO: 1002134 - DNA, 33 bp, Homo sapien
agagctactcctaaaagcaatgaccattggtac

SEQ ID NO: 1002135 - DNA, 33 bp, Homo sapien
tttttttctgcaaaggaagcaataaaagccaat

SEQ ID NO: 1002136 - DNA, 33 bp, Homo sapien
tttttttctgcaaaggcagcaataaaagccaat

SEQ ID NO: 1002137 - DNA, 33 bp, Homo sapien
tcaataacaaatcaatcagactatactcctcct

SEQ ID NO: 1002138 - DNA, 33 bp, Homo sapien
tcaataacaaatcaatgagactatactcctcct

SEQ ID NO: 1002139 - DNA, 33 bp, Homo sapien
agagctttgccttttccagcgaaagacagagac

SEQ ID NO: 1002140 - DNA, 33 bp, Homo sapien
agagctttgccttttcgagcgaaagacagagac

SEQ ID NO: 1002141 - DNA, 33 bp, Homo sapien
cccactatttcccaaaaaagtgcccagacccat

SEQ ID NO: 1002142 - DNA, 33 bp, Homo sapien
cccactatttcccaaacaagtgcccagacccat

SEQ ID NO: 1002143 - DNA, 33 bp, Homo sapien
actggaatgtcacaaacctctaagaatagaata

SEQ ID NO: 1002144 - DNA, 33 bp, Homo sapien
actggaatgtcacaaatctctaagaatagaata

SEQ ID NO: 1002145 - DNA, 33 bp, Homo sapien
aaatatttttcaaaaccctaacagttgaagcaa

SEQ ID NO: 1002146 - DNA, 33 bp, Homo sapien
aaatatttttcaaaactctaacagttgaagcaa

SEQ ID NO: 1002147 - DNA, 33 bp, Homo sapien
ctgtttgtcttttaggaccatgtgtgatagtct

SEQ ID NO: 1002148 - DNA, 33 bp, Homo sapien
ctgtttgtcttttaggtccatgtgtgatagtct

SEQ ID NO: 1002149 - DNA, 33 bp, Homo sapien
gggagcggtttaacaaagactgaataaggagag

SEQ ID NO: 1002150 - DNA, 33 bp, Homo sapien
gggagcggtttaacaatgactgaataaggagag

SEQ ID NO: 1002151 - DNA, 33 bp, Homo sapien
ggcaatgacacttagaaggctctcaaagcatat

SEQ ID NO: 1002152 - DNA, 33 bp, Homo sapien
ggcaatgacacttagagggctctcaaagcatat

SEQ ID NO: 1002153 - DNA, 33 bp, Homo sapien
agcatatcttttggacacattagtttctctggc

SEQ ID NO: 1002154 - DNA, 33 bp, Homo sapien
agcatatcttttggacgcattagtttctctggc

SEQ ID NO: 1002155 - DNA, 33 bp, Homo sapien
ttggtacctggctgccgcgtggtattttatatc

SEQ ID NO: 1002156 - DNA, 33 bp, Homo sapien
ttggtacctggctgcctcgtggtattttatatc

SEQ ID NO: 1002157 - DNA, 33 bp, Homo sapien
ggcaaacataatgtagcacttgttggtgactcc

SEQ ID NO: 1002158 - DNA, 33 bp, Homo sapien
ggcaaacataatgtagtacttgttggtgactcc

SEQ ID NO: 1002159 - DNA, 33 bp, Homo sapien
aggtcctgagcagcaaatctagagaagtccagg

SEQ ID NO: 1002160 - DNA, 33 bp, Homo sapien
aggtcctgagcagcaattctagagaagtccagg

SEQ ID NO: 1002161 - DNA, 33 bp, Homo sapien
agcaagaagaggaccaatcgatagtatattaac

SEQ ID NO: 1002162 - DNA, 33 bp, Homo sapien
agcaagaagaggaccagtcgatagtatattaac

SEQ ID NO: 1002163 - DNA, 33 bp, Homo sapien
cattcaactaagaaaaagccactaagagaattc

SEQ ID NO: 1002164 - DNA, 33 bp, Homo sapien
cattcaactaagaaaatgccactaagagaattc

SEQ ID NO: 1002165 - DNA, 33 bp, Homo sapien
ttaacctcaagtttcactcttcagaaatcctga

SEQ ID NO: 1002166 - DNA, 33 bp, Homo sapien
ttaacctcaagtttcagtcttcagaaatcctga

SEQ ID NO: 1002167 - DNA, 33 bp, Homo sapien
agagagtacctatgaactggaacaaatactttt

SEQ ID NO: 1002168 - DNA, 33 bp, Homo sapien
agagagtacctatgaagtggaacaaatactttt

SEQ ID NO: 1002169 - DNA, 33 bp, Homo sapien
catgtgtgtaaagcataatagttaaaagaggtg

SEQ ID NO: 1002170 - DNA, 33 bp, Homo sapien
catgtgtgtaaagcatgatagttaaaagaggtg

SEQ ID NO: 1002171 - DNA, 33 bp, Homo sapien
caccacttttaaaatcaaggagttgaatcggtt

SEQ ID NO: 1002172 - DNA, 33 bp, Homo sapien
caccacttttaaaatccaggagttgaatcggtt

SEQ ID NO: 1002173 - DNA, 33 bp, Homo sapien
cccaagaagtttgtaacgcaggtatgattcctg

SEQ ID NO: 1002174 - DNA, 33 bp, Homo sapien
cccaagaagtttgtaatgcaggtatgattcctg

SEQ ID NO: 1002175 - DNA, 33 bp, Homo sapien
catagtaggcatgaaacaatggtgaatgagtga

SEQ ID NO: 1002176 - DNA, 33 bp, Homo sapien
catagtaggcatgaaataatggtgaatgagtga

SEQ ID NO: 1002177 - DNA, 33 bp, Homo sapien
ggcagctttaataacacaatcatatacaataca

SEQ ID NO: 1002178 - DNA, 33 bp, Homo sapien
ggcagctttaataacagaatcatatacaataca

SEQ ID NO: 1002179 - DNA, 33 bp, Homo sapien
aaccccagcactgggaataccaagcactagagg

SEQ ID NO: 1002180 - DNA, 33 bp, Homo sapien
aaccccagcactgggagtaccaagcactagagg

SEQ ID NO: 1002181 - DNA, 33 bp, Homo sapien
gggggaaggaggacaaaacagaagctcaacttt

SEQ ID NO: 1002182 - DNA, 33 bp, Homo sapien
gggggaaggaggacaagacagaagctcaacttt

SEQ ID NO: 1002183 - DNA, 33 bp, Homo sapien
ttttcgagaactgtcacctctaccttcccaaga

SEQ ID NO: 1002184 - DNA, 33 bp, Homo sapien
ttttcgagaactgtcagctctaccttcccaaga

SEQ ID NO: 1002185 - DNA, 33 bp, Homo sapien
ctgctcctgatgcaaaaccaggcacaacaaggg

SEQ ID NO: 1002186 - DNA, 33 bp, Homo sapien
ctgctcctgatgcaaagccaggcacaacaaggg

SEQ ID NO: 1002187 - DNA, 33 bp, Homo sapien
gtcttttgtgtggtcacattttagccagctgcc

SEQ ID NO: 1002188 - DNA, 33 bp, Homo sapien
gtcttttgtgtggtcatattttagccagctgcc

SEQ ID NO: 1002189 - DNA, 33 bp, Homo sapien
taaagatggcaagttaccatatctatagttgtc

SEQ ID NO: 1002190 - DNA, 33 bp, Homo sapien
taaagatggcaagttagcatatctatagttgtc

SEQ ID NO: 1002191 - DNA, 33 bp, Homo sapien
tgctttgggtccgagaagtagtgttatttccaa

SEQ ID NO: 1002192 - DNA, 33 bp, Homo sapien
tgctttgggtccgagacgtagtgttatttccaa

SEQ ID NO: 1002193 - DNA, 33 bp, Homo sapien
gtagaagcataagtgaggaatgggtggactcaa

SEQ ID NO: 1002194 - DNA, 33 bp, Homo sapien
gtagaagcataagtgatgaatgggtggactcaa

SEQ ID NO: 1002195 - DNA, 33 bp, Homo sapien
ccccaaccaactacacaaaacagtctttgaaaa

SEQ ID NO: 1002196 - DNA, 33 bp, Homo sapien
ccccaaccaactacactaaacagtctttgaaaa

SEQ ID NO: 1002197 - DNA, 33 bp, Homo sapien
caaaagaaatgtgcctaaatggaattttcaggg

SEQ ID NO: 1002198 - DNA, 33 bp, Homo sapien
caaaagaaatgtgcctcaatggaattttcaggg

SEQ ID NO: 1002199 - DNA, 33 bp, Homo sapien
atttctcgttggtttacgtagaattgtgagtgc

SEQ ID NO: 1002200 - DNA, 33 bp, Homo sapien
atttctcgttggtttatgtagaattgtgagtgc

SEQ ID NO: 1002201 - DNA, 33 bp, Homo sapien
cgtacttgagcaagcacagtgcataatggcatg

SEQ ID NO: 1002202 - DNA, 33 bp, Homo sapien
cgtacttgagcaagcagagtgcataatggcatg

SEQ ID NO: 1002203 - DNA, 33 bp, Homo sapien
ggggtaatcccattggaagccgttagatagaga

SEQ ID NO: 1002204 - DNA, 33 bp, Homo sapien
ggggtaatcccattgggagccgttagatagaga

SEQ ID NO: 1002205 - DNA, 33 bp, Homo sapien
agctggaaattgcacccaggaccatctgactcc

SEQ ID NO: 1002206 - DNA, 33 bp, Homo sapien
agctggaaattgcaccgaggaccatctgactcc

SEQ ID NO: 1002207 - DNA, 33 bp, Homo sapien
aacgcttacacagtaccagggattgatgattag

SEQ ID NO: 1002208 - DNA, 33 bp, Homo sapien
aacgcttacacagtactagggattgatgattag

SEQ ID NO: 1002209 - DNA, 33 bp, Homo sapien
ttgtacttgccacctcactgccatttaaatatc

SEQ ID NO: 1002210 - DNA, 33 bp, Homo sapien
ttgtacttgccacctcgctgccatttaaatatc

SEQ ID NO: 1002211 - DNA, 33 bp, Homo sapien
tattgcatatgtcacaatgcgttgattaaatga

SEQ ID NO: 1002212 - DNA, 33 bp, Homo sapien
tattgcatatgtcacagtgcgttgattaaatga

SEQ ID NO: 1002213 - DNA, 33 bp, Homo sapien
atttagtattacagcacgattaacaaaacttga

SEQ ID NO: 1002214 - DNA, 33 bp, Homo sapien
atttagtattacagcatgattaacaaaacttga

SEQ ID NO: 1002215 - DNA, 33 bp, Homo sapien
ggctttggtcttccaaatgaagaagatgagatc

SEQ ID NO: 1002216 - DNA, 33 bp, Homo sapien
ggctttggtcttccaagtgaagaagatgagatc

SEQ ID NO: 1002217 - DNA, 33 bp, Homo sapien
gtgtgggctatgtgaaatgtagagtaggccatt

SEQ ID NO: 1002218 - DNA, 33 bp, Homo sapien
gtgtgggctatgtgaagtgtagagtaggccatt

SEQ ID NO: 1002219 - DNA, 33 bp, Homo sapien
gtatgagttatacttgaaattaatgggtgatgt

SEQ ID NO: 1002220 - DNA, 33 bp, Homo sapien
gtatgagttatacttgtaattaatgggtgatgt

SEQ ID NO: 1002221 - DNA, 33 bp, Homo sapien
cctgcgccttgaaggacggagaggatgtggacc

SEQ ID NO: 1002222 - DNA, 33 bp, Homo sapien
cctgcgccttgaaggatggagaggatgtggacc

SEQ ID NO: 1002223 - DNA, 33 bp, Homo sapien
cttgtggtgtagagcaatgccatgtgtgagctg

SEQ ID NO: 1002224 - DNA, 33 bp, Homo sapien
cttgtggtgtagagcagtgccatgtgtgagctg

SEQ ID NO: 1002225 - DNA, 33 bp, Homo sapien
tcaactccaatcctccaccctagttcaagccac

SEQ ID NO: 1002226 - DNA, 33 bp, Homo sapien
tcaactccaatcctcctccctagttcaagccac

SEQ ID NO: 1002227 - DNA, 33 bp, Homo sapien
tttcttgataatggagaaaaatcaagagttaag

SEQ ID NO: 1002228 - DNA, 33 bp, Homo sapien
tttcttgataatggaggaaaatcaagagttaag

SEQ ID NO: 1002229 - DNA, 33 bp, Homo sapien
taaacattgagaagtaccagaaattttccatag

SEQ ID NO: 1002230 - DNA, 33 bp, Homo sapien
taaacattgagaagtagcagaaattttccatag

SEQ ID NO: 1002231 - DNA, 33 bp, Homo sapien
aaagtttgtaacatataaagaatggcaagaata

SEQ ID NO: 1002232 - DNA, 33 bp, Homo sapien
aaagtttgtaacatatgaagaatggcaagaata

SEQ ID NO: 1002233 - DNA, 33 bp, Homo sapien
cagccttgcctttctgaactggtaagcattttc

SEQ ID NO: 1002234 - DNA, 33 bp, Homo sapien
cagccttgcctttctgtactggtaagcattttc

SEQ ID NO: 1002235 - DNA, 33 bp, Homo sapien
attttgaatgtgtatgaaaggaagtttttcctt

SEQ ID NO: 1002236 - DNA, 33 bp, Homo sapien
attttgaatgtgtatggaaggaagtttttcctt

SEQ ID NO: 1002237 - DNA, 33 bp, Homo sapien
caagaagacacctgcagaagcagcctgggccat

SEQ ID NO: 1002238 - DNA, 33 bp, Homo sapien
caagaagacacctgcataagcagcctgggccat

SEQ ID NO: 1002239 - DNA, 33 bp, Homo sapien
taagttggtttgctgaggtgaaaatttccttag

SEQ ID NO: 1002240 - DNA, 33 bp, Homo sapien
taagttggtttgctgatgtgaaaatttccttag

SEQ ID NO: 1002241 - DNA, 33 bp, Homo sapien
cccttactatacagtaacaagcagcaaagactg

SEQ ID NO: 1002242 - DNA, 33 bp, Homo sapien
cccttactatacagtatcaagcagcaaagactg

SEQ ID NO: 1002243 - DNA, 33 bp, Homo sapien
gaaaatgacgggagtaaaatttccatctcttgt

SEQ ID NO: 1002244 - DNA, 33 bp, Homo sapien
gaaaatgacgggagtataatttccatctcttgt

SEQ ID NO: 1002245 - DNA, 33 bp, Homo sapien
ccctttgttctccagaaatcaaatgccaccaaa

SEQ ID NO: 1002246 - DNA, 33 bp, Homo sapien
ccctttgttctccagatatcaaatgccaccaaa

SEQ ID NO: 1002247 - DNA, 33 bp, Homo sapien
tgttcaaagaaacataaaatttcagagcaaaaa

SEQ ID NO: 1002248 - DNA, 33 bp, Homo sapien
tgttcaaagaaacatagaatttcagagcaaaaa

SEQ ID NO: 1002249 - DNA, 33 bp, Homo sapien
tagtcttctgcttttaagacgtacctctgaatg

SEQ ID NO: 1002250 - DNA, 33 bp, Homo sapien
tagtcttctgcttttacgacgtacctctgaatg

SEQ ID NO: 1002251 - DNA, 33 bp, Homo sapien
accttgcttctaaagagtcaatgtcaagtgtaa

SEQ ID NO: 1002252 - DNA, 33 bp, Homo sapien
accttgcttctaaagattcaatgtcaagtgtaa

SEQ ID NO: 1002253 - DNA, 33 bp, Homo sapien
ctttcaagctagttgcaaagaagggaaaatgga

SEQ ID NO: 1002254 - DNA, 33 bp, Homo sapien
ctttcaagctagttgccaagaagggaaaatgga

SEQ ID NO: 1002255 - DNA, 33 bp, Homo sapien
cgcccttgtgtgaagtaaccctgaaaacaaatc

SEQ ID NO: 1002256 - DNA, 33 bp, Homo sapien
cgcccttgtgtgaagtcaccctgaaaacaaatc

SEQ ID NO: 1002257 - DNA, 33 bp, Homo sapien
caacaagtcaatgaaaaccaattcaaccacttg

SEQ ID NO: 1002258 - DNA, 33 bp, Homo sapien
caacaagtcaatgaaatccaattcaaccacttg

SEQ ID NO: 1002259 - DNA, 33 bp, Homo sapien
aaagtagttaatagcacgcaaaaagggtgtgtt

SEQ ID NO: 1002260 - DNA, 33 bp, Homo sapien
aaagtagttaatagcatgcaaaaagggtgtgtt

SEQ ID NO: 1002261 - DNA, 33 bp, Homo sapien
ttagcacaatgccagccgagggtgtgtatatgg

SEQ ID NO: 1002262 - DNA, 33 bp, Homo sapien
ttagcacaatgccagctgagggtgtgtatatgg

SEQ ID NO: 1002263 - DNA, 33 bp, Homo sapien
ctggcattgtgctaacacttctcaaggaagaaa

SEQ ID NO: 1002264 - DNA, 33 bp, Homo sapien
ctggcattgtgctaactcttctcaaggaagaaa

SEQ ID NO: 1002265 - DNA, 33 bp, Homo sapien
tgagatgttcttggagaaagtttgactacacac

SEQ ID NO: 1002266 - DNA, 33 bp, Homo sapien
tgagatgttcttggaggaagtttgactacacac

SEQ ID NO: 1002267 - DNA, 33 bp, Homo sapien
gcaacagttcttgcaaactacagataactagct

SEQ ID NO: 1002268 - DNA, 33 bp, Homo sapien
gcaacagttcttgcaacctacagataactagct

SEQ ID NO: 1002269 - DNA, 33 bp, Homo sapien
ctctgattaattcaaactgttcacttgataaga

SEQ ID NO: 1002270 - DNA, 33 bp, Homo sapien
ctctgattaattcaaattgttcacttgataaga

SEQ ID NO: 1002271 - DNA, 33 bp, Homo sapien
tctgccgaaagagaaaagaggtgctgttcattt

SEQ ID NO: 1002272 - DNA, 33 bp, Homo sapien
tctgccgaaagagaaaggaggtgctgttcattt

SEQ ID NO: 1002273 - DNA, 33 bp, Homo sapien
gttctaaaaatgaaagcctcattagacaccatt

SEQ ID NO: 1002274 - DNA, 33 bp, Homo sapien
gttctaaaaatgaaaggctcattagacaccatt

SEQ ID NO: 1002275 - DNA, 33 bp, Homo sapien
catattcaaagcagtaataacagcaaacctttc

SEQ ID NO: 1002276 - DNA, 33 bp, Homo sapien
catattcaaagcagtagtaacagcaaacctttc

SEQ ID NO: 1002277 - DNA, 33 bp, Homo sapien
tctgtgactcagaaaaagatggtcaaagggcca

SEQ ID NO: 1002278 - DNA, 33 bp, Homo sapien
tctgtgactcagaaaaggatggtcaaagggcca

SEQ ID NO: 1002279 - DNA, 33 bp, Homo sapien
accacctaaggtgtgaaactaccacagtttagt

SEQ ID NO: 1002280 - DNA, 33 bp, Homo sapien
accacctaaggtgtgagactaccacagtttagt

SEQ ID NO: 1002281 - DNA, 33 bp, Homo sapien
ttcgcatttggacatacgggtcacctcatgcca

SEQ ID NO: 1002282 - DNA, 33 bp, Homo sapien
ttcgcatttggacatatgggtcacctcatgcca

SEQ ID NO: 1002283 - DNA, 33 bp, Homo sapien
cctagtgggactgcatcagttgtctccaaagca

SEQ ID NO: 1002284 - DNA, 33 bp, Homo sapien
cctagtgggactgcattagttgtctccaaagca

SEQ ID NO: 1002285 - DNA, 33 bp, Homo sapien
acaagttgttgctacaaatttctcagaatatca

SEQ ID NO: 1002286 - DNA, 33 bp, Homo sapien
acaagttgttgctacagatttctcagaatatca

SEQ ID NO: 1002287 - DNA, 33 bp, Homo sapien
tttttgttgagaaaagaacagtgtcaggaaaat

SEQ ID NO: 1002288 - DNA, 33 bp, Homo sapien
tttttgttgagaaaagcacagtgtcaggaaaat

SEQ ID NO: 1002289 - DNA, 33 bp, Homo sapien
tcttagccatgagtgaacatataggaagaaggg

SEQ ID NO: 1002290 - DNA, 33 bp, Homo sapien
tcttagccatgagtgagcatataggaagaaggg

SEQ ID NO: 1002291 - DNA, 33 bp, Homo sapien
actcatagttattcaaccactgtcatgcctgca

SEQ ID NO: 1002292 - DNA, 33 bp, Homo sapien
actcatagttattcaatcactgtcatgcctgca

SEQ ID NO: 1002293 - DNA, 33 bp, Homo sapien
aatgtctgccatacacaactaccaagcccttag

SEQ ID NO: 1002294 - DNA, 33 bp, Homo sapien
aatgtctgccatacacgactaccaagcccttag

SEQ ID NO: 1002295 - DNA, 33 bp, Homo sapien
aaaagtttcctacatcaattcttttttcaaaaa

SEQ ID NO: 1002296 - DNA, 33 bp, Homo sapien
aaaagtttcctacatcgattcttttttcaaaaa

SEQ ID NO: 1002297 - DNA, 33 bp, Homo sapien
tttaagactgttggaagagcagaatagagtggg

SEQ ID NO: 1002298 - DNA, 33 bp, Homo sapien
tttaagactgttggaatagcagaatagagtggg

SEQ ID NO: 1002299 - DNA, 33 bp, Homo sapien
tatactttgacacccacctgtatagtatcccag

SEQ ID NO: 1002300 - DNA, 33 bp, Homo sapien
tatactttgacacccatctgtatagtatcccag

SEQ ID NO: 1002301 - DNA, 33 bp, Homo sapien
ataagaggaaaattaagtgctgaatgatagaag

SEQ ID NO: 1002302 - DNA, 33 bp, Homo sapien
ataagaggaaaattaattgctgaatgatagaag

SEQ ID NO: 1002303 - DNA, 33 bp, Homo sapien
cggagacagtgctggcaagggccttccacatca

SEQ ID NO: 1002304 - DNA, 33 bp, Homo sapien
cggagacagtgctggccagggccttccacatca

SEQ ID NO: 1002305 - DNA, 33 bp, Homo sapien
tgataattttcatttcaacagaaaactcaggtt

SEQ ID NO: 1002306 - DNA, 33 bp, Homo sapien
tgataattttcatttcgacagaaaactcaggtt

SEQ ID NO: 1002307 - DNA, 33 bp, Homo sapien
agtatatgaggataaggataccagcatatttac

SEQ ID NO: 1002308 - DNA, 33 bp, Homo sapien
agtatatgaggataagtataccagcatatttac

SEQ ID NO: 1002309 - DNA, 33 bp, Homo sapien
gttctttgaaaagcacggtcttgtatttaactg

SEQ ID NO: 1002310 - DNA, 33 bp, Homo sapien
gttctttgaaaagcactgtcttgtatttaactg

SEQ ID NO: 1002311 - DNA, 33 bp, Homo sapien
ttaattgctggagccaatcatcagttaaataca

SEQ ID NO: 1002312 - DNA, 33 bp, Homo sapien
ttaattgctggagccagtcatcagttaaataca

SEQ ID NO: 1002313 - DNA, 33 bp, Homo sapien
attctaaagtgtggtaagatttaattgctggag

SEQ ID NO: 1002314 - DNA, 33 bp, Homo sapien
attctaaagtgtggtaggatttaattgctggag

SEQ ID NO: 1002315 - DNA, 33 bp, Homo sapien
acacgctagtgtgttacgtgagcagtaagtgtc

SEQ ID NO: 1002316 - DNA, 33 bp, Homo sapien
acacgctagtgtgttatgtgagcagtaagtgtc

SEQ ID NO: 1002317 - DNA, 33 bp, Homo sapien
taaaagtatgcagttcactcaggcaatttcatt

SEQ ID NO: 1002318 - DNA, 33 bp, Homo sapien
taaaagtatgcagttcgctcaggcaatttcatt

SEQ ID NO: 1002319 - DNA, 33 bp, Homo sapien
attgtgaatatagaaaaatacctttcatttttg

SEQ ID NO: 1002320 - DNA, 33 bp, Homo sapien
attgtgaatatagaaacatacctttcatttttg

SEQ ID NO: 1002321 - DNA, 33 bp, Homo sapien
tgtcttccaaagccccagaaaaccagctacact

SEQ ID NO: 1002322 - DNA, 33 bp, Homo sapien
tgtcttccaaagccccggaaaaccagctacact

SEQ ID NO: 1002323 - DNA, 33 bp, Homo sapien
gtcacaatgtgaatgaagaaaccaggaaatatt

SEQ ID NO: 1002324 - DNA, 33 bp, Homo sapien
gtcacaatgtgaatgatgaaaccaggaaatatt

SEQ ID NO: 1002325 - DNA, 33 bp, Homo sapien
acaggtcttaagttgcacacggcaatggcgcat

SEQ ID NO: 1002326 - DNA, 33 bp, Homo sapien
acaggtcttaagttgcgcacggcaatggcgcat

SEQ ID NO: 1002327 - DNA, 33 bp, Homo sapien
aaactgagatgacaaaggataagtgtctagaat

SEQ ID NO: 1002328 - DNA, 33 bp, Homo sapien
aaactgagatgacaaatgataagtgtctagaat

SEQ ID NO: 1002329 - DNA, 33 bp, Homo sapien
ttactgagactgacacagaaattcttgtttaca

SEQ ID NO: 1002330 - DNA, 33 bp, Homo sapien
ttactgagactgacacggaaattcttgtttaca

SEQ ID NO: 1002331 - DNA, 33 bp, Homo sapien
gaggaagacattcagaaagagggatgtatctgg

SEQ ID NO: 1002332 - DNA, 33 bp, Homo sapien
gaggaagacattcagagagagggatgtatctgg

SEQ ID NO: 1002333 - DNA, 33 bp, Homo sapien
ataagaaatacataaaagaaagatcacacacac

SEQ ID NO: 1002334 - DNA, 33 bp, Homo sapien
ataagaaatacataaaggaaagatcacacacac

SEQ ID NO: 1002335 - DNA, 33 bp, Homo sapien
agggctctttccactacagcatgtgttcttcac

SEQ ID NO: 1002336 - DNA, 33 bp, Homo sapien
agggctctttccactatagcatgtgttcttcac

SEQ ID NO: 1002337 - DNA, 33 bp, Homo sapien
cattcctgaaccggagacacacatgcaactcat

SEQ ID NO: 1002338 - DNA, 33 bp, Homo sapien
cattcctgaaccggagccacacatgcaactcat

SEQ ID NO: 1002339 - DNA, 33 bp, Homo sapien
tgtcatggttctttcaaaaaatgttaatgagat

SEQ ID NO: 1002340 - DNA, 33 bp, Homo sapien
tgtcatggttctttcacaaaatgttaatgagat

SEQ ID NO: 1002341 - DNA, 33 bp, Homo sapien
ttcaacaacaataataaggattttccagccaag

SEQ ID NO: 1002342 - DNA, 33 bp, Homo sapien
ttcaacaacaataatagggattttccagccaag

SEQ ID NO: 1002343 - DNA, 33 bp, Homo sapien
tcctatttatgacggccaggttggttatgacgg

SEQ ID NO: 1002344 - DNA, 33 bp, Homo sapien
tcctatttatgacggcgaggttggttatgacgg

SEQ ID NO: 1002345 - DNA, 33 bp, Homo sapien
atctcaagattagaacaaaggtgaaaagcctga

SEQ ID NO: 1002346 - DNA, 33 bp, Homo sapien
atctcaagattagaaccaaggtgaaaagcctga

SEQ ID NO: 1002347 - DNA, 33 bp, Homo sapien
taaatgtctgatactacaagaattagtgtcgag

SEQ ID NO: 1002348 - DNA, 33 bp, Homo sapien
taaatgtctgatactataagaattagtgtcgag

SEQ ID NO: 1002349 - DNA, 33 bp, Homo sapien
gcaaaacctatcctaaccaaacttagctaacta

SEQ ID NO: 1002350 - DNA, 33 bp, Homo sapien
gcaaaacctatcctaatcaaacttagctaacta

SEQ ID NO: 1002351 - DNA, 33 bp, Homo sapien
actgttgaataggaaagctgactaatgtacaat

SEQ ID NO: 1002352 - DNA, 33 bp, Homo sapien
actgttgaataggaaatctgactaatgtacaat

SEQ ID NO: 1002353 - DNA, 33 bp, Homo sapien
ataacattgcacttaaaagaatgaggttactgc

SEQ ID NO: 1002354 - DNA, 33 bp, Homo sapien
ataacattgcacttaacagaatgaggttactgc

SEQ ID NO: 1002355 - DNA, 33 bp, Homo sapien
atttcaggaagcttggcaagtgtttttgcagct

SEQ ID NO: 1002356 - DNA, 33 bp, Homo sapien
atttcaggaagcttgggaagtgtttttgcagct

SEQ ID NO: 1002357 - DNA, 33 bp, Homo sapien
tcaaatgttagagatacgttgtgcccgataaac

SEQ ID NO: 1002358 - DNA, 33 bp, Homo sapien
tcaaatgttagagatatgttgtgcccgataaac

SEQ ID NO: 1002359 - DNA, 33 bp, Homo sapien
attataatcatcaaggcatcaaaccaagcgcag

SEQ ID NO: 1002360 - DNA, 33 bp, Homo sapien
attataatcatcaaggtatcaaaccaagcgcag

SEQ ID NO: 1002361 - DNA, 33 bp, Homo sapien
ggagaaatgaagagaccgagtttcctgggcttc

SEQ ID NO: 1002362 - DNA, 33 bp, Homo sapien
ggagaaatgaagagactgagtttcctgggcttc

SEQ ID NO: 1002363 - DNA, 33 bp, Homo sapien
ggctgaagtcaaacctaagactgtctgacacta

SEQ ID NO: 1002364 - DNA, 33 bp, Homo sapien
ggctgaagtcaaacctcagactgtctgacacta

SEQ ID NO: 1002365 - DNA, 33 bp, Homo sapien
ggatgcaatgttagcaacctggctaaaagtaca

SEQ ID NO: 1002366 - DNA, 33 bp, Homo sapien
ggatgcaatgttagcagcctggctaaaagtaca

SEQ ID NO: 1002367 - DNA, 33 bp, Homo sapien
atagatcactttttcccgcttttgaattgagta

SEQ ID NO: 1002368 - DNA, 33 bp, Homo sapien
atagatcactttttcctgcttttgaattgagta

SEQ ID NO: 1002369 - DNA, 33 bp, Homo sapien
tctggggatctgttacaacttttttttgagaca

SEQ ID NO: 1002370 - DNA, 33 bp, Homo sapien
tctggggatctgttacgacttttttttgagaca

SEQ ID NO: 1002371 - DNA, 33 bp, Homo sapien
gtgacaactgggaaaaattgtgataccgctttc

SEQ ID NO: 1002372 - DNA, 33 bp, Homo sapien
gtgacaactgggaaaacttgtgataccgctttc

SEQ ID NO: 1002373 - DNA, 33 bp, Homo sapien
gctcagctttacccaacggttcatagtgagaga

SEQ ID NO: 1002374 - DNA, 33 bp, Homo sapien
gctcagctttacccaatggttcatagtgagaga

SEQ ID NO: 1002375 - DNA, 33 bp, Homo sapien
tcaagtttgtaagagacggatgattcctattgt

SEQ ID NO: 1002376 - DNA, 33 bp, Homo sapien
tcaagtttgtaagagatggatgattcctattgt

SEQ ID NO: 1002377 - DNA, 33 bp, Homo sapien
tttatggcctagaaaactgagggagttagatga

SEQ ID NO: 1002378 - DNA, 33 bp, Homo sapien
tttatggcctagaaaattgagggagttagatga

SEQ ID NO: 1002379 - DNA, 33 bp, Homo sapien
tgggtcaggctttggcactaaatagtggtgttt

SEQ ID NO: 1002380 - DNA, 33 bp, Homo sapien
tgggtcaggctttggcgctaaatagtggtgttt

SEQ ID NO: 1002381 - DNA, 33 bp, Homo sapien
agaatagagaagtgaaatgggaacagtgttaac

SEQ ID NO: 1002382 - DNA, 33 bp, Homo sapien
agaatagagaagtgaactgggaacagtgttaac

SEQ ID NO: 1002383 - DNA, 33 bp, Homo sapien
atcaatgaagctaataagataagttgtacttaa

SEQ ID NO: 1002384 - DNA, 33 bp, Homo sapien
atcaatgaagctaatacgataagttgtacttaa

SEQ ID NO: 1002385 - DNA, 33 bp, Homo sapien
tcatggtcttaaaagacgcttttgtgctctctt

SEQ ID NO: 1002386 - DNA, 33 bp, Homo sapien
tcatggtcttaaaagatgcttttgtgctctctt

SEQ ID NO: 1002387 - DNA, 33 bp, Homo sapien
attctggactgctggaaattgctatagtctcaa

SEQ ID NO: 1002388 - DNA, 33 bp, Homo sapien
attctggactgctggagattgctatagtctcaa

SEQ ID NO: 1002389 - DNA, 33 bp, Homo sapien
gggtatcacctggcaacgggtctgaacgaacta

SEQ ID NO: 1002390 - DNA, 33 bp, Homo sapien
gggtatcacctggcaaggggtctgaacgaacta

SEQ ID NO: 1002391 - DNA, 33 bp, Homo sapien
agcatcaaagataagacaggaatatgcactcca

SEQ ID NO: 1002392 - DNA, 33 bp, Homo sapien
agcatcaaagataagagaggaatatgcactcca

SEQ ID NO: 1002393 - DNA, 33 bp, Homo sapien
ttagtacagttttacaatacctggtcagaaatc

SEQ ID NO: 1002394 - DNA, 33 bp, Homo sapien
ttagtacagttttacattacctggtcagaaatc

SEQ ID NO: 1002395 - DNA, 33 bp, Homo sapien
gaagctagagagacaccgcaaggtgaagtggaa

SEQ ID NO: 1002396 - DNA, 33 bp, Homo sapien
gaagctagagagacactgcaaggtgaagtggaa

SEQ ID NO: 1002397 - DNA, 33 bp, Homo sapien
catttactttcatttcaaggcacttctcacctc

SEQ ID NO: 1002398 - DNA, 33 bp, Homo sapien
catttactttcatttcgaggcacttctcacctc

SEQ ID NO: 1002399 - DNA, 33 bp, Homo sapien
cttctaaaatgcacaacggtattttagaatgat

SEQ ID NO: 1002400 - DNA, 33 bp, Homo sapien
cttctaaaatgcacaatggtattttagaatgat

SEQ ID NO: 1002401 - DNA, 33 bp, Homo sapien
tacatatttctctctcacatatccaggtgaaag

SEQ ID NO: 1002402 - DNA, 33 bp, Homo sapien
tacatatttctctctcgcatatccaggtgaaag

SEQ ID NO: 1002403 - DNA, 33 bp, Homo sapien
accctgagaatttcaaaagagccacaagaatgt

SEQ ID NO: 1002404 - DNA, 33 bp, Homo sapien
accctgagaatttcaagagagccacaagaatgt

SEQ ID NO: 1002405 - DNA, 33 bp, Homo sapien
atgcaggtcagtgttacctgttgccttgcctcc

SEQ ID NO: 1002406 - DNA, 33 bp, Homo sapien
atgcaggtcagtgttatctgttgccttgcctcc

SEQ ID NO: 1002407 - DNA, 33 bp, Homo sapien
actaacttgtgacttgcattgggatgaggaacc

SEQ ID NO: 1002408 - DNA, 33 bp, Homo sapien
actaacttgtgacttggattgggatgaggaacc

SEQ ID NO: 1002409 - DNA, 33 bp, Homo sapien
aaaaaaacaataacaacgatgatgtccaatttt

SEQ ID NO: 1002410 - DNA, 33 bp, Homo sapien
aaaaaaacaataacaatgatgatgtccaatttt

SEQ ID NO: 1002411 - DNA, 33 bp, Homo sapien
ggccctgagtaggacacattttgtagttggctg

SEQ ID NO: 1002412 - DNA, 33 bp, Homo sapien
ggccctgagtaggacatattttgtagttggctg

SEQ ID NO: 1002413 - DNA, 33 bp, Homo sapien
aaaagagagaagtctaggggcattaaaatacat

SEQ ID NO: 1002414 - DNA, 33 bp, Homo sapien
aaaagagagaagtctatgggcattaaaatacat

SEQ ID NO: 1002415 - DNA, 33 bp, Homo sapien
tgtacgcccgggggtcaagatgatccaacggaa

SEQ ID NO: 1002416 - DNA, 33 bp, Homo sapien
tgtacgcccgggggtccagatgatccaacggaa

SEQ ID NO: 1002417 - DNA, 33 bp, Homo sapien
cttctcatttattacacgaagctgaaatcttct

SEQ ID NO: 1002418 - DNA, 33 bp, Homo sapien
cttctcatttattacaggaagctgaaatcttct

SEQ ID NO: 1002419 - DNA, 33 bp, Homo sapien
ctccactctttacttgcatattctggaaacaca

SEQ ID NO: 1002420 - DNA, 33 bp, Homo sapien
ctccactctttacttggatattctggaaacaca

SEQ ID NO: 1002421 - DNA, 33 bp, Homo sapien
aagatgtgtatgacaaggtttaagagtaagtaa

SEQ ID NO: 1002422 - DNA, 33 bp, Homo sapien
aagatgtgtatgacaatgtttaagagtaagtaa

SEQ ID NO: 1002423 - DNA, 33 bp, Homo sapien
agcaagtgaaaccagaaattattgatgtaagca

SEQ ID NO: 1002424 - DNA, 33 bp, Homo sapien
agcaagtgaaaccagagattattgatgtaagca

SEQ ID NO: 1002425 - DNA, 33 bp, Homo sapien
aactaagggtaaggtaacaatcctgctacacag

SEQ ID NO: 1002426 - DNA, 33 bp, Homo sapien
aactaagggtaaggtaccaatcctgctacacag

SEQ ID NO: 1002427 - DNA, 33 bp, Homo sapien
acaagaattcaacttccgaaagggagaaagaat

SEQ ID NO: 1002428 - DNA, 33 bp, Homo sapien
acaagaattcaacttctgaaagggagaaagaat

SEQ ID NO: 1002429 - DNA, 33 bp, Homo sapien
attgggaagcatccacagaacagatgatctgga

SEQ ID NO: 1002430 - DNA, 33 bp, Homo sapien
attgggaagcatccacggaacagatgatctgga

SEQ ID NO: 1002431 - DNA, 33 bp, Homo sapien
aggaactgaggaaaacaagctgggtcatcaaat

SEQ ID NO: 1002432 - DNA, 33 bp, Homo sapien
aggaactgaggaaaaccagctgggtcatcaaat

SEQ ID NO: 1002433 - DNA, 33 bp, Homo sapien
tttgccatggtagtaacggaacattcctgttat

SEQ ID NO: 1002434 - DNA, 33 bp, Homo sapien
tttgccatggtagtaatggaacattcctgttat

SEQ ID NO: 1002435 - DNA, 33 bp, Homo sapien
acttggcttaaaaaacaacttcgcttagccgct

SEQ ID NO: 1002436 - DNA, 33 bp, Homo sapien
acttggcttaaaaaaccacttcgcttagccgct

SEQ ID NO: 1002437 - DNA, 33 bp, Homo sapien
ttctggttcctgtcacccagtgtttctcaacca

SEQ ID NO: 1002438 - DNA, 33 bp, Homo sapien
ttctggttcctgtcactcagtgtttctcaacca

SEQ ID NO: 1002439 - DNA, 33 bp, Homo sapien
agttaatctctcagtgaatttggtggtatctcg

SEQ ID NO: 1002440 - DNA, 33 bp, Homo sapien
agttaatctctcagtgtatttggtggtatctcg

SEQ ID NO: 1002441 - DNA, 33 bp, Homo sapien
aattggtaggcattaaaaacagtatccatacat

SEQ ID NO: 1002442 - DNA, 33 bp, Homo sapien
aattggtaggcattaacaacagtatccatacat

SEQ ID NO: 1002443 - DNA, 33 bp, Homo sapien
caccctcatggtcttaggctcttaaaattggta

SEQ ID NO: 1002444 - DNA, 33 bp, Homo sapien
caccctcatggtcttatgctcttaaaattggta

SEQ ID NO: 1002445 - DNA, 33 bp, Homo sapien
tctggtctggaagcataaacacaagtatattga

SEQ ID NO: 1002446 - DNA, 33 bp, Homo sapien
tctggtctggaagcatgaacacaagtatattga

SEQ ID NO: 1002447 - DNA, 33 bp, Homo sapien
aagtcagaccctatcactcctctactcaaaagc

SEQ ID NO: 1002448 - DNA, 33 bp, Homo sapien
aagtcagaccctatcagtcctctactcaaaagc

SEQ ID NO: 1002449 - DNA, 33 bp, Homo sapien
gaaagagagtgacaaaaaagagtcagcagtgac

SEQ ID NO: 1002450 - DNA, 33 bp, Homo sapien
gaaagagagtgacaaagaagagtcagcagtgac

SEQ ID NO: 1002451 - DNA, 33 bp, Homo sapien
tgggcaccgttacccaaccattgcacagtcttc

SEQ ID NO: 1002452 - DNA, 33 bp, Homo sapien
tgggcaccgttacccagccattgcacagtcttc

SEQ ID NO: 1002453 - DNA, 33 bp, Homo sapien
gaccttaccatctcagaaaaacttaatagaatt

SEQ ID NO: 1002454 - DNA, 33 bp, Homo sapien
gaccttaccatctcaggaaaacttaatagaatt

SEQ ID NO: 1002455 - DNA, 33 bp, Homo sapien
ctatgcataagcctgcaaacattaacctatcag

SEQ ID NO: 1002456 - DNA, 33 bp, Homo sapien
ctatgcataagcctgcgaacattaacctatcag

SEQ ID NO: 1002457 - DNA, 33 bp, Homo sapien
aatggagagccactaaccatgaaagaaatcttc

SEQ ID NO: 1002458 - DNA, 33 bp, Homo sapien
aatggagagccactaatcatgaaagaaatcttc

SEQ ID NO: 1002459 - DNA, 33 bp, Homo sapien
ggaaaaaacacacgtacgcaaagcaagccgggc

SEQ ID NO: 1002460 - DNA, 33 bp, Homo sapien
ggaaaaaacacacgtatgcaaagcaagccgggc

SEQ ID NO: 1002461 - DNA, 33 bp, Homo sapien
gaattgttgcaaaagtcaattacagaaagtgaa

SEQ ID NO: 1002462 - DNA, 33 bp, Homo sapien
gaattgttgcaaaagtgaattacagaaagtgaa

SEQ ID NO: 1002463 - DNA, 33 bp, Homo sapien
accagaagtaatatcagtaggatcagatgagca

SEQ ID NO: 1002464 - DNA, 33 bp, Homo sapien
accagaagtaatatcattaggatcagatgagca

SEQ ID NO: 1002465 - DNA, 33 bp, Homo sapien
gtattgtttttcctgaagatgtaattcttattc

SEQ ID NO: 1002466 - DNA, 33 bp, Homo sapien
gtattgtttttcctgatgatgtaattcttattc

SEQ ID NO: 1002467 - DNA, 33 bp, Homo sapien
tcagcaagtctgagaaatcccttaaggcataat

SEQ ID NO: 1002468 - DNA, 33 bp, Homo sapien
tcagcaagtctgagaagtcccttaaggcataat

SEQ ID NO: 1002469 - DNA, 33 bp, Homo sapien
tggaacagcatccaagaaatactacttgatggc

SEQ ID NO: 1002470 - DNA, 33 bp, Homo sapien
tggaacagcatccaaggaatactacttgatggc

SEQ ID NO: 1002471 - DNA, 33 bp, Homo sapien
cattcattctaatttcactggatagactttatt

SEQ ID NO: 1002472 - DNA, 33 bp, Homo sapien
cattcattctaatttcgctggatagactttatt

SEQ ID NO: 1002473 - DNA, 33 bp, Homo sapien
cttcctagagactgcccgaattatgaccaaaat

SEQ ID NO: 1002474 - DNA, 33 bp, Homo sapien
cttcctagagactgcctgaattatgaccaaaat

SEQ ID NO: 1002475 - DNA, 33 bp, Homo sapien
tcctttggtgttcgtaaccatttagccatgcct

SEQ ID NO: 1002476 - DNA, 33 bp, Homo sapien
tcctttggtgttcgtagccatttagccatgcct

SEQ ID NO: 1002477 - DNA, 33 bp, Homo sapien
tgtactcagcagtgaagcaactcaatttaagat

SEQ ID NO: 1002478 - DNA, 33 bp, Homo sapien
tgtactcagcagtgaatcaactcaatttaagat

SEQ ID NO: 1002479 - DNA, 33 bp, Homo sapien
tagattattttgtgaactggttaggccctttgt

SEQ ID NO: 1002480 - DNA, 33 bp, Homo sapien
tagattattttgtgaattggttaggccctttgt

SEQ ID NO: 1002481 - DNA, 33 bp, Homo sapien
ttttttactgaacttacgttgtaccaaatatct

SEQ ID NO: 1002482 - DNA, 33 bp, Homo sapien
ttttttactgaacttatgttgtaccaaatatct

SEQ ID NO: 1002483 - DNA, 33 bp, Homo sapien
ctttcattgaatgataaatcgttccctggtact

SEQ ID NO: 1002484 - DNA, 33 bp, Homo sapien
ctttcattgaatgatagatcgttccctggtact

SEQ ID NO: 1002485 - DNA, 33 bp, Homo sapien
ctacttctgcttaggtaaatgaagctcttcttt

SEQ ID NO: 1002486 - DNA, 33 bp, Homo sapien
ctacttctgcttaggtgaatgaagctcttcttt

SEQ ID NO: 1002487 - DNA, 33 bp, Homo sapien
catttgttaaccatgaaaatcatatatgggatg

SEQ ID NO: 1002488 - DNA, 33 bp, Homo sapien
catttgttaaccatgagaatcatatatgggatg

SEQ ID NO: 1002489 - DNA, 33 bp, Homo sapien
ttggccctttctttcaatacggatgatcatgtt

SEQ ID NO: 1002490 - DNA, 33 bp, Homo sapien
ttggccctttctttcagtacggatgatcatgtt

SEQ ID NO: 1002491 - DNA, 33 bp, Homo sapien
tatgtgtgggaaatagaaactcgccgggtttat

SEQ ID NO: 1002492 - DNA, 33 bp, Homo sapien
tatgtgtgggaaataggaactcgccgggtttat

SEQ ID NO: 1002493 - DNA, 33 bp, Homo sapien
actctgtactttccaacctattctatagccaag

SEQ ID NO: 1002494 - DNA, 33 bp, Homo sapien
actctgtactttccaatctattctatagccaag

SEQ ID NO: 1002495 - DNA, 33 bp, Homo sapien
aacatttgcagacaaaataattacccaagcaag

SEQ ID NO: 1002496 - DNA, 33 bp, Homo sapien
aacatttgcagacaaagtaattacccaagcaag

SEQ ID NO: 1002497 - DNA, 33 bp, Homo sapien
catggtgatgaaaagcactggccttactcattt

SEQ ID NO: 1002498 - DNA, 33 bp, Homo sapien
catggtgatgaaaagcgctggccttactcattt

SEQ ID NO: 1002499 - DNA, 33 bp, Homo sapien
aaagagtataggagaactcggtacattgttctt

SEQ ID NO: 1002500 - DNA, 33 bp, Homo sapien
aaagagtataggagaattcggtacattgttctt

SEQ ID NO: 1002501 - DNA, 33 bp, Homo sapien
gattctatcagaaaataacccagaatcaagatc

SEQ ID NO: 1002502 - DNA, 33 bp, Homo sapien
gattctatcagaaaattacccagaatcaagatc

SEQ ID NO: 1002503 - DNA, 33 bp, Homo sapien
tcttcctgacaagtccaccgaaagtgccaccag

SEQ ID NO: 1002504 - DNA, 33 bp, Homo sapien
tcttcctgacaagtccgccgaaagtgccaccag

SEQ ID NO: 1002505 - DNA, 33 bp, Homo sapien
agtcaaagaagaaataacaacgatttgtaatgt

SEQ ID NO: 1002506 - DNA, 33 bp, Homo sapien
agtcaaagaagaaatatcaacgatttgtaatgt

SEQ ID NO: 1002507 - DNA, 33 bp, Homo sapien
taaaatcaatgcacaagaattgggggtttggct

SEQ ID NO: 1002508 - DNA, 33 bp, Homo sapien
taaaatcaatgcacaataattgggggtttggct

SEQ ID NO: 1002509 - DNA, 33 bp, Homo sapien
tgtgaacgacggaagaccagaaataaaaagtgt

SEQ ID NO: 1002510 - DNA, 33 bp, Homo sapien
tgtgaacgacggaagatcagaaataaaaagtgt

SEQ ID NO: 1002511 - DNA, 33 bp, Homo sapien
ttgcaatttaaattcacgtgacaaatttcaatg

SEQ ID NO: 1002512 - DNA, 33 bp, Homo sapien
ttgcaatttaaattcatgtgacaaatttcaatg

SEQ ID NO: 1002513 - DNA, 33 bp, Homo sapien
cacacattccaaaatcaagggtataagcaatta

SEQ ID NO: 1002514 - DNA, 33 bp, Homo sapien
cacacattccaaaatctagggtataagcaatta

SEQ ID NO: 1002515 - DNA, 33 bp, Homo sapien
acatccttgtgcagtcacatatcttcatgcaaa

SEQ ID NO: 1002516 - DNA, 33 bp, Homo sapien
acatccttgtgcagtcgcatatcttcatgcaaa

SEQ ID NO: 1002517 - DNA, 33 bp, Homo sapien
tcgaatacccccacttcaaagggagacatttgc

SEQ ID NO: 1002518 - DNA, 33 bp, Homo sapien
tcgaatacccccacttgaaagggagacatttgc

SEQ ID NO: 1002519 - DNA, 33 bp, Homo sapien
catctgagactgaggaacgcctagtcctccgtc

SEQ ID NO: 1002520 - DNA, 33 bp, Homo sapien
catctgagactgaggagcgcctagtcctccgtc

SEQ ID NO: 1002521 - DNA, 33 bp, Homo sapien
aatgtgtttgcttaaaagagagagaggagaaaa

SEQ ID NO: 1002522 - DNA, 33 bp, Homo sapien
aatgtgtttgcttaaaggagagagaggagaaaa

SEQ ID NO: 1002523 - DNA, 33 bp, Homo sapien
tgtgtaaaatgtacctcaataaatttgttgttt

SEQ ID NO: 1002524 - DNA, 33 bp, Homo sapien
tgtgtaaaatgtacctgaataaatttgttgttt

SEQ ID NO: 1002525 - DNA, 33 bp, Homo sapien
aaagtatatattagtacgtcaacacaaagacat

SEQ ID NO: 1002526 - DNA, 33 bp, Homo sapien
aaagtatatattagtatgtcaacacaaagacat

SEQ ID NO: 1002527 - DNA, 33 bp, Homo sapien
cagaagtaaaatctcaaacctgtaaccatcaga

SEQ ID NO: 1002528 - DNA, 33 bp, Homo sapien
cagaagtaaaatctcagacctgtaaccatcaga

SEQ ID NO: 1002529 - DNA, 33 bp, Homo sapien
gcagagcatttcttcacgtctgttggccacttg

SEQ ID NO: 1002530 - DNA, 33 bp, Homo sapien
gcagagcatttcttcatgtctgttggccacttg

SEQ ID NO: 1002531 - DNA, 33 bp, Homo sapien
tcacattctcacatcaaatcttccagggaagag

SEQ ID NO: 1002532 - DNA, 33 bp, Homo sapien
tcacattctcacatcacatcttccagggaagag

SEQ ID NO: 1002533 - DNA, 33 bp, Homo sapien
caatatcccttggtcactattaagattcccttt

SEQ ID NO: 1002534 - DNA, 33 bp, Homo sapien
caatatcccttggtcattattaagattcccttt

SEQ ID NO: 1002535 - DNA, 33 bp, Homo sapien
taatataaaactcagacgcctattagcagaaaa

SEQ ID NO: 1002536 - DNA, 33 bp, Homo sapien
taatataaaactcagatgcctattagcagaaaa

SEQ ID NO: 1002537 - DNA, 33 bp, Homo sapien
ttctcaggtctaataaagggtgtgaaccatcca

SEQ ID NO: 1002538 - DNA, 33 bp, Homo sapien
ttctcaggtctaataaggggtgtgaaccatcca

SEQ ID NO: 1002539 - DNA, 33 bp, Homo sapien
gctcttggtaaactgacgcagagtttcgatcta

SEQ ID NO: 1002540 - DNA, 33 bp, Homo sapien
gctcttggtaaactgatgcagagtttcgatcta

SEQ ID NO: 1002541 - DNA, 33 bp, Homo sapien
ggctcacatcttaacaatggatcaatcacgaaa

SEQ ID NO: 1002542 - DNA, 33 bp, Homo sapien
ggctcacatcttaacagtggatcaatcacgaaa

SEQ ID NO: 1002543 - DNA, 33 bp, Homo sapien
taagactacacatactcactccagcactatctc

SEQ ID NO: 1002544 - DNA, 33 bp, Homo sapien
taagactacacatactgactccagcactatctc

SEQ ID NO: 1002545 - DNA, 33 bp, Homo sapien
tgactcttggattttacagaaccacaagtcctg

SEQ ID NO: 1002546 - DNA, 33 bp, Homo sapien
tgactcttggattttatagaaccacaagtcctg

SEQ ID NO: 1002547 - DNA, 33 bp, Homo sapien
gatttgggatgccagcggaaagtgacctgaaaa

SEQ ID NO: 1002548 - DNA, 33 bp, Homo sapien
gatttgggatgccagctgaaagtgacctgaaaa

SEQ ID NO: 1002549 - DNA, 33 bp, Homo sapien
gactcgctgattgatacgatgtggtagcagaaa

SEQ ID NO: 1002550 - DNA, 33 bp, Homo sapien
gactcgctgattgatatgatgtggtagcagaaa

SEQ ID NO: 1002551 - DNA, 33 bp, Homo sapien
ttttataggactcaacaggctgcataaaagggc

SEQ ID NO: 1002552 - DNA, 33 bp, Homo sapien
ttttataggactcaacgggctgcataaaagggc

SEQ ID NO: 1002553 - DNA, 33 bp, Homo sapien
gcaacaatatgtgtctcaaattaaccaggcatg

SEQ ID NO: 1002554 - DNA, 33 bp, Homo sapien
gcaacaatatgtgtctgaaattaaccaggcatg

SEQ ID NO: 1002555 - DNA, 33 bp, Homo sapien
ctttggctcaaactccgcctcacagaaacaacc

SEQ ID NO: 1002556 - DNA, 33 bp, Homo sapien
ctttggctcaaactcctcctcacagaaacaacc

SEQ ID NO: 1002557 - DNA, 33 bp, Homo sapien
atttctaccacgataaatctcaaaaggatgcac

SEQ ID NO: 1002558 - DNA, 33 bp, Homo sapien
atttctaccacgataagtctcaaaaggatgcac

SEQ ID NO: 1002559 - DNA, 33 bp, Homo sapien
taagtgtctggtctcactagatgaagctgcaaa

SEQ ID NO: 1002560 - DNA, 33 bp, Homo sapien
taagtgtctggtctcattagatgaagctgcaaa

SEQ ID NO: 1002561 - DNA, 33 bp, Homo sapien
actgacaccttaatccaattttggtatcaaacc

SEQ ID NO: 1002562 - DNA, 33 bp, Homo sapien
actgacaccttaatccgattttggtatcaaacc

SEQ ID NO: 1002563 - DNA, 33 bp, Homo sapien
gattaaattgcagctaaatctctcaatcaactc

SEQ ID NO: 1002564 - DNA, 33 bp, Homo sapien
gattaaattgcagctacatctctcaatcaactc

SEQ ID NO: 1002565 - DNA, 33 bp, Homo sapien
tgccatgtacgtttcacacaggcaatgaaggac

SEQ ID NO: 1002566 - DNA, 33 bp, Homo sapien
tgccatgtacgtttcatacaggcaatgaaggac

SEQ ID NO: 1002567 - DNA, 33 bp, Homo sapien
ttcgtaagtatctcaactctccacaaagtttac

SEQ ID NO: 1002568 - DNA, 33 bp, Homo sapien
ttcgtaagtatctcaagtctccacaaagtttac

SEQ ID NO: 1002569 - DNA, 33 bp, Homo sapien
aatgggtaaagaattcacatatctggaagatgg

SEQ ID NO: 1002570 - DNA, 33 bp, Homo sapien
aatgggtaaagaattcgcatatctggaagatgg

SEQ ID NO: 1002571 - DNA, 33 bp, Homo sapien
catgtagtgaatggcaatacaatttcctgagat

SEQ ID NO: 1002572 - DNA, 33 bp, Homo sapien
catgtagtgaatggcagtacaatttcctgagat

SEQ ID NO: 1002573 - DNA, 33 bp, Homo sapien
actaactttgagacttaaagagactaacatttg

SEQ ID NO: 1002574 - DNA, 33 bp, Homo sapien
actaactttgagacttcaagagactaacatttg

SEQ ID NO: 1002575 - DNA, 33 bp, Homo sapien
tcttccagaatcaaataaacaagtgtgggttcc

SEQ ID NO: 1002576 - DNA, 33 bp, Homo sapien
tcttccagaatcaaatcaacaagtgtgggttcc

SEQ ID NO: 1002577 - DNA, 33 bp, Homo sapien
taggggtacagaaaacagtggtaagagatgaag

SEQ ID NO: 1002578 - DNA, 33 bp, Homo sapien
taggggtacagaaaaccgtggtaagagatgaag

SEQ ID NO: 1002579 - DNA, 33 bp, Homo sapien
gttggataattcatacaaacaagtgggcagtta

SEQ ID NO: 1002580 - DNA, 33 bp, Homo sapien
gttggataattcataccaacaagtgggcagtta

SEQ ID NO: 1002581 - DNA, 33 bp, Homo sapien
tgcttgactagtgaaccgtagcttgcttttata

SEQ ID NO: 1002582 - DNA, 33 bp, Homo sapien
tgcttgactagtgaactgtagcttgcttttata

SEQ ID NO: 1002583 - DNA, 33 bp, Homo sapien
aaaaatgcttacaccaccaaatagaattactag

SEQ ID NO: 1002584 - DNA, 33 bp, Homo sapien
aaaaatgcttacaccagcaaatagaattactag

SEQ ID NO: 1002585 - DNA, 33 bp, Homo sapien
ttaataaccaataaaacgaggaatcaataaata

SEQ ID NO: 1002586 - DNA, 33 bp, Homo sapien
ttaataaccaataaaatgaggaatcaataaata

SEQ ID NO: 1002587 - DNA, 33 bp, Homo sapien
aaacccaaaagcaccacctacctgagctgtgag

SEQ ID NO: 1002588 - DNA, 33 bp, Homo sapien
aaacccaaaagcaccatctacctgagctgtgag

SEQ ID NO: 1002589 - DNA, 33 bp, Homo sapien
ttgtggttgtttactgcaactttgaagcattgg

SEQ ID NO: 1002590 - DNA, 33 bp, Homo sapien
ttgtggttgtttactggaactttgaagcattgg

SEQ ID NO: 1002591 - DNA, 33 bp, Homo sapien
aatctagggactgtgaaaagatagctcttaaag

SEQ ID NO: 1002592 - DNA, 33 bp, Homo sapien
aatctagggactgtgacaagatagctcttaaag

SEQ ID NO: 1002593 - DNA, 33 bp, Homo sapien
gaagggctgtgcaaaacgccttacagggagcat

SEQ ID NO: 1002594 - DNA, 33 bp, Homo sapien
gaagggctgtgcaaaatgccttacagggagcat

SEQ ID NO: 1002595 - DNA, 33 bp, Homo sapien
tggctgagtgttttccagaactagatggcatga

SEQ ID NO: 1002596 - DNA, 33 bp, Homo sapien
tggctgagtgttttccggaactagatggcatga

SEQ ID NO: 1002597 - DNA, 33 bp, Homo sapien
ttccagaaaatttcaacaacatgacttccataa

SEQ ID NO: 1002598 - DNA, 33 bp, Homo sapien
ttccagaaaatttcaagaacatgacttccataa

SEQ ID NO: 1002599 - DNA, 33 bp, Homo sapien
ttctgagttataccaactgaagacaaattagtg

SEQ ID NO: 1002600 - DNA, 33 bp, Homo sapien
ttctgagttataccaattgaagacaaattagtg

SEQ ID NO: 1002601 - DNA, 33 bp, Homo sapien
ctacagattgctggagcaaattcaggaccttca

SEQ ID NO: 1002602 - DNA, 33 bp, Homo sapien
ctacagattgctggaggaaattcaggaccttca

SEQ ID NO: 1002603 - DNA, 33 bp, Homo sapien
gaatttagacaggaaaatgaaacacaggcaaat

SEQ ID NO: 1002604 - DNA, 33 bp, Homo sapien
gaatttagacaggaaagtgaaacacaggcaaat

SEQ ID NO: 1002605 - DNA, 33 bp, Homo sapien
ataacaaaacctttgaaatgacattgatacata

SEQ ID NO: 1002606 - DNA, 33 bp, Homo sapien
ataacaaaacctttgacatgacattgatacata

SEQ ID NO: 1002607 - DNA, 33 bp, Homo sapien
gatgctttgatcaagacagaagtcctcaaggac

SEQ ID NO: 1002608 - DNA, 33 bp, Homo sapien
gatgctttgatcaagatagaagtcctcaaggac

SEQ ID NO: 1002609 - DNA, 33 bp, Homo sapien
cagagagaaactggaaaactgacagaatgacat

SEQ ID NO: 1002610 - DNA, 33 bp, Homo sapien
cagagagaaactggaagactgacagaatgacat

SEQ ID NO: 1002611 - DNA, 33 bp, Homo sapien
aaaagaaaatactcataaaatgaagcatgcagc

SEQ ID NO: 1002612 - DNA, 33 bp, Homo sapien
aaaagaaaatactcatgaaatgaagcatgcagc

SEQ ID NO: 1002613 - DNA, 33 bp, Homo sapien
ctgggaagcagttgtacagcacaagaatctgat

SEQ ID NO: 1002614 - DNA, 33 bp, Homo sapien
ctgggaagcagttgtatagcacaagaatctgat

SEQ ID NO: 1002615 - DNA, 33 bp, Homo sapien
ctggaagagaaaaaaagatagtgctacacccaa

SEQ ID NO: 1002616 - DNA, 33 bp, Homo sapien
ctggaagagaaaaaaatatagtgctacacccaa

SEQ ID NO: 1002617 - DNA, 33 bp, Homo sapien
gtttttttccatgagccattgattaaagttggg

SEQ ID NO: 1002618 - DNA, 33 bp, Homo sapien
gtttttttccatgagctattgattaaagttggg

SEQ ID NO: 1002619 - DNA, 33 bp, Homo sapien
ttccactgcatttctacgtaactggactgttgc

SEQ ID NO: 1002620 - DNA, 33 bp, Homo sapien
ttccactgcatttctatgtaactggactgttgc

SEQ ID NO: 1002621 - DNA, 33 bp, Homo sapien
gtatgttcagcccaaactcttcggctcacatac

SEQ ID NO: 1002622 - DNA, 33 bp, Homo sapien
gtatgttcagcccaaattcttcggctcacatac

SEQ ID NO: 1002623 - DNA, 33 bp, Homo sapien
gagattttcacgtgtacacacatttcttttctt

SEQ ID NO: 1002624 - DNA, 33 bp, Homo sapien
gagattttcacgtgtatacacatttcttttctt

SEQ ID NO: 1002625 - DNA, 33 bp, Homo sapien
attctcacaacatccgaatcaggtaagatctag

SEQ ID NO: 1002626 - DNA, 33 bp, Homo sapien
attctcacaacatccgcatcaggtaagatctag

SEQ ID NO: 1002627 - DNA, 33 bp, Homo sapien
ggcagagagaggtggaatatctccccactgtca

SEQ ID NO: 1002628 - DNA, 33 bp, Homo sapien
ggcagagagaggtggagtatctccccactgtca

SEQ ID NO: 1002629 - DNA, 33 bp, Homo sapien
gaatcccaacttcaccactaaccgagagacctt

SEQ ID NO: 1002630 - DNA, 33 bp, Homo sapien
gaatcccaacttcaccgctaaccgagagacctt

SEQ ID NO: 1002631 - DNA, 33 bp, Homo sapien
tacagcaacttatagaagtacctaaggtattaa

SEQ ID NO: 1002632 - DNA, 33 bp, Homo sapien
tacagcaacttatagaggtacctaaggtattaa

SEQ ID NO: 1002633 - DNA, 33 bp, Homo sapien
ccaccactcattagcccctacactgtgagaatt

SEQ ID NO: 1002634 - DNA, 33 bp, Homo sapien
ccaccactcattagcctctacactgtgagaatt

SEQ ID NO: 1002635 - DNA, 33 bp, Homo sapien
tcagacttctatcctacaaaactgtaagataga

SEQ ID NO: 1002636 - DNA, 33 bp, Homo sapien
tcagacttctatcctataaaactgtaagataga

SEQ ID NO: 1002637 - DNA, 33 bp, Homo sapien
caaatgtgattcggcactgaaactaatggatgt

SEQ ID NO: 1002638 - DNA, 33 bp, Homo sapien
caaatgtgattcggcattgaaactaatggatgt

SEQ ID NO: 1002639 - DNA, 33 bp, Homo sapien
gcacttctataaagtccccatccttagaagttg

SEQ ID NO: 1002640 - DNA, 33 bp, Homo sapien
gcacttctataaagtctccatccttagaagttg

SEQ ID NO: 1002641 - DNA, 33 bp, Homo sapien
cagatatctcgtattacctcttgggatgctgtt

SEQ ID NO: 1002642 - DNA, 33 bp, Homo sapien
cagatatctcgtattatctcttgggatgctgtt

SEQ ID NO: 1002643 - DNA, 33 bp, Homo sapien
ctctgtccctagcaaggagtaggagctgctaaa

SEQ ID NO: 1002644 - DNA, 33 bp, Homo sapien
ctctgtccctagcaagtagtaggagctgctaaa

SEQ ID NO: 1002645 - DNA, 33 bp, Homo sapien
tacactccacacagtgaatctggccaggaactg

SEQ ID NO: 1002646 - DNA, 33 bp, Homo sapien
tacactccacacagtggatctggccaggaactg

SEQ ID NO: 1002647 - DNA, 33 bp, Homo sapien
aagtgcctgcgaaggacaaaggtaggtttgggg

SEQ ID NO: 1002648 - DNA, 33 bp, Homo sapien
aagtgcctgcgaaggagaaaggtaggtttgggg

SEQ ID NO: 1002649 - DNA, 33 bp, Homo sapien
tgcaaagggttagtcactctcgggtcttggggc

SEQ ID NO: 1002650 - DNA, 33 bp, Homo sapien
tgcaaagggttagtcagtctcgggtcttggggc

SEQ ID NO: 1002651 - DNA, 33 bp, Homo sapien
ccctgcgtaaaacagggatggacataatctctc

SEQ ID NO: 1002652 - DNA, 33 bp, Homo sapien
ccctgcgtaaaacaggtatggacataatctctc

SEQ ID NO: 1002653 - DNA, 33 bp, Homo sapien
ggagcttatgagaaaccattagggaactgcact

SEQ ID NO: 1002654 - DNA, 33 bp, Homo sapien
ggagcttatgagaaactattagggaactgcact

SEQ ID NO: 1002655 - DNA, 33 bp, Homo sapien
ttggttcaaggaaatgaagggccacagaggtag

SEQ ID NO: 1002656 - DNA, 33 bp, Homo sapien
ttggttcaaggaaatggagggccacagaggtag

SEQ ID NO: 1002657 - DNA, 33 bp, Homo sapien
tctgaagcccattcccacgataatgttctgagt

SEQ ID NO: 1002658 - DNA, 33 bp, Homo sapien
tctgaagcccattcccgcgataatgttctgagt

SEQ ID NO: 1002659 - DNA, 33 bp, Homo sapien
tagttttaagggtaagcctgtaacacataaagc

SEQ ID NO: 1002660 - DNA, 33 bp, Homo sapien
tagttttaagggtaagtctgtaacacataaagc

SEQ ID NO: 1002661 - DNA, 33 bp, Homo sapien
ttgtgaaggtacttggcacattgcttggtacct

SEQ ID NO: 1002662 - DNA, 33 bp, Homo sapien
ttgtgaaggtacttgggacattgcttggtacct

SEQ ID NO: 1002663 - DNA, 33 bp, Homo sapien
cagttgggattgctgacgatgggactagtgagg

SEQ ID NO: 1002664 - DNA, 33 bp, Homo sapien
cagttgggattgctgaggatgggactagtgagg

SEQ ID NO: 1002665 - DNA, 33 bp, Homo sapien
gttaagtcaattgctgaagttgttccagtatgt

SEQ ID NO: 1002666 - DNA, 33 bp, Homo sapien
gttaagtcaattgctgcagttgttccagtatgt

SEQ ID NO: 1002667 - DNA, 33 bp, Homo sapien
ctaattcaaagtggaactggtgtctaagaactt

SEQ ID NO: 1002668 - DNA, 33 bp, Homo sapien
ctaattcaaagtggaattggtgtctaagaactt

SEQ ID NO: 1002669 - DNA, 33 bp, Homo sapien
tggctttgaagatcaccgactatcagaatccca

SEQ ID NO: 1002670 - DNA, 33 bp, Homo sapien
tggctttgaagatcactgactatcagaatccca

SEQ ID NO: 1002671 - DNA, 33 bp, Homo sapien
atcctttcattcaattaaagtatgaagttcacc

SEQ ID NO: 1002672 - DNA, 33 bp, Homo sapien
atcctttcattcaattgaagtatgaagttcacc

SEQ ID NO: 1002673 - DNA, 33 bp, Homo sapien
gtgaaacctcagaaggcaaaagatatcataacg

SEQ ID NO: 1002674 - DNA, 33 bp, Homo sapien
gtgaaacctcagaaggtaaaagatatcataacg

SEQ ID NO: 1002675 - DNA, 33 bp, Homo sapien
gtacccactggcatatcaggacggaaccaacta

SEQ ID NO: 1002676 - DNA, 33 bp, Homo sapien
gtacccactggcatattaggacggaaccaacta

SEQ ID NO: 1002677 - DNA, 33 bp, Homo sapien
tattaaatattcaaaaatacatgtctataagat

SEQ ID NO: 1002678 - DNA, 33 bp, Homo sapien
tattaaatattcaaaagtacatgtctataagat

SEQ ID NO: 1002679 - DNA, 33 bp, Homo sapien
gcagaatgagaaaggcacatattatttcttggt

SEQ ID NO: 1002680 - DNA, 33 bp, Homo sapien
gcagaatgagaaaggcgcatattatttcttggt

SEQ ID NO: 1002681 - DNA, 33 bp, Homo sapien
ttccaaatgttatggaaaatgaatgagattgta

SEQ ID NO: 1002682 - DNA, 33 bp, Homo sapien
ttccaaatgttatggagaatgaatgagattgta

SEQ ID NO: 1002683 - DNA, 33 bp, Homo sapien
atccagttaccattcaatacctccctcttaatt

SEQ ID NO: 1002684 - DNA, 33 bp, Homo sapien
atccagttaccattcagtacctccctcttaatt

SEQ ID NO: 1002685 - DNA, 33 bp, Homo sapien
atctgccctataaatgacatgactgattggcag

SEQ ID NO: 1002686 - DNA, 33 bp, Homo sapien
atctgccctataaatgccatgactgattggcag

SEQ ID NO: 1002687 - DNA, 33 bp, Homo sapien
acagcagaatttgttacagaacctttcatgagg

SEQ ID NO: 1002688 - DNA, 33 bp, Homo sapien
acagcagaatttgttatagaacctttcatgagg

SEQ ID NO: 1002689 - DNA, 33 bp, Homo sapien
tagccccattgtatagcatgagtatctgtcctg

SEQ ID NO: 1002690 - DNA, 33 bp, Homo sapien
tagccccattgtataggatgagtatctgtcctg

SEQ ID NO: 1002691 - DNA, 33 bp, Homo sapien
aaagctgctgcatttacgaggtaatttgggaga

SEQ ID NO: 1002692 - DNA, 33 bp, Homo sapien
aaagctgctgcatttatgaggtaatttgggaga

SEQ ID NO: 1002693 - DNA, 33 bp, Homo sapien
agaaccttggaagccaggtaacgagtttgctcc

SEQ ID NO: 1002694 - DNA, 33 bp, Homo sapien
agaaccttggaagccatgtaacgagtttgctcc

SEQ ID NO: 1002695 - DNA, 33 bp, Homo sapien
agagtaagggaaaagaacaagtctccagaaaat

SEQ ID NO: 1002696 - DNA, 33 bp, Homo sapien
agagtaagggaaaagatcaagtctccagaaaat

SEQ ID NO: 1002697 - DNA, 33 bp, Homo sapien
ttcttggtcattaacaaccctttctttcagact

SEQ ID NO: 1002698 - DNA, 33 bp, Homo sapien
ttcttggtcattaacatccctttctttcagact

SEQ ID NO: 1002699 - DNA, 33 bp, Homo sapien
aagaaggaagagaacaatgcaaaacaacgagaa

SEQ ID NO: 1002700 - DNA, 33 bp, Homo sapien
aagaaggaagagaacactgcaaaacaacgagaa

SEQ ID NO: 1002701 - DNA, 33 bp, Homo sapien
ttgtgactactcattaagttcatttgttccata

SEQ ID NO: 1002702 - DNA, 33 bp, Homo sapien
ttgtgactactcattaggttcatttgttccata

SEQ ID NO: 1002703 - DNA, 33 bp, Homo sapien
tgcagagcacaggatcaaatgactgcactaact

SEQ ID NO: 1002704 - DNA, 33 bp, Homo sapien
tgcagagcacaggatctaatgactgcactaact

SEQ ID NO: 1002705 - DNA, 33 bp, Homo sapien
ctgaagagccagtagtgaagtttgtgatttatc

SEQ ID NO: 1002706 - DNA, 33 bp, Homo sapien
ctgaagagccagtagttaagtttgtgatttatc

SEQ ID NO: 1002707 - DNA, 33 bp, Homo sapien
actttgaagataaatcaatcatattttgtatac

SEQ ID NO: 1002708 - DNA, 33 bp, Homo sapien
actttgaagataaatcgatcatattttgtatac

SEQ ID NO: 1002709 - DNA, 33 bp, Homo sapien
atgactggaggtgttaccgggttttagtggaca

SEQ ID NO: 1002710 - DNA, 33 bp, Homo sapien
atgactggaggtgttagcgggttttagtggaca

SEQ ID NO: 1002711 - DNA, 33 bp, Homo sapien
atctcccccattaagaaatagagccttcatttt

SEQ ID NO: 1002712 - DNA, 33 bp, Homo sapien
atctcccccattaagacatagagccttcatttt

SEQ ID NO: 1002713 - DNA, 33 bp, Homo sapien
ttttaaaattttggaaggctttctaagaccaga

SEQ ID NO: 1002714 - DNA, 33 bp, Homo sapien
ttttaaaattttggaatgctttctaagaccaga

SEQ ID NO: 1002715 - DNA, 33 bp, Homo sapien
gaatgtgctccacaaaataactttcatgaaggg

SEQ ID NO: 1002716 - DNA, 33 bp, Homo sapien
gaatgtgctccacaaactaactttcatgaaggg

SEQ ID NO: 1002717 - DNA, 33 bp, Homo sapien
tcactcccaagttctgcaatactcagggtggta

SEQ ID NO: 1002718 - DNA, 33 bp, Homo sapien
tcactcccaagttctggaatactcagggtggta

SEQ ID NO: 1002719 - DNA, 33 bp, Homo sapien
ttagttaacatcattacctcaactatctttcag

SEQ ID NO: 1002720 - DNA, 33 bp, Homo sapien
ttagttaacatcattagctcaactatctttcag

SEQ ID NO: 1002721 - DNA, 33 bp, Homo sapien
tagctcacaaatggatcaatcctagcactttag

SEQ ID NO: 1002722 - DNA, 33 bp, Homo sapien
tagctcacaaatggatgaatcctagcactttag

SEQ ID NO: 1002723 - DNA, 33 bp, Homo sapien
tacttcctggtagaaacaagatttgaaatgtct

SEQ ID NO: 1002724 - DNA, 33 bp, Homo sapien
tacttcctggtagaaataagatttgaaatgtct

SEQ ID NO: 1002725 - DNA, 33 bp, Homo sapien
taaccggtaccagtcaaggaaagctgggctcta

SEQ ID NO: 1002726 - DNA, 33 bp, Homo sapien
taaccggtaccagtcatggaaagctgggctcta

SEQ ID NO: 1002727 - DNA, 33 bp, Homo sapien
cacttctcaaagctgaaccaactagcaaagtgg

SEQ ID NO: 1002728 - DNA, 33 bp, Homo sapien
cacttctcaaagctgagccaactagcaaagtgg

SEQ ID NO: 1002729 - DNA, 33 bp, Homo sapien
tccgccaagccatgcacggtatataatctcctg

SEQ ID NO: 1002730 - DNA, 33 bp, Homo sapien
tccgccaagccatgcatggtatataatctcctg

SEQ ID NO: 1002731 - DNA, 33 bp, Homo sapien
ttctgtgaaaatggaactctcaaccccatttta

SEQ ID NO: 1002732 - DNA, 33 bp, Homo sapien
ttctgtgaaaatggaagtctcaaccccatttta

SEQ ID NO: 1002733 - DNA, 33 bp, Homo sapien
aatttatggactcacccatgtgaaagaatagta

SEQ ID NO: 1002734 - DNA, 33 bp, Homo sapien
aatttatggactcaccgatgtgaaagaatagta

SEQ ID NO: 1002735 - DNA, 33 bp, Homo sapien
aaatcctacaatgttaagtttggaaagaatgtt

SEQ ID NO: 1002736 - DNA, 33 bp, Homo sapien
aaatcctacaatgttaggtttggaaagaatgtt

SEQ ID NO: 1002737 - DNA, 33 bp, Homo sapien
gcattgttctaggcaccggggacacagtagtga

SEQ ID NO: 1002738 - DNA, 33 bp, Homo sapien
gcattgttctaggcactggggacacagtagtga

SEQ ID NO: 1002739 - DNA, 33 bp, Homo sapien
aaatcattggcaaagaaggacagaaaagaagca

SEQ ID NO: 1002740 - DNA, 33 bp, Homo sapien
aaatcattggcaaagagggacagaaaagaagca

SEQ ID NO: 1002741 - DNA, 33 bp, Homo sapien
agaactagaaagaaagaacaaggacaaatcccc

SEQ ID NO: 1002742 - DNA, 33 bp, Homo sapien
agaactagaaagaaaggacaaggacaaatcccc

SEQ ID NO: 1002743 - DNA, 33 bp, Homo sapien
ctcatttggcgttaaaactcttcaaggtctctt

SEQ ID NO: 1002744 - DNA, 33 bp, Homo sapien
ctcatttggcgttaaagctcttcaaggtctctt

SEQ ID NO: 1002745 - DNA, 33 bp, Homo sapien
cattctgcaataagacaagcccagaaattagga

SEQ ID NO: 1002746 - DNA, 33 bp, Homo sapien
cattctgcaataagacgagcccagaaattagga

SEQ ID NO: 1002747 - DNA, 33 bp, Homo sapien
cactttggaaatgcaaaaagtagaaggcaaaga

SEQ ID NO: 1002748 - DNA, 33 bp, Homo sapien
cactttggaaatgcaagaagtagaaggcaaaga

SEQ ID NO: 1002749 - DNA, 33 bp, Homo sapien
agggagacgtgcaggaggaagtccgcgcccagg

SEQ ID NO: 1002750 - DNA, 33 bp, Homo sapien
agggagacgtgcaggatgaagtccgcgcccagg

SEQ ID NO: 1002751 - DNA, 33 bp, Homo sapien
aaccctaagggaaggaagtttgtgttgctcttc

SEQ ID NO: 1002752 - DNA, 33 bp, Homo sapien
aaccctaagggaaggacgtttgtgttgctcttc

SEQ ID NO: 1002753 - DNA, 33 bp, Homo sapien
ccacatctagtgtttacccacgcagttgttcaa

SEQ ID NO: 1002754 - DNA, 33 bp, Homo sapien
ccacatctagtgtttatccacgcagttgttcaa

SEQ ID NO: 1002755 - DNA, 33 bp, Homo sapien
ctgttagagagccacactggtacaggagctttc

SEQ ID NO: 1002756 - DNA, 33 bp, Homo sapien
ctgttagagagccacattggtacaggagctttc

SEQ ID NO: 1002757 - DNA, 33 bp, Homo sapien
attgtgttcagttgttcaaatgttcaggcccgt

SEQ ID NO: 1002758 - DNA, 33 bp, Homo sapien
attgtgttcagttgtttaaatgttcaggcccgt

SEQ ID NO: 1002759 - DNA, 33 bp, Homo sapien
tgcagtctttgatgtcaactgaaaattgttgaa

SEQ ID NO: 1002760 - DNA, 33 bp, Homo sapien
tgcagtctttgatgtcgactgaaaattgttgaa

SEQ ID NO: 1002761 - DNA, 33 bp, Homo sapien
accaggattattttgacaacagtgtgatctgaa

SEQ ID NO: 1002762 - DNA, 33 bp, Homo sapien
accaggattattttgagaacagtgtgatctgaa

SEQ ID NO: 1002763 - DNA, 33 bp, Homo sapien
attgagtcacattggaaataatttcagaagata

SEQ ID NO: 1002764 - DNA, 33 bp, Homo sapien
attgagtcacattggacataatttcagaagata

SEQ ID NO: 1002765 - DNA, 33 bp, Homo sapien
ggactggaaactgcaaaataggtgtgagaaaaa

SEQ ID NO: 1002766 - DNA, 33 bp, Homo sapien
ggactggaaactgcaagataggtgtgagaaaaa

SEQ ID NO: 1002767 - DNA, 33 bp, Homo sapien
gtctcacaaggcttcaataaggtgtcaattagg

SEQ ID NO: 1002768 - DNA, 33 bp, Homo sapien
gtctcacaaggcttcagtaaggtgtcaattagg

SEQ ID NO: 1002769 - DNA, 33 bp, Homo sapien
ggcttcaaaacggtaacaaaatggtctcaaaac

SEQ ID NO: 1002770 - DNA, 33 bp, Homo sapien
ggcttcaaaacggtaagaaaatggtctcaaaac

SEQ ID NO: 1002771 - DNA, 33 bp, Homo sapien
gacagtgctaattgatcagagtctccccaaggg

SEQ ID NO: 1002772 - DNA, 33 bp, Homo sapien
gacagtgctaattgatgagagtctccccaaggg

SEQ ID NO: 1002773 - DNA, 33 bp, Homo sapien
gatgaagtgtgttgataagggtatcagtgtcac

SEQ ID NO: 1002774 - DNA, 33 bp, Homo sapien
gatgaagtgtgttgattagggtatcagtgtcac

SEQ ID NO: 1002775 - DNA, 33 bp, Homo sapien
ctgttgaatagcaagacaaacccatgtgcccca

SEQ ID NO: 1002776 - DNA, 33 bp, Homo sapien
ctgttgaatagcaagagaaacccatgtgcccca

SEQ ID NO: 1002777 - DNA, 33 bp, Homo sapien
gttagagactcttgaagggataagaacaccaag

SEQ ID NO: 1002778 - DNA, 33 bp, Homo sapien
gttagagactcttgaatggataagaacaccaag

SEQ ID NO: 1002779 - DNA, 33 bp, Homo sapien
ataaacatttcccaaactgtagctaagacaaag

SEQ ID NO: 1002780 - DNA, 33 bp, Homo sapien
ataaacatttcccaaattgtagctaagacaaag

SEQ ID NO: 1002781 - DNA, 33 bp, Homo sapien
gtcattttacttccaaatatcatgacatccaac

SEQ ID NO: 1002782 - DNA, 33 bp, Homo sapien
gtcattttacttccaagtatcatgacatccaac

SEQ ID NO: 1002783 - DNA, 33 bp, Homo sapien
gcagctctttctgtcacgtggaaagcttcaagt

SEQ ID NO: 1002784 - DNA, 33 bp, Homo sapien
gcagctctttctgtcatgtggaaagcttcaagt

SEQ ID NO: 1002785 - DNA, 33 bp, Homo sapien
ataatatacttagcaaacttacatatttgtatt

SEQ ID NO: 1002786 - DNA, 33 bp, Homo sapien
ataatatacttagcaagcttacatatttgtatt

SEQ ID NO: 1002787 - DNA, 33 bp, Homo sapien
aaggaaacacactaacaagaatggataatgaca

SEQ ID NO: 1002788 - DNA, 33 bp, Homo sapien
aaggaaacacactaaccagaatggataatgaca

SEQ ID NO: 1002789 - DNA, 33 bp, Homo sapien
taattttaatggctcaataatctgtcatgtggc

SEQ ID NO: 1002790 - DNA, 33 bp, Homo sapien
taattttaatggctcagtaatctgtcatgtggc

SEQ ID NO: 1002791 - DNA, 33 bp, Homo sapien
tttctcctttttcagacagttgtaatgaatata

SEQ ID NO: 1002792 - DNA, 33 bp, Homo sapien
tttctcctttttcagatagttgtaatgaatata

SEQ ID NO: 1002793 - DNA, 33 bp, Homo sapien
gctctttatttcacaacctgaggattaaatcgc

SEQ ID NO: 1002794 - DNA, 33 bp, Homo sapien
gctctttatttcacaatctgaggattaaatcgc

SEQ ID NO: 1002795 - DNA, 33 bp, Homo sapien
ttagctcttgttactacgtgaaatgcactaaaa

SEQ ID NO: 1002796 - DNA, 33 bp, Homo sapien
ttagctcttgttactatgtgaaatgcactaaaa

SEQ ID NO: 1002797 - DNA, 33 bp, Homo sapien
gagaaaattctaataaaggaggagctgctctta

SEQ ID NO: 1002798 - DNA, 33 bp, Homo sapien
gagaaaattctaataagggaggagctgctctta

SEQ ID NO: 1002799 - DNA, 33 bp, Homo sapien
tggttttgttttatggcacagttcaagccctcc

SEQ ID NO: 1002800 - DNA, 33 bp, Homo sapien
tggttttgttttatggtacagttcaagccctcc

SEQ ID NO: 1002801 - DNA, 33 bp, Homo sapien
aagtacagaatacttaccagtgtgaacactttt

SEQ ID NO: 1002802 - DNA, 33 bp, Homo sapien
aagtacagaatacttatcagtgtgaacactttt

SEQ ID NO: 1002803 - DNA, 33 bp, Homo sapien
tatgtttgtcaactgacgaagctagagaagttg

SEQ ID NO: 1002804 - DNA, 33 bp, Homo sapien
tatgtttgtcaactgatgaagctagagaagttg

SEQ ID NO: 1002805 - DNA, 33 bp, Homo sapien
aggatgcatctgtctcacttacctcatatttaa

SEQ ID NO: 1002806 - DNA, 33 bp, Homo sapien
aggatgcatctgtctcgcttacctcatatttaa

SEQ ID NO: 1002807 - DNA, 33 bp, Homo sapien
aagggttcagtaaaaacggcaaggcaggtcact

SEQ ID NO: 1002808 - DNA, 33 bp, Homo sapien
aagggttcagtaaaaatggcaaggcaggtcact

SEQ ID NO: 1002809 - DNA, 33 bp, Homo sapien
agaactgagcagcaacagaaggaaaaaagggca

SEQ ID NO: 1002810 - DNA, 33 bp, Homo sapien
agaactgagcagcaacggaaggaaaaaagggca

SEQ ID NO: 1002811 - DNA, 33 bp, Homo sapien
aggtgagagttgataacgttgagcctggaggct

SEQ ID NO: 1002812 - DNA, 33 bp, Homo sapien
aggtgagagttgataatgttgagcctggaggct

SEQ ID NO: 1002813 - DNA, 33 bp, Homo sapien
attttctttacttttcgcgacaagattacctaa

SEQ ID NO: 1002814 - DNA, 33 bp, Homo sapien
attttctttacttttctcgacaagattacctaa

SEQ ID NO: 1002815 - DNA, 33 bp, Homo sapien
tcaacatggatgggaccgcgctctatgaagcag

SEQ ID NO: 1002816 - DNA, 33 bp, Homo sapien
tcaacatggatgggactgcgctctatgaagcag

SEQ ID NO: 1002817 - DNA, 33 bp, Homo sapien
ctaatcccagcctatcactctaacatagtgctg

SEQ ID NO: 1002818 - DNA, 33 bp, Homo sapien
ctaatcccagcctatctctctaacatagtgctg

SEQ ID NO: 1002819 - DNA, 33 bp, Homo sapien
ggaggccacacctacaatgctttctggagacaa

SEQ ID NO: 1002820 - DNA, 33 bp, Homo sapien
ggaggccacacctacagtgctttctggagacaa

SEQ ID NO: 1002821 - DNA, 33 bp, Homo sapien
ctctaaggcaaatcaacgtccagtttcttttaa

SEQ ID NO: 1002822 - DNA, 33 bp, Homo sapien
ctctaaggcaaatcaaggtccagtttcttttaa

SEQ ID NO: 1002823 - DNA, 33 bp, Homo sapien
ttctctgtggtcacctcactgacccaaagttag

SEQ ID NO: 1002824 - DNA, 33 bp, Homo sapien
ttctctgtggtcacctgactgacccaaagttag

SEQ ID NO: 1002825 - DNA, 33 bp, Homo sapien
cctctcctgagacttacagcgtaaccttaatgt

SEQ ID NO: 1002826 - DNA, 33 bp, Homo sapien
cctctcctgagacttatagcgtaaccttaatgt

SEQ ID NO: 1002827 - DNA, 33 bp, Homo sapien
agagttgttgattaaaatgtttgctgtttgggg

SEQ ID NO: 1002828 - DNA, 33 bp, Homo sapien
agagttgttgattaaagtgtttgctgtttgggg

SEQ ID NO: 1002829 - DNA, 33 bp, Homo sapien
aaattttgcaggggaaattaatgaaagcttaag

SEQ ID NO: 1002830 - DNA, 33 bp, Homo sapien
aaattttgcaggggaagttaatgaaagcttaag

SEQ ID NO: 1002831 - DNA, 33 bp, Homo sapien
ctgcttacttacataacacagtaccttaaaaat

SEQ ID NO: 1002832 - DNA, 33 bp, Homo sapien
ctgcttacttacataagacagtaccttaaaaat

SEQ ID NO: 1002833 - DNA, 33 bp, Homo sapien
ccaggctaacgtacaactgcatgatcatagctc

SEQ ID NO: 1002834 - DNA, 33 bp, Homo sapien
ccaggctaacgtacaattgcatgatcatagctc

SEQ ID NO: 1002835 - DNA, 33 bp, Homo sapien
atgcaggctctattacaatgggactcacacatc

SEQ ID NO: 1002836 - DNA, 33 bp, Homo sapien
atgcaggctctattacgatgggactcacacatc

SEQ ID NO: 1002837 - DNA, 33 bp, Homo sapien
aacttagattttcttccagacctcctcaaatga

SEQ ID NO: 1002838 - DNA, 33 bp, Homo sapien
aacttagattttcttctagacctcctcaaatga

SEQ ID NO: 1002839 - DNA, 33 bp, Homo sapien
ttttctggctcttcaacatatggccactaagca

SEQ ID NO: 1002840 - DNA, 33 bp, Homo sapien
ttttctggctcttcaatatatggccactaagca

SEQ ID NO: 1002841 - DNA, 33 bp, Homo sapien
attttacccatctctcaatgtctgatctcactc

SEQ ID NO: 1002842 - DNA, 33 bp, Homo sapien
attttacccatctctcgatgtctgatctcactc

SEQ ID NO: 1002843 - DNA, 33 bp, Homo sapien
cccagctgaagccctcaagagaaaagaagccaa

SEQ ID NO: 1002844 - DNA, 33 bp, Homo sapien
cccagctgaagccctcgagagaaaagaagccaa

SEQ ID NO: 1002845 - DNA, 33 bp, Homo sapien
caaacaaaaaaagagacgaagctgaatatttcc

SEQ ID NO: 1002846 - DNA, 33 bp, Homo sapien
caaacaaaaaaagagatgaagctgaatatttcc

SEQ ID NO: 1002847 - DNA, 33 bp, Homo sapien
tgacagaggctcgcaaattgatattactgaagg

SEQ ID NO: 1002848 - DNA, 33 bp, Homo sapien
tgacagaggctcgcaagttgatattactgaagg

SEQ ID NO: 1002849 - DNA, 33 bp, Homo sapien
tctattaggagagaaactcttgggacctgaacg

SEQ ID NO: 1002850 - DNA, 33 bp, Homo sapien
tctattaggagagaaattcttgggacctgaacg

SEQ ID NO: 1002851 - DNA, 33 bp, Homo sapien
ctcctcttgaataacacgtgctaggatcaatat

SEQ ID NO: 1002852 - DNA, 33 bp, Homo sapien
ctcctcttgaataacatgtgctaggatcaatat

SEQ ID NO: 1002853 - DNA, 33 bp, Homo sapien
ttttttaaagccttccaaagtcataacagagaa

SEQ ID NO: 1002854 - DNA, 33 bp, Homo sapien
ttttttaaagccttccgaagtcataacagagaa

SEQ ID NO: 1002855 - DNA, 33 bp, Homo sapien
gctaccatctgaatcacctttgaccacacagca

SEQ ID NO: 1002856 - DNA, 33 bp, Homo sapien
gctaccatctgaatcatctttgaccacacagca

SEQ ID NO: 1002857 - DNA, 33 bp, Homo sapien
caagctcactgtggaacaggatcacgctgcccc

SEQ ID NO: 1002858 - DNA, 33 bp, Homo sapien
caagctcactgtggaataggatcacgctgcccc

SEQ ID NO: 1002859 - DNA, 33 bp, Homo sapien
attttacatggattttaaaaaagttactcaata

SEQ ID NO: 1002860 - DNA, 33 bp, Homo sapien
attttacatggatttttaaaaagttactcaata

SEQ ID NO: 1002861 - DNA, 33 bp, Homo sapien
actatggaaaaatacacagctattgaaaatgac

SEQ ID NO: 1002862 - DNA, 33 bp, Homo sapien
actatggaaaaatacagagctattgaaaatgac

SEQ ID NO: 1002863 - DNA, 33 bp, Homo sapien
tcagttggttttcgtacgttcataagattggac

SEQ ID NO: 1002864 - DNA, 33 bp, Homo sapien
tcagttggttttcgtatgttcataagattggac

SEQ ID NO: 1002865 - DNA, 33 bp, Homo sapien
attcaaattttacgtacgctgtcttgaaataaa

SEQ ID NO: 1002866 - DNA, 33 bp, Homo sapien
attcaaattttacgtaggctgtcttgaaataaa

SEQ ID NO: 1002867 - DNA, 33 bp, Homo sapien
ctaaaaccaacaggaagaaaggaatatgaaccc

SEQ ID NO: 1002868 - DNA, 33 bp, Homo sapien
ctaaaaccaacaggaataaaggaatatgaaccc

SEQ ID NO: 1002869 - DNA, 33 bp, Homo sapien
gcccaaagatacaaaactgtagaagcacacaac

SEQ ID NO: 1002870 - DNA, 33 bp, Homo sapien
gcccaaagatacaaaattgtagaagcacacaac

SEQ ID NO: 1002871 - DNA, 33 bp, Homo sapien
ggcttcaaaaaaattacgatcagtaccgctagt

SEQ ID NO: 1002872 - DNA, 33 bp, Homo sapien
ggcttcaaaaaaattaggatcagtaccgctagt

SEQ ID NO: 1002873 - DNA, 33 bp, Homo sapien
cttctcaaatcaccaaggattggaaaaatacag

SEQ ID NO: 1002874 - DNA, 33 bp, Homo sapien
cttctcaaatcaccaatgattggaaaaatacag

SEQ ID NO: 1002875 - DNA, 33 bp, Homo sapien
acaatattttggtatacagtatatcctgtgttc

SEQ ID NO: 1002876 - DNA, 33 bp, Homo sapien
acaatattttggtatatagtatatcctgtgttc

SEQ ID NO: 1002877 - DNA, 33 bp, Homo sapien
catgctcctgatccaaagactcagaattatgca

SEQ ID NO: 1002878 - DNA, 33 bp, Homo sapien
catgctcctgatccaaggactcagaattatgca

SEQ ID NO: 1002879 - DNA, 33 bp, Homo sapien
ggactcttggttgacacgggcctggtgtgtgtg

SEQ ID NO: 1002880 - DNA, 33 bp, Homo sapien
ggactcttggttgacatgggcctggtgtgtgtg

SEQ ID NO: 1002881 - DNA, 33 bp, Homo sapien
ataatagtccatgatacattgtaccatttacca

SEQ ID NO: 1002882 - DNA, 33 bp, Homo sapien
ataatagtccatgatatattgtaccatttacca

SEQ ID NO: 1002883 - DNA, 33 bp, Homo sapien
ggtagatagagttgaaaatattacctctccaga

SEQ ID NO: 1002884 - DNA, 33 bp, Homo sapien
ggtagatagagttgaagatattacctctccaga

SEQ ID NO: 1002885 - DNA, 33 bp, Homo sapien
ctgaagaaatgcttacactatgaattcacagga

SEQ ID NO: 1002886 - DNA, 33 bp, Homo sapien
ctgaagaaatgcttacgctatgaattcacagga

SEQ ID NO: 1002887 - DNA, 33 bp, Homo sapien
ggaattggtctcccaccatgaggagattagccc

SEQ ID NO: 1002888 - DNA, 33 bp, Homo sapien
ggaattggtctcccactatgaggagattagccc

SEQ ID NO: 1002889 - DNA, 33 bp, Homo sapien
tgaaataagccaaataccattcattatccttag

SEQ ID NO: 1002890 - DNA, 33 bp, Homo sapien
tgaaataagccaaatagcattcattatccttag

SEQ ID NO: 1002891 - DNA, 33 bp, Homo sapien
agcaggaaatcaacaaatgtttttgaatgagta

SEQ ID NO: 1002892 - DNA, 33 bp, Homo sapien
agcaggaaatcaacaactgtttttgaatgagta

SEQ ID NO: 1002893 - DNA, 33 bp, Homo sapien
tgagaatataccctcaagagttttggtcagagg

SEQ ID NO: 1002894 - DNA, 33 bp, Homo sapien
tgagaatataccctcaggagttttggtcagagg

SEQ ID NO: 1002895 - DNA, 33 bp, Homo sapien
cctcatatctgaatgaccttattcaaacttact

SEQ ID NO: 1002896 - DNA, 33 bp, Homo sapien
cctcatatctgaatgagcttattcaaacttact

SEQ ID NO: 1002897 - DNA, 33 bp, Homo sapien
aataataaacacttgactcaacaaagtggttac

SEQ ID NO: 1002898 - DNA, 33 bp, Homo sapien
aataataaacacttgagtcaacaaagtggttac

SEQ ID NO: 1002899 - DNA, 33 bp, Homo sapien
aacaacatgtaaacacagtcattggagtgatat

SEQ ID NO: 1002900 - DNA, 33 bp, Homo sapien
aacaacatgtaaacacggtcattggagtgatat

SEQ ID NO: 1002901 - DNA, 33 bp, Homo sapien
tacatgttgttatagacggaagtatgtctcccc

SEQ ID NO: 1002902 - DNA, 33 bp, Homo sapien
tacatgttgttatagatggaagtatgtctcccc

SEQ ID NO: 1002903 - DNA, 33 bp, Homo sapien
agcctgagctgactaacacacatgtccatctgc

SEQ ID NO: 1002904 - DNA, 33 bp, Homo sapien
agcctgagctgactaatacacatgtccatctgc

SEQ ID NO: 1002905 - DNA, 33 bp, Homo sapien
agctctagggaactaacacagcttgtttccaag

SEQ ID NO: 1002906 - DNA, 33 bp, Homo sapien
agctctagggaactaatacagcttgtttccaag

SEQ ID NO: 1002907 - DNA, 33 bp, Homo sapien
gccaaaactatccagcggagcccttcctaagtt

SEQ ID NO: 1002908 - DNA, 33 bp, Homo sapien
gccaaaactatccagctgagcccttcctaagtt

SEQ ID NO: 1002909 - DNA, 33 bp, Homo sapien
tgtacttagatttctacgagctaatcagagagc

SEQ ID NO: 1002910 - DNA, 33 bp, Homo sapien
tgtacttagatttctatgagctaatcagagagc

SEQ ID NO: 1002911 - DNA, 33 bp, Homo sapien
tctatcccagatcccaagtataatgtgttaaca

SEQ ID NO: 1002912 - DNA, 33 bp, Homo sapien
tctatcccagatcccacgtataatgtgttaaca

SEQ ID NO: 1002913 - DNA, 33 bp, Homo sapien
atacgtccacattgtgcaatggcaaaatcaatc

SEQ ID NO: 1002914 - DNA, 33 bp, Homo sapien
atacgtccacattgtggaatggcaaaatcaatc

SEQ ID NO: 1002915 - DNA, 33 bp, Homo sapien
tctcatcctagtgaaagatacccggttttgtac

SEQ ID NO: 1002916 - DNA, 33 bp, Homo sapien
tctcatcctagtgaaatatacccggttttgtac

SEQ ID NO: 1002917 - DNA, 33 bp, Homo sapien
ggagctgtgtgttggacagagtattgggcttgg

SEQ ID NO: 1002918 - DNA, 33 bp, Homo sapien
ggagctgtgtgttggatagagtattgggcttgg

SEQ ID NO: 1002919 - DNA, 33 bp, Homo sapien
aaaaaaaaagttctacacacatctaagtttttc

SEQ ID NO: 1002920 - DNA, 33 bp, Homo sapien
aaaaaaaaagttctactcacatctaagtttttc

SEQ ID NO: 1002921 - DNA, 33 bp, Homo sapien
cttttttatgactggaagtgtgttccttatagg

SEQ ID NO: 1002922 - DNA, 33 bp, Homo sapien
cttttttatgactggaggtgtgttccttatagg

SEQ ID NO: 1002923 - DNA, 33 bp, Homo sapien
ttattagagctagagagatagaccctgatatgg

SEQ ID NO: 1002924 - DNA, 33 bp, Homo sapien
ttattagagctagagatatagaccctgatatgg

SEQ ID NO: 1002925 - DNA, 33 bp, Homo sapien
aagcctgcagtttagcgattgtcaccgacccct

SEQ ID NO: 1002926 - DNA, 33 bp, Homo sapien
aagcctgcagtttagctattgtcaccgacccct

SEQ ID NO: 1002927 - DNA, 33 bp, Homo sapien
agaaagggacagatgaagggcaacataggcttc

SEQ ID NO: 1002928 - DNA, 33 bp, Homo sapien
agaaagggacagatgacgggcaacataggcttc

SEQ ID NO: 1002929 - DNA, 33 bp, Homo sapien
tcccccatgggaccaagtaactcctctcaattt

SEQ ID NO: 1002930 - DNA, 33 bp, Homo sapien
tcccccatgggaccaattaactcctctcaattt

SEQ ID NO: 1002931 - DNA, 33 bp, Homo sapien
acagattagagactgacaagggttaaggaagaa

SEQ ID NO: 1002932 - DNA, 33 bp, Homo sapien
acagattagagactgagaagggttaaggaagaa

SEQ ID NO: 1002933 - DNA, 33 bp, Homo sapien
gactagcatatataaactagtctcaaaagcaac

SEQ ID NO: 1002934 - DNA, 33 bp, Homo sapien
gactagcatatataaagtagtctcaaaagcaac

SEQ ID NO: 1002935 - DNA, 33 bp, Homo sapien
tttctcccactgtgcaccttgtcttcttattat

SEQ ID NO: 1002936 - DNA, 33 bp, Homo sapien
tttctcccactgtgcatcttgtcttcttattat

SEQ ID NO: 1002937 - DNA, 33 bp, Homo sapien
gctaagggaatggttaaataaattggtatgtct

SEQ ID NO: 1002938 - DNA, 33 bp, Homo sapien
gctaagggaatggttacataaattggtatgtct

SEQ ID NO: 1002939 - DNA, 33 bp, Homo sapien
cagtgtcatttgactacggcaatctagttggca

SEQ ID NO: 1002940 - DNA, 33 bp, Homo sapien
cagtgtcatttgactagggcaatctagttggca

SEQ ID NO: 1002941 - DNA, 33 bp, Homo sapien
gacattgttatagcaaaacgaaatggattaaga

SEQ ID NO: 1002942 - DNA, 33 bp, Homo sapien
gacattgttatagcaacacgaaatggattaaga

SEQ ID NO: 1002943 - DNA, 33 bp, Homo sapien
aggtggatggatcacccgacagatcaccctgtc

SEQ ID NO: 1002944 - DNA, 33 bp, Homo sapien
aggtggatggatcacctgacagatcaccctgtc

SEQ ID NO: 1002945 - DNA, 33 bp, Homo sapien
gtccttttaattttccccatcagagtagtaaaa

SEQ ID NO: 1002946 - DNA, 33 bp, Homo sapien
gtccttttaattttccgcatcagagtagtaaaa

SEQ ID NO: 1002947 - DNA, 33 bp, Homo sapien
attcctgataagagtagaaagatggcattcaaa

SEQ ID NO: 1002948 - DNA, 33 bp, Homo sapien
attcctgataagagtataaagatggcattcaaa

SEQ ID NO: 1002949 - DNA, 33 bp, Homo sapien
gcttccttacaaggcacagctcttccatattca

SEQ ID NO: 1002950 - DNA, 33 bp, Homo sapien
gcttccttacaaggcatagctcttccatattca

SEQ ID NO: 1002951 - DNA, 33 bp, Homo sapien
actttgaaaagtcttaacagtgaaattgtaatt

SEQ ID NO: 1002952 - DNA, 33 bp, Homo sapien
actttgaaaagtcttagcagtgaaattgtaatt

SEQ ID NO: 1002953 - DNA, 33 bp, Homo sapien
cttcaccgaatgatgacgtcttctgagggagga

SEQ ID NO: 1002954 - DNA, 33 bp, Homo sapien
cttcaccgaatgatgatgtcttctgagggagga

SEQ ID NO: 1002955 - DNA, 33 bp, Homo sapien
ttcttgctctactttgcaatcctctgttcttca

SEQ ID NO: 1002956 - DNA, 33 bp, Homo sapien
ttcttgctctactttgtaatcctctgttcttca

SEQ ID NO: 1002957 - DNA, 33 bp, Homo sapien
agcctgtcttgctctacggcctccaacacctgc

SEQ ID NO: 1002958 - DNA, 33 bp, Homo sapien
agcctgtcttgctctatggcctccaacacctgc

SEQ ID NO: 1002959 - DNA, 33 bp, Homo sapien
aaccacaggaatacataataacaaagccttcct

SEQ ID NO: 1002960 - DNA, 33 bp, Homo sapien
aaccacaggaatacatcataacaaagccttcct

SEQ ID NO: 1002961 - DNA, 33 bp, Homo sapien
agagaacagaccataacccaggaaggctttgtt

SEQ ID NO: 1002962 - DNA, 33 bp, Homo sapien
agagaacagaccataatccaggaaggctttgtt

SEQ ID NO: 1002963 - DNA, 33 bp, Homo sapien
aatacaccttagaaaactcacacagatggaaat

SEQ ID NO: 1002964 - DNA, 33 bp, Homo sapien
aatacaccttagaaaagtcacacagatggaaat

SEQ ID NO: 1002965 - DNA, 33 bp, Homo sapien
tccactcaccagcaaacggaaagagaagacaaa

SEQ ID NO: 1002966 - DNA, 33 bp, Homo sapien
tccactcaccagcaaatggaaagagaagacaaa

SEQ ID NO: 1002967 - DNA, 33 bp, Homo sapien
gcacagaataactaggaaaggcaggcctgtggc

SEQ ID NO: 1002968 - DNA, 33 bp, Homo sapien
gcacagaataactagggaaggcaggcctgtggc

SEQ ID NO: 1002969 - DNA, 33 bp, Homo sapien
gaaaatctattgcacgcccctaaactaccttag

SEQ ID NO: 1002970 - DNA, 33 bp, Homo sapien
gaaaatctattgcacgtccctaaactaccttag

SEQ ID NO: 1002971 - DNA, 33 bp, Homo sapien
catttagtagccctaaaaatggtgaaggaaata

SEQ ID NO: 1002972 - DNA, 33 bp, Homo sapien
catttagtagccctaataatggtgaaggaaata

SEQ ID NO: 1002973 - DNA, 33 bp, Homo sapien
gttttaaagttattccagaaagaatgatcagaa

SEQ ID NO: 1002974 - DNA, 33 bp, Homo sapien
gttttaaagttattccggaaagaatgatcagaa

SEQ ID NO: 1002975 - DNA, 33 bp, Homo sapien
gatctaaccttaacaagtcttcagttttaagga

SEQ ID NO: 1002976 - DNA, 33 bp, Homo sapien
gatctaaccttaacaattcttcagttttaagga

SEQ ID NO: 1002977 - DNA, 33 bp, Homo sapien
tgttctgtgacagattaaataaatatgagcgtc

SEQ ID NO: 1002978 - DNA, 33 bp, Homo sapien
tgttctgtgacagattcaataaatatgagcgtc

SEQ ID NO: 1002979 - DNA, 33 bp, Homo sapien
tctgctgcctcccagaactttgtgcagacgggt

SEQ ID NO: 1002980 - DNA, 33 bp, Homo sapien
tctgctgcctcccagagctttgtgcagacgggt

SEQ ID NO: 1002981 - DNA, 33 bp, Homo sapien
aggggcagaaagagtacgaaacagatccagctt

SEQ ID NO: 1002982 - DNA, 33 bp, Homo sapien
aggggcagaaagagtatgaaacagatccagctt

SEQ ID NO: 1002983 - DNA, 33 bp, Homo sapien
taaagatagaaagagaccattttacagcagaat

SEQ ID NO: 1002984 - DNA, 33 bp, Homo sapien
taaagatagaaagagatcattttacagcagaat

SEQ ID NO: 1002985 - DNA, 33 bp, Homo sapien
tacattcagttactgaagcagcaggaaacagag

SEQ ID NO: 1002986 - DNA, 33 bp, Homo sapien
tacattcagttactgaggcagcaggaaacagag

SEQ ID NO: 1002987 - DNA, 33 bp, Homo sapien
gtcagcttgtctttggaaaagcctctattcagc

SEQ ID NO: 1002988 - DNA, 33 bp, Homo sapien
gtcagcttgtctttgggaaagcctctattcagc

SEQ ID NO: 1002989 - DNA, 33 bp, Homo sapien
ctgttgggctgtggagaaggacgtggatcagca

SEQ ID NO: 1002990 - DNA, 33 bp, Homo sapien
ctgttgggctgtggagcaggacgtggatcagca

SEQ ID NO: 1002991 - DNA, 33 bp, Homo sapien
gctacaaataccccaaacttgcaaatacacagg

SEQ ID NO: 1002992 - DNA, 33 bp, Homo sapien
gctacaaataccccaaccttgcaaatacacagg

SEQ ID NO: 1002993 - DNA, 33 bp, Homo sapien
tcctcccatccttctccaagagatcagaagcaa

SEQ ID NO: 1002994 - DNA, 33 bp, Homo sapien
tcctcccatccttctctaagagatcagaagcaa

SEQ ID NO: 1002995 - DNA, 33 bp, Homo sapien
gaagtaggctgggtgacatcctgggagcagagc

SEQ ID NO: 1002996 - DNA, 33 bp, Homo sapien
gaagtaggctgggtgagatcctgggagcagagc

SEQ ID NO: 1002997 - DNA, 33 bp, Homo sapien
tgcaacttcatctcgacctttaaaataacatcc

SEQ ID NO: 1002998 - DNA, 33 bp, Homo sapien
tgcaacttcatctcgatctttaaaataacatcc

SEQ ID NO: 1002999 - DNA, 33 bp, Homo sapien
agactccacaggtttgcaaaacagccatatgac

SEQ ID NO: 1003000 - DNA, 33 bp, Homo sapien
agactccacaggtttggaaaacagccatatgac

SEQ ID NO: 1003001 - DNA, 33 bp, Homo sapien
tgagaaagaacccaggcaagagcctgcccagca

SEQ ID NO: 1003002 - DNA, 33 bp, Homo sapien
tgagaaagaacccaggtaagagcctgcccagca

SEQ ID NO: 1003003 - DNA, 33 bp, Homo sapien
ttgaaggacctatgaaatgcttgcaagaaacca

SEQ ID NO: 1003004 - DNA, 33 bp, Homo sapien
ttgaaggacctatgaagtgcttgcaagaaacca

SEQ ID NO: 1003005 - DNA, 33 bp, Homo sapien
ctgaatgatttgctcaaaggtgtgccttaggca

SEQ ID NO: 1003006 - DNA, 33 bp, Homo sapien
ctgaatgatttgctcagaggtgtgccttaggca

SEQ ID NO: 1003007 - DNA, 33 bp, Homo sapien
aggtggaaaatccagactcatgtctaaccctgg

SEQ ID NO: 1003008 - DNA, 33 bp, Homo sapien
aggtggaaaatccagagtcatgtctaaccctgg

SEQ ID NO: 1003009 - DNA, 33 bp, Homo sapien
taccaaacatctgagaaaataataccgtgaaag

SEQ ID NO: 1003010 - DNA, 33 bp, Homo sapien
taccaaacatctgagacaataataccgtgaaag

SEQ ID NO: 1003011 - DNA, 33 bp, Homo sapien
ccaggccaagttagcaagaaatccagactatcc

SEQ ID NO: 1003012 - DNA, 33 bp, Homo sapien
ccaggccaagttagcaggaaatccagactatcc

SEQ ID NO: 1003013 - DNA, 33 bp, Homo sapien
acccctaccccaaaaaatctcagacccagaatg

SEQ ID NO: 1003014 - DNA, 33 bp, Homo sapien
acccctaccccaaaaagtctcagacccagaatg

SEQ ID NO: 1003015 - DNA, 33 bp, Homo sapien
acccacaaaggcagacaaggactctgagaacca

SEQ ID NO: 1003016 - DNA, 33 bp, Homo sapien
acccacaaaggcagacgaggactctgagaacca

SEQ ID NO: 1003017 - DNA, 33 bp, Homo sapien
caagtcctaaatgttaactactatgtgccaggt

SEQ ID NO: 1003018 - DNA, 33 bp, Homo sapien
caagtcctaaatgttacctactatgtgccaggt

SEQ ID NO: 1003019 - DNA, 33 bp, Homo sapien
agccacggcacctcacaaattacacattattca

SEQ ID NO: 1003020 - DNA, 33 bp, Homo sapien
agccacggcacctcacgaattacacattattca

SEQ ID NO: 1003021 - DNA, 33 bp, Homo sapien
gcaaatgctcacgtaaatatatcccagtcaaga

SEQ ID NO: 1003022 - DNA, 33 bp, Homo sapien
gcaaatgctcacgtaactatatcccagtcaaga

SEQ ID NO: 1003023 - DNA, 33 bp, Homo sapien
cttcacaattaaactacgtgcccactctttcac

SEQ ID NO: 1003024 - DNA, 33 bp, Homo sapien
cttcacaattaaactatgtgcccactctttcac

SEQ ID NO: 1003025 - DNA, 33 bp, Homo sapien
aaacacagctctagtcccttgcatagcatctag

SEQ ID NO: 1003026 - DNA, 33 bp, Homo sapien
aaacacagctctagtctcttgcatagcatctag

SEQ ID NO: 1003027 - DNA, 33 bp, Homo sapien
tgtaggtcattagaacaatgtggaatacttagg

SEQ ID NO: 1003028 - DNA, 33 bp, Homo sapien
tgtaggtcattagaaccatgtggaatacttagg

SEQ ID NO: 1003029 - DNA, 33 bp, Homo sapien
caggctagcttacaaaaaccaagttcaagccag

SEQ ID NO: 1003030 - DNA, 33 bp, Homo sapien
caggctagcttacaaagaccaagttcaagccag

SEQ ID NO: 1003031 - DNA, 33 bp, Homo sapien
acatagccggattcaaattagtccaacagagct

SEQ ID NO: 1003032 - DNA, 33 bp, Homo sapien
acatagccggattcaacttagtccaacagagct

SEQ ID NO: 1003033 - DNA, 33 bp, Homo sapien
aagttgattaccttacaaaggtcacactggcgg

SEQ ID NO: 1003034 - DNA, 33 bp, Homo sapien
aagttgattaccttactaaggtcacactggcgg

SEQ ID NO: 1003035 - DNA, 33 bp, Homo sapien
ttctttcatctttcaaatgcaaaatctatgccc

SEQ ID NO: 1003036 - DNA, 33 bp, Homo sapien
ttctttcatctttcaagtgcaaaatctatgccc

SEQ ID NO: 1003037 - DNA, 33 bp, Homo sapien
ccacttgagcaaactacagttgggtggtaagtt

SEQ ID NO: 1003038 - DNA, 33 bp, Homo sapien
ccacttgagcaaactatagttgggtggtaagtt

SEQ ID NO: 1003039 - DNA, 33 bp, Homo sapien
aaaaatattcagggcaaacgctcttagacctaa

SEQ ID NO: 1003040 - DNA, 33 bp, Homo sapien
aaaaatattcagggcagacgctcttagacctaa

SEQ ID NO: 1003041 - DNA, 33 bp, Homo sapien
ctctttgatttcaggccacaggagaacagaatg

SEQ ID NO: 1003042 - DNA, 33 bp, Homo sapien
ctctttgatttcaggctacaggagaacagaatg

SEQ ID NO: 1003043 - DNA, 33 bp, Homo sapien
ttaaattcaagtcctgcaaaaaatcaggaatgc

SEQ ID NO: 1003044 - DNA, 33 bp, Homo sapien
ttaaattcaagtcctggaaaaaatcaggaatgc

SEQ ID NO: 1003045 - DNA, 33 bp, Homo sapien
gagaagaaatagtagaacaggggagttgtcagg

SEQ ID NO: 1003046 - DNA, 33 bp, Homo sapien
gagaagaaatagtagagcaggggagttgtcagg

SEQ ID NO: 1003047 - DNA, 33 bp, Homo sapien
aataactttagcttacaaaatggatatttctgg

SEQ ID NO: 1003048 - DNA, 33 bp, Homo sapien
aataactttagcttaccaaatggatatttctgg

SEQ ID NO: 1003049 - DNA, 33 bp, Homo sapien
attttctgttttaagacaatagatagctggcca

SEQ ID NO: 1003050 - DNA, 33 bp, Homo sapien
attttctgttttaagagaatagatagctggcca

SEQ ID NO: 1003051 - DNA, 33 bp, Homo sapien
ctataccagacgacgcagatcactgtcagtcct

SEQ ID NO: 1003052 - DNA, 33 bp, Homo sapien
ctataccagacgacgcggatcactgtcagtcct

SEQ ID NO: 1003053 - DNA, 33 bp, Homo sapien
gactacaggcgcataccacagtacccagataat

SEQ ID NO: 1003054 - DNA, 33 bp, Homo sapien
gactacaggcgcatactacagtacccagataat

SEQ ID NO: 1003055 - DNA, 33 bp, Homo sapien
cagatacagaccatccaacatgtcttagacctt

SEQ ID NO: 1003056 - DNA, 33 bp, Homo sapien
cagatacagaccatcccacatgtcttagacctt

SEQ ID NO: 1003057 - DNA, 33 bp, Homo sapien
tattttgcatgtcttaaaattcatttggtgctt

SEQ ID NO: 1003058 - DNA, 33 bp, Homo sapien
tattttgcatgtcttacaattcatttggtgctt

SEQ ID NO: 1003059 - DNA, 33 bp, Homo sapien
ctcatgactgtcctacaaggaatgcaccattat

SEQ ID NO: 1003060 - DNA, 33 bp, Homo sapien
ctcatgactgtcctacgaggaatgcaccattat

SEQ ID NO: 1003061 - DNA, 33 bp, Homo sapien
ttcagttgtttccttacagaaaagcggctagag

SEQ ID NO: 1003062 - DNA, 33 bp, Homo sapien
ttcagttgtttccttatagaaaagcggctagag

SEQ ID NO: 1003063 - DNA, 33 bp, Homo sapien
tacatgtcagaaacctaactgtacaattggtgc

SEQ ID NO: 1003064 - DNA, 33 bp, Homo sapien
tacatgtcagaaacctcactgtacaattggtgc

SEQ ID NO: 1003065 - DNA, 33 bp, Homo sapien
actatcctcttttccaaccggaaacctctacca

SEQ ID NO: 1003066 - DNA, 33 bp, Homo sapien
actatcctcttttccagccggaaacctctacca

SEQ ID NO: 1003067 - DNA, 33 bp, Homo sapien
ttaggggtcctatccactctactcaccacaagg

SEQ ID NO: 1003068 - DNA, 33 bp, Homo sapien
ttaggggtcctatccagtctactcaccacaagg

SEQ ID NO: 1003069 - DNA, 33 bp, Homo sapien
ttctaacaactaactcaagccccaaatagacaa

SEQ ID NO: 1003070 - DNA, 33 bp, Homo sapien
ttctaacaactaactcgagccccaaatagacaa

SEQ ID NO: 1003071 - DNA, 33 bp, Homo sapien
gctcaataataaagagacatcagggtgcagttg

SEQ ID NO: 1003072 - DNA, 33 bp, Homo sapien
gctcaataataaagaggcatcagggtgcagttg

SEQ ID NO: 1003073 - DNA, 33 bp, Homo sapien
gccagcacaagcttgacggcctttcaatacata

SEQ ID NO: 1003074 - DNA, 33 bp, Homo sapien
gccagcacaagcttgatggcctttcaatacata

SEQ ID NO: 1003075 - DNA, 33 bp, Homo sapien
gctagtccagctccagaaaagcagggcagtaga

SEQ ID NO: 1003076 - DNA, 33 bp, Homo sapien
gctagtccagctccaggaaagcagggcagtaga

SEQ ID NO: 1003077 - DNA, 33 bp, Homo sapien
aatagtgaaaatataacagctgtacatatttac

SEQ ID NO: 1003078 - DNA, 33 bp, Homo sapien
aatagtgaaaatataatagctgtacatatttac

SEQ ID NO: 1003079 - DNA, 33 bp, Homo sapien
catgccatttggtctacgtctcaagtcaattca

SEQ ID NO: 1003080 - DNA, 33 bp, Homo sapien
catgccatttggtctatgtctcaagtcaattca

SEQ ID NO: 1003081 - DNA, 33 bp, Homo sapien
tcaggccaatttttacggattacacaaacaaat

SEQ ID NO: 1003082 - DNA, 33 bp, Homo sapien
tcaggccaatttttactgattacacaaacaaat

SEQ ID NO: 1003083 - DNA, 33 bp, Homo sapien
ctttcgctccatgtaacagttcacacctaatac

SEQ ID NO: 1003084 - DNA, 33 bp, Homo sapien
ctttcgctccatgtaatagttcacacctaatac

SEQ ID NO: 1003085 - DNA, 33 bp, Homo sapien
cctgtttgcattctataactgagccacaaacag

SEQ ID NO: 1003086 - DNA, 33 bp, Homo sapien
cctgtttgcattctatgactgagccacaaacag

SEQ ID NO: 1003087 - DNA, 33 bp, Homo sapien
aagacggtattgctcaagatagccttccagcct

SEQ ID NO: 1003088 - DNA, 33 bp, Homo sapien
aagacggtattgctcaggatagccttccagcct

SEQ ID NO: 1003089 - DNA, 33 bp, Homo sapien
tgtattagcttggaatcaaagggacagttgcta

SEQ ID NO: 1003090 - DNA, 33 bp, Homo sapien
tgtattagcttggaatgaaagggacagttgcta

SEQ ID NO: 1003091 - DNA, 33 bp, Homo sapien
cgtctgaaaggatctaggaggtactgatttaga

SEQ ID NO: 1003092 - DNA, 33 bp, Homo sapien
cgtctgaaaggatctatgaggtactgatttaga

SEQ ID NO: 1003093 - DNA, 33 bp, Homo sapien
gaattcatggcggctccgacaaataagaaaagg

SEQ ID NO: 1003094 - DNA, 33 bp, Homo sapien
gaattcatggcggctctgacaaataagaaaagg

SEQ ID NO: 1003095 - DNA, 33 bp, Homo sapien
aaggacacaagcaacagagtgaaaagcaatcta

SEQ ID NO: 1003096 - DNA, 33 bp, Homo sapien
aaggacacaagcaacatagtgaaaagcaatcta

SEQ ID NO: 1003097 - DNA, 33 bp, Homo sapien
gaattgtttgactgtacctcaaattttaaatgt

SEQ ID NO: 1003098 - DNA, 33 bp, Homo sapien
gaattgtttgactgtatctcaaattttaaatgt

SEQ ID NO: 1003099 - DNA, 33 bp, Homo sapien
ggtgagggttgatgatcagccacatttatcaag

SEQ ID NO: 1003100 - DNA, 33 bp, Homo sapien
ggtgagggttgatgatgagccacatttatcaag

SEQ ID NO: 1003101 - DNA, 33 bp, Homo sapien
gacctgtgcaaggccacgagttaaaagtgagac

SEQ ID NO: 1003102 - DNA, 33 bp, Homo sapien
gacctgtgcaaggccatgagttaaaagtgagac

SEQ ID NO: 1003103 - DNA, 33 bp, Homo sapien
gactccttttcctcaccagaagcgcagttaaaa

SEQ ID NO: 1003104 - DNA, 33 bp, Homo sapien
gactccttttcctcactagaagcgcagttaaaa

SEQ ID NO: 1003105 - DNA, 33 bp, Homo sapien
aatgtaaactttgtgacgcactaaaataaaggc

SEQ ID NO: 1003106 - DNA, 33 bp, Homo sapien
aatgtaaactttgtgaggcactaaaataaaggc

SEQ ID NO: 1003107 - DNA, 33 bp, Homo sapien
agatattttacaataaccatcctattatttata

SEQ ID NO: 1003108 - DNA, 33 bp, Homo sapien
agatattttacaataagcatcctattatttata

SEQ ID NO: 1003109 - DNA, 33 bp, Homo sapien
gacaatcccaactcttaaactctcactaagctt

SEQ ID NO: 1003110 - DNA, 33 bp, Homo sapien
gacaatcccaactcttgaactctcactaagctt

SEQ ID NO: 1003111 - DNA, 33 bp, Homo sapien; identical to SEQ ID NO: 1003109

SEQ ID NO: 1003112 - DNA, 33 bp, Homo sapien; identical to SEQ ID NO: 1003110

SEQ ID NO: 1003113 - DNA, 33 bp, Homo sapien
acaatcgcatcggcgacattggttttattttag

SEQ ID NO: 1003114 - DNA, 33 bp, Homo sapien
acaatcgcatcggcgatattggttttattttag

SEQ ID NO: 1003115 - DNA, 33 bp, Homo sapien
cgactggctcacagaccgtcaagtaactgttgt

SEQ ID NO: 1003116 - DNA, 33 bp, Homo sapien
cgactggctcacagactgtcaagtaactgttgt

SEQ ID NO: 1003117 - DNA, 33 bp, Homo sapien
gtattcattaagtataaccaaatctctgaatct

SEQ ID NO: 1003118 - DNA, 33 bp, Homo sapien
gtattcattaagtatacccaaatctctgaatct

SEQ ID NO: 1003119 - DNA, 33 bp, Homo sapien
tttttgcacatggttacgtagagaggagaatta

SEQ ID NO: 1003120 - DNA, 33 bp, Homo sapien
tttttgcacatggttatgtagagaggagaatta

SEQ ID NO: 1003121 - DNA, 33 bp, Homo sapien
atagacatttaaaggacggtcagggaatatgat

SEQ ID NO: 1003122 - DNA, 33 bp, Homo sapien
atagacatttaaaggatggtcagggaatatgat

SEQ ID NO: 1003123 - DNA, 33 bp, Homo sapien
aaggactccaccaaaaaatgattagaactcata

SEQ ID NO: 1003124 - DNA, 33 bp, Homo sapien
aaggactccaccaaaagatgattagaactcata

SEQ ID NO: 1003125 - DNA, 33 bp, Homo sapien
aacaggtttggaagacagtatcagtagttcagt

SEQ ID NO: 1003126 - DNA, 33 bp, Homo sapien
aacaggtttggaagacggtatcagtagttcagt

SEQ ID NO: 1003127 - DNA, 33 bp, Homo sapien
ttctagttatacacggaccatatttgatgtgag

SEQ ID NO: 1003128 - DNA, 33 bp, Homo sapien
ttctagttatacacgggccatatttgatgtgag

SEQ ID NO: 1003129 - DNA, 33 bp, Homo sapien
taaatcagtgtgacaactgaagtaaaaggacag

SEQ ID NO: 1003130 - DNA, 33 bp, Homo sapien
taaatcagtgtgacaattgaagtaaaaggacag

SEQ ID NO: 1003131 - DNA, 33 bp, Homo sapien
tagagggaaaaatggacagaaagataggctagt

SEQ ID NO: 1003132 - DNA, 33 bp, Homo sapien
tagagggaaaaatggagagaaagataggctagt

SEQ ID NO: 1003133 - DNA, 33 bp, Homo sapien
gaaatattatttgaaaacaagctgaactgacaa

SEQ ID NO: 1003134 - DNA, 33 bp, Homo sapien
gaaatattatttgaaagcaagctgaactgacaa

SEQ ID NO: 1003135 - DNA, 33 bp, Homo sapien
tatcaacctctgtggactaaggactgggcaaga

SEQ ID NO: 1003136 - DNA, 33 bp, Homo sapien
tatcaacctctgtggagtaaggactgggcaaga

SEQ ID NO: 1003137 - DNA, 33 bp, Homo sapien
aagttgctgccaaggacatttttgttccttttt

SEQ ID NO: 1003138 - DNA, 33 bp, Homo sapien
aagttgctgccaaggatatttttgttccttttt

SEQ ID NO: 1003139 - DNA, 33 bp, Homo sapien
cttcatcagtacatacacctactcttagcatat

SEQ ID NO: 1003140 - DNA, 33 bp, Homo sapien
cttcatcagtacatacccctactcttagcatat

SEQ ID NO: 1003141 - DNA, 33 bp, Homo sapien
tttctgtcacttgctacggaattcagcatcaga

SEQ ID NO: 1003142 - DNA, 33 bp, Homo sapien
tttctgtcacttgctatggaattcagcatcaga

SEQ ID NO: 1003143 - DNA, 33 bp, Homo sapien
atgttaattgaagtaacttaataggacctgata

SEQ ID NO: 1003144 - DNA, 33 bp, Homo sapien
atgttaattgaagtaagttaataggacctgata

SEQ ID NO: 1003145 - DNA, 33 bp, Homo sapien
tctgacattcctgtagccctagacagttattat

SEQ ID NO: 1003146 - DNA, 33 bp, Homo sapien
tctgacattcctgtagtcctagacagttattat

SEQ ID NO: 1003147 - DNA, 33 bp, Homo sapien
tcatcagatgactctcaaagtatagaaaaattt

SEQ ID NO: 1003148 - DNA, 33 bp, Homo sapien
tcatcagatgactctccaagtatagaaaaattt

SEQ ID NO: 1003149 - DNA, 33 bp, Homo sapien
gtgcagatggcccagaagagtagctgtccccac

SEQ ID NO: 1003150 - DNA, 33 bp, Homo sapien
gtgcagatggcccagaggagtagctgtccccac

SEQ ID NO: 1003151 - DNA, 33 bp, Homo sapien
gtggagtaatgccaggaacaaaagaggagttta

SEQ ID NO: 1003152 - DNA, 33 bp, Homo sapien
gtggagtaatgccagggacaaaagaggagttta

SEQ ID NO: 1003153 - DNA, 33 bp, Homo sapien
ctaaagtcctagaaaaatgatagacacatagag

SEQ ID NO: 1003154 - DNA, 33 bp, Homo sapien
ctaaagtcctagaaaactgatagacacatagag

SEQ ID NO: 1003155 - DNA, 33 bp, Homo sapien
cagaaagaaaaataccacttaaactcacttata

SEQ ID NO: 1003156 - DNA, 33 bp, Homo sapien
cagaaagaaaaataccgcttaaactcacttata

SEQ ID NO: 1003157 - DNA, 33 bp, Homo sapien
agacaagatctcagaaagctttaaattttcact

SEQ ID NO: 1003158 - DNA, 33 bp, Homo sapien
agacaagatctcagaaggctttaaattttcact

SEQ ID NO: 1003159 - DNA, 33 bp, Homo sapien
cactggggctgttctacagtctagacataactg

SEQ ID NO: 1003160 - DNA, 33 bp, Homo sapien
cactggggctgttctagagtctagacataactg

SEQ ID NO: 1003161 - DNA, 33 bp, Homo sapien
tataaatagatgtccactgagatacacaaaaaa

SEQ ID NO: 1003162 - DNA, 33 bp, Homo sapien
tataaatagatgtccattgagatacacaaaaaa

SEQ ID NO: 1003163 - DNA, 33 bp, Homo sapien
agtataactttaaaaaattcattcggccactct

SEQ ID NO: 1003164 - DNA, 33 bp, Homo sapien
agtataactttaaaaatttcattcggccactct

SEQ ID NO: 1003165 - DNA, 33 bp, Homo sapien
taaacatttctggtaacatggcaaaacgaggtt

SEQ ID NO: 1003166 - DNA, 33 bp, Homo sapien
taaacatttctggtaatatggcaaaacgaggtt

SEQ ID NO: 1003167 - DNA, 33 bp, Homo sapien
atctctgtatagatgaatataggtctctttaag

SEQ ID NO: 1003168 - DNA, 33 bp, Homo sapien
atctctgtatagatgagtataggtctctttaag

SEQ ID NO: 1003169 - DNA, 33 bp, Homo sapien
cagggcagcacccccacacctccatcacaggtc

SEQ ID NO: 1003170 - DNA, 33 bp, Homo sapien
cagggcagcacccccatacctccatcacaggtc

SEQ ID NO: 1003171 - DNA, 33 bp, Homo sapien
ggacaaacttactaaccactaagagctaataat

SEQ ID NO: 1003172 - DNA, 33 bp, Homo sapien
ggacaaacttactaacgactaagagctaataat

SEQ ID NO: 1003173 - DNA, 33 bp, Homo sapien
tattttattccttctgaagcaatccattcattg

SEQ ID NO: 1003174 - DNA, 33 bp, Homo sapien
tattttattccttctgtagcaatccattcattg

SEQ ID NO: 1003175 - DNA, 33 bp, Homo sapien
ttgtttgtagatgttacgatcctatatctagaa

SEQ ID NO: 1003176 - DNA, 33 bp, Homo sapien
ttgtttgtagatgttatgatcctatatctagaa

SEQ ID NO: 1003177 - DNA, 33 bp, Homo sapien
tcgtatctagcacttacagcctcaagagtttag

SEQ ID NO: 1003178 - DNA, 33 bp, Homo sapien
tcgtatctagcacttatagcctcaagagtttag

SEQ ID NO: 1003179 - DNA, 33 bp, Homo sapien
atgctcgtggatacaaagaatcaatatcatgac

SEQ ID NO: 1003180 - DNA, 33 bp, Homo sapien
atgctcgtggatacaaggaatcaatatcatgac

SEQ ID NO: 1003181 - DNA, 33 bp, Homo sapien
tggctgactcatttaactggctttaagtatata

SEQ ID NO: 1003182 - DNA, 33 bp, Homo sapien
tggctgactcatttaagtggctttaagtatata

SEQ ID NO: 1003183 - DNA, 33 bp, Homo sapien
atcagggctgccttacaagatttcctgaaggaa

SEQ ID NO: 1003184 - DNA, 33 bp, Homo sapien
atcagggctgccttacgagatttcctgaaggaa

SEQ ID NO: 1003185 - DNA, 33 bp, Homo sapien
tatgtttgtatgtgcacaagtagactggctttc

SEQ ID NO: 1003186 - DNA, 33 bp, Homo sapien
tatgtttgtatgtgcagaagtagactggctttc

SEQ ID NO: 1003187 - DNA, 33 bp, Homo sapien
gtaatgaatgttcaacggagctgaatgggtaca

SEQ ID NO: 1003188 - DNA, 33 bp, Homo sapien
gtaatgaatgttcaactgagctgaatgggtaca

SEQ ID NO: 1003189 - DNA, 33 bp, Homo sapien
ttggagtttgacagagcaataaaaaacaaaaca

SEQ ID NO: 1003190 - DNA, 33 bp, Homo sapien
ttggagtttgacagaggaataaaaaacaaaaca

SEQ ID NO: 1003191 - DNA, 33 bp, Homo sapien
tgtacactgaaaactgaaataacattgataaga

SEQ ID NO: 1003192 - DNA, 33 bp, Homo sapien
tgtacactgaaaactgcaataacattgataaga

SEQ ID NO: 1003193 - DNA, 33 bp, Homo sapien
ttgcatgaaaccacaaaagcttctaaatagcca

SEQ ID NO: 1003194 - DNA, 33 bp, Homo sapien
ttgcatgaaaccacaagagcttctaaatagcca

SEQ ID NO: 1003195 - DNA, 33 bp, Homo sapien
tatagtatttgctggacgtgggaccagtagaaa

SEQ ID NO: 1003196 - DNA, 33 bp, Homo sapien
tatagtatttgctggatgtgggaccagtagaaa

SEQ ID NO: 1003197 - DNA, 33 bp, Homo sapien
actgatcttagctgacagaactatgtggctact

SEQ ID NO: 1003198 - DNA, 33 bp, Homo sapien
actgatcttagctgacggaactatgtggctact

SEQ ID NO: 1003199 - DNA, 33 bp, Homo sapien
gctaacactccatcaccgaatccttgacacttg

SEQ ID NO: 1003200 - DNA, 33 bp, Homo sapien
gctaacactccatcactgaatccttgacacttg

SEQ ID NO: 1003201 - DNA, 33 bp, Homo sapien
ttgatactttttctgccccaccattcttggaaa

SEQ ID NO: 1003202 - DNA, 33 bp, Homo sapien
ttgatactttttctgctccaccattcttggaaa

SEQ ID NO: 1003203 - DNA, 33 bp, Homo sapien
gcttatatttaggttacattggtcatagattat

SEQ ID NO: 1003204 - DNA, 33 bp, Homo sapien
gcttatatttaggttatattggtcatagattat

SEQ ID NO: 1003205 - DNA, 33 bp, Homo sapien
tctaaactatcattcgcccctcccagctactcc

SEQ ID NO: 1003206 - DNA, 33 bp, Homo sapien
tctaaactatcattcgtccctcccagctactcc

SEQ ID NO: 1003207 - DNA, 33 bp, Homo sapien
gggcacagaaggtaaccgcggattgagagcagg

SEQ ID NO: 1003208 - DNA, 33 bp, Homo sapien
gggcacagaaggtaactgcggattgagagcagg

SEQ ID NO: 1003209 - DNA, 33 bp, Homo sapien
tacagacatagacaagaatgaaattatagatat

SEQ ID NO: 1003210 - DNA, 33 bp, Homo sapien
tacagacatagacaaggatgaaattatagatat

SEQ ID NO: 1003211 - DNA, 33 bp, Homo sapien
atggctttaggtcttacgtataactctttaatc

SEQ ID NO: 1003212 - DNA, 33 bp, Homo sapien
atggctttaggtcttatgtataactctttaatc

SEQ ID NO: 1003213 - DNA, 33 bp, Homo sapien
ttctgccaagtaggcaaccctgaaggagacttg

SEQ ID NO: 1003214 - DNA, 33 bp, Homo sapien
ttctgccaagtaggcacccctgaaggagacttg

SEQ ID NO: 1003215 - DNA, 33 bp, Homo sapien
gccctaaatgtaccaaatgaaataataaataca

SEQ ID NO: 1003216 - DNA, 33 bp, Homo sapien
gccctaaatgtaccaagtgaaataataaataca

SEQ ID NO: 1003217 - DNA, 33 bp, Homo sapien
tggcccattaggaaccagactgcccagcaggag

SEQ ID NO: 1003218 - DNA, 33 bp, Homo sapien
tggcccattaggaaccggactgcccagcaggag

SEQ ID NO: 1003219 - DNA, 33 bp, Homo sapien
gatccatctatctcacagccttttggagccagg

SEQ ID NO: 1003220 - DNA, 33 bp, Homo sapien
gatccatctatctcactgccttttggagccagg

SEQ ID NO: 1003221 - DNA, 33 bp, Homo sapien
aaagtaaggaagaacagggtctgctgtgtgaag

SEQ ID NO: 1003222 - DNA, 33 bp, Homo sapien
aaagtaaggaagaacatggtctgctgtgtgaag

SEQ ID NO: 1003223 - DNA, 33 bp, Homo sapien
cagtgtctttgctcgaaaggcatacagagatgt

SEQ ID NO: 1003224 - DNA, 33 bp, Homo sapien
cagtgtctttgctcgacaggcatacagagatgt

SEQ ID NO: 1003225 - DNA, 33 bp, Homo sapien
tagagaggacttaacacaggacatggacttgtg

SEQ ID NO: 1003226 - DNA, 33 bp, Homo sapien
tagagaggacttaacataggacatggacttgtg

SEQ ID NO: 1003227 - DNA, 33 bp, Homo sapien
tcagtgaatcatttgcaaagcagagaagatgag

SEQ ID NO: 1003228 - DNA, 33 bp, Homo sapien
tcagtgaatcatttgcgaagcagagaagatgag

SEQ ID NO: 1003229 - DNA, 33 bp, Homo sapien
ggacaaagtagagaaaacagcttcatagtatgt

SEQ ID NO: 1003230 - DNA, 33 bp, Homo sapien
ggacaaagtagagaaaccagcttcatagtatgt

SEQ ID NO: 1003231 - DNA, 33 bp, Homo sapien
ttcacacagaagaactcaattagtcacagagtt

SEQ ID NO: 1003232 - DNA, 33 bp, Homo sapien
ttcacacagaagaactgaattagtcacagagtt

SEQ ID NO: 1003233 - DNA, 33 bp, Homo sapien
ctttattgtgaacatccataacaacttgacaaa

SEQ ID NO: 1003234 - DNA, 33 bp, Homo sapien
ctttattgtgaacatctataacaacttgacaaa

SEQ ID NO: 1003235 - DNA, 33 bp, Homo sapien
ctgccattgacaatcactcccagaggaatgtat

SEQ ID NO: 1003236 - DNA, 33 bp, Homo sapien
ctgccattgacaatcagtcccagaggaatgtat

SEQ ID NO: 1003237 - DNA, 33 bp, Homo sapien
acacctaaagtgataactcaagaacaggagaag

SEQ ID NO: 1003238 - DNA, 33 bp, Homo sapien
acacctaaagtgataagtcaagaacaggagaag

SEQ ID NO: 1003239 - DNA, 33 bp, Homo sapien
ggaaatgaaaaacctacgggaagcggagcagtc

SEQ ID NO: 1003240 - DNA, 33 bp, Homo sapien
ggaaatgaaaaacctatgggaagcggagcagtc

SEQ ID NO: 1003241 - DNA, 33 bp, Homo sapien
ctttgctaaagcttaacagaagtgactgctccg

SEQ ID NO: 1003242 - DNA, 33 bp, Homo sapien
ctttgctaaagcttaagagaagtgactgctccg

SEQ ID NO: 1003243 - DNA, 33 bp, Homo sapien
tgagtactgatggcaacagctttgaagatgatt

SEQ ID NO: 1003244 - DNA, 33 bp, Homo sapien
tgagtactgatggcaagagctttgaagatgatt

SEQ ID NO: 1003245 - DNA, 33 bp, Homo sapien; identical to SEQ ID NO: 1003243

SEQ ID NO: 1003246 - DNA, 33 bp, Homo sapien; identical to SEQ ID NO: 1003244

SEQ ID NO: 1003247 - DNA, 33 bp, Homo sapien
agaaggtgaggtctcaacaagataccaggcaac

SEQ ID NO: 1003248 - DNA, 33 bp, Homo sapien
agaaggtgaggtctcagcaagataccaggcaac

SEQ ID NO: 1003249 - DNA, 33 bp, Homo sapien
ggacctttatagccaactcaagatactgtgatg

SEQ ID NO: 1003250 - DNA, 33 bp, Homo sapien
ggacctttatagccaattcaagatactgtgatg

SEQ ID NO: 1003251 - DNA, 33 bp, Homo sapien
cgtgctaagcatcggacagctggctgatttgta

SEQ ID NO: 1003252 - DNA, 33 bp, Homo sapien
cgtgctaagcatcggatagctggctgatttgta

SEQ ID NO: 1003253 - DNA, 33 bp, Homo sapien
tcccctgagttttgcaatattctgaaatgcaac

SEQ ID NO: 1003254 - DNA, 33 bp, Homo sapien
tcccctgagttttgcagtattctgaaatgcaac

SEQ ID NO: 1003255 - DNA, 33 bp, Homo sapien
atcattattatggcacacggcagtattaagaag

SEQ ID NO: 1003256 - DNA, 33 bp, Homo sapien
atcattattatggcacgcggcagtattaagaag

SEQ ID NO: 1003257 - DNA, 33 bp, Homo sapien
agtttcttgttcaatacgctgtgtgaagcattt

SEQ ID NO: 1003258 - DNA, 33 bp, Homo sapien
agtttcttgttcaatatgctgtgtgaagcattt

SEQ ID NO: 1003259 - DNA, 33 bp, Homo sapien
tatatcattaaacacaatatcagaatttcatta

SEQ ID NO: 1003260 - DNA, 33 bp, Homo sapien
tatatcattaaacacagtatcagaatttcatta

SEQ ID NO: 1003261 - DNA, 33 bp, Homo sapien
tgacagtatttcaaagacatgctcctgaggctt

SEQ ID NO: 1003262 - DNA, 33 bp, Homo sapien
tgacagtatttcaaagccatgctcctgaggctt

SEQ ID NO: 1003263 - DNA, 33 bp, Homo sapien
tatattttgaacatgcgctacagaaacagctcc

SEQ ID NO: 1003264 - DNA, 33 bp, Homo sapien
tatattttgaacatgctctacagaaacagctcc

SEQ ID NO: 1003265 - DNA, 33 bp, Homo sapien
aaaataggtacctaacactggcaagaggatgat

SEQ ID NO: 1003266 - DNA, 33 bp, Homo sapien
aaaataggtacctaaccctggcaagaggatgat

SEQ ID NO: 1003267 - DNA, 33 bp, Homo sapien
tatcaacctgtatgagcccttcatgttaaaaga

SEQ ID NO: 1003268 - DNA, 33 bp, Homo sapien
tatcaacctgtatgagtccttcatgttaaaaga

SEQ ID NO: 1003269 - DNA, 33 bp, Homo sapien
atttgatctcttccacagtatctgaattatttg

SEQ ID NO: 1003270 - DNA, 33 bp, Homo sapien
atttgatctcttccacggtatctgaattatttg

SEQ ID NO: 1003271 - DNA, 33 bp, Homo sapien
agttccttttcaattccccaagacaacatcagt

SEQ ID NO: 1003272 - DNA, 33 bp, Homo sapien
agttccttttcaattctccaagacaacatcagt

SEQ ID NO: 1003273 - DNA, 33 bp, Homo sapien
atcagtgacaaatgtaaactttttctacttgta

SEQ ID NO: 1003274 - DNA, 33 bp, Homo sapien
atcagtgacaaatgtatactttttctacttgta

SEQ ID NO: 1003275 - DNA, 33 bp, Homo sapien
agactgcagatacacaagggatattatggagcc

SEQ ID NO: 1003276 - DNA, 33 bp, Homo sapien
agactgcagatacacaggggatattatggagcc

SEQ ID NO: 1003277 - DNA, 33 bp, Homo sapien
tccaatggaaatgaggcagctggcttgcaggag

SEQ ID NO: 1003278 - DNA, 33 bp, Homo sapien
tccaatggaaatgaggtagctggcttgcaggag

SEQ ID NO: 1003279 - DNA, 33 bp, Homo sapien
tagattgtttagtgcacctatatagcataagag

SEQ ID NO: 1003280 - DNA, 33 bp, Homo sapien
tagattgtttagtgcatctatatagcataagag

SEQ ID NO: 1003281 - DNA, 33 bp, Homo sapien
aattgtcagcaaactacgtatcttaatcctgaa

SEQ ID NO: 1003282 - DNA, 33 bp, Homo sapien
aattgtcagcaaactatgtatcttaatcctgaa

SEQ ID NO: 1003283 - DNA, 33 bp, Homo sapien
ctgacccttacaataaacttgctcagtagatta

SEQ ID NO: 1003284 - DNA, 33 bp, Homo sapien
ctgacccttacaataagcttgctcagtagatta

SEQ ID NO: 1003285 - DNA, 33 bp, Homo sapien
attctgctgcccttaaccagttttgaggtcttg

SEQ ID NO: 1003286 - DNA, 33 bp, Homo sapien
attctgctgcccttaatcagttttgaggtcttg

SEQ ID NO: 1003287 - DNA, 33 bp, Homo sapien
aagaacactgtcacacaaattactgtacaaatg

SEQ ID NO: 1003288 - DNA, 33 bp, Homo sapien
aagaacactgtcacaccaattactgtacaaatg

SEQ ID NO: 1003289 - DNA, 33 bp, Homo sapien
aataggaaatttcaccaaaggcctggagtcact

SEQ ID NO: 1003290 - DNA, 33 bp, Homo sapien
aataggaaatttcaccgaaggcctggagtcact

SEQ ID NO: 1003291 - DNA, 33 bp, Homo sapien
aaaagaagcttcagtcaatgttaaagctgtgcc

SEQ ID NO: 1003292 - DNA, 33 bp, Homo sapien
aaaagaagcttcagtcgatgttaaagctgtgcc

SEQ ID NO: 1003293 - DNA, 33 bp, Homo sapien
gtggatctatacccaaactggcagcaagatagc

SEQ ID NO: 1003294 - DNA, 33 bp, Homo sapien
gtggatctatacccaagctggcagcaagatagc

SEQ ID NO: 1003295 - DNA, 33 bp, Homo sapien
gcagggaccacagttaagaggtggctgcagtta

SEQ ID NO: 1003296 - DNA, 33 bp, Homo sapien
gcagggaccacagttaggaggtggctgcagtta

SEQ ID NO: 1003297 - DNA, 33 bp, Homo sapien
ttatacatgttgagaaaatggagccaaaaactg

SEQ ID NO: 1003298 - DNA, 33 bp, Homo sapien
ttatacatgttgagaagatggagccaaaaactg

SEQ ID NO: 1003299 - DNA, 33 bp, Homo sapien
tagcttttgttttagaactacataaacagagag

SEQ ID NO: 1003300 - DNA, 33 bp, Homo sapien
tagcttttgttttagacctacataaacagagag

SEQ ID NO: 1003301 - DNA, 33 bp, Homo sapien
tgttagatacagcatacagcatacagcatacag

SEQ ID NO: 1003302 - DNA, 33 bp, Homo sapien
tgttagatacagcatagagcatacagcatacag

SEQ ID NO: 1003303 - DNA, 33 bp, Homo sapien
atttaaggctgtttacaagggctgttagataca

SEQ ID NO: 1003304 - DNA, 33 bp, Homo sapien
atttaaggctgtttacgagggctgttagataca

SEQ ID NO: 1003305 - DNA, 33 bp, Homo sapien
agagcattctcataaccgtcctgacttttgagg

SEQ ID NO: 1003306 - DNA, 33 bp, Homo sapien
agagcattctcataactgtcctgacttttgagg

SEQ ID NO: 1003307 - DNA, 33 bp, Homo sapien
tcaaagtagagggaaacactgaggaaataagca

SEQ ID NO: 1003308 - DNA, 33 bp, Homo sapien
tcaaagtagagggaaagactgaggaaataagca

SEQ ID NO: 1003309 - DNA, 33 bp, Homo sapien
cattcatcagtctctggacatctggtttgtttc

SEQ ID NO: 1003310 - DNA, 33 bp, Homo sapien
cattcatcagtctctgtacatctggtttgtttc

SEQ ID NO: 1003311 - DNA, 33 bp, Homo sapien
aacccaggattctttccagctgggacatatgag

SEQ ID NO: 1003312 - DNA, 33 bp, Homo sapien
aacccaggattctttctagctgggacatatgag

SEQ ID NO: 1003313 - DNA, 33 bp, Homo sapien
ttttcttgtttaggaaatggatacagcaatact

SEQ ID NO: 1003314 - DNA, 33 bp, Homo sapien
ttttcttgtttaggaagtggatacagcaatact

SEQ ID NO: 1003315 - DNA, 33 bp, Homo sapien
attttctataaagccaaattgaatcagtactag

SEQ ID NO: 1003316 - DNA, 33 bp, Homo sapien
attttctataaagccagattgaatcagtactag

SEQ ID NO: 1003317 - DNA, 33 bp, Homo sapien
tctaaagctctaaccacacaggattttctagtc

SEQ ID NO: 1003318 - DNA, 33 bp, Homo sapien
tctaaagctctaaccatacaggattttctagtc

SEQ ID NO: 1003319 - DNA, 33 bp, Homo sapien
agcagccagaaaataacgctgtaatcatgtgct

SEQ ID NO: 1003320 - DNA, 33 bp, Homo sapien
agcagccagaaaataatgctgtaatcatgtgct

SEQ ID NO: 1003321 - DNA, 33 bp, Homo sapien
gagatcccagagtagcaatcagcattttttacc

SEQ ID NO: 1003322 - DNA, 33 bp, Homo sapien
gagatcccagagtagcgatcagcattttttacc

SEQ ID NO: 1003323 - DNA, 33 bp, Homo sapien
gggttctgggactataaaaatgaataaaatacc

SEQ ID NO: 1003324 - DNA, 33 bp, Homo sapien
gggttctgggactatacaaatgaataaaatacc

SEQ ID NO: 1003325 - DNA, 33 bp, Homo sapien
tacctgcattttcctagtaacgacagggctttc

SEQ ID NO: 1003326 - DNA, 33 bp, Homo sapien
tacctgcattttcctattaacgacagggctttc

SEQ ID NO: 1003327 - DNA, 33 bp, Homo sapien
ctggatgagacagtcacgtgtattagaggtatg

SEQ ID NO: 1003328 - DNA, 33 bp, Homo sapien
ctggatgagacagtcatgtgtattagaggtatg

SEQ ID NO: 1003329 - DNA, 33 bp, Homo sapien
ctaccttgttcttctccaaaagagtctttgtta

SEQ ID NO: 1003330 - DNA, 33 bp, Homo sapien
ctaccttgttcttctctaaaagagtctttgtta

SEQ ID NO: 1003331 - DNA, 33 bp, Homo sapien
tcttgctgtggttttaagattttcagtaatata

SEQ ID NO: 1003332 - DNA, 33 bp, Homo sapien
tcttgctgtggttttacgattttcagtaatata

SEQ ID NO: 1003333 - DNA, 33 bp, Homo sapien
tccatctcctgagcaggatacgctgaacccaat

SEQ ID NO: 1003334 - DNA, 33 bp, Homo sapien
tccatctcctgagcagtatacgctgaacccaat

SEQ ID NO: 1003335 - DNA, 33 bp, Homo sapien
caagtagtcatcaagacatggccagatgaagcc

SEQ ID NO: 1003336 - DNA, 33 bp, Homo sapien
caagtagtcatcaagatatggccagatgaagcc

SEQ ID NO: 1003337 - DNA, 33 bp, Homo sapien
ccatagaggattgttacggagattgaataatgt

SEQ ID NO: 1003338 - DNA, 33 bp, Homo sapien
ccatagaggattgttatggagattgaataatgt

SEQ ID NO: 1003339 - DNA, 33 bp, Homo sapien
gaagctacacattacactactccctttgacttg

SEQ ID NO: 1003340 - DNA, 33 bp, Homo sapien
gaagctacacattacattactccctttgacttg

SEQ ID NO: 1003341 - DNA, 33 bp, Homo sapien
atcataacctaccttacgcaacagtttcatcct

SEQ ID NO: 1003342 - DNA, 33 bp, Homo sapien
atcataacctaccttatgcaacagtttcatcct

SEQ ID NO: 1003343 - DNA, 33 bp, Homo sapien
aactttgaaaatgaacaaagttggagacctaac

SEQ ID NO: 1003344 - DNA, 33 bp, Homo sapien
aactttgaaaatgaacgaagttggagacctaac

SEQ ID NO: 1003345 - DNA, 33 bp, Homo sapien
aaagcaaaattgtttgcaagaacagataataga

SEQ ID NO: 1003346 - DNA, 33 bp, Homo sapien
aaagcaaaattgtttggaagaacagataataga

SEQ ID NO: 1003347 - DNA, 33 bp, Homo sapien
aatacactcaaaatgtcaaaaaacatacgtgca

SEQ ID NO: 1003348 - DNA, 33 bp, Homo sapien
aatacactcaaaatgtgaaaaaacatacgtgca

SEQ ID NO: 1003349 - DNA, 33 bp, Homo sapien
ttgtgatagttgtacaaaacactgtaaatgtac

SEQ ID NO: 1003350 - DNA, 33 bp, Homo sapien
ttgtgatagttgtacagaacactgtaaatgtac

SEQ ID NO: 1003351 - DNA, 33 bp, Homo sapien
cttttacatcactccaagcagaaaccatggatt

SEQ ID NO: 1003352 - DNA, 33 bp, Homo sapien
cttttacatcactccaggcagaaaccatggatt

SEQ ID NO: 1003353 - DNA, 33 bp, Homo sapien
agagagggagatgtacaggaacatagttttgag

SEQ ID NO: 1003354 - DNA, 33 bp, Homo sapien
agagagggagatgtacgggaacatagttttgag

SEQ ID NO: 1003355 - DNA, 33 bp, Homo sapien
gtcttaagctttctagacctatttgaattttaa

SEQ ID NO: 1003356 - DNA, 33 bp, Homo sapien
gtcttaagctttctagccctatttgaattttaa

SEQ ID NO: 1003357 - DNA, 33 bp, Homo sapien
acatagtaaaccaaaccaaccaaaattcacagt

SEQ ID NO: 1003358 - DNA, 33 bp, Homo sapien
acatagtaaaccaaacgaaccaaaattcacagt

SEQ ID NO: 1003359 - DNA, 33 bp, Homo sapien
tcaaatgtaaagcaagcatacaagtagagattt

SEQ ID NO: 1003360 - DNA, 33 bp, Homo sapien
tcaaatgtaaagcaaggatacaagtagagattt

SEQ ID NO: 1003361 - DNA, 33 bp, Homo sapien
gagaaataatgctcaccgctgtctttaccattt

SEQ ID NO: 1003362 - DNA, 33 bp, Homo sapien
gagaaataatgctcactgctgtctttaccattt

SEQ ID NO: 1003363 - DNA, 33 bp, Homo sapien
ttggctgtgtgaggtacaattgatgtaggcttt

SEQ ID NO: 1003364 - DNA, 33 bp, Homo sapien
ttggctgtgtgaggtataattgatgtaggcttt

SEQ ID NO: 1003365 - DNA, 33 bp, Homo sapien
tagccacatggatagcaaatacagttaaccctt

SEQ ID NO: 1003366 - DNA, 33 bp, Homo sapien
tagccacatggatagcgaatacagttaaccctt

SEQ ID NO: 1003367 - DNA, 33 bp, Homo sapien
ccctgaatgacttccacactgaaaaaactaaga

SEQ ID NO: 1003368 - DNA, 33 bp, Homo sapien
ccctgaatgacttccagactgaaaaaactaaga

SEQ ID NO: 1003369 - DNA, 33 bp, Homo sapien
aaaaaacgtaaggagcaaatttctatttctgga

SEQ ID NO: 1003370 - DNA, 33 bp, Homo sapien
aaaaaacgtaaggagcgaatttctatttctgga

SEQ ID NO: 1003371 - DNA, 33 bp, Homo sapien
catcaaagaaactaagaatagagaggcaaagtg

SEQ ID NO: 1003372 - DNA, 33 bp, Homo sapien
catcaaagaaactaaggatagagaggcaaagtg

SEQ ID NO: 1003373 - DNA, 33 bp, Homo sapien
acacagaacagtcgtaagtcccatcctgaaaag

SEQ ID NO: 1003374 - DNA, 33 bp, Homo sapien
acacagaacagtcgtacgtcccatcctgaaaag

SEQ ID NO: 1003375 - DNA, 33 bp, Homo sapien
tagctcaagtacctgacagactatagcaagcac

SEQ ID NO: 1003376 - DNA, 33 bp, Homo sapien
tagctcaagtacctgatagactatagcaagcac

SEQ ID NO: 1003377 - DNA, 33 bp, Homo sapien
gacaaagccaacaatccacttcaatagctgccc

SEQ ID NO: 1003378 - DNA, 33 bp, Homo sapien
gacaaagccaacaatctacttcaatagctgccc

SEQ ID NO: 1003379 - DNA, 33 bp, Homo sapien
tccaacccttatttgcacccaacacacactgtt

SEQ ID NO: 1003380 - DNA, 33 bp, Homo sapien
tccaacccttatttgcgcccaacacacactgtt

SEQ ID NO: 1003381 - DNA, 33 bp, Homo sapien
aagggagtgctgaaaaaaatcccgaaatataca

SEQ ID NO: 1003382 - DNA, 33 bp, Homo sapien
aagggagtgctgaaaagaatcccgaaatataca

SEQ ID NO: 1003383 - DNA, 33 bp, Homo sapien
gcatttatctctcttacacagaagcgtgtgtgc

SEQ ID NO: 1003384 - DNA, 33 bp, Homo sapien
gcatttatctctcttatacagaagcgtgtgtgc

SEQ ID NO: 1003385 - DNA, 33 bp, Homo sapien
tgatcctagttttagcaatcattgatgactctt

SEQ ID NO: 1003386 - DNA, 33 bp, Homo sapien
tgatcctagttttagcgatcattgatgactctt

SEQ ID NO: 1003387 - DNA, 33 bp, Homo sapien
aaaatccttactgttacatgtatttgcatttat

SEQ ID NO: 1003388 - DNA, 33 bp, Homo sapien
aaaatccttactgttatatgtatttgcatttat

SEQ ID NO: 1003389 - DNA, 33 bp, Homo sapien
tgaatgaatgaatgtacgttctaggccaggcac

SEQ ID NO: 1003390 - DNA, 33 bp, Homo sapien
tgaatgaatgaatgtaggttctaggccaggcac

SEQ ID NO: 1003391 - DNA, 33 bp, Homo sapien
gtacaaaggttgatcaagaaagacaactttaaa

SEQ ID NO: 1003392 - DNA, 33 bp, Homo sapien
gtacaaaggttgatcacgaaagacaactttaaa

SEQ ID NO: 1003393 - DNA, 33 bp, Homo sapien
atggtgtttatttgccccttcccagaatttaag

SEQ ID NO: 1003394 - DNA, 33 bp, Homo sapien
atggtgtttatttgccgcttcccagaatttaag

SEQ ID NO: 1003395 - DNA, 33 bp, Homo sapien
ccaaaacgagaaaaataagagatcgcttttgaa

SEQ ID NO: 1003396 - DNA, 33 bp, Homo sapien
ccaaaacgagaaaaatgagagatcgcttttgaa

SEQ ID NO: 1003397 - DNA, 33 bp, Homo sapien
ttccagttgacagtcaagttttctggttgtgaa

SEQ ID NO: 1003398 - DNA, 33 bp, Homo sapien
ttccagttgacagtcaggttttctggttgtgaa

SEQ ID NO: 1003399 - DNA, 33 bp, Homo sapien
gttttctggttgtgaaactcaggtcttctaaag

SEQ ID NO: 1003400 - DNA, 33 bp, Homo sapien
gttttctggttgtgaacctcaggtcttctaaag

SEQ ID NO: 1003401 - DNA, 33 bp, Homo sapien
acatcctgccctctgaagaaaaccacaaggctg

SEQ ID NO: 1003402 - DNA, 33 bp, Homo sapien
acatcctgccctctgaggaaaaccacaaggctg

SEQ ID NO: 1003403 - DNA, 33 bp, Homo sapien
acattttcccctgttcactttggcaggaaacca

SEQ ID NO: 1003404 - DNA, 33 bp, Homo sapien
acattttcccctgttcgctttggcaggaaacca

SEQ ID NO: 1003405 - DNA, 33 bp, Homo sapien
ttgattgatcgatcgacagattatctggagttc

SEQ ID NO: 1003406 - DNA, 33 bp, Homo sapien
ttgattgatcgatcgatagattatctggagttc

SEQ ID NO: 1003407 - DNA, 33 bp, Homo sapien
acagcttaaaggtaagcccagaggcaaggccag

SEQ ID NO: 1003408 - DNA, 33 bp, Homo sapien
acagcttaaaggtaaggccagaggcaaggccag

SEQ ID NO: 1003409 - DNA, 33 bp, Homo sapien
ctacactgcaaggccacgattgaaatccacaat

SEQ ID NO: 1003410 - DNA, 33 bp, Homo sapien
ctacactgcaaggccaggattgaaatccacaat

SEQ ID NO: 1003411 - DNA, 33 bp, Homo sapien
gactctgagataccgtcaagttcgtaaacctct

SEQ ID NO: 1003412 - DNA, 33 bp, Homo sapien
gactctgagataccgtgaagttcgtaaacctct

SEQ ID NO: 1003413 - DNA, 33 bp, Homo sapien
attccagtatttgagcacataaaaaattctgct

SEQ ID NO: 1003414 - DNA, 33 bp, Homo sapien
attccagtatttgagcgcataaaaaattctgct

SEQ ID NO: 1003415 - DNA, 33 bp, Homo sapien
cacgtgcacatccagcaactcaaaatttttaca

SEQ ID NO: 1003416 - DNA, 33 bp, Homo sapien
cacgtgcacatccagcgactcaaaatttttaca

SEQ ID NO: 1003417 - DNA, 33 bp, Homo sapien
tagttgatgcttactacagagacgtactataat

SEQ ID NO: 1003418 - DNA, 33 bp, Homo sapien
tagttgatgcttactatagagacgtactataat

SEQ ID NO: 1003419 - DNA, 33 bp, Homo sapien
tacttcttcccaaccacgcaaggatggcagagg

SEQ ID NO: 1003420 - DNA, 33 bp, Homo sapien
tacttcttcccaaccatgcaaggatggcagagg

SEQ ID NO: 1003421 - DNA, 33 bp, Homo sapien
ttaatcttcaaaacaacactgagaggttggtac

SEQ ID NO: 1003422 - DNA, 33 bp, Homo sapien
ttaatcttcaaaacaagactgagaggttggtac

SEQ ID NO: 1003423 - DNA, 33 bp, Homo sapien
actgcagacaagttcacgggaaaggaaagttac

SEQ ID NO: 1003424 - DNA, 33 bp, Homo sapien
actgcagacaagttcatgggaaaggaaagttac

SEQ ID NO: 1003425 - DNA, 33 bp, Homo sapien
cagaggtgtgcacacacattgaagtacaagtga

SEQ ID NO: 1003426 - DNA, 33 bp, Homo sapien
cagaggtgtgcacacatattgaagtacaagtga

SEQ ID NO: 1003427 - DNA, 33 bp, Homo sapien
ttttgcatctgttccactaacttcactccttct

SEQ ID NO: 1003428 - DNA, 33 bp, Homo sapien
ttttgcatctgttccattaacttcactccttct

SEQ ID NO: 1003429 - DNA, 33 bp, Homo sapien
gcaaaacagggtcccaatgaagctcttctgaat

SEQ ID NO: 1003430 - DNA, 33 bp, Homo sapien
gcaaaacagggtcccagtgaagctcttctgaat

SEQ ID NO: 1003431 - DNA, 33 bp, Homo sapien
tccaactacgtacactcaggccagaagcagatg

SEQ ID NO: 1003432 - DNA, 33 bp, Homo sapien
tccaactacgtacactgaggccagaagcagatg

SEQ ID NO: 1003433 - DNA, 33 bp, Homo sapien
gaaaggaaagatgaccaagagttgatgggggaa

SEQ ID NO: 1003434 - DNA, 33 bp, Homo sapien
gaaaggaaagatgacccagagttgatgggggaa

SEQ ID NO: 1003435 - DNA, 33 bp, Homo sapien
ctgtttccctttctgaacctctaatagtctaca

SEQ ID NO: 1003436 - DNA, 33 bp, Homo sapien
ctgtttccctttctgagcctctaatagtctaca

SEQ ID NO: 1003437 - DNA, 33 bp, Homo sapien
cgggtatttttgggtaccagcagggagacagaa

SEQ ID NO: 1003438 - DNA, 33 bp, Homo sapien
cgggtatttttgggtatcagcagggagacagaa

SEQ ID NO: 1003439 - DNA, 33 bp, Homo sapien
gtcttcccttcatagcagccaactctacaatcc

SEQ ID NO: 1003440 - DNA, 33 bp, Homo sapien
gtcttcccttcatagcggccaactctacaatcc

SEQ ID NO: 1003441 - DNA, 33 bp, Homo sapien
ttctgactactttcacacttgtttggctagctt

SEQ ID NO: 1003442 - DNA, 33 bp, Homo sapien
ttctgactactttcacgcttgtttggctagctt

SEQ ID NO: 1003443 - DNA, 33 bp, Homo sapien
tgactcagcccacagcaagactcgagaggaaga

SEQ ID NO: 1003444 - DNA, 33 bp, Homo sapien
tgactcagcccacagccagactcgagaggaaga

SEQ ID NO: 1003445 - DNA, 33 bp, Homo sapien
gggtgttgtcctgttacagtcccacgcagaggg

SEQ ID NO: 1003446 - DNA, 33 bp, Homo sapien
gggtgttgtcctgttagagtcccacgcagaggg

SEQ ID NO: 1003447 - DNA, 33 bp, Homo sapien
aggacattttctgagaagataccgccgccctca

SEQ ID NO: 1003448 - DNA, 33 bp, Homo sapien
aggacattttctgagaggataccgccgccctca

SEQ ID NO: 1003449 - DNA, 33 bp, Homo sapien
gagggaatcgtgtttaaatttcctggtttattt

SEQ ID NO: 1003450 - DNA, 33 bp, Homo sapien
gagggaatcgtgtttacatttcctggtttattt

SEQ ID NO: 1003451 - DNA, 33 bp, Homo sapien
tgtaaatgtattctacacacttcttgagaacca

SEQ ID NO: 1003452 - DNA, 33 bp, Homo sapien
tgtaaatgtattctacgcacttcttgagaacca

SEQ ID NO: 1003453 - DNA, 33 bp, Homo sapien
tattttttgaataaacaacactaagggtaaaag

SEQ ID NO: 1003454 - DNA, 33 bp, Homo sapien
tattttttgaataaacgacactaagggtaaaag

SEQ ID NO: 1003455 - DNA, 33 bp, Homo sapien
caatggcttctcacctaactcagtgtaaaaact

SEQ ID NO: 1003456 - DNA, 33 bp, Homo sapien
caatggcttctcacctcactcagtgtaaaaact

SEQ ID NO: 1003457 - DNA, 33 bp, Homo sapien
tatgaatataatgaccacaacaaagggcacccc

SEQ ID NO: 1003458 - DNA, 33 bp, Homo sapien
tatgaatataatgaccgcaacaaagggcacccc

SEQ ID NO: 1003459 - DNA, 33 bp, Homo sapien
agactacaccattttacataaggcactcgaaca

SEQ ID NO: 1003460 - DNA, 33 bp, Homo sapien
agactacaccattttatataaggcactcgaaca

SEQ ID NO: 1003461 - DNA, 33 bp, Homo sapien
tgtaggtaagcagtaaaaaaaataggtgaatac

SEQ ID NO: 1003462 - DNA, 33 bp, Homo sapien
tgtaggtaagcagtaagaaaaataggtgaatac

SEQ ID NO: 1003463 - DNA, 33 bp, Homo sapien
gaacccatctttctgagagcatatatggatctg

SEQ ID NO: 1003464 - DNA, 33 bp, Homo sapien
gaacccatctttctgatagcatatatggatctg

SEQ ID NO: 1003465 - DNA, 33 bp, Homo sapien
tgggggcttatgcttacagtcgcagcattttgg

SEQ ID NO: 1003466 - DNA, 33 bp, Homo sapien
tgggggcttatgcttatagtcgcagcattttgg

SEQ ID NO: 1003467 - DNA, 33 bp, Homo sapien
tcacagagttctgtataagccagtggttatcaa

SEQ ID NO: 1003468 - DNA, 33 bp, Homo sapien
tcacagagttctgtatgagccagtggttatcaa

SEQ ID NO: 1003469 - DNA, 33 bp, Homo sapien
cctctcttctgcctccaaaataaggcatatatg

SEQ ID NO: 1003470 - DNA, 33 bp, Homo sapien
cctctcttctgcctccgaaataaggcatatatg

SEQ ID NO: 1003471 - DNA, 33 bp, Homo sapien
cctgcaggggtgaacacgaaactccatagcagc

SEQ ID NO: 1003472 - DNA, 33 bp, Homo sapien
cctgcaggggtgaacatgaaactccatagcagc

SEQ ID NO: 1003473 - DNA, 33 bp, Homo sapien
cctgaccagtttgccaaaggaccagtcttcttt

SEQ ID NO: 1003474 - DNA, 33 bp, Homo sapien
cctgaccagtttgccagaggaccagtcttcttt

SEQ ID NO: 1003475 - DNA, 33 bp, Homo sapien
tatttaaaacaccttgaacaaaacaaataattt

SEQ ID NO: 1003476 - DNA, 33 bp, Homo sapien
tatttaaaacaccttggacaaaacaaataattt

SEQ ID NO: 1003477 - DNA, 33 bp, Homo sapien
tcaccacctggatcaacgtggagcattttgaaa

SEQ ID NO: 1003478 - DNA, 33 bp, Homo sapien
tcaccacctggatcaatgtggagcattttgaaa

SEQ ID NO: 1003479 - DNA, 33 bp, Homo sapien
ttatttcacctggactaagaggctctccaaagc

SEQ ID NO: 1003480 - DNA, 33 bp, Homo sapien
ttatttcacctggactgagaggctctccaaagc

SEQ ID NO: 1003481 - DNA, 33 bp, Homo sapien
tcaagatcagactaggcaacatggcgagatttc

SEQ ID NO: 1003482 - DNA, 33 bp, Homo sapien
tcaagatcagactagggaacatggcgagatttc

SEQ ID NO: 1003483 - DNA, 33 bp, Homo sapien
agtctgctgggccttacctgggtactctctgtc

SEQ ID NO: 1003484 - DNA, 33 bp, Homo sapien
agtctgctgggccttagctgggtactctctgtc

SEQ ID NO: 1003485 - DNA, 33 bp, Homo sapien
agtatggtcttttatcccttaacaactttctgt

SEQ ID NO: 1003486 - DNA, 33 bp, Homo sapien
agtatggtcttttatctcttaacaactttctgt

SEQ ID NO: 1003487 - DNA, 33 bp, Homo sapien
gcaagcagctacaaaccgaacacaatatataaa

SEQ ID NO: 1003488 - DNA, 33 bp, Homo sapien
gcaagcagctacaaactgaacacaatatataaa

SEQ ID NO: 1003489 - DNA, 33 bp, Homo sapien
taggagaaaaacaacacaaagacttagaaatta

SEQ ID NO: 1003490 - DNA, 33 bp, Homo sapien
taggagaaaaacaacagaaagacttagaaatta

SEQ ID NO: 1003491 - DNA, 33 bp, Homo sapien
aaattacaaagatgatgaagttagagattagaa

SEQ ID NO: 1003492 - DNA, 33 bp, Homo sapien
aaattacaaagatgattaagttagagattagaa

SEQ ID NO: 1003493 - DNA, 33 bp, Homo sapien
aataatgtactgaacactacaacatggaagagc

SEQ ID NO: 1003494 - DNA, 33 bp, Homo sapien
aataatgtactgaacattacaacatggaagagc

SEQ ID NO: 1003495 - DNA, 33 bp, Homo sapien
ggttggaatgtgtatcacaacttgatgatgaac

SEQ ID NO: 1003496 - DNA, 33 bp, Homo sapien
ggttggaatgtgtatctcaacttgatgatgaac

SEQ ID NO: 1003497 - DNA, 33 bp, Homo sapien
cagctctagcggataacgtcctgattgctggat

SEQ ID NO: 1003498 - DNA, 33 bp, Homo sapien
cagctctagcggataatgtcctgattgctggat

SEQ ID NO: 1003499 - DNA, 33 bp, Homo sapien
ctttacagtaaatcttgaacccatgtatagttt

SEQ ID NO: 1003500 - DNA, 33 bp, Homo sapien
ctttacagtaaatctttaacccatgtatagttt

SEQ ID NO: 1003501 - DNA, 33 bp, Homo sapien
tgccgcttctttcaaagggtctggtttccatca

SEQ ID NO: 1003502 - DNA, 33 bp, Homo sapien
tgccgcttctttcaaatggtctggtttccatca

SEQ ID NO: 1003503 - DNA, 33 bp, Homo sapien
ggggtatataggtgagaatgaatggtaatacca

SEQ ID NO: 1003504 - DNA, 33 bp, Homo sapien
ggggtatataggtgaggatgaatggtaatacca

SEQ ID NO: 1003505 - DNA, 33 bp, Homo sapien
ctaaagtaatggtgttaaaaggtggtagggtcc

SEQ ID NO: 1003506 - DNA, 33 bp, Homo sapien
ctaaagtaatggtgttcaaaggtggtagggtcc

SEQ ID NO: 1003507 - DNA, 33 bp, Homo sapien
atactgtaagagcccaaggaatcaagtctgaat

SEQ ID NO: 1003508 - DNA, 33 bp, Homo sapien
atactgtaagagcccacggaatcaagtctgaat

SEQ ID NO: 1003509 - DNA, 33 bp, Homo sapien
gagaggagctattggacggcggccccctggaat

SEQ ID NO: 1003510 - DNA, 33 bp, Homo sapien
gagaggagctattggatggcggccccctggaat

SEQ ID NO: 1003511 - DNA, 33 bp, Homo sapien
ggaatttggaactaccacttaagactaagacta

SEQ ID NO: 1003512 - DNA, 33 bp, Homo sapien
ggaatttggaactaccgcttaagactaagacta

SEQ ID NO: 1003513 - DNA, 33 bp, Homo sapien
catgcatttataacaaccgaaaagttcttttgt

SEQ ID NO: 1003514 - DNA, 33 bp, Homo sapien
catgcatttataacaatcgaaaagttcttttgt

SEQ ID NO: 1003515 - DNA, 33 bp, Homo sapien
acttgtccttgtaaaactaaaaataggtcttcc

SEQ ID NO: 1003516 - DNA, 33 bp, Homo sapien
acttgtccttgtaaaagtaaaaataggtcttcc

SEQ ID NO: 1003517 - DNA, 33 bp, Homo sapien
attgaagagagatgaacggtgaggatcaagtgg

SEQ ID NO: 1003518 - DNA, 33 bp, Homo sapien
attgaagagagatgaagggtgaggatcaagtgg

SEQ ID NO: 1003519 - DNA, 33 bp, Homo sapien
tcctgaaaggcaaatacagtcagtaaaggccca

SEQ ID NO: 1003520 - DNA, 33 bp, Homo sapien
tcctgaaaggcaaatatagtcagtaaaggccca

SEQ ID NO: 1003521 - DNA, 33 bp, Homo sapien
cttcccatgttacctacaatgccatttgttttc

SEQ ID NO: 1003522 - DNA, 33 bp, Homo sapien
cttcccatgttacctagaatgccatttgttttc

SEQ ID NO: 1003523 - DNA, 33 bp, Homo sapien
tgggaagaattagtaaataaaaatcaacagaac

SEQ ID NO: 1003524 - DNA, 33 bp, Homo sapien
tgggaagaattagtaagtaaaaatcaacagaac

SEQ ID NO: 1003525 - DNA, 33 bp, Homo sapien
aagatagaggatagacaaagtgtatagattttg

SEQ ID NO: 1003526 - DNA, 33 bp, Homo sapien
aagatagaggatagaccaagtgtatagattttg

SEQ ID NO: 1003527 - DNA, 33 bp, Homo sapien
tatttaattgtttccaaccaagcatttgcatct

SEQ ID NO: 1003528 - DNA, 33 bp, Homo sapien
tatttaattgtttccagccaagcatttgcatct

SEQ ID NO: 1003529 - DNA, 33 bp, Homo sapien
ttaaattcatttggcaatcctcttgggacccca

SEQ ID NO: 1003530 - DNA, 33 bp, Homo sapien
ttaaattcatttggcactcctcttgggacccca

SEQ ID NO: 1003531 - DNA, 33 bp, Homo sapien
tagcctttagaaagaaggaggcagatttgcatg

SEQ ID NO: 1003532 - DNA, 33 bp, Homo sapien
tagcctttagaaagaatgaggcagatttgcatg

SEQ ID NO: 1003533 - DNA, 33 bp, Homo sapien
atcatttgggtgtggaaaagagtcctcctgaac

SEQ ID NO: 1003534 - DNA, 33 bp, Homo sapien
atcatttgggtgtggagaagagtcctcctgaac

SEQ ID NO: 1003535 - DNA, 33 bp, Homo sapien
atatcaagattgttcacctgggcttggaggccc

SEQ ID NO: 1003536 - DNA, 33 bp, Homo sapien
atatcaagattgttcagctgggcttggaggccc

SEQ ID NO: 1003537 - DNA, 33 bp, Homo sapien
ttacatattccctatacggattcctactgaagg

SEQ ID NO: 1003538 - DNA, 33 bp, Homo sapien
ttacatattccctatatggattcctactgaagg

SEQ ID NO: 1003539 - DNA, 33 bp, Homo sapien
ataaatatctcaagccaagagaagtttgttcat

SEQ ID NO: 1003540 - DNA, 33 bp, Homo sapien
ataaatatctcaagccgagagaagtttgttcat

SEQ ID NO: 1003541 - DNA, 33 bp, Homo sapien
gtccaatatctactcacgctgttgaggctggag

SEQ ID NO: 1003542 - DNA, 33 bp, Homo sapien
gtccaatatctactcatgctgttgaggctggag

SEQ ID NO: 1003543 - DNA, 33 bp, Homo sapien
cctaatagccaatcataaaggttctgagatgct

SEQ ID NO: 1003544 - DNA, 33 bp, Homo sapien
cctaatagccaatcatgaaggttctgagatgct

SEQ ID NO: 1003545 - DNA, 33 bp, Homo sapien
ctttgggcactgacaaccataggagagaagctg

SEQ ID NO: 1003546 - DNA, 33 bp, Homo sapien
ctttgggcactgacaagcataggagagaagctg

SEQ ID NO: 1003547 - DNA, 33 bp, Homo sapien
tcattcatggaatgtgacaaaggataccagcaa

SEQ ID NO: 1003548 - DNA, 33 bp, Homo sapien
tcattcatggaatgtgtcaaaggataccagcaa

SEQ ID NO: 1003549 - DNA, 33 bp, Homo sapien
ctgtgaaatccagaaacatggcgacaaaaatta

SEQ ID NO: 1003550 - DNA, 33 bp, Homo sapien
ctgtgaaatccagaaatatggcgacaaaaatta

SEQ ID NO: 1003551 - DNA, 33 bp, Homo sapien
gagtgaaaggtggccaactattcccttttggta

SEQ ID NO: 1003552 - DNA, 33 bp, Homo sapien
gagtgaaaggtggccagctattcccttttggta

SEQ ID NO: 1003553 - DNA, 33 bp, Homo sapien
gttattgctgcctactaaacaattttctattct

SEQ ID NO: 1003554 - DNA, 33 bp, Homo sapien
gttattgctgcctactgaacaattttctattct

SEQ ID NO: 1003555 - DNA, 33 bp, Homo sapien
tggcttgcacaagacaggcctaaagtgtcactg

SEQ ID NO: 1003556 - DNA, 33 bp, Homo sapien
tggcttgcacaagacatgcctaaagtgtcactg

SEQ ID NO: 1003557 - DNA, 33 bp, Homo sapien
gtgagggaaaaagaaacgtcctgtatagcctac

SEQ ID NO: 1003558 - DNA, 33 bp, Homo sapien
gtgagggaaaaagaaatgtcctgtatagcctac

SEQ ID NO: 1003559 - DNA, 33 bp, Homo sapien
gctgttttatacagtcaaaattcatttagatta

SEQ ID NO: 1003560 - DNA, 33 bp, Homo sapien
gctgttttatacagtcgaaattcatttagatta

SEQ ID NO: 1003561 - DNA, 33 bp, Homo sapien
catgggggtatagataaaacaatactgaccatg

SEQ ID NO: 1003562 - DNA, 33 bp, Homo sapien
catgggggtatagatagaacaatactgaccatg

SEQ ID NO: 1003563 - DNA, 33 bp, Homo sapien
aggctgtctggcttcaaatcccacctttgctac

SEQ ID NO: 1003564 - DNA, 33 bp, Homo sapien
aggctgtctggcttcagatcccacctttgctac

SEQ ID NO: 1003565 - DNA, 33 bp, Homo sapien
ttatctcattaacttaccgcaacccagtgaggt

SEQ ID NO: 1003566 - DNA, 33 bp, Homo sapien
ttatctcattaacttatcgcaacccagtgaggt

SEQ ID NO: 1003567 - DNA, 33 bp, Homo sapien
aatggctatcagaggacgggaaaactttagtag

SEQ ID NO: 1003568 - DNA, 33 bp, Homo sapien
aatggctatcagaggatgggaaaactttagtag

SEQ ID NO: 1003569 - DNA, 33 bp, Homo sapien
accactgcatttccgtcacaataggttcaatgg

SEQ ID NO: 1003570 - DNA, 33 bp, Homo sapien
accactgcatttccgtgacaataggttcaatgg

SEQ ID NO: 1003571 - DNA, 33 bp, Homo sapien
ctgtctaggcagaaagaaattgctcagctctga

SEQ ID NO: 1003572 - DNA, 33 bp, Homo sapien
ctgtctaggcagaaaggaattgctcagctctga

SEQ ID NO: 1003573 - DNA, 33 bp, Homo sapien
tactagtgatatatgacgcaggatttcagtttt

SEQ ID NO: 1003574 - DNA, 33 bp, Homo sapien
tactagtgatatatgatgcaggatttcagtttt

SEQ ID NO: 1003575 - DNA, 33 bp, Homo sapien
ggactatgggctcccaagttcttgcagcttctg

SEQ ID NO: 1003576 - DNA, 33 bp, Homo sapien
ggactatgggctcccacgttcttgcagcttctg

SEQ ID NO: 1003577 - DNA, 33 bp, Homo sapien
ttctttaaaaatgagacagtaagtaagacatta

SEQ ID NO: 1003578 - DNA, 33 bp, Homo sapien
ttctttaaaaatgagagagtaagtaagacatta

SEQ ID NO: 1003579 - DNA, 33 bp, Homo sapien
agaaccagtgataggtcaattgaaatggtccag

SEQ ID NO: 1003580 - DNA, 33 bp, Homo sapien
agaaccagtgataggttaattgaaatggtccag

SEQ ID NO: 1003581 - DNA, 33 bp, Homo sapien
atcacaattatttgagaaaaaggtccatttagt

SEQ ID NO: 1003582 - DNA, 33 bp, Homo sapien
atcacaattatttgaggaaaaggtccatttagt

SEQ ID NO: 1003583 - DNA, 33 bp, Homo sapien
gttcttgtttcataaaaagtcaagagttatagt

SEQ ID NO: 1003584 - DNA, 33 bp, Homo sapien
gttcttgtttcataaagagtcaagagttatagt

SEQ ID NO: 1003585 - DNA, 33 bp, Homo sapien
aggttcctcatttagcccatttatttccttctc

SEQ ID NO: 1003586 - DNA, 33 bp, Homo sapien
aggttcctcatttagctcatttatttccttctc

SEQ ID NO: 1003587 - DNA, 33 bp, Homo sapien
ctggcctgtggctctgcagttttagtgtgactg

SEQ ID NO: 1003588 - DNA, 33 bp, Homo sapien
ctggcctgtggctctgtagttttagtgtgactg

SEQ ID NO: 1003589 - DNA, 33 bp, Homo sapien
tttaatcctgactcagacacttggtaactgcat

SEQ ID NO: 1003590 - DNA, 33 bp, Homo sapien
tttaatcctgactcagccacttggtaactgcat

SEQ ID NO: 1003591 - DNA, 33 bp, Homo sapien
gaaatactggtactgaagttctgagactgtttt

SEQ ID NO: 1003592 - DNA, 33 bp, Homo sapien
gaaatactggtactgaggttctgagactgtttt

SEQ ID NO: 1003593 - DNA, 33 bp, Homo sapien
atgagtctaggtgagtcaataagtagtgagtga

SEQ ID NO: 1003594 - DNA, 33 bp, Homo sapien
atgagtctaggtgagttaataagtagtgagtga

SEQ ID NO: 1003595 - DNA, 33 bp, Homo sapien
ctatttctcaagatagacaattcaggagaaata

SEQ ID NO: 1003596 - DNA, 33 bp, Homo sapien
ctatttctcaagataggcaattcaggagaaata

SEQ ID NO: 1003597 - DNA, 33 bp, Homo sapien
tcatcagcctctaaaaaggtgattgaagtcatt

SEQ ID NO: 1003598 - DNA, 33 bp, Homo sapien
tcatcagcctctaaaagggtgattgaagtcatt

SEQ ID NO: 1003599 - DNA, 33 bp, Homo sapien
tatcaatccctttggaacatgaagtggccaaag

SEQ ID NO: 1003600 - DNA, 33 bp, Homo sapien
tatcaatccctttggaccatgaagtggccaaag

SEQ ID NO: 1003601 - DNA, 33 bp, Homo sapien
ggtgttgagactcataataactcagtaacacct

SEQ ID NO: 1003602 - DNA, 33 bp, Homo sapien
ggtgttgagactcatagtaactcagtaacacct

SEQ ID NO: 1003603 - DNA, 33 bp, Homo sapien
aaagatagtctcagaacgttatctccaacccaa

SEQ ID NO: 1003604 - DNA, 33 bp, Homo sapien
aaagatagtctcagaaggttatctccaacccaa

SEQ ID NO: 1003605 - DNA, 33 bp, Homo sapien
tacacatcatgaccaacgtaataatgccatttg

SEQ ID NO: 1003606 - DNA, 33 bp, Homo sapien
tacacatcatgaccaatgtaataatgccatttg

SEQ ID NO: 1003607 - DNA, 33 bp, Homo sapien
acataaatagtggataataaccagcatcttcct

SEQ ID NO: 1003608 - DNA, 33 bp, Homo sapien
acataaatagtggatagtaaccagcatcttcct

SEQ ID NO: 1003609 - DNA, 33 bp, Homo sapien
cagagagcttaaacaacatattttcagtacaca

SEQ ID NO: 1003610 - DNA, 33 bp, Homo sapien
cagagagcttaaacaagatattttcagtacaca

SEQ ID NO: 1003611 - DNA, 33 bp, Homo sapien
ccatataatccaactaccatggtaaggccagaa

SEQ ID NO: 1003612 - DNA, 33 bp, Homo sapien
ccatataatccaactatcatggtaaggccagaa

SEQ ID NO: 1003613 - DNA, 33 bp, Homo sapien
ttacctaagacctacacgaggaacctgcttaac

SEQ ID NO: 1003614 - DNA, 33 bp, Homo sapien
ttacctaagacctacatgaggaacctgcttaac

SEQ ID NO: 1003615 - DNA, 33 bp, Homo sapien
gggacaaaggcctacacattagaagtggcagga

SEQ ID NO: 1003616 - DNA, 33 bp, Homo sapien
gggacaaaggcctacagattagaagtggcagga

SEQ ID NO: 1003617 - DNA, 33 bp, Homo sapien
cctgttctgcactttaacatgagatcacattct

SEQ ID NO: 1003618 - DNA, 33 bp, Homo sapien
cctgttctgcactttagcatgagatcacattct

SEQ ID NO: 1003619 - DNA, 33 bp, Homo sapien
ctagtctcgtttgttcaattttgtcccaatttc

SEQ ID NO: 1003620 - DNA, 33 bp, Homo sapien
ctagtctcgtttgttcgattttgtcccaatttc

SEQ ID NO: 1003621 - DNA, 33 bp, Homo sapien
atcatgttgctcaagaagaaaaccatcatacat

SEQ ID NO: 1003622 - DNA, 33 bp, Homo sapien
atcatgttgctcaagaggaaaaccatcatacat

SEQ ID NO: 1003623 - DNA, 33 bp, Homo sapien
aactagaattttatcaaggaaagaatctttgca

SEQ ID NO: 1003624 - DNA, 33 bp, Homo sapien
aactagaattttatcacggaaagaatctttgca

SEQ ID NO: 1003625 - DNA, 33 bp, Homo sapien
aagctcttccattatacgtcctgctatttgtag

SEQ ID NO: 1003626 - DNA, 33 bp, Homo sapien
aagctcttccattatatgtcctgctatttgtag

SEQ ID NO: 1003627 - DNA, 33 bp, Homo sapien
agcacaatggtttagaagccaagtgtgtctgac

SEQ ID NO: 1003628 - DNA, 33 bp, Homo sapien
agcacaatggtttagacgccaagtgtgtctgac

SEQ ID NO: 1003629 - DNA, 33 bp, Homo sapien
ttaccatccatcaaatcataacagcttttctag

SEQ ID NO: 1003630 - DNA, 33 bp, Homo sapien
ttaccatccatcaaattataacagcttttctag

SEQ ID NO: 1003631 - DNA, 33 bp, Homo sapien
agttccttcttgctcaatcagtctttgttctat

SEQ ID NO: 1003632 - DNA, 33 bp, Homo sapien
agttccttcttgctcagtcagtctttgttctat

SEQ ID NO: 1003633 - DNA, 33 bp, Homo sapien
aaatgttaatcttattcaaaaacaccctcacag

SEQ ID NO: 1003634 - DNA, 33 bp, Homo sapien
aaatgttaatcttattgaaaaacaccctcacag

SEQ ID NO: 1003635 - DNA, 33 bp, Homo sapien
cccccaataacaggaaagagattcctttgttcc

SEQ ID NO: 1003636 - DNA, 33 bp, Homo sapien
cccccaataacaggaaggagattcctttgttcc

SEQ ID NO: 1003637 - DNA, 33 bp, Homo sapien
caaattatcaatcaaaagtgaaggcagaataaa

SEQ ID NO: 1003638 - DNA, 33 bp, Homo sapien
caaattatcaatcaaatgtgaaggcagaataaa

SEQ ID NO: 1003639 - DNA, 33 bp, Homo sapien
tccttactagttggcaaatagcagctctactaa

SEQ ID NO: 1003640 - DNA, 33 bp, Homo sapien
tccttactagttggcacatagcagctctactaa

SEQ ID NO: 1003641 - DNA, 33 bp, Homo sapien
tcctgagatggtctagcatagaaggcctcttgg

SEQ ID NO: 1003642 - DNA, 33 bp, Homo sapien
tcctgagatggtctaggatagaaggcctcttgg

SEQ ID NO: 1003643 - DNA, 33 bp, Homo sapien
gaaggtaaaagagcacagtgaatgtattagtcc

SEQ ID NO: 1003644 - DNA, 33 bp, Homo sapien
gaaggtaaaagagcacggtgaatgtattagtcc

SEQ ID NO: 1003645 - DNA, 33 bp, Homo sapien
ttatatttctggcataccaaattattatagttc

SEQ ID NO: 1003646 - DNA, 33 bp, Homo sapien
ttatatttctggcatagcaaattattatagttc

SEQ ID NO: 1003647 - DNA, 33 bp, Homo sapien
ctgggatggcacaccacagaaactaacctttga

SEQ ID NO: 1003648 - DNA, 33 bp, Homo sapien
ctgggatggcacaccagagaaactaacctttga

SEQ ID NO: 1003649 - DNA, 33 bp, Homo sapien
gaagaagtcggccacactcagatcttttgaagg

SEQ ID NO: 1003650 - DNA, 33 bp, Homo sapien
gaagaagtcggccacattcagatcttttgaagg

SEQ ID NO: 1003651 - DNA, 33 bp, Homo sapien
agatcttggcattttgaaaatggaaaaggaaaa

SEQ ID NO: 1003652 - DNA, 33 bp, Homo sapien
agatcttggcattttgtaaatggaaaaggaaaa

SEQ ID NO: 1003653 - DNA, 33 bp, Homo sapien
cactgcctgagatagaagtttgcatcttattgg

SEQ ID NO: 1003654 - DNA, 33 bp, Homo sapien
cactgcctgagatagacgtttgcatcttattgg

SEQ ID NO: 1003655 - DNA, 33 bp, Homo sapien
ataaattctcaactccataaaagtagtaaagta

SEQ ID NO: 1003656 - DNA, 33 bp, Homo sapien
ataaattctcaactccgtaaaagtagtaaagta

SEQ ID NO: 1003657 - DNA, 33 bp, Homo sapien
ctgtcattttgctgcaagttttttatatgccat

SEQ ID NO: 1003658 - DNA, 33 bp, Homo sapien
ctgtcattttgctgcatgttttttatatgccat

SEQ ID NO: 1003659 - DNA, 33 bp, Homo sapien
caaggtatcattttcccaggaagtagagtacta

SEQ ID NO: 1003660 - DNA, 33 bp, Homo sapien
caaggtatcattttcctaggaagtagagtacta

SEQ ID NO: 1003661 - DNA, 33 bp, Homo sapien
cacctgggctgcccagaacaatcacacacaacc

SEQ ID NO: 1003662 - DNA, 33 bp, Homo sapien
cacctgggctgcccaggacaatcacacacaacc

SEQ ID NO: 1003663 - DNA, 33 bp, Homo sapien
ggctggtaaatagttacgctgggtcttaagctt

SEQ ID NO: 1003664 - DNA, 33 bp, Homo sapien
ggctggtaaatagttatgctgggtcttaagctt

SEQ ID NO: 1003665 - DNA, 33 bp, Homo sapien
cactattaaacattagccattattaccaaagat

SEQ ID NO: 1003666 - DNA, 33 bp, Homo sapien
cactattaaacattagtcattattaccaaagat

SEQ ID NO: 1003667 - DNA, 33 bp, Homo sapien
gacttgggatcttgtacgagtttatctgcaaag

SEQ ID NO: 1003668 - DNA, 33 bp, Homo sapien
gacttgggatcttgtatgagtttatctgcaaag

SEQ ID NO: 1003669 - DNA, 33 bp, Homo sapien
ttgaaataaaaggccaaagaaagttagtaagta

SEQ ID NO: 1003670 - DNA, 33 bp, Homo sapien
ttgaaataaaaggccatagaaagttagtaagta

SEQ ID NO: 1003671 - DNA, 33 bp, Homo sapien
aagagttgttatcagaggatctcttagtgaagt

SEQ ID NO: 1003672 - DNA, 33 bp, Homo sapien
aagagttgttatcagatgatctcttagtgaagt

SEQ ID NO: 1003673 - DNA, 33 bp, Homo sapien
cacacttctttgagtacgctagggcatttaaca

SEQ ID NO: 1003674 - DNA, 33 bp, Homo sapien
cacacttctttgagtaggctagggcatttaaca

SEQ ID NO: 1003675 - DNA, 33 bp, Homo sapien
aacaatcatctttcaaaacaatttatctcagca

SEQ ID NO: 1003676 - DNA, 33 bp, Homo sapien
aacaatcatctttcaatacaatttatctcagca

SEQ ID NO: 1003677 - DNA, 33 bp, Homo sapien
ttaaatgcttcagacagtgtattggcttgctag

SEQ ID NO: 1003678 - DNA, 33 bp, Homo sapien
ttaaatgcttcagacattgtattggcttgctag

SEQ ID NO: 1003679 - DNA, 33 bp, Homo sapien
ggcacagggtctaggacaagtacatcacttctg

SEQ ID NO: 1003680 - DNA, 33 bp, Homo sapien
ggcacagggtctaggagaagtacatcacttctg

SEQ ID NO: 1003681 - DNA, 33 bp, Homo sapien
ttgcatacatagctacaagtagaattgttccta

SEQ ID NO: 1003682 - DNA, 33 bp, Homo sapien
ttgcatacatagctacgagtagaattgttccta

SEQ ID NO: 1003683 - DNA, 33 bp, Homo sapien
ctggatagggttctaaaagagccagtggaagcc

SEQ ID NO: 1003684 - DNA, 33 bp, Homo sapien
ctggatagggttctaagagagccagtggaagcc

SEQ ID NO: 1003685 - DNA, 33 bp, Homo sapien
caataggaatgacaaactgcagaaggcagagga

SEQ ID NO: 1003686 - DNA, 33 bp, Homo sapien
caataggaatgacaaattgcagaaggcagagga

SEQ ID NO: 1003687 - DNA, 33 bp, Homo sapien
tgagcaaccatattaactgctttttagccaatg

SEQ ID NO: 1003688 - DNA, 33 bp, Homo sapien
tgagcaaccatattaagtgctttttagccaatg

SEQ ID NO: 1003689 - DNA, 33 bp, Homo sapien
agaatatgcatgcatccaggactagcgactgca

SEQ ID NO: 1003690 - DNA, 33 bp, Homo sapien
agaatatgcatgcatctaggactagcgactgca

SEQ ID NO: 1003691 - DNA, 33 bp, Homo sapien
actggctttgagacagcagttaagaaacaagac

SEQ ID NO: 1003692 - DNA, 33 bp, Homo sapien
actggctttgagacagtagttaagaaacaagac

SEQ ID NO: 1003693 - DNA, 33 bp, Homo sapien
tgacaggctttttaaacccagattatccactcc

SEQ ID NO: 1003694 - DNA, 33 bp, Homo sapien
tgacaggctttttaaatccagattatccactcc

SEQ ID NO: 1003695 - DNA, 33 bp, Homo sapien
ataaaactgctggaaactgaaagaacatttttc

SEQ ID NO: 1003696 - DNA, 33 bp, Homo sapien
ataaaactgctggaaattgaaagaacatttttc

SEQ ID NO: 1003697 - DNA, 33 bp, Homo sapien
aagctagctctaggaaaaagggcagtctctcct

SEQ ID NO: 1003698 - DNA, 33 bp, Homo sapien
aagctagctctaggaagaagggcagtctctcct

SEQ ID NO: 1003699 - DNA, 33 bp, Homo sapien
agataagggaggtagtcaagtgcatggactcgg

SEQ ID NO: 1003700 - DNA, 33 bp, Homo sapien
agataagggaggtagttaagtgcatggactcgg

SEQ ID NO: 1003701 - DNA, 33 bp, Homo sapien
gcagttcagaggaaaaatacttaggcctgtatg

SEQ ID NO: 1003702 - DNA, 33 bp, Homo sapien
gcagttcagaggaaaactacttaggcctgtatg

SEQ ID NO: 1003703 - DNA, 33 bp, Homo sapien
actctgtcgcagcaaaacaaaatgtaagtttca

SEQ ID NO: 1003704 - DNA, 33 bp, Homo sapien
actctgtcgcagcaaatcaaaatgtaagtttca

SEQ ID NO: 1003705 - DNA, 33 bp, Homo sapien
ccaaccatgctgggtaggacaaacaatcagaga

SEQ ID NO: 1003706 - DNA, 33 bp, Homo sapien
ccaaccatgctgggtatgacaaacaatcagaga

SEQ ID NO: 1003707 - DNA, 33 bp, Homo sapien
ggtttcaaaccacaaaatgacagagggtagaaa

SEQ ID NO: 1003708 - DNA, 33 bp, Homo sapien
ggtttcaaaccacaaactgacagagggtagaaa

SEQ ID NO: 1003709 - DNA, 33 bp, Homo sapien
tttacaatatgggaacaatcataatccaggtct

SEQ ID NO: 1003710 - DNA, 33 bp, Homo sapien
tttacaatatgggaactatcataatccaggtct

SEQ ID NO: 1003711 - DNA, 33 bp, Homo sapien
atctattaaactgtctcactcaagagcccaaga

SEQ ID NO: 1003712 - DNA, 33 bp, Homo sapien
atctattaaactgtctgactcaagagcccaaga

SEQ ID NO: 1003713 - DNA, 33 bp, Homo sapien
ctacggtttagctcaacagaagttgcgtgtgtg

SEQ ID NO: 1003714 - DNA, 33 bp, Homo sapien
ctacggtttagctcaatagaagttgcgtgtgtg

SEQ ID NO: 1003715 - DNA, 33 bp, Homo sapien
gagcctacaagtcatacacagttagaggaaata

SEQ ID NO: 1003716 - DNA, 33 bp, Homo sapien
gagcctacaagtcatagacagttagaggaaata

SEQ ID NO: 1003717 - DNA, 33 bp, Homo sapien
tggtacttgctcctcaatgaaaaattgctgttt

SEQ ID NO: 1003718 - DNA, 33 bp, Homo sapien
tggtacttgctcctcagtgaaaaattgctgttt

SEQ ID NO: 1003719 - DNA, 33 bp, Homo sapien
gaaatatgcatacctaactttgagagtataaag

SEQ ID NO: 1003720 - DNA, 33 bp, Homo sapien
gaaatatgcatacctagctttgagagtataaag

SEQ ID NO: 1003721 - DNA, 33 bp, Homo sapien
aaatgtttcaaagttgaaaaaagacagagtacc

SEQ ID NO: 1003722 - DNA, 33 bp, Homo sapien
aaatgtttcaaagttgcaaaaagacagagtacc

SEQ ID NO: 1003723 - DNA, 33 bp, Homo sapien
actcttaaaaagctcaatctatcaaaggtaggc

SEQ ID NO: 1003724 - DNA, 33 bp, Homo sapien
actcttaaaaagctcagtctatcaaaggtaggc

SEQ ID NO: 1003725 - DNA, 33 bp, Homo sapien
gaacctggcatattccaatagtctccattttcc

SEQ ID NO: 1003726 - DNA, 33 bp, Homo sapien
gaacctggcatattccgatagtctccattttcc

SEQ ID NO: 1003727 - DNA, 33 bp, Homo sapien
gtacacagtaggataacagcacacatagcattg

SEQ ID NO: 1003728 - DNA, 33 bp, Homo sapien
gtacacagtaggataatagcacacatagcattg

SEQ ID NO: 1003729 - DNA, 33 bp, Homo sapien
acacacacacctttcaccaagtcctatgtgtct

SEQ ID NO: 1003730 - DNA, 33 bp, Homo sapien
acacacacacctttcatcaagtcctatgtgtct

SEQ ID NO: 1003731 - DNA, 33 bp, Homo sapien
aaaatgcacagtggtagatcacaaacaagaatg

SEQ ID NO: 1003732 - DNA, 33 bp, Homo sapien
aaaatgcacagtggtatatcacaaacaagaatg

SEQ ID NO: 1003733 - DNA, 33 bp, Homo sapien
ggcagaaacaaacacaactgtatcagcctttat

SEQ ID NO: 1003734 - DNA, 33 bp, Homo sapien
ggcagaaacaaacacagctgtatcagcctttat

SEQ ID NO: 1003735 - DNA, 33 bp, Homo sapien
ttgctagtgttagtagaattaattgtgcactga

SEQ ID NO: 1003736 - DNA, 33 bp, Homo sapien
ttgctagtgttagtaggattaattgtgcactga

SEQ ID NO: 1003737 - DNA, 33 bp, Homo sapien
agaagtttagaatacaagcaatatatcatttgt

SEQ ID NO: 1003738 - DNA, 33 bp, Homo sapien
agaagtttagaatacacgcaatatatcatttgt

SEQ ID NO: 1003739 - DNA, 33 bp, Homo sapien
tcatattggatagtaaagagcagaaatgggcac

SEQ ID NO: 1003740 - DNA, 33 bp, Homo sapien
tcatattggatagtaaggagcagaaatgggcac

SEQ ID NO: 1003741 - DNA, 33 bp, Homo sapien
gtttcttcagccagtcaaaggcaaaactgatga

SEQ ID NO: 1003742 - DNA, 33 bp, Homo sapien
gtttcttcagccagtcgaaggcaaaactgatga

SEQ ID NO: 1003743 - DNA, 33 bp, Homo sapien
gcattcttccgatcaaaatgcttttattagaat

SEQ ID NO: 1003744 - DNA, 33 bp, Homo sapien
gcattcttccgatcaagatgcttttattagaat

SEQ ID NO: 1003745 - DNA, 33 bp, Homo sapien
acacagaaaaagaggaaaacactcagaaatgtg

SEQ ID NO: 1003746 - DNA, 33 bp, Homo sapien
acacagaaaaagaggagaacactcagaaatgtg

SEQ ID NO: 1003747 - DNA, 33 bp, Homo sapien
aaacctttgcctcctacaaaagtagacagctgt

SEQ ID NO: 1003748 - DNA, 33 bp, Homo sapien
aaacctttgcctcctataaaagtagacagctgt

SEQ ID NO: 1003749 - DNA, 33 bp, Homo sapien
catccttcactccagaccagagagctttctttt

SEQ ID NO: 1003750 - DNA, 33 bp, Homo sapien
catccttcactccagatcagagagctttctttt

SEQ ID NO: 1003751 - DNA, 33 bp, Homo sapien
gcaggaaaccaaaggacgcggccagaacatcca

SEQ ID NO: 1003752 - DNA, 33 bp, Homo sapien
gcaggaaaccaaaggatgcggccagaacatcca

SEQ ID NO: 1003753 - DNA, 33 bp, Homo sapien
ttatccacacaccacaaagggagagaagtgtct

SEQ ID NO: 1003754 - DNA, 33 bp, Homo sapien
ttatccacacaccacagagggagagaagtgtct

SEQ ID NO: 1003755 - DNA, 33 bp, Homo sapien
catagagacctagcctcaaaggatcttattatt

SEQ ID NO: 1003756 - DNA, 33 bp, Homo sapien
catagagacctagcctgaaaggatcttattatt

SEQ ID NO: 1003757 - DNA, 33 bp, Homo sapien
gtaggagctgatagcacgaaagtcaagctttag

SEQ ID NO: 1003758 - DNA, 33 bp, Homo sapien
gtaggagctgatagcatgaaagtcaagctttag

SEQ ID NO: 1003759 - DNA, 33 bp, Homo sapien
tgtggcaatgaaaggacacagtgctctcaattg

SEQ ID NO: 1003760 - DNA, 33 bp, Homo sapien
tgtggcaatgaaaggatacagtgctctcaattg

SEQ ID NO: 1003761 - DNA, 33 bp, Homo sapien
tgaatgccttacgatacacagaaatgagctact

SEQ ID NO: 1003762 - DNA, 33 bp, Homo sapien
tgaatgccttacgatatacagaaatgagctact

SEQ ID NO: 1003763 - DNA, 33 bp, Homo sapien
tgagtattacatgttacattcttggatgctttc

SEQ ID NO: 1003764 - DNA, 33 bp, Homo sapien
tgagtattacatgttagattcttggatgctttc

SEQ ID NO: 1003765 - DNA, 33 bp, Homo sapien
aaatgatgctgtaaaaaatatttgctgatgtgg

SEQ ID NO: 1003766 - DNA, 33 bp, Homo sapien
aaatgatgctgtaaaacatatttgctgatgtgg

SEQ ID NO: 1003767 - DNA, 33 bp, Homo sapien
accaataccacaatgaaaaagaagccttcatca

SEQ ID NO: 1003768 - DNA, 33 bp, Homo sapien
accaataccacaatgataaagaagccttcatca

SEQ ID NO: 1003769 - DNA, 33 bp, Homo sapien
aacaggagcttttgaaatacccaagtacatgct

SEQ ID NO: 1003770 - DNA, 33 bp, Homo sapien
aacaggagcttttgaagtacccaagtacatgct

SEQ ID NO: 1003771 - DNA, 33 bp, Homo sapien
ccttgtaggcgagtccagcttcaattatgatcc

SEQ ID NO: 1003772 - DNA, 33 bp, Homo sapien
ccttgtaggcgagtccggcttcaattatgatcc

SEQ ID NO: 1003773 - DNA, 33 bp, Homo sapien
cccatggtacctctgaatataaccttacttgaa

SEQ ID NO: 1003774 - DNA, 33 bp, Homo sapien
cccatggtacctctgagtataaccttacttgaa

SEQ ID NO: 1003775 - DNA, 33 bp, Homo sapien
ggaagctctgaaggagaatcagttccctgcctc

SEQ ID NO: 1003776 - DNA, 33 bp, Homo sapien
ggaagctctgaaggaggatcagttccctgcctc

SEQ ID NO: 1003777 - DNA, 33 bp, Homo sapien
tcttgatttctgactacggaactgggagtgaac

SEQ ID NO: 1003778 - DNA, 33 bp, Homo sapien
tcttgatttctgactatggaactgggagtgaac

SEQ ID NO: 1003779 - DNA, 33 bp, Homo sapien
actaaccgcgtcagagactccctcactcttcgc

SEQ ID NO: 1003780 - DNA, 33 bp, Homo sapien
actaaccgcgtcagagcctccctcactcttcgc

SEQ ID NO: 1003781 - DNA, 33 bp, Homo sapien
gccgctgccctgaccacatccttacacgtggca

SEQ ID NO: 1003782 - DNA, 33 bp, Homo sapien
gccgctgccctgaccatatccttacacgtggca

SEQ ID NO: 1003783 - DNA, 33 bp, Homo sapien
aaatgctgagtttgaaatgagaatcagtgcagg

SEQ ID NO: 1003784 - DNA, 33 bp, Homo sapien
aaatgctgagtttgaagtgagaatcagtgcagg

SEQ ID NO: 1003785 - DNA, 33 bp, Homo sapien
ttaggacacagtcttcacttcttgttcttgctc

SEQ ID NO: 1003786 - DNA, 33 bp, Homo sapien
ttaggacacagtcttcccttcttgttcttgctc

SEQ ID NO: 1003787 - DNA, 33 bp, Homo sapien
ctttactctgcaatgaagacatttaacactcct

SEQ ID NO: 1003788 - DNA, 33 bp, Homo sapien
ctttactctgcaatgaggacatttaacactcct

SEQ ID NO: 1003789 - DNA, 33 bp, Homo sapien
caggcattcacatgaaaccaagtttgagtaatg

SEQ ID NO: 1003790 - DNA, 33 bp, Homo sapien
caggcattcacatgaagccaagtttgagtaatg

SEQ ID NO: 1003791 - DNA, 33 bp, Homo sapien
ctgaattctggctatgaataatatggcataaat

SEQ ID NO: 1003792 - DNA, 33 bp, Homo sapien
ctgaattctggctatggataatatggcataaat

SEQ ID NO: 1003793 - DNA, 33 bp, Homo sapien
tccactcccatagaaaccctctggtgataatat

SEQ ID NO: 1003794 - DNA, 33 bp, Homo sapien
tccactcccatagaaatcctctggtgataatat

SEQ ID NO: 1003795 - DNA, 33 bp, Homo sapien
acaaattgatgggcagactactaaagatgtaac

SEQ ID NO: 1003796 - DNA, 33 bp, Homo sapien
acaaattgatgggcaggctactaaagatgtaac

SEQ ID NO: 1003797 - DNA, 33 bp, Homo sapien
ctctctgaagtcagggaattggttgaaaagctg

SEQ ID NO: 1003798 - DNA, 33 bp, Homo sapien
ctctctgaagtcaggggattggttgaaaagctg

SEQ ID NO: 1003799 - DNA, 33 bp, Homo sapien
aatggtaaaccctacacatctaaaaccactctg

SEQ ID NO: 1003800 - DNA, 33 bp, Homo sapien
aatggtaaaccctacatatctaaaaccactctg

SEQ ID NO: 1003801 - DNA, 33 bp, Homo sapien
cacacaaacacacaaaataatagccaggtgtgg

SEQ ID NO: 1003802 - DNA, 33 bp, Homo sapien
cacacaaacacacaaagtaatagccaggtgtgg

SEQ ID NO: 1003803 - DNA, 33 bp, Homo sapien
tgagtgaactttggaaatgactctgatacctgt

SEQ ID NO: 1003804 - DNA, 33 bp, Homo sapien
tgagtgaactttggaattgactctgatacctgt

SEQ ID NO: 1003805 - DNA, 33 bp, Homo sapien
tcaatttccattgctgcattgttattatcaagc

SEQ ID NO: 1003806 - DNA, 33 bp, Homo sapien
tcaatttccattgctggattgttattatcaagc

SEQ ID NO: 1003807 - DNA, 33 bp, Homo sapien; identical to SEQ ID NO: 1003805

SEQ ID NO: 1003808 - DNA, 33 bp, Homo sapien; identical to SEQ ID NO: 1003806

SEQ ID NO: 1003809 - DNA, 33 bp, Homo sapien
gatctaggatgtaaaccgcaagtgtggcaggcc

SEQ ID NO: 1003810 - DNA, 33 bp, Homo sapien
gatctaggatgtaaactgcaagtgtggcaggcc

SEQ ID NO: 1003811 - DNA, 33 bp, Homo sapien
acaagataatgcaggaataaacagctgcataca

SEQ ID NO: 1003812 - DNA, 33 bp, Homo sapien
acaagataatgcaggagtaaacagctgcataca

SEQ ID NO: 1003813 - DNA, 33 bp, Homo sapien
ggcaaacatagttggaggagagagggaaatgcc

SEQ ID NO: 1003814 - DNA, 33 bp, Homo sapien
ggcaaacatagttggatgagagagggaaatgcc

SEQ ID NO: 1003815 - DNA, 33 bp, Homo sapien
tttaacacttattcataataaacactcatggaa

SEQ ID NO: 1003816 - DNA, 33 bp, Homo sapien
tttaacacttattcatgataaacactcatggaa

SEQ ID NO: 1003817 - DNA, 33 bp, Homo sapien
gagtctagacgggaaaatctgtaagcaaaatat

SEQ ID NO: 1003818 - DNA, 33 bp, Homo sapien
gagtctagacgggaaactctgtaagcaaaatat

SEQ ID NO: 1003819 - DNA, 33 bp, Homo sapien
aaaaaaatcgctatcaagtccatttatttgtgt

SEQ ID NO: 1003820 - DNA, 33 bp, Homo sapien
aaaaaaatcgctatcacgtccatttatttgtgt

SEQ ID NO: 1003821 - DNA, 33 bp, Homo sapien
gtttcaacagagcagacggagaaagttacgtca

SEQ ID NO: 1003822 - DNA, 33 bp, Homo sapien
gtttcaacagagcagatggagaaagttacgtca

SEQ ID NO: 1003823 - DNA, 33 bp, Homo sapien
tgaaaaaacttgctgtgaaaccatgcacgcacg

SEQ ID NO: 1003824 - DNA, 33 bp, Homo sapien
tgaaaaaacttgctgttaaaccatgcacgcacg

SEQ ID NO: 1003825 - DNA, 33 bp, Homo sapien
cacataaaaaacataactgaagatcgaattggc

SEQ ID NO: 1003826 - DNA, 33 bp, Homo sapien
cacataaaaaacataattgaagatcgaattggc

SEQ ID NO: 1003827 - DNA, 33 bp, Homo sapien
agatgttgcctaaataaatctctaacaaaagcc

SEQ ID NO: 1003828 - DNA, 33 bp, Homo sapien
agatgttgcctaaatacatctctaacaaaagcc

SEQ ID NO: 1003829 - DNA, 33 bp, Homo sapien
agccagcatgataaggcagtcctctctacttta

SEQ ID NO: 1003830 - DNA, 33 bp, Homo sapien
agccagcatgataaggtagtcctctctacttta

SEQ ID NO: 1003831 - DNA, 33 bp, Homo sapien
gtagggatgctataaaagccccgctgttactag

SEQ ID NO: 1003832 - DNA, 33 bp, Homo sapien
gtagggatgctataaaggccccgctgttactag

SEQ ID NO: 1003833 - DNA, 33 bp, Homo sapien
agagaattagcaaaaaacactgagaatcaggag

SEQ ID NO: 1003834 - DNA, 33 bp, Homo sapien
agagaattagcaaaaaccactgagaatcaggag

SEQ ID NO: 1003835 - DNA, 33 bp, Homo sapien
gaccaggcagccaagaaacgcggagacagacta

SEQ ID NO: 1003836 - DNA, 33 bp, Homo sapien
gaccaggcagccaagagacgcggagacagacta

SEQ ID NO: 1003837 - DNA, 33 bp, Homo sapien
ccatgaggaagcccaaaaagcctgtaaaccctg

SEQ ID NO: 1003838 - DNA, 33 bp, Homo sapien
ccatgaggaagcccaagaagcctgtaaaccctg

SEQ ID NO: 1003839 - DNA, 33 bp, Homo sapien
ttgttcagggaggcaccgctttaagaattaccc

SEQ ID NO: 1003840 - DNA, 33 bp, Homo sapien
ttgttcagggaggcactgctttaagaattaccc

SEQ ID NO: 1003841 - DNA, 33 bp, Homo sapien
ctactgagaagcttaaccaaggacaaatacaat

SEQ ID NO: 1003842 - DNA, 33 bp, Homo sapien
ctactgagaagcttaatcaaggacaaatacaat

SEQ ID NO: 1003843 - DNA, 33 bp, Homo sapien
ccgtgctggttccccaatagcctaggacaactc

SEQ ID NO: 1003844 - DNA, 33 bp, Homo sapien
ccgtgctggttccccagtagcctaggacaactc

SEQ ID NO: 1003845 - DNA, 33 bp, Homo sapien
tcgtgggatgaatacacgattaagagcttacct

SEQ ID NO: 1003846 - DNA, 33 bp, Homo sapien
tcgtgggatgaatacatgattaagagcttacct

SEQ ID NO: 1003847 - DNA, 33 bp, Homo sapien
ggtaacggaaaatggcactaaggccctaagttc

SEQ ID NO: 1003848 - DNA, 33 bp, Homo sapien
ggtaacggaaaatggcgctaaggccctaagttc

SEQ ID NO: 1003849 - DNA, 33 bp, Homo sapien
gttaacaacaacataaaataactgtgagactaa

SEQ ID NO: 1003850 - DNA, 33 bp, Homo sapien
gttaacaacaacataagataactgtgagactaa

SEQ ID NO: 1003851 - DNA, 33 bp, Homo sapien
actgcgagccgataaacttctgttcattataaa

SEQ ID NO: 1003852 - DNA, 33 bp, Homo sapien
actgcgagccgataaatttctgttcattataaa

SEQ ID NO: 1003853 - DNA, 33 bp, Homo sapien
actgaagtggatatacgaaccttgctaacttca

SEQ ID NO: 1003854 - DNA, 33 bp, Homo sapien
actgaagtggatatactaaccttgctaacttca

SEQ ID NO: 1003855 - DNA, 33 bp, Homo sapien
gggtccgggatacaaaacttggagtcagttcat

SEQ ID NO: 1003856 - DNA, 33 bp, Homo sapien
gggtccgggatacaaagcttggagtcagttcat

SEQ ID NO: 1003857 - DNA, 33 bp, Homo sapien
gttctttttaataagacgtcagtactcaaagag

SEQ ID NO: 1003858 - DNA, 33 bp, Homo sapien
gttctttttaataagatgtcagtactcaaagag

SEQ ID NO: 1003859 - DNA, 33 bp, Homo sapien
cgcaaaaaccatatacaataccggctatattga

SEQ ID NO: 1003860 - DNA, 33 bp, Homo sapien
cgcaaaaaccatatacgataccggctatattga

SEQ ID NO: 1003861 - DNA, 33 bp, Homo sapien
tcaagacaatttaataagcaaactttccaatta

SEQ ID NO: 1003862 - DNA, 33 bp, Homo sapien
tcaagacaatttaatacgcaaactttccaatta

SEQ ID NO: 1003863 - DNA, 33 bp, Homo sapien
tctcatccatcttctcgccttggcaaccatgtc

SEQ ID NO: 1003864 - DNA, 33 bp, Homo sapien
tctcatccatcttctctccttggcaaccatgtc

SEQ ID NO: 1003865 - DNA, 33 bp, Homo sapien
tccatcttgttccaccagcctgctgaggccagg

SEQ ID NO: 1003866 - DNA, 33 bp, Homo sapien
tccatcttgttccacctgcctgctgaggccagg

SEQ ID NO: 1003867 - DNA, 33 bp, Homo sapien
actcatttctctctcacaagtccaagcagcttt

SEQ ID NO: 1003868 - DNA, 33 bp, Homo sapien
actcatttctctctcagaagtccaagcagcttt

SEQ ID NO: 1003869 - DNA, 33 bp, Homo sapien
ctccattaatcgttagcacatctacccagttat

SEQ ID NO: 1003870 - DNA, 33 bp, Homo sapien
ctccattaatcgttaggacatctacccagttat

SEQ ID NO: 1003871 - DNA, 33 bp, Homo sapien
ttatgcagtgatattgacaagtctacagaaacc

SEQ ID NO: 1003872 - DNA, 33 bp, Homo sapien
ttatgcagtgatattgtcaagtctacagaaacc

SEQ ID NO: 1003873 - DNA, 33 bp, Homo sapien
ttcactttcgcaacctcaccatcaactttgtag

SEQ ID NO: 1003874 - DNA, 33 bp, Homo sapien
ttcactttcgcaacctgaccatcaactttgtag

SEQ ID NO: 1003875 - DNA, 33 bp, Homo sapien
tatagagctgaacttccgaaaatatattccatt

SEQ ID NO: 1003876 - DNA, 33 bp, Homo sapien
tatagagctgaacttctgaaaatatattccatt

SEQ ID NO: 1003877 - DNA, 33 bp, Homo sapien
caacatgccatgttagaaaccttgagaaataat

SEQ ID NO: 1003878 - DNA, 33 bp, Homo sapien
caacatgccatgttaggaaccttgagaaataat

SEQ ID NO: 1003879 - DNA, 33 bp, Homo sapien
cactgtgcctggcctacgagtgcttttaaactg

SEQ ID NO: 1003880 - DNA, 33 bp, Homo sapien
cactgtgcctggcctatgagtgcttttaaactg

SEQ ID NO: 1003881 - DNA, 33 bp, Homo sapien
tttcaatcagtgatagcatcttcctcctatcag

SEQ ID NO: 1003882 - DNA, 33 bp, Homo sapien
tttcaatcagtgatagtatcttcctcctatcag

SEQ ID NO: 1003883 - DNA, 33 bp, Homo sapien
aaacaactcacaattgaaccacgatttttgcac

SEQ ID NO: 1003884 - DNA, 33 bp, Homo sapien
aaacaactcacaattggaccacgatttttgcac

SEQ ID NO: 1003885 - DNA, 33 bp, Homo sapien
agttgtgaactgtagtcaattcatgagtgattg

SEQ ID NO: 1003886 - DNA, 33 bp, Homo sapien
agttgtgaactgtagtgaattcatgagtgattg

SEQ ID NO: 1003887 - DNA, 33 bp, Homo sapien
ctgtaactttcatttccatttggcatcaggaag

SEQ ID NO: 1003888 - DNA, 33 bp, Homo sapien
ctgtaactttcatttctatttggcatcaggaag

SEQ ID NO: 1003889 - DNA, 33 bp, Homo sapien
ccacattatgctggtaataatctttgaccaata

SEQ ID NO: 1003890 - DNA, 33 bp, Homo sapien
ccacattatgctggtagtaatctttgaccaata

SEQ ID NO: 1003891 - DNA, 33 bp, Homo sapien
tacacccaggaagtcaactcttcactcctaact

SEQ ID NO: 1003892 - DNA, 33 bp, Homo sapien
tacacccaggaagtcagctcttcactcctaact

SEQ ID NO: 1003893 - DNA, 33 bp, Homo sapien
ttcacagcttaaaacaaatcctcttacacctta

SEQ ID NO: 1003894 - DNA, 33 bp, Homo sapien
ttcacagcttaaaacacatcctcttacacctta

SEQ ID NO: 1003895 - DNA, 33 bp, Homo sapien
tagatttaaaggaatgaattgaagaaacagaag

SEQ ID NO: 1003896 - DNA, 33 bp, Homo sapien
tagatttaaaggaatgcattgaagaaacagaag

SEQ ID NO: 1003897 - DNA, 33 bp, Homo sapien
agctctagtaaaggatcagagtgccccctgtcc

SEQ ID NO: 1003898 - DNA, 33 bp, Homo sapien
agctctagtaaaggatgagagtgccccctgtcc

SEQ ID NO: 1003899 - DNA, 33 bp, Homo sapien
cagtgctacactgtagaaggtctgtcccacagg

SEQ ID NO: 1003900 - DNA, 33 bp, Homo sapien
cagtgctacactgtaggaggtctgtcccacagg

SEQ ID NO: 1003901 - DNA, 33 bp, Homo sapien
tccctactttggaaaaactttaacacagagatt

SEQ ID NO: 1003902 - DNA, 33 bp, Homo sapien
tccctactttggaaaagctttaacacagagatt

SEQ ID NO: 1003903 - DNA, 33 bp, Homo sapien
tgaaaacttccttccaatcacagccccgtacac

SEQ ID NO: 1003904 - DNA, 33 bp, Homo sapien
tgaaaacttccttccagtcacagccccgtacac

SEQ ID NO: 1003905 - DNA, 33 bp, Homo sapien
tgagtagttttgctgcactcttttatttttttg

SEQ ID NO: 1003906 - DNA, 33 bp, Homo sapien
tgagtagttttgctgcgctcttttatttttttg

SEQ ID NO: 1003907 - DNA, 33 bp, Homo sapien
tgaggcacaagtgaacaccctctttacaggtag

SEQ ID NO: 1003908 - DNA, 33 bp, Homo sapien
tgaggcacaagtgaacgccctctttacaggtag

SEQ ID NO: 1003909 - DNA, 33 bp, Homo sapien
ttagttgtttcttaaaggaagtgcccattttat

SEQ ID NO: 1003910 - DNA, 33 bp, Homo sapien
ttagttgtttcttaaatgaagtgcccattttat

SEQ ID NO: 1003911 - DNA, 33 bp, Homo sapien
gcaaccatcagttcagaagacactaatacctgc

SEQ ID NO: 1003912 - DNA, 33 bp, Homo sapien
gcaaccatcagttcagcagacactaatacctgc

SEQ ID NO: 1003913 - DNA, 33 bp, Homo sapien
acaatttgaaattctcaagttagtcttactgaa

SEQ ID NO: 1003914 - DNA, 33 bp, Homo sapien
acaatttgaaattctcgagttagtcttactgaa

SEQ ID NO: 1003915 - DNA, 33 bp, Homo sapien
accttgcctttctttcactttgttatactcatc

SEQ ID NO: 1003916 - DNA, 33 bp, Homo sapien
accttgcctttctttcgctttgttatactcatc

SEQ ID NO: 1003917 - DNA, 33 bp, Homo sapien
aaattctaggactccaatgagttgttcacgatg

SEQ ID NO: 1003918 - DNA, 33 bp, Homo sapien
aaattctaggactccagtgagttgttcacgatg

SEQ ID NO: 1003919 - DNA, 33 bp, Homo sapien
gagccaacgaactcggcaacatggctggactgc

SEQ ID NO: 1003920 - DNA, 33 bp, Homo sapien
gagccaacgaactcgggaacatggctggactgc

SEQ ID NO: 1003921 - DNA, 33 bp, Homo sapien
tgaaacctgaggactaagccctaaagctctcga

SEQ ID NO: 1003922 - DNA, 33 bp, Homo sapien
tgaaacctgaggactacgccctaaagctctcga

SEQ ID NO: 1003923 - DNA, 33 bp, Homo sapien
cattattattagaactaaaggctgtactctgac

SEQ ID NO: 1003924 - DNA, 33 bp, Homo sapien
cattattattagaactcaaggctgtactctgac

SEQ ID NO: 1003925 - DNA, 33 bp, Homo sapien
cataggcgataaaaaacaacgggcacgacaata

SEQ ID NO: 1003926 - DNA, 33 bp, Homo sapien
cataggcgataaaaaataacgggcacgacaata

SEQ ID NO: 1003927 - DNA, 33 bp, Homo sapien
aaaaacgagtgggtaacaatgcagcaagcaaag

SEQ ID NO: 1003928 - DNA, 33 bp, Homo sapien
aaaaacgagtgggtaagaatgcagcaagcaaag

SEQ ID NO: 1003929 - DNA, 33 bp, Homo sapien
tcacactacttccatacggaaacctcagagttc

SEQ ID NO: 1003930 - DNA, 33 bp, Homo sapien
tcacactacttccatagggaaacctcagagttc

SEQ ID NO: 1003931 - DNA, 33 bp, Homo sapien
gtgtagtgtttggataaagaagatattcctggc

SEQ ID NO: 1003932 - DNA, 33 bp, Homo sapien
gtgtagtgtttggatacagaagatattcctggc

SEQ ID NO: 1003933 - DNA, 33 bp, Homo sapien
tcacttctctgatgaaccactgacactttttct

SEQ ID NO: 1003934 - DNA, 33 bp, Homo sapien
tcacttctctgatgaatcactgacactttttct

SEQ ID NO: 1003935 - DNA, 33 bp, Homo sapien
actaaaggcttttgaaagttaacatcctatacc

SEQ ID NO: 1003936 - DNA, 33 bp, Homo sapien
actaaaggcttttgaaggttaacatcctatacc

SEQ ID NO: 1003937 - DNA, 33 bp, Homo sapien
ggctcatgatgacccaaagagtgcagctcagtt

SEQ ID NO: 1003938 - DNA, 33 bp, Homo sapien
ggctcatgatgacccagagagtgcagctcagtt

SEQ ID NO: 1003939 - DNA, 33 bp, Homo sapien
ttgttcacattttgaacctctaataacatgaaa

SEQ ID NO: 1003940 - DNA, 33 bp, Homo sapien
ttgttcacattttgaagctctaataacatgaaa

SEQ ID NO: 1003941 - DNA, 33 bp, Homo sapien
tgaacaattattgcccgctgttgtcactacctt

SEQ ID NO: 1003942 - DNA, 33 bp, Homo sapien
tgaacaattattgccctctgttgtcactacctt

SEQ ID NO: 1003943 - DNA, 33 bp, Homo sapien
tctcaagcatgagggaatcagtctaaacagggt

SEQ ID NO: 1003944 - DNA, 33 bp, Homo sapien
tctcaagcatgagggagtcagtctaaacagggt

SEQ ID NO: 1003945 - DNA, 33 bp, Homo sapien
ggcttggctgccacaacgtcaagcatgagggca

SEQ ID NO: 1003946 - DNA, 33 bp, Homo sapien
ggcttggctgccacaaggtcaagcatgagggca

SEQ ID NO: 1003947 - DNA, 33 bp, Homo sapien
gagaatgaccgtggtaaggagcgcatggccatc

SEQ ID NO: 1003948 - DNA, 33 bp, Homo sapien
gagaatgaccgtggtacggagcgcatggccatc

SEQ ID NO: 1003949 - DNA, 33 bp, Homo sapien
tgtttgggtgaagtagcagagcaataactttaa

SEQ ID NO: 1003950 - DNA, 33 bp, Homo sapien
tgtttgggtgaagtagtagagcaataactttaa

SEQ ID NO: 1003951 - DNA, 33 bp, Homo sapien
gctagaacatgagaaaaaaatagataaggctaa

SEQ ID NO: 1003952 - DNA, 33 bp, Homo sapien
gctagaacatgagaaagaaatagataaggctaa

SEQ ID NO: 1003953 - DNA, 33 bp, Homo sapien
aatacatcaatgctacgactaaatgctttataa

SEQ ID NO: 1003954 - DNA, 33 bp, Homo sapien
aatacatcaatgctactactaaatgctttataa

SEQ ID NO: 1003955 - DNA, 33 bp, Homo sapien
cacttttagagcttgtcaataccaccatgatat

SEQ ID NO: 1003956 - DNA, 33 bp, Homo sapien
cacttttagagcttgttaataccaccatgatat

SEQ ID NO: 1003957 - DNA, 33 bp, Homo sapien
acaattgtgcaaccaaaagaaaatatcagtcac

SEQ ID NO: 1003958 - DNA, 33 bp, Homo sapien
acaattgtgcaaccaatagaaaatatcagtcac

SEQ ID NO: 1003959 - DNA, 33 bp, Homo sapien
accgcaccggcctcaaggtgatataattcttat

SEQ ID NO: 1003960 - DNA, 33 bp, Homo sapien
accgcaccggcctcaatgtgatataattcttat

SEQ ID NO: 1003961 - DNA, 33 bp, Homo sapien
tttcccttctagcttacggtgttttaaggatgt

SEQ ID NO: 1003962 - DNA, 33 bp, Homo sapien
tttcccttctagcttatggtgttttaaggatgt

SEQ ID NO: 1003963 - DNA, 33 bp, Homo sapien
tcttgaattactgctaactagattaaacactgc

SEQ ID NO: 1003964 - DNA, 33 bp, Homo sapien
tcttgaattactgctagctagattaaacactgc

SEQ ID NO: 1003965 - DNA, 33 bp, Homo sapien
atgactgtcacaacccggactcagatttatttc

SEQ ID NO: 1003966 - DNA, 33 bp, Homo sapien
atgactgtcacaaccctgactcagatttatttc

SEQ ID NO: 1003967 - DNA, 33 bp, Homo sapien
ccagtagtatcgtgccgcatattcatggcattg

SEQ ID NO: 1003968 - DNA, 33 bp, Homo sapien
ccagtagtatcgtgcctcatattcatggcattg

SEQ ID NO: 1003969 - DNA, 33 bp, Homo sapien
aggcccctaacagctacctatatgtttttctac

SEQ ID NO: 1003970 - DNA, 33 bp, Homo sapien
aggcccctaacagctatctatatgtttttctac

SEQ ID NO: 1003971 - DNA, 33 bp, Homo sapien
atcccatgctgactataaaatcattttttcata

SEQ ID NO: 1003972 - DNA, 33 bp, Homo sapien
atcccatgctgactatcaaatcattttttcata

SEQ ID NO: 1003973 - DNA, 33 bp, Homo sapien
ctggtcctatgggtaaacattctctggatgcag

SEQ ID NO: 1003974 - DNA, 33 bp, Homo sapien
ctggtcctatgggtaagcattctctggatgcag

SEQ ID NO: 1003975 - DNA, 33 bp, Homo sapien
atttagcagccatgtcaaaaacaataacctgca

SEQ ID NO: 1003976 - DNA, 33 bp, Homo sapien
atttagcagccatgtcgaaaacaataacctgca

SEQ ID NO: 1003977 - DNA, 33 bp, Homo sapien
actgacttgttggatgccacaaggatagtaact

SEQ ID NO: 1003978 - DNA, 33 bp, Homo sapien
actgacttgttggatgtcacaaggatagtaact

SEQ ID NO: 1003979 - DNA, 33 bp, Homo sapien
tggaagttcagagttacagatattaaacaatcc

SEQ ID NO: 1003980 - DNA, 33 bp, Homo sapien
tggaagttcagagttagagatattaaacaatcc

SEQ ID NO: 1003981 - DNA, 33 bp, Homo sapien
acccaatgtagaagatcaattagatttttgaac

SEQ ID NO: 1003982 - DNA, 33 bp, Homo sapien
acccaatgtagaagatgaattagatttttgaac

SEQ ID NO: 1003983 - DNA, 33 bp, Homo sapien
gttctgaagaatcaaacaggaggagcaatccca

SEQ ID NO: 1003984 - DNA, 33 bp, Homo sapien
gttctgaagaatcaaagaggaggagcaatccca

SEQ ID NO: 1003985 - DNA, 33 bp, Homo sapien
gcacagagaggttaaacaagctgttcaagattt

SEQ ID NO: 1003986 - DNA, 33 bp, Homo sapien
gcacagagaggttaaataagctgttcaagattt

SEQ ID NO: 1003987 - DNA, 33 bp, Homo sapien
catcttccattgcataataattccaaataaact

SEQ ID NO: 1003988 - DNA, 33 bp, Homo sapien
catcttccattgcatagtaattccaaataaact

SEQ ID NO: 1003989 - DNA, 33 bp, Homo sapien
gatgcttggatgtccacgaactacacagaagac

SEQ ID NO: 1003990 - DNA, 33 bp, Homo sapien
gatgcttggatgtccatgaactacacagaagac

SEQ ID NO: 1003991 - DNA, 33 bp, Homo sapien
tgcaggcattaaaaatcatgttgcagcaaatca

SEQ ID NO: 1003992 - DNA, 33 bp, Homo sapien
tgcaggcattaaaaattatgttgcagcaaatca

SEQ ID NO: 1003993 - DNA, 33 bp, Homo sapien
tagtatgtgatgggtaaaaatgaggtttgtttt

SEQ ID NO: 1003994 - DNA, 33 bp, Homo sapien
tagtatgtgatgggtacaaatgaggtttgtttt

SEQ ID NO: 1003995 - DNA, 33 bp, Homo sapien
ggtaaactattcccaaatgattctgtatcttac

SEQ ID NO: 1003996 - DNA, 33 bp, Homo sapien
ggtaaactattcccaactgattctgtatcttac

SEQ ID NO: 1003997 - DNA, 33 bp, Homo sapien
gcttcagtacaggttaaatgctcaatttctttg

SEQ ID NO: 1003998 - DNA, 33 bp, Homo sapien
gcttcagtacaggttacatgctcaatttctttg

SEQ ID NO: 1003999 - DNA, 33 bp, Homo sapien
aggtgagtggtgacaaaggattgaaacattcca

SEQ ID NO: 1004000 - DNA, 33 bp, Homo sapien
aggtgagtggtgacaagggattgaaacattcca

SEQ ID NO: 1004001 - DNA, 33 bp, Homo sapien
gtatgtaacacgttgaagtacttaactttttaa

SEQ ID NO: 1004002 - DNA, 33 bp, Homo sapien
gtatgtaacacgttgaggtacttaactttttaa

SEQ ID NO: 1004003 - DNA, 33 bp, Homo sapien
gcgtcagcacgattaaagtgctgctgataagaa

SEQ ID NO: 1004004 - DNA, 33 bp, Homo sapien
gcgtcagcacgattaaggtgctgctgataagaa

SEQ ID NO: 1004005 - DNA, 33 bp, Homo sapien
atggcatttgctgacacagtgatactcctctgc

SEQ ID NO: 1004006 - DNA, 33 bp, Homo sapien
atggcatttgctgacatagtgatactcctctgc

SEQ ID NO: 1004007 - DNA, 33 bp, Homo sapien
gtttacaaagtagtgacggtagcagcacctgcc

SEQ ID NO: 1004008 - DNA, 33 bp, Homo sapien
gtttacaaagtagtgatggtagcagcacctgcc

SEQ ID NO: 1004009 - DNA, 33 bp, Homo sapien
actaacttattccacactgtactaataaaacgt

SEQ ID NO: 1004010 - DNA, 33 bp, Homo sapien
actaacttattccacattgtactaataaaacgt

SEQ ID NO: 1004011 - DNA, 33 bp, Homo sapien
agatactaacttggataaatgtactgaagaaac

SEQ ID NO: 1004012 - DNA, 33 bp, Homo sapien
agatactaacttggatcaatgtactgaagaaac

SEQ ID NO: 1004013 - DNA, 33 bp, Homo sapien
gtggaaatggggaaaccagatactaacttggat

SEQ ID NO: 1004014 - DNA, 33 bp, Homo sapien
gtggaaatggggaaactagatactaacttggat

SEQ ID NO: 1004015 - DNA, 33 bp, Homo sapien
tacaaactaaattttccagttcatcctcatcag

SEQ ID NO: 1004016 - DNA, 33 bp, Homo sapien
tacaaactaaattttctagttcatcctcatcag

SEQ ID NO: 1004017 - DNA, 33 bp, Homo sapien
tatatgtctgttcatacaagaaagcaactggct

SEQ ID NO: 1004018 - DNA, 33 bp, Homo sapien
tatatgtctgttcatataagaaagcaactggct

SEQ ID NO: 1004019 - DNA, 33 bp, Homo sapien
gaatagacaaatcgaagtgaaaatactccttca

SEQ ID NO: 1004020 - DNA, 33 bp, Homo sapien
gaatagacaaatcgaattgaaaatactccttca

SEQ ID NO: 1004021 - DNA, 33 bp, Homo sapien
ttttggtggagtcttcaagttttttcaagtaca

SEQ ID NO: 1004022 - DNA, 33 bp, Homo sapien
ttttggtggagtcttccagttttttcaagtaca

SEQ ID NO: 1004023 - DNA, 33 bp, Homo sapien
acattggtctgggaaacgattttatgaataaaa

SEQ ID NO: 1004024 - DNA, 33 bp, Homo sapien
acattggtctgggaaatgattttatgaataaaa

SEQ ID NO: 1004025 - DNA, 33 bp, Homo sapien
cagtctcttcaatgaacagtgccggaaaaattg

SEQ ID NO: 1004026 - DNA, 33 bp, Homo sapien
cagtctcttcaatgaatagtgccggaaaaattg

SEQ ID NO: 1004027 - DNA, 33 bp, Homo sapien
cgtatgactgtagatacgtggggtaatttctgg

SEQ ID NO: 1004028 - DNA, 33 bp, Homo sapien
cgtatgactgtagatatgtggggtaatttctgg

SEQ ID NO: 1004029 - DNA, 33 bp, Homo sapien
accaaatgttgtataacgttaacaaagtaaaga

SEQ ID NO: 1004030 - DNA, 33 bp, Homo sapien
accaaatgttgtataatgttaacaaagtaaaga

SEQ ID NO: 1004031 - DNA, 33 bp, Homo sapien
atgcatggtttatatgcagatactaagctgttt

SEQ ID NO: 1004032 - DNA, 33 bp, Homo sapien
atgcatggtttatatgtagatactaagctgttt

SEQ ID NO: 1004033 - DNA, 33 bp, Homo sapien
ttactgtcagagaacacaattgataactctaaa

SEQ ID NO: 1004034 - DNA, 33 bp, Homo sapien
ttactgtcagagaacagaattgataactctaaa

SEQ ID NO: 1004035 - DNA, 33 bp, Homo sapien
aaaagtaggaaacaaccaaagtcatgtcaagtt

SEQ ID NO: 1004036 - DNA, 33 bp, Homo sapien
aaaagtaggaaacaacgaaagtcatgtcaagtt

SEQ ID NO: 1004037 - DNA, 33 bp, Homo sapien
ctctgaggccatattaagtactgagaagcatta

SEQ ID NO: 1004038 - DNA, 33 bp, Homo sapien
ctctgaggccatattaggtactgagaagcatta

SEQ ID NO: 1004039 - DNA, 33 bp, Homo sapien
tcactttcgctgatagccccagtatccttcacc

SEQ ID NO: 1004040 - DNA, 33 bp, Homo sapien
tcactttcgctgatagtcccagtatccttcacc

SEQ ID NO: 1004041 - DNA, 33 bp, Homo sapien
aaaaatgtgtcctccaatatgagctagaatgga

SEQ ID NO: 1004042 - DNA, 33 bp, Homo sapien
aaaaatgtgtcctccagtatgagctagaatgga

SEQ ID NO: 1004043 - DNA, 33 bp, Homo sapien
ctaggaagagtgaataccttcttgtgatggtgg

SEQ ID NO: 1004044 - DNA, 33 bp, Homo sapien
ctaggaagagtgaatatcttcttgtgatggtgg

SEQ ID NO: 1004045 - DNA, 33 bp, Homo sapien
taaaatccatttaaaaccttgagcctacacatt

SEQ ID NO: 1004046 - DNA, 33 bp, Homo sapien
taaaatccatttaaaatcttgagcctacacatt

SEQ ID NO: 1004047 - DNA, 33 bp, Homo sapien
tataaggcagtaataacaagttgggatagaacc

SEQ ID NO: 1004048 - DNA, 33 bp, Homo sapien
tataaggcagtaataagaagttgggatagaacc

SEQ ID NO: 1004049 - DNA, 33 bp, Homo sapien
tcaaaaatgtatactacatggcaagacaagtga

SEQ ID NO: 1004050 - DNA, 33 bp, Homo sapien
tcaaaaatgtatactatatggcaagacaagtga

SEQ ID NO: 1004051 - DNA, 33 bp, Homo sapien
acaaatgcatccgtccccacagtggtgtagcac

SEQ ID NO: 1004052 - DNA, 33 bp, Homo sapien
acaaatgcatccgtcctcacagtggtgtagcac

SEQ ID NO: 1004053 - DNA, 33 bp, Homo sapien
caacctattcatcttacggttttcagcaataac

SEQ ID NO: 1004054 - DNA, 33 bp, Homo sapien
caacctattcatcttatggttttcagcaataac

SEQ ID NO: 1004055 - DNA, 33 bp, Homo sapien
tctctaggccccaaaccgctgaagactcccagc

SEQ ID NO: 1004056 - DNA, 33 bp, Homo sapien
tctctaggccccaaactgctgaagactcccagc

SEQ ID NO: 1004057 - DNA, 33 bp, Homo sapien
aatgtaaaccatctctaaacaatctaaaacaaa

SEQ ID NO: 1004058 - DNA, 33 bp, Homo sapien
aatgtaaaccatctctgaacaatctaaaacaaa

SEQ ID NO: 1004059 - DNA, 33 bp, Homo sapien
agcaaatatctgcagcactactcagtttatgcc

SEQ ID NO: 1004060 - DNA, 33 bp, Homo sapien
agcaaatatctgcagcgctactcagtttatgcc

SEQ ID NO: 1004061 - DNA, 33 bp, Homo sapien
tattatcctcttcttacgtttctcaaagcaatt

SEQ ID NO: 1004062 - DNA, 33 bp, Homo sapien
tattatcctcttcttatgtttctcaaagcaatt

SEQ ID NO: 1004063 - DNA, 33 bp, Homo sapien
gctgaagttacaaaaactgttgtgctttatcta

SEQ ID NO: 1004064 - DNA, 33 bp, Homo sapien
gctgaagttacaaaaagtgttgtgctttatcta

SEQ ID NO: 1004065 - DNA, 33 bp, Homo sapien
attggggaaagcaaacaagcaagcaagatgtgt

SEQ ID NO: 1004066 - DNA, 33 bp, Homo sapien
attggggaaagcaaacgagcaagcaagatgtgt

SEQ ID NO: 1004067 - DNA, 33 bp, Homo sapien
ctcaggctgataacctaaactctgagcttggtc

SEQ ID NO: 1004068 - DNA, 33 bp, Homo sapien
ctcaggctgataacctcaactctgagcttggtc

SEQ ID NO: 1004069 - DNA, 33 bp, Homo sapien
cggtttctcaggtgtacgatttgctgcaaagta

SEQ ID NO: 1004070 - DNA, 33 bp, Homo sapien
cggtttctcaggtgtatgatttgctgcaaagta

SEQ ID NO: 1004071 - DNA, 33 bp, Homo sapien
tgggttttacgtcacaaaagccctatgagattt

SEQ ID NO: 1004072 - DNA, 33 bp, Homo sapien
tgggttttacgtcacagaagccctatgagattt

SEQ ID NO: 1004073 - DNA, 33 bp, Homo sapien
ttttgtcatgtacttacgtgctgtctatgtatg

SEQ ID NO: 1004074 - DNA, 33 bp, Homo sapien
ttttgtcatgtacttatgtgctgtctatgtatg

SEQ ID NO: 1004075 - DNA, 33 bp, Homo sapien
ttacctaacagataataacattaagcattttgt

SEQ ID NO: 1004076 - DNA, 33 bp, Homo sapien
ttacctaacagataatgacattaagcattttgt

SEQ ID NO: 1004077 - DNA, 33 bp, Homo sapien
atccccatcctaaacacgatgctggctgctccc

SEQ ID NO: 1004078 - DNA, 33 bp, Homo sapien
atccccatcctaaacatgatgctggctgctccc

SEQ ID NO: 1004079 - DNA, 33 bp, Homo sapien
gtgactttgaacaaacgaccctttacctcactt

SEQ ID NO: 1004080 - DNA, 33 bp, Homo sapien
gtgactttgaacaaactaccctttacctcactt

SEQ ID NO: 1004081 - DNA, 33 bp, Homo sapien
tgtctgtgacctgccacaacctctttgcctctt

SEQ ID NO: 1004082 - DNA, 33 bp, Homo sapien
tgtctgtgacctgccataacctctttgcctctt

SEQ ID NO: 1004083 - DNA, 33 bp, Homo sapien
aaggaagactaccccaacgtagcagcttgtgta

SEQ ID NO: 1004084 - DNA, 33 bp, Homo sapien
aaggaagactaccccagcgtagcagcttgtgta

SEQ ID NO: 1004085 - DNA, 33 bp, Homo sapien
actatacactactctcagaaaaaacgtcagcaa

SEQ ID NO: 1004086 - DNA, 33 bp, Homo sapien
actatacactactctctgaaaaaacgtcagcaa

SEQ ID NO: 1004087 - DNA, 33 bp, Homo sapien
cagactctgcactggaagcttattggcagacat

SEQ ID NO: 1004088 - DNA, 33 bp, Homo sapien
cagactctgcactggaggcttattggcagacat

SEQ ID NO: 1004089 - DNA, 33 bp, Homo sapien
ttaaaaggtgcttccgaaaggattcttacttga

SEQ ID NO: 1004090 - DNA, 33 bp, Homo sapien
ttaaaaggtgcttccgcaaggattcttacttga

SEQ ID NO: 1004091 - DNA, 33 bp, Homo sapien
tctgaaacacagcagtaacattcaacaaaggtg

SEQ ID NO: 1004092 - DNA, 33 bp, Homo sapien
tctgaaacacagcagtgacattcaacaaaggtg

SEQ ID NO: 1004093 - DNA, 33 bp, Homo sapien
ccagaattacatttcaccatatacgcatttcac

SEQ ID NO: 1004094 - DNA, 33 bp, Homo sapien
ccagaattacatttcagcatatacgcatttcac

SEQ ID NO: 1004095 - DNA, 33 bp, Homo sapien
tttggtcaactggtacacaatgggctcataaaa

SEQ ID NO: 1004096 - DNA, 33 bp, Homo sapien
tttggtcaactggtacgcaatgggctcataaaa

SEQ ID NO: 1004097 - DNA, 33 bp, Homo sapien
ccaatctacttcaccaacttcaacttcccactc

SEQ ID NO: 1004098 - DNA, 33 bp, Homo sapien
ccaatctacttcaccagcttcaacttcccactc

SEQ ID NO: 1004099 - DNA, 33 bp, Homo sapien
atcttccctactttgacgaactcttgaaacaag

SEQ ID NO: 1004100 - DNA, 33 bp, Homo sapien
atcttccctactttgaggaactcttgaaacaag

SEQ ID NO: 1004101 - DNA, 33 bp, Homo sapien
aatatgatacacaaaactctggattagctcaaa

SEQ ID NO: 1004102 - DNA, 33 bp, Homo sapien
aatatgatacacaaaagtctggattagctcaaa

SEQ ID NO: 1004103 - DNA, 33 bp, Homo sapien
ccctggaaagaaaagacgtattgacttgtatgt

SEQ ID NO: 1004104 - DNA, 33 bp, Homo sapien
ccctggaaagaaaagaggtattgacttgtatgt

SEQ ID NO: 1004105 - DNA, 33 bp, Homo sapien
ctggtgtagtgggtcactgaaattataatgtct

SEQ ID NO: 1004106 - DNA, 33 bp, Homo sapien
ctggtgtagtgggtcagtgaaattataatgtct

SEQ ID NO: 1004107 - DNA, 33 bp, Homo sapien
attttgtttgtccctcaagtgggccttttagtt

SEQ ID NO: 1004108 - DNA, 33 bp, Homo sapien
attttgtttgtccctcgagtgggccttttagtt

SEQ ID NO: 1004109 - DNA, 33 bp, Homo sapien
tcaggagaagcaactaaaggtacggtgaaaggg

SEQ ID NO: 1004110 - DNA, 33 bp, Homo sapien
tcaggagaagcaactacaggtacggtgaaaggg

SEQ ID NO: 1004111 - DNA, 33 bp, Homo sapien
aaaatgccaagaacaacctgtcaatcaatgcca

SEQ ID NO: 1004112 - DNA, 33 bp, Homo sapien
aaaatgccaagaacaagctgtcaatcaatgcca

SEQ ID NO: 1004113 - DNA, 33 bp, Homo sapien
aagtactaaataaatcccattacccagagttat

SEQ ID NO: 1004114 - DNA, 33 bp, Homo sapien
aagtactaaataaatcgcattacccagagttat

SEQ ID NO: 1004115 - DNA, 33 bp, Homo sapien
cttcagaacaccatagccatttctttaatctga

SEQ ID NO: 1004116 - DNA, 33 bp, Homo sapien
cttcagaacaccatagtcatttctttaatctga

SEQ ID NO: 1004117 - DNA, 33 bp, Homo sapien
tattcctggcatcctaaaaaaccatgtgtaggc

SEQ ID NO: 1004118 - DNA, 33 bp, Homo sapien
tattcctggcatcctacaaaaccatgtgtaggc

SEQ ID NO: 1004119 - DNA, 33 bp, Homo sapien
aattctgaaacaactacgtagcctgcacagggc

SEQ ID NO: 1004120 - DNA, 33 bp, Homo sapien
aattctgaaacaactatgtagcctgcacagggc

SEQ ID NO: 1004121 - DNA, 33 bp, Homo sapien
attctcttttacatcacaagcctatacacacca

SEQ ID NO: 1004122 - DNA, 33 bp, Homo sapien
attctcttttacatcataagcctatacacacca

SEQ ID NO: 1004123 - DNA, 33 bp, Homo sapien
acaaatatgattttaagtacacttgagtgttgt

SEQ ID NO: 1004124 - DNA, 33 bp, Homo sapien
acaaatatgattttaattacacttgagtgttgt

SEQ ID NO: 1004125 - DNA, 33 bp, Homo sapien
gaccctggaatctttacgctcattgagtacttt

SEQ ID NO: 1004126 - DNA, 33 bp, Homo sapien
gaccctggaatctttatgctcattgagtacttt

SEQ ID NO: 1004127 - DNA, 33 bp, Homo sapien
aaataggagaattcaaactaactaatgtctgat

SEQ ID NO: 1004128 - DNA, 33 bp, Homo sapien
aaataggagaattcaagctaactaatgtctgat

SEQ ID NO: 1004129 - DNA, 33 bp, Homo sapien
gagataactgccagcacagaaaataagagaaat

SEQ ID NO: 1004130 - DNA, 33 bp, Homo sapien
gagataactgccagcagagaaaataagagaaat

SEQ ID NO: 1004131 - DNA, 33 bp, Homo sapien
aggagagactcaggtagagcatttcatcttcag

SEQ ID NO: 1004132 - DNA, 33 bp, Homo sapien
aggagagactcaggtatagcatttcatcttcag

SEQ ID NO: 1004133 - DNA, 33 bp, Homo sapien
gctgcctatgatgcaaaattttacacttttaaa

SEQ ID NO: 1004134 - DNA, 33 bp, Homo sapien
gctgcctatgatgcaacattttacacttttaaa

SEQ ID NO: 1004135 - DNA, 33 bp, Homo sapien
ataaaacatctaaagcacagaagactttcaaat

SEQ ID NO: 1004136 - DNA, 33 bp, Homo sapien
ataaaacatctaaagcgcagaagactttcaaat

SEQ ID NO: 1004137 - DNA, 33 bp, Homo sapien
aaaagctcttacttcaaaggttcattaactgtc

SEQ ID NO: 1004138 - DNA, 33 bp, Homo sapien
aaaagctcttacttcagaggttcattaactgtc

SEQ ID NO: 1004139 - DNA, 33 bp, Homo sapien
aatgagcatgattggtaaactttatgcatttac

SEQ ID NO: 1004140 - DNA, 33 bp, Homo sapien
aatgagcatgattggttaactttatgcatttac

SEQ ID NO: 1004141 - DNA, 33 bp, Homo sapien
caaggttaaattatagccagctcttggggactt

SEQ ID NO: 1004142 - DNA, 33 bp, Homo sapien
caaggttaaattataggcagctcttggggactt

SEQ ID NO: 1004143 - DNA, 33 bp, Homo sapien
ggcaaggctgagactacggtttctaaattttca

SEQ ID NO: 1004144 - DNA, 33 bp, Homo sapien
ggcaaggctgagactatggtttctaaattttca

SEQ ID NO: 1004145 - DNA, 33 bp, Homo sapien
aaacacactctctttcacttaagtttcttaaca

SEQ ID NO: 1004146 - DNA, 33 bp, Homo sapien
aaacacactctctttcgcttaagtttcttaaca

SEQ ID NO: 1004147 - DNA, 33 bp, Homo sapien
gacctggggcgaaatgccaacagctgctatcgt

SEQ ID NO: 1004148 - DNA, 33 bp, Homo sapien
gacctggggcgaaatgtcaacagctgctatcgt

SEQ ID NO: 1004149 - DNA, 33 bp, Homo sapien
tgtccagactctttgaagcagtccatcttcacc

SEQ ID NO: 1004150 - DNA, 33 bp, Homo sapien
tgtccagactctttgacgcagtccatcttcacc

SEQ ID NO: 1004151 - DNA, 33 bp, Homo sapien
aacattaggatacagaacaacgttaggaggagg

SEQ ID NO: 1004152 - DNA, 33 bp, Homo sapien
aacattaggatacagagcaacgttaggaggagg

SEQ ID NO: 1004153 - DNA, 33 bp, Homo sapien
ttgggtccttctcgaaacccaacagaggcaagt

SEQ ID NO: 1004154 - DNA, 33 bp, Homo sapien
ttgggtccttctcgaatcccaacagaggcaagt

SEQ ID NO: 1004155 - DNA, 33 bp, Homo sapien
cagtgttctcggtaccacataaatcttgggaag

SEQ ID NO: 1004156 - DNA, 33 bp, Homo sapien
cagtgttctcggtaccgcataaatcttgggaag

SEQ ID NO: 1004157 - DNA, 33 bp, Homo sapien
acatggtagatttccaatcataaacaactaaat

SEQ ID NO: 1004158 - DNA, 33 bp, Homo sapien
acatggtagatttccagtcataaacaactaaat

SEQ ID NO: 1004159 - DNA, 33 bp, Homo sapien
atgagaggcatacacaagaagtatttagttgtt

SEQ ID NO: 1004160 - DNA, 33 bp, Homo sapien
atgagaggcatacacaggaagtatttagttgtt

SEQ ID NO: 1004161 - DNA, 33 bp, Homo sapien
gtgtcatctgatttacacaacttagttgatagc

SEQ ID NO: 1004162 - DNA, 33 bp, Homo sapien
gtgtcatctgatttacccaacttagttgatagc

SEQ ID NO: 1004163 - DNA, 33 bp, Homo sapien
acatttctttaacattgaactaggccatagtgt

SEQ ID NO: 1004164 - DNA, 33 bp, Homo sapien
acatttctttaacatttaactaggccatagtgt

SEQ ID NO: 1004165 - DNA, 33 bp, Homo sapien
ataatacgttcaattgcatgtttgatctttatt

SEQ ID NO: 1004166 - DNA, 33 bp, Homo sapien
ataatacgttcaattgtatgtttgatctttatt

SEQ ID NO: 1004167 - DNA, 33 bp, Homo sapien
gcaaataatttcataaccaattgtttttaacat

SEQ ID NO: 1004168 - DNA, 33 bp, Homo sapien
gcaaataatttcataatcaattgtttttaacat

SEQ ID NO: 1004169 - DNA, 33 bp, Homo sapien
aatacaaaatacatttcaaaacaggccaaaatt

SEQ ID NO: 1004170 - DNA, 33 bp, Homo sapien
aatacaaaatacattttaaaacaggccaaaatt

SEQ ID NO: 1004171 - DNA, 33 bp, Homo sapien
tggtatctttacaacacgaatatttaatttttt

SEQ ID NO: 1004172 - DNA, 33 bp, Homo sapien
tggtatctttacaacaggaatatttaatttttt

SEQ ID NO: 1004173 - DNA, 33 bp, Homo sapien
gtatgactaagcatccgaccagctgagtcttgt

SEQ ID NO: 1004174 - DNA, 33 bp, Homo sapien
gtatgactaagcatcctaccagctgagtcttgt

SEQ ID NO: 1004175 - DNA, 33 bp, Homo sapien
aggaaggacagcaatgaagaaggaaggctttca

SEQ ID NO: 1004176 - DNA, 33 bp, Homo sapien
aggaaggacagcaatggagaaggaaggctttca

SEQ ID NO: 1004177 - DNA, 33 bp, Homo sapien
aaaaaagtgcggtatacagggtcggccacatat

SEQ ID NO: 1004178 - DNA, 33 bp, Homo sapien
aaaaaagtgcggtatatagggtcggccacatat

SEQ ID NO: 1004179 - DNA, 33 bp, Homo sapien
gcagcttgggttggaaaagagaagatgaaggga

SEQ ID NO: 1004180 - DNA, 33 bp, Homo sapien
gcagcttgggttggaagagagaagatgaaggga

SEQ ID NO: 1004181 - DNA, 33 bp, Homo sapien
cacctatgccagcaaaactcacggcacagcccc

SEQ ID NO: 1004182 - DNA, 33 bp, Homo sapien
cacctatgccagcaaatctcacggcacagcccc

SEQ ID NO: 1004183 - DNA, 33 bp, Homo sapien
aaaatacaaaatacacacaatgaattggacgca

SEQ ID NO: 1004184 - DNA, 33 bp, Homo sapien
aaaatacaaaatacacccaatgaattggacgca

SEQ ID NO: 1004185 - DNA, 33 bp, Homo sapien
aacgtgtgcatgaacgcccttgtttcacagtgg

SEQ ID NO: 1004186 - DNA, 33 bp, Homo sapien
aacgtgtgcatgaacggccttgtttcacagtgg

SEQ ID NO: 1004187 - DNA, 33 bp, Homo sapien
tacagtcttgttaccaccatcataatcaagata

SEQ ID NO: 1004188 - DNA, 33 bp, Homo sapien
tacagtcttgttaccatcatcataatcaagata

SEQ ID NO: 1004189 - DNA, 33 bp, Homo sapien
ttcctggacttggaaccggaaaatcctgtaaat

SEQ ID NO: 1004190 - DNA, 33 bp, Homo sapien
ttcctggacttggaactggaaaatcctgtaaat

SEQ ID NO: 1004191 - DNA, 33 bp, Homo sapien
aaggggagattttatccgagaagaccaatttcc

SEQ ID NO: 1004192 - DNA, 33 bp, Homo sapien
aaggggagattttatctgagaagaccaatttcc

SEQ ID NO: 1004193 - DNA, 33 bp, Homo sapien
cagagaaggcagattacagaattgttccagaag

SEQ ID NO: 1004194 - DNA, 33 bp, Homo sapien
cagagaaggcagattatagaattgttccagaag

SEQ ID NO: 1004195 - DNA, 33 bp, Homo sapien
agctgttcagcagatacagcaagagggaggctg

SEQ ID NO: 1004196 - DNA, 33 bp, Homo sapien
agctgttcagcagatatagcaagagggaggctg

SEQ ID NO: 1004197 - DNA, 33 bp, Homo sapien
atacaccccctcactcaatgtgaatgggcatca

SEQ ID NO: 1004198 - DNA, 33 bp, Homo sapien
atacaccccctcactccatgtgaatgggcatca

SEQ ID NO: 1004199 - DNA, 33 bp, Homo sapien
ccaggcattttctatacattggtaggaaaactg

SEQ ID NO: 1004200 - DNA, 33 bp, Homo sapien
ccaggcattttctatagattggtaggaaaactg

SEQ ID NO: 1004201 - DNA, 33 bp, Homo sapien
gaactggaaacttccacaggaattggctttccc

SEQ ID NO: 1004202 - DNA, 33 bp, Homo sapien
gaactggaaacttccataggaattggctttccc

SEQ ID NO: 1004203 - DNA, 33 bp, Homo sapien
ctgacatttgtgaagtaacattggggaagaaac

SEQ ID NO: 1004204 - DNA, 33 bp, Homo sapien
ctgacatttgtgaagtgacattggggaagaaac

SEQ ID NO: 1004205 - DNA, 33 bp, Homo sapien
cctggcagccttgagacattccggttattctca

SEQ ID NO: 1004206 - DNA, 33 bp, Homo sapien
cctggcagccttgagatattccggttattctca

SEQ ID NO: 1004207 - DNA, 33 bp, Homo sapien
gacacctttggccatgccagacactttggcagg

SEQ ID NO: 1004208 - DNA, 33 bp, Homo sapien
gacacctttggccatgtcagacactttggcagg

SEQ ID NO: 1004209 - DNA, 33 bp, Homo sapien
aagcaatgtctatttcaactctcctgtgcccta

SEQ ID NO: 1004210 - DNA, 33 bp, Homo sapien
aagcaatgtctatttcgactctcctgtgcccta

SEQ ID NO: 1004211 - DNA, 33 bp, Homo sapien
gagtagcaaaaagaagaaaaaagatggtcagtg

SEQ ID NO: 1004212 - DNA, 33 bp, Homo sapien
gagtagcaaaaagaaggaaaaagatggtcagtg

SEQ ID NO: 1004213 - DNA, 33 bp, Homo sapien
agttcctcttatacaacaccacctcaaggacca

SEQ ID NO: 1004214 - DNA, 33 bp, Homo sapien
agttcctcttatacaataccacctcaaggacca

SEQ ID NO: 1004215 - DNA, 33 bp, Homo sapien
tttggaaagtcttccaataacggcaacaaataa

SEQ ID NO: 1004216 - DNA, 33 bp, Homo sapien
tttggaaagtcttccattaacggcaacaaataa

SEQ ID NO: 1004217 - DNA, 33 bp, Homo sapien
cagggagatggatttccagcagaacctcttcat

SEQ ID NO: 1004218 - DNA, 33 bp, Homo sapien
cagggagatggatttctagcagaacctcttcat

SEQ ID NO: 1004219 - DNA, 33 bp, Homo sapien
aggcacgcgatgcaggaacttcctttgcacact

SEQ ID NO: 1004220 - DNA, 33 bp, Homo sapien
aggcacgcgatgcagggacttcctttgcacact

SEQ ID NO: 1004221 - DNA, 33 bp, Homo sapien
gtggtgtttattatcaaaatggatggattcaat

SEQ ID NO: 1004222 - DNA, 33 bp, Homo sapien
gtggtgtttattatcagaatggatggattcaat

SEQ ID NO: 1004223 - DNA, 33 bp, Homo sapien
acatcattaagtgtcacaggcgtttattaacac

SEQ ID NO: 1004224 - DNA, 33 bp, Homo sapien
acatcattaagtgtcataggcgtttattaacac

SEQ ID NO: 1004225 - DNA, 33 bp, Homo sapien
tatcccaccaggtcccacactctcgcttgcctt

SEQ ID NO: 1004226 - DNA, 33 bp, Homo sapien
tatcccaccaggtcccgcactctcgcttgcctt

SEQ ID NO: 1004227 - DNA, 33 bp, Homo sapien
cattggaatatctgccacttcgaaaccttggaa

SEQ ID NO: 1004228 - DNA, 33 bp, Homo sapien
cattggaatatctgccgcttcgaaaccttggaa

SEQ ID NO: 1004229 - DNA, 33 bp, Homo sapien
tatgcattgactgtgaggacatctactactctt

SEQ ID NO: 1004230 - DNA, 33 bp, Homo sapien
tatgcattgactgtgatgacatctactactctt

SEQ ID NO: 1004231 - DNA, 33 bp, Homo sapien
ctcatgttcaagaataatagtccaatgataaat

SEQ ID NO: 1004232 - DNA, 33 bp, Homo sapien
ctcatgttcaagaatactagtccaatgataaat

SEQ ID NO: 1004233 - DNA, 33 bp, Homo sapien
gtttttctctcacccacaatttatcattggact

SEQ ID NO: 1004234 - DNA, 33 bp, Homo sapien
gtttttctctcacccataatttatcattggact

SEQ ID NO: 1004235 - DNA, 33 bp, Homo sapien
tagtttccttagtttcaaatctgcctcgaacta

SEQ ID NO: 1004236 - DNA, 33 bp, Homo sapien
tagtttccttagtttcgaatctgcctcgaacta

SEQ ID NO: 1004237 - DNA, 33 bp, Homo sapien
ctgggctctcaactccacgctccagtcatcttc

SEQ ID NO: 1004238 - DNA, 33 bp, Homo sapien
ctgggctctcaactccgcgctccagtcatcttc

SEQ ID NO: 1004239 - DNA, 33 bp, Homo sapien
aaaagccagtgaagtacgttcatgaggaggtaa

SEQ ID NO: 1004240 - DNA, 33 bp, Homo sapien
aaaagccagtgaagtatgttcatgaggaggtaa

SEQ ID NO: 1004241 - DNA, 33 bp, Homo sapien
tgaaaagggttatcaaagactaagaaactttta

SEQ ID NO: 1004242 - DNA, 33 bp, Homo sapien
tgaaaagggttatcaaggactaagaaactttta

SEQ ID NO: 1004243 - DNA, 33 bp, Homo sapien
atgtattgtctcatccaatattctcaactcctg

SEQ ID NO: 1004244 - DNA, 33 bp, Homo sapien
atgtattgtctcatccgatattctcaactcctg

SEQ ID NO: 1004245 - DNA, 33 bp, Homo sapien
ttgccttgcctttaaagcctacagttgactgta

SEQ ID NO: 1004246 - DNA, 33 bp, Homo sapien
ttgccttgcctttaaatcctacagttgactgta

SEQ ID NO: 1004247 - DNA, 33 bp, Homo sapien
acagagaagtggatgcactggtttacatgtaca

SEQ ID NO: 1004248 - DNA, 33 bp, Homo sapien
acagagaagtggatgcgctggtttacatgtaca

SEQ ID NO: 1004249 - DNA, 33 bp, Homo sapien
ggtgtgattgcacagacattgccagataataat

SEQ ID NO: 1004250 - DNA, 33 bp, Homo sapien
ggtgtgattgcacagagattgccagataataat

SEQ ID NO: 1004251 - DNA, 33 bp, Homo sapien
ggattctgatgttaagcctatccatggagagtt

SEQ ID NO: 1004252 - DNA, 33 bp, Homo sapien
ggattctgatgttaagtctatccatggagagtt

SEQ ID NO: 1004253 - DNA, 33 bp, Homo sapien
ttaacataacattcttcaacattctttaacata

SEQ ID NO: 1004254 - DNA, 33 bp, Homo sapien
ttaacataacattctttaacattctttaacata

SEQ ID NO: 1004255 - DNA, 33 bp, Homo sapien
acacacaacataaagccgcagattaaagaagat

SEQ ID NO: 1004256 - DNA, 33 bp, Homo sapien
acacacaacataaagctgcagattaaagaagat

SEQ ID NO: 1004257 - DNA, 33 bp, Homo sapien
ttctctagatcaaagaatcgtaattccttaaag

SEQ ID NO: 1004258 - DNA, 33 bp, Homo sapien
ttctctagatcaaagactcgtaattccttaaag

SEQ ID NO: 1004259 - DNA, 33 bp, Homo sapien
caaaaagtccttcacaatgacagttgttttagc

SEQ ID NO: 1004260 - DNA, 33 bp, Homo sapien
caaaaagtccttcacagtgacagttgttttagc

SEQ ID NO: 1004261 - DNA, 33 bp, Homo sapien
tatgaaatacacaaaacaagcgatagaaagaca

SEQ ID NO: 1004262 - DNA, 33 bp, Homo sapien
tatgaaatacacaaaataagcgatagaaagaca

SEQ ID NO: 1004263 - DNA, 33 bp, Homo sapien
acatcattttgagtaacgaccctgcaactgcaa

SEQ ID NO: 1004264 - DNA, 33 bp, Homo sapien
acatcattttgagtaatgaccctgcaactgcaa

SEQ ID NO: 1004265 - DNA, 33 bp, Homo sapien
atcatctttcaagtcccgattctatgtcaaatg

SEQ ID NO: 1004266 - DNA, 33 bp, Homo sapien
atcatctttcaagtccggattctatgtcaaatg

SEQ ID NO: 1004267 - DNA, 33 bp, Homo sapien
acatcaaaattctgaaagtgaggctcatcccag

SEQ ID NO: 1004268 - DNA, 33 bp, Homo sapien
acatcaaaattctgaacgtgaggctcatcccag

SEQ ID NO: 1004269 - DNA, 33 bp, Homo sapien
ctttgggtaatactaacgggcatgactgctgga

SEQ ID NO: 1004270 - DNA, 33 bp, Homo sapien
ctttgggtaatactaatgggcatgactgctgga

SEQ ID NO: 1004271 - DNA, 33 bp, Homo sapien
cagacaaataggtcaacggaacagaacagagag

SEQ ID NO: 1004272 - DNA, 33 bp, Homo sapien
cagacaaataggtcaatggaacagaacagagag

SEQ ID NO: 1004273 - DNA, 33 bp, Homo sapien
aatccctcatagaaacccaaataagcaactctg

SEQ ID NO: 1004274 - DNA, 33 bp, Homo sapien
aatccctcatagaaactcaaataagcaactctg

SEQ ID NO: 1004275 - DNA, 33 bp, Homo sapien
gaagcctagaaccatccgaggcagccgtcttgt

SEQ ID NO: 1004276 - DNA, 33 bp, Homo sapien
gaagcctagaaccatctgaggcagccgtcttgt

SEQ ID NO: 1004277 - DNA, 33 bp, Homo sapien
accatctttggccccacgcaactcagagatgac

SEQ ID NO: 1004278 - DNA, 33 bp, Homo sapien
accatctttggccccatgcaactcagagatgac

SEQ ID NO: 1004279 - DNA, 33 bp, Homo sapien
caagctaacgtgataacgagttattgggcatcc

SEQ ID NO: 1004280 - DNA, 33 bp, Homo sapien
caagctaacgtgataatgagttattgggcatcc

SEQ ID NO: 1004281 - DNA, 33 bp, Homo sapien
agtggacagtaaatggaccacagattatacgca

SEQ ID NO: 1004282 - DNA, 33 bp, Homo sapien
agtggacagtaaatgggccacagattatacgca

SEQ ID NO: 1004283 - DNA, 33 bp, Homo sapien
ctttatgtgtctgaaaaatttttgttacagtgg

SEQ ID NO: 1004284 - DNA, 33 bp, Homo sapien
ctttatgtgtctgaaatatttttgttacagtgg

SEQ ID NO: 1004285 - DNA, 33 bp, Homo sapien
cctcatttccttgaaacccacaactcttatgta

SEQ ID NO: 1004286 - DNA, 33 bp, Homo sapien
cctcatttccttgaaatccacaactcttatgta

SEQ ID NO: 1004287 - DNA, 33 bp, Homo sapien
gaggacctggagaaaccgctgcatcaaacacca

SEQ ID NO: 1004288 - DNA, 33 bp, Homo sapien
gaggacctggagaaactgctgcatcaaacacca

SEQ ID NO: 1004289 - DNA, 33 bp, Homo sapien
taaaaagtagaagaacaaaaggatgaaaggggc

SEQ ID NO: 1004290 - DNA, 33 bp, Homo sapien
taaaaagtagaagaacgaaaggatgaaaggggc

SEQ ID NO: 1004291 - DNA, 33 bp, Homo sapien
ttgtatctgctcttcaatcaacctagaatcaca

SEQ ID NO: 1004292 - DNA, 33 bp, Homo sapien
ttgtatctgctcttcattcaacctagaatcaca

SEQ ID NO: 1004293 - DNA, 33 bp, Homo sapien
ttctctgactccagaagaggaatgggcagtatt

SEQ ID NO: 1004294 - DNA, 33 bp, Homo sapien
ttctctgactccagaataggaatgggcagtatt

SEQ ID NO: 1004295 - DNA, 33 bp, Homo sapien
agcccagtgatttctgcatttggagcagcattt

SEQ ID NO: 1004296 - DNA, 33 bp, Homo sapien
agcccagtgatttctgtatttggagcagcattt

SEQ ID NO: 1004297 - DNA, 33 bp, Homo sapien
tgtctcgtcctccgtcactgccgcttctccaca

SEQ ID NO: 1004298 - DNA, 33 bp, Homo sapien
tgtctcgtcctccgtcgctgccgcttctccaca

SEQ ID NO: 1004299 - DNA, 33 bp, Homo sapien
ccttttcgcctggtaacagaagctccatcttgg

SEQ ID NO: 1004300 - DNA, 33 bp, Homo sapien
ccttttcgcctggtaatagaagctccatcttgg

SEQ ID NO: 1004301 - DNA, 33 bp, Homo sapien
cttgctctccctgttacagtcccgtttccatta

SEQ ID NO: 1004302 - DNA, 33 bp, Homo sapien
cttgctctccctgttatagtcccgtttccatta

SEQ ID NO: 1004303 - DNA, 33 bp, Homo sapien
gcaatggttttaattacgtccacctgaaggtcc

SEQ ID NO: 1004304 - DNA, 33 bp, Homo sapien
gcaatggttttaattatgtccacctgaaggtcc

SEQ ID NO: 1004305 - DNA, 33 bp, Homo sapien
ggttatgaagtccttacgttgttttttgagaga

SEQ ID NO: 1004306 - DNA, 33 bp, Homo sapien
ggttatgaagtccttatgttgttttttgagaga

SEQ ID NO: 1004307 - DNA, 33 bp, Homo sapien
tgaggactgaatgatacatacgacctaaaagag

SEQ ID NO: 1004308 - DNA, 33 bp, Homo sapien
tgaggactgaatgatatatacgacctaaaagag

SEQ ID NO: 1004309 - DNA, 33 bp, Homo sapien
gggaaaggacttagaaacttgggccagaactag

SEQ ID NO: 1004310 - DNA, 33 bp, Homo sapien
gggaaaggacttagaagcttgggccagaactag

SEQ ID NO: 1004311 - DNA, 33 bp, Homo sapien
ggaaaatcttgtcagaccagaaagcaaggaaaa

SEQ ID NO: 1004312 - DNA, 33 bp, Homo sapien
ggaaaatcttgtcagatcagaaagcaaggaaaa

SEQ ID NO: 1004313 - DNA, 33 bp, Homo sapien
tttaacacaatctccaccatctcgatgttttcc

SEQ ID NO: 1004314 - DNA, 33 bp, Homo sapien
tttaacacaatctccatcatctcgatgttttcc

SEQ ID NO: 1004315 - DNA, 33 bp, Homo sapien
tatatgattacaaatccatgcatatttatatct

SEQ ID NO: 1004316 - DNA, 33 bp, Homo sapien
tatatgattacaaatcgatgcatatttatatct

SEQ ID NO: 1004317 - DNA, 33 bp, Homo sapien
catcacccagcttcacacttgtcaatccataac

SEQ ID NO: 1004318 - DNA, 33 bp, Homo sapien
catcacccagcttcacgcttgtcaatccataac

SEQ ID NO: 1004319 - DNA, 33 bp, Homo sapien
ggttgaggctcaatggaccacctaattataacc

SEQ ID NO: 1004320 - DNA, 33 bp, Homo sapien
ggttgaggctcaatgggccacctaattataacc

SEQ ID NO: 1004321 - DNA, 33 bp, Homo sapien
cacagggtccaagaaaactatcctcagtcattt

SEQ ID NO: 1004322 - DNA, 33 bp, Homo sapien
cacagggtccaagaaatctatcctcagtcattt

SEQ ID NO: 1004323 - DNA, 33 bp, Homo sapien
tactcagtacccacacaatgaagccactaccct

SEQ ID NO: 1004324 - DNA, 33 bp, Homo sapien
tactcagtacccacaccatgaagccactaccct

SEQ ID NO: 1004325 - DNA, 33 bp, Homo sapien
tcagggataacaatggaaaaataaatcatagtt

SEQ ID NO: 1004326 - DNA, 33 bp, Homo sapien
tcagggataacaatgggaaaataaatcatagtt

SEQ ID NO: 1004327 - DNA, 33 bp, Homo sapien
gttaaacttacttatccagtttgtgcttggatc

SEQ ID NO: 1004328 - DNA, 33 bp, Homo sapien
gttaaacttacttatcgagtttgtgcttggatc

SEQ ID NO: 1004329 - DNA, 33 bp, Homo sapien
aatgctctcttgtaaaccttgacagtataatat

SEQ ID NO: 1004330 - DNA, 33 bp, Homo sapien
aatgctctcttgtaaatcttgacagtataatat

SEQ ID NO: 1004331 - DNA, 33 bp, Homo sapien
tgaattgctttctagagctcaggattctctttt

SEQ ID NO: 1004332 - DNA, 33 bp, Homo sapien
tgaattgctttctagatctcaggattctctttt

SEQ ID NO: 1004333 - DNA, 33 bp, Homo sapien
tagtgatgtttttccaataccaactctcccata

SEQ ID NO: 1004334 - DNA, 33 bp, Homo sapien
tagtgatgtttttccagtaccaactctcccata

SEQ ID NO: 1004335 - DNA, 33 bp, Homo sapien
agtgcaattataaataaggacagggcaaatcac

SEQ ID NO: 1004336 - DNA, 33 bp, Homo sapien
agtgcaattataaatatggacagggcaaatcac

SEQ ID NO: 1004337 - DNA, 33 bp, Homo sapien
agcaaattccaaaaaacggaagaagtgactaat

SEQ ID NO: 1004338 - DNA, 33 bp, Homo sapien
agcaaattccaaaaaatggaagaagtgactaat

SEQ ID NO: 1004339 - DNA, 33 bp, Homo sapien
ttcacactaattcctaactctggtaatttattc

SEQ ID NO: 1004340 - DNA, 33 bp, Homo sapien
ttcacactaattcctacctctggtaatttattc

SEQ ID NO: 1004341 - DNA, 33 bp, Homo sapien
ccagtggaagatgcaaaatggcatggaaaagaa

SEQ ID NO: 1004342 - DNA, 33 bp, Homo sapien
ccagtggaagatgcaacatggcatggaaaagaa

SEQ ID NO: 1004343 - DNA, 33 bp, Homo sapien
tgtttaatgtgcctctcaaagcaagtggtctct

SEQ ID NO: 1004344 - DNA, 33 bp, Homo sapien
tgtttaatgtgcctctgaaagcaagtggtctct

SEQ ID NO: 1004345 - DNA, 33 bp, Homo sapien
cagatggtttgcaaaagatggagccgggcatct

SEQ ID NO: 1004346 - DNA, 33 bp, Homo sapien
cagatggtttgcaaaatatggagccgggcatct

SEQ ID NO: 1004347 - DNA, 33 bp, Homo sapien
caggttaaatgtgagcgctctaatttctctcct

SEQ ID NO: 1004348 - DNA, 33 bp, Homo sapien
caggttaaatgtgagctctctaatttctctcct

SEQ ID NO: 1004349 - DNA, 33 bp, Homo sapien
atcaaatgacaagaccaagagccagcatttatt

SEQ ID NO: 1004350 - DNA, 33 bp, Homo sapien
atcaaatgacaagaccgagagccagcatttatt

SEQ ID NO: 1004351 - DNA, 33 bp, Homo sapien
aaatccatgagtaaaagcttctggctaaatttg

SEQ ID NO: 1004352 - DNA, 33 bp, Homo sapien
aaatccatgagtaaaatcttctggctaaatttg

SEQ ID NO: 1004353 - DNA, 33 bp, Homo sapien
aagccactagacattcccttttgtagctgagat

SEQ ID NO: 1004354 - DNA, 33 bp, Homo sapien
aagccactagacattctcttttgtagctgagat

SEQ ID NO: 1004355 - DNA, 33 bp, Homo sapien
atcattagtctgaatcaaattcctgctggacat

SEQ ID NO: 1004356 - DNA, 33 bp, Homo sapien
atcattagtctgaatcgaattcctgctggacat

SEQ ID NO: 1004357 - DNA, 33 bp, Homo sapien
taaaggaatagtaaagccttccaagttggatgt

SEQ ID NO: 1004358 - DNA, 33 bp, Homo sapien
taaaggaatagtaaagtcttccaagttggatgt

SEQ ID NO: 1004359 - DNA, 33 bp, Homo sapien
gaaaaacagcttgggaaaccagcaaatcactgc

SEQ ID NO: 1004360 - DNA, 33 bp, Homo sapien
gaaaaacagcttgggataccagcaaatcactgc

SEQ ID NO: 1004361 - DNA, 33 bp, Homo sapien
aacctggaaatgagaaatgatgcccactggctt

SEQ ID NO: 1004362 - DNA, 33 bp, Homo sapien
aacctggaaatgagaagtgatgcccactggctt

SEQ ID NO: 1004363 - DNA, 33 bp, Homo sapien
atatgaaagaaaaatggaaccttatgttgtaag

SEQ ID NO: 1004364 - DNA, 33 bp, Homo sapien
atatgaaagaaaaatgtaaccttatgttgtaag

SEQ ID NO: 1004365 - DNA, 33 bp, Homo sapien
ttgggagagctagccacactaaaaagaaaaata

SEQ ID NO: 1004366 - DNA, 33 bp, Homo sapien
ttgggagagctagccatactaaaaagaaaaata

SEQ ID NO: 1004367 - DNA, 33 bp, Homo sapien
ctcattcaaaaacaggaaccttctttgtagcct

SEQ ID NO: 1004368 - DNA, 33 bp, Homo sapien
ctcattcaaaaacaggcaccttctttgtagcct

SEQ ID NO: 1004369 - DNA, 33 bp, Homo sapien
tttacacacccaaatcacctgagagagagtgca

SEQ ID NO: 1004370 - DNA, 33 bp, Homo sapien
tttacacacccaaatcgcctgagagagagtgca

SEQ ID NO: 1004371 - DNA, 33 bp, Homo sapien
ttgtatatggtacagaatcacagaatatttggc

SEQ ID NO: 1004372 - DNA, 33 bp, Homo sapien
ttgtatatggtacagactcacagaatatttggc

SEQ ID NO: 1004373 - DNA, 33 bp, Homo sapien
tctaatatttggacctaaactaaggcaaactga

SEQ ID NO: 1004374 - DNA, 33 bp, Homo sapien
tctaatatttggacctcaactaaggcaaactga

SEQ ID NO: 1004375 - DNA, 33 bp, Homo sapien
atactttattgttatagctccagcacttggcac

SEQ ID NO: 1004376 - DNA, 33 bp, Homo sapien
atactttattgttatatctccagcacttggcac

SEQ ID NO: 1004377 - DNA, 33 bp, Homo sapien
gaaaagccctcagtaacagtgtttgccaatttc

SEQ ID NO: 1004378 - DNA, 33 bp, Homo sapien
gaaaagccctcagtaatagtgtttgccaatttc

SEQ ID NO: 1004379 - DNA, 33 bp, Homo sapien
tacctacgtggtcttccacctacaggtatttat

SEQ ID NO: 1004380 - DNA, 33 bp, Homo sapien
tacctacgtggtcttctacctacaggtatttat

SEQ ID NO: 1004381 - DNA, 33 bp, Homo sapien
gcctaaaggaagctgacatagcctcattcgtat

SEQ ID NO: 1004382 - DNA, 33 bp, Homo sapien
gcctaaaggaagctgagatagcctcattcgtat

SEQ ID NO: 1004383 - DNA, 33 bp, Homo sapien
tggattttgaaacataaaagtgtcataattaga

SEQ ID NO: 1004384 - DNA, 33 bp, Homo sapien
tggattttgaaacatagaagtgtcataattaga

SEQ ID NO: 1004385 - DNA, 33 bp, Homo sapien
attcacactttagtataaatttagatggtataa

SEQ ID NO: 1004386 - DNA, 33 bp, Homo sapien
attcacactttagtatgaatttagatggtataa

SEQ ID NO: 1004387 - DNA, 33 bp, Homo sapien
ataatgacttgtgtaactatctcactccacttg

SEQ ID NO: 1004388 - DNA, 33 bp, Homo sapien
ataatgacttgtgtaagtatctcactccacttg

SEQ ID NO: 1004389 - DNA, 33 bp, Homo sapien
catgtgaatgtggttgcaaaacaaatgtattat

SEQ ID NO: 1004390 - DNA, 33 bp, Homo sapien
catgtgaatgtggttggaaaacaaatgtattat

SEQ ID NO: 1004391 - DNA, 33 bp, Homo sapien
atgaagatgaattagccgcagggagagtcatag

SEQ ID NO: 1004392 - DNA, 33 bp, Homo sapien
atgaagatgaattagctgcagggagagtcatag

SEQ ID NO: 1004393 - DNA, 33 bp, Homo sapien
cagatcatctcactgacatcttctgttttccag

SEQ ID NO: 1004394 - DNA, 33 bp, Homo sapien
cagatcatctcactgatatcttctgttttccag

SEQ ID NO: 1004395 - DNA, 33 bp, Homo sapien
agtaaacctgtgatgaaaaaccttaaatagatg

SEQ ID NO: 1004396 - DNA, 33 bp, Homo sapien
agtaaacctgtgatgataaaccttaaatagatg

SEQ ID NO: 1004397 - DNA, 33 bp, Homo sapien
ttaaatagatgacaggcatatagtgttttctcc

SEQ ID NO: 1004398 - DNA, 33 bp, Homo sapien
ttaaatagatgacaggtatatagtgttttctcc

SEQ ID NO: 1004399 - DNA, 33 bp, Homo sapien
cgctccagcaacacgaagccacttgaagttacc

SEQ ID NO: 1004400 - DNA, 33 bp, Homo sapien
cgctccagcaacacgatgccacttgaagttacc

SEQ ID NO: 1004401 - DNA, 33 bp, Homo sapien
gctgaatctaatgtgaaagcctgacaggtccct

SEQ ID NO: 1004402 - DNA, 33 bp, Homo sapien
gctgaatctaatgtgagagcctgacaggtccct

SEQ ID NO: 1004403 - DNA, 33 bp, Homo sapien
aaagtcttcgagtataatagacatgaatgtgtc

SEQ ID NO: 1004404 - DNA, 33 bp, Homo sapien
aaagtcttcgagtatagtagacatgaatgtgtc

SEQ ID NO: 1004405 - DNA, 33 bp, Homo sapien
ctgtttttcttttgcaacatcaaaccttaaaaa

SEQ ID NO: 1004406 - DNA, 33 bp, Homo sapien
ctgtttttcttttgcagcatcaaaccttaaaaa

SEQ ID NO: 1004407 - DNA, 33 bp, Homo sapien
agagctaagagtgccacctacagacactttagt

SEQ ID NO: 1004408 - DNA, 33 bp, Homo sapien
agagctaagagtgccatctacagacactttagt

SEQ ID NO: 1004409 - DNA, 33 bp, Homo sapien
tcaccaatggttttaacgggtatggattcatag

SEQ ID NO: 1004410 - DNA, 33 bp, Homo sapien
tcaccaatggttttaaggggtatggattcatag

SEQ ID NO: 1004411 - DNA, 33 bp, Homo sapien
ttatcagctcacaataaactccagtctgttttg

SEQ ID NO: 1004412 - DNA, 33 bp, Homo sapien
ttatcagctcacaatacactccagtctgttttg

SEQ ID NO: 1004413 - DNA, 33 bp, Homo sapien
atgtgattagtatcacaaagtaaatgtcatgtt

SEQ ID NO: 1004414 - DNA, 33 bp, Homo sapien
atgtgattagtatcaccaagtaaatgtcatgtt

SEQ ID NO: 1004415 - DNA, 33 bp, Homo sapien
cctatccattagcagacgatgtttttccatttg

SEQ ID NO: 1004416 - DNA, 33 bp, Homo sapien
cctatccattagcagaggatgtttttccatttg

SEQ ID NO: 1004417 - DNA, 33 bp, Homo sapien
tatgtaccacactttccctttatccaacctgtc

SEQ ID NO: 1004418 - DNA, 33 bp, Homo sapien
tatgtaccacactttctctttatccaacctgtc

SEQ ID NO: 1004419 - DNA, 33 bp, Homo sapien
catgcctaacacgctaagctccctgggtgtggg

SEQ ID NO: 1004420 - DNA, 33 bp, Homo sapien
catgcctaacacgctatgctccctgggtgtggg

SEQ ID NO: 1004421 - DNA, 33 bp, Homo sapien
agttaatctattctcaatctgggaaaggcctag

SEQ ID NO: 1004422 - DNA, 33 bp, Homo sapien
agttaatctattctcactctgggaaaggcctag

SEQ ID NO: 1004423 - DNA, 33 bp, Homo sapien
caggaacaggcaaagtcaacgccatttataagg

SEQ ID NO: 1004424 - DNA, 33 bp, Homo sapien
caggaacaggcaaagtgaacgccatttataagg

SEQ ID NO: 1004425 - DNA, 33 bp, Homo sapien
aggctgttgtggtggacattctattattactga

SEQ ID NO: 1004426 - DNA, 33 bp, Homo sapien
aggctgttgtggtggagattctattattactga

SEQ ID NO: 1004427 - DNA, 33 bp, Homo sapien
tgcccaacccacatcagacttcactcacaaaac

SEQ ID NO: 1004428 - DNA, 33 bp, Homo sapien
tgcccaacccacatcatacttcactcacaaaac

SEQ ID NO: 1004429 - DNA, 33 bp, Homo sapien
tggtatgaggaacttaaggactgatatactctt

SEQ ID NO: 1004430 - DNA, 33 bp, Homo sapien
tggtatgaggaacttagggactgatatactctt

SEQ ID NO: 1004431 - DNA, 33 bp, Homo sapien
aattattcattgttaaagactcacacatgtttt

SEQ ID NO: 1004432 - DNA, 33 bp, Homo sapien
aattattcattgttaatgactcacacatgtttt

SEQ ID NO: 1004433 - DNA, 33 bp, Homo sapien
tctcagttgatgtctaagaataagagggctgtc

SEQ ID NO: 1004434 - DNA, 33 bp, Homo sapien
tctcagttgatgtctaggaataagagggctgtc

SEQ ID NO: 1004435 - DNA, 33 bp, Homo sapien
cctttgagtcccagcccaaaaaatcccagctgt

SEQ ID NO: 1004436 - DNA, 33 bp, Homo sapien
cctttgagtcccagcctaaaaaatcccagctgt

SEQ ID NO: 1004437 - DNA, 33 bp, Homo sapien
gtacagatctctaaaccgtgtttctctcttgaa

SEQ ID NO: 1004438 - DNA, 33 bp, Homo sapien
gtacagatctctaaactgtgtttctctcttgaa

SEQ ID NO: 1004439 - DNA, 33 bp, Homo sapien
aatatgaagaagtctaaaaatctagcatttgcc

SEQ ID NO: 1004440 - DNA, 33 bp, Homo sapien
aatatgaagaagtctagaaatctagcatttgcc

SEQ ID NO: 1004441 - DNA, 33 bp, Homo sapien
aaatctctgtagccaccgaattatttgttttcc

SEQ ID NO: 1004442 - DNA, 33 bp, Homo sapien
aaatctctgtagccactgaattatttgttttcc

SEQ ID NO: 1004443 - DNA, 33 bp, Homo sapien
cagagtggtgtctacaaagcaatgaaatgtggt

SEQ ID NO: 1004444 - DNA, 33 bp, Homo sapien
cagagtggtgtctacacagcaatgaaatgtggt

SEQ ID NO: 1004445 - DNA, 33 bp, Homo sapien
atttatctaaaactcaaacttaacaggtgttcc

SEQ ID NO: 1004446 - DNA, 33 bp, Homo sapien
atttatctaaaactcagacttaacaggtgttcc

SEQ ID NO: 1004447 - DNA, 33 bp, Homo sapien
ttggctgcggctttgacataaatggctcttatt

SEQ ID NO: 1004448 - DNA, 33 bp, Homo sapien
ttggctgcggctttgatataaatggctcttatt

SEQ ID NO: 1004449 - DNA, 33 bp, Homo sapien
atccatattcccttccggcagcaatagtacctt

SEQ ID NO: 1004450 - DNA, 33 bp, Homo sapien
atccatattcccttcctgcagcaatagtacctt

SEQ ID NO: 1004451 - DNA, 33 bp, Homo sapien
acatacactaaatccacaagccaggaagctggt

SEQ ID NO: 1004452 - DNA, 33 bp, Homo sapien
acatacactaaatccagaagccaggaagctggt

SEQ ID NO: 1004453 - DNA, 33 bp, Homo sapien
tgtagtggcaagaaaacagaacttggagtggta

SEQ ID NO: 1004454 - DNA, 33 bp, Homo sapien
tgtagtggcaagaaaatagaacttggagtggta

SEQ ID NO: 1004455 - DNA, 33 bp, Homo sapien
actgacagatggtacaaccctggacaactccct

SEQ ID NO: 1004456 - DNA, 33 bp, Homo sapien
actgacagatggtacagccctggacaactccct

SEQ ID NO: 1004457 - DNA, 33 bp, Homo sapien
gctgatagattggacacggggtttgggagagtg

SEQ ID NO: 1004458 - DNA, 33 bp, Homo sapien
gctgatagattggacatggggtttgggagagtg

SEQ ID NO: 1004459 - DNA, 33 bp, Homo sapien
ggtttcagaaaatctacgaagtgggactaagag

SEQ ID NO: 1004460 - DNA, 33 bp, Homo sapien
ggtttcagaaaatctatgaagtgggactaagag

SEQ ID NO: 1004461 - DNA, 33 bp, Homo sapien
tagatcctttcaaagggcattctcctgaggccc

SEQ ID NO: 1004462 - DNA, 33 bp, Homo sapien
tagatcctttcaaaggtcattctcctgaggccc

SEQ ID NO: 1004463 - DNA, 33 bp, Homo sapien
gtggaggttgtagtcacgcaaaaatgtacgagc

SEQ ID NO: 1004464 - DNA, 33 bp, Homo sapien
gtggaggttgtagtcatgcaaaaatgtacgagc

SEQ ID NO: 1004465 - DNA, 33 bp, Homo sapien
gtagctgatgtaataagtgtggtaataaaaata

SEQ ID NO: 1004466 - DNA, 33 bp, Homo sapien
gtagctgatgtaataattgtggtaataaaaata

SEQ ID NO: 1004467 - DNA, 33 bp, Homo sapien
ttcacactactcttacgacacaaagctccacag

SEQ ID NO: 1004468 - DNA, 33 bp, Homo sapien
ttcacactactcttactacacaaagctccacag

SEQ ID NO: 1004469 - DNA, 33 bp, Homo sapien
agtcttcaaaatgaataataatccaatgttgta

SEQ ID NO: 1004470 - DNA, 33 bp, Homo sapien
agtcttcaaaatgaatgataatccaatgttgta

SEQ ID NO: 1004471 - DNA, 33 bp, Homo sapien
agcttaaggatccacaaaactcaaaggtatcac

SEQ ID NO: 1004472 - DNA, 33 bp, Homo sapien
agcttaaggatccacagaactcaaaggtatcac

SEQ ID NO: 1004473 - DNA, 33 bp, Homo sapien
tcttcttttcatctaaatcttctgcttaaaaat

SEQ ID NO: 1004474 - DNA, 33 bp, Homo sapien
tcttcttttcatctaagtcttctgcttaaaaat

SEQ ID NO: 1004475 - DNA, 33 bp, Homo sapien
agccatagttttccaaaggactgtctcataatt

SEQ ID NO: 1004476 - DNA, 33 bp, Homo sapien
agccatagttttccaacggactgtctcataatt

SEQ ID NO: 1004477 - DNA, 33 bp, Homo sapien
aggtaaatggccctccaaattatctccacttta

SEQ ID NO: 1004478 - DNA, 33 bp, Homo sapien
aggtaaatggccctccgaattatctccacttta

SEQ ID NO: 1004479 - DNA, 33 bp, Homo sapien
gctaccattgtactcacaagtatgtctctatca

SEQ ID NO: 1004480 - DNA, 33 bp, Homo sapien
gctaccattgtactcataagtatgtctctatca

SEQ ID NO: 1004481 - DNA, 33 bp, Homo sapien
tgttgtcttacctctacgaggctccattggtct

SEQ ID NO: 1004482 - DNA, 33 bp, Homo sapien
tgttgtcttacctctatgaggctccattggtct

SEQ ID NO: 1004483 - DNA, 33 bp, Homo sapien
tcttagcagcgttgacagatgttgacctttgat

SEQ ID NO: 1004484 - DNA, 33 bp, Homo sapien
tcttagcagcgttgacggatgttgacctttgat

SEQ ID NO: 1004485 - DNA, 33 bp, Homo sapien
aggtagcagaatattacataaggtatgacagta

SEQ ID NO: 1004486 - DNA, 33 bp, Homo sapien
aggtagcagaatattatataaggtatgacagta

SEQ ID NO: 1004487 - DNA, 33 bp, Homo sapien
tttaagtgtagttatacgttcagttcaattcct

SEQ ID NO: 1004488 - DNA, 33 bp, Homo sapien
tttaagtgtagttatatgttcagttcaattcct

SEQ ID NO: 1004489 - DNA, 33 bp, Homo sapien
atcacggaaggttttacggacagcagtagatag

SEQ ID NO: 1004490 - DNA, 33 bp, Homo sapien
atcacggaaggttttatggacagcagtagatag

SEQ ID NO: 1004491 - DNA, 33 bp, Homo sapien
gcaccacaaacttcaaatacacctcagtttggt

SEQ ID NO: 1004492 - DNA, 33 bp, Homo sapien
gcaccacaaacttcaagtacacctcagtttggt

SEQ ID NO: 1004493 - DNA, 33 bp, Homo sapien
acagctcaaagtgtgacagagatttggggtaga

SEQ ID NO: 1004494 - DNA, 33 bp, Homo sapien
acagctcaaagtgtgagagagatttggggtaga

SEQ ID NO: 1004495 - DNA, 33 bp, Homo sapien
cagcgaagaaaggacaagctatcctttgtaaag

SEQ ID NO: 1004496 - DNA, 33 bp, Homo sapien
cagcgaagaaaggacaggctatcctttgtaaag

SEQ ID NO: 1004497 - DNA, 33 bp, Homo sapien
gatatgacatattaacactacctggaaggaggg

SEQ ID NO: 1004498 - DNA, 33 bp, Homo sapien
gatatgacatattaacgctacctggaaggaggg

SEQ ID NO: 1004499 - DNA, 33 bp, Homo sapien
cctctcttggagatcccaaaggcaactcgtcac

SEQ ID NO: 1004500 - DNA, 33 bp, Homo sapien
cctctcttggagatcctaaaggcaactcgtcac

SEQ ID NO: 1004501 - DNA, 33 bp, Homo sapien
gaacaatttatttagcgcctccaaatggctatt

SEQ ID NO: 1004502 - DNA, 33 bp, Homo sapien
gaacaatttatttagctcctccaaatggctatt

SEQ ID NO: 1004503 - DNA, 33 bp, Homo sapien
ttgtctctttcttatactagtgcaacagttaca

SEQ ID NO: 1004504 - DNA, 33 bp, Homo sapien
ttgtctctttcttatagtagtgcaacagttaca

SEQ ID NO: 1004505 - DNA, 33 bp, Homo sapien
ttctcattgttattcacatctatgctgtaccca

SEQ ID NO: 1004506 - DNA, 33 bp, Homo sapien
ttctcattgttattcatatctatgctgtaccca

SEQ ID NO: 1004507 - DNA, 33 bp, Homo sapien
gaaacaaggccattcacgagactctgtggttta

SEQ ID NO: 1004508 - DNA, 33 bp, Homo sapien
gaaacaaggccattcatgagactctgtggttta

SEQ ID NO: 1004509 - DNA, 33 bp, Homo sapien
gtttctgtatttcggccccatgatgcatataag

SEQ ID NO: 1004510 - DNA, 33 bp, Homo sapien
gtttctgtatttcggctccatgatgcatataag

SEQ ID NO: 1004511 - DNA, 33 bp, Homo sapien
gaaagccaactctgcaatccattcgtctgggtt

SEQ ID NO: 1004512 - DNA, 33 bp, Homo sapien
gaaagccaactctgcagtccattcgtctgggtt

SEQ ID NO: 1004513 - DNA, 33 bp, Homo sapien
cagagagatggcctcaatgactgtggactgatc

SEQ ID NO: 1004514 - DNA, 33 bp, Homo sapien
cagagagatggcctcagtgactgtggactgatc

SEQ ID NO: 1004515 - DNA, 33 bp, Homo sapien
ttttccttctgctttagaaatgtttcctttaga

SEQ ID NO: 1004516 - DNA, 33 bp, Homo sapien
ttttccttctgctttataaatgtttcctttaga

SEQ ID NO: 1004517 - DNA, 33 bp, Homo sapien
atattaaacgaactgagaaattcttcggtaaag

SEQ ID NO: 1004518 - DNA, 33 bp, Homo sapien
atattaaacgaactgataaattcttcggtaaag

SEQ ID NO: 1004519 - DNA, 33 bp, Homo sapien
atactgggtgcgtatacatttaggatagttagt

SEQ ID NO: 1004520 - DNA, 33 bp, Homo sapien
atactgggtgcgtatatatttaggatagttagt

SEQ ID NO: 1004521 - DNA, 33 bp, Homo sapien
ctgaggagtgttttaaatccaattatgtggtcg

SEQ ID NO: 1004522 - DNA, 33 bp, Homo sapien
ctgaggagtgttttaattccaattatgtggtcg

SEQ ID NO: 1004523 - DNA, 33 bp, Homo sapien
tttaccaaatactcttcaaatcactgaagcctg

SEQ ID NO: 1004524 - DNA, 33 bp, Homo sapien
tttaccaaatactctttaaatcactgaagcctg

SEQ ID NO: 1004525 - DNA, 33 bp, Homo sapien
agcaagcagcaaaatcaataatccgaaaaacaa

SEQ ID NO: 1004526 - DNA, 33 bp, Homo sapien
agcaagcagcaaaatcgataatccgaaaaacaa

SEQ ID NO: 1004527 - DNA, 33 bp, Homo sapien
ttagaacaatctattcaaatgtcctttatgagc

SEQ ID NO: 1004528 - DNA, 33 bp, Homo sapien
ttagaacaatctattccaatgtcctttatgagc

SEQ ID NO: 1004529 - DNA, 33 bp, Homo sapien
agacagagtatgaaacaggtctccaaacaattc

SEQ ID NO: 1004530 - DNA, 33 bp, Homo sapien
agacagagtatgaaacgggtctccaaacaattc

SEQ ID NO: 1004531 - DNA, 33 bp, Homo sapien
tggctcaaatccttgacgtcaacattgccttct

SEQ ID NO: 1004532 - DNA, 33 bp, Homo sapien
tggctcaaatccttgatgtcaacattgccttct

SEQ ID NO: 1004533 - DNA, 33 bp, Homo sapien
ggcaagtacttccaaacgtaagaagtgagtggg

SEQ ID NO: 1004534 - DNA, 33 bp, Homo sapien
ggcaagtacttccaaatgtaagaagtgagtggg

SEQ ID NO: 1004535 - DNA, 33 bp, Homo sapien
ctcaaagatctttttcactaggatgatactgtc

SEQ ID NO: 1004536 - DNA, 33 bp, Homo sapien
ctcaaagatctttttctctaggatgatactgtc

SEQ ID NO: 1004537 - DNA, 33 bp, Homo sapien
ctctgatgataaaccaaatagataaggtacctg

SEQ ID NO: 1004538 - DNA, 33 bp, Homo sapien
ctctgatgataaaccagatagataaggtacctg

SEQ ID NO: 1004539 - DNA, 33 bp, Homo sapien
ctaagcactcctccacaatgacatcttttaggt

SEQ ID NO: 1004540 - DNA, 33 bp, Homo sapien
ctaagcactcctccacgatgacatcttttaggt

SEQ ID NO: 1004541 - DNA, 33 bp, Homo sapien
atcgccaaaactaaccaccaggaagataaggag

SEQ ID NO: 1004542 - DNA, 33 bp, Homo sapien
atcgccaaaactaaccgccaggaagataaggag

SEQ ID NO: 1004543 - DNA, 33 bp, Homo sapien
gtccagtagatttttggatctgcaaagtcaagg

SEQ ID NO: 1004544 - DNA, 33 bp, Homo sapien
gtccagtagatttttgtatctgcaaagtcaagg

SEQ ID NO: 1004545 - DNA, 33 bp, Homo sapien
aggagtacaactaaccaagcagatctttacaag

SEQ ID NO: 1004546 - DNA, 33 bp, Homo sapien
aggagtacaactaaccgagcagatctttacaag

SEQ ID NO: 1004547 - DNA, 33 bp, Homo sapien
tgatgtccacgctatccgactgcctcattcttt

SEQ ID NO: 1004548 - DNA, 33 bp, Homo sapien
tgatgtccacgctatctgactgcctcattcttt

SEQ ID NO: 1004549 - DNA, 33 bp, Homo sapien
tatacaccaacagagacaaagctgagaatcaaa

SEQ ID NO: 1004550 - DNA, 33 bp, Homo sapien
tatacaccaacagagagaaagctgagaatcaaa

SEQ ID NO: 1004551 - DNA, 33 bp, Homo sapien
catactgcctttggtacagtaggtagatagcca

SEQ ID NO: 1004552 - DNA, 33 bp, Homo sapien
catactgcctttggtatagtaggtagatagcca

SEQ ID NO: 1004553 - DNA, 33 bp, Homo sapien
gaagtaggccagcatacaaaaactgaagtccaa

SEQ ID NO: 1004554 - DNA, 33 bp, Homo sapien
gaagtaggccagcatataaaaactgaagtccaa

SEQ ID NO: 1004555 - DNA, 33 bp, Homo sapien
ttgttatttttttcccaaattcgcaaagtgaga

SEQ ID NO: 1004556 - DNA, 33 bp, Homo sapien
ttgttatttttttccccaattcgcaaagtgaga

SEQ ID NO: 1004557 - DNA, 33 bp, Homo sapien
actacttctgtttgtaagaggaaaagaaattaa

SEQ ID NO: 1004558 - DNA, 33 bp, Homo sapien
actacttctgtttgtaggaggaaaagaaattaa

SEQ ID NO: 1004559 - DNA, 33 bp, Homo sapien
ttcagtactaaatgaacgccaactgcagttgaa

SEQ ID NO: 1004560 - DNA, 33 bp, Homo sapien
ttcagtactaaatgaatgccaactgcagttgaa

SEQ ID NO: 1004561 - DNA, 33 bp, Homo sapien
tggtgcctatgtaccacattttcgttatccagt

SEQ ID NO: 1004562 - DNA, 33 bp, Homo sapien
tggtgcctatgtaccatattttcgttatccagt

SEQ ID NO: 1004563 - DNA, 33 bp, Homo sapien
ctagagattgctccccccttctgactgaggcac

SEQ ID NO: 1004564 - DNA, 33 bp, Homo sapien
ctagagattgctccccgcttctgactgaggcac

SEQ ID NO: 1004565 - DNA, 33 bp, Homo sapien
tgaagatttaaagcttcaaattgtcatactcag

SEQ ID NO: 1004566 - DNA, 33 bp, Homo sapien
tgaagatttaaagcttgaaattgtcatactcag

SEQ ID NO: 1004567 - DNA, 33 bp, Homo sapien
taaaattaacctgtgaaaatgccttaaaaacac

SEQ ID NO: 1004568 - DNA, 33 bp, Homo sapien
taaaattaacctgtgagaatgccttaaaaacac

SEQ ID NO: 1004569 - DNA, 33 bp, Homo sapien
aaggagatcagatgggcccaaatcagacctcac

SEQ ID NO: 1004570 - DNA, 33 bp, Homo sapien
aaggagatcagatgggtccaaatcagacctcac

SEQ ID NO: 1004571 - DNA, 33 bp, Homo sapien
aatctcaaatctttcaaggtacacagattactc

SEQ ID NO: 1004572 - DNA, 33 bp, Homo sapien
aatctcaaatctttcagggtacacagattactc

SEQ ID NO: 1004573 - DNA, 33 bp, Homo sapien
aattattgattcactggcaaactcctaattctg

SEQ ID NO: 1004574 - DNA, 33 bp, Homo sapien
aattattgattcactgtcaaactcctaattctg

SEQ ID NO: 1004575 - DNA, 33 bp, Homo sapien
tcttgcccatggagagcatttagtctgggaatt

SEQ ID NO: 1004576 - DNA, 33 bp, Homo sapien
tcttgcccatggagaggatttagtctgggaatt

SEQ ID NO: 1004577 - DNA, 33 bp, Homo sapien
tggattgatttctgtggagattacatctgactt

SEQ ID NO: 1004578 - DNA, 33 bp, Homo sapien
tggattgatttctgtgtagattacatctgactt

SEQ ID NO: 1004579 - DNA, 33 bp, Homo sapien
gacagtgcctagcggaatataaacacttgtaaa

SEQ ID NO: 1004580 - DNA, 33 bp, Homo sapien
gacagtgcctagcggagtataaacacttgtaaa

SEQ ID NO: 1004581 - DNA, 33 bp, Homo sapien
caatttcggcatatataaaatgtagacgagagt

SEQ ID NO: 1004582 - DNA, 33 bp, Homo sapien
caatttcggcatatatgaaatgtagacgagagt

SEQ ID NO: 1004583 - DNA, 33 bp, Homo sapien
atttaatcctcataaaatccctgaaatagaggt

SEQ ID NO: 1004584 - DNA, 33 bp, Homo sapien
atttaatcctcataaactccctgaaatagaggt

SEQ ID NO: 1004585 - DNA, 33 bp, Homo sapien
tatgtttttgataaaacgcctcctcaaagaaaa

SEQ ID NO: 1004586 - DNA, 33 bp, Homo sapien
tatgtttttgataaaatgcctcctcaaagaaaa

SEQ ID NO: 1004587 - DNA, 33 bp, Homo sapien
tttacaggttaataaaacttgtgaccaacaagc

SEQ ID NO: 1004588 - DNA, 33 bp, Homo sapien
tttacaggttaataaatcttgtgaccaacaagc

SEQ ID NO: 1004589 - DNA, 33 bp, Homo sapien
gaatctttacttgggcaataaacattatctata

SEQ ID NO: 1004590 - DNA, 33 bp, Homo sapien
gaatctttacttgggcgataaacattatctata

SEQ ID NO: 1004591 - DNA, 33 bp, Homo sapien
caagacctgaaggctgcacatactaatttctat

SEQ ID NO: 1004592 - DNA, 33 bp, Homo sapien
caagacctgaaggctggacatactaatttctat

SEQ ID NO: 1004593 - DNA, 33 bp, Homo sapien
aggagcgatggcagaactccaagcaaacttctt

SEQ ID NO: 1004594 - DNA, 33 bp, Homo sapien
aggagcgatggcagaattccaagcaaacttctt

SEQ ID NO: 1004595 - DNA, 33 bp, Homo sapien
tacatgttgaagagacaggctggatattcattc

SEQ ID NO: 1004596 - DNA, 33 bp, Homo sapien
tacatgttgaagagacgggctggatattcattc

SEQ ID NO: 1004597 - DNA, 33 bp, Homo sapien
catttgagatacaactaaagaagtgagttgaga

SEQ ID NO: 1004598 - DNA, 33 bp, Homo sapien
catttgagatacaactgaagaagtgagttgaga

SEQ ID NO: 1004599 - DNA, 33 bp, Homo sapien
gtttatgattcactgcaaaatgtagcatttctt

SEQ ID NO: 1004600 - DNA, 33 bp, Homo sapien
gtttatgattcactgcgaaatgtagcatttctt

SEQ ID NO: 1004601 - DNA, 33 bp, Homo sapien
gatctacacaattctacgattggatatggtaga

SEQ ID NO: 1004602 - DNA, 33 bp, Homo sapien
gatctacacaattctatgattggatatggtaga

SEQ ID NO: 1004603 - DNA, 33 bp, Homo sapien
actacgggttgtttagccacaacaatgcacaaa

SEQ ID NO: 1004604 - DNA, 33 bp, Homo sapien
actacgggttgtttaggcacaacaatgcacaaa

SEQ ID NO: 1004605 - DNA, 33 bp, Homo sapien
tcaactatccagcttccagaattgtgtgaacaa

SEQ ID NO: 1004606 - DNA, 33 bp, Homo sapien
tcaactatccagcttctagaattgtgtgaacaa

SEQ ID NO: 1004607 - DNA, 33 bp, Homo sapien
aaactcttctaaccaccgcttctgtcttcctat

SEQ ID NO: 1004608 - DNA, 33 bp, Homo sapien
aaactcttctaaccactgcttctgtcttcctat

SEQ ID NO: 1004609 - DNA, 33 bp, Homo sapien
ggttggacaagggaagaacattgatcaacagga

SEQ ID NO: 1004610 - DNA, 33 bp, Homo sapien
ggttggacaagggaaggacattgatcaacagga

SEQ ID NO: 1004611 - DNA, 33 bp, Homo sapien
tctacctaccgttacaatcactgcacacatgac

SEQ ID NO: 1004612 - DNA, 33 bp, Homo sapien
tctacctaccgttacagtcactgcacacatgac

SEQ ID NO: 1004613 - DNA, 33 bp, Homo sapien
aggacataaatcatgaaaaatctgctacaacta

SEQ ID NO: 1004614 - DNA, 33 bp, Homo sapien
aggacataaatcatgataaatctgctacaacta

SEQ ID NO: 1004615 - DNA, 33 bp, Homo sapien
ttttcacaccaccccaactcactatcaaatccc

SEQ ID NO: 1004616 - DNA, 33 bp, Homo sapien
ttttcacaccaccccatctcactatcaaatccc

SEQ ID NO: 1004617 - DNA, 33 bp, Homo sapien
attgtaactatatacacgcccattgaccatttc

SEQ ID NO: 1004618 - DNA, 33 bp, Homo sapien
attgtaactatatacatgcccattgaccatttc

SEQ ID NO: 1004619 - DNA, 33 bp, Homo sapien
tcctaggaaagcccccaacgtttccactgcaaa

SEQ ID NO: 1004620 - DNA, 33 bp, Homo sapien
tcctaggaaagccccccacgtttccactgcaaa

SEQ ID NO: 1004621 - DNA, 33 bp, Homo sapien
atgaaggctcggaaacgccattgcctcaataaa

SEQ ID NO: 1004622 - DNA, 33 bp, Homo sapien
atgaaggctcggaaactccattgcctcaataaa

SEQ ID NO: 1004623 - DNA, 33 bp, Homo sapien
cccaatacttgcttaaacaaatttatactctgc

SEQ ID NO: 1004624 - DNA, 33 bp, Homo sapien
cccaatacttgcttaaccaaatttatactctgc

SEQ ID NO: 1004625 - DNA, 33 bp, Homo sapien
gtttaagaaaggcctccgacttattcaagtctg

SEQ ID NO: 1004626 - DNA, 33 bp, Homo sapien
gtttaagaaaggcctctgacttattcaagtctg

SEQ ID NO: 1004627 - DNA, 33 bp, Homo sapien
cttaaacccaactggcaacttttctgcctcttt

SEQ ID NO: 1004628 - DNA, 33 bp, Homo sapien
cttaaacccaactggcgacttttctgcctcttt

SEQ ID NO: 1004629 - DNA, 33 bp, Homo sapien
acagatgccacaagaacgatgtttcttaactaa

SEQ ID NO: 1004630 - DNA, 33 bp, Homo sapien
acagatgccacaagaatgatgtttcttaactaa

SEQ ID NO: 1004631 - DNA, 33 bp, Homo sapien
cagaacttttgcccaccactcactagccacttg

SEQ ID NO: 1004632 - DNA, 33 bp, Homo sapien
cagaacttttgcccactactcactagccacttg

SEQ ID NO: 1004633 - DNA, 33 bp, Homo sapien
cacagcttttcaaccaccaaaacatttggtgtc

SEQ ID NO: 1004634 - DNA, 33 bp, Homo sapien
cacagcttttcaaccatcaaaacatttggtgtc

SEQ ID NO: 1004635 - DNA, 33 bp, Homo sapien
agttacactacgcaaaaaaatgaatgtggttgc

SEQ ID NO: 1004636 - DNA, 33 bp, Homo sapien
agttacactacgcaaagaaatgaatgtggttgc

SEQ ID NO: 1004637 - DNA, 33 bp, Homo sapien
aatgcgtgtacccaaggaacttttgtcttagaa

SEQ ID NO: 1004638 - DNA, 33 bp, Homo sapien
aatgcgtgtacccaagtaacttttgtcttagaa

SEQ ID NO: 1004639 - DNA, 33 bp, Homo sapien
gataactgactagctaaatgtaggagaatgaaa

SEQ ID NO: 1004640 - DNA, 33 bp, Homo sapien
gataactgactagctatatgtaggagaatgaaa

SEQ ID NO: 1004641 - DNA, 33 bp, Homo sapien
atcattctcactcatacaaagtctgattttttt

SEQ ID NO: 1004642 - DNA, 33 bp, Homo sapien
atcattctcactcatataaagtctgattttttt

SEQ ID NO: 1004643 - DNA, 33 bp, Homo sapien
tgtaattaataaagacggaaaatgaagcaggaa

SEQ ID NO: 1004644 - DNA, 33 bp, Homo sapien
tgtaattaataaagactgaaaatgaagcaggaa

SEQ ID NO: 1004645 - DNA, 33 bp, Homo sapien
ttttgtaacagtgaagacagagaacagcaggta

SEQ ID NO: 1004646 - DNA, 33 bp, Homo sapien
ttttgtaacagtgaaggcagagaacagcaggta

SEQ ID NO: 1004647 - DNA, 33 bp, Homo sapien
ttgggacaactggaaaagcacatgccaaagaat

SEQ ID NO: 1004648 - DNA, 33 bp, Homo sapien
ttgggacaactggaaaggcacatgccaaagaat

SEQ ID NO: 1004649 - DNA, 33 bp, Homo sapien
taggatggttttacaacagctagtctgctctga

SEQ ID NO: 1004650 - DNA, 33 bp, Homo sapien
taggatggttttacaatagctagtctgctctga

SEQ ID NO: 1004651 - DNA, 33 bp, Homo sapien
ggtcttagtggaaagcacaaaccccaaagcaat

SEQ ID NO: 1004652 - DNA, 33 bp, Homo sapien
ggtcttagtggaaagcgcaaaccccaaagcaat

SEQ ID NO: 1004653 - DNA, 33 bp, Homo sapien
gtttggtcaggtctaacgcaagcatgagtgaac

SEQ ID NO: 1004654 - DNA, 33 bp, Homo sapien
gtttggtcaggtctaatgcaagcatgagtgaac

SEQ ID NO: 1004655 - DNA, 33 bp, Homo sapien
ccaccacccatacttaacctaggtctcaaagca

SEQ ID NO: 1004656 - DNA, 33 bp, Homo sapien
ccaccacccatacttagcctaggtctcaaagca

SEQ ID NO: 1004657 - DNA, 33 bp, Homo sapien
ttacacatcttccaaaaactcttccaggttctg

SEQ ID NO: 1004658 - DNA, 33 bp, Homo sapien
ttacacatcttccaaacactcttccaggttctg

SEQ ID NO: 1004659 - DNA, 33 bp, Homo sapien
tcctttttccaaataaatacttgggcaaagagg

SEQ ID NO: 1004660 - DNA, 33 bp, Homo sapien
tcctttttccaaataagtacttgggcaaagagg

SEQ ID NO: 1004661 - DNA, 33 bp, Homo sapien
caatagcaaatttgctcaacgatttcaggtgca

SEQ ID NO: 1004662 - DNA, 33 bp, Homo sapien
caatagcaaatttgcttaacgatttcaggtgca

SEQ ID NO: 1004663 - DNA, 33 bp, Homo sapien
tttgaggagccagttcaaaggacttacaacttg

SEQ ID NO: 1004664 - DNA, 33 bp, Homo sapien
tttgaggagccagttcgaaggacttacaacttg

SEQ ID NO: 1004665 - DNA, 33 bp, Homo sapien
tccttgaagcaagaggaacttgtgaatttcaag

SEQ ID NO: 1004666 - DNA, 33 bp, Homo sapien
tccttgaagcaagagggacttgtgaatttcaag

SEQ ID NO: 1004667 - DNA, 33 bp, Homo sapien
aaggcagttacttgcacggctcagctttcagct

SEQ ID NO: 1004668 - DNA, 33 bp, Homo sapien
aaggcagttacttgcatggctcagctttcagct

SEQ ID NO: 1004669 - DNA, 33 bp, Homo sapien
tcaaaatcatctttggaaaaggcatggaccata

SEQ ID NO: 1004670 - DNA, 33 bp, Homo sapien
tcaaaatcatctttggtaaaggcatggaccata

SEQ ID NO: 1004671 - DNA, 33 bp, Homo sapien
ttttcagaattgtaaacgaacattagcttcaac

SEQ ID NO: 1004672 - DNA, 33 bp, Homo sapien
ttttcagaattgtaaatgaacattagcttcaac

SEQ ID NO: 1004673 - DNA, 33 bp, Homo sapien
gcccaaattcagactcaactttagcataattct

SEQ ID NO: 1004674 - DNA, 33 bp, Homo sapien
gcccaaattcagactctactttagcataattct

SEQ ID NO: 1004675 - DNA, 33 bp, Homo sapien
ggcgcataccactacacctggctaagtcttgca

SEQ ID NO: 1004676 - DNA, 33 bp, Homo sapien
ggcgcataccactacatctggctaagtcttgca

SEQ ID NO: 1004677 - DNA, 33 bp, Homo sapien
ctattctctccagaaaatgattggttgaattag

SEQ ID NO: 1004678 - DNA, 33 bp, Homo sapien
ctattctctccagaaagtgattggttgaattag

SEQ ID NO: 1004679 - DNA, 33 bp, Homo sapien
ttatactcagaatggcagagcatgtttgatgtg

SEQ ID NO: 1004680 - DNA, 33 bp, Homo sapien
ttatactcagaatggccgagcatgtttgatgtg

SEQ ID NO: 1004681 - DNA, 33 bp, Homo sapien
gattcactttgggaaacaaacactacaccaaac

SEQ ID NO: 1004682 - DNA, 33 bp, Homo sapien
gattcactttgggaaataaacactacaccaaac

SEQ ID NO: 1004683 - DNA, 33 bp, Homo sapien
gcttaagaaaattaaggcactgggccaagacca

SEQ ID NO: 1004684 - DNA, 33 bp, Homo sapien
gcttaagaaaattaagtcactgggccaagacca

SEQ ID NO: 1004685 - DNA, 33 bp, Homo sapien
atttctgatttctataacagagcaatccaatgg

SEQ ID NO: 1004686 - DNA, 33 bp, Homo sapien
atttctgatttctatagcagagcaatccaatgg

SEQ ID NO: 1004687 - DNA, 33 bp, Homo sapien
ttaatgcctcaggtgcaaggaacccgggtttgc

SEQ ID NO: 1004688 - DNA, 33 bp, Homo sapien
ttaatgcctcaggtgcgaggaacccgggtttgc

SEQ ID NO: 1004689 - DNA, 33 bp, Homo sapien
acagtggggataaagacgtaagcaaaatacaca

SEQ ID NO: 1004690 - DNA, 33 bp, Homo sapien
acagtggggataaagatgtaagcaaaatacaca

SEQ ID NO: 1004691 - DNA, 33 bp, Homo sapien
agccctgaacctggcacgatgtttcaactaaag

SEQ ID NO: 1004692 - DNA, 33 bp, Homo sapien
agccctgaacctggcatgatgtttcaactaaag

SEQ ID NO: 1004693 - DNA, 33 bp, Homo sapien
ttattaaacagggacaaaaatcaaatctgacat

SEQ ID NO: 1004694 - DNA, 33 bp, Homo sapien
ttattaaacagggacagaaatcaaatctgacat

SEQ ID NO: 1004695 - DNA, 33 bp, Homo sapien
agtagacagcaattgacgaattaggcagtgcca

SEQ ID NO: 1004696 - DNA, 33 bp, Homo sapien
agtagacagcaattgatgaattaggcagtgcca

SEQ ID NO: 1004697 - DNA, 33 bp, Homo sapien
gcaaaactgtatggccgcacacatagttacaac

SEQ ID NO: 1004698 - DNA, 33 bp, Homo sapien
gcaaaactgtatggcctcacacatagttacaac

SEQ ID NO: 1004699 - DNA, 33 bp, Homo sapien
tccagcaggtcttcaaaaggcggtgttctgctg

SEQ ID NO: 1004700 - DNA, 33 bp, Homo sapien
tccagcaggtcttcaacaggcggtgttctgctg

SEQ ID NO: 1004701 - DNA, 33 bp, Homo sapien
aaaaacatcagagttacagatctcgtcaccaca

SEQ ID NO: 1004702 - DNA, 33 bp, Homo sapien
aaaaacatcagagttatagatctcgtcaccaca

SEQ ID NO: 1004703 - DNA, 33 bp, Homo sapien
ggcattgtacatgggccattaagcagtatattt

SEQ ID NO: 1004704 - DNA, 33 bp, Homo sapien
ggcattgtacatgggctattaagcagtatattt

SEQ ID NO: 1004705 - DNA, 33 bp, Homo sapien
agcctagatttgaatccagagtttcaggctcac

SEQ ID NO: 1004706 - DNA, 33 bp, Homo sapien
agcctagatttgaatcgagagtttcaggctcac

SEQ ID NO: 1004707 - DNA, 33 bp, Homo sapien
ggctggcaaggcagtaaataaagttcctattgt

SEQ ID NO: 1004708 - DNA, 33 bp, Homo sapien
ggctggcaaggcagtacataaagttcctattgt

SEQ ID NO: 1004709 - DNA, 33 bp, Homo sapien
gacacaaatgaatggacgcatttaaaagcactt

SEQ ID NO: 1004710 - DNA, 33 bp, Homo sapien
gacacaaatgaatggatgcatttaaaagcactt

SEQ ID NO: 1004711 - DNA, 33 bp, Homo sapien
caggaaggggaatgcagcacttctttgaaaggg

SEQ ID NO: 1004712 - DNA, 33 bp, Homo sapien
caggaaggggaatgcatcacttctttgaaaggg

SEQ ID NO: 1004713 - DNA, 33 bp, Homo sapien
acacaaaaatcaaaaccgtctgagactgcttct

SEQ ID NO: 1004714 - DNA, 33 bp, Homo sapien
acacaaaaatcaaaactgtctgagactgcttct

SEQ ID NO: 1004715 - DNA, 33 bp, Homo sapien
ttaacaatgtgaaccaatgatgtattttgtcat

SEQ ID NO: 1004716 - DNA, 33 bp, Homo sapien
ttaacaatgtgaaccagtgatgtattttgtcat

SEQ ID NO: 1004717 - DNA, 33 bp, Homo sapien
tgactgattctagataggaggcaaaaaggaaca

SEQ ID NO: 1004718 - DNA, 33 bp, Homo sapien
tgactgattctagatatgaggcaaaaaggaaca

SEQ ID NO: 1004719 - DNA, 33 bp, Homo sapien
atcctgatggaagtacacaatattacctgtgaa

SEQ ID NO: 1004720 - DNA, 33 bp, Homo sapien
atcctgatggaagtacgcaatattacctgtgaa

SEQ ID NO: 1004721 - DNA, 33 bp, Homo sapien
acattaagatagtttacatatgccttttaaggc

SEQ ID NO: 1004722 - DNA, 33 bp, Homo sapien
acattaagatagtttagatatgccttttaaggc

SEQ ID NO: 1004723 - DNA, 33 bp, Homo sapien
gcctgctgttacctacaggcaaaatccttgcca

SEQ ID NO: 1004724 - DNA, 33 bp, Homo sapien
gcctgctgttacctacgggcaaaatccttgcca

SEQ ID NO: 1004725 - DNA, 33 bp, Homo sapien
ttatttggccagtgccaagaggaattgcaatca

SEQ ID NO: 1004726 - DNA, 33 bp, Homo sapien
ttatttggccagtgccgagaggaattgcaatca

SEQ ID NO: 1004727 - DNA, 33 bp, Homo sapien
ctaccatttggcctaaaataaggagagcaacat

SEQ ID NO: 1004728 - DNA, 33 bp, Homo sapien
ctaccatttggcctaatataaggagagcaacat

SEQ ID NO: 1004729 - DNA, 33 bp, Homo sapien
gtctctactctactgtaaactcttggctctaaa

SEQ ID NO: 1004730 - DNA, 33 bp, Homo sapien
gtctctactctactgtgaactcttggctctaaa

SEQ ID NO: 1004731 - DNA, 33 bp, Homo sapien
agttgaaagtcttgtcaatcaaggagagtaatg

SEQ ID NO: 1004732 - DNA, 33 bp, Homo sapien
agttgaaagtcttgtccatcaaggagagtaatg

SEQ ID NO: 1004733 - DNA, 33 bp, Homo sapien
tacatctatggggaacaactgttactaacgcca

SEQ ID NO: 1004734 - DNA, 33 bp, Homo sapien
tacatctatggggaactactgttactaacgcca

SEQ ID NO: 1004735 - DNA, 33 bp, Homo sapien
acttcaacatcagagtcaagccatacttaagga

SEQ ID NO: 1004736 - DNA, 33 bp, Homo sapien
acttcaacatcagagttaagccatacttaagga

SEQ ID NO: 1004737 - DNA, 33 bp, Homo sapien
caaaccaaaccaaactaaaatggagtcactcat

SEQ ID NO: 1004738 - DNA, 33 bp, Homo sapien
caaaccaaaccaaactgaaatggagtcactcat

SEQ ID NO: 1004739 - DNA, 33 bp, Homo sapien
aaacaccaagctataaccaatcttgctgtttct

SEQ ID NO: 1004740 - DNA, 33 bp, Homo sapien
aaacaccaagctataagcaatcttgctgtttct

SEQ ID NO: 1004741 - DNA, 33 bp, Homo sapien
ggaaaaatcactaacaacaacatcttaaaaaaa

SEQ ID NO: 1004742 - DNA, 33 bp, Homo sapien
ggaaaaatcactaacagcaacatcttaaaaaaa

SEQ ID NO: 1004743 - DNA, 33 bp, Homo sapien
atgttttatttcactcaaattcgaatccatgca

SEQ ID NO: 1004744 - DNA, 33 bp, Homo sapien
atgttttatttcactcgaattcgaatccatgca

SEQ ID NO: 1004745 - DNA, 33 bp, Homo sapien
gacatctgaccttgaaaaagataccatctagta

SEQ ID NO: 1004746 - DNA, 33 bp, Homo sapien
gacatctgaccttgaagaagataccatctagta

SEQ ID NO: 1004747 - DNA, 33 bp, Homo sapien
tggattccatgcactacatttcttttactttag

SEQ ID NO: 1004748 - DNA, 33 bp, Homo sapien
tggattccatgcactagatttcttttactttag

SEQ ID NO: 1004749 - DNA, 33 bp, Homo sapien
tatctcatggtgttcacagcaagtcatggctag

SEQ ID NO: 1004750 - DNA, 33 bp, Homo sapien
tatctcatggtgttcatagcaagtcatggctag

SEQ ID NO: 1004751 - DNA, 33 bp, Homo sapien
atttgatggcattaacaaagttccttaaagtca

SEQ ID NO: 1004752 - DNA, 33 bp, Homo sapien
atttgatggcattaacgaagttccttaaagtca

SEQ ID NO: 1004753 - DNA, 33 bp, Homo sapien
atgtgctcaccaagtacgaccagagagaatttg

SEQ ID NO: 1004754 - DNA, 33 bp, Homo sapien
atgtgctcaccaagtatgaccagagagaatttg

SEQ ID NO: 1004755 - DNA, 33 bp, Homo sapien
cgagactccgagaagaactcatccaaggcactg

SEQ ID NO: 1004756 - DNA, 33 bp, Homo sapien
cgagactccgagaagagctcatccaaggcactg

SEQ ID NO: 1004757 - DNA, 33 bp, Homo sapien
tgaaaactggatcaaactgctttaagaaagcaa

SEQ ID NO: 1004758 - DNA, 33 bp, Homo sapien
tgaaaactggatcaaattgctttaagaaagcaa

SEQ ID NO: 1004759 - DNA, 33 bp, Homo sapien
gttctgtttctaaaaccgttgaattaatacaat

SEQ ID NO: 1004760 - DNA, 33 bp, Homo sapien
gttctgtttctaaaactgttgaattaatacaat

SEQ ID NO: 1004761 - DNA, 33 bp, Homo sapien
cattaaaaagccctcaataattgctggtataaa

SEQ ID NO: 1004762 - DNA, 33 bp, Homo sapien
cattaaaaagccctcagtaattgctggtataaa

SEQ ID NO: 1004763 - DNA, 33 bp, Homo sapien
catgttaccggtatcacgcacaaacattcttat

SEQ ID NO: 1004764 - DNA, 33 bp, Homo sapien
catgttaccggtatcatgcacaaacattcttat

SEQ ID NO: 1004765 - DNA, 33 bp, Homo sapien
aaataccaagtgattgcagatatttctataatt

SEQ ID NO: 1004766 - DNA, 33 bp, Homo sapien
aaataccaagtgattggagatatttctataatt

SEQ ID NO: 1004767 - DNA, 33 bp, Homo sapien
ttgtcaaggacctgagaagatactgttttctgg

SEQ ID NO: 1004768 - DNA, 33 bp, Homo sapien
ttgtcaaggacctgaggagatactgttttctgg

SEQ ID NO: 1004769 - DNA, 33 bp, Homo sapien
cccaaggctaccatggccactgcagaaatccat

SEQ ID NO: 1004770 - DNA, 33 bp, Homo sapien
cccaaggctaccatggtcactgcagaaatccat

SEQ ID NO: 1004771 - DNA, 33 bp, Homo sapien
acataaatgtatctgactagaagcagtgggtga

SEQ ID NO: 1004772 - DNA, 33 bp, Homo sapien
acataaatgtatctgattagaagcagtgggtga

SEQ ID NO: 1004773 - DNA, 33 bp, Homo sapien
gcttctttctttaagacctgtgtctaactctag

SEQ ID NO: 1004774 - DNA, 33 bp, Homo sapien
gcttctttctttaagagctgtgtctaactctag

SEQ ID NO: 1004775 - DNA, 33 bp, Homo sapien
gatgctgttacaaagaacggtatcctctggagc

SEQ ID NO: 1004776 - DNA, 33 bp, Homo sapien
gatgctgttacaaagagcggtatcctctggagc

SEQ ID NO: 1004777 - DNA, 33 bp, Homo sapien
ataaaacatttatatcaccaaaatggtcccttg

SEQ ID NO: 1004778 - DNA, 33 bp, Homo sapien
ataaaacatttatatctccaaaatggtcccttg

SEQ ID NO: 1004779 - DNA, 33 bp, Homo sapien
ggtaaaagagggtagacggatacatggatggac

SEQ ID NO: 1004780 - DNA, 33 bp, Homo sapien
ggtaaaagagggtagatggatacatggatggac

SEQ ID NO: 1004781 - DNA, 33 bp, Homo sapien
aagattatgcagtcataagaaaatgatgtctgg

SEQ ID NO: 1004782 - DNA, 33 bp, Homo sapien
aagattatgcagtcatgagaaaatgatgtctgg

SEQ ID NO: 1004783 - DNA, 33 bp, Homo sapien
acataccccagtctccacaagattccatggggg

SEQ ID NO: 1004784 - DNA, 33 bp, Homo sapien
acataccccagtctccgcaagattccatggggg

SEQ ID NO: 1004785 - DNA, 33 bp, Homo sapien
taactggaaagtctgacgggaaacgtgtatgaa

SEQ ID NO: 1004786 - DNA, 33 bp, Homo sapien
taactggaaagtctgatgggaaacgtgtatgaa

SEQ ID NO: 1004787 - DNA, 33 bp, Homo sapien
attacctggtctgttcaagttttccagtatttt

SEQ ID NO: 1004788 - DNA, 33 bp, Homo sapien
attacctggtctgttccagttttccagtatttt

SEQ ID NO: 1004789 - DNA, 33 bp, Homo sapien
aaatggcagagttgaaatgtgaacccaagtctt

SEQ ID NO: 1004790 - DNA, 33 bp, Homo sapien
aaatggcagagttgaactgtgaacccaagtctt

SEQ ID NO: 1004791 - DNA, 33 bp, Homo sapien
gaattttggtctttcacgatttcagcattcagg

SEQ ID NO: 1004792 - DNA, 33 bp, Homo sapien
gaattttggtctttcaggatttcagcattcagg

SEQ ID NO: 1004793 - DNA, 33 bp, Homo sapien
ttagtctcatcaaaaggcttaggttgtctgtca

SEQ ID NO: 1004794 - DNA, 33 bp, Homo sapien
ttagtctcatcaaaagtcttaggttgtctgtca

SEQ ID NO: 1004795 - DNA, 33 bp, Homo sapien
tattcataaaagagcacaattgggaaggctgta

SEQ ID NO: 1004796 - DNA, 33 bp, Homo sapien
tattcataaaagagcagaattgggaaggctgta

SEQ ID NO: 1004797 - DNA, 33 bp, Homo sapien
actgggaacaagataacgatgcccattcttgcc

SEQ ID NO: 1004798 - DNA, 33 bp, Homo sapien
actgggaacaagataaggatgcccattcttgcc

SEQ ID NO: 1004799 - DNA, 33 bp, Homo sapien
gaacaagttctataccacagcactgatcaaaag

SEQ ID NO: 1004800 - DNA, 33 bp, Homo sapien
gaacaagttctataccgcagcactgatcaaaag

SEQ ID NO: 1004801 - DNA, 33 bp, Homo sapien
tactgtcattttaagacgagatactagaatgtt

SEQ ID NO: 1004802 - DNA, 33 bp, Homo sapien
tactgtcattttaagatgagatactagaatgtt

SEQ ID NO: 1004803 - DNA, 33 bp, Homo sapien
ggtgccagctacaaagcctcagtgtaagtaaga

SEQ ID NO: 1004804 - DNA, 33 bp, Homo sapien
ggtgccagctacaaaggctcagtgtaagtaaga

SEQ ID NO: 1004805 - DNA, 33 bp, Homo sapien
atattcaaattaattcacatatatcacatagac

SEQ ID NO: 1004806 - DNA, 33 bp, Homo sapien
atattcaaattaattcgcatatatcacatagac

SEQ ID NO: 1004807 - DNA, 33 bp, Homo sapien
attaaaatgtgtaaaagcatatgcaaaagcatg

SEQ ID NO: 1004808 - DNA, 33 bp, Homo sapien
attaaaatgtgtaaaatcatatgcaaaagcatg

SEQ ID NO: 1004809 - DNA, 33 bp, Homo sapien
ctcttccctggaagaacacagagtctgccagca

SEQ ID NO: 1004810 - DNA, 33 bp, Homo sapien
ctcttccctggaagaatacagagtctgccagca

SEQ ID NO: 1004811 - DNA, 33 bp, Homo sapien
attgtgcacttgctatcagatacacattcttct

SEQ ID NO: 1004812 - DNA, 33 bp, Homo sapien
attgtgcacttgctatgagatacacattcttct

SEQ ID NO: 1004813 - DNA, 33 bp, Homo sapien
attttggatatactggaaacaactttagaagca

SEQ ID NO: 1004814 - DNA, 33 bp, Homo sapien
attttggatatactgggaacaactttagaagca

SEQ ID NO: 1004815 - DNA, 33 bp, Homo sapien
gtaacatttgtcaggaacaactctaaactgatc

SEQ ID NO: 1004816 - DNA, 33 bp, Homo sapien
gtaacatttgtcaggatcaactctaaactgatc

SEQ ID NO: 1004817 - DNA, 33 bp, Homo sapien
tgaaatttccgcttctcaaaaaatcgattccca

SEQ ID NO: 1004818 - DNA, 33 bp, Homo sapien
tgaaatttccgcttctgaaaaaatcgattccca

SEQ ID NO: 1004819 - DNA, 33 bp, Homo sapien
tttgcaccagctaaccagctcgtctacatgagt

SEQ ID NO: 1004820 - DNA, 33 bp, Homo sapien
tttgcaccagctaaccggctcgtctacatgagt

SEQ ID NO: 1004821 - DNA, 33 bp, Homo sapien
aggcagcagtattctcaaaatgaagacatttga

SEQ ID NO: 1004822 - DNA, 33 bp, Homo sapien
aggcagcagtattctccaaatgaagacatttga

SEQ ID NO: 1004823 - DNA, 33 bp, Homo sapien
agcccttgaattatacaggcaaatgtgttcttg

SEQ ID NO: 1004824 - DNA, 33 bp, Homo sapien
agcccttgaattataccggcaaatgtgttcttg

SEQ ID NO: 1004825 - DNA, 33 bp, Homo sapien
cttgagactctgggaacgagcatagtgataaga

SEQ ID NO: 1004826 - DNA, 33 bp, Homo sapien
cttgagactctgggaaggagcatagtgataaga

SEQ ID NO: 1004827 - DNA, 33 bp, Homo sapien
ctgatgtgtagatttaaggtaggtcccaagatt

SEQ ID NO: 1004828 - DNA, 33 bp, Homo sapien
ctgatgtgtagatttagggtaggtcccaagatt

SEQ ID NO: 1004829 - DNA, 33 bp, Homo sapien
tataagaagctttccccctctacactctgtact

SEQ ID NO: 1004830 - DNA, 33 bp, Homo sapien
tataagaagctttccctctctacactctgtact

SEQ ID NO: 1004831 - DNA, 33 bp, Homo sapien
gacttagacagtcacaaaattatatggggggat

SEQ ID NO: 1004832 - DNA, 33 bp, Homo sapien
gacttagacagtcacacaattatatggggggat

SEQ ID NO: 1004833 - DNA, 33 bp, Homo sapien
tgctaaccttttaaaactgtatgcagaacaagt

SEQ ID NO: 1004834 - DNA, 33 bp, Homo sapien
tgctaaccttttaaaattgtatgcagaacaagt

SEQ ID NO: 1004835 - DNA, 33 bp, Homo sapien
agttatatagtcagtgcagatgtttggccaagt

SEQ ID NO: 1004836 - DNA, 33 bp, Homo sapien
agttatatagtcagtgtagatgtttggccaagt

SEQ ID NO: 1004837 - DNA, 33 bp, Homo sapien
tgttagatgagggcaaaaaaggctcctggtctg

SEQ ID NO: 1004838 - DNA, 33 bp, Homo sapien
tgttagatgagggcaagaaaggctcctggtctg

SEQ ID NO: 1004839 - DNA, 33 bp, Homo sapien
aagagaaatgagtaagaatactatcaaagcaaa

SEQ ID NO: 1004840 - DNA, 33 bp, Homo sapien
aagagaaatgagtaaggatactatcaaagcaaa

SEQ ID NO: 1004841 - DNA, 33 bp, Homo sapien
tgctaaatattcttgcgaaaactcatttggtta

SEQ ID NO: 1004842 - DNA, 33 bp, Homo sapien
tgctaaatattcttgctaaaactcatttggtta

SEQ ID NO: 1004843 - DNA, 33 bp, Homo sapien
catggtgtagggaaaccacaagtgatagtgcag

SEQ ID NO: 1004844 - DNA, 33 bp, Homo sapien
catggtgtagggaaactacaagtgatagtgcag

SEQ ID NO: 1004845 - DNA, 33 bp, Homo sapien
tcctgctacaagaataataaggctacttagcat

SEQ ID NO: 1004846 - DNA, 33 bp, Homo sapien
tcctgctacaagaatagtaaggctacttagcat

SEQ ID NO: 1004847 - DNA, 33 bp, Homo sapien
ggtgacctcacctagaagtcctggctctcagac

SEQ ID NO: 1004848 - DNA, 33 bp, Homo sapien
ggtgacctcacctagatgtcctggctctcagac

SEQ ID NO: 1004849 - DNA, 33 bp, Homo sapien
ctgcaaagaactgaacactgtcctggtagtctg

SEQ ID NO: 1004850 - DNA, 33 bp, Homo sapien
ctgcaaagaactgaacgctgtcctggtagtctg

SEQ ID NO: 1004851 - DNA, 33 bp, Homo sapien
tattgtcgaggaaataagctggtttgttatttt

SEQ ID NO: 1004852 - DNA, 33 bp, Homo sapien
tattgtcgaggaaatacgctggtttgttatttt

SEQ ID NO: 1004853 - DNA, 33 bp, Homo sapien
atcagtggtgtagctacagttgacagtaattta

SEQ ID NO: 1004854 - DNA, 33 bp, Homo sapien
atcagtggtgtagctatagttgacagtaattta

SEQ ID NO: 1004855 - DNA, 33 bp, Homo sapien
gttcatgcttggaataacactttctactttaat

SEQ ID NO: 1004856 - DNA, 33 bp, Homo sapien
gttcatgcttggaatagcactttctactttaat

SEQ ID NO: 1004857 - DNA, 33 bp, Homo sapien
tatacacacatattcaagaaatttggtgcaaca

SEQ ID NO: 1004858 - DNA, 33 bp, Homo sapien
tatacacacatattcaggaaatttggtgcaaca

SEQ ID NO: 1004859 - DNA, 33 bp, Homo sapien
tgggacttatccatcaacttaacactcccatcc

SEQ ID NO: 1004860 - DNA, 33 bp, Homo sapien
tgggacttatccatcaccttaacactcccatcc

SEQ ID NO: 1004861 - DNA, 33 bp, Homo sapien
ggattggagagttctactaagttcaaatctctt

SEQ ID NO: 1004862 - DNA, 33 bp, Homo sapien
ggattggagagttctagtaagttcaaatctctt

SEQ ID NO: 1004863 - DNA, 33 bp, Homo sapien
attaccagtcactacacctggttttgccccagt

SEQ ID NO: 1004864 - DNA, 33 bp, Homo sapien
attaccagtcactacatctggttttgccccagt

SEQ ID NO: 1004865 - DNA, 33 bp, Homo sapien
gagaccctgtggaggagaattaaggtaccctta

SEQ ID NO: 1004866 - DNA, 33 bp, Homo sapien
gagaccctgtggaggataattaaggtaccctta

SEQ ID NO: 1004867 - DNA, 33 bp, Homo sapien
taaaatatataagccactgaggtaagtagttgt

SEQ ID NO: 1004868 - DNA, 33 bp, Homo sapien
taaaatatataagccattgaggtaagtagttgt

SEQ ID NO: 1004869 - DNA, 33 bp, Homo sapien
ggatgactccaacacaatgacaataagtcctta

SEQ ID NO: 1004870 - DNA, 33 bp, Homo sapien
ggatgactccaacacagtgacaataagtcctta

SEQ ID NO: 1004871 - DNA, 33 bp, Homo sapien
ttcatgttcatgagtacggcaaatttgttctat

SEQ ID NO: 1004872 - DNA, 33 bp, Homo sapien
ttcatgttcatgagtatggcaaatttgttctat

SEQ ID NO: 1004873 - DNA, 33 bp, Homo sapien
gcgtccattaaaataaactgcactgccaagtgt

SEQ ID NO: 1004874 - DNA, 33 bp, Homo sapien
gcgtccattaaaataacctgcactgccaagtgt

SEQ ID NO: 1004875 - DNA, 33 bp, Homo sapien
gccagttgactaaacccaatattatataccaca

SEQ ID NO: 1004876 - DNA, 33 bp, Homo sapien
gccagttgactaaaccgaatattatataccaca

SEQ ID NO: 1004877 - DNA, 33 bp, Homo sapien
aggggcaagtgacagaacaagtgatgaaataat

SEQ ID NO: 1004878 - DNA, 33 bp, Homo sapien
aggggcaagtgacagagcaagtgatgaaataat

SEQ ID NO: 1004879 - DNA, 33 bp, Homo sapien
gagtgctattatgttcaaactgctttccagaga

SEQ ID NO: 1004880 - DNA, 33 bp, Homo sapien
gagtgctattatgttcgaactgctttccagaga

SEQ ID NO: 1004881 - DNA, 33 bp, Homo sapien
aaggtgatctcttacacagtggcctggaccttt

SEQ ID NO: 1004882 - DNA, 33 bp, Homo sapien
aaggtgatctcttacatagtggcctggaccttt

SEQ ID NO: 1004883 - DNA, 33 bp, Homo sapien
ttcttccaagaagagaggaccttgacacgtgat

SEQ ID NO: 1004884 - DNA, 33 bp, Homo sapien
ttcttccaagaagagatgaccttgacacgtgat

SEQ ID NO: 1004885 - DNA, 33 bp, Homo sapien
cgtgcaataaggcataacacaaggggattagaa

SEQ ID NO: 1004886 - DNA, 33 bp, Homo sapien
cgtgcaataaggcatatcacaaggggattagaa

SEQ ID NO: 1004887 - DNA, 33 bp, Homo sapien
gctgcagctgctaaaacaactggcaccagaaac

SEQ ID NO: 1004888 - DNA, 33 bp, Homo sapien
gctgcagctgctaaaataactggcaccagaaac

SEQ ID NO: 1004889 - DNA, 33 bp, Homo sapien
gcaacaaccaaatcaacacaaatggaaaatata

SEQ ID NO: 1004890 - DNA, 33 bp, Homo sapien
gcaacaaccaaatcaagacaaatggaaaatata

SEQ ID NO: 1004891 - DNA, 33 bp, Homo sapien
ccaatgttatctttctaaaagtctaatgtggcc

SEQ ID NO: 1004892 - DNA, 33 bp, Homo sapien
ccaatgttatctttctgaaagtctaatgtggcc

SEQ ID NO: 1004893 - DNA, 33 bp, Homo sapien
gagagcatttcaggaaaaggaagaggaaaagga

SEQ ID NO: 1004894 - DNA, 33 bp, Homo sapien
gagagcatttcaggaagaggaagaggaaaagga

SEQ ID NO: 1004895 - DNA, 33 bp, Homo sapien
tttgacccgctttataccactggttctgatacc

SEQ ID NO: 1004896 - DNA, 33 bp, Homo sapien
tttgacccgctttatagcactggttctgatacc

SEQ ID NO: 1004897 - DNA, 33 bp, Homo sapien
ggagtatctctgctggaagtagtctgtgttaga

SEQ ID NO: 1004898 - DNA, 33 bp, Homo sapien
ggagtatctctgctggcagtagtctgtgttaga

SEQ ID NO: 1004899 - DNA, 33 bp, Homo sapien
tggatgcaaatatcatcacactgtggcaataag

SEQ ID NO: 1004900 - DNA, 33 bp, Homo sapien
tggatgcaaatatcattacactgtggcaataag

SEQ ID NO: 1004901 - DNA, 33 bp, Homo sapien
tctgaattccagacacacgtttataactatgaa

SEQ ID NO: 1004902 - DNA, 33 bp, Homo sapien
tctgaattccagacactcgtttataactatgaa

SEQ ID NO: 1004903 - DNA, 33 bp, Homo sapien
ttgagtaactaaatcaacataaatcagcaatta

SEQ ID NO: 1004904 - DNA, 33 bp, Homo sapien
ttgagtaactaaatcatcataaatcagcaatta

SEQ ID NO: 1004905 - DNA, 33 bp, Homo sapien
atttgtttctacaaaaattgctacatgtcaaca

SEQ ID NO: 1004906 - DNA, 33 bp, Homo sapien
atttgtttctacaaaatttgctacatgtcaaca

SEQ ID NO: 1004907 - DNA, 33 bp, Homo sapien
atatgtgagtacaaaaatagagacatacccaga

SEQ ID NO: 1004908 - DNA, 33 bp, Homo sapien
atatgtgagtacaaaactagagacatacccaga

SEQ ID NO: 1004909 - DNA, 33 bp, Homo sapien
tgccactaggtagacaaaaacctgaggaattat

SEQ ID NO: 1004910 - DNA, 33 bp, Homo sapien
tgccactaggtagacagaaacctgaggaattat

SEQ ID NO: 1004911 - DNA, 33 bp, Homo sapien
tgcgtcctcaaatctaccaggttattaatatgc

SEQ ID NO: 1004912 - DNA, 33 bp, Homo sapien
tgcgtcctcaaatctatcaggttattaatatgc

SEQ ID NO: 1004913 - DNA, 33 bp, Homo sapien
gccatgctaggttgagcaatgctttttggggtc

SEQ ID NO: 1004914 - DNA, 33 bp, Homo sapien
gccatgctaggttgaggaatgctttttggggtc

SEQ ID NO: 1004915 - DNA, 33 bp, Homo sapien
ttggttctcctattggccagcaatggagaaaca

SEQ ID NO: 1004916 - DNA, 33 bp, Homo sapien
ttggttctcctattggtcagcaatggagaaaca

SEQ ID NO: 1004917 - DNA, 33 bp, Homo sapien
atcttgctgatagagaagctgccaaaatctgcc

SEQ ID NO: 1004918 - DNA, 33 bp, Homo sapien
atcttgctgatagagaggctgccaaaatctgcc

SEQ ID NO: 1004919 - DNA, 33 bp, Homo sapien
agtaaaggaaaagatacattcatagtaagagat

SEQ ID NO: 1004920 - DNA, 33 bp, Homo sapien
agtaaaggaaaagatagattcatagtaagagat

SEQ ID NO: 1004921 - DNA, 33 bp, Homo sapien
attctcctttgcaggaagaaactggagcacgga

SEQ ID NO: 1004922 - DNA, 33 bp, Homo sapien
attctcctttgcaggaggaaactggagcacgga

SEQ ID NO: 1004923 - DNA, 33 bp, Homo sapien
ctgttatgaatattcaagtgtatgttttaatct

SEQ ID NO: 1004924 - DNA, 33 bp, Homo sapien
ctgttatgaatattcacgtgtatgttttaatct

SEQ ID NO: 1004925 - DNA, 33 bp, Homo sapien
ggcaaactggcaccaaatagctacagaaaaagg

SEQ ID NO: 1004926 - DNA, 33 bp, Homo sapien
ggcaaactggcaccaagtagctacagaaaaagg

SEQ ID NO: 1004927 - DNA, 33 bp, Homo sapien
aatttcctgctgcaataactgctttgataacaa

SEQ ID NO: 1004928 - DNA, 33 bp, Homo sapien
aatttcctgctgcaatgactgctttgataacaa

SEQ ID NO: 1004929 - DNA, 33 bp, Homo sapien
gctaaatctttatatcacaagcaggttacagaa

SEQ ID NO: 1004930 - DNA, 33 bp, Homo sapien
gctaaatctttatatcgcaagcaggttacagaa

SEQ ID NO: 1004931 - DNA, 33 bp, Homo sapien
ctagtggttttaggcacatactcaagtgataca

SEQ ID NO: 1004932 - DNA, 33 bp, Homo sapien
ctagtggttttaggcatatactcaagtgataca

SEQ ID NO: 1004933 - DNA, 33 bp, Homo sapien
ttagtaaaaggtagaaatctgtttacatttgtt

SEQ ID NO: 1004934 - DNA, 33 bp, Homo sapien
ttagtaaaaggtagaagtctgtttacatttgtt

SEQ ID NO: 1004935 - DNA, 33 bp, Homo sapien
taaaaggagagattaaaccttgttgatatgaaa

SEQ ID NO: 1004936 - DNA, 33 bp, Homo sapien
taaaaggagagattaagccttgttgatatgaaa

SEQ ID NO: 1004937 - DNA, 33 bp, Homo sapien
ttggtcaaagcaagtcacatttttatatttaac

SEQ ID NO: 1004938 - DNA, 33 bp, Homo sapien
ttggtcaaagcaagtcccatttttatatttaac

SEQ ID NO: 1004939 - DNA, 33 bp, Homo sapien
gtaatgtgtctggatacaattgaagttaaatat

SEQ ID NO: 1004940 - DNA, 33 bp, Homo sapien
gtaatgtgtctggatataattgaagttaaatat

SEQ ID NO: 1004941 - DNA, 33 bp, Homo sapien
gttttgagaggtgaaacgtggctgaagttggaa

SEQ ID NO: 1004942 - DNA, 33 bp, Homo sapien
gttttgagaggtgaaatgtggctgaagttggaa

SEQ ID NO: 1004943 - DNA, 33 bp, Homo sapien
caaagtcagaataagacggatgtagaatccctc

SEQ ID NO: 1004944 - DNA, 33 bp, Homo sapien
caaagtcagaataagatggatgtagaatccctc

SEQ ID NO: 1004945 - DNA, 33 bp, Homo sapien
catgcattcctttgataaaaaacacaaattaaa

SEQ ID NO: 1004946 - DNA, 33 bp, Homo sapien
catgcattcctttgattaaaaacacaaattaaa

SEQ ID NO: 1004947 - DNA, 33 bp, Homo sapien
tttattttacactgagacatatgcatgatgact

SEQ ID NO: 1004948 - DNA, 33 bp, Homo sapien
tttattttacactgagccatatgcatgatgact

SEQ ID NO: 1004949 - DNA, 33 bp, Homo sapien
atatgcatgatgactacatttcttgtacaattt

SEQ ID NO: 1004950 - DNA, 33 bp, Homo sapien
atatgcatgatgactatatttcttgtacaattt

SEQ ID NO: 1004951 - DNA, 33 bp, Homo sapien
gaaggtagaataaagacgttttcaagcaaaata

SEQ ID NO: 1004952 - DNA, 33 bp, Homo sapien
gaaggtagaataaagatgttttcaagcaaaata

SEQ ID NO: 1004953 - DNA, 33 bp, Homo sapien
ttcccaaaaagagaacaaagaaggaagaaagag

SEQ ID NO: 1004954 - DNA, 33 bp, Homo sapien
ttcccaaaaagagaacgaagaaggaagaaagag

SEQ ID NO: 1004955 - DNA, 33 bp, Homo sapien
tgaaggaataccaggacgctatatgtagaaata

SEQ ID NO: 1004956 - DNA, 33 bp, Homo sapien
tgaaggaataccaggatgctatatgtagaaata

SEQ ID NO: 1004957 - DNA, 33 bp, Homo sapien
ctggaaaaaaattcctcagagataagagaaaat

SEQ ID NO: 1004958 - DNA, 33 bp, Homo sapien
ctggaaaaaaattcctgagagataagagaaaat

SEQ ID NO: 1004959 - DNA, 33 bp, Homo sapien
gcattgcagaaaaacaatgatcagtgtactggg

SEQ ID NO: 1004960 - DNA, 33 bp, Homo sapien
gcattgcagaaaaacagtgatcagtgtactggg

SEQ ID NO: 1004961 - DNA, 33 bp, Homo sapien
gcatctccatccttgcccctttaagtgaacgca

SEQ ID NO: 1004962 - DNA, 33 bp, Homo sapien
gcatctccatccttgctcctttaagtgaacgca

SEQ ID NO: 1004963 - DNA, 33 bp, Homo sapien
ctctttttgcattttaaatatcgcttcaaaacc

SEQ ID NO: 1004964 - DNA, 33 bp, Homo sapien
ctctttttgcattttacatatcgcttcaaaacc

SEQ ID NO: 1004965 - DNA, 33 bp, Homo sapien
ggaagaatgaaggtctaacaagttacagttgct

SEQ ID NO: 1004966 - DNA, 33 bp, Homo sapien
ggaagaatgaaggtctgacaagttacagttgct

SEQ ID NO: 1004967 - DNA, 33 bp, Homo sapien
gccactgaggtagactaagagaaaatagggcaa

SEQ ID NO: 1004968 - DNA, 33 bp, Homo sapien
gccactgaggtagactgagagaaaatagggcaa

SEQ ID NO: 1004969 - DNA, 33 bp, Homo sapien
gacagtgcaatatacaatcaaagctttagacaa

SEQ ID NO: 1004970 - DNA, 33 bp, Homo sapien
gacagtgcaatatacagtcaaagctttagacaa

SEQ ID NO: 1004971 - DNA, 33 bp, Homo sapien
gtatagggaaagctaaactccattctccttgtg

SEQ ID NO: 1004972 - DNA, 33 bp, Homo sapien
gtatagggaaagctaatctccattctccttgtg

SEQ ID NO: 1004973 - DNA, 33 bp, Homo sapien
tcatccctagtgttcaaccgagtttatagtctt

SEQ ID NO: 1004974 - DNA, 33 bp, Homo sapien
tcatccctagtgttcacccgagtttatagtctt

SEQ ID NO: 1004975 - DNA, 33 bp, Homo sapien
gagttaaatgattactaacatgcagtgatttta

SEQ ID NO: 1004976 - DNA, 33 bp, Homo sapien
gagttaaatgattacttacatgcagtgatttta

SEQ ID NO: 1004977 - DNA, 33 bp, Homo sapien
ttttcaatcaaagacccaagatggtgtgctgtt

SEQ ID NO: 1004978 - DNA, 33 bp, Homo sapien
ttttcaatcaaagaccgaagatggtgtgctgtt

SEQ ID NO: 1004979 - DNA, 33 bp, Homo sapien
tctgttctctcactgccactaatttagagcttt

SEQ ID NO: 1004980 - DNA, 33 bp, Homo sapien
tctgttctctcactgctactaatttagagcttt

SEQ ID NO: 1004981 - DNA, 33 bp, Homo sapien
ctcatttccaccctcagactgcaaaaggagaaa

SEQ ID NO: 1004982 - DNA, 33 bp, Homo sapien
ctcatttccaccctcatactgcaaaaggagaaa

SEQ ID NO: 1004983 - DNA, 33 bp, Homo sapien
ctaagcctttcagaatcatgaattgcaatggtt

SEQ ID NO: 1004984 - DNA, 33 bp, Homo sapien
ctaagcctttcagaatgatgaattgcaatggtt

SEQ ID NO: 1004985 - DNA, 33 bp, Homo sapien
ccatcagttaagactccagtgactttttttgaa

SEQ ID NO: 1004986 - DNA, 33 bp, Homo sapien
ccatcagttaagactctagtgactttttttgaa

SEQ ID NO: 1004987 - DNA, 33 bp, Homo sapien
ctgtgaacagtcgttacgagcggcaaagatggt

SEQ ID NO: 1004988 - DNA, 33 bp, Homo sapien
ctgtgaacagtcgttatgagcggcaaagatggt

SEQ ID NO: 1004989 - DNA, 33 bp, Homo sapien
gtagcaggaccaagacaataagagggtatcagt

SEQ ID NO: 1004990 - DNA, 33 bp, Homo sapien
gtagcaggaccaagacgataagagggtatcagt

SEQ ID NO: 1004991 - DNA, 33 bp, Homo sapien
aatcagaagtctatggaaagtttaggaatgaaa

SEQ ID NO: 1004992 - DNA, 33 bp, Homo sapien
aatcagaagtctatggcaagtttaggaatgaaa

SEQ ID NO: 1004993 - DNA, 33 bp, Homo sapien
tgctagtaaagcctggacatatcaagattataa

SEQ ID NO: 1004994 - DNA, 33 bp, Homo sapien
tgctagtaaagcctgggcatatcaagattataa

SEQ ID NO: 1004995 - DNA, 33 bp, Homo sapien
ctcaatctatggtactcagctcaaactgactaa

SEQ ID NO: 1004996 - DNA, 33 bp, Homo sapien
ctcaatctatggtacttagctcaaactgactaa

SEQ ID NO: 1004997 - DNA, 33 bp, Homo sapien
gatgaaaatgtgggaaatgatgatctctaggtg

SEQ ID NO: 1004998 - DNA, 33 bp, Homo sapien
gatgaaaatgtgggaagtgatgatctctaggtg

SEQ ID NO: 1004999 - DNA, 33 bp, Homo sapien
tctcacaatgaatgccaggcaaattgaatggaa

SEQ ID NO: 1005000 - DNA, 33 bp, Homo sapien
tctcacaatgaatgcctggcaaattgaatggaa

SEQ ID NO: 1005001 - DNA, 33 bp, Homo sapien
tgaacatctacaatcaatgactttgagtaaaag

SEQ ID NO: 1005002 - DNA, 33 bp, Homo sapien
tgaacatctacaatcagtgactttgagtaaaag

SEQ ID NO: 1005003 - DNA, 33 bp, Homo sapien
cacatgaggcaaaataatatttcaaagtatgca

SEQ ID NO: 1005004 - DNA, 33 bp, Homo sapien
cacatgaggcaaaatactatttcaaagtatgca

SEQ ID NO: 1005005 - DNA, 33 bp, Homo sapien
ttaagtacactcataaggttatgccaccattac

SEQ ID NO: 1005006 - DNA, 33 bp, Homo sapien
ttaagtacactcataatgttatgccaccattac

SEQ ID NO: 1005007 - DNA, 33 bp, Homo sapien
tgaaattctgacatgcactacaatatggatgat

SEQ ID NO: 1005008 - DNA, 33 bp, Homo sapien
tgaaattctgacatgcgctacaatatggatgat

SEQ ID NO: 1005009 - DNA, 33 bp, Homo sapien
ttgctggataggttagcacaatctagaatcatg

SEQ ID NO: 1005010 - DNA, 33 bp, Homo sapien
ttgctggataggttaggacaatctagaatcatg

SEQ ID NO: 1005011 - DNA, 33 bp, Homo sapien
tttcatgatctaacccagagtgaaaaagtccct

SEQ ID NO: 1005012 - DNA, 33 bp, Homo sapien
tttcatgatctaacccggagtgaaaaagtccct

SEQ ID NO: 1005013 - DNA, 33 bp, Homo sapien
tatataccctgttataccatctcttttctcata

SEQ ID NO: 1005014 - DNA, 33 bp, Homo sapien
tatataccctgttatagcatctcttttctcata

SEQ ID NO: 1005015 - DNA, 33 bp, Homo sapien
cattgttttaagataactccagaatcttcacgg

SEQ ID NO: 1005016 - DNA, 33 bp, Homo sapien
cattgttttaagataattccagaatcttcacgg

SEQ ID NO: 1005017 - DNA, 33 bp, Homo sapien
ctcttgtgcacttaagcaggaaagcaatgggaa

SEQ ID NO: 1005018 - DNA, 33 bp, Homo sapien
ctcttgtgcacttaaggaggaaagcaatgggaa

SEQ ID NO: 1005019 - DNA, 33 bp, Homo sapien
catgtcatccagaccacagcttttgcagttgtc

SEQ ID NO: 1005020 - DNA, 33 bp, Homo sapien
catgtcatccagaccagagcttttgcagttgtc

SEQ ID NO: 1005021 - DNA, 33 bp, Homo sapien
acaacggtagaaatacccaagcacagcagatgt

SEQ ID NO: 1005022 - DNA, 33 bp, Homo sapien
acaacggtagaaatacgcaagcacagcagatgt

SEQ ID NO: 1005023 - DNA, 33 bp, Homo sapien
ggttaacagcaactaccgggtttgtgtcagata

SEQ ID NO: 1005024 - DNA, 33 bp, Homo sapien
ggttaacagcaactactgggtttgtgtcagata

SEQ ID NO: 1005025 - DNA, 33 bp, Homo sapien
tgtctcagaggaatacaatttctagccatggca

SEQ ID NO: 1005026 - DNA, 33 bp, Homo sapien
tgtctcagaggaataccatttctagccatggca

SEQ ID NO: 1005027 - DNA, 33 bp, Homo sapien
agggagcctctgtttacagaagcagaaataata

SEQ ID NO: 1005028 - DNA, 33 bp, Homo sapien
agggagcctctgtttatagaagcagaaataata

SEQ ID NO: 1005029 - DNA, 33 bp, Homo sapien
atgttatttggggatgcagataaacaggaagat

SEQ ID NO: 1005030 - DNA, 33 bp, Homo sapien
atgttatttggggatggagataaacaggaagat

SEQ ID NO: 1005031 - DNA, 33 bp, Homo sapien
accattagctgaaaaggagtctaagatacctct

SEQ ID NO: 1005032 - DNA, 33 bp, Homo sapien
accattagctgaaaagtagtctaagatacctct

SEQ ID NO: 1005033 - DNA, 33 bp, Homo sapien
taccagcctgataaacacgcatgatcaggaaga

SEQ ID NO: 1005034 - DNA, 33 bp, Homo sapien
taccagcctgataaacccgcatgatcaggaaga

SEQ ID NO: 1005035 - DNA, 33 bp, Homo sapien
ggagctctgtggtttacagactgggctaactag

SEQ ID NO: 1005036 - DNA, 33 bp, Homo sapien
ggagctctgtggtttatagactgggctaactag

SEQ ID NO: 1005037 - DNA, 33 bp, Homo sapien
cataccttagcacagaccaattggcaacctgat

SEQ ID NO: 1005038 - DNA, 33 bp, Homo sapien
cataccttagcacagatcaattggcaacctgat

SEQ ID NO: 1005039 - DNA, 33 bp, Homo sapien
actggaaccaccaggccgactttgctctatatt

SEQ ID NO: 1005040 - DNA, 33 bp, Homo sapien
actggaaccaccaggctgactttgctctatatt

SEQ ID NO: 1005041 - DNA, 33 bp, Homo sapien
taacttggaggttcaaaaatttcatctagatat

SEQ ID NO: 1005042 - DNA, 33 bp, Homo sapien
taacttggaggttcaacaatttcatctagatat

SEQ ID NO: 1005043 - DNA, 33 bp, Homo sapien
tttgacaaaatattcacctgtctaacttttata

SEQ ID NO: 1005044 - DNA, 33 bp, Homo sapien
tttgacaaaatattcagctgtctaacttttata

SEQ ID NO: 1005045 - DNA, 33 bp, Homo sapien
tgttgaatagcatggacaaatttgactgcgtat

SEQ ID NO: 1005046 - DNA, 33 bp, Homo sapien
tgttgaatagcatggataaatttgactgcgtat

SEQ ID NO: 1005047 - DNA, 33 bp, Homo sapien
aacatacggatttgtaaaacttagattggtaaa

SEQ ID NO: 1005048 - DNA, 33 bp, Homo sapien
aacatacggatttgtataacttagattggtaaa

SEQ ID NO: 1005049 - DNA, 33 bp, Homo sapien
tcattttgaaacttcacgctataaaagacttca

SEQ ID NO: 1005050 - DNA, 33 bp, Homo sapien
tcattttgaaacttcatgctataaaagacttca

SEQ ID NO: 1005051 - DNA, 33 bp, Homo sapien
gactattggtttcttaagccatagccaaactgt

SEQ ID NO: 1005052 - DNA, 33 bp, Homo sapien
gactattggtttcttaggccatagccaaactgt

SEQ ID NO: 1005053 - DNA, 33 bp, Homo sapien
ctatctcttgtaactggactacattcacagagc

SEQ ID NO: 1005054 - DNA, 33 bp, Homo sapien
ctatctcttgtaactgtactacattcacagagc

SEQ ID NO: 1005055 - DNA, 33 bp, Homo sapien
ctaggtggtctctgcaatacgaagagtaagaac

SEQ ID NO: 1005056 - DNA, 33 bp, Homo sapien
ctaggtggtctctgcagtacgaagagtaagaac

SEQ ID NO: 1005057 - DNA, 33 bp, Homo sapien
gttgaaaggtttctcaagtctttatacaaacag

SEQ ID NO: 1005058 - DNA, 33 bp, Homo sapien
gttgaaaggtttctcaggtctttatacaaacag

SEQ ID NO: 1005059 - DNA, 33 bp, Homo sapien
atcctgtcctgggggaaagcaagtaggaaagaa

SEQ ID NO: 1005060 - DNA, 33 bp, Homo sapien
atcctgtcctgggggagagcaagtaggaaagaa

SEQ ID NO: 1005061 - DNA, 33 bp, Homo sapien
cccagatttgtgatgacctgcataagccaatag

SEQ ID NO: 1005062 - DNA, 33 bp, Homo sapien
cccagatttgtgatgagctgcataagccaatag

SEQ ID NO: 1005063 - DNA, 33 bp, Homo sapien
gataactgctggtaacaagcagtcatttgcaaa

SEQ ID NO: 1005064 - DNA, 33 bp, Homo sapien
gataactgctggtaacgagcagtcatttgcaaa

SEQ ID NO: 1005065 - DNA, 33 bp, Homo sapien
tgtccctcatatacacacccaggcttagagaaa

SEQ ID NO: 1005066 - DNA, 33 bp, Homo sapien
tgtccctcatatacacgcccaggcttagagaaa

SEQ ID NO: 1005067 - DNA, 33 bp, Homo sapien
actgtgtgaaagttgacgttctgtaaatgttct

SEQ ID NO: 1005068 - DNA, 33 bp, Homo sapien
actgtgtgaaagttgaggttctgtaaatgttct

SEQ ID NO: 1005069 - DNA, 33 bp, Homo sapien
gagggttgctcctcaaatctatccagcttcatt

SEQ ID NO: 1005070 - DNA, 33 bp, Homo sapien
gagggttgctcctcaactctatccagcttcatt

SEQ ID NO: 1005071 - DNA, 33 bp, Homo sapien
atctgttgtctgattgaaatcccttctctaatc

SEQ ID NO: 1005072 - DNA, 33 bp, Homo sapien
atctgttgtctgattggaatcccttctctaatc

SEQ ID NO: 1005073 - DNA, 33 bp, Homo sapien
aaaaaactcttgtaccccatttcataccaaatg

SEQ ID NO: 1005074 - DNA, 33 bp, Homo sapien
aaaaaactcttgtaccgcatttcataccaaatg

SEQ ID NO: 1005075 - DNA, 33 bp, Homo sapien
cgtagctagttgccaaatggatgctccagtctg

SEQ ID NO: 1005076 - DNA, 33 bp, Homo sapien
cgtagctagttgccaagtggatgctccagtctg

SEQ ID NO: 1005077 - DNA, 33 bp, Homo sapien
atatttttacaatacaactgtggagagataaat

SEQ ID NO: 1005078 - DNA, 33 bp, Homo sapien
atatttttacaatacagctgtggagagataaat

SEQ ID NO: 1005079 - DNA, 33 bp, Homo sapien
gagaaagaaggaggagcctagtttgctctttgc

SEQ ID NO: 1005080 - DNA, 33 bp, Homo sapien
gagaaagaaggaggagtctagtttgctctttgc

SEQ ID NO: 1005081 - DNA, 33 bp, Homo sapien
ccttcactttcatctacactcccaaagcatggt

SEQ ID NO: 1005082 - DNA, 33 bp, Homo sapien
ccttcactttcatctatactcccaaagcatggt

SEQ ID NO: 1005083 - DNA, 33 bp, Homo sapien
gccaattagtagctacactgcttgatcctgagc

SEQ ID NO: 1005084 - DNA, 33 bp, Homo sapien
gccaattagtagctacgctgcttgatcctgagc

SEQ ID NO: 1005085 - DNA, 33 bp, Homo sapien
gaagttggccaaaaaaaattgtgtgtgtgtgta

SEQ ID NO: 1005086 - DNA, 33 bp, Homo sapien
gaagttggccaaaaaagattgtgtgtgtgtgta

SEQ ID NO: 1005087 - DNA, 33 bp, Homo sapien
aggcgcagaaccatcactagtaaaacagtcatc

SEQ ID NO: 1005088 - DNA, 33 bp, Homo sapien
aggcgcagaaccatcattagtaaaacagtcatc

SEQ ID NO: 1005089 - DNA, 33 bp, Homo sapien
tatgacatgctaaggacgcattgcttttctcca

SEQ ID NO: 1005090 - DNA, 33 bp, Homo sapien
tatgacatgctaaggatgcattgcttttctcca

SEQ ID NO: 1005091 - DNA, 33 bp, Homo sapien
gcacatgagaaatgaacgttctggtagtctcat

SEQ ID NO: 1005092 - DNA, 33 bp, Homo sapien
gcacatgagaaatgaatgttctggtagtctcat

SEQ ID NO: 1005093 - DNA, 33 bp, Homo sapien
aacaaacagtcaattaaatagagttcagagttt

SEQ ID NO: 1005094 - DNA, 33 bp, Homo sapien
aacaaacagtcaattagatagagttcagagttt

SEQ ID NO: 1005095 - DNA, 33 bp, Homo sapien
tgtgctatgaatcaataaggttagctagtggaa

SEQ ID NO: 1005096 - DNA, 33 bp, Homo sapien
tgtgctatgaatcaatgaggttagctagtggaa

SEQ ID NO: 1005097 - DNA, 33 bp, Homo sapien
aggcctaaaagggaaacagtagtagcttgatag

SEQ ID NO: 1005098 - DNA, 33 bp, Homo sapien
aggcctaaaagggaaagagtagtagcttgatag

SEQ ID NO: 1005099 - DNA, 33 bp, Homo sapien
catgcaccacgactcactgacgataatcactga

SEQ ID NO: 1005100 - DNA, 33 bp, Homo sapien
catgcaccacgactcattgacgataatcactga

SEQ ID NO: 1005101 - DNA, 33 bp, Homo sapien
agcagtatctagtccactgccttgtggatacaa

SEQ ID NO: 1005102 - DNA, 33 bp, Homo sapien
agcagtatctagtccattgccttgtggatacaa

SEQ ID NO: 1005103 - DNA, 33 bp, Homo sapien
aactggaaaatacagaagtgtttttgcatcccc

SEQ ID NO: 1005104 - DNA, 33 bp, Homo sapien
aactggaaaatacagacgtgtttttgcatcccc

SEQ ID NO: 1005105 - DNA, 33 bp, Homo sapien
aaaagcgctgacccaacgaaatttactacagta

SEQ ID NO: 1005106 - DNA, 33 bp, Homo sapien
aaaagcgctgacccaatgaaatttactacagta

SEQ ID NO: 1005107 - DNA, 33 bp, Homo sapien
caaaataattcactgtaaaatgtgtactgtaat

SEQ ID NO: 1005108 - DNA, 33 bp, Homo sapien
caaaataattcactgtgaaatgtgtactgtaat

SEQ ID NO: 1005109 - DNA, 33 bp, Homo sapien
ctttcaaatgtgaaggaaaaaaaacagtgttag

SEQ ID NO: 1005110 - DNA, 33 bp, Homo sapien
ctttcaaatgtgaagggaaaaaaacagtgttag

SEQ ID NO: 1005111 - DNA, 33 bp, Homo sapien
cccaggaagtgttcgacagtggagagataattt

SEQ ID NO: 1005112 - DNA, 33 bp, Homo sapien
cccaggaagtgttcgatagtggagagataattt

SEQ ID NO: 1005113 - DNA, 33 bp, Homo sapien
taatacatagaactgaaaattcactagatggtt

SEQ ID NO: 1005114 - DNA, 33 bp, Homo sapien
taatacatagaactgataattcactagatggtt

SEQ ID NO: 1005115 - DNA, 33 bp, Homo sapien
gtaccacatatgtacccaggtgtatggtgaggc

SEQ ID NO: 1005116 - DNA, 33 bp, Homo sapien
gtaccacatatgtacctaggtgtatggtgaggc

SEQ ID NO: 1005117 - DNA, 33 bp, Homo sapien
atatgtggtacaaatacctaagtttgaaagctt

SEQ ID NO: 1005118 - DNA, 33 bp, Homo sapien
atatgtggtacaaatatctaagtttgaaagctt

SEQ ID NO: 1005119 - DNA, 33 bp, Homo sapien
gctggcaagagttgcaataaaatcctcggccta

SEQ ID NO: 1005120 - DNA, 33 bp, Homo sapien
gctggcaagagttgcagtaaaatcctcggccta

SEQ ID NO: 1005121 - DNA, 33 bp, Homo sapien
gtttagtggaggcaaactgccaagaaaaggggc

SEQ ID NO: 1005122 - DNA, 33 bp, Homo sapien
gtttagtggaggcaaagtgccaagaaaaggggc

SEQ ID NO: 1005123 - DNA, 33 bp, Homo sapien
ggggcattgacagtaacgcagtaggttctacaa

SEQ ID NO: 1005124 - DNA, 33 bp, Homo sapien
ggggcattgacagtaatgcagtaggttctacaa

SEQ ID NO: 1005125 - DNA, 33 bp, Homo sapien
gaaagccaaaatctcccctcatttgatgatttg

SEQ ID NO: 1005126 - DNA, 33 bp, Homo sapien
gaaagccaaaatctcctctcatttgatgatttg

SEQ ID NO: 1005127 - DNA, 33 bp, Homo sapien
agccatatattgccgcccactttgatgtccttc

SEQ ID NO: 1005128 - DNA, 33 bp, Homo sapien
agccatatattgccgctcactttgatgtccttc

SEQ ID NO: 1005129 - DNA, 33 bp, Homo sapien
gtcctgtgagattagaacaagggtcacgagtag

SEQ ID NO: 1005130 - DNA, 33 bp, Homo sapien
gtcctgtgagattagagcaagggtcacgagtag

SEQ ID NO: 1005131 - DNA, 33 bp, Homo sapien
gttctttcagctcataggatttggttgatatga

SEQ ID NO: 1005132 - DNA, 33 bp, Homo sapien
gttctttcagctcatatgatttggttgatatga

SEQ ID NO: 1005133 - DNA, 33 bp, Homo sapien
cagatgtagtaagcgtcaatgatagaattatgc

SEQ ID NO: 1005134 - DNA, 33 bp, Homo sapien
cagatgtagtaagcgttaatgatagaattatgc

SEQ ID NO: 1005135 - DNA, 33 bp, Homo sapien
agctttacgtgcatctcacggaaacaggataca

SEQ ID NO: 1005136 - DNA, 33 bp, Homo sapien
agctttacgtgcatcttacggaaacaggataca

SEQ ID NO: 1005137 - DNA, 33 bp, Homo sapien
aatcacttctcaaataactttttaggaacatac

SEQ ID NO: 1005138 - DNA, 33 bp, Homo sapien
aatcacttctcaaatatctttttaggaacatac

SEQ ID NO: 1005139 - DNA, 33 bp, Homo sapien
caacaattgagctctacggtatctgttacagcc

SEQ ID NO: 1005140 - DNA, 33 bp, Homo sapien
caacaattgagctctatggtatctgttacagcc

SEQ ID NO: 1005141 - DNA, 33 bp, Homo sapien
attcctccctcagcgacatactttctacttctt

SEQ ID NO: 1005142 - DNA, 33 bp, Homo sapien
attcctccctcagcgagatactttctacttctt

SEQ ID NO: 1005143 - DNA, 33 bp, Homo sapien
cacagaagaaagtagactccatcagcaaaattg

SEQ ID NO: 1005144 - DNA, 33 bp, Homo sapien
cacagaagaaagtagattccatcagcaaaattg

SEQ ID NO: 1005145 - DNA, 33 bp, Homo sapien
actttgtgactcttaacattacggagtgccagg

SEQ ID NO: 1005146 - DNA, 33 bp, Homo sapien
actttgtgactcttaatattacggagtgccagg

SEQ ID NO: 1005147 - DNA, 33 bp, Homo sapien
agtgatgagaccaaaagaagtcacagttacact

SEQ ID NO: 1005148 - DNA, 33 bp, Homo sapien
agtgatgagaccaaaataagtcacagttacact

SEQ ID NO: 1005149 - DNA, 33 bp, Homo sapien
cacagccagaaaaaaaatagattcacaaatgtt

SEQ ID NO: 1005150 - DNA, 33 bp, Homo sapien
cacagccagaaaaaaagtagattcacaaatgtt

SEQ ID NO: 1005151 - DNA, 33 bp, Homo sapien
caaaacaaaacaaaacgctatcacttacaaata

SEQ ID NO: 1005152 - DNA, 33 bp, Homo sapien
caaaacaaaacaaaactctatcacttacaaata

SEQ ID NO: 1005153 - DNA, 33 bp, Homo sapien
tttgagaatagaaaaacgacacttctttgtaat

SEQ ID NO: 1005154 - DNA, 33 bp, Homo sapien
tttgagaatagaaaaatgacacttctttgtaat

SEQ ID NO: 1005155 - DNA, 33 bp, Homo sapien
caacagatgatagatacctgaaaaggaacaagc

SEQ ID NO: 1005156 - DNA, 33 bp, Homo sapien
caacagatgatagatatctgaaaaggaacaagc

SEQ ID NO: 1005157 - DNA, 33 bp, Homo sapien
tatttcacgattgtaaatgttgacaatgtgtac

SEQ ID NO: 1005158 - DNA, 33 bp, Homo sapien
tatttcacgattgtaagtgttgacaatgtgtac

SEQ ID NO: 1005159 - DNA, 33 bp, Homo sapien
gttataattggtatcgcatctctaaccaagcgt

SEQ ID NO: 1005160 - DNA, 33 bp, Homo sapien
gttataattggtatcgtatctctaaccaagcgt

SEQ ID NO: 1005161 - DNA, 33 bp, Homo sapien
aaatcaacatagtctaataatagatgatttaac

SEQ ID NO: 1005162 - DNA, 33 bp, Homo sapien
aaatcaacatagtctagtaatagatgatttaac

SEQ ID NO: 1005163 - DNA, 33 bp, Homo sapien
aagctgctaactctataaaacaagtgctacatg

SEQ ID NO: 1005164 - DNA, 33 bp, Homo sapien
aagctgctaactctatgaaacaagtgctacatg

SEQ ID NO: 1005165 - DNA, 33 bp, Homo sapien
tactaatataacaacacggaccctgcggcgtct

SEQ ID NO: 1005166 - DNA, 33 bp, Homo sapien
tactaatataacaacatggaccctgcggcgtct

SEQ ID NO: 1005167 - DNA, 33 bp, Homo sapien
gggatagccgacaaaactgacttgtaccttcct

SEQ ID NO: 1005168 - DNA, 33 bp, Homo sapien
gggatagccgacaaaattgacttgtaccttcct

SEQ ID NO: 1005169 - DNA, 33 bp, Homo sapien
tctcatgaaaatttaacgaagaaagtgcattca

SEQ ID NO: 1005170 - DNA, 33 bp, Homo sapien
tctcatgaaaatttaatgaagaaagtgcattca

SEQ ID NO: 1005171 - DNA, 33 bp, Homo sapien
ccatccttatttacctcaaggaactctaataag

SEQ ID NO: 1005172 - DNA, 33 bp, Homo sapien
ccatccttatttacctgaaggaactctaataag

SEQ ID NO: 1005173 - DNA, 33 bp, Homo sapien
tgcttgacaactcttccatctagttgcaaaaga

SEQ ID NO: 1005174 - DNA, 33 bp, Homo sapien
tgcttgacaactcttctatctagttgcaaaaga

SEQ ID NO: 1005175 - DNA, 33 bp, Homo sapien
atctgcatttcattgaagagacctttgaataaa

SEQ ID NO: 1005176 - DNA, 33 bp, Homo sapien
atctgcatttcattgaggagacctttgaataaa

SEQ ID NO: 1005177 - DNA, 33 bp, Homo sapien
ctttcctatccaaggaatccacttgcatatata

SEQ ID NO: 1005178 - DNA, 33 bp, Homo sapien
ctttcctatccaaggagtccacttgcatatata

SEQ ID NO: 1005179 - DNA, 33 bp, Homo sapien
cattactaatgagagcaaacttcctgaaatcaa

SEQ ID NO: 1005180 - DNA, 33 bp, Homo sapien
cattactaatgagagcgaacttcctgaaatcaa

SEQ ID NO: 1005181 - DNA, 33 bp, Homo sapien
aataaacatgagctgaatcacctgtactatttc

SEQ ID NO: 1005182 - DNA, 33 bp, Homo sapien
aataaacatgagctgagtcacctgtactatttc

SEQ ID NO: 1005183 - DNA, 33 bp, Homo sapien
tggaaatgctgttaaacggaaacaaatgtaact

SEQ ID NO: 1005184 - DNA, 33 bp, Homo sapien
tggaaatgctgttaaatggaaacaaatgtaact

SEQ ID NO: 1005185 - DNA, 33 bp, Homo sapien
atctcctcttgcttcaaatgtatcagttacatt

SEQ ID NO: 1005186 - DNA, 33 bp, Homo sapien
atctcctcttgcttcagatgtatcagttacatt

SEQ ID NO: 1005187 - DNA, 33 bp, Homo sapien
cctagtatgtatcagaagctgacagttacaggc

SEQ ID NO: 1005188 - DNA, 33 bp, Homo sapien
cctagtatgtatcagaggctgacagttacaggc

SEQ ID NO: 1005189 - DNA, 33 bp, Homo sapien
gcactctcttaacatacaggtagagcattttgt

SEQ ID NO: 1005190 - DNA, 33 bp, Homo sapien
gcactctcttaacatataggtagagcattttgt

SEQ ID NO: 1005191 - DNA, 33 bp, Homo sapien
ccaggtgttgacatacaaaaccatatagccaat

SEQ ID NO: 1005192 - DNA, 33 bp, Homo sapien
ccaggtgttgacatacgaaaccatatagccaat

SEQ ID NO: 1005193 - DNA, 33 bp, Homo sapien
gcatggagaaaagcctcagagaacatctaccaa

SEQ ID NO: 1005194 - DNA, 33 bp, Homo sapien
gcatggagaaaagcctgagagaacatctaccaa

SEQ ID NO: 1005195 - DNA, 33 bp, Homo sapien
tgtgaagtctcagaagccctgggcaatgaggaa

SEQ ID NO: 1005196 - DNA, 33 bp, Homo sapien
tgtgaagtctcagaagtcctgggcaatgaggaa

SEQ ID NO: 1005197 - DNA, 33 bp, Homo sapien
agagaccattgtttcacgagatgatgaattccc

SEQ ID NO: 1005198 - DNA, 33 bp, Homo sapien
agagaccattgtttcatgagatgatgaattccc

SEQ ID NO: 1005199 - DNA, 33 bp, Homo sapien
tgataccaaagtggacagtcaaggaacagatgc

SEQ ID NO: 1005200 - DNA, 33 bp, Homo sapien
tgataccaaagtggaccgtcaaggaacagatgc

SEQ ID NO: 1005201 - DNA, 33 bp, Homo sapien
ttgactgaaataagaacgcagtgttttggaggg

SEQ ID NO: 1005202 - DNA, 33 bp, Homo sapien
ttgactgaaataagaatgcagtgttttggaggg

SEQ ID NO: 1005203 - DNA, 33 bp, Homo sapien
ttggcagtgaaagagacagctaaaaagaagtct

SEQ ID NO: 1005204 - DNA, 33 bp, Homo sapien
ttggcagtgaaagagatagctaaaaagaagtct

SEQ ID NO: 1005205 - DNA, 33 bp, Homo sapien
attaaaattactttacagcataatggtgaaatg

SEQ ID NO: 1005206 - DNA, 33 bp, Homo sapien
attaaaattactttaccgcataatggtgaaatg

SEQ ID NO: 1005207 - DNA, 33 bp, Homo sapien
taagacatgagaaggacagctttaattttaggg

SEQ ID NO: 1005208 - DNA, 33 bp, Homo sapien
taagacatgagaaggatagctttaattttaggg

SEQ ID NO: 1005209 - DNA, 33 bp, Homo sapien
ttgaagtgtcttgaaagggaagagagttaatca

SEQ ID NO: 1005210 - DNA, 33 bp, Homo sapien
ttgaagtgtcttgaaatggaagagagttaatca

SEQ ID NO: 1005211 - DNA, 33 bp, Homo sapien
catcattcagtaattcgcaatcctggttgcatg

SEQ ID NO: 1005212 - DNA, 33 bp, Homo sapien
catcattcagtaattctcaatcctggttgcatg

SEQ ID NO: 1005213 - DNA, 33 bp, Homo sapien
acagtggataaaaatacggccaatgataaagta

SEQ ID NO: 1005214 - DNA, 33 bp, Homo sapien
acagtggataaaaatatggccaatgataaagta

SEQ ID NO: 1005215 - DNA, 33 bp, Homo sapien
aaagtccgtataaccaaagcaaacacattttat

SEQ ID NO: 1005216 - DNA, 33 bp, Homo sapien
aaagtccgtataaccacagcaaacacattttat

SEQ ID NO: 1005217 - DNA, 33 bp, Homo sapien
gtgctgaacaaccgaccacggtaggagaagaca

SEQ ID NO: 1005218 - DNA, 33 bp, Homo sapien
gtgctgaacaaccgactacggtaggagaagaca

SEQ ID NO: 1005219 - DNA, 33 bp, Homo sapien
ggttttatataatgtcaatcaactggttgggct

SEQ ID NO: 1005220 - DNA, 33 bp, Homo sapien
ggttttatataatgtccatcaactggttgggct

SEQ ID NO: 1005221 - DNA, 33 bp, Homo sapien
ttgcagaaggagttagaattgttaggagaggaa

SEQ ID NO: 1005222 - DNA, 33 bp, Homo sapien
ttgcagaaggagttagtattgttaggagaggaa

SEQ ID NO: 1005223 - DNA, 33 bp, Homo sapien
gtttcaggaagtagacaggatttacagagctgc

SEQ ID NO: 1005224 - DNA, 33 bp, Homo sapien
gtttcaggaagtagactggatttacagagctgc

SEQ ID NO: 1005225 - DNA, 33 bp, Homo sapien
agaaactgtatcctagcaactcatggccaaata

SEQ ID NO: 1005226 - DNA, 33 bp, Homo sapien
agaaactgtatcctagtaactcatggccaaata

SEQ ID NO: 1005227 - DNA, 33 bp, Homo sapien
ttagcaaaaggaagcaaaatccatagaggtatc

SEQ ID NO: 1005228 - DNA, 33 bp, Homo sapien
ttagcaaaaggaagcagaatccatagaggtatc

SEQ ID NO: 1005229 - DNA, 33 bp, Homo sapien
tctcccttttcccttccctacgtatagtcagtc

SEQ ID NO: 1005230 - DNA, 33 bp, Homo sapien
tctcccttttcccttctctacgtatagtcagtc

SEQ ID NO: 1005231 - DNA, 33 bp, Homo sapien
atattttaagaatgccaccatcataaatgttgg

SEQ ID NO: 1005232 - DNA, 33 bp, Homo sapien
atattttaagaatgccgccatcataaatgttgg

SEQ ID NO: 1005233 - DNA, 33 bp, Homo sapien
gtataccatgtctcagccaatgtgcaaatagaa

SEQ ID NO: 1005234 - DNA, 33 bp, Homo sapien
gtataccatgtctcaggcaatgtgcaaatagaa

SEQ ID NO: 1005235 - DNA, 33 bp, Homo sapien
cctggcaatagtggacaatatatgctcctggta

SEQ ID NO: 1005236 - DNA, 33 bp, Homo sapien
cctggcaatagtggaccatatatgctcctggta

SEQ ID NO: 1005237 - DNA, 33 bp, Homo sapien
ttagtgttgttcattagtaaagacacacaattg

SEQ ID NO: 1005238 - DNA, 33 bp, Homo sapien
ttagtgttgttcattattaaagacacacaattg

SEQ ID NO: 1005239 - DNA, 33 bp, Homo sapien
aaatacagcaattttacaggtagttccagcagg

SEQ ID NO: 1005240 - DNA, 33 bp, Homo sapien
aaatacagcaattttagaggtagttccagcagg

SEQ ID NO: 1005241 - DNA, 33 bp, Homo sapien
gtgaccaggagagtaaaattcattattgaggta

SEQ ID NO: 1005242 - DNA, 33 bp, Homo sapien
gtgaccaggagagtaacattcattattgaggta

SEQ ID NO: 1005243 - DNA, 33 bp, Homo sapien
atagatgtctaatggcacttaacctttaaaatg

SEQ ID NO: 1005244 - DNA, 33 bp, Homo sapien
atagatgtctaatggcgcttaacctttaaaatg

SEQ ID NO: 1005245 - DNA, 33 bp, Homo sapien
gtcctagtttgatcacccctgcttttgacctta

SEQ ID NO: 1005246 - DNA, 33 bp, Homo sapien
gtcctagtttgatcactcctgcttttgacctta

SEQ ID NO: 1005247 - DNA, 33 bp, Homo sapien
ttttctaaacacggaaagatccacaaaaataaa

SEQ ID NO: 1005248 - DNA, 33 bp, Homo sapien
ttttctaaacacggaatgatccacaaaaataaa

SEQ ID NO: 1005249 - DNA, 33 bp, Homo sapien
atcacataaagtgacacctatccaactcttttt

SEQ ID NO: 1005250 - DNA, 33 bp, Homo sapien
atcacataaagtgacatctatccaactcttttt

SEQ ID NO: 1005251 - DNA, 33 bp, Homo sapien
aggcctctgtaaatcaactgaatgtggcttcta

SEQ ID NO: 1005252 - DNA, 33 bp, Homo sapien
aggcctctgtaaatcagctgaatgtggcttcta

SEQ ID NO: 1005253 - DNA, 33 bp, Homo sapien
atttaagagaaggatccatttgtacaaacgatg

SEQ ID NO: 1005254 - DNA, 33 bp, Homo sapien
atttaagagaaggatctatttgtacaaacgatg

SEQ ID NO: 1005255 - DNA, 33 bp, Homo sapien
tgtttttttatctgcactgactaataattgacc

SEQ ID NO: 1005256 - DNA, 33 bp, Homo sapien
tgtttttttatctgcattgactaataattgacc

SEQ ID NO: 1005257 - DNA, 33 bp, Homo sapien
tctgttcatttctcacggcatacctcatttttt

SEQ ID NO: 1005258 - DNA, 33 bp, Homo sapien
tctgttcatttctcactgcatacctcatttttt

SEQ ID NO: 1005259 - DNA, 33 bp, Homo sapien
ggttcaagcaattctacattctcgtgtctcatc

SEQ ID NO: 1005260 - DNA, 33 bp, Homo sapien
ggttcaagcaattctagattctcgtgtctcatc

SEQ ID NO: 1005261 - DNA, 33 bp, Homo sapien
gaaagagatgaatcctaagaagaaaatcatttt

SEQ ID NO: 1005262 - DNA, 33 bp, Homo sapien
gaaagagatgaatcctcagaagaaaatcatttt

SEQ ID NO: 1005263 - DNA, 33 bp, Homo sapien
ctccgtgccagagagaagtgttagaaaaacaaa

SEQ ID NO: 1005264 - DNA, 33 bp, Homo sapien
ctccgtgccagagagatgtgttagaaaaacaaa

SEQ ID NO: 1005265 - DNA, 33 bp, Homo sapien
cttctgacccttgaaactaaaagcactttctcc

SEQ ID NO: 1005266 - DNA, 33 bp, Homo sapien
cttctgacccttgaaattaaaagcactttctcc

SEQ ID NO: 1005267 - DNA, 33 bp, Homo sapien
tttttcatttatcacactaagtttttggcagtt

SEQ ID NO: 1005268 - DNA, 33 bp, Homo sapien
tttttcatttatcacattaagtttttggcagtt

SEQ ID NO: 1005269 - DNA, 33 bp, Homo sapien
aaccctagaaactctcgccaggcagtaagctga

SEQ ID NO: 1005270 - DNA, 33 bp, Homo sapien
aaccctagaaactctctccaggcagtaagctga

SEQ ID NO: 1005271 - DNA, 33 bp, Homo sapien
gctgaagtcagaattaccttttcacaacaaaaa

SEQ ID NO: 1005272 - DNA, 33 bp, Homo sapien
gctgaagtcagaattatcttttcacaacaaaaa

SEQ ID NO: 1005273 - DNA, 33 bp, Homo sapien
aggagattggataataaatggctcctttgcgcg

SEQ ID NO: 1005274 - DNA, 33 bp, Homo sapien
aggagattggataatagatggctcctttgcgcg

SEQ ID NO: 1005275 - DNA, 33 bp, Homo sapien
ataaatagctgtggtacaaagtaatgggcactg

SEQ ID NO: 1005276 - DNA, 33 bp, Homo sapien
ataaatagctgtggtagaaagtaatgggcactg

SEQ ID NO: 1005277 - DNA, 33 bp, Homo sapien
tatttggccatggcgcccgatcaaaaattgttc

SEQ ID NO: 1005278 - DNA, 33 bp, Homo sapien
tatttggccatggcgctcgatcaaaaattgttc

SEQ ID NO: 1005279 - DNA, 33 bp, Homo sapien
gtgatgccttaagtgaagcaggtactaacatct

SEQ ID NO: 1005280 - DNA, 33 bp, Homo sapien
gtgatgccttaagtgatgcaggtactaacatct

SEQ ID NO: 1005281 - DNA, 33 bp, Homo sapien
ctgtgtcctagctgagaaaaagatatgtcaaaa

SEQ ID NO: 1005282 - DNA, 33 bp, Homo sapien
ctgtgtcctagctgaggaaaagatatgtcaaaa

SEQ ID NO: 1005283 - DNA, 33 bp, Homo sapien
agtttgataagccgaccaagttattgaataaag

SEQ ID NO: 1005284 - DNA, 33 bp, Homo sapien
agtttgataagccgactaagttattgaataaag

SEQ ID NO: 1005285 - DNA, 33 bp, Homo sapien
ccatatcttacagttaccatttacatcttttta

SEQ ID NO: 1005286 - DNA, 33 bp, Homo sapien
ccatatcttacagttatcatttacatcttttta

SEQ ID NO: 1005287 - DNA, 33 bp, Homo sapien
tttgtattgtggtttgaacagaaccatgactat

SEQ ID NO: 1005288 - DNA, 33 bp, Homo sapien
tttgtattgtggtttggacagaaccatgactat

SEQ ID NO: 1005289 - DNA, 33 bp, Homo sapien
atcacacccagtcaaaaatttggagttttatac

SEQ ID NO: 1005290 - DNA, 33 bp, Homo sapien
atcacacccagtcaaacatttggagttttatac

SEQ ID NO: 1005291 - DNA, 33 bp, Homo sapien
aaggtcagggactgaagaggtaatgaagcaaga

SEQ ID NO: 1005292 - DNA, 33 bp, Homo sapien
aaggtcagggactgaataggtaatgaagcaaga

SEQ ID NO: 1005293 - DNA, 33 bp, Homo sapien
aaaatggaagtaagaaagcttgtcaacaaactt

SEQ ID NO: 1005294 - DNA, 33 bp, Homo sapien
aaaatggaagtaagaatgcttgtcaacaaactt

SEQ ID NO: 1005295 - DNA, 33 bp, Homo sapien
tgcaactgaagaaccaaaggatatggaaataaa

SEQ ID NO: 1005296 - DNA, 33 bp, Homo sapien
tgcaactgaagaaccagaggatatggaaataaa

SEQ ID NO: 1005297 - DNA, 33 bp, Homo sapien
gcctttaaatgaatgcggaagatttgaaaaggt

SEQ ID NO: 1005298 - DNA, 33 bp, Homo sapien
gcctttaaatgaatgctgaagatttgaaaaggt

SEQ ID NO: 1005299 - DNA, 33 bp, Homo sapien
actggactgatagatgaaaacttttgggttgtg

SEQ ID NO: 1005300 - DNA, 33 bp, Homo sapien
actggactgatagatgcaaacttttgggttgtg

SEQ ID NO: 1005301 - DNA, 33 bp, Homo sapien
cagtccttccatttcaacttagagatgaacctt

SEQ ID NO: 1005302 - DNA, 33 bp, Homo sapien
cagtccttccatttcaccttagagatgaacctt

SEQ ID NO: 1005303 - DNA, 33 bp, Homo sapien
aaggggatctgacttacggcacaaaaagcaact

SEQ ID NO: 1005304 - DNA, 33 bp, Homo sapien
aaggggatctgacttagggcacaaaaagcaact

SEQ ID NO: 1005305 - DNA, 33 bp, Homo sapien
tctttcagatgggaaacgctctgagatccttag

SEQ ID NO: 1005306 - DNA, 33 bp, Homo sapien
tctttcagatgggaaatgctctgagatccttag

SEQ ID NO: 1005307 - DNA, 33 bp, Homo sapien
tctccagagtttgtaaggtttgtcaccttgcta

SEQ ID NO: 1005308 - DNA, 33 bp, Homo sapien
tctccagagtttgtaatgtttgtcaccttgcta

SEQ ID NO: 1005309 - DNA, 33 bp, Homo sapien
tgagtaatatgtaacacagcctgatgcaaactc

SEQ ID NO: 1005310 - DNA, 33 bp, Homo sapien
tgagtaatatgtaacatagcctgatgcaaactc

SEQ ID NO: 1005311 - DNA, 33 bp, Homo sapien
ggaaagaagatatagaatagaagcaggcatttg

SEQ ID NO: 1005312 - DNA, 33 bp, Homo sapien
ggaaagaagatatagagtagaagcaggcatttg

SEQ ID NO: 1005313 - DNA, 33 bp, Homo sapien
ggatggcaagctagcaatatcgttacagggcac

SEQ ID NO: 1005314 - DNA, 33 bp, Homo sapien
ggatggcaagctagcagtatcgttacagggcac

SEQ ID NO: 1005315 - DNA, 33 bp, Homo sapien
ttcttccatctctaacagggtaacaaatgtagt

SEQ ID NO: 1005316 - DNA, 33 bp, Homo sapien
ttcttccatctctaacggggtaacaaatgtagt

SEQ ID NO: 1005317 - DNA, 33 bp, Homo sapien
acccaaattagacatacgaaaccaaagctaaca

SEQ ID NO: 1005318 - DNA, 33 bp, Homo sapien
acccaaattagacataggaaaccaaagctaaca

SEQ ID NO: 1005319 - DNA, 33 bp, Homo sapien
tctggatgctttgtaaagaatagattgggaggt

SEQ ID NO: 1005320 - DNA, 33 bp, Homo sapien
tctggatgctttgtaaggaatagattgggaggt

SEQ ID NO: 1005321 - DNA, 33 bp, Homo sapien
ttaaatttactgttgacagctttccaaattaaa

SEQ ID NO: 1005322 - DNA, 33 bp, Homo sapien
ttaaatttactgttgagagctttccaaattaaa

SEQ ID NO: 1005323 - DNA, 33 bp, Homo sapien
agctgcacctaaaacccgggcaattcacttata

SEQ ID NO: 1005324 - DNA, 33 bp, Homo sapien
agctgcacctaaaacctgggcaattcacttata

SEQ ID NO: 1005325 - DNA, 33 bp, Homo sapien
ttggggaaagggcatacgtgatggtgaaatcat

SEQ ID NO: 1005326 - DNA, 33 bp, Homo sapien
ttggggaaagggcatatgtgatggtgaaatcat

SEQ ID NO: 1005327 - DNA, 33 bp, Homo sapien
atagtctaagagaacactgacaaagcaaactac

SEQ ID NO: 1005328 - DNA, 33 bp, Homo sapien
atagtctaagagaacattgacaaagcaaactac

SEQ ID NO: 1005329 - DNA, 33 bp, Homo sapien
tacatctttcctgctacagtcaacgagtattct

SEQ ID NO: 1005330 - DNA, 33 bp, Homo sapien
tacatctttcctgctagagtcaacgagtattct

SEQ ID NO: 1005331 - DNA, 33 bp, Homo sapien
tcaacgagtattctaactacataaatgctgtac

SEQ ID NO: 1005332 - DNA, 33 bp, Homo sapien
tcaacgagtattctaagtacataaatgctgtac

SEQ ID NO: 1005333 - DNA, 33 bp, Homo sapien
aaccagcaccgacatacaacgtttcccgtgttg

SEQ ID NO: 1005334 - DNA, 33 bp, Homo sapien
aaccagcaccgacatagaacgtttcccgtgttg

SEQ ID NO: 1005335 - DNA, 33 bp, Homo sapien
ttggttttgacctcaccgtagttgcttctgtgc

SEQ ID NO: 1005336 - DNA, 33 bp, Homo sapien
ttggttttgacctcactgtagttgcttctgtgc

SEQ ID NO: 1005337 - DNA, 33 bp, Homo sapien
caaaataaatttcctcacttgtctctggagttc

SEQ ID NO: 1005338 - DNA, 33 bp, Homo sapien
caaaataaatttcctcgcttgtctctggagttc

SEQ ID NO: 1005339 - DNA, 33 bp, Homo sapien
ttagatttccttcagaacaaacttgatttatca

SEQ ID NO: 1005340 - DNA, 33 bp, Homo sapien
ttagatttccttcagaccaaacttgatttatca

SEQ ID NO: 1005341 - DNA, 33 bp, Homo sapien
gctggaaattatactccgagctttaatcaatag

SEQ ID NO: 1005342 - DNA, 33 bp, Homo sapien
gctggaaattatactctgagctttaatcaatag

SEQ ID NO: 1005343 - DNA, 33 bp, Homo sapien
gagacctagtcccccaatgctttcattctttaa

SEQ ID NO: 1005344 - DNA, 33 bp, Homo sapien
gagacctagtcccccagtgctttcattctttaa

SEQ ID NO: 1005345 - DNA, 33 bp, Homo sapien
gagggtagactccatactaactgacaggctgtc

SEQ ID NO: 1005346 - DNA, 33 bp, Homo sapien
gagggtagactccatattaactgacaggctgtc

SEQ ID NO: 1005347 - DNA, 33 bp, Homo sapien
tttgaaaagaaaaataaaatctgagtttacagt

SEQ ID NO: 1005348 - DNA, 33 bp, Homo sapien
tttgaaaagaaaaatataatctgagtttacagt

SEQ ID NO: 1005349 - DNA, 33 bp, Homo sapien
gtcattaggagaacaacgtaaccaagtacttgg

SEQ ID NO: 1005350 - DNA, 33 bp, Homo sapien
gtcattaggagaacaaggtaaccaagtacttgg

SEQ ID NO: 1005351 - DNA, 33 bp, Homo sapien
attagggaagagataagagtcattaggagaaca

SEQ ID NO: 1005352 - DNA, 33 bp, Homo sapien
attagggaagagataatagtcattaggagaaca

SEQ ID NO: 1005353 - DNA, 33 bp, Homo sapien
ttgaataaaatagaaacagacaagcctgtgctc

SEQ ID NO: 1005354 - DNA, 33 bp, Homo sapien
ttgaataaaatagaaagagacaagcctgtgctc

SEQ ID NO: 1005355 - DNA, 33 bp, Homo sapien
atagttcccatttggaaaccctactcttcttgg

SEQ ID NO: 1005356 - DNA, 33 bp, Homo sapien
atagttcccatttggagaccctactcttcttgg

SEQ ID NO: 1005357 - DNA, 33 bp, Homo sapien
cacaatgttgagggaaaaaaagctcgctgtaga

SEQ ID NO: 1005358 - DNA, 33 bp, Homo sapien
cacaatgttgagggaagaaaagctcgctgtaga

SEQ ID NO: 1005359 - DNA, 33 bp, Homo sapien
tcagcctttttctacacaattgcacatacacac

SEQ ID NO: 1005360 - DNA, 33 bp, Homo sapien
tcagcctttttctacagaattgcacatacacac

SEQ ID NO: 1005361 - DNA, 33 bp, Homo sapien
ttttctaccaatcatgaaccttttctttgaata

SEQ ID NO: 1005362 - DNA, 33 bp, Homo sapien
ttttctaccaatcatggaccttttctttgaata

SEQ ID NO: 1005363 - DNA, 33 bp, Homo sapien
tgtggaacataaaacaatatttaagtcaaccat

SEQ ID NO: 1005364 - DNA, 33 bp, Homo sapien
tgtggaacataaaacagtatttaagtcaaccat

SEQ ID NO: 1005365 - DNA, 33 bp, Homo sapien
acaataacaaagatgagaaatttactacatgga

SEQ ID NO: 1005366 - DNA, 33 bp, Homo sapien
acaataacaaagatgataaatttactacatgga

SEQ ID NO: 1005367 - DNA, 33 bp, Homo sapien
gtctcatatgtcatgcccaggattttcattttt

SEQ ID NO: 1005368 - DNA, 33 bp, Homo sapien
gtctcatatgtcatgctcaggattttcattttt

SEQ ID NO: 1005369 - DNA, 33 bp, Homo sapien
acacaggaatgaaggaaaagaaggtgtttagaa

SEQ ID NO: 1005370 - DNA, 33 bp, Homo sapien
acacaggaatgaaggagaagaaggtgtttagaa

SEQ ID NO: 1005371 - DNA, 33 bp, Homo sapien
cttgattttagaataacagatgtgtttatgagc

SEQ ID NO: 1005372 - DNA, 33 bp, Homo sapien
cttgattttagaataatagatgtgtttatgagc

SEQ ID NO: 1005373 - DNA, 33 bp, Homo sapien
gctgtcagtgagttaaagtggctgaaacagatc

SEQ ID NO: 1005374 - DNA, 33 bp, Homo sapien
gctgtcagtgagttaaggtggctgaaacagatc

SEQ ID NO: 1005375 - DNA, 33 bp, Homo sapien
aaagattcaatctctaccaaaataccaattata

SEQ ID NO: 1005376 - DNA, 33 bp, Homo sapien
aaagattcaatctctatcaaaataccaattata

SEQ ID NO: 1005377 - DNA, 33 bp, Homo sapien
cgagggttttgttggactactggctcttctttg

SEQ ID NO: 1005378 - DNA, 33 bp, Homo sapien
cgagggttttgttggagtactggctcttctttg

SEQ ID NO: 1005379 - DNA, 33 bp, Homo sapien
aagtgtggtttagaaacgcactggagaattttg

SEQ ID NO: 1005380 - DNA, 33 bp, Homo sapien
aagtgtggtttagaaatgcactggagaattttg

SEQ ID NO: 1005381 - DNA, 33 bp, Homo sapien
aagtaattgtcatcaacgtactgcattttattt

SEQ ID NO: 1005382 - DNA, 33 bp, Homo sapien
aagtaattgtcatcaaggtactgcattttattt

SEQ ID NO: 1005383 - DNA, 33 bp, Homo sapien
tgatcatggcaactgacacaggtcctcgaggaa

SEQ ID NO: 1005384 - DNA, 33 bp, Homo sapien
tgatcatggcaactgagacaggtcctcgaggaa

SEQ ID NO: 1005385 - DNA, 33 bp, Homo sapien
ctaattgctctggctacaacttctgatgctatg

SEQ ID NO: 1005386 - DNA, 33 bp, Homo sapien
ctaattgctctggctagaacttctgatgctatg

SEQ ID NO: 1005387 - DNA, 33 bp, Homo sapien
tgatattataccttacaatatgcgttcttgata

SEQ ID NO: 1005388 - DNA, 33 bp, Homo sapien
tgatattataccttaccatatgcgttcttgata

SEQ ID NO: 1005389 - DNA, 33 bp, Homo sapien
atcaatgttttagagacgtttaatagactagta

SEQ ID NO: 1005390 - DNA, 33 bp, Homo sapien
atcaatgttttagagatgtttaatagactagta

SEQ ID NO: 1005391 - DNA, 33 bp, Homo sapien
ttagctcccatttataaacggacacacaggatt

SEQ ID NO: 1005392 - DNA, 33 bp, Homo sapien
ttagctcccatttatagacggacacacaggatt

SEQ ID NO: 1005393 - DNA, 33 bp, Homo sapien
tttgtcagattcattgaaagtatgttctcccat

SEQ ID NO: 1005394 - DNA, 33 bp, Homo sapien
tttgtcagattcattggaagtatgttctcccat

SEQ ID NO: 1005395 - DNA, 33 bp, Homo sapien
gattaataaacgtaagcagtatacatggtcaat

SEQ ID NO: 1005396 - DNA, 33 bp, Homo sapien
gattaataaacgtaagtagtatacatggtcaat

SEQ ID NO: 1005397 - DNA, 33 bp, Homo sapien
tatcaaagtagtttgaaaacatgatgaagggaa

SEQ ID NO: 1005398 - DNA, 33 bp, Homo sapien
tatcaaagtagtttgataacatgatgaagggaa

SEQ ID NO: 1005399 - DNA, 33 bp, Homo sapien
gcatacaatggaaggaaagtttatataatttct

SEQ ID NO: 1005400 - DNA, 33 bp, Homo sapien
gcatacaatggaaggagagtttatataatttct

SEQ ID NO: 1005401 - DNA, 33 bp, Homo sapien
ccctaaaagaagctaacgcatggtctttggaac

SEQ ID NO: 1005402 - DNA, 33 bp, Homo sapien
ccctaaaagaagctaatgcatggtctttggaac

SEQ ID NO: 1005403 - DNA, 33 bp, Homo sapien
atctagaaaaagaaaacagtgaacttgcagata

SEQ ID NO: 1005404 - DNA, 33 bp, Homo sapien
atctagaaaaagaaaatagtgaacttgcagata

SEQ ID NO: 1005405 - DNA, 33 bp, Homo sapien
attttttaagtcctaactgcagtgacatcataa

SEQ ID NO: 1005406 - DNA, 33 bp, Homo sapien
attttttaagtcctaattgcagtgacatcataa

SEQ ID NO: 1005407 - DNA, 33 bp, Homo sapien
aagcttaacacaaaatgataaagcatcatactg

SEQ ID NO: 1005408 - DNA, 33 bp, Homo sapien
aagcttaacacaaaattataaagcatcatactg

SEQ ID NO: 1005409 - DNA, 33 bp, Homo sapien
agaggttaacttgccaactgactgaatctattt

SEQ ID NO: 1005410 - DNA, 33 bp, Homo sapien
agaggttaacttgccagctgactgaatctattt

SEQ ID NO: 1005411 - DNA, 33 bp, Homo sapien
aatgggtcctgagcaaataagattgtaaacaca

SEQ ID NO: 1005412 - DNA, 33 bp, Homo sapien
aatgggtcctgagcaattaagattgtaaacaca

SEQ ID NO: 1005413 - DNA, 33 bp, Homo sapien
attattgaataaccacaaccaacatagatccat

SEQ ID NO: 1005414 - DNA, 33 bp, Homo sapien
attattgaataaccacgaccaacatagatccat

SEQ ID NO: 1005415 - DNA, 33 bp, Homo sapien
gctcaagattatacacacagggatagtcactca

SEQ ID NO: 1005416 - DNA, 33 bp, Homo sapien
gctcaagattatacacgcagggatagtcactca

SEQ ID NO: 1005417 - DNA, 33 bp, Homo sapien
ttgggttgcaaataacaaatataaaccaggaag

SEQ ID NO: 1005418 - DNA, 33 bp, Homo sapien
ttgggttgcaaataaccaatataaaccaggaag

SEQ ID NO: 1005419 - DNA, 33 bp, Homo sapien
cttgaggtgcttgttaaaacttcactttaagaa

SEQ ID NO: 1005420 - DNA, 33 bp, Homo sapien
cttgaggtgcttgttataacttcactttaagaa

SEQ ID NO: 1005421 - DNA, 33 bp, Homo sapien
cacatctgactgctaaaaaacaggcagctctca

SEQ ID NO: 1005422 - DNA, 33 bp, Homo sapien
cacatctgactgctaacaaacaggcagctctca

SEQ ID NO: 1005423 - DNA, 33 bp, Homo sapien
tacctttctccacaataaacagaaatttgagag

SEQ ID NO: 1005424 - DNA, 33 bp, Homo sapien
tacctttctccacaatcaacagaaatttgagag

SEQ ID NO: 1005425 - DNA, 33 bp, Homo sapien
atgtgcatcagtaactcaaaaagtcttatggat

SEQ ID NO: 1005426 - DNA, 33 bp, Homo sapien
atgtgcatcagtaactgaaaaagtcttatggat

SEQ ID NO: 1005427 - DNA, 33 bp, Homo sapien
ctgaaaagactccccccacttttgtatcttcct

SEQ ID NO: 1005428 - DNA, 33 bp, Homo sapien
ctgaaaagactcccccgacttttgtatcttcct

SEQ ID NO: 1005429 - DNA, 33 bp, Homo sapien
aaatgaggagaagctacgactgatgattcctga

SEQ ID NO: 1005430 - DNA, 33 bp, Homo sapien
aaatgaggagaagctatgactgatgattcctga

SEQ ID NO: 1005431 - DNA, 33 bp, Homo sapien
tcacgtatcccaacacactcttttttgggggaa

SEQ ID NO: 1005432 - DNA, 33 bp, Homo sapien
tcacgtatcccaacactctcttttttgggggaa

SEQ ID NO: 1005433 - DNA, 33 bp, Homo sapien
ttgtaggattaaaaaaaatgctcactaatactt

SEQ ID NO: 1005434 - DNA, 33 bp, Homo sapien
ttgtaggattaaaaaacatgctcactaatactt

SEQ ID NO: 1005435 - DNA, 33 bp, Homo sapien
tcagcaaatcatattacagcttcttcatattcc

SEQ ID NO: 1005436 - DNA, 33 bp, Homo sapien
tcagcaaatcatattatagcttcttcatattcc

SEQ ID NO: 1005437 - DNA, 33 bp, Homo sapien
tctttcacaaagatagaactgcagactggctct

SEQ ID NO: 1005438 - DNA, 33 bp, Homo sapien
tctttcacaaagatagtactgcagactggctct

SEQ ID NO: 1005439 - DNA, 33 bp, Homo sapien
aatggggtcggtagagaatgagaaagctataaa

SEQ ID NO: 1005440 - DNA, 33 bp, Homo sapien
aatggggtcggtagagtatgagaaagctataaa

SEQ ID NO: 1005441 - DNA, 33 bp, Homo sapien
cagctttattattgaggaatgtctttctcaaag

SEQ ID NO: 1005442 - DNA, 33 bp, Homo sapien
cagctttattattgagtaatgtctttctcaaag

SEQ ID NO: 1005443 - DNA, 33 bp, Homo sapien
ctgtcatcaagaacctcaatttgattcatttgt

SEQ ID NO: 1005444 - DNA, 33 bp, Homo sapien
ctgtcatcaagaaccttaatttgattcatttgt

SEQ ID NO: 1005445 - DNA, 33 bp, Homo sapien
atagtgcaacagtgaacgtaataacctagacag

SEQ ID NO: 1005446 - DNA, 33 bp, Homo sapien
atagtgcaacagtgaatgtaataacctagacag

SEQ ID NO: 1005447 - DNA, 33 bp, Homo sapien
gtgagtgaaaattggaagttattgaaaatgttg

SEQ ID NO: 1005448 - DNA, 33 bp, Homo sapien
gtgagtgaaaattggatgttattgaaaatgttg

SEQ ID NO: 1005449 - DNA, 33 bp, Homo sapien
catttcatggagatttgtgagtaacagggcata

SEQ ID NO: 1005450 - DNA, 33 bp, Homo sapien
catttcatggagatttttgagtaacagggcata

SEQ ID NO: 1005451 - DNA, 33 bp, Homo sapien
ctcaggttggggattagctctctcaggacattt

SEQ ID NO: 1005452 - DNA, 33 bp, Homo sapien
ctcaggttggggattatctctctcaggacattt

SEQ ID NO: 1005453 - DNA, 33 bp, Homo sapien
tggattcttttttctagccctaatatgcatacc

SEQ ID NO: 1005454 - DNA, 33 bp, Homo sapien
tggattcttttttctatccctaatatgcatacc

SEQ ID NO: 1005455 - DNA, 33 bp, Homo sapien
taggtgagtgcccaaaacatctcagctgaagaa

SEQ ID NO: 1005456 - DNA, 33 bp, Homo sapien
taggtgagtgcccaaatcatctcagctgaagaa

SEQ ID NO: 1005457 - DNA, 33 bp, Homo sapien
aagaaatacactgtcaacaattccattcacatg

SEQ ID NO: 1005458 - DNA, 33 bp, Homo sapien
aagaaatacactgtcatcaattccattcacatg

SEQ ID NO: 1005459 - DNA, 33 bp, Homo sapien
tacatttgtaacgcaacttcccatttctgtttc

SEQ ID NO: 1005460 - DNA, 33 bp, Homo sapien
tacatttgtaacgcaatttcccatttctgtttc

SEQ ID NO: 1005461 - DNA, 33 bp, Homo sapien
gctggtcaaataaacaactcttctatcctcctg

SEQ ID NO: 1005462 - DNA, 33 bp, Homo sapien
gctggtcaaataaacagctcttctatcctcctg

SEQ ID NO: 1005463 - DNA, 33 bp, Homo sapien
cttatgttttggtaacactatattcaagaccat

SEQ ID NO: 1005464 - DNA, 33 bp, Homo sapien
cttatgttttggtaacgctatattcaagaccat

SEQ ID NO: 1005465 - DNA, 33 bp, Homo sapien
cgctttctttaaagataactgagactccgaact

SEQ ID NO: 1005466 - DNA, 33 bp, Homo sapien
cgctttctttaaagatgactgagactccgaact

SEQ ID NO: 1005467 - DNA, 33 bp, Homo sapien
gagttttagactacaaactttccctctcaagtc

SEQ ID NO: 1005468 - DNA, 33 bp, Homo sapien
gagttttagactacaagctttccctctcaagtc

SEQ ID NO: 1005469 - DNA, 33 bp, Homo sapien
aatggtaaaaattatacaagaatatgcatgtaa

SEQ ID NO: 1005470 - DNA, 33 bp, Homo sapien
aatggtaaaaattatagaagaatatgcatgtaa

SEQ ID NO: 1005471 - DNA, 33 bp, Homo sapien
caggaccacaaaggcacagattgaaatgataca

SEQ ID NO: 1005472 - DNA, 33 bp, Homo sapien
caggaccacaaaggcagagattgaaatgataca

SEQ ID NO: 1005473 - DNA, 33 bp, Homo sapien
cttttttatgtttatacagatccacaaaaattg

SEQ ID NO: 1005474 - DNA, 33 bp, Homo sapien
cttttttatgtttatagagatccacaaaaattg

SEQ ID NO: 1005475 - DNA, 33 bp, Homo sapien
taaaactaatagcggagagtgtcatgcaaagat

SEQ ID NO: 1005476 - DNA, 33 bp, Homo sapien
taaaactaatagcggatagtgtcatgcaaagat

SEQ ID NO: 1005477 - DNA, 33 bp, Homo sapien
attgtgtactaccagaactttccaagctctata

SEQ ID NO: 1005478 - DNA, 33 bp, Homo sapien
attgtgtactaccagacctttccaagctctata

SEQ ID NO: 1005479 - DNA, 33 bp, Homo sapien
gaagaagaaatgaaaacagcatacctttataaa

SEQ ID NO: 1005480 - DNA, 33 bp, Homo sapien
gaagaagaaatgaaaagagcatacctttataaa

SEQ ID NO: 1005481 - DNA, 33 bp, Homo sapien
ggtgatacatggttaaagaacatttgctaattt

SEQ ID NO: 1005482 - DNA, 33 bp, Homo sapien
ggtgatacatggttaatgaacatttgctaattt

SEQ ID NO: 1005483 - DNA, 33 bp, Homo sapien
cattgaaccagaatcacgctgcgggaactgtgg

SEQ ID NO: 1005484 - DNA, 33 bp, Homo sapien
cattgaaccagaatcatgctgcgggaactgtgg

SEQ ID NO: 1005485 - DNA, 33 bp, Homo sapien
acaatggacttttcacagcctatacaaatttgt

SEQ ID NO: 1005486 - DNA, 33 bp, Homo sapien
acaatggacttttcacggcctatacaaatttgt

SEQ ID NO: 1005487 - DNA, 33 bp, Homo sapien
aaatgagttgttataaaaaaactcacttttgaa

SEQ ID NO: 1005488 - DNA, 33 bp, Homo sapien
aaatgagttgttataagaaaactcacttttgaa

SEQ ID NO: 1005489 - DNA, 33 bp, Homo sapien
ctgattgtatgctttcaactcagaagattttag

SEQ ID NO: 1005490 - DNA, 33 bp, Homo sapien
ctgattgtatgctttcgactcagaagattttag

SEQ ID NO: 1005491 - DNA, 33 bp, Homo sapien
atttccgtaatgaatgaaaatcatggacaacca

SEQ ID NO: 1005492 - DNA, 33 bp, Homo sapien
atttccgtaatgaatgcaaatcatggacaacca

SEQ ID NO: 1005493 - DNA, 33 bp, Homo sapien
cgggaacagtgcacatcatgaagaatgaagaat

SEQ ID NO: 1005494 - DNA, 33 bp, Homo sapien
cgggaacagtgcacattatgaagaatgaagaat

SEQ ID NO: 1005495 - DNA, 33 bp, Homo sapien
acagagccagatgaataaaaagaatgaactgag

SEQ ID NO: 1005496 - DNA, 33 bp, Homo sapien
acagagccagatgaatgaaaagaatgaactgag

SEQ ID NO: 1005497 - DNA, 33 bp, Homo sapien
cattacagatccatataatacgtcaacatttaa

SEQ ID NO: 1005498 - DNA, 33 bp, Homo sapien
cattacagatccatattatacgtcaacatttaa

SEQ ID NO: 1005499 - DNA, 33 bp, Homo sapien
cacttctgttcagcataagaaattatcacagtg

SEQ ID NO: 1005500 - DNA, 33 bp, Homo sapien
cacttctgttcagcatgagaaattatcacagtg

SEQ ID NO: 1005501 - DNA, 33 bp, Homo sapien
tgacttactacaaccaaatatgtaattgagctt

SEQ ID NO: 1005502 - DNA, 33 bp, Homo sapien
tgacttactacaaccagatatgtaattgagctt

SEQ ID NO: 1005503 - DNA, 33 bp, Homo sapien
ttctattttttaatgcagaaaaaccatgcatga

SEQ ID NO: 1005504 - DNA, 33 bp, Homo sapien
ttctattttttaatgctgaaaaaccatgcatga

SEQ ID NO: 1005505 - DNA, 33 bp, Homo sapien
ctgctataacacaatacccccgcatgagtaatt

SEQ ID NO: 1005506 - DNA, 33 bp, Homo sapien
ctgctataacacaatatccccgcatgagtaatt

SEQ ID NO: 1005507 - DNA, 33 bp, Homo sapien
agaaatcacagtaccactgaagtcaaataagat

SEQ ID NO: 1005508 - DNA, 33 bp, Homo sapien
agaaatcacagtaccattgaagtcaaataagat

SEQ ID NO: 1005509 - DNA, 33 bp, Homo sapien
ggcagccaagctaaagcaaatccttgtctatcc

SEQ ID NO: 1005510 - DNA, 33 bp, Homo sapien
ggcagccaagctaaaggaaatccttgtctatcc

SEQ ID NO: 1005511 - DNA, 33 bp, Homo sapien
aggaggtaaatctcggaaagttgacttctgcca

SEQ ID NO: 1005512 - DNA, 33 bp, Homo sapien
aggaggtaaatctcggtaagttgacttctgcca

SEQ ID NO: 1005513 - DNA, 33 bp, Homo sapien
aaagagatttcattaggaagctttcattctctt

SEQ ID NO: 1005514 - DNA, 33 bp, Homo sapien
aaagagatttcattagtaagctttcattctctt

SEQ ID NO: 1005515 - DNA, 33 bp, Homo sapien
ctgtcttatgaaattgccaagtcccttttttat

SEQ ID NO: 1005516 - DNA, 33 bp, Homo sapien
ctgtcttatgaaattgtcaagtcccttttttat

SEQ ID NO: 1005517 - DNA, 33 bp, Homo sapien
tagactttcaaagcaaataacttctaccaacta

SEQ ID NO: 1005518 - DNA, 33 bp, Homo sapien
tagactttcaaagcaagtaacttctaccaacta

SEQ ID NO: 1005519 - DNA, 33 bp, Homo sapien
ttcctagggtggtgaactaaagatgacaaggac

SEQ ID NO: 1005520 - DNA, 33 bp, Homo sapien
ttcctagggtggtgaattaaagatgacaaggac

SEQ ID NO: 1005521 - DNA, 33 bp, Homo sapien
ctaacgtagtagttaactgcagatatagaagaa

SEQ ID NO: 1005522 - DNA, 33 bp, Homo sapien
ctaacgtagtagttaattgcagatatagaagaa

SEQ ID NO: 1005523 - DNA, 33 bp, Homo sapien
aagaatatgtagccaaaggctatggtttgaatg

SEQ ID NO: 1005524 - DNA, 33 bp, Homo sapien
aagaatatgtagccaatggctatggtttgaatg

SEQ ID NO: 1005525 - DNA, 33 bp, Homo sapien
atcattttgcattttaggttatttgaaaagagc

SEQ ID NO: 1005526 - DNA, 33 bp, Homo sapien
atcattttgcattttatgttatttgaaaagagc

SEQ ID NO: 1005527 - DNA, 33 bp, Homo sapien
tcttcctacttcctggaacacagagtgaaatta

SEQ ID NO: 1005528 - DNA, 33 bp, Homo sapien
tcttcctacttcctgggacacagagtgaaatta

SEQ ID NO: 1005529 - DNA, 33 bp, Homo sapien
gttctcctacgctgcaatgaacactaaactcaa

SEQ ID NO: 1005530 - DNA, 33 bp, Homo sapien
gttctcctacgctgcagtgaacactaaactcaa

SEQ ID NO: 1005531 - DNA, 33 bp, Homo sapien
gcctaaggtaacacagaattccaaccaagactg

SEQ ID NO: 1005532 - DNA, 33 bp, Homo sapien
gcctaaggtaacacaggattccaaccaagactg

SEQ ID NO: 1005533 - DNA, 33 bp, Homo sapien
caacaacatttaagagacggactaaagaacagt

SEQ ID NO: 1005534 - DNA, 33 bp, Homo sapien
caacaacatttaagaggcggactaaagaacagt

SEQ ID NO: 1005535 - DNA, 33 bp, Homo sapien
gaaagcctaggtgatgcagtcagggccacaaaa

SEQ ID NO: 1005536 - DNA, 33 bp, Homo sapien
gaaagcctaggtgatggagtcagggccacaaaa

SEQ ID NO: 1005537 - DNA, 33 bp, Homo sapien
tttttcctatctgtctcaagtgaaccaattagt

SEQ ID NO: 1005538 - DNA, 33 bp, Homo sapien
tttttcctatctgtcttaagtgaaccaattagt

SEQ ID NO: 1005539 - DNA, 33 bp, Homo sapien
gaaactggtggcatagaatacaatgggactgtc

SEQ ID NO: 1005540 - DNA, 33 bp, Homo sapien
gaaactggtggcataggatacaatgggactgtc

SEQ ID NO: 1005541 - DNA, 33 bp, Homo sapien
gaagcttacaagtacacgattccatcaattgtt

SEQ ID NO: 1005542 - DNA, 33 bp, Homo sapien
gaagcttacaagtacaggattccatcaattgtt

SEQ ID NO: 1005543 - DNA, 33 bp, Homo sapien
gtctgtggacagggacggctgtgaaggtcttta

SEQ ID NO: 1005544 - DNA, 33 bp, Homo sapien
gtctgtggacagggactgctgtgaaggtcttta

SEQ ID NO: 1005545 - DNA, 33 bp, Homo sapien
attgttttagaatataactcattgcatggacat

SEQ ID NO: 1005546 - DNA, 33 bp, Homo sapien
attgttttagaatatacctcattgcatggacat

SEQ ID NO: 1005547 - DNA, 33 bp, Homo sapien
tgcgtacttccctataacattccaagtggtctt

SEQ ID NO: 1005548 - DNA, 33 bp, Homo sapien
tgcgtacttccctataccattccaagtggtctt

SEQ ID NO: 1005549 - DNA, 33 bp, Homo sapien
ttccaaaaggtatctacagttctagtgaagata

SEQ ID NO: 1005550 - DNA, 33 bp, Homo sapien
ttccaaaaggtatctatagttctagtgaagata

SEQ ID NO: 1005551 - DNA, 33 bp, Homo sapien
aagaaaggtggaagaaggctagagtgacatttt

SEQ ID NO: 1005552 - DNA, 33 bp, Homo sapien
aagaaaggtggaagaatgctagagtgacatttt

SEQ ID NO: 1005553 - DNA, 33 bp, Homo sapien
tcttatactgaaagaccgaactgggagatgaaa

SEQ ID NO: 1005554 - DNA, 33 bp, Homo sapien
tcttatactgaaagactgaactgggagatgaaa

SEQ ID NO: 1005555 - DNA, 33 bp, Homo sapien
ataaatcaattttgaaaagcttgagtaagatca

SEQ ID NO: 1005556 - DNA, 33 bp, Homo sapien
ataaatcaattttgaagagcttgagtaagatca

SEQ ID NO: 1005557 - DNA, 33 bp, Homo sapien
actaggtgagttgatacatatgttaggtagctt

SEQ ID NO: 1005558 - DNA, 33 bp, Homo sapien
actaggtgagttgatagatatgttaggtagctt

SEQ ID NO: 1005559 - DNA, 33 bp, Homo sapien
ttgggaaaaagggcagaaagagcgttccaggca

SEQ ID NO: 1005560 - DNA, 33 bp, Homo sapien
ttgggaaaaagggcaggaagagcgttccaggca

SEQ ID NO: 1005561 - DNA, 33 bp, Homo sapien
caaaagaagagccatacaagttatttaggggat

SEQ ID NO: 1005562 - DNA, 33 bp, Homo sapien
caaaagaagagccatagaagttatttaggggat

SEQ ID NO: 1005563 - DNA, 33 bp, Homo sapien
tgccatgctcaaaatggcaactgtttcattttc

SEQ ID NO: 1005564 - DNA, 33 bp, Homo sapien
tgccatgctcaaaatgtcaactgtttcattttc

SEQ ID NO: 1005565 - DNA, 33 bp, Homo sapien
ctgatcagcttacgagcacaagcaaaacaatat

SEQ ID NO: 1005566 - DNA, 33 bp, Homo sapien
ctgatcagcttacgaggacaagcaaaacaatat

SEQ ID NO: 1005567 - DNA, 33 bp, Homo sapien
aatgaggagtactgtacactaacctgtgtatat

SEQ ID NO: 1005568 - DNA, 33 bp, Homo sapien
aatgaggagtactgtatactaacctgtgtatat

SEQ ID NO: 1005569 - DNA, 33 bp, Homo sapien
atgtggctccttgttacggattgaataaataaa

SEQ ID NO: 1005570 - DNA, 33 bp, Homo sapien
atgtggctccttgttatggattgaataaataaa

SEQ ID NO: 1005571 - DNA, 33 bp, Homo sapien
aacattagatggcagagtaatgtatattttaat

SEQ ID NO: 1005572 - DNA, 33 bp, Homo sapien
aacattagatggcagattaatgtatattttaat

SEQ ID NO: 1005573 - DNA, 33 bp, Homo sapien
atcttgccactagctacgtgacttggaaatgtg

SEQ ID NO: 1005574 - DNA, 33 bp, Homo sapien
atcttgccactagctatgtgacttggaaatgtg

SEQ ID NO: 1005575 - DNA, 33 bp, Homo sapien
atatgtcactataccaggctacttctcatatac

SEQ ID NO: 1005576 - DNA, 33 bp, Homo sapien
atatgtcactataccatgctacttctcatatac

SEQ ID NO: 1005577 - DNA, 33 bp, Homo sapien
taagataataccaaaaaggtctattacataaac

SEQ ID NO: 1005578 - DNA, 33 bp, Homo sapien
taagataataccaaaatggtctattacataaac

SEQ ID NO: 1005579 - DNA, 33 bp, Homo sapien
tatactggcatgtaagaatgtaagagtgagtca

SEQ ID NO: 1005580 - DNA, 33 bp, Homo sapien
tatactggcatgtaagcatgtaagagtgagtca

SEQ ID NO: 1005581 - DNA, 33 bp, Homo sapien
tttgactcaacagacaacacaaaaactatgtac

SEQ ID NO: 1005582 - DNA, 33 bp, Homo sapien
tttgactcaacagacaccacaaaaactatgtac

SEQ ID NO: 1005583 - DNA, 33 bp, Homo sapien
tgaacacaatcattcacgttctacataagccaa

SEQ ID NO: 1005584 - DNA, 33 bp, Homo sapien
tgaacacaatcattcatgttctacataagccaa

SEQ ID NO: 1005585 - DNA, 33 bp, Homo sapien
ctatcatagttgcttaacaataaaacagacatg

SEQ ID NO: 1005586 - DNA, 33 bp, Homo sapien
ctatcatagttgcttagcaataaaacagacatg

SEQ ID NO: 1005587 - DNA, 33 bp, Homo sapien
ttgtgtctactgtacactacccgttaaaaacac

SEQ ID NO: 1005588 - DNA, 33 bp, Homo sapien
ttgtgtctactgtacattacccgttaaaaacac

SEQ ID NO: 1005589 - DNA, 33 bp, Homo sapien
gtgatgaacaataaataaacacgaaattagcag

SEQ ID NO: 1005590 - DNA, 33 bp, Homo sapien
gtgatgaacaataaattaacacgaaattagcag

SEQ ID NO: 1005591 - DNA, 33 bp, Homo sapien
ttattcttatgttcaaattcttgctgtatcata

SEQ ID NO: 1005592 - DNA, 33 bp, Homo sapien
ttattcttatgttcaatttcttgctgtatcata

SEQ ID NO: 1005593 - DNA, 33 bp, Homo sapien
aaattgacctaaaaccaatggtgttattatatc

SEQ ID NO: 1005594 - DNA, 33 bp, Homo sapien
aaattgacctaaaaccgatggtgttattatatc

SEQ ID NO: 1005595 - DNA, 33 bp, Homo sapien
ttgaggtaaggcactccagaaaccgctaaagac

SEQ ID NO: 1005596 - DNA, 33 bp, Homo sapien
ttgaggtaaggcactctagaaaccgctaaagac

SEQ ID NO: 1005597 - DNA, 33 bp, Homo sapien
ctcttaataaggtccccctgtactacaacaatc

SEQ ID NO: 1005598 - DNA, 33 bp, Homo sapien
ctcttaataaggtccctctgtactacaacaatc

SEQ ID NO: 1005599 - DNA, 33 bp, Homo sapien
ctgcatttctcatatactagcacttctgcagaa

SEQ ID NO: 1005600 - DNA, 33 bp, Homo sapien
ctgcatttctcatatattagcacttctgcagaa

SEQ ID NO: 1005601 - DNA, 33 bp, Homo sapien
attggcgtctgtgatactacacactttggcttt

SEQ ID NO: 1005602 - DNA, 33 bp, Homo sapien
attggcgtctgtgatagtacacactttggcttt

SEQ ID NO: 1005603 - DNA, 33 bp, Homo sapien
atctttataaattatcacatgtaccaaaaacat

SEQ ID NO: 1005604 - DNA, 33 bp, Homo sapien
atctttataaattatctcatgtaccaaaaacat

SEQ ID NO: 1005605 - DNA, 33 bp, Homo sapien
gtcttttcctatgcccaatttatgctagtatat

SEQ ID NO: 1005606 - DNA, 33 bp, Homo sapien
gtcttttcctatgcccgatttatgctagtatat

SEQ ID NO: 1005607 - DNA, 33 bp, Homo sapien
agagtgttgtagtagacgaaaggatgcaaatgt

SEQ ID NO: 1005608 - DNA, 33 bp, Homo sapien
agagtgttgtagtagatgaaaggatgcaaatgt

SEQ ID NO: 1005609 - DNA, 33 bp, Homo sapien
ttagtggtcatccaggaatttgtttgccataga

SEQ ID NO: 1005610 - DNA, 33 bp, Homo sapien
ttagtggtcatccaggcatttgtttgccataga

SEQ ID NO: 1005611 - DNA, 33 bp, Homo sapien
cacgtcaggtagaaaaacggcaagtacatagtg

SEQ ID NO: 1005612 - DNA, 33 bp, Homo sapien
cacgtcaggtagaaaatcggcaagtacatagtg

SEQ ID NO: 1005613 - DNA, 33 bp, Homo sapien
ctgatacaggactgtcaaaatctctatgattgt

SEQ ID NO: 1005614 - DNA, 33 bp, Homo sapien
ctgatacaggactgtcgaaatctctatgattgt

SEQ ID NO: 1005615 - DNA, 33 bp, Homo sapien
tcctttcagtgagcaaatatttcatccataaac

SEQ ID NO: 1005616 - DNA, 33 bp, Homo sapien
tcctttcagtgagcaagtatttcatccataaac

SEQ ID NO: 1005617 - DNA, 33 bp, Homo sapien
gaagagtgagggtagagcccggtaaaacgaatg

SEQ ID NO: 1005618 - DNA, 33 bp, Homo sapien
gaagagtgagggtagatcccggtaaaacgaatg

SEQ ID NO: 1005619 - DNA, 33 bp, Homo sapien
aaactggttttccccacgaccagccgcttgtgt

SEQ ID NO: 1005620 - DNA, 33 bp, Homo sapien
aaactggttttccccatgaccagccgcttgtgt

SEQ ID NO: 1005621 - DNA, 33 bp, Homo sapien
aactaggactgtccaactaaactaagatgtatg

SEQ ID NO: 1005622 - DNA, 33 bp, Homo sapien
aactaggactgtccaagtaaactaagatgtatg

SEQ ID NO: 1005623 - DNA, 33 bp, Homo sapien
acagtcattctagcaacagctaagtagggaatc

SEQ ID NO: 1005624 - DNA, 33 bp, Homo sapien
acagtcattctagcaagagctaagtagggaatc

SEQ ID NO: 1005625 - DNA, 33 bp, Homo sapien
ctgtctcttcttatccaacttaatgctcttaat

SEQ ID NO: 1005626 - DNA, 33 bp, Homo sapien
ctgtctcttcttatcccacttaatgctcttaat

SEQ ID NO: 1005627 - DNA, 33 bp, Homo sapien
ggagaactgcaagacacaatctaccattgactg

SEQ ID NO: 1005628 - DNA, 33 bp, Homo sapien
ggagaactgcaagacagaatctaccattgactg

SEQ ID NO: 1005629 - DNA, 33 bp, Homo sapien
acagcaactgcttgacaaagtgaggaaattcag

SEQ ID NO: 1005630 - DNA, 33 bp, Homo sapien
acagcaactgcttgaccaagtgaggaaattcag

SEQ ID NO: 1005631 - DNA, 33 bp, Homo sapien
attaatacattagtaacctgtgtttgtttcctc

SEQ ID NO: 1005632 - DNA, 33 bp, Homo sapien
attaatacattagtaatctgtgtttgtttcctc

SEQ ID NO: 1005633 - DNA, 33 bp, Homo sapien
ttatgcttaaagcaaaactcaacttaataatgc

SEQ ID NO: 1005634 - DNA, 33 bp, Homo sapien
ttatgcttaaagcaaagctcaacttaataatgc

SEQ ID NO: 1005635 - DNA, 33 bp, Homo sapien
tagtgcacttaatgcaatctcttatgcttaaag

SEQ ID NO: 1005636 - DNA, 33 bp, Homo sapien
tagtgcacttaatgcagtctcttatgcttaaag

SEQ ID NO: 1005637 - DNA, 33 bp, Homo sapien
cagctgagcaagagggaagccgattaaccagct

SEQ ID NO: 1005638 - DNA, 33 bp, Homo sapien
cagctgagcaagagggcagccgattaaccagct

SEQ ID NO: 1005639 - DNA, 33 bp, Homo sapien
catggttcagtctatcacaccagatgttgttgc

SEQ ID NO: 1005640 - DNA, 33 bp, Homo sapien
catggttcagtctatcgcaccagatgttgttgc

SEQ ID NO: 1005641 - DNA, 33 bp, Homo sapien
aaagatgacaagtataagcatacctggaggcat

SEQ ID NO: 1005642 - DNA, 33 bp, Homo sapien
aaagatgacaagtatacgcatacctggaggcat

SEQ ID NO: 1005643 - DNA, 33 bp, Homo sapien
tctatatggtgagtcaccttccaatggctgtcc

SEQ ID NO: 1005644 - DNA, 33 bp, Homo sapien
tctatatggtgagtcatcttccaatggctgtcc

SEQ ID NO: 1005645 - DNA, 33 bp, Homo sapien
cagattcttgagctctaaaatacactgttattt

SEQ ID NO: 1005646 - DNA, 33 bp, Homo sapien
cagattcttgagctctgaaatacactgttattt

SEQ ID NO: 1005647 - DNA, 33 bp, Homo sapien
atagctagtgctttcacgatgcccttagtgtct

SEQ ID NO: 1005648 - DNA, 33 bp, Homo sapien
atagctagtgctttcatgatgcccttagtgtct

SEQ ID NO: 1005649 - DNA, 33 bp, Homo sapien
ccagaattttttaaaacgtctcagcattaatga

SEQ ID NO: 1005650 - DNA, 33 bp, Homo sapien
ccagaattttttaaaaggtctcagcattaatga

SEQ ID NO: 1005651 - DNA, 33 bp, Homo sapien
tcagttctaacacttaccagttacgtaaatttt

SEQ ID NO: 1005652 - DNA, 33 bp, Homo sapien
tcagttctaacacttatcagttacgtaaatttt

SEQ ID NO: 1005653 - DNA, 33 bp, Homo sapien
ttgtaacaattgcaccaaagatcatgtttgcat

SEQ ID NO: 1005654 - DNA, 33 bp, Homo sapien
ttgtaacaattgcaccgaagatcatgtttgcat

SEQ ID NO: 1005655 - DNA, 33 bp, Homo sapien
aagactctgggtttcacaatattcttcagattt

SEQ ID NO: 1005656 - DNA, 33 bp, Homo sapien
aagactctgggtttcagaatattcttcagattt

SEQ ID NO: 1005657 - DNA, 33 bp, Homo sapien
caatcatatcactttgcaatagtccgattacaa

SEQ ID NO: 1005658 - DNA, 33 bp, Homo sapien
caatcatatcactttggaatagtccgattacaa

SEQ ID NO: 1005659 - DNA, 33 bp, Homo sapien
caattacccttcatacccagttcctttccccgt

SEQ ID NO: 1005660 - DNA, 33 bp, Homo sapien
caattacccttcatactcagttcctttccccgt

SEQ ID NO: 1005661 - DNA, 33 bp, Homo sapien
ggaagcaaatcatatccgaagtaagatgcactc

SEQ ID NO: 1005662 - DNA, 33 bp, Homo sapien
ggaagcaaatcatatctgaagtaagatgcactc

SEQ ID NO: 1005663 - DNA, 33 bp, Homo sapien
gttgacgctaatcaacacagctgatacagatac

SEQ ID NO: 1005664 - DNA, 33 bp, Homo sapien
gttgacgctaatcaacgcagctgatacagatac

SEQ ID NO: 1005665 - DNA, 33 bp, Homo sapien
gtagggacttggaaaagactgaattaaaccatc

SEQ ID NO: 1005666 - DNA, 33 bp, Homo sapien
gtagggacttggaaaatactgaattaaaccatc

SEQ ID NO: 1005667 - DNA, 33 bp, Homo sapien
catcaccttaatcaagaagccattgcaattttc

SEQ ID NO: 1005668 - DNA, 33 bp, Homo sapien
catcaccttaatcaaggagccattgcaattttc

SEQ ID NO: 1005669 - DNA, 33 bp, Homo sapien
cacaatgaaaattatactaaggttcactaagca

SEQ ID NO: 1005670 - DNA, 33 bp, Homo sapien
cacaatgaaaattatagtaaggttcactaagca

SEQ ID NO: 1005671 - DNA, 33 bp, Homo sapien
aatgttggccagcaggaaattatcttttaaatt

SEQ ID NO: 1005672 - DNA, 33 bp, Homo sapien
aatgttggccagcaggtaattatcttttaaatt

SEQ ID NO: 1005673 - DNA, 33 bp, Homo sapien
aaacccagattaactacgagtgcagcagacaca

SEQ ID NO: 1005674 - DNA, 33 bp, Homo sapien
aaacccagattaactatgagtgcagcagacaca

SEQ ID NO: 1005675 - DNA, 33 bp, Homo sapien
tatattgatgggaaataaaagtctgatccagat

SEQ ID NO: 1005676 - DNA, 33 bp, Homo sapien
tatattgatgggaaatgaaagtctgatccagat

SEQ ID NO: 1005677 - DNA, 33 bp, Homo sapien
cggtaaattcattggacgtaagacatacataaa

SEQ ID NO: 1005678 - DNA, 33 bp, Homo sapien
cggtaaattcattggaggtaagacatacataaa

SEQ ID NO: 1005679 - DNA, 33 bp, Homo sapien
ggctatgaacctaaacaaacaaggagctgaaaa

SEQ ID NO: 1005680 - DNA, 33 bp, Homo sapien
ggctatgaacctaaaccaacaaggagctgaaaa

SEQ ID NO: 1005681 - DNA, 33 bp, Homo sapien
tagagaattaaatgcaatatcaccaggcataca

SEQ ID NO: 1005682 - DNA, 33 bp, Homo sapien
tagagaattaaatgcagtatcaccaggcataca

SEQ ID NO: 1005683 - DNA, 33 bp, Homo sapien
aataatcaaacaaaaactctaaaatgcaaaaaa

SEQ ID NO: 1005684 - DNA, 33 bp, Homo sapien
aataatcaaacaaaaattctaaaatgcaaaaaa

SEQ ID NO: 1005685 - DNA, 33 bp, Homo sapien
gagtggtgcattatagaatccactctgctagga

SEQ ID NO: 1005686 - DNA, 33 bp, Homo sapien
gagtggtgcattataggatccactctgctagga

SEQ ID NO: 1005687 - DNA, 33 bp, Homo sapien
tctcaaaaacctgagacattgtacaagcaacag

SEQ ID NO: 1005688 - DNA, 33 bp, Homo sapien
tctcaaaaacctgagagattgtacaagcaacag

SEQ ID NO: 1005689 - DNA, 33 bp, Homo sapien
ttctgctgaaatctaccggtcaaagcaagtcac

SEQ ID NO: 1005690 - DNA, 33 bp, Homo sapien
ttctgctgaaatctactggtcaaagcaagtcac

SEQ ID NO: 1005691 - DNA, 33 bp, Homo sapien
tgctcatgattctgaacgtcatggaactgggcc

SEQ ID NO: 1005692 - DNA, 33 bp, Homo sapien
tgctcatgattctgaaggtcatggaactgggcc

SEQ ID NO: 1005693 - DNA, 33 bp, Homo sapien
aagtaaagaaagtggcagagaaccttcaaagca

SEQ ID NO: 1005694 - DNA, 33 bp, Homo sapien
aagtaaagaaagtggcggagaaccttcaaagca

SEQ ID NO: 1005695 - DNA, 33 bp, Homo sapien
gatacttcacaaaatacattttacacagataca

SEQ ID NO: 1005696 - DNA, 33 bp, Homo sapien
gatacttcacaaaatagattttacacagataca

SEQ ID NO: 1005697 - DNA, 33 bp, Homo sapien
aaaaaaacctgatacacctcattactctcaggg

SEQ ID NO: 1005698 - DNA, 33 bp, Homo sapien
aaaaaaacctgatacatctcattactctcaggg

SEQ ID NO: 1005699 - DNA, 33 bp, Homo sapien
taaaacaatattatccaaaaattctgtcttcaa

SEQ ID NO: 1005700 - DNA, 33 bp, Homo sapien
taaaacaatattatcccaaaattctgtcttcaa

SEQ ID NO: 1005701 - DNA, 33 bp, Homo sapien
catttgcagggataaaagtgggacagataagta

SEQ ID NO: 1005702 - DNA, 33 bp, Homo sapien
catttgcagggataaacgtgggacagataagta

SEQ ID NO: 1005703 - DNA, 33 bp, Homo sapien
agagagagagaatgaaatgcaaaggaagaactt

SEQ ID NO: 1005704 - DNA, 33 bp, Homo sapien
agagagagagaatgaactgcaaaggaagaactt

SEQ ID NO: 1005705 - DNA, 33 bp, Homo sapien
agtgatggattgaagactaatgtggcactcatg

SEQ ID NO: 1005706 - DNA, 33 bp, Homo sapien
agtgatggattgaagagtaatgtggcactcatg

SEQ ID NO: 1005707 - DNA, 33 bp, Homo sapien
cagtattttgttataaaatggctatggttctga

SEQ ID NO: 1005708 - DNA, 33 bp, Homo sapien
cagtattttgttataacatggctatggttctga

SEQ ID NO: 1005709 - DNA, 33 bp, Homo sapien
aagcaaggagggtaacagagtaaataagtacca

SEQ ID NO: 1005710 - DNA, 33 bp, Homo sapien
aagcaaggagggtaacggagtaaataagtacca

SEQ ID NO: 1005711 - DNA, 33 bp, Homo sapien
tctgtatctgtcaagaagaaatccaacattgta

SEQ ID NO: 1005712 - DNA, 33 bp, Homo sapien
tctgtatctgtcaagaggaaatccaacattgta

SEQ ID NO: 1005713 - DNA, 33 bp, Homo sapien
ttcatacatttcatacacttcatacattttgaa

SEQ ID NO: 1005714 - DNA, 33 bp, Homo sapien
ttcatacatttcatacgcttcatacattttgaa

SEQ ID NO: 1005715 - DNA, 33 bp, Homo sapien
cttaacaataatcatcgaagcgatgcaaattaa

SEQ ID NO: 1005716 - DNA, 33 bp, Homo sapien
cttaacaataatcatctaagcgatgcaaattaa

SEQ ID NO: 1005717 - DNA, 33 bp, Homo sapien
agctgtagaaatgtaccaggtaatcatcaatat

SEQ ID NO: 1005718 - DNA, 33 bp, Homo sapien
agctgtagaaatgtacgaggtaatcatcaatat

SEQ ID NO: 1005719 - DNA, 33 bp, Homo sapien
acgatcctctcttccacctttttgcctttttct

SEQ ID NO: 1005720 - DNA, 33 bp, Homo sapien
acgatcctctcttccatctttttgcctttttct

SEQ ID NO: 1005721 - DNA, 33 bp, Homo sapien
tgacagtattgttacacctatgtcaggggtggg

SEQ ID NO: 1005722 - DNA, 33 bp, Homo sapien
tgacagtattgttacatctatgtcaggggtggg

SEQ ID NO: 1005723 - DNA, 33 bp, Homo sapien
caatcggccacaaccactgcaatacatatcagc

SEQ ID NO: 1005724 - DNA, 33 bp, Homo sapien
caatcggccacaaccattgcaatacatatcagc

SEQ ID NO: 1005725 - DNA, 33 bp, Homo sapien
atataaccctatggcactaacagctgttatgga

SEQ ID NO: 1005726 - DNA, 33 bp, Homo sapien
atataaccctatggcagtaacagctgttatgga

SEQ ID NO: 1005727 - DNA, 33 bp, Homo sapien
gattttgagtaaaacactgcattagctgtgaca

SEQ ID NO: 1005728 - DNA, 33 bp, Homo sapien
gattttgagtaaaacattgcattagctgtgaca

SEQ ID NO: 1005729 - DNA, 33 bp, Homo sapien
gaaatggtagggatcacgtcacctcattttcac

SEQ ID NO: 1005730 - DNA, 33 bp, Homo sapien
gaaatggtagggatcatgtcacctcattttcac

SEQ ID NO: 1005731 - DNA, 33 bp, Homo sapien
caagacttagtgacctcaaatctctgtggaatg

SEQ ID NO: 1005732 - DNA, 33 bp, Homo sapien
caagacttagtgacctgaaatctctgtggaatg

SEQ ID NO: 1005733 - DNA, 33 bp, Homo sapien
aggttcttctgatgcacatggactaagatcaca

SEQ ID NO: 1005734 - DNA, 33 bp, Homo sapien
aggttcttctgatgcagatggactaagatcaca

SEQ ID NO: 1005735 - DNA, 33 bp, Homo sapien
tgaggcagacatatcactacgcctgttttctca

SEQ ID NO: 1005736 - DNA, 33 bp, Homo sapien
tgaggcagacatatcagtacgcctgttttctca

SEQ ID NO: 1005737 - DNA, 33 bp, Homo sapien
actcctagtgtgtctacctcttcttgatgtata

SEQ ID NO: 1005738 - DNA, 33 bp, Homo sapien
actcctagtgtgtctatctcttcttgatgtata

SEQ ID NO: 1005739 - DNA, 33 bp, Homo sapien
attagtatgagcagagaagttatacataggtaa

SEQ ID NO: 1005740 - DNA, 33 bp, Homo sapien
attagtatgagcagaggagttatacataggtaa

SEQ ID NO: 1005741 - DNA, 33 bp, Homo sapien
tccccatcagctgtcactagtaatttcatacag

SEQ ID NO: 1005742 - DNA, 33 bp, Homo sapien
tccccatcagctgtcattagtaatttcatacag

SEQ ID NO: 1005743 - DNA, 33 bp, Homo sapien
aatgtcataagggcaacgtacttgctgtatgaa

SEQ ID NO: 1005744 - DNA, 33 bp, Homo sapien
aatgtcataagggcaatgtacttgctgtatgaa

SEQ ID NO: 1005745 - DNA, 33 bp, Homo sapien
catccttgtttgaagacgcaaaggtaagggatg

SEQ ID NO: 1005746 - DNA, 33 bp, Homo sapien
catccttgtttgaagatgcaaaggtaagggatg

SEQ ID NO: 1005747 - DNA, 33 bp, Homo sapien
atgtattagtggtctaaaatttcttttgctgct

SEQ ID NO: 1005748 - DNA, 33 bp, Homo sapien
atgtattagtggtctacaatttcttttgctgct

SEQ ID NO: 1005749 - DNA, 33 bp, Homo sapien
atatgaggtagttaaacagtcaacatcactgag

SEQ ID NO: 1005750 - DNA, 33 bp, Homo sapien
atatgaggtagttaaagagtcaacatcactgag

SEQ ID NO: 1005751 - DNA, 33 bp, Homo sapien
aatgggcgctcaagtacctgggctcataactgt

SEQ ID NO: 1005752 - DNA, 33 bp, Homo sapien
aatgggcgctcaagtatctgggctcataactgt

SEQ ID NO: 1005753 - DNA, 33 bp, Homo sapien
ttaattatttaatctaagagagtcggctgctct

SEQ ID NO: 1005754 - DNA, 33 bp, Homo sapien
ttaattatttaatctatgagagtcggctgctct

SEQ ID NO: 1005755 - DNA, 33 bp, Homo sapien
taaatgctgtaacttgaaattagttgcagtgaa

SEQ ID NO: 1005756 - DNA, 33 bp, Homo sapien
taaatgctgtaacttgcaattagttgcagtgaa

SEQ ID NO: 1005757 - DNA, 33 bp, Homo sapien
tactaaaatttcaaatgagtcatcactatttcc

SEQ ID NO: 1005758 - DNA, 33 bp, Homo sapien
tactaaaatttcaaattagtcatcactatttcc

SEQ ID NO: 1005759 - DNA, 33 bp, Homo sapien
gaggtaatgtgacatacatatactaagcagaac

SEQ ID NO: 1005760 - DNA, 33 bp, Homo sapien
gaggtaatgtgacatagatatactaagcagaac

SEQ ID NO: 1005761 - DNA, 33 bp, Homo sapien
tctttagcccaacttacatttgtaaactacagt

SEQ ID NO: 1005762 - DNA, 33 bp, Homo sapien
tctttagcccaacttatatttgtaaactacagt

SEQ ID NO: 1005763 - DNA, 33 bp, Homo sapien
ctctgacagttccaggaatatttttacttgctt

SEQ ID NO: 1005764 - DNA, 33 bp, Homo sapien
ctctgacagttccaggtatatttttacttgctt

SEQ ID NO: 1005765 - DNA, 33 bp, Homo sapien
gatacaaactctggcacgtgtatataataagtg

SEQ ID NO: 1005766 - DNA, 33 bp, Homo sapien
gatacaaactctggcatgtgtatataataagtg

SEQ ID NO: 1005767 - DNA, 33 bp, Homo sapien
gtggcctttagaaacacgctgtctttaactaaa

SEQ ID NO: 1005768 - DNA, 33 bp, Homo sapien
gtggcctttagaaacatgctgtctttaactaaa

SEQ ID NO: 1005769 - DNA, 33 bp, Homo sapien
aatgcaatgatgctaaaagcagtttgagaacat

SEQ ID NO: 1005770 - DNA, 33 bp, Homo sapien
aatgcaatgatgctaagagcagtttgagaacat

SEQ ID NO: 1005771 - DNA, 33 bp, Homo sapien
agacaagtataaataaccctgtagagtgattcc

SEQ ID NO: 1005772 - DNA, 33 bp, Homo sapien
agacaagtataaataatcctgtagagtgattcc

SEQ ID NO: 1005773 - DNA, 33 bp, Homo sapien
tgttgtcaagtggtccagcaagtctgtgacaga

SEQ ID NO: 1005774 - DNA, 33 bp, Homo sapien
tgttgtcaagtggtccggcaagtctgtgacaga

SEQ ID NO: 1005775 - DNA, 33 bp, Homo sapien
atgttcttctctcagacgtcttgcactaagtct

SEQ ID NO: 1005776 - DNA, 33 bp, Homo sapien
atgttcttctctcagatgtcttgcactaagtct

SEQ ID NO: 1005777 - DNA, 33 bp, Homo sapien
ttctagaatctaccaccatatgttcttgcaggc

SEQ ID NO: 1005778 - DNA, 33 bp, Homo sapien
ttctagaatctaccacgatatgttcttgcaggc

SEQ ID NO: 1005779 - DNA, 33 bp, Homo sapien
gtaatggccattatacagagtttaaagtcaatt

SEQ ID NO: 1005780 - DNA, 33 bp, Homo sapien
gtaatggccattataccgagtttaaagtcaatt

SEQ ID NO: 1005781 - DNA, 33 bp, Homo sapien
gttaatcattgtacggcattcttacaagtgcta

SEQ ID NO: 1005782 - DNA, 33 bp, Homo sapien
gttaatcattgtacggtattcttacaagtgcta

SEQ ID NO: 1005783 - DNA, 33 bp, Homo sapien
ctgagtttccattgtcaatcaacccaagctcta

SEQ ID NO: 1005784 - DNA, 33 bp, Homo sapien
ctgagtttccattgtctatcaacccaagctcta

SEQ ID NO: 1005785 - DNA, 33 bp, Homo sapien
atcaaaatcttctcaacgtcttaatcaatgcct

SEQ ID NO: 1005786 - DNA, 33 bp, Homo sapien
atcaaaatcttctcaatgtcttaatcaatgcct

SEQ ID NO: 1005787 - DNA, 33 bp, Homo sapien
atggcagcccaaaaaacaccagtttgcttcctt

SEQ ID NO: 1005788 - DNA, 33 bp, Homo sapien
atggcagcccaaaaaagaccagtttgcttcctt

SEQ ID NO: 1005789 - DNA, 33 bp, Homo sapien
tgggaacttggtttagaaatgctaattttggat

SEQ ID NO: 1005790 - DNA, 33 bp, Homo sapien
tgggaacttggtttaggaatgctaattttggat

SEQ ID NO: 1005791 - DNA, 33 bp, Homo sapien
ctttatcctccaattccaaccaccaacccatcc

SEQ ID NO: 1005792 - DNA, 33 bp, Homo sapien
ctttatcctccaattctaaccaccaacccatcc

SEQ ID NO: 1005793 - DNA, 33 bp, Homo sapien
aggtcactgaggaacaaaatgaaggtcactgag

SEQ ID NO: 1005794 - DNA, 33 bp, Homo sapien
aggtcactgaggaacacaatgaaggtcactgag

SEQ ID NO: 1005795 - DNA, 33 bp, Homo sapien
atttttaaagcaatgggcatttaaaacaacatt

SEQ ID NO: 1005796 - DNA, 33 bp, Homo sapien
atttttaaagcaatggtcatttaaaacaacatt

SEQ ID NO: 1005797 - DNA, 33 bp, Homo sapien
ggttattgtttcaccacgtacttaacacattgt

SEQ ID NO: 1005798 - DNA, 33 bp, Homo sapien
ggttattgtttcaccatgtacttaacacattgt

SEQ ID NO: 1005799 - DNA, 33 bp, Homo sapien
atggctagaaggaaataagaatgggcaatgcat

SEQ ID NO: 1005800 - DNA, 33 bp, Homo sapien
atggctagaaggaaattagaatgggcaatgcat

SEQ ID NO: 1005801 - DNA, 33 bp, Homo sapien
cctgtctacttgcaaactgctagagtattgtga

SEQ ID NO: 1005802 - DNA, 33 bp, Homo sapien
cctgtctacttgcaaagtgctagagtattgtga

SEQ ID NO: 1005803 - DNA, 33 bp, Homo sapien
tggagtcagactctggaataaattattaccaaa

SEQ ID NO: 1005804 - DNA, 33 bp, Homo sapien
tggagtcagactctgggataaattattaccaaa

SEQ ID NO: 1005805 - DNA, 33 bp, Homo sapien
aaatggtgactatctcagactttgagcccttat

SEQ ID NO: 1005806 - DNA, 33 bp, Homo sapien
aaatggtgactatctctgactttgagcccttat

SEQ ID NO: 1005807 - DNA, 33 bp, Homo sapien
ttcacgtaactcagaaaatatctgccggtggta

SEQ ID NO: 1005808 - DNA, 33 bp, Homo sapien
ttcacgtaactcagaatatatctgccggtggta

SEQ ID NO: 1005809 - DNA, 33 bp, Homo sapien
aacactgacaggagaagatgcacttagaatata

SEQ ID NO: 1005810 - DNA, 33 bp, Homo sapien
aacactgacaggagaatatgcacttagaatata

SEQ ID NO: 1005811 - DNA, 33 bp, Homo sapien
tatcaaagaattcaaacgacttccaaaatctag

SEQ ID NO: 1005812 - DNA, 33 bp, Homo sapien
tatcaaagaattcaaaggacttccaaaatctag

SEQ ID NO: 1005813 - DNA, 33 bp, Homo sapien
tgttatctttgtgaataaatgaattccattaaa

SEQ ID NO: 1005814 - DNA, 33 bp, Homo sapien
tgttatctttgtgaatgaatgaattccattaaa

SEQ ID NO: 1005815 - DNA, 33 bp, Homo sapien
agaacccccaaatttacgtcattttcacacaca

SEQ ID NO: 1005816 - DNA, 33 bp, Homo sapien
agaacccccaaatttatgtcattttcacacaca

SEQ ID NO: 1005817 - DNA, 33 bp, Homo sapien
cttagacattacttaagtgatcatgtcagtgaa

SEQ ID NO: 1005818 - DNA, 33 bp, Homo sapien
cttagacattacttaattgatcatgtcagtgaa

SEQ ID NO: 1005819 - DNA, 33 bp, Homo sapien
ataggaaaagaaaatacaggctttgttctgtag

SEQ ID NO: 1005820 - DNA, 33 bp, Homo sapien
ataggaaaagaaaatataggctttgttctgtag

SEQ ID NO: 1005821 - DNA, 33 bp, Homo sapien
aatgtaagatcctaaggctggtgtagtcatttt

SEQ ID NO: 1005822 - DNA, 33 bp, Homo sapien
aatgtaagatcctaagtctggtgtagtcatttt

SEQ ID NO: 1005823 - DNA, 33 bp, Homo sapien
actgagcacactccccactagaaatgataagag

SEQ ID NO: 1005824 - DNA, 33 bp, Homo sapien
actgagcacactccccgctagaaatgataagag

SEQ ID NO: 1005825 - DNA, 33 bp, Homo sapien
ttaatgagtgcaaaataagtgactctagttatg

SEQ ID NO: 1005826 - DNA, 33 bp, Homo sapien
ttaatgagtgcaaaatgagtgactctagttatg

SEQ ID NO: 1005827 - DNA, 33 bp, Homo sapien
cagatctggtttcttacgaccattgaattctag

SEQ ID NO: 1005828 - DNA, 33 bp, Homo sapien
cagatctggtttcttatgaccattgaattctag

SEQ ID NO: 1005829 - DNA, 33 bp, Homo sapien
gactagtgaggagatacaataatccaggaaaaa

SEQ ID NO: 1005830 - DNA, 33 bp, Homo sapien
gactagtgaggagatataataatccaggaaaaa

SEQ ID NO: 1005831 - DNA, 33 bp, Homo sapien
gttcaacaaaaaggcaacctgaacacataagat

SEQ ID NO: 1005832 - DNA, 33 bp, Homo sapien
gttcaacaaaaaggcagcctgaacacataagat

SEQ ID NO: 1005833 - DNA, 33 bp, Homo sapien
tccatttgcattcttaagtaaaatctataaact

SEQ ID NO: 1005834 - DNA, 33 bp, Homo sapien
tccatttgcattcttacgtaaaatctataaact

SEQ ID NO: 1005835 - DNA, 33 bp, Homo sapien
aattagagtagccatccagcaggaccatactgt

SEQ ID NO: 1005836 - DNA, 33 bp, Homo sapien
aattagagtagccatctagcaggaccatactgt

SEQ ID NO: 1005837 - DNA, 33 bp, Homo sapien
cgtgaaggcagaaataaccctgaagacagccag

SEQ ID NO: 1005838 - DNA, 33 bp, Homo sapien
cgtgaaggcagaaatatccctgaagacagccag

SEQ ID NO: 1005839 - DNA, 33 bp, Homo sapien
tgattcagagtcatggcatgatttcctagctaa

SEQ ID NO: 1005840 - DNA, 33 bp, Homo sapien
tgattcagagtcatggtatgatttcctagctaa

SEQ ID NO: 1005841 - DNA, 33 bp, Homo sapien
ctaaaccactacatctaactatatgaagggttg

SEQ ID NO: 1005842 - DNA, 33 bp, Homo sapien
ctaaaccactacatctgactatatgaagggttg

SEQ ID NO: 1005843 - DNA, 33 bp, Homo sapien
tccttcctcagcttgtcaagaaagtcattccaa

SEQ ID NO: 1005844 - DNA, 33 bp, Homo sapien
tccttcctcagcttgtgaagaaagtcattccaa

SEQ ID NO: 1005845 - DNA, 33 bp, Homo sapien
ttagcaaactaatgcacggacatataccccatg

SEQ ID NO: 1005846 - DNA, 33 bp, Homo sapien
ttagcaaactaatgcagggacatataccccatg

SEQ ID NO: 1005847 - DNA, 33 bp, Homo sapien
cattaaataactcacccaagttcatgcaggtaa

SEQ ID NO: 1005848 - DNA, 33 bp, Homo sapien
cattaaataactcacctaagttcatgcaggtaa

SEQ ID NO: 1005849 - DNA, 33 bp, Homo sapien
ttctcattgttttttaaggacaacttgtacatc

SEQ ID NO: 1005850 - DNA, 33 bp, Homo sapien
ttctcattgttttttacggacaacttgtacatc

SEQ ID NO: 1005851 - DNA, 33 bp, Homo sapien
caccaaaaaaacttcactatcggatatccgcat

SEQ ID NO: 1005852 - DNA, 33 bp, Homo sapien
caccaaaaaaacttcattatcggatatccgcat

SEQ ID NO: 1005853 - DNA, 33 bp, Homo sapien
atcggatatccgcataacactgacattggcatg

SEQ ID NO: 1005854 - DNA, 33 bp, Homo sapien
atcggatatccgcataccactgacattggcatg

SEQ ID NO: 1005855 - DNA, 33 bp, Homo sapien
gaggtaggtggccataagcaggacagtgtaaaa

SEQ ID NO: 1005856 - DNA, 33 bp, Homo sapien
gaggtaggtggccataggcaggacagtgtaaaa

SEQ ID NO: 1005857 - DNA, 33 bp, Homo sapien
tacatggaagagtgatcacttagtgggaagtta

SEQ ID NO: 1005858 - DNA, 33 bp, Homo sapien
tacatggaagagtgattacttagtgggaagtta

SEQ ID NO: 1005859 - DNA, 33 bp, Homo sapien
ttatatctatttccacaatgaacctcagacttc

SEQ ID NO: 1005860 - DNA, 33 bp, Homo sapien
ttatatctatttccaccatgaacctcagacttc

SEQ ID NO: 1005861 - DNA, 33 bp, Homo sapien
acatatttgagatgaaagaaggaacataccatg

SEQ ID NO: 1005862 - DNA, 33 bp, Homo sapien
acatatttgagatgaaggaaggaacataccatg

SEQ ID NO: 1005863 - DNA, 33 bp, Homo sapien
ctattgtttccttccacatttctaggaggctca

SEQ ID NO: 1005864 - DNA, 33 bp, Homo sapien
ctattgtttccttccagatttctaggaggctca

SEQ ID NO: 1005865 - DNA, 33 bp, Homo sapien
aaacaatagcaggaaacagaatactggggtcat

SEQ ID NO: 1005866 - DNA, 33 bp, Homo sapien
aaacaatagcaggaaatagaatactggggtcat

SEQ ID NO: 1005867 - DNA, 33 bp, Homo sapien
agaaagaaatcaaatacagtgcctaattttgat

SEQ ID NO: 1005868 - DNA, 33 bp, Homo sapien
agaaagaaatcaaatatagtgcctaattttgat

SEQ ID NO: 1005869 - DNA, 33 bp, Homo sapien
gcctctcctgccacagaagacaggttcttgaat

SEQ ID NO: 1005870 - DNA, 33 bp, Homo sapien
gcctctcctgccacagcagacaggttcttgaat

SEQ ID NO: 1005871 - DNA, 33 bp, Homo sapien
tggaccacttatccaacataactagcgtccttt

SEQ ID NO: 1005872 - DNA, 33 bp, Homo sapien
tggaccacttatccaatataactagcgtccttt

SEQ ID NO: 1005873 - DNA, 33 bp, Homo sapien
ttttcaagcagagaataaaagataaaattgatt

SEQ ID NO: 1005874 - DNA, 33 bp, Homo sapien
ttttcaagcagagaatcaaagataaaattgatt

SEQ ID NO: 1005875 - DNA, 33 bp, Homo sapien
gttaaacatctttcatcaacctttgaatagttc

SEQ ID NO: 1005876 - DNA, 33 bp, Homo sapien
gttaaacatctttcattaacctttgaatagttc

SEQ ID NO: 1005877 - DNA, 33 bp, Homo sapien
accagacagcaaagcccattcgttaactagata

SEQ ID NO: 1005878 - DNA, 33 bp, Homo sapien
accagacagcaaagccgattcgttaactagata

SEQ ID NO: 1005879 - DNA, 33 bp, Homo sapien
tgaatttatgcctttcaacccagaggacaggag

SEQ ID NO: 1005880 - DNA, 33 bp, Homo sapien
tgaatttatgcctttcgacccagaggacaggag

SEQ ID NO: 1005881 - DNA, 33 bp, Homo sapien
atctgtttcaaaatgtaaagttgtacatgacaa

SEQ ID NO: 1005882 - DNA, 33 bp, Homo sapien
atctgtttcaaaatgtgaagttgtacatgacaa

SEQ ID NO: 1005883 - DNA, 33 bp, Homo sapien
acacacacacccctaaatgtttacgtgtcaaaa

SEQ ID NO: 1005884 - DNA, 33 bp, Homo sapien
acacacacacccctaactgtttacgtgtcaaaa

SEQ ID NO: 1005885 - DNA, 33 bp, Homo sapien
atatcctctttgtccaagcttttctagcatttt

SEQ ID NO: 1005886 - DNA, 33 bp, Homo sapien
atatcctctttgtccatgcttttctagcatttt

SEQ ID NO: 1005887 - DNA, 33 bp, Homo sapien
aaggctacactgtgtaactgttcctgcagagtg

SEQ ID NO: 1005888 - DNA, 33 bp, Homo sapien
aaggctacactgtgtacctgttcctgcagagtg

SEQ ID NO: 1005889 - DNA, 33 bp, Homo sapien
aagtgagaggcattccacaaaacaactaaatgg

SEQ ID NO: 1005890 - DNA, 33 bp, Homo sapien
aagtgagaggcattccgcaaaacaactaaatgg

SEQ ID NO: 1005891 - DNA, 33 bp, Homo sapien
gggtgctggaacagaaaaagaatatttgttgaa

SEQ ID NO: 1005892 - DNA, 33 bp, Homo sapien
gggtgctggaacagaagaagaatatttgttgaa

SEQ ID NO: 1005893 - DNA, 33 bp, Homo sapien
ggctagagcagagaagccatggggggtatatgt

SEQ ID NO: 1005894 - DNA, 33 bp, Homo sapien
ggctagagcagagaaggcatggggggtatatgt

SEQ ID NO: 1005895 - DNA, 33 bp, Homo sapien
agtgagggatactgaacgataagctaatcaaac

SEQ ID NO: 1005896 - DNA, 33 bp, Homo sapien
agtgagggatactgaatgataagctaatcaaac

SEQ ID NO: 1005897 - DNA, 33 bp, Homo sapien
tccaacaccataggacaggagcaaaagtgtgac

SEQ ID NO: 1005898 - DNA, 33 bp, Homo sapien
tccaacaccataggaccggagcaaaagtgtgac

SEQ ID NO: 1005899 - DNA, 33 bp, Homo sapien
acagcctctgtttggaagtgaatatttgattag

SEQ ID NO: 1005900 - DNA, 33 bp, Homo sapien
acagcctctgtttggaggtgaatatttgattag

SEQ ID NO: 1005901 - DNA, 33 bp, Homo sapien
aaatgaagagaggtacaaaacctgtagcctgat

SEQ ID NO: 1005902 - DNA, 33 bp, Homo sapien
aaatgaagagaggtaccaaacctgtagcctgat

SEQ ID NO: 1005903 - DNA, 33 bp, Homo sapien
ataaatgtgtggagtaaaatgaggaaccaaagc

SEQ ID NO: 1005904 - DNA, 33 bp, Homo sapien
ataaatgtgtggagtagaatgaggaaccaaagc

SEQ ID NO: 1005905 - DNA, 33 bp, Homo sapien
ttcctgttattattacaggaatgactgcagaat

SEQ ID NO: 1005906 - DNA, 33 bp, Homo sapien
ttcctgttattattacgggaatgactgcagaat

SEQ ID NO: 1005907 - DNA, 33 bp, Homo sapien
tacttctaaaaatgaaagtaaccacttgcaaat

SEQ ID NO: 1005908 - DNA, 33 bp, Homo sapien
tacttctaaaaatgaaggtaaccacttgcaaat

SEQ ID NO: 1005909 - DNA, 33 bp, Homo sapien
gactatttttttctcaatactcaccaacttgcc

SEQ ID NO: 1005910 - DNA, 33 bp, Homo sapien
gactatttttttctcagtactcaccaacttgcc

SEQ ID NO: 1005911 - DNA, 33 bp, Homo sapien
agcaattggtgctaaacacattcaatttgaaat

SEQ ID NO: 1005912 - DNA, 33 bp, Homo sapien
agcaattggtgctaaatacattcaatttgaaat

SEQ ID NO: 1005913 - DNA, 33 bp, Homo sapien
tccatgataaaactctcaagaatttaggtgtag

SEQ ID NO: 1005914 - DNA, 33 bp, Homo sapien
tccatgataaaactctgaagaatttaggtgtag

SEQ ID NO: 1005915 - DNA, 33 bp, Homo sapien
gtaaacattcagaagaagaacatcactgtaggt

SEQ ID NO: 1005916 - DNA, 33 bp, Homo sapien
gtaaacattcagaagacgaacatcactgtaggt

SEQ ID NO: 1005917 - DNA, 33 bp, Homo sapien
taatctgcagctgaaacattcagtgtctaaaat

SEQ ID NO: 1005918 - DNA, 33 bp, Homo sapien
taatctgcagctgaaagattcagtgtctaaaat

SEQ ID NO: 1005919 - DNA, 33 bp, Homo sapien
aaagaatattctgtcaccaagcatttgctacta

SEQ ID NO: 1005920 - DNA, 33 bp, Homo sapien
aaagaatattctgtcatcaagcatttgctacta

SEQ ID NO: 1005921 - DNA, 33 bp, Homo sapien
ccataggctataataaataaggcatttcacctt

SEQ ID NO: 1005922 - DNA, 33 bp, Homo sapien
ccataggctataataactaaggcatttcacctt

SEQ ID NO: 1005923 - DNA, 33 bp, Homo sapien
gcactggatagcataaatacagtgaacgacaca

SEQ ID NO: 1005924 - DNA, 33 bp, Homo sapien
gcactggatagcataagtacagtgaacgacaca

SEQ ID NO: 1005925 - DNA, 33 bp, Homo sapien
tactctctcatctaaaaaatgtagtaaccttgt

SEQ ID NO: 1005926 - DNA, 33 bp, Homo sapien
tactctctcatctaaacaatgtagtaaccttgt

SEQ ID NO: 1005927 - DNA, 33 bp, Homo sapien
atcttggagtagcagacgaaagagtatctacaa

SEQ ID NO: 1005928 - DNA, 33 bp, Homo sapien
atcttggagtagcagatgaaagagtatctacaa

SEQ ID NO: 1005929 - DNA, 33 bp, Homo sapien
cacaaaaaactcaaagcctactgaaggagagca

SEQ ID NO: 1005930 - DNA, 33 bp, Homo sapien
cacaaaaaactcaaagtctactgaaggagagca

SEQ ID NO: 1005931 - DNA, 33 bp, Homo sapien
tcaagatgcctaagtactaaatgtaaatcaatt

SEQ ID NO: 1005932 - DNA, 33 bp, Homo sapien
tcaagatgcctaagtattaaatgtaaatcaatt

SEQ ID NO: 1005933 - DNA, 33 bp, Homo sapien
gatggtcacttaaatacatagacacaccctgtt

SEQ ID NO: 1005934 - DNA, 33 bp, Homo sapien
gatggtcacttaaatagatagacacaccctgtt

SEQ ID NO: 1005935 - DNA, 33 bp, Homo sapien
tactttgcttcatacactggatgcatttctttt

SEQ ID NO: 1005936 - DNA, 33 bp, Homo sapien
tactttgcttcatacagtggatgcatttctttt

SEQ ID NO: 1005937 - DNA, 33 bp, Homo sapien
caagaggagtaaagccaaaagacaggatctcaa

SEQ ID NO: 1005938 - DNA, 33 bp, Homo sapien
caagaggagtaaagccgaaagacaggatctcaa

SEQ ID NO: 1005939 - DNA, 33 bp, Homo sapien
ttactatgattgtttacgtcacaatttcaaatg

SEQ ID NO: 1005940 - DNA, 33 bp, Homo sapien
ttactatgattgtttatgtcacaatttcaaatg

SEQ ID NO: 1005941 - DNA, 33 bp, Homo sapien
gggaaagagatactgcacatttattcaggaagc

SEQ ID NO: 1005942 - DNA, 33 bp, Homo sapien
gggaaagagatactgctcatttattcaggaagc

SEQ ID NO: 1005943 - DNA, 33 bp, Homo sapien
gtcagactctggaatacggtatccttaccaaag

SEQ ID NO: 1005944 - DNA, 33 bp, Homo sapien
gtcagactctggaatatggtatccttaccaaag

SEQ ID NO: 1005945 - DNA, 33 bp, Homo sapien
agctttcctaggaccactaaacaattgtagttc

SEQ ID NO: 1005946 - DNA, 33 bp, Homo sapien
agctttcctaggaccattaaacaattgtagttc

SEQ ID NO: 1005947 - DNA, 33 bp, Homo sapien
agcaattttgtgatgcgagttaaagaaaacaac

SEQ ID NO: 1005948 - DNA, 33 bp, Homo sapien
agcaattttgtgatgctagttaaagaaaacaac

SEQ ID NO: 1005949 - DNA, 33 bp, Homo sapien
gttggaaaaatagacagtatagttggaagcttt

SEQ ID NO: 1005950 - DNA, 33 bp, Homo sapien
gttggaaaaatagacattatagttggaagcttt

SEQ ID NO: 1005951 - DNA, 33 bp, Homo sapien
tttgtcttagtccgtgaacctttaatctgcttt

SEQ ID NO: 1005952 - DNA, 33 bp, Homo sapien
tttgtcttagtccgtgcacctttaatctgcttt

SEQ ID NO: 1005953 - DNA, 33 bp, Homo sapien
cgtttaaacaatagcactaacctgattttcaaa

SEQ ID NO: 1005954 - DNA, 33 bp, Homo sapien
cgtttaaacaatagcagtaacctgattttcaaa

SEQ ID NO: 1005955 - DNA, 33 bp, Homo sapien
tcccatctgaacaattcaaggaagagtcccaga

SEQ ID NO: 1005956 - DNA, 33 bp, Homo sapien
tcccatctgaacaattgaaggaagagtcccaga

SEQ ID NO: 1005957 - DNA, 33 bp, Homo sapien
tatgcacttataaacacggttatgtgcctctga

SEQ ID NO: 1005958 - DNA, 33 bp, Homo sapien
tatgcacttataaacatggttatgtgcctctga

SEQ ID NO: 1005959 - DNA, 33 bp, Homo sapien
ttaaaaacagtctaggaaataaaaatcaactta

SEQ ID NO: 1005960 - DNA, 33 bp, Homo sapien
ttaaaaacagtctagggaataaaaatcaactta

SEQ ID NO: 1005961 - DNA, 33 bp, Homo sapien
gtggctgcttacttaacattttttaaagctatc

SEQ ID NO: 1005962 - DNA, 33 bp, Homo sapien
gtggctgcttacttaatattttttaaagctatc

SEQ ID NO: 1005963 - DNA, 33 bp, Homo sapien
aattgataaagggaatcaatcaagcattatctt

SEQ ID NO: 1005964 - DNA, 33 bp, Homo sapien
aattgataaagggaatgaatcaagcattatctt

SEQ ID NO: 1005965 - DNA, 33 bp, Homo sapien
aagagcaagcctgcaggaaaatctagaatgtgg

SEQ ID NO: 1005966 - DNA, 33 bp, Homo sapien
aagagcaagcctgcagtaaaatctagaatgtgg

SEQ ID NO: 1005967 - DNA, 33 bp, Homo sapien
ctctgcagttttaacaataagacaaatatgaga

SEQ ID NO: 1005968 - DNA, 33 bp, Homo sapien
ctctgcagttttaacagtaagacaaatatgaga

SEQ ID NO: 1005969 - DNA, 33 bp, Homo sapien
gattgtttgatcagataaaggaccctgccaact

SEQ ID NO: 1005970 - DNA, 33 bp, Homo sapien
gattgtttgatcagatgaaggaccctgccaact

SEQ ID NO: 1005971 - DNA, 33 bp, Homo sapien
gaaatgtttttcaatgcagggtttccaaatgtg

SEQ ID NO: 1005972 - DNA, 33 bp, Homo sapien
gaaatgtttttcaatgtagggtttccaaatgtg

SEQ ID NO: 1005973 - DNA, 33 bp, Homo sapien
acccttccaaaatggccaatgagacttttccag

SEQ ID NO: 1005974 - DNA, 33 bp, Homo sapien
acccttccaaaatggctaatgagacttttccag

SEQ ID NO: 1005975 - DNA, 33 bp, Homo sapien
agagtctgatattaaacagctgatagtcaagtt

SEQ ID NO: 1005976 - DNA, 33 bp, Homo sapien
agagtctgatattaaatagctgatagtcaagtt

SEQ ID NO: 1005977 - DNA, 33 bp, Homo sapien
tagttttagagaatgaaatgtggccatggaaag

SEQ ID NO: 1005978 - DNA, 33 bp, Homo sapien
tagttttagagaatgagatgtggccatggaaag

SEQ ID NO: 1005979 - DNA, 33 bp, Homo sapien
aatttacaggcacaaaccatacaaaattactat

SEQ ID NO: 1005980 - DNA, 33 bp, Homo sapien
aatttacaggcacaaagcatacaaaattactat

SEQ ID NO: 1005981 - DNA, 33 bp, Homo sapien
tctgatatgcagccagacatgtattgataattc

SEQ ID NO: 1005982 - DNA, 33 bp, Homo sapien
tctgatatgcagccaggcatgtattgataattc

SEQ ID NO: 1005983 - DNA, 33 bp, Homo sapien
ttgttcttaatgcacaagtgaaaaggttttaag

SEQ ID NO: 1005984 - DNA, 33 bp, Homo sapien
ttgttcttaatgcacaggtgaaaaggttttaag

SEQ ID NO: 1005985 - DNA, 33 bp, Homo sapien
atagtgaatcacttaacagttgtcattttcatc

SEQ ID NO: 1005986 - DNA, 33 bp, Homo sapien
atagtgaatcacttaatagttgtcattttcatc

SEQ ID NO: 1005987 - DNA, 33 bp, Homo sapien
tcatgtacctgacctacagcatcttatactttg

SEQ ID NO: 1005988 - DNA, 33 bp, Homo sapien
tcatgtacctgacctatagcatcttatactttg

SEQ ID NO: 1005989 - DNA, 33 bp, Homo sapien
cagctattgatactatcagtgtggaagaactct

SEQ ID NO: 1005990 - DNA, 33 bp, Homo sapien
cagctattgatactattagtgtggaagaactct

SEQ ID NO: 1005991 - DNA, 33 bp, Homo sapien
aatacttgatatattaagcaaccagcacagaaa

SEQ ID NO: 1005992 - DNA, 33 bp, Homo sapien
aatacttgatatattaggcaaccagcacagaaa

SEQ ID NO: 1005993 - DNA, 33 bp, Homo sapien
aaaataggcactcatacaaatgctaggtctaag

SEQ ID NO: 1005994 - DNA, 33 bp, Homo sapien
aaaataggcactcatataaatgctaggtctaag

SEQ ID NO: 1005995 - DNA, 33 bp, Homo sapien
gtctgtatgttgaagtcaacttagtcaatttct

SEQ ID NO: 1005996 - DNA, 33 bp, Homo sapien
gtctgtatgttgaagttaacttagtcaatttct

SEQ ID NO: 1005997 - DNA, 33 bp, Homo sapien
cagctttcatatctgtaaaggcagaggacaaca

SEQ ID NO: 1005998 - DNA, 33 bp, Homo sapien
cagctttcatatctgtgaaggcagaggacaaca

SEQ ID NO: 1005999 - DNA, 33 bp, Homo sapien
gggatatcaacagaaaatgtgacaatatagctc

SEQ ID NO: 1006000 - DNA, 33 bp, Homo sapien
gggatatcaacagaaagtgtgacaatatagctc

SEQ ID NO: 1006001 - DNA, 33 bp, Homo sapien
tataaattgcaggaggaataaaagtgctttaag

SEQ ID NO: 1006002 - DNA, 33 bp, Homo sapien
tataaattgcaggaggcataaaagtgctttaag

SEQ ID NO: 1006003 - DNA, 33 bp, Homo sapien
acagggttatttcttaagcccctgacgtggcta

SEQ ID NO: 1006004 - DNA, 33 bp, Homo sapien
acagggttatttcttaggcccctgacgtggcta

SEQ ID NO: 1006005 - DNA, 33 bp, Homo sapien
attaattctgtagataaaagtccaaaaaataca

SEQ ID NO: 1006006 - DNA, 33 bp, Homo sapien
attaattctgtagatagaagtccaaaaaataca

SEQ ID NO: 1006007 - DNA, 33 bp, Homo sapien
acatcttgtgtcatggaaaactagcatacccag

SEQ ID NO: 1006008 - DNA, 33 bp, Homo sapien
acatcttgtgtcatgggaaactagcatacccag

SEQ ID NO: 1006009 - DNA, 33 bp, Homo sapien
aaggaggtacagaagcgaattgtgcagttctct

SEQ ID NO: 1006010 - DNA, 33 bp, Homo sapien
aaggaggtacagaagctaattgtgcagttctct

SEQ ID NO: 1006011 - DNA, 33 bp, Homo sapien
atatctacttataacaatctgtctcagtccacc

SEQ ID NO: 1006012 - DNA, 33 bp, Homo sapien
atatctacttataacagtctgtctcagtccacc

SEQ ID NO: 1006013 - DNA, 33 bp, Homo sapien
aataaacctgagattaaggagaaaatatgcctg

SEQ ID NO: 1006014 - DNA, 33 bp, Homo sapien
aataaacctgagattacggagaaaatatgcctg

SEQ ID NO: 1006015 - DNA, 33 bp, Homo sapien
ggtggcagttaagtaacgcaagttgaagaattg

SEQ ID NO: 1006016 - DNA, 33 bp, Homo sapien
ggtggcagttaagtaatgcaagttgaagaattg

SEQ ID NO: 1006017 - DNA, 33 bp, Homo sapien
atgtgctctagtaaaactggaggaggatgctgg

SEQ ID NO: 1006018 - DNA, 33 bp, Homo sapien
atgtgctctagtaaaattggaggaggatgctgg

SEQ ID NO: 1006019 - DNA, 33 bp, Homo sapien
ttaagtttcagtggaactacttgagttttgctt

SEQ ID NO: 1006020 - DNA, 33 bp, Homo sapien
ttaagtttcagtggaagtacttgagttttgctt

SEQ ID NO: 1006021 - DNA, 33 bp, Homo sapien
tgagggaagatagtcacattttttaaaaattga

SEQ ID NO: 1006022 - DNA, 33 bp, Homo sapien
tgagggaagatagtcatattttttaaaaattga

SEQ ID NO: 1006023 - DNA, 33 bp, Homo sapien
gttgatttttaccaataagcaacaacttactga

SEQ ID NO: 1006024 - DNA, 33 bp, Homo sapien
gttgatttttaccaattagcaacaacttactga

SEQ ID NO: 1006025 - DNA, 33 bp, Homo sapien
ataaattctcttcatactagtctttacattgct

SEQ ID NO: 1006026 - DNA, 33 bp, Homo sapien
ataaattctcttcatattagtctttacattgct

SEQ ID NO: 1006027 - DNA, 33 bp, Homo sapien
gaggtgatcaaggccaatatcaatatgatagca

SEQ ID NO: 1006028 - DNA, 33 bp, Homo sapien
gaggtgatcaaggccagtatcaatatgatagca

SEQ ID NO: 1006029 - DNA, 33 bp, Homo sapien
agaattaccaacaaacaatttgatttcctatct

SEQ ID NO: 1006030 - DNA, 33 bp, Homo sapien
agaattaccaacaaacgatttgatttcctatct

SEQ ID NO: 1006031 - DNA, 33 bp, Homo sapien
agaacatttaaagcacaattcacccaaacatta

SEQ ID NO: 1006032 - DNA, 33 bp, Homo sapien
agaacatttaaagcacgattcacccaaacatta

SEQ ID NO: 1006033 - DNA, 33 bp, Homo sapien
cttttagacaactgaaataatgttggcagttgt

SEQ ID NO: 1006034 - DNA, 33 bp, Homo sapien
cttttagacaactgaagtaatgttggcagttgt

SEQ ID NO: 1006035 - DNA, 33 bp, Homo sapien
tttattaaaaaaccgaaagccagtagagtcgag

SEQ ID NO: 1006036 - DNA, 33 bp, Homo sapien
tttattaaaaaaccgagagccagtagagtcgag

SEQ ID NO: 1006037 - DNA, 33 bp, Homo sapien
cactggaagttgaaaaatctgtggccttcaaat

SEQ ID NO: 1006038 - DNA, 33 bp, Homo sapien
cactggaagttgaaaagtctgtggccttcaaat

SEQ ID NO: 1006039 - DNA, 33 bp, Homo sapien
taagacagtgcaaaatgacgttttaggggttgt

SEQ ID NO: 1006040 - DNA, 33 bp, Homo sapien
taagacagtgcaaaattacgttttaggggttgt

SEQ ID NO: 1006041 - DNA, 33 bp, Homo sapien
ttattttacaggtgtacgttttaatatcttgct

SEQ ID NO: 1006042 - DNA, 33 bp, Homo sapien
ttattttacaggtgtatgttttaatatcttgct

SEQ ID NO: 1006043 - DNA, 33 bp, Homo sapien
caaaaaattagcacaacgccgttaatctcaacc

SEQ ID NO: 1006044 - DNA, 33 bp, Homo sapien
caaaaaattagcacaaggccgttaatctcaacc

SEQ ID NO: 1006045 - DNA, 33 bp, Homo sapien
ttagtaggagagagtccatagtcaaataattac

SEQ ID NO: 1006046 - DNA, 33 bp, Homo sapien
ttagtaggagagagtcgatagtcaaataattac

SEQ ID NO: 1006047 - DNA, 33 bp, Homo sapien
gaaatgccagaggccaagagaaaaatgtataca

SEQ ID NO: 1006048 - DNA, 33 bp, Homo sapien
gaaatgccagaggccaggagaaaaatgtataca

SEQ ID NO: 1006049 - DNA, 33 bp, Homo sapien
gagataagaaagcacaatgcagttagcaagctg

SEQ ID NO: 1006050 - DNA, 33 bp, Homo sapien
gagataagaaagcacagtgcagttagcaagctg

SEQ ID NO: 1006051 - DNA, 33 bp, Homo sapien
tttgccacattaaataacaaacatacagtgttt

SEQ ID NO: 1006052 - DNA, 33 bp, Homo sapien
tttgccacattaaatagcaaacatacagtgttt

SEQ ID NO: 1006053 - DNA, 33 bp, Homo sapien
caagctttctataccactgacattgatttgata

SEQ ID NO: 1006054 - DNA, 33 bp, Homo sapien
caagctttctataccagtgacattgatttgata

SEQ ID NO: 1006055 - DNA, 33 bp, Homo sapien
gtttaaaatcaaacaccgaggctatgtaatcgt

SEQ ID NO: 1006056 - DNA, 33 bp, Homo sapien
gtttaaaatcaaacactgaggctatgtaatcgt

SEQ ID NO: 1006057 - DNA, 33 bp, Homo sapien
tgtccccctttccacaacagttctttgacttca

SEQ ID NO: 1006058 - DNA, 33 bp, Homo sapien
tgtccccctttccacagcagttctttgacttca

SEQ ID NO: 1006059 - DNA, 33 bp, Homo sapien
atttgttgacacagtaaatattcgttgaattaa

SEQ ID NO: 1006060 - DNA, 33 bp, Homo sapien
atttgttgacacagtagatattcgttgaattaa

SEQ ID NO: 1006061 - DNA, 33 bp, Homo sapien
tatagtttcagacataaatacttaactgtggtt

SEQ ID NO: 1006062 - DNA, 33 bp, Homo sapien
tatagtttcagacatacatacttaactgtggtt

SEQ ID NO: 1006063 - DNA, 33 bp, Homo sapien
tatagtcattctgcagaaaagtctcacactatt

SEQ ID NO: 1006064 - DNA, 33 bp, Homo sapien
tatagtcattctgcaggaaagtctcacactatt

SEQ ID NO: 1006065 - DNA, 33 bp, Homo sapien
taaggattgcaaatacaaaaattataaaatcat

SEQ ID NO: 1006066 - DNA, 33 bp, Homo sapien
taaggattgcaaatacgaaaattataaaatcat

SEQ ID NO: 1006067 - DNA, 33 bp, Homo sapien
caattttttcacacgacctcattcctcctggac

SEQ ID NO: 1006068 - DNA, 33 bp, Homo sapien
caattttttcacacgatctcattcctcctggac

SEQ ID NO: 1006069 - DNA, 33 bp, Homo sapien
agttactgttaatttacattccacttgaacatt

SEQ ID NO: 1006070 - DNA, 33 bp, Homo sapien
agttactgttaatttagattccacttgaacatt

SEQ ID NO: 1006071 - DNA, 33 bp, Homo sapien
tatttataacaactcaagtggtcctcacaacag

SEQ ID NO: 1006072 - DNA, 33 bp, Homo sapien
tatttataacaactcatgtggtcctcacaacag

SEQ ID NO: 1006073 - DNA, 33 bp, Homo sapien
tatttttcttggattgcaaggttcagcagaacc

SEQ ID NO: 1006074 - DNA, 33 bp, Homo sapien
tatttttcttggattggaaggttcagcagaacc

SEQ ID NO: 1006075 - DNA, 33 bp, Homo sapien
atattcaggactgaaacgttatgtaactttaag

SEQ ID NO: 1006076 - DNA, 33 bp, Homo sapien
atattcaggactgaaatgttatgtaactttaag

SEQ ID NO: 1006077 - DNA, 33 bp, Homo sapien
tgaaaaaggatcatgaagtcaagccatctagac

SEQ ID NO: 1006078 - DNA, 33 bp, Homo sapien
tgaaaaaggatcatgacgtcaagccatctagac

SEQ ID NO: 1006079 - DNA, 33 bp, Homo sapien
ctgaattctccattataagaaaagtttgaagat

SEQ ID NO: 1006080 - DNA, 33 bp, Homo sapien
ctgaattctccattattagaaaagtttgaagat

SEQ ID NO: 1006081 - DNA, 33 bp, Homo sapien
tgagactagtgaattaagacatgactacagtgc

SEQ ID NO: 1006082 - DNA, 33 bp, Homo sapien
tgagactagtgaattaggacatgactacagtgc

SEQ ID NO: 1006083 - DNA, 33 bp, Homo sapien
gagaaactagagattaactcaggatacttcaag

SEQ ID NO: 1006084 - DNA, 33 bp, Homo sapien
gagaaactagagattagctcaggatacttcaag

SEQ ID NO: 1006085 - DNA, 33 bp, Homo sapien
ttcccttcacaagctcacttctcttatctgctg

SEQ ID NO: 1006086 - DNA, 33 bp, Homo sapien
ttcccttcacaagctctcttctcttatctgctg

SEQ ID NO: 1006087 - DNA, 33 bp, Homo sapien
tttgcataagtaatgaggattcaaattctaatc

SEQ ID NO: 1006088 - DNA, 33 bp, Homo sapien
tttgcataagtaatgatgattcaaattctaatc

SEQ ID NO: 1006089 - DNA, 33 bp, Homo sapien
tggagactactcaaagaccttaagacaaaaata

SEQ ID NO: 1006090 - DNA, 33 bp, Homo sapien
tggagactactcaaaggccttaagacaaaaata

SEQ ID NO: 1006091 - DNA, 33 bp, Homo sapien
ctaaaatgtttcgaccaattgttgaatgtgctg

SEQ ID NO: 1006092 - DNA, 33 bp, Homo sapien
ctaaaatgtttcgaccgattgttgaatgtgctg

SEQ ID NO: 1006093 - DNA, 33 bp, Homo sapien
agagtcagctcacctacagtttgaatatttcca

SEQ ID NO: 1006094 - DNA, 33 bp, Homo sapien
agagtcagctcacctatagtttgaatatttcca

SEQ ID NO: 1006095 - DNA, 33 bp, Homo sapien
catattgtagtcttcaaacattgtaattttatg

SEQ ID NO: 1006096 - DNA, 33 bp, Homo sapien
catattgtagtcttcagacattgtaattttatg

SEQ ID NO: 1006097 - DNA, 33 bp, Homo sapien
gagcttaaaaatagtaactactccattagaaca

SEQ ID NO: 1006098 - DNA, 33 bp, Homo sapien
gagcttaaaaatagtatctactccattagaaca

SEQ ID NO: 1006099 - DNA, 33 bp, Homo sapien
agactggaaattttagaaaagtcactgtggagc

SEQ ID NO: 1006100 - DNA, 33 bp, Homo sapien
agactggaaattttaggaaagtcactgtggagc

SEQ ID NO: 1006101 - DNA, 33 bp, Homo sapien
aaccatccactaaataagccattcactttacta

SEQ ID NO: 1006102 - DNA, 33 bp, Homo sapien
aaccatccactaaataggccattcactttacta

SEQ ID NO: 1006103 - DNA, 33 bp, Homo sapien
tccctttgtgatactccattacagttccaggag

SEQ ID NO: 1006104 - DNA, 33 bp, Homo sapien
tccctttgtgatactcgattacagttccaggag

SEQ ID NO: 1006105 - DNA, 33 bp, Homo sapien
tatcttcttgaaccacagtactcatcatcctat

SEQ ID NO: 1006106 - DNA, 33 bp, Homo sapien
tatcttcttgaaccacggtactcatcatcctat

SEQ ID NO: 1006107 - DNA, 33 bp, Homo sapien
ttcaaattgaccttcacgttcgtagagcaccat

SEQ ID NO: 1006108 - DNA, 33 bp, Homo sapien
ttcaaattgaccttcatgttcgtagagcaccat

SEQ ID NO: 1006109 - DNA, 33 bp, Homo sapien
aaaacacattacatccagagacttactacagac

SEQ ID NO: 1006110 - DNA, 33 bp, Homo sapien
aaaacacattacatccggagacttactacagac

SEQ ID NO: 1006111 - DNA, 33 bp, Homo sapien
ataaggagtgggaaataaataaaatgaacgtga

SEQ ID NO: 1006112 - DNA, 33 bp, Homo sapien
ataaggagtgggaaattaataaaatgaacgtga

SEQ ID NO: 1006113 - DNA, 33 bp, Homo sapien
tgaattactggaaatacgtgaaatctctgatac

SEQ ID NO: 1006114 - DNA, 33 bp, Homo sapien
tgaattactggaaatatgtgaaatctctgatac

SEQ ID NO: 1006115 - DNA, 33 bp, Homo sapien
gagatacaaatatgaacgtggtgtccacaagtt

SEQ ID NO: 1006116 - DNA, 33 bp, Homo sapien
gagatacaaatatgaatgtggtgtccacaagtt

SEQ ID NO: 1006117 - DNA, 33 bp, Homo sapien
cgaccctaaaggatatcaagtgcacatagttag

SEQ ID NO: 1006118 - DNA, 33 bp, Homo sapien
cgaccctaaaggatatgaagtgcacatagttag

SEQ ID NO: 1006119 - DNA, 33 bp, Homo sapien
ataaaacttcagagtaaccaaggtaattaaatc

SEQ ID NO: 1006120 - DNA, 33 bp, Homo sapien
ataaaacttcagagtatccaaggtaattaaatc

SEQ ID NO: 1006121 - DNA, 33 bp, Homo sapien
tcaccagaggacaaaaggctgtatctcctttat

SEQ ID NO: 1006122 - DNA, 33 bp, Homo sapien
tcaccagaggacaaaatgctgtatctcctttat

SEQ ID NO: 1006123 - DNA, 33 bp, Homo sapien
ttggattacagtgtagaaatgacaagtggtttg

SEQ ID NO: 1006124 - DNA, 33 bp, Homo sapien
ttggattacagtgtagcaatgacaagtggtttg

SEQ ID NO: 1006125 - DNA, 33 bp, Homo sapien
tgtgtgtttttatctaagagagttgagactcct

SEQ ID NO: 1006126 - DNA, 33 bp, Homo sapien
tgtgtgtttttatctacgagagttgagactcct

SEQ ID NO: 1006127 - DNA, 33 bp, Homo sapien
aggcagatatgagtcccatagtttattagtctc

SEQ ID NO: 1006128 - DNA, 33 bp, Homo sapien
aggcagatatgagtcctatagtttattagtctc

SEQ ID NO: 1006129 - DNA, 33 bp, Homo sapien
gaatttggccagagtaaaatctgaattccagat

SEQ ID NO: 1006130 - DNA, 33 bp, Homo sapien
gaatttggccagagtacaatctgaattccagat

SEQ ID NO: 1006131 - DNA, 33 bp, Homo sapien
aggtgtctgatggttccacccttgaactaaaag

SEQ ID NO: 1006132 - DNA, 33 bp, Homo sapien
aggtgtctgatggttctacccttgaactaaaag

SEQ ID NO: 1006133 - DNA, 33 bp, Homo sapien
tcatggcaattcttaaagggcaaaatctgcaat

SEQ ID NO: 1006134 - DNA, 33 bp, Homo sapien
tcatggcaattcttaaggggcaaaatctgcaat

SEQ ID NO: 1006135 - DNA, 33 bp, Homo sapien
tggatgaagaaactgcacataaaaccagttgaa

SEQ ID NO: 1006136 - DNA, 33 bp, Homo sapien
tggatgaagaaactgcgcataaaaccagttgaa

SEQ ID NO: 1006137 - DNA, 33 bp, Homo sapien
cagctgtctaggatacaggattcatttactgtt

SEQ ID NO: 1006138 - DNA, 33 bp, Homo sapien
cagctgtctaggatacgggattcatttactgtt

SEQ ID NO: 1006139 - DNA, 33 bp, Homo sapien
ggggtcaaaggaaatacgatatggatcaagcaa

SEQ ID NO: 1006140 - DNA, 33 bp, Homo sapien
ggggtcaaaggaaataggatatggatcaagcaa

SEQ ID NO: 1006141 - DNA, 33 bp, Homo sapien
aacagatctatttgtggatgttttaaaggagga

SEQ ID NO: 1006142 - DNA, 33 bp, Homo sapien
aacagatctatttgtgtatgttttaaaggagga

SEQ ID NO: 1006143 - DNA, 33 bp, Homo sapien
ttctggagactagtgcactcttttgacgttctt

SEQ ID NO: 1006144 - DNA, 33 bp, Homo sapien
ttctggagactagtgcgctcttttgacgttctt

SEQ ID NO: 1006145 - DNA, 33 bp, Homo sapien
ttgataaatatgctgacgattttctgaggcaga

SEQ ID NO: 1006146 - DNA, 33 bp, Homo sapien
ttgataaatatgctgatgattttctgaggcaga

SEQ ID NO: 1006147 - DNA, 33 bp, Homo sapien
aaacaggaaaatcagaagttggtattgatatat

SEQ ID NO: 1006148 - DNA, 33 bp, Homo sapien
aaacaggaaaatcagatgttggtattgatatat

SEQ ID NO: 1006149 - DNA, 33 bp, Homo sapien
aggaaaatcgagctcaatatttctcaactgtaa

SEQ ID NO: 1006150 - DNA, 33 bp, Homo sapien
aggaaaatcgagctcactatttctcaactgtaa

SEQ ID NO: 1006151 - DNA, 33 bp, Homo sapien
tagtagtagatagaaaatgccatgtaaccagct

SEQ ID NO: 1006152 - DNA, 33 bp, Homo sapien
tagtagtagatagaaattgccatgtaaccagct

SEQ ID NO: 1006153 - DNA, 33 bp, Homo sapien
agttctggcaaactaacagaatccttaaacaca

SEQ ID NO: 1006154 - DNA, 33 bp, Homo sapien
agttctggcaaactaatagaatccttaaacaca

SEQ ID NO: 1006155 - DNA, 33 bp, Homo sapien
cctgttttctctctgcaataccgtctttaggga

SEQ ID NO: 1006156 - DNA, 33 bp, Homo sapien
cctgttttctctctgcgataccgtctttaggga

SEQ ID NO: 1006157 - DNA, 33 bp, Homo sapien
ttaatacataatggcactctaagtatttgtaag

SEQ ID NO: 1006158 - DNA, 33 bp, Homo sapien
ttaatacataatggcagtctaagtatttgtaag

SEQ ID NO: 1006159 - DNA, 33 bp, Homo sapien
tgaagagaggctaacccagaatacagcataacc

SEQ ID NO: 1006160 - DNA, 33 bp, Homo sapien
tgaagagaggctaaccgagaatacagcataacc

SEQ ID NO: 1006161 - DNA, 33 bp, Homo sapien
gtatattcaacttacaacacagtcaaactctta

SEQ ID NO: 1006162 - DNA, 33 bp, Homo sapien
gtatattcaacttacaccacagtcaaactctta

SEQ ID NO: 1006163 - DNA, 33 bp, Homo sapien
cctcatctgagaaggacgctgttcccttatctt

SEQ ID NO: 1006164 - DNA, 33 bp, Homo sapien
cctcatctgagaaggatgctgttcccttatctt

SEQ ID NO: 1006165 - DNA, 33 bp, Homo sapien
ttggttcttttaaaaaattgctatgtcatcttt

SEQ ID NO: 1006166 - DNA, 33 bp, Homo sapien
ttggttcttttaaaaatttgctatgtcatcttt

SEQ ID NO: 1006167 - DNA, 33 bp, Homo sapien
cattgtcacagggtaactctgtagatattttcg

SEQ ID NO: 1006168 - DNA, 33 bp, Homo sapien
cattgtcacagggtaattctgtagatattttcg

SEQ ID NO: 1006169 - DNA, 33 bp, Homo sapien
ttgatgaagccacataaaatttcaggcagatta

SEQ ID NO: 1006170 - DNA, 33 bp, Homo sapien
ttgatgaagccacatataatttcaggcagatta

SEQ ID NO: 1006171 - DNA, 33 bp, Homo sapien
caacacaagaagccgaccgagcactgtactttg

SEQ ID NO: 1006172 - DNA, 33 bp, Homo sapien
caacacaagaagccgagcgagcactgtactttg

SEQ ID NO: 1006173 - DNA, 33 bp, Homo sapien
cttgcattttgtgataagagagtatcatattga

SEQ ID NO: 1006174 - DNA, 33 bp, Homo sapien
cttgcattttgtgataggagagtatcatattga

SEQ ID NO: 1006175 - DNA, 33 bp, Homo sapien
atcagatctcgtatcaagaaccatatcaagaac

SEQ ID NO: 1006176 - DNA, 33 bp, Homo sapien
atcagatctcgtatcaggaaccatatcaagaac

SEQ ID NO: 1006177 - DNA, 33 bp, Homo sapien
aataaagtgagtgggaccagtttttcttattta

SEQ ID NO: 1006178 - DNA, 33 bp, Homo sapien
aataaagtgagtgggatcagtttttcttattta

SEQ ID NO: 1006179 - DNA, 33 bp, Homo sapien
aataacctagacactaaaactctgagacaagaa

SEQ ID NO: 1006180 - DNA, 33 bp, Homo sapien
aataacctagacactacaactctgagacaagaa

SEQ ID NO: 1006181 - DNA, 33 bp, Homo sapien
gtgaagcaataatttcaatgatactttccaatt

SEQ ID NO: 1006182 - DNA, 33 bp, Homo sapien
gtgaagcaataatttcgatgatactttccaatt

SEQ ID NO: 1006183 - DNA, 33 bp, Homo sapien
aacaccccagggagaactggtaacttgtctaat

SEQ ID NO: 1006184 - DNA, 33 bp, Homo sapien
aacaccccagggagaattggtaacttgtctaat

SEQ ID NO: 1006185 - DNA, 33 bp, Homo sapien
cttgtctaatgttatacggctaatatgtgcaag

SEQ ID NO: 1006186 - DNA, 33 bp, Homo sapien
cttgtctaatgttatatggctaatatgtgcaag

SEQ ID NO: 1006187 - DNA, 33 bp, Homo sapien
ctaacaccatatttctaaaataaagacagtagg

SEQ ID NO: 1006188 - DNA, 33 bp, Homo sapien
ctaacaccatatttctgaaataaagacagtagg

SEQ ID NO: 1006189 - DNA, 33 bp, Homo sapien
ttgactttccaaatcaatcaacttagtcttctt

SEQ ID NO: 1006190 - DNA, 33 bp, Homo sapien
ttgactttccaaatcattcaacttagtcttctt

SEQ ID NO: 1006191 - DNA, 33 bp, Homo sapien
ttaaatttgagaggtacaattttcagtaaactt

SEQ ID NO: 1006192 - DNA, 33 bp, Homo sapien
ttaaatttgagaggtagaattttcagtaaactt

SEQ ID NO: 1006193 - DNA, 33 bp, Homo sapien
gcattgacctctatgacatttgaatgttcttcc

SEQ ID NO: 1006194 - DNA, 33 bp, Homo sapien
gcattgacctctatgagatttgaatgttcttcc

SEQ ID NO: 1006195 - DNA, 33 bp, Homo sapien
acgaacagaatcattgcagaattttgctattga

SEQ ID NO: 1006196 - DNA, 33 bp, Homo sapien
acgaacagaatcattggagaattttgctattga

SEQ ID NO: 1006197 - DNA, 33 bp, Homo sapien
ctaccactagagtgaacatccccatggaagaca

SEQ ID NO: 1006198 - DNA, 33 bp, Homo sapien
ctaccactagagtgaatatccccatggaagaca

SEQ ID NO: 1006199 - DNA, 33 bp, Homo sapien
tggcctgcaactataaccctgcaattaggacaa

SEQ ID NO: 1006200 - DNA, 33 bp, Homo sapien
tggcctgcaactataatcctgcaattaggacaa

SEQ ID NO: 1006201 - DNA, 33 bp, Homo sapien
atattagtttgttacagcttccacaacaaagtc

SEQ ID NO: 1006202 - DNA, 33 bp, Homo sapien
atattagtttgttacatcttccacaacaaagtc

SEQ ID NO: 1006203 - DNA, 33 bp, Homo sapien
tttaagcctaactgtcaagataggagccttttc

SEQ ID NO: 1006204 - DNA, 33 bp, Homo sapien
tttaagcctaactgtcgagataggagccttttc

SEQ ID NO: 1006205 - DNA, 33 bp, Homo sapien
gataacatggaattgacggaaagaagtgaatga

SEQ ID NO: 1006206 - DNA, 33 bp, Homo sapien
gataacatggaattgatggaaagaagtgaatga

SEQ ID NO: 1006207 - DNA, 33 bp, Homo sapien
aggttttgcagaatgacccaccatatagaaaat

SEQ ID NO: 1006208 - DNA, 33 bp, Homo sapien
aggttttgcagaatgatccaccatatagaaaat

SEQ ID NO: 1006209 - DNA, 33 bp, Homo sapien
ggttaatttttgtttagaactgaccattaacct

SEQ ID NO: 1006210 - DNA, 33 bp, Homo sapien
ggttaatttttgtttataactgaccattaacct

SEQ ID NO: 1006211 - DNA, 33 bp, Homo sapien
aaaatggtaaacagcaatctggagttctatgtt

SEQ ID NO: 1006212 - DNA, 33 bp, Homo sapien
aaaatggtaaacagcagtctggagttctatgtt

SEQ ID NO: 1006213 - DNA, 33 bp, Homo sapien
atgatgatgcctatgacgacagtgatgaagaaa

SEQ ID NO: 1006214 - DNA, 33 bp, Homo sapien
atgatgatgcctatgatgacagtgatgaagaaa

SEQ ID NO: 1006215 - DNA, 33 bp, Homo sapien
tgattaatggctgtaaccttttttttctatctc

SEQ ID NO: 1006216 - DNA, 33 bp, Homo sapien
tgattaatggctgtaatcttttttttctatctc

SEQ ID NO: 1006217 - DNA, 33 bp, Homo sapien
tttttttcctagtgagaaggattatcagatcga

SEQ ID NO: 1006218 - DNA, 33 bp, Homo sapien
tttttttcctagtgagtaggattatcagatcga

SEQ ID NO: 1006219 - DNA, 33 bp, Homo sapien
gctaagcaacttgttgaaaatcacataactcga

SEQ ID NO: 1006220 - DNA, 33 bp, Homo sapien
gctaagcaacttgttgtaaatcacataactcga

SEQ ID NO: 1006221 - DNA, 33 bp, Homo sapien
tgggcttctttcctgacgaagaactacagttcc

SEQ ID NO: 1006222 - DNA, 33 bp, Homo sapien
tgggcttctttcctgatgaagaactacagttcc

SEQ ID NO: 1006223 - DNA, 33 bp, Homo sapien
agcaagagattttatacagcacataagaagcaa

SEQ ID NO: 1006224 - DNA, 33 bp, Homo sapien
agcaagagattttatagagcacataagaagcaa

SEQ ID NO: 1006225 - DNA, 33 bp, Homo sapien
agtgataatggcataaagcaatagtaaatatat

SEQ ID NO: 1006226 - DNA, 33 bp, Homo sapien
agtgataatggcataaggcaatagtaaatatat

SEQ ID NO: 1006227 - DNA, 33 bp, Homo sapien
gaagccatgaataaaactgaggtctgaaatcca

SEQ ID NO: 1006228 - DNA, 33 bp, Homo sapien
gaagccatgaataaaattgaggtctgaaatcca

SEQ ID NO: 1006229 - DNA, 33 bp, Homo sapien
agcatagcaacaaaccaatacagtaaattggta

SEQ ID NO: 1006230 - DNA, 33 bp, Homo sapien
agcatagcaacaaaccgatacagtaaattggta

SEQ ID NO: 1006231 - DNA, 33 bp, Homo sapien
caccccaaaatttgtacgtaaatgttcacagat

SEQ ID NO: 1006232 - DNA, 33 bp, Homo sapien
caccccaaaatttgtatgtaaatgttcacagat

SEQ ID NO: 1006233 - DNA, 33 bp, Homo sapien
ttctctttccatttcacaaatccccctagtgtt

SEQ ID NO: 1006234 - DNA, 33 bp, Homo sapien
ttctctttccatttcagaaatccccctagtgtt

SEQ ID NO: 1006235 - DNA, 33 bp, Homo sapien
gataaactattacttacgtgagttcaaacacta

SEQ ID NO: 1006236 - DNA, 33 bp, Homo sapien
gataaactattacttatgtgagttcaaacacta

SEQ ID NO: 1006237 - DNA, 33 bp, Homo sapien
ttcagaattatcccaaattacactggctctcaa

SEQ ID NO: 1006238 - DNA, 33 bp, Homo sapien
ttcagaattatcccaagttacactggctctcaa

SEQ ID NO: 1006239 - DNA, 33 bp, Homo sapien
cagatggcattgttgtaaaaactttctcagaag

SEQ ID NO: 1006240 - DNA, 33 bp, Homo sapien
cagatggcattgttgtgaaaactttctcagaag

SEQ ID NO: 1006241 - DNA, 33 bp, Homo sapien
cctggccttctgttctcacatgattagtcctat

SEQ ID NO: 1006242 - DNA, 33 bp, Homo sapien
cctggccttctgttctgacatgattagtcctat

SEQ ID NO: 1006243 - DNA, 33 bp, Homo sapien
aagataatgatttttacgccaatccgtaagttt

SEQ ID NO: 1006244 - DNA, 33 bp, Homo sapien
aagataatgatttttatgccaatccgtaagttt

SEQ ID NO: 1006245 - DNA, 33 bp, Homo sapien
actcaagctactttcaagtgtctactcaacctt

SEQ ID NO: 1006246 - DNA, 33 bp, Homo sapien
actcaagctactttcacgtgtctactcaacctt

SEQ ID NO: 1006247 - DNA, 33 bp, Homo sapien
atgctaactattaggccctttctcagtgtatag

SEQ ID NO: 1006248 - DNA, 33 bp, Homo sapien
atgctaactattaggctctttctcagtgtatag

SEQ ID NO: 1006249 - DNA, 33 bp, Homo sapien
agaatgtaaggttagcaaacttgaaaatgcaaa

SEQ ID NO: 1006250 - DNA, 33 bp, Homo sapien
agaatgtaaggttagcgaacttgaaaatgcaaa

SEQ ID NO: 1006251 - DNA, 33 bp, Homo sapien
tacagatagaatcttaagcagtgttcagagaaa

SEQ ID NO: 1006252 - DNA, 33 bp, Homo sapien
tacagatagaatcttaggcagtgttcagagaaa

SEQ ID NO: 1006253 - DNA, 33 bp, Homo sapien
aacaaagaaaatctgacaggatgaccataatac

SEQ ID NO: 1006254 - DNA, 33 bp, Homo sapien
aacaaagaaaatctgataggatgaccataatac

SEQ ID NO: 1006255 - DNA, 33 bp, Homo sapien
tgagggaagaaatacactgactactattgaata

SEQ ID NO: 1006256 - DNA, 33 bp, Homo sapien
tgagggaagaaatacattgactactattgaata

SEQ ID NO: 1006257 - DNA, 33 bp, Homo sapien
gttattctgctcaaaaccttccaataccttctc

SEQ ID NO: 1006258 - DNA, 33 bp, Homo sapien
gttattctgctcaaaatcttccaataccttctc

SEQ ID NO: 1006259 - DNA, 33 bp, Homo sapien
gcaaagaaagtttgaaagcataggtacagcagg

SEQ ID NO: 1006260 - DNA, 33 bp, Homo sapien
gcaaagaaagtttgaatgcataggtacagcagg

SEQ ID NO: 1006261 - DNA, 33 bp, Homo sapien
agctcaaatgataaaagtgacacaagcataata

SEQ ID NO: 1006262 - DNA, 33 bp, Homo sapien
agctcaaatgataaaattgacacaagcataata

SEQ ID NO: 1006263 - DNA, 33 bp, Homo sapien
aggtattatgtagtagcagagaatgtttccttg

SEQ ID NO: 1006264 - DNA, 33 bp, Homo sapien
aggtattatgtagtaggagagaatgtttccttg

SEQ ID NO: 1006265 - DNA, 33 bp, Homo sapien
ctggacctgagtaccaactttaacatatactag

SEQ ID NO: 1006266 - DNA, 33 bp, Homo sapien
ctggacctgagtaccagctttaacatatactag

SEQ ID NO: 1006267 - DNA, 33 bp, Homo sapien
ttgctactgaagattcacattttctacatttct

SEQ ID NO: 1006268 - DNA, 33 bp, Homo sapien
ttgctactgaagattctcattttctacatttct

SEQ ID NO: 1006269 - DNA, 33 bp, Homo sapien
aataatgtgagtaaaacgctattacggaacttc

SEQ ID NO: 1006270 - DNA, 33 bp, Homo sapien
aataatgtgagtaaaatgctattacggaacttc

SEQ ID NO: 1006271 - DNA, 33 bp, Homo sapien
tgaactttgacagataagcttgaaggtaaaaat

SEQ ID NO: 1006272 - DNA, 33 bp, Homo sapien
tgaactttgacagatacgcttgaaggtaaaaat

SEQ ID NO: 1006273 - DNA, 33 bp, Homo sapien
ggacaagaacactagaagcctggctatgagaat

SEQ ID NO: 1006274 - DNA, 33 bp, Homo sapien
ggacaagaacactagatgcctggctatgagaat

SEQ ID NO: 1006275 - DNA, 33 bp, Homo sapien
ccatgcaaccaatataatatagtgacataacca

SEQ ID NO: 1006276 - DNA, 33 bp, Homo sapien
ccatgcaaccaatatagtatagtgacataacca

SEQ ID NO: 1006277 - DNA, 33 bp, Homo sapien
gatgtaaaaatagagcaaaacagtgaggaaaaa

SEQ ID NO: 1006278 - DNA, 33 bp, Homo sapien
gatgtaaaaatagagcgaaacagtgaggaaaaa

SEQ ID NO: 1006279 - DNA, 33 bp, Homo sapien
gaggggactaatccaaattgaaaaataacccgt

SEQ ID NO: 1006280 - DNA, 33 bp, Homo sapien
gaggggactaatccaagttgaaaaataacccgt

SEQ ID NO: 1006281 - DNA, 33 bp, Homo sapien
tagctaaaagacaaccaaaatcataccatgtgg

SEQ ID NO: 1006282 - DNA, 33 bp, Homo sapien
tagctaaaagacaaccgaaatcataccatgtgg

SEQ ID NO: 1006283 - DNA, 33 bp, Homo sapien
agattaggtatagaaacaaaggtgcagttaaat

SEQ ID NO: 1006284 - DNA, 33 bp, Homo sapien
agattaggtatagaaataaaggtgcagttaaat

SEQ ID NO: 1006285 - DNA, 33 bp, Homo sapien
cttgttttcagataaggcggagtcacaagaaag

SEQ ID NO: 1006286 - DNA, 33 bp, Homo sapien
cttgttttcagataagtcggagtcacaagaaag

SEQ ID NO: 1006287 - DNA, 33 bp, Homo sapien
ataggcaaagagctgacggtctgtaataaaaaa

SEQ ID NO: 1006288 - DNA, 33 bp, Homo sapien
ataggcaaagagctgatggtctgtaataaaaaa

SEQ ID NO: 1006289 - DNA, 33 bp, Homo sapien
gatttgtattttatcacccctgcttaatctaat

SEQ ID NO: 1006290 - DNA, 33 bp, Homo sapien
gatttgtattttatcatccctgcttaatctaat

SEQ ID NO: 1006291 - DNA, 33 bp, Homo sapien
ataggcctctaaatcacctaatgagaagaaatt

SEQ ID NO: 1006292 - DNA, 33 bp, Homo sapien
ataggcctctaaatcatctaatgagaagaaatt

SEQ ID NO: 1006293 - DNA, 33 bp, Homo sapien
gctgatagttgctttcactgtgcccaagctctt

SEQ ID NO: 1006294 - DNA, 33 bp, Homo sapien
gctgatagttgctttcgctgtgcccaagctctt

SEQ ID NO: 1006295 - DNA, 33 bp, Homo sapien
gagttgctgattttagcaataacaccaagctaa

SEQ ID NO: 1006296 - DNA, 33 bp, Homo sapien
gagttgctgattttaggaataacaccaagctaa

SEQ ID NO: 1006297 - DNA, 33 bp, Homo sapien
ttaaactacttagtaaacattactccagatggc

SEQ ID NO: 1006298 - DNA, 33 bp, Homo sapien
ttaaactacttagtaagcattactccagatggc

SEQ ID NO: 1006299 - DNA, 33 bp, Homo sapien
aaactcctgacctttacggtattcccgccttgg

SEQ ID NO: 1006300 - DNA, 33 bp, Homo sapien
aaactcctgacctttatggtattcccgccttgg

SEQ ID NO: 1006301 - DNA, 33 bp, Homo sapien
atataaagaatcaaaactactcagttgcaaaaa

SEQ ID NO: 1006302 - DNA, 33 bp, Homo sapien
atataaagaatcaaaattactcagttgcaaaaa

SEQ ID NO: 1006303 - DNA, 33 bp, Homo sapien
ttactgtgcatatacaacgcactttattcattc

SEQ ID NO: 1006304 - DNA, 33 bp, Homo sapien
ttactgtgcatatacaccgcactttattcattc

SEQ ID NO: 1006305 - DNA, 33 bp, Homo sapien
aatttgggtacttccccgctctggaatgatact

SEQ ID NO: 1006306 - DNA, 33 bp, Homo sapien
aatttgggtacttccctgctctggaatgatact

SEQ ID NO: 1006307 - DNA, 33 bp, Homo sapien
tttaatagatggtagtaaagaagggatcaaatc

SEQ ID NO: 1006308 - DNA, 33 bp, Homo sapien
tttaatagatggtagtgaagaagggatcaaatc

SEQ ID NO: 1006309 - DNA, 33 bp, Homo sapien
ttcttaaaacaacacagtatattgacaggttta

SEQ ID NO: 1006310 - DNA, 33 bp, Homo sapien
ttcttaaaacaacacattatattgacaggttta

SEQ ID NO: 1006311 - DNA, 33 bp, Homo sapien
cagatgacaagccaggacagtcttaaactacaa

SEQ ID NO: 1006312 - DNA, 33 bp, Homo sapien
cagatgacaagccagggcagtcttaaactacaa

SEQ ID NO: 1006313 - DNA, 33 bp, Homo sapien
aagaagtcacaaggcccgacaattcaaaaaacg

SEQ ID NO: 1006314 - DNA, 33 bp, Homo sapien
aagaagtcacaaggccggacaattcaaaaaacg

SEQ ID NO: 1006315 - DNA, 33 bp, Homo sapien
aacttgtactctaacccggcacgacttcaactt

SEQ ID NO: 1006316 - DNA, 33 bp, Homo sapien
aacttgtactctaaccgggcacgacttcaactt

SEQ ID NO: 1006317 - DNA, 33 bp, Homo sapien
cacgacttcaactttaaaccacacattttgaag

SEQ ID NO: 1006318 - DNA, 33 bp, Homo sapien
cacgacttcaactttataccacacattttgaag

SEQ ID NO: 1006319 - DNA, 33 bp, Homo sapien
tagttaagggcatagacggtatatggatattat

SEQ ID NO: 1006320 - DNA, 33 bp, Homo sapien
tagttaagggcatagatggtatatggatattat

SEQ ID NO: 1006321 - DNA, 33 bp, Homo sapien
gtagaggtactacctcaattatcttgggcaata

SEQ ID NO: 1006322 - DNA, 33 bp, Homo sapien
gtagaggtactacctctattatcttgggcaata

SEQ ID NO: 1006323 - DNA, 33 bp, Homo sapien
cctgaaatgtataaggaaatgttatggaagtaa

SEQ ID NO: 1006324 - DNA, 33 bp, Homo sapien
cctgaaatgtataagggaatgttatggaagtaa

SEQ ID NO: 1006325 - DNA, 33 bp, Homo sapien
ttacttttaagatatacgcatttttgtatgaac

SEQ ID NO: 1006326 - DNA, 33 bp, Homo sapien
ttacttttaagatataggcatttttgtatgaac

SEQ ID NO: 1006327 - DNA, 33 bp, Homo sapien
aagatggtgaacataaatatcattgaatcaagg

SEQ ID NO: 1006328 - DNA, 33 bp, Homo sapien
aagatggtgaacataagtatcattgaatcaagg

SEQ ID NO: 1006329 - DNA, 33 bp, Homo sapien
ctctactgcactcttaagattgactgtatgtcc

SEQ ID NO: 1006330 - DNA, 33 bp, Homo sapien
ctctactgcactcttacgattgactgtatgtcc

SEQ ID NO: 1006331 - DNA, 33 bp, Homo sapien
gatcaatcagattgtcaagggggtacatggagt

SEQ ID NO: 1006332 - DNA, 33 bp, Homo sapien
gatcaatcagattgtcgagggggtacatggagt

SEQ ID NO: 1006333 - DNA, 33 bp, Homo sapien
gggatgtccatcatttcaaacattgattatttc

SEQ ID NO: 1006334 - DNA, 33 bp, Homo sapien
gggatgtccatcattttaaacattgattatttc

SEQ ID NO: 1006335 - DNA, 33 bp, Homo sapien
agagaatgtgtgactacgtgagtagaagatttc

SEQ ID NO: 1006336 - DNA, 33 bp, Homo sapien
agagaatgtgtgactatgtgagtagaagatttc

SEQ ID NO: 1006337 - DNA, 33 bp, Homo sapien
gattgaaagatattgaaccatttaaaaaaacat

SEQ ID NO: 1006338 - DNA, 33 bp, Homo sapien
gattgaaagatattgagccatttaaaaaaacat

SEQ ID NO: 1006339 - DNA, 33 bp, Homo sapien
caaacatattagagccactttctctctctctct

SEQ ID NO: 1006340 - DNA, 33 bp, Homo sapien
caaacatattagagccgctttctctctctctct

SEQ ID NO: 1006341 - DNA, 33 bp, Homo sapien
cattttgcgctgcctccgaacaaatgtaaatct

SEQ ID NO: 1006342 - DNA, 33 bp, Homo sapien
cattttgcgctgcctcggaacaaatgtaaatct

SEQ ID NO: 1006343 - DNA, 33 bp, Homo sapien
gcaaacctcagaaagaagggaatggctaaggca

SEQ ID NO: 1006344 - DNA, 33 bp, Homo sapien
gcaaacctcagaaagaggggaatggctaaggca

SEQ ID NO: 1006345 - DNA, 33 bp, Homo sapien
attgtaaagtggacaacggtaactttcccatgg

SEQ ID NO: 1006346 - DNA, 33 bp, Homo sapien
attgtaaagtggacaatggtaactttcccatgg

SEQ ID NO: 1006347 - DNA, 33 bp, Homo sapien
acacatgagccactaaactcaaactaagaacag

SEQ ID NO: 1006348 - DNA, 33 bp, Homo sapien
acacatgagccactaacctcaaactaagaacag

SEQ ID NO: 1006349 - DNA, 33 bp, Homo sapien
tgtacaaaaacttcaacggccagatagatggat

SEQ ID NO: 1006350 - DNA, 33 bp, Homo sapien
tgtacaaaaacttcaatggccagatagatggat

SEQ ID NO: 1006351 - DNA, 33 bp, Homo sapien
tgatatttggttgggaacgtgttttaatagaga

SEQ ID NO: 1006352 - DNA, 33 bp, Homo sapien
tgatatttggttgggatcgtgttttaatagaga

SEQ ID NO: 1006353 - DNA, 33 bp, Homo sapien
agtttctggagattcacgttgcttgatatagta

SEQ ID NO: 1006354 - DNA, 33 bp, Homo sapien
agtttctggagattcatgttgcttgatatagta

SEQ ID NO: 1006355 - DNA, 33 bp, Homo sapien
cttgtccagtttaaggaatttgtgcatttcagt

SEQ ID NO: 1006356 - DNA, 33 bp, Homo sapien
cttgtccagtttaaggcatttgtgcatttcagt

SEQ ID NO: 1006357 - DNA, 33 bp, Homo sapien
atcttgactctaagtcgccaatgtgcttatagt

SEQ ID NO: 1006358 - DNA, 33 bp, Homo sapien
atcttgactctaagtctccaatgtgcttatagt

SEQ ID NO: 1006359 - DNA, 33 bp, Homo sapien
atgtaaaactttctcaggactatatccaaaaat

SEQ ID NO: 1006360 - DNA, 33 bp, Homo sapien
atgtaaaactttctcatgactatatccaaaaat

SEQ ID NO: 1006361 - DNA, 33 bp, Homo sapien
acaaatcatctcaataccacactttgaagaaag

SEQ ID NO: 1006362 - DNA, 33 bp, Homo sapien
acaaatcatctcaatatcacactttgaagaaag

SEQ ID NO: 1006363 - DNA, 33 bp, Homo sapien
caaaaacagtgatgaaagaagctaattgcaagt

SEQ ID NO: 1006364 - DNA, 33 bp, Homo sapien
caaaaacagtgatgaaggaagctaattgcaagt

SEQ ID NO: 1006365 - DNA, 33 bp, Homo sapien
ttcaatgaggtagttacaaaatcattgtatttg

SEQ ID NO: 1006366 - DNA, 33 bp, Homo sapien
ttcaatgaggtagttagaaaatcattgtatttg

SEQ ID NO: 1006367 - DNA, 33 bp, Homo sapien
tcatatcttcaaaagacacaggtagcattgctt

SEQ ID NO: 1006368 - DNA, 33 bp, Homo sapien
tcatatcttcaaaagagacaggtagcattgctt

SEQ ID NO: 1006369 - DNA, 33 bp, Homo sapien
gaagtacttataacgccacctggtgcatattaa

SEQ ID NO: 1006370 - DNA, 33 bp, Homo sapien
gaagtacttataacgctacctggtgcatattaa

SEQ ID NO: 1006371 - DNA, 33 bp, Homo sapien
tccacccttgaaaggaaactgacaagtttatag

SEQ ID NO: 1006372 - DNA, 33 bp, Homo sapien
tccacccttgaaaggagactgacaagtttatag

SEQ ID NO: 1006373 - DNA, 33 bp, Homo sapien
gggcagttaagaaagcaaacacttttcaaaaag

SEQ ID NO: 1006374 - DNA, 33 bp, Homo sapien
gggcagttaagaaagccaacacttttcaaaaag

SEQ ID NO: 1006375 - DNA, 33 bp, Homo sapien
gtaccttgtgagactaaatctaccgcagttagt

SEQ ID NO: 1006376 - DNA, 33 bp, Homo sapien
gtaccttgtgagactacatctaccgcagttagt

SEQ ID NO: 1006377 - DNA, 33 bp, Homo sapien
ttacaaactctgttcactaagtattcaaacagt

SEQ ID NO: 1006378 - DNA, 33 bp, Homo sapien
ttacaaactctgttcagtaagtattcaaacagt

SEQ ID NO: 1006379 - DNA, 33 bp, Homo sapien
atgaatgtgtcttagtaaatgtgtaatttgttt

SEQ ID NO: 1006380 - DNA, 33 bp, Homo sapien
atgaatgtgtcttagtgaatgtgtaatttgttt

SEQ ID NO: 1006381 - DNA, 33 bp, Homo sapien
gtgactcattaatctcacgctagagacagaatt

SEQ ID NO: 1006382 - DNA, 33 bp, Homo sapien
gtgactcattaatctcgcgctagagacagaatt

SEQ ID NO: 1006383 - DNA, 33 bp, Homo sapien
caatgtctgagcacaaaagaaaatgggtgtcag

SEQ ID NO: 1006384 - DNA, 33 bp, Homo sapien
caatgtctgagcacaagagaaaatgggtgtcag

SEQ ID NO: 1006385 - DNA, 33 bp, Homo sapien
tgtatccattatgtaaacagtattttgctatga

SEQ ID NO: 1006386 - DNA, 33 bp, Homo sapien
tgtatccattatgtaatcagtattttgctatga

SEQ ID NO: 1006387 - DNA, 33 bp, Homo sapien
ttgctacttacaattcaatgcagaaaagtgaat

SEQ ID NO: 1006388 - DNA, 33 bp, Homo sapien
ttgctacttacaattccatgcagaaaagtgaat

SEQ ID NO: 1006389 - DNA, 33 bp, Homo sapien
ttccaggccatgccacacatttctgtgctgaaa

SEQ ID NO: 1006390 - DNA, 33 bp, Homo sapien
ttccaggccatgccacgcatttctgtgctgaaa

SEQ ID NO: 1006391 - DNA, 33 bp, Homo sapien
aagacaaaggcacttacagcaattacactttcg

SEQ ID NO: 1006392 - DNA, 33 bp, Homo sapien
aagacaaaggcacttagagcaattacactttcg

SEQ ID NO: 1006393 - DNA, 33 bp, Homo sapien
ataatttgctcctttgaatgcccaagtgaatga

SEQ ID NO: 1006394 - DNA, 33 bp, Homo sapien
ataatttgctcctttgtatgcccaagtgaatga

SEQ ID NO: 1006395 - DNA, 33 bp, Homo sapien
ctggctatcacagggaagaaataagtgtaattc

SEQ ID NO: 1006396 - DNA, 33 bp, Homo sapien
ctggctatcacagggaggaaataagtgtaattc

SEQ ID NO: 1006397 - DNA, 33 bp, Homo sapien
atagcacaaggctgaaatgtacattgttgttcc

SEQ ID NO: 1006398 - DNA, 33 bp, Homo sapien
atagcacaaggctgaagtgtacattgttgttcc

SEQ ID NO: 1006399 - DNA, 33 bp, Homo sapien
tgttcccatttccgagaacataataagcagctt

SEQ ID NO: 1006400 - DNA, 33 bp, Homo sapien
tgttcccatttccgaggacataataagcagctt

SEQ ID NO: 1006401 - DNA, 33 bp, Homo sapien
ttcccaacacaagaaagtatgaagatttgaagt

SEQ ID NO: 1006402 - DNA, 33 bp, Homo sapien
ttcccaacacaagaaattatgaagatttgaagt

SEQ ID NO: 1006403 - DNA, 33 bp, Homo sapien
aaaatgtagaagatatcagatcattttcattct

SEQ ID NO: 1006404 - DNA, 33 bp, Homo sapien
aaaatgtagaagatattagatcattttcattct

SEQ ID NO: 1006405 - DNA, 33 bp, Homo sapien
acagctttagtgtaaacttgtttgtgtgactca

SEQ ID NO: 1006406 - DNA, 33 bp, Homo sapien
acagctttagtgtaaatttgtttgtgtgactca

SEQ ID NO: 1006407 - DNA, 33 bp, Homo sapien
ttcttaaatgctatcaatgaatgctgctcagtt

SEQ ID NO: 1006408 - DNA, 33 bp, Homo sapien
ttcttaaatgctatcattgaatgctgctcagtt

SEQ ID NO: 1006409 - DNA, 33 bp, Homo sapien
gaagagaaacaatgaaaatctgacaaagccatg

SEQ ID NO: 1006410 - DNA, 33 bp, Homo sapien
gaagagaaacaatgaagatctgacaaagccatg

SEQ ID NO: 1006411 - DNA, 33 bp, Homo sapien
aataaacatatacagaagtctacattccaaaaa

SEQ ID NO: 1006412 - DNA, 33 bp, Homo sapien
aataaacatatacagacgtctacattccaaaaa

SEQ ID NO: 1006413 - DNA, 33 bp, Homo sapien
tagagtgagattctgaccataggacatgaaatg

SEQ ID NO: 1006414 - DNA, 33 bp, Homo sapien
tagagtgagattctgatcataggacatgaaatg

SEQ ID NO: 1006415 - DNA, 33 bp, Homo sapien
actactttggattccccctattgtctgtaatca

SEQ ID NO: 1006416 - DNA, 33 bp, Homo sapien
actactttggattccctctattgtctgtaatca

SEQ ID NO: 1006417 - DNA, 33 bp, Homo sapien
tgatttggcgaatacactcttcttgattacaga

SEQ ID NO: 1006418 - DNA, 33 bp, Homo sapien
tgatttggcgaatacattcttcttgattacaga

SEQ ID NO: 1006419 - DNA, 33 bp, Homo sapien
ctatacctagcgtaaaggtgagttactcagccc

SEQ ID NO: 1006420 - DNA, 33 bp, Homo sapien
ctatacctagcgtaaatgtgagttactcagccc

SEQ ID NO: 1006421 - DNA, 33 bp, Homo sapien
ggaagcaacttaatcaaaggaacaaagcaaact

SEQ ID NO: 1006422 - DNA, 33 bp, Homo sapien
ggaagcaacttaatcagaggaacaaagcaaact

SEQ ID NO: 1006423 - DNA, 33 bp, Homo sapien
aagtgacccatcctgaatcaattgccatgggga

SEQ ID NO: 1006424 - DNA, 33 bp, Homo sapien
aagtgacccatcctgagtcaattgccatgggga

SEQ ID NO: 1006425 - DNA, 33 bp, Homo sapien
ttatctttggtatgcacagagaaatgtaaatag

SEQ ID NO: 1006426 - DNA, 33 bp, Homo sapien
ttatctttggtatgcagagagaaatgtaaatag

SEQ ID NO: 1006427 - DNA, 33 bp, Homo sapien
catgctaaatctaacaaacattcttctgggtgt

SEQ ID NO: 1006428 - DNA, 33 bp, Homo sapien
catgctaaatctaacacacattcttctgggtgt

SEQ ID NO: 1006429 - DNA, 33 bp, Homo sapien
tatagtttagttagtactacaccagcattcagc

SEQ ID NO: 1006430 - DNA, 33 bp, Homo sapien
tatagtttagttagtattacaccagcattcagc

SEQ ID NO: 1006431 - DNA, 33 bp, Homo sapien
ataactatatgtgaaacaatgaaactggacctg

SEQ ID NO: 1006432 - DNA, 33 bp, Homo sapien
ataactatatgtgaaagaatgaaactggacctg

SEQ ID NO: 1006433 - DNA, 33 bp, Homo sapien
gtctacaactgtgtgacattcccaagagcaagg

SEQ ID NO: 1006434 - DNA, 33 bp, Homo sapien
gtctacaactgtgtgatattcccaagagcaagg

SEQ ID NO: 1006435 - DNA, 33 bp, Homo sapien
tataaggagctcaaaaactctgcaggaaaaaat

SEQ ID NO: 1006436 - DNA, 33 bp, Homo sapien
tataaggagctcaaaacctctgcaggaaaaaat

SEQ ID NO: 1006437 - DNA, 33 bp, Homo sapien
tgtcactgccatttggacaatatatagatgagg

SEQ ID NO: 1006438 - DNA, 33 bp, Homo sapien
tgtcactgccatttgggcaatatatagatgagg

SEQ ID NO: 1006439 - DNA, 33 bp, Homo sapien
atactgtctatggcaaatacctcgatcgatcag

SEQ ID NO: 1006440 - DNA, 33 bp, Homo sapien
atactgtctatggcaagtacctcgatcgatcag

SEQ ID NO: 1006441 - DNA, 33 bp, Homo sapien
ttccaaacttaagctacattccttcaccaccac

SEQ ID NO: 1006442 - DNA, 33 bp, Homo sapien
ttccaaacttaagctatattccttcaccaccac

SEQ ID NO: 1006443 - DNA, 33 bp, Homo sapien
gtgaacccatccagtgacaagcataaaaatgag

SEQ ID NO: 1006444 - DNA, 33 bp, Homo sapien
gtgaacccatccagtggcaagcataaaaatgag

SEQ ID NO: 1006445 - DNA, 33 bp, Homo sapien
attgaattttctggtgaatgaccaaagtcaatc

SEQ ID NO: 1006446 - DNA, 33 bp, Homo sapien
attgaattttctggtgtatgaccaaagtcaatc

SEQ ID NO: 1006447 - DNA, 33 bp, Homo sapien
ttagagatgggcaaaagtgtgtggaatggcaaa

SEQ ID NO: 1006448 - DNA, 33 bp, Homo sapien
ttagagatgggcaaaattgtgtggaatggcaaa

SEQ ID NO: 1006449 - DNA, 33 bp, Homo sapien
cattcagatgacgaaaaaagaatttctaaaagg

SEQ ID NO: 1006450 - DNA, 33 bp, Homo sapien
cattcagatgacgaaagaagaatttctaaaagg

SEQ ID NO: 1006451 - DNA, 33 bp, Homo sapien
gcccaggtataagcacagagctatatcatgtat

SEQ ID NO: 1006452 - DNA, 33 bp, Homo sapien
gcccaggtataagcactgagctatatcatgtat

SEQ ID NO: 1006453 - DNA, 33 bp, Homo sapien
aaccagctgatgggtacgaaccactattccaag

SEQ ID NO: 1006454 - DNA, 33 bp, Homo sapien
aaccagctgatgggtatgaaccactattccaag

SEQ ID NO: 1006455 - DNA, 33 bp, Homo sapien
agacagcaacagtagacaggtaactgttgggca

SEQ ID NO: 1006456 - DNA, 33 bp, Homo sapien
agacagcaacagtagataggtaactgttgggca

SEQ ID NO: 1006457 - DNA, 33 bp, Homo sapien
ccatttcaatattctcaaaatccaaacttaccc

SEQ ID NO: 1006458 - DNA, 33 bp, Homo sapien
ccatttcaatattctcgaaatccaaacttaccc

SEQ ID NO: 1006459 - DNA, 33 bp, Homo sapien
agatctcccccattcagtctaccaacacatgct

SEQ ID NO: 1006460 - DNA, 33 bp, Homo sapien
agatctcccccattcattctaccaacacatgct

SEQ ID NO: 1006461 - DNA, 33 bp, Homo sapien
gcctacacgtggctcaatcaagctctgtcactt

SEQ ID NO: 1006462 - DNA, 33 bp, Homo sapien
gcctacacgtggctcagtcaagctctgtcactt

SEQ ID NO: 1006463 - DNA, 33 bp, Homo sapien
ctgatgcttgtttatgccaagattcagcatatc

SEQ ID NO: 1006464 - DNA, 33 bp, Homo sapien
ctgatgcttgtttatggcaagattcagcatatc

SEQ ID NO: 1006465 - DNA, 33 bp, Homo sapien
attattagcttcatttcaaagttgttgcaagag

SEQ ID NO: 1006466 - DNA, 33 bp, Homo sapien
attattagcttcattttaaagttgttgcaagag

SEQ ID NO: 1006467 - DNA, 33 bp, Homo sapien
cttaacataaaagagaagaatgcatcagattca

SEQ ID NO: 1006468 - DNA, 33 bp, Homo sapien
cttaacataaaagagaggaatgcatcagattca

SEQ ID NO: 1006469 - DNA, 33 bp, Homo sapien
tccctgaacatagtaactgaattgcagtacaga

SEQ ID NO: 1006470 - DNA, 33 bp, Homo sapien
tccctgaacatagtaagtgaattgcagtacaga

SEQ ID NO: 1006471 - DNA, 33 bp, Homo sapien
gtattgtgcacacagaaggcaaaataatcatat

SEQ ID NO: 1006472 - DNA, 33 bp, Homo sapien
gtattgtgcacacagagggcaaaataatcatat

SEQ ID NO: 1006473 - DNA, 33 bp, Homo sapien
tatttccactgttttaacttttgacactcacca

SEQ ID NO: 1006474 - DNA, 33 bp, Homo sapien
tatttccactgttttatcttttgacactcacca

SEQ ID NO: 1006475 - DNA, 33 bp, Homo sapien
ttctttctaatgtccaacccactgacatcctat

SEQ ID NO: 1006476 - DNA, 33 bp, Homo sapien
ttctttctaatgtccaccccactgacatcctat

SEQ ID NO: 1006477 - DNA, 33 bp, Homo sapien
agcaaggggcaattatcagttcattaatgtgta

SEQ ID NO: 1006478 - DNA, 33 bp, Homo sapien
agcaaggggcaattatgagttcattaatgtgta

SEQ ID NO: 1006479 - DNA, 33 bp, Homo sapien
tcatgtaagtgaaggacgattactgttgcttta

SEQ ID NO: 1006480 - DNA, 33 bp, Homo sapien
tcatgtaagtgaaggatgattactgttgcttta

SEQ ID NO: 1006481 - DNA, 33 bp, Homo sapien
tttctaagacgtttagaagttaattagccattc

SEQ ID NO: 1006482 - DNA, 33 bp, Homo sapien
tttctaagacgtttaggagttaattagccattc

SEQ ID NO: 1006483 - DNA, 33 bp, Homo sapien
gtattcactatctttcaacgttttcccaaagca

SEQ ID NO: 1006484 - DNA, 33 bp, Homo sapien
gtattcactatctttcgacgttttcccaaagca

SEQ ID NO: 1006485 - DNA, 33 bp, Homo sapien
taagtggaaagtatgggatgttttattttgcat

SEQ ID NO: 1006486 - DNA, 33 bp, Homo sapien
taagtggaaagtatggtatgttttattttgcat

SEQ ID NO: 1006487 - DNA, 33 bp, Homo sapien
taacacagtggaactcagaacaccaaaacttcc

SEQ ID NO: 1006488 - DNA, 33 bp, Homo sapien
taacacagtggaactcggaacaccaaaacttcc

SEQ ID NO: 1006489 - DNA, 33 bp, Homo sapien
gtgggaccttcttcaagtagccaggctatcatt

SEQ ID NO: 1006490 - DNA, 33 bp, Homo sapien
gtgggaccttcttcaattagccaggctatcatt

SEQ ID NO: 1006491 - DNA, 33 bp, Homo sapien
cctaacaagaataccacgtacaattgcggtaaa

SEQ ID NO: 1006492 - DNA, 33 bp, Homo sapien
cctaacaagaataccatgtacaattgcggtaaa

SEQ ID NO: 1006493 - DNA, 33 bp, Homo sapien
gctgctttatgtggctaaaacttaatcatgatc

SEQ ID NO: 1006494 - DNA, 33 bp, Homo sapien
gctgctttatgtggctgaaacttaatcatgatc

SEQ ID NO: 1006495 - DNA, 33 bp, Homo sapien
ttttgaaagtgacgacagaacaatgagtaggtg

SEQ ID NO: 1006496 - DNA, 33 bp, Homo sapien
ttttgaaagtgacgacggaacaatgagtaggtg

SEQ ID NO: 1006497 - DNA, 33 bp, Homo sapien
ttcattgattttttaacagtcctggttttcctt

SEQ ID NO: 1006498 - DNA, 33 bp, Homo sapien
ttcattgattttttaagagtcctggttttcctt

SEQ ID NO: 1006499 - DNA, 33 bp, Homo sapien
aaactgacttgcagtccctggaaacccttttat

SEQ ID NO: 1006500 - DNA, 33 bp, Homo sapien
aaactgacttgcagtcgctggaaacccttttat

SEQ ID NO: 1006501 - DNA, 33 bp, Homo sapien
acacgatcaaccactacgcataccttctatgtg

SEQ ID NO: 1006502 - DNA, 33 bp, Homo sapien
acacgatcaaccactatgcataccttctatgtg

SEQ ID NO: 1006503 - DNA, 33 bp, Homo sapien
atagagagaaacccgacggagtccagtagcctc

SEQ ID NO: 1006504 - DNA, 33 bp, Homo sapien
atagagagaaacccgatggagtccagtagcctc

SEQ ID NO: 1006505 - DNA, 33 bp, Homo sapien
actgaattcaaggtcaaacgaaaaatttactta

SEQ ID NO: 1006506 - DNA, 33 bp, Homo sapien
actgaattcaaggtcagacgaaaaatttactta

SEQ ID NO: 1006507 - DNA, 33 bp, Homo sapien
tcttgaaaagaggttacgttaatcaaaagaggg

SEQ ID NO: 1006508 - DNA, 33 bp, Homo sapien
tcttgaaaagaggttaggttaatcaaaagaggg

SEQ ID NO: 1006509 - DNA, 33 bp, Homo sapien
gttcctaatatccaggaacggagaggatgatct

SEQ ID NO: 1006510 - DNA, 33 bp, Homo sapien
gttcctaatatccagggacggagaggatgatct

SEQ ID NO: 1006511 - DNA, 33 bp, Homo sapien
tcattaccccaagaccaatagcctagctttata

SEQ ID NO: 1006512 - DNA, 33 bp, Homo sapien
tcattaccccaagaccgatagcctagctttata

SEQ ID NO: 1006513 - DNA, 33 bp, Homo sapien
aacacaacttctggaaataacagaatctataaa

SEQ ID NO: 1006514 - DNA, 33 bp, Homo sapien
aacacaacttctggaactaacagaatctataaa

SEQ ID NO: 1006515 - DNA, 33 bp, Homo sapien
atgcgttgaaatcagaaaacatttcctcttcca

SEQ ID NO: 1006516 - DNA, 33 bp, Homo sapien
atgcgttgaaatcagagaacatttcctcttcca

SEQ ID NO: 1006517 - DNA, 33 bp, Homo sapien
aatgagaaaaatcacaagaacatttgaagaaat

SEQ ID NO: 1006518 - DNA, 33 bp, Homo sapien
aatgagaaaaatcacaggaacatttgaagaaat

SEQ ID NO: 1006519 - DNA, 33 bp, Homo sapien
gaattctaaatccatccaaatgatcaatcaaat

SEQ ID NO: 1006520 - DNA, 33 bp, Homo sapien
gaattctaaatccatcgaaatgatcaatcaaat

SEQ ID NO: 1006521 - DNA, 33 bp, Homo sapien
tcttagatatgcaagaccttaaaatatttatat

SEQ ID NO: 1006522 - DNA, 33 bp, Homo sapien
tcttagatatgcaagagcttaaaatatttatat

SEQ ID NO: 1006523 - DNA, 33 bp, Homo sapien
aacaagaatgaagataaaaagatgtctgtgaat

SEQ ID NO: 1006524 - DNA, 33 bp, Homo sapien
aacaagaatgaagatagaaagatgtctgtgaat

SEQ ID NO: 1006525 - DNA, 33 bp, Homo sapien
gaatacaatgtatgcaataataagcacatggac

SEQ ID NO: 1006526 - DNA, 33 bp, Homo sapien
gaatacaatgtatgcagtaataagcacatggac

SEQ ID NO: 1006527 - DNA, 33 bp, Homo sapien
agagtaaaactaggcacctatcttttgccttgt

SEQ ID NO: 1006528 - DNA, 33 bp, Homo sapien
agagtaaaactaggcagctatcttttgccttgt

SEQ ID NO: 1006529 - DNA, 33 bp, Homo sapien
tttattttcaatcaaacgtgtctttctaggtga

SEQ ID NO: 1006530 - DNA, 33 bp, Homo sapien
tttattttcaatcaaatgtgtctttctaggtga

SEQ ID NO: 1006531 - DNA, 33 bp, Homo sapien
taggaggtgaggatacagaagagacacctgagg

SEQ ID NO: 1006532 - DNA, 33 bp, Homo sapien
taggaggtgaggatacggaagagacacctgagg

SEQ ID NO: 1006533 - DNA, 33 bp, Homo sapien
ccctactccagggccaagtctcaacattcactg

SEQ ID NO: 1006534 - DNA, 33 bp, Homo sapien
ccctactccagggccaggtctcaacattcactg

SEQ ID NO: 1006535 - DNA, 33 bp, Homo sapien
cttagccacagaagaaatcaccaggcagagttc

SEQ ID NO: 1006536 - DNA, 33 bp, Homo sapien
cttagccacagaagaagtcaccaggcagagttc

SEQ ID NO: 1006537 - DNA, 33 bp, Homo sapien
tatggctctactctcactatatacaaatggtga

SEQ ID NO: 1006538 - DNA, 33 bp, Homo sapien
tatggctctactctcagtatatacaaatggtga

SEQ ID NO: 1006539 - DNA, 33 bp, Homo sapien
actataaaacttgatgacagacgagccaaaatc

SEQ ID NO: 1006540 - DNA, 33 bp, Homo sapien
actataaaacttgatggcagacgagccaaaatc

SEQ ID NO: 1006541 - DNA, 33 bp, Homo sapien
cagtttgtgcacaatcaatcttcatcacaagtg

SEQ ID NO: 1006542 - DNA, 33 bp, Homo sapien
cagtttgtgcacaatcgatcttcatcacaagtg

SEQ ID NO: 1006543 - DNA, 33 bp, Homo sapien
aatgaaagaaaaatcaaaccactagtaagtgaa

SEQ ID NO: 1006544 - DNA, 33 bp, Homo sapien
aatgaaagaaaaatcagaccactagtaagtgaa

SEQ ID NO: 1006545 - DNA, 33 bp, Homo sapien
cccaaggttattctgcacttctttgtcctacgt

SEQ ID NO: 1006546 - DNA, 33 bp, Homo sapien
cccaaggttattctgcccttctttgtcctacgt

SEQ ID NO: 1006547 - DNA, 33 bp, Homo sapien
tcttagagactggtcaaatagttgtgacaaaaa

SEQ ID NO: 1006548 - DNA, 33 bp, Homo sapien
tcttagagactggtcagatagttgtgacaaaaa

SEQ ID NO: 1006549 - DNA, 33 bp, Homo sapien
tgtttatctatagcaacgcaagaatagcctaat

SEQ ID NO: 1006550 - DNA, 33 bp, Homo sapien
tgtttatctatagcaatgcaagaatagcctaat

SEQ ID NO: 1006551 - DNA, 33 bp, Homo sapien
atgaaaccacaaagtacgtaaccttttgagaag

SEQ ID NO: 1006552 - DNA, 33 bp, Homo sapien
atgaaaccacaaagtatgtaaccttttgagaag

SEQ ID NO: 1006553 - DNA, 33 bp, Homo sapien
tcattgcttgtgcctcaaattccattgttcaca

SEQ ID NO: 1006554 - DNA, 33 bp, Homo sapien
tcattgcttgtgcctcgaattccattgttcaca

SEQ ID NO: 1006555 - DNA, 33 bp, Homo sapien
ttcctaaccattgtacacatagtagtttaaagc

SEQ ID NO: 1006556 - DNA, 33 bp, Homo sapien
ttcctaaccattgtacccatagtagtttaaagc

SEQ ID NO: 1006557 - DNA, 33 bp, Homo sapien
tactggatgatggctaggttgttatgaaaaaaa

SEQ ID NO: 1006558 - DNA, 33 bp, Homo sapien
tactggatgatggctatgttgttatgaaaaaaa

SEQ ID NO: 1006559 - DNA, 33 bp, Homo sapien
ggtaaccattgcctaacaacaacttaccagcta

SEQ ID NO: 1006560 - DNA, 33 bp, Homo sapien
ggtaaccattgcctaagaacaacttaccagcta

SEQ ID NO: 1006561 - DNA, 33 bp, Homo sapien
ctagatttacaaaacaatgacaacaaatataac

SEQ ID NO: 1006562 - DNA, 33 bp, Homo sapien
ctagatttacaaaacagtgacaacaaatataac

SEQ ID NO: 1006563 - DNA, 33 bp, Homo sapien
ggtgattagactcaaactgatgatagaagctca

SEQ ID NO: 1006564 - DNA, 33 bp, Homo sapien
ggtgattagactcaaattgatgatagaagctca

SEQ ID NO: 1006565 - DNA, 33 bp, Homo sapien
ttatagtctagcgataaaagactagaatggcca

SEQ ID NO: 1006566 - DNA, 33 bp, Homo sapien
ttatagtctagcgatagaagactagaatggcca

SEQ ID NO: 1006567 - DNA, 33 bp, Homo sapien
tatctctaatctcaaccgagtgcccaatgcaat

SEQ ID NO: 1006568 - DNA, 33 bp, Homo sapien
tatctctaatctcaacggagtgcccaatgcaat

SEQ ID NO: 1006569 - DNA, 33 bp, Homo sapien
atatcttcctgttatcacataagcactgggaaa

SEQ ID NO: 1006570 - DNA, 33 bp, Homo sapien
atatcttcctgttatctcataagcactgggaaa

SEQ ID NO: 1006571 - DNA, 33 bp, Homo sapien
aatatgaaaaaaattaccaattcaaggccgaaa

SEQ ID NO: 1006572 - DNA, 33 bp, Homo sapien
aatatgaaaaaaattagcaattcaaggccgaaa

SEQ ID NO: 1006573 - DNA, 33 bp, Homo sapien
gttaccttattatgcaagtaaagtatcccaggt

SEQ ID NO: 1006574 - DNA, 33 bp, Homo sapien
gttaccttattatgcaggtaaagtatcccaggt

SEQ ID NO: 1006575 - DNA, 33 bp, Homo sapien
catcaccctgcccaaaagtttttgttgtaatct

SEQ ID NO: 1006576 - DNA, 33 bp, Homo sapien
catcaccctgcccaaacgtttttgttgtaatct

SEQ ID NO: 1006577 - DNA, 33 bp, Homo sapien
attagcgacttacttaaaggcatttctgtctac

SEQ ID NO: 1006578 - DNA, 33 bp, Homo sapien
attagcgacttacttacaggcatttctgtctac

SEQ ID NO: 1006579 - DNA, 33 bp, Homo sapien
gcaagatggccaaatacaactctctaggtatca

SEQ ID NO: 1006580 - DNA, 33 bp, Homo sapien
gcaagatggccaaatagaactctctaggtatca

SEQ ID NO: 1006581 - DNA, 33 bp, Homo sapien
ggatgccctgtacttacatttgctaaatctgtc

SEQ ID NO: 1006582 - DNA, 33 bp, Homo sapien
ggatgccctgtacttatatttgctaaatctgtc

SEQ ID NO: 1006583 - DNA, 33 bp, Homo sapien
atactttacacaataccgtatgatcactcactg

SEQ ID NO: 1006584 - DNA, 33 bp, Homo sapien
atactttacacaatactgtatgatcactcactg

SEQ ID NO: 1006585 - DNA, 33 bp, Homo sapien
agccatttaggaattgcattattgtctcataaa

SEQ ID NO: 1006586 - DNA, 33 bp, Homo sapien
agccatttaggaattggattattgtctcataaa

SEQ ID NO: 1006587 - DNA, 33 bp, Homo sapien
tgttgctttaacatggaaactgaatttcagtga

SEQ ID NO: 1006588 - DNA, 33 bp, Homo sapien
tgttgctttaacatgggaactgaatttcagtga

SEQ ID NO: 1006589 - DNA, 33 bp, Homo sapien
caaccatgtgctactaccaaagtacgatccaca

SEQ ID NO: 1006590 - DNA, 33 bp, Homo sapien
caaccatgtgctactatcaaagtacgatccaca

SEQ ID NO: 1006591 - DNA, 33 bp, Homo sapien
gtaaaaactccctggcgactatctgtgttctct

SEQ ID NO: 1006592 - DNA, 33 bp, Homo sapien
gtaaaaactccctggctactatctgtgttctct

SEQ ID NO: 1006593 - DNA, 33 bp, Homo sapien
acaagcacctctatggccaccactactatgact

SEQ ID NO: 1006594 - DNA, 33 bp, Homo sapien
acaagcacctctatggtcaccactactatgact

SEQ ID NO: 1006595 - DNA, 33 bp, Homo sapien
tgacaaacagacctaccaaaatgtgctcgacat

SEQ ID NO: 1006596 - DNA, 33 bp, Homo sapien
tgacaaacagacctacgaaaatgtgctcgacat

SEQ ID NO: 1006597 - DNA, 33 bp, Homo sapien
ctgaagagatatttgcactcttgtatttgttgc

SEQ ID NO: 1006598 - DNA, 33 bp, Homo sapien
ctgaagagatatttgcgctcttgtatttgttgc

SEQ ID NO: 1006599 - DNA, 33 bp, Homo sapien
tccataaatcttcttccacaatgtggctatgtt

SEQ ID NO: 1006600 - DNA, 33 bp, Homo sapien
tccataaatcttcttctacaatgtggctatgtt

SEQ ID NO: 1006601 - DNA, 33 bp, Homo sapien
tatcggtgatgtgtaaaaaactatttgactttt

SEQ ID NO: 1006602 - DNA, 33 bp, Homo sapien
tatcggtgatgtgtaagaaactatttgactttt

SEQ ID NO: 1006603 - DNA, 33 bp, Homo sapien
cccaacagtcacccaaagtcttaattcatttca

SEQ ID NO: 1006604 - DNA, 33 bp, Homo sapien
cccaacagtcacccaacgtcttaattcatttca

SEQ ID NO: 1006605 - DNA, 33 bp, Homo sapien
ctttcgttgatttttaaatatgcatcaggcagt

SEQ ID NO: 1006606 - DNA, 33 bp, Homo sapien
ctttcgttgatttttagatatgcatcaggcagt

SEQ ID NO: 1006607 - DNA, 33 bp, Homo sapien
gatttgatgcagacaaaagtaaaagcatagtga

SEQ ID NO: 1006608 - DNA, 33 bp, Homo sapien
gatttgatgcagacaacagtaaaagcatagtga

SEQ ID NO: 1006609 - DNA, 33 bp, Homo sapien
aaactgaatcatagccaagagaagcactcttcc

SEQ ID NO: 1006610 - DNA, 33 bp, Homo sapien
aaactgaatcatagccgagagaagcactcttcc

SEQ ID NO: 1006611 - DNA, 33 bp, Homo sapien
agaggattgcttgcagaaatcagataacaaagc

SEQ ID NO: 1006612 - DNA, 33 bp, Homo sapien
agaggattgcttgcaggaatcagataacaaagc

SEQ ID NO: 1006613 - DNA, 33 bp, Homo sapien
tggatattgtgaaaaacaggcagacactggttt

SEQ ID NO: 1006614 - DNA, 33 bp, Homo sapien
tggatattgtgaaaaagaggcagacactggttt

SEQ ID NO: 1006615 - DNA, 33 bp, Homo sapien
tttcttcttaaaatgacgtagcacaacccttct

SEQ ID NO: 1006616 - DNA, 33 bp, Homo sapien
tttcttcttaaaatgatgtagcacaacccttct

SEQ ID NO: 1006617 - DNA, 33 bp, Homo sapien
caatttagctttatgcaagaagaaatttagcca

SEQ ID NO: 1006618 - DNA, 33 bp, Homo sapien
caatttagctttatgcgagaagaaatttagcca

SEQ ID NO: 1006619 - DNA, 33 bp, Homo sapien
taaatgctttacataacacctagcatattattt

SEQ ID NO: 1006620 - DNA, 33 bp, Homo sapien
taaatgctttacataagacctagcatattattt

SEQ ID NO: 1006621 - DNA, 33 bp, Homo sapien
ttgtcttaaatatatacgccaaattgccagtgc

SEQ ID NO: 1006622 - DNA, 33 bp, Homo sapien
ttgtcttaaatatatatgccaaattgccagtgc

SEQ ID NO: 1006623 - DNA, 33 bp, Homo sapien
agagacagtgttcaacccactaaaattactgaa

SEQ ID NO: 1006624 - DNA, 33 bp, Homo sapien
agagacagtgttcaacgcactaaaattactgaa

SEQ ID NO: 1006625 - DNA, 33 bp, Homo sapien
ccagatccagcctagaagtggaaatattatttt

SEQ ID NO: 1006626 - DNA, 33 bp, Homo sapien
ccagatccagcctagaggtggaaatattatttt

SEQ ID NO: 1006627 - DNA, 33 bp, Homo sapien
ggttaatcctcacgtacacagctcctcacttgg

SEQ ID NO: 1006628 - DNA, 33 bp, Homo sapien
ggttaatcctcacgtagacagctcctcacttgg

SEQ ID NO: 1006629 - DNA, 33 bp, Homo sapien
gccagatgtggcctagaaaaggagtcatcgact

SEQ ID NO: 1006630 - DNA, 33 bp, Homo sapien
gccagatgtggcctaggaaaggagtcatcgact

SEQ ID NO: 1006631 - DNA, 33 bp, Homo sapien
aagtgatgggataaccaatgccagatgtggcct

SEQ ID NO: 1006632 - DNA, 33 bp, Homo sapien
aagtgatgggataaccgatgccagatgtggcct

SEQ ID NO: 1006633 - DNA, 33 bp, Homo sapien
gaatgggagtaaagtaaagcagatttttcattg

SEQ ID NO: 1006634 - DNA, 33 bp, Homo sapien
gaatgggagtaaagtagagcagatttttcattg

SEQ ID NO: 1006635 - DNA, 33 bp, Homo sapien
cctgactctggtcatactatcttcatattgctt

SEQ ID NO: 1006636 - DNA, 33 bp, Homo sapien
cctgactctggtcatagtatcttcatattgctt

SEQ ID NO: 1006637 - DNA, 33 bp, Homo sapien
ataacaatatgcattgaaaggtagaatatacca

SEQ ID NO: 1006638 - DNA, 33 bp, Homo sapien
ataacaatatgcattgtaaggtagaatatacca

SEQ ID NO: 1006639 - DNA, 33 bp, Homo sapien
ggttgcaaactctttgaaggatgagactcagca

SEQ ID NO: 1006640 - DNA, 33 bp, Homo sapien
ggttgcaaactctttgcaggatgagactcagca

SEQ ID NO: 1006641 - DNA, 33 bp, Homo sapien
caaggtggtcaaggcacagcttagttttatata

SEQ ID NO: 1006642 - DNA, 33 bp, Homo sapien
caaggtggtcaaggcagagcttagttttatata

SEQ ID NO: 1006643 - DNA, 33 bp, Homo sapien
ctttctggctacttcccgctgacgaggcgatgg

SEQ ID NO: 1006644 - DNA, 33 bp, Homo sapien
ctttctggctacttcctgctgacgaggcgatgg

SEQ ID NO: 1006645 - DNA, 33 bp, Homo sapien
cttaaacaattgaacaagctaaaaacaaccctg

SEQ ID NO: 1006646 - DNA, 33 bp, Homo sapien
cttaaacaattgaacacgctaaaaacaaccctg

SEQ ID NO: 1006647 - DNA, 33 bp, Homo sapien
caaagcaatgtacagaatcaaagttattcctgt

SEQ ID NO: 1006648 - DNA, 33 bp, Homo sapien
caaagcaatgtacagattcaaagttattcctgt

SEQ ID NO: 1006649 - DNA, 33 bp, Homo sapien
gagccttgcctagctacgagtagtgagggtgag

SEQ ID NO: 1006650 - DNA, 33 bp, Homo sapien
gagccttgcctagctaggagtagtgagggtgag

SEQ ID NO: 1006651 - DNA, 33 bp, Homo sapien
gacatggatggagttgaaattcattatcttcag

SEQ ID NO: 1006652 - DNA, 33 bp, Homo sapien
gacatggatggagttggaattcattatcttcag

SEQ ID NO: 1006653 - DNA, 33 bp, Homo sapien
agagcctaatcagttacggtaaatggatgttac

SEQ ID NO: 1006654 - DNA, 33 bp, Homo sapien
agagcctaatcagttatggtaaatggatgttac

SEQ ID NO: 1006655 - DNA, 33 bp, Homo sapien
cagacacaggtatccaatgaaagagtgggctag

SEQ ID NO: 1006656 - DNA, 33 bp, Homo sapien
cagacacaggtatccagtgaaagagtgggctag

SEQ ID NO: 1006657 - DNA, 33 bp, Homo sapien
agagaatacaaaattacagagtcagtagaaagt

SEQ ID NO: 1006658 - DNA, 33 bp, Homo sapien
agagaatacaaaattatagagtcagtagaaagt

SEQ ID NO: 1006659 - DNA, 33 bp, Homo sapien
acatgaaatttatgtcaatttacactgtatata

SEQ ID NO: 1006660 - DNA, 33 bp, Homo sapien
acatgaaatttatgtctatttacactgtatata

SEQ ID NO: 1006661 - DNA, 33 bp, Homo sapien
attaaccagtactagaatattgatccagtttta

SEQ ID NO: 1006662 - DNA, 33 bp, Homo sapien
attaaccagtactagagtattgatccagtttta

SEQ ID NO: 1006663 - DNA, 33 bp, Homo sapien
tgaaaaccctaagtgcaagtagggacattgtgc

SEQ ID NO: 1006664 - DNA, 33 bp, Homo sapien
tgaaaaccctaagtgcgagtagggacattgtgc

SEQ ID NO: 1006665 - DNA, 33 bp, Homo sapien
cagcatgagttagggaagagaatttttgtttgt

SEQ ID NO: 1006666 - DNA, 33 bp, Homo sapien
cagcatgagttagggatgagaatttttgtttgt

SEQ ID NO: 1006667 - DNA, 33 bp, Homo sapien
attaaaatgtaaaaaaataagatgctggcaagg

SEQ ID NO: 1006668 - DNA, 33 bp, Homo sapien
attaaaatgtaaaaaattaagatgctggcaagg

SEQ ID NO: 1006669 - DNA, 33 bp, Homo sapien
ggagtgtcccacagtaaagagacacaatagcat

SEQ ID NO: 1006670 - DNA, 33 bp, Homo sapien
ggagtgtcccacagtacagagacacaatagcat

SEQ ID NO: 1006671 - DNA, 33 bp, Homo sapien
tgattcaatactggtacgctttatatgtctaga

SEQ ID NO: 1006672 - DNA, 33 bp, Homo sapien
tgattcaatactggtatgctttatatgtctaga

SEQ ID NO: 1006673 - DNA, 33 bp, Homo sapien
aagtccctaattccagaccttaacttctgaata

SEQ ID NO: 1006674 - DNA, 33 bp, Homo sapien
aagtccctaattccaggccttaacttctgaata

SEQ ID NO: 1006675 - DNA, 33 bp, Homo sapien
attgacagctttttccaaaatgaccaagaacaa

SEQ ID NO: 1006676 - DNA, 33 bp, Homo sapien
attgacagctttttcccaaatgaccaagaacaa

SEQ ID NO: 1006677 - DNA, 33 bp, Homo sapien
aggaagaaactctataccatttgtgtaagtcag

SEQ ID NO: 1006678 - DNA, 33 bp, Homo sapien
aggaagaaactctatagcatttgtgtaagtcag

SEQ ID NO: 1006679 - DNA, 33 bp, Homo sapien
aaacaaaacataatgaccctgacagatgcaaca

SEQ ID NO: 1006680 - DNA, 33 bp, Homo sapien
aaacaaaacataatgatcctgacagatgcaaca

SEQ ID NO: 1006681 - DNA, 33 bp, Homo sapien
gacagaactcaggagagaaacaaaggatgtccc

SEQ ID NO: 1006682 - DNA, 33 bp, Homo sapien
gacagaactcaggagataaacaaaggatgtccc

SEQ ID NO: 1006683 - DNA, 33 bp, Homo sapien
taaaaatagcctgtgaactctgattatttaaca

SEQ ID NO: 1006684 - DNA, 33 bp, Homo sapien
taaaaatagcctgtgagctctgattatttaaca

SEQ ID NO: 1006685 - DNA, 33 bp, Homo sapien
ataattgttttcataaatagattggaaatacag

SEQ ID NO: 1006686 - DNA, 33 bp, Homo sapien
ataattgttttcataattagattggaaatacag

SEQ ID NO: 1006687 - DNA, 33 bp, Homo sapien
ctaaaaatacacagacaaatcatcaggttatac

SEQ ID NO: 1006688 - DNA, 33 bp, Homo sapien
ctaaaaatacacagacgaatcatcaggttatac

SEQ ID NO: 1006689 - DNA, 33 bp, Homo sapien
cttgtgattcctttcaactatccaatatgtgta

SEQ ID NO: 1006690 - DNA, 33 bp, Homo sapien
cttgtgattcctttcagctatccaatatgtgta

SEQ ID NO: 1006691 - DNA, 33 bp, Homo sapien
agaatattaatgaatactaaaattggtgagtaa

SEQ ID NO: 1006692 - DNA, 33 bp, Homo sapien
agaatattaatgaatagtaaaattggtgagtaa

SEQ ID NO: 1006693 - DNA, 33 bp, Homo sapien
actctgttgattactcccattattgacaatgtt

SEQ ID NO: 1006694 - DNA, 33 bp, Homo sapien
actctgttgattactctcattattgacaatgtt

SEQ ID NO: 1006695 - DNA, 33 bp, Homo sapien
cactctggttcatacaactctgacacagtgatt

SEQ ID NO: 1006696 - DNA, 33 bp, Homo sapien
cactctggttcatacacctctgacacagtgatt

SEQ ID NO: 1006697 - DNA, 33 bp, Homo sapien
gatgacctccacaggaaaattgatgcactgatg

SEQ ID NO: 1006698 - DNA, 33 bp, Homo sapien
gatgacctccacaggacaattgatgcactgatg

SEQ ID NO: 1006699 - DNA, 33 bp, Homo sapien
atgatcccacagaacaaaatatgatgacctcca

SEQ ID NO: 1006700 - DNA, 33 bp, Homo sapien
atgatcccacagaacagaatatgatgacctcca

SEQ ID NO: 1006701 - DNA, 33 bp, Homo sapien
atccatgttgttgcaaatggacttccttctttt

SEQ ID NO: 1006702 - DNA, 33 bp, Homo sapien
atccatgttgttgcaattggacttccttctttt

SEQ ID NO: 1006703 - DNA, 33 bp, Homo sapien
aaccattatggatgcacagaacccgtgctcaga

SEQ ID NO: 1006704 - DNA, 33 bp, Homo sapien
aaccattatggatgcatagaacccgtgctcaga

SEQ ID NO: 1006705 - DNA, 33 bp, Homo sapien
gtgctgaggtggtgccaaccaaaagcagagtgg

SEQ ID NO: 1006706 - DNA, 33 bp, Homo sapien
gtgctgaggtggtgcccaccaaaagcagagtgg

SEQ ID NO: 1006707 - DNA, 33 bp, Homo sapien
ccagagtaattcaatcaaagcatcttgttattt

SEQ ID NO: 1006708 - DNA, 33 bp, Homo sapien
ccagagtaattcaatcgaagcatcttgttattt

SEQ ID NO: 1006709 - DNA, 33 bp, Homo sapien
tcaaagaacgttaagacagttctgcaaatagac

SEQ ID NO: 1006710 - DNA, 33 bp, Homo sapien
tcaaagaacgttaagatagttctgcaaatagac

SEQ ID NO: 1006711 - DNA, 33 bp, Homo sapien
tcctagagtccttacaaaatgtggaacagtaat

SEQ ID NO: 1006712 - DNA, 33 bp, Homo sapien
tcctagagtccttacagaatgtggaacagtaat

SEQ ID NO: 1006713 - DNA, 33 bp, Homo sapien
tctaataaagggttgacggaatcagcaaacatg

SEQ ID NO: 1006714 - DNA, 33 bp, Homo sapien
tctaataaagggttgagggaatcagcaaacatg

SEQ ID NO: 1006715 - DNA, 33 bp, Homo sapien
ccaagctgtctctaataaggtaaatggataaat

SEQ ID NO: 1006716 - DNA, 33 bp, Homo sapien
ccaagctgtctctaatgaggtaaatggataaat

SEQ ID NO: 1006717 - DNA, 33 bp, Homo sapien
caaaaaaaaatgttgacgtagctaatgagctag

SEQ ID NO: 1006718 - DNA, 33 bp, Homo sapien
caaaaaaaaatgttgatgtagctaatgagctag

SEQ ID NO: 1006719 - DNA, 33 bp, Homo sapien
tcacatgataaaactgaatttcagaggttatgt

SEQ ID NO: 1006720 - DNA, 33 bp, Homo sapien
tcacatgataaaactgtatttcagaggttatgt

SEQ ID NO: 1006721 - DNA, 33 bp, Homo sapien
caagcatttgcataccagccagcttgtgacagc

SEQ ID NO: 1006722 - DNA, 33 bp, Homo sapien
caagcatttgcataccggccagcttgtgacagc

SEQ ID NO: 1006723 - DNA, 33 bp, Homo sapien
agtacctgccaaatgacggggctgaaagagctg

SEQ ID NO: 1006724 - DNA, 33 bp, Homo sapien
agtacctgccaaatgatggggctgaaagagctg

SEQ ID NO: 1006725 - DNA, 33 bp, Homo sapien
aaagatagaagagagacggaaagaagatctgag

SEQ ID NO: 1006726 - DNA, 33 bp, Homo sapien
aaagatagaagagagatggaaagaagatctgag

SEQ ID NO: 1006727 - DNA, 33 bp, Homo sapien
atgtcaatgaaactgacgacactgaacctttaa

SEQ ID NO: 1006728 - DNA, 33 bp, Homo sapien
atgtcaatgaaactgatgacactgaacctttaa

SEQ ID NO: 1006729 - DNA, 33 bp, Homo sapien
atgattcagacccttcaaaattcaaagtttgag

SEQ ID NO: 1006730 - DNA, 33 bp, Homo sapien
atgattcagacccttcgaaattcaaagtttgag

SEQ ID NO: 1006731 - DNA, 33 bp, Homo sapien
cctggttcagaatataaccccaatgaatgaaga

SEQ ID NO: 1006732 - DNA, 33 bp, Homo sapien
cctggttcagaatatacccccaatgaatgaaga

SEQ ID NO: 1006733 - DNA, 33 bp, Homo sapien
tgagcattaaatatgacgatgagtgtaaagtgc

SEQ ID NO: 1006734 - DNA, 33 bp, Homo sapien
tgagcattaaatatgatgatgagtgtaaagtgc

SEQ ID NO: 1006735 - DNA, 33 bp, Homo sapien
tgattggggtactttgcaggaagattgtaaaga

SEQ ID NO: 1006736 - DNA, 33 bp, Homo sapien
tgattggggtactttggaggaagattgtaaaga

SEQ ID NO: 1006737 - DNA, 33 bp, Homo sapien
tattcctgcaatttggaagtacaaaatggagtg

SEQ ID NO: 1006738 - DNA, 33 bp, Homo sapien
tattcctgcaatttggcagtacaaaatggagtg

SEQ ID NO: 1006739 - DNA, 33 bp, Homo sapien
tcctaagctcatcctgcagtgccagctaaacct

SEQ ID NO: 1006740 - DNA, 33 bp, Homo sapien
tcctaagctcatcctgtagtgccagctaaacct

SEQ ID NO: 1006741 - DNA, 33 bp, Homo sapien
tgcattttttctaaccccatatttttgtcatat

SEQ ID NO: 1006742 - DNA, 33 bp, Homo sapien
tgcattttttctaaccgcatatttttgtcatat

SEQ ID NO: 1006743 - DNA, 33 bp, Homo sapien
accacatgcagcccagcagggttttgaatgcaa

SEQ ID NO: 1006744 - DNA, 33 bp, Homo sapien
accacatgcagcccaggagggttttgaatgcaa

SEQ ID NO: 1006745 - DNA, 33 bp, Homo sapien
attatgttactattaacaaggcagaaatagcca

SEQ ID NO: 1006746 - DNA, 33 bp, Homo sapien
attatgttactattaagaaggcagaaatagcca

SEQ ID NO: 1006747 - DNA, 33 bp, Homo sapien
ttctctctcttctcgaaacctaaatttgaggaa

SEQ ID NO: 1006748 - DNA, 33 bp, Homo sapien
ttctctctcttctcgatacctaaatttgaggaa

SEQ ID NO: 1006749 - DNA, 33 bp, Homo sapien
atatgtgtaaaaagtacattagccactttatat

SEQ ID NO: 1006750 - DNA, 33 bp, Homo sapien
atatgtgtaaaaagtatattagccactttatat

SEQ ID NO: 1006751 - DNA, 33 bp, Homo sapien
cagtatgtgtagcatcgctaatatttaaggttg

SEQ ID NO: 1006752 - DNA, 33 bp, Homo sapien
cagtatgtgtagcatctctaatatttaaggttg

SEQ ID NO: 1006753 - DNA, 33 bp, Homo sapien
aaaaattctggtaaccccagtggaaaatcacca

SEQ ID NO: 1006754 - DNA, 33 bp, Homo sapien
aaaaattctggtaacctcagtggaaaatcacca

SEQ ID NO: 1006755 - DNA, 33 bp, Homo sapien
ggaaccaccaagtgcacgtacccaagaaaggct

SEQ ID NO: 1006756 - DNA, 33 bp, Homo sapien
ggaaccaccaagtgcaggtacccaagaaaggct

SEQ ID NO: 1006757 - DNA, 33 bp, Homo sapien
atcattactatagacaaatcagtgagagtaata

SEQ ID NO: 1006758 - DNA, 33 bp, Homo sapien
atcattactatagacatatcagtgagagtaata

SEQ ID NO: 1006759 - DNA, 33 bp, Homo sapien
ccccaatgaaggtgtaagtcctaattagcatgt

SEQ ID NO: 1006760 - DNA, 33 bp, Homo sapien
ccccaatgaaggtgtaggtcctaattagcatgt

SEQ ID NO: 1006761 - DNA, 33 bp, Homo sapien
tcctaattagcatgtaccagcatagagtggagg

SEQ ID NO: 1006762 - DNA, 33 bp, Homo sapien
tcctaattagcatgtagcagcatagagtggagg

SEQ ID NO: 1006763 - DNA, 33 bp, Homo sapien
acatcacagcattacacccatgatatggcctag

SEQ ID NO: 1006764 - DNA, 33 bp, Homo sapien
acatcacagcattacatccatgatatggcctag

SEQ ID NO: 1006765 - DNA, 33 bp, Homo sapien
ttcttgtcagctaatccaattctgtaatggtta

SEQ ID NO: 1006766 - DNA, 33 bp, Homo sapien
ttcttgtcagctaatctaattctgtaatggtta

SEQ ID NO: 1006767 - DNA, 33 bp, Homo sapien
gcaaaatcttcagtcaataggttctaggtatga

SEQ ID NO: 1006768 - DNA, 33 bp, Homo sapien
gcaaaatcttcagtcagtaggttctaggtatga

SEQ ID NO: 1006769 - DNA, 33 bp, Homo sapien
ttgtttgctcatctgacccaattagtctgttga

SEQ ID NO: 1006770 - DNA, 33 bp, Homo sapien
ttgtttgctcatctgatccaattagtctgttga

SEQ ID NO: 1006771 - DNA, 33 bp, Homo sapien
tgctacctgcaacaaaatattataggccttttg

SEQ ID NO: 1006772 - DNA, 33 bp, Homo sapien
tgctacctgcaacaaagtattataggccttttg

SEQ ID NO: 1006773 - DNA, 33 bp, Homo sapien
tcaagaactaacactaactaccattgagagata

SEQ ID NO: 1006774 - DNA, 33 bp, Homo sapien
tcaagaactaacactacctaccattgagagata

SEQ ID NO: 1006775 - DNA, 33 bp, Homo sapien
aaggaaatctgtgaaactgttacagccatgggg

SEQ ID NO: 1006776 - DNA, 33 bp, Homo sapien
aaggaaatctgtgaaattgttacagccatgggg

SEQ ID NO: 1006777 - DNA, 33 bp, Homo sapien
tgaattcgatttgtaactatgcaacttcccagt

SEQ ID NO: 1006778 - DNA, 33 bp, Homo sapien
tgaattcgatttgtaattatgcaacttcccagt

SEQ ID NO: 1006779 - DNA, 33 bp, Homo sapien
aaactgataaagtgcaactatgaaaactataca

SEQ ID NO: 1006780 - DNA, 33 bp, Homo sapien
aaactgataaagtgcatctatgaaaactataca

SEQ ID NO: 1006781 - DNA, 33 bp, Homo sapien
acaacctgactgtggaaagtagctacccacttc

SEQ ID NO: 1006782 - DNA, 33 bp, Homo sapien
acaacctgactgtggagagtagctacccacttc

SEQ ID NO: 1006783 - DNA, 33 bp, Homo sapien
ggctggacagcatgctcacttgcccatacaaac

SEQ ID NO: 1006784 - DNA, 33 bp, Homo sapien
ggctggacagcatgctgacttgcccatacaaac

SEQ ID NO: 1006785 - DNA, 33 bp, Homo sapien
gataaattgcattgtaagttcagaataaagcat

SEQ ID NO: 1006786 - DNA, 33 bp, Homo sapien
gataaattgcattgtaggttcagaataaagcat

SEQ ID NO: 1006787 - DNA, 33 bp, Homo sapien
aacaaacatggttgtgaaaagaaatgaaaacat

SEQ ID NO: 1006788 - DNA, 33 bp, Homo sapien
aacaaacatggttgtggaaagaaatgaaaacat

SEQ ID NO: 1006789 - DNA, 33 bp, Homo sapien
tttctatgtaacaataacgcaattttattattt

SEQ ID NO: 1006790 - DNA, 33 bp, Homo sapien
tttctatgtaacaatagcgcaattttattattt

SEQ ID NO: 1006791 - DNA, 33 bp, Homo sapien
gttattactcaaatcaagtatcatcaagggctc

SEQ ID NO: 1006792 - DNA, 33 bp, Homo sapien
gttattactcaaatcaggtatcatcaagggctc

SEQ ID NO: 1006793 - DNA, 33 bp, Homo sapien
tctctcttagaaaagcaattgtgtaactgggtt

SEQ ID NO: 1006794 - DNA, 33 bp, Homo sapien
tctctcttagaaaagccattgtgtaactgggtt

SEQ ID NO: 1006795 - DNA, 33 bp, Homo sapien
ctgataagggttttagacaaaggctgttcatat

SEQ ID NO: 1006796 - DNA, 33 bp, Homo sapien
ctgataagggttttaggcaaaggctgttcatat

SEQ ID NO: 1006797 - DNA, 33 bp, Homo sapien
aagaattcacaaattacgcgacaatgtgtgcca

SEQ ID NO: 1006798 - DNA, 33 bp, Homo sapien
aagaattcacaaattaggcgacaatgtgtgcca

SEQ ID NO: 1006799 - DNA, 33 bp, Homo sapien
tttgaaaccactgaaacgcttcaacgttttctt

SEQ ID NO: 1006800 - DNA, 33 bp, Homo sapien
tttgaaaccactgaaatgcttcaacgttttctt

SEQ ID NO: 1006801 - DNA, 33 bp, Homo sapien
ttttcacacttcaaagcattgccacttagcatc

SEQ ID NO: 1006802 - DNA, 33 bp, Homo sapien
ttttcacacttcaaagtattgccacttagcatc

SEQ ID NO: 1006803 - DNA, 33 bp, Homo sapien
catcatttggcattaactaagactacctatctc

SEQ ID NO: 1006804 - DNA, 33 bp, Homo sapien
catcatttggcattaattaagactacctatctc

SEQ ID NO: 1006805 - DNA, 33 bp, Homo sapien
cttcaagactgtaaagaagtcaaccatttgtcc

SEQ ID NO: 1006806 - DNA, 33 bp, Homo sapien
cttcaagactgtaaaggagtcaaccatttgtcc

SEQ ID NO: 1006807 - DNA, 33 bp, Homo sapien
ggaagcaaatcattacacatttttagccacatt

SEQ ID NO: 1006808 - DNA, 33 bp, Homo sapien
ggaagcaaatcattacgcatttttagccacatt

SEQ ID NO: 1006809 - DNA, 33 bp, Homo sapien
tgcatctactctgctacaataccaaccaattag

SEQ ID NO: 1006810 - DNA, 33 bp, Homo sapien
tgcatctactctgctagaataccaaccaattag

SEQ ID NO: 1006811 - DNA, 33 bp, Homo sapien
actgttactgaagacaaaccagatatttttctt

SEQ ID NO: 1006812 - DNA, 33 bp, Homo sapien
actgttactgaagacagaccagatatttttctt

SEQ ID NO: 1006813 - DNA, 33 bp, Homo sapien
gttggcaggcaattagcattgtcattagatgaa

SEQ ID NO: 1006814 - DNA, 33 bp, Homo sapien
gttggcaggcaattagtattgtcattagatgaa

SEQ ID NO: 1006815 - DNA, 33 bp, Homo sapien
taagaggcagtattaggatataagggccaaatt

SEQ ID NO: 1006816 - DNA, 33 bp, Homo sapien
taagaggcagtattagtatataagggccaaatt

SEQ ID NO: 1006817 - DNA, 33 bp, Homo sapien
cagaaagcaatatccacagatttgggtgactcg

SEQ ID NO: 1006818 - DNA, 33 bp, Homo sapien
cagaaagcaatatccagagatttgggtgactcg

SEQ ID NO: 1006819 - DNA, 33 bp, Homo sapien
tttacctatcagggtcacatttgttcaattcct

SEQ ID NO: 1006820 - DNA, 33 bp, Homo sapien
tttacctatcagggtcgcatttgttcaattcct

SEQ ID NO: 1006821 - DNA, 33 bp, Homo sapien
aggcaccttaccaatacgatgagttttttaatc

SEQ ID NO: 1006822 - DNA, 33 bp, Homo sapien
aggcaccttaccaatatgatgagttttttaatc

SEQ ID NO: 1006823 - DNA, 33 bp, Homo sapien
cagcagagaggaaatccagagtggatagctcct

SEQ ID NO: 1006824 - DNA, 33 bp, Homo sapien
cagcagagaggaaatctagagtggatagctcct

SEQ ID NO: 1006825 - DNA, 33 bp, Homo sapien
tcaatgtttgcttatacatttaggtgctttgat

SEQ ID NO: 1006826 - DNA, 33 bp, Homo sapien
tcaatgtttgcttatatatttaggtgctttgat

SEQ ID NO: 1006827 - DNA, 33 bp, Homo sapien
atttaaaatgcaaaggaaagacttagagagtag

SEQ ID NO: 1006828 - DNA, 33 bp, Homo sapien
atttaaaatgcaaagggaagacttagagagtag

SEQ ID NO: 1006829 - DNA, 33 bp, Homo sapien
tgcaagtttatacatacacataagcaacaaata

SEQ ID NO: 1006830 - DNA, 33 bp, Homo sapien
tgcaagtttatacatagacataagcaacaaata

SEQ ID NO: 1006831 - DNA, 33 bp, Homo sapien
gctgatctcttttaaacttacctatagagttac

SEQ ID NO: 1006832 - DNA, 33 bp, Homo sapien
gctgatctcttttaaatttacctatagagttac

SEQ ID NO: 1006833 - DNA, 33 bp, Homo sapien
tcagtggtacttttcaaactttgatgcctgaag

SEQ ID NO: 1006834 - DNA, 33 bp, Homo sapien
tcagtggtacttttcacactttgatgcctgaag

SEQ ID NO: 1006835 - DNA, 33 bp, Homo sapien
cagtggaagttgtggtgaaagaaaacgtggaga

SEQ ID NO: 1006836 - DNA, 33 bp, Homo sapien
cagtggaagttgtggttaaagaaaacgtggaga

SEQ ID NO: 1006837 - DNA, 33 bp, Homo sapien
agaacttgagaaagagacaagatcctaagaaag

SEQ ID NO: 1006838 - DNA, 33 bp, Homo sapien
agaacttgagaaagagccaagatcctaagaaag

SEQ ID NO: 1006839 - DNA, 33 bp, Homo sapien
atattttaaaaagagcaaactcagtaaatcaag

SEQ ID NO: 1006840 - DNA, 33 bp, Homo sapien
atattttaaaaagagctaactcagtaaatcaag

SEQ ID NO: 1006841 - DNA, 33 bp, Homo sapien
agtagaaccaccttaccacctgaagttgcagag

SEQ ID NO: 1006842 - DNA, 33 bp, Homo sapien
agtagaaccaccttactacctgaagttgcagag

SEQ ID NO: 1006843 - DNA, 33 bp, Homo sapien
tgtatacactaaaggcccccctcagtcttaaat

SEQ ID NO: 1006844 - DNA, 33 bp, Homo sapien
tgtatacactaaaggctcccctcagtcttaaat

SEQ ID NO: 1006845 - DNA, 33 bp, Homo sapien
ttgcattgaggaacaaaattgatttaaaatatg

SEQ ID NO: 1006846 - DNA, 33 bp, Homo sapien
ttgcattgaggaacaagattgatttaaaatatg

SEQ ID NO: 1006847 - DNA, 33 bp, Homo sapien
ataaaagtaataagaggcaaaacagagggagca

SEQ ID NO: 1006848 - DNA, 33 bp, Homo sapien
ataaaagtaataagagtcaaaacagagggagca

SEQ ID NO: 1006849 - DNA, 33 bp, Homo sapien
ctcttgttgtgttttacagtcatctgaattcac

SEQ ID NO: 1006850 - DNA, 33 bp, Homo sapien
ctcttgttgtgttttatagtcatctgaattcac

SEQ ID NO: 1006851 - DNA, 33 bp, Homo sapien
cattcaatcaattgacagcatgactagagcaaa

SEQ ID NO: 1006852 - DNA, 33 bp, Homo sapien
cattcaatcaattgacggcatgactagagcaaa

SEQ ID NO: 1006853 - DNA, 33 bp, Homo sapien
aatctggaaaggtaacagagaaataatgagtag

SEQ ID NO: 1006854 - DNA, 33 bp, Homo sapien
aatctggaaaggtaactgagaaataatgagtag

SEQ ID NO: 1006855 - DNA, 33 bp, Homo sapien
acgtccagcagcataaaaaacttggcaattgaa

SEQ ID NO: 1006856 - DNA, 33 bp, Homo sapien
acgtccagcagcataacaaacttggcaattgaa

SEQ ID NO: 1006857 - DNA, 33 bp, Homo sapien
tcaacaggtttcttcacgctttaggattcatga

SEQ ID NO: 1006858 - DNA, 33 bp, Homo sapien
tcaacaggtttcttcatgctttaggattcatga

SEQ ID NO: 1006859 - DNA, 33 bp, Homo sapien
gctatgactttatgacagctacgatgcaactag

SEQ ID NO: 1006860 - DNA, 33 bp, Homo sapien
gctatgactttatgactgctacgatgcaactag

SEQ ID NO: 1006861 - DNA, 33 bp, Homo sapien
gcacactgttcgctaaggagaattaaatcttcc

SEQ ID NO: 1006862 - DNA, 33 bp, Homo sapien
gcacactgttcgctaatgagaattaaatcttcc

SEQ ID NO: 1006863 - DNA, 33 bp, Homo sapien; identical to SEQ ID NO: 1006861

SEQ ID NO: 1006864 - DNA, 33 bp, Homo sapien; identical to SEQ ID NO: 1006862

SEQ ID NO: 1006865 - DNA, 33 bp, Homo sapien
atcctgattgtgtaagcaacccagtaaatagta

SEQ ID NO: 1006866 - DNA, 33 bp, Homo sapien
atcctgattgtgtaagtaacccagtaaatagta

SEQ ID NO: 1006867 - DNA, 33 bp, Homo sapien
gtaaatgtgtccattcaaaatgggaaaaattgt

SEQ ID NO: 1006868 - DNA, 33 bp, Homo sapien
gtaaatgtgtccattcgaaatgggaaaaattgt

SEQ ID NO: 1006869 - DNA, 33 bp, Homo sapien
ttaagaggaataaccaatgagaggtaacaggaa

SEQ ID NO: 1006870 - DNA, 33 bp, Homo sapien
ttaagaggaataaccagtgagaggtaacaggaa

SEQ ID NO: 1006871 - DNA, 33 bp, Homo sapien
ttttatgttatttccaaaattaaagtgtcccaa

SEQ ID NO: 1006872 - DNA, 33 bp, Homo sapien
ttttatgttatttccagaattaaagtgtcccaa

SEQ ID NO: 1006873 - DNA, 33 bp, Homo sapien
atagccctttcataaaacagatacagctacata

SEQ ID NO: 1006874 - DNA, 33 bp, Homo sapien
atagccctttcataaagcagatacagctacata

SEQ ID NO: 1006875 - DNA, 33 bp, Homo sapien
aatgcagttttggccactgatttatcatcttta

SEQ ID NO: 1006876 - DNA, 33 bp, Homo sapien
aatgcagttttggccattgatttatcatcttta

SEQ ID NO: 1006877 - DNA, 33 bp, Homo sapien
taggctggatatgaaagatggaagctccagatt

SEQ ID NO: 1006878 - DNA, 33 bp, Homo sapien
taggctggatatgaaatatggaagctccagatt

SEQ ID NO: 1006879 - DNA, 33 bp, Homo sapien
ctgaaagcatcccttacgttcttttagcaattt

SEQ ID NO: 1006880 - DNA, 33 bp, Homo sapien
ctgaaagcatcccttatgttcttttagcaattt

SEQ ID NO: 1006881 - DNA, 33 bp, Homo sapien
tcttttatttatcagacagcataaagtttttca

SEQ ID NO: 1006882 - DNA, 33 bp, Homo sapien
tcttttatttatcagagagcataaagtttttca

SEQ ID NO: 1006883 - DNA, 33 bp, Homo sapien
taaaaatgttagtgaactgaatttatgtgacat

SEQ ID NO: 1006884 - DNA, 33 bp, Homo sapien
taaaaatgttagtgaattgaatttatgtgacat

SEQ ID NO: 1006885 - DNA, 33 bp, Homo sapien
atattctttgaaaaaactggtgaataagaagtg

SEQ ID NO: 1006886 - DNA, 33 bp, Homo sapien
atattctttgaaaaaagtggtgaataagaagtg

SEQ ID NO: 1006887 - DNA, 33 bp, Homo sapien
tgcacataacacagagaaaacaggacatttgaa

SEQ ID NO: 1006888 - DNA, 33 bp, Homo sapien
tgcacataacacagaggaaacaggacatttgaa

SEQ ID NO: 1006889 - DNA, 33 bp, Homo sapien
aagcattgataggcaaagaaggcttacagtaaa

SEQ ID NO: 1006890 - DNA, 33 bp, Homo sapien
aagcattgataggcaaggaaggcttacagtaaa

SEQ ID NO: 1006891 - DNA, 33 bp, Homo sapien
agggaaaatgcacactcaagagtaatacatgaa

SEQ ID NO: 1006892 - DNA, 33 bp, Homo sapien
agggaaaatgcacactgaagagtaatacatgaa

SEQ ID NO: 1006893 - DNA, 33 bp, Homo sapien
tctttactagaagtcagcctacttggtaattta

SEQ ID NO: 1006894 - DNA, 33 bp, Homo sapien
tctttactagaagtcatcctacttggtaattta

SEQ ID NO: 1006895 - DNA, 33 bp, Homo sapien
tctgcaaatttaggacaaaggcagcaaatctgg

SEQ ID NO: 1006896 - DNA, 33 bp, Homo sapien
tctgcaaatttaggacgaaggcagcaaatctgg

SEQ ID NO: 1006897 - DNA, 33 bp, Homo sapien
gataagcaattttgataacaagaagctgtttaa

SEQ ID NO: 1006898 - DNA, 33 bp, Homo sapien
gataagcaattttgatgacaagaagctgtttaa

SEQ ID NO: 1006899 - DNA, 33 bp, Homo sapien
aacattagatcataccctgtttgtcctatcata

SEQ ID NO: 1006900 - DNA, 33 bp, Homo sapien
aacattagatcataccgtgtttgtcctatcata

SEQ ID NO: 1006901 - DNA, 33 bp, Homo sapien
tcagaaaggcacagaagaatctagacaggcagg

SEQ ID NO: 1006902 - DNA, 33 bp, Homo sapien
tcagaaaggcacagaataatctagacaggcagg

SEQ ID NO: 1006903 - DNA, 33 bp, Homo sapien
gtttatggaaatcacacggaaaatatggagagg

SEQ ID NO: 1006904 - DNA, 33 bp, Homo sapien
gtttatggaaatcacatggaaaatatggagagg

SEQ ID NO: 1006905 - DNA, 33 bp, Homo sapien
tgtaaatctaaaactacggagaccagaaataac

SEQ ID NO: 1006906 - DNA, 33 bp, Homo sapien
tgtaaatctaaaactatggagaccagaaataac

SEQ ID NO: 1006907 - DNA, 33 bp, Homo sapien
tataaaagtagactccacaaagttcttcaccct

SEQ ID NO: 1006908 - DNA, 33 bp, Homo sapien
tataaaagtagactccgcaaagttcttcaccct

SEQ ID NO: 1006909 - DNA, 33 bp, Homo sapien
gacattagcaaattaacgtgacaatgtttaaaa

SEQ ID NO: 1006910 - DNA, 33 bp, Homo sapien
gacattagcaaattaatgtgacaatgtttaaaa

SEQ ID NO: 1006911 - DNA, 33 bp, Homo sapien
aaatctagaaaatcacacatatagtttagagct

SEQ ID NO: 1006912 - DNA, 33 bp, Homo sapien
aaatctagaaaatcacgcatatagtttagagct

SEQ ID NO: 1006913 - DNA, 33 bp, Homo sapien
aagctcactgaactctaaataagacacaaagac

SEQ ID NO: 1006914 - DNA, 33 bp, Homo sapien
aagctcactgaactctgaataagacacaaagac

SEQ ID NO: 1006915 - DNA, 33 bp, Homo sapien
cagaagctgtttaatacaaaaatgtcacaataa

SEQ ID NO: 1006916 - DNA, 33 bp, Homo sapien
cagaagctgtttaatataaaaatgtcacaataa

SEQ ID NO: 1006917 - DNA, 33 bp, Homo sapien
cattgactttgtcccactgagtttatttttttg

SEQ ID NO: 1006918 - DNA, 33 bp, Homo sapien
cattgactttgtcccattgagtttatttttttg

SEQ ID NO: 1006919 - DNA, 33 bp, Homo sapien
gattgacatctacaacggattaggtccattgac

SEQ ID NO: 1006920 - DNA, 33 bp, Homo sapien
gattgacatctacaactgattaggtccattgac

SEQ ID NO: 1006921 - DNA, 33 bp, Homo sapien
tttttaataaggctaacagattggagtagtgcc

SEQ ID NO: 1006922 - DNA, 33 bp, Homo sapien
tttttaataaggctaagagattggagtagtgcc

SEQ ID NO: 1006923 - DNA, 33 bp, Homo sapien
ttgtaaacagatatcaataattaagttctatgc

SEQ ID NO: 1006924 - DNA, 33 bp, Homo sapien
ttgtaaacagatatcagtaattaagttctatgc

SEQ ID NO: 1006925 - DNA, 33 bp, Homo sapien
tttcaagtccaagtacccagtctatactacaga

SEQ ID NO: 1006926 - DNA, 33 bp, Homo sapien
tttcaagtccaagtacgcagtctatactacaga

SEQ ID NO: 1006927 - DNA, 33 bp, Homo sapien
agttgagagtcttgaaggactgacccataagtg

SEQ ID NO: 1006928 - DNA, 33 bp, Homo sapien
agttgagagtcttgaatgactgacccataagtg

SEQ ID NO: 1006929 - DNA, 33 bp, Homo sapien
attcatacttgaggaaaagaggtgaaaggatcc

SEQ ID NO: 1006930 - DNA, 33 bp, Homo sapien
attcatacttgaggaagagaggtgaaaggatcc

SEQ ID NO: 1006931 - DNA, 33 bp, Homo sapien
agcataaggccacagacagaattagcaagaatg

SEQ ID NO: 1006932 - DNA, 33 bp, Homo sapien
agcataaggccacagagagaattagcaagaatg

SEQ ID NO: 1006933 - DNA, 33 bp, Homo sapien
tcagtgttctctacataataactgagaagacgt

SEQ ID NO: 1006934 - DNA, 33 bp, Homo sapien
tcagtgttctctacattataactgagaagacgt

SEQ ID NO: 1006935 - DNA, 33 bp, Homo sapien
catcagctgaagtgtgcaaagcagttttggcta

SEQ ID NO: 1006936 - DNA, 33 bp, Homo sapien
catcagctgaagtgtggaaagcagttttggcta

SEQ ID NO: 1006937 - DNA, 33 bp, Homo sapien
aatggctgcaatagaacatgaccatgggtgccc

SEQ ID NO: 1006938 - DNA, 33 bp, Homo sapien
aatggctgcaatagaatatgaccatgggtgccc

SEQ ID NO: 1006939 - DNA, 33 bp, Homo sapien
ctctgggctccatacaaactggaattctgcctc

SEQ ID NO: 1006940 - DNA, 33 bp, Homo sapien
ctctgggctccatacagactggaattctgcctc

SEQ ID NO: 1006941 - DNA, 33 bp, Homo sapien
aaaagcaaggaagctcagaatactgcatggggt

SEQ ID NO: 1006942 - DNA, 33 bp, Homo sapien
aaaagcaaggaagctcggaatactgcatggggt

SEQ ID NO: 1006943 - DNA, 33 bp, Homo sapien
aaaaataagtagataaagtgacagatatataaa

SEQ ID NO: 1006944 - DNA, 33 bp, Homo sapien
aaaaataagtagataaggtgacagatatataaa

SEQ ID NO: 1006945 - DNA, 33 bp, Homo sapien
cagtgcttacaaaggagtaaggtgaaggaggaa

SEQ ID NO: 1006946 - DNA, 33 bp, Homo sapien
cagtgcttacaaaggattaaggtgaaggaggaa

SEQ ID NO: 1006947 - DNA, 33 bp, Homo sapien
gtttctttgagtaaataaaagttgtgtaaaatg

SEQ ID NO: 1006948 - DNA, 33 bp, Homo sapien
gtttctttgagtaaatgaaagttgtgtaaaatg

SEQ ID NO: 1006949 - DNA, 33 bp, Homo sapien
tcataccaaaaatggccatcacagactaaagtg

SEQ ID NO: 1006950 - DNA, 33 bp, Homo sapien
tcataccaaaaatggctatcacagactaaagtg

SEQ ID NO: 1006951 - DNA, 33 bp, Homo sapien
tagtggagtggaagaactaatgtttaaatgtcc

SEQ ID NO: 1006952 - DNA, 33 bp, Homo sapien
tagtggagtggaagaattaatgtttaaatgtcc

SEQ ID NO: 1006953 - DNA, 33 bp, Homo sapien
agagaagggcattaaactgattatcccataaca

SEQ ID NO: 1006954 - DNA, 33 bp, Homo sapien
agagaagggcattaaattgattatcccataaca

SEQ ID NO: 1006955 - DNA, 33 bp, Homo sapien
atctagagtgtttgcacggtcagaggaaaaaga

SEQ ID NO: 1006956 - DNA, 33 bp, Homo sapien
atctagagtgtttgcatggtcagaggaaaaaga

SEQ ID NO: 1006957 - DNA, 33 bp, Homo sapien
acacagctaatagagaccaaagttaagcttcga

SEQ ID NO: 1006958 - DNA, 33 bp, Homo sapien
acacagctaatagagagcaaagttaagcttcga

SEQ ID NO: 1006959 - DNA, 33 bp, Homo sapien
taagctaaagagaatggaaagagatatgtggaa

SEQ ID NO: 1006960 - DNA, 33 bp, Homo sapien
taagctaaagagaatgtaaagagatatgtggaa

SEQ ID NO: 1006961 - DNA, 33 bp, Homo sapien
ggacaaaagaaggcaccgggaaagctgatcaga

SEQ ID NO: 1006962 - DNA, 33 bp, Homo sapien
ggacaaaagaaggcactgggaaagctgatcaga

SEQ ID NO: 1006963 - DNA, 33 bp, Homo sapien
gtagaagaaaactgcaaagaatgttccagaagg

SEQ ID NO: 1006964 - DNA, 33 bp, Homo sapien
gtagaagaaaactgcacagaatgttccagaagg

SEQ ID NO: 1006965 - DNA, 33 bp, Homo sapien
tgtttttaacatgaaggatgctgaattttatct

SEQ ID NO: 1006966 - DNA, 33 bp, Homo sapien
tgtttttaacatgaagtatgctgaattttatct

SEQ ID NO: 1006967 - DNA, 33 bp, Homo sapien
cagccaaaaaatgtatcaaaaaaagctcaacat

SEQ ID NO: 1006968 - DNA, 33 bp, Homo sapien
cagccaaaaaatgtatgaaaaaaagctcaacat

SEQ ID NO: 1006969 - DNA, 33 bp, Homo sapien
agaaatgcaaattaacaccacaataaaatacca

SEQ ID NO: 1006970 - DNA, 33 bp, Homo sapien
agaaatgcaaattaacgccacaataaaatacca

SEQ ID NO: 1006971 - DNA, 33 bp, Homo sapien
ccacagctggctttgacacttgtaccatagatt

SEQ ID NO: 1006972 - DNA, 33 bp, Homo sapien
ccacagctggctttgagacttgtaccatagatt

SEQ ID NO: 1006973 - DNA, 33 bp, Homo sapien
tctacaaagtcaagcccagtgcaattcctgagc

SEQ ID NO: 1006974 - DNA, 33 bp, Homo sapien
tctacaaagtcaagcctagtgcaattcctgagc

SEQ ID NO: 1006975 - DNA, 33 bp, Homo sapien
ggttagaaaatccagaaattgggtctttacatg

SEQ ID NO: 1006976 - DNA, 33 bp, Homo sapien
ggttagaaaatccagacattgggtctttacatg

SEQ ID NO: 1006977 - DNA, 33 bp, Homo sapien
tgaagattcttcaaggaatgacatgttctcttt

SEQ ID NO: 1006978 - DNA, 33 bp, Homo sapien
tgaagattcttcaaggcatgacatgttctcttt

SEQ ID NO: 1006979 - DNA, 33 bp, Homo sapien
agtaaatatacaaccaaatcttcctgaattggc

SEQ ID NO: 1006980 - DNA, 33 bp, Homo sapien
agtaaatatacaaccagatcttcctgaattggc

SEQ ID NO: 1006981 - DNA, 33 bp, Homo sapien
agagactgcttacagccccttacagtgtggacc

SEQ ID NO: 1006982 - DNA, 33 bp, Homo sapien
agagactgcttacagctccttacagtgtggacc

SEQ ID NO: 1006983 - DNA, 33 bp, Homo sapien
taaacacatttacagaagtttgctgttcatgtt

SEQ ID NO: 1006984 - DNA, 33 bp, Homo sapien
taaacacatttacagatgtttgctgttcatgtt

SEQ ID NO: 1006985 - DNA, 33 bp, Homo sapien
tgaattcagggtataacggctatagtttatatt

SEQ ID NO: 1006986 - DNA, 33 bp, Homo sapien
tgaattcagggtataatggctatagtttatatt

SEQ ID NO: 1006987 - DNA, 33 bp, Homo sapien
ataaaagctttccatacgttatgacttacaatt

SEQ ID NO: 1006988 - DNA, 33 bp, Homo sapien
ataaaagctttccatatgttatgacttacaatt

SEQ ID NO: 1006989 - DNA, 33 bp, Homo sapien
ggtaggctcttcttcaaatcagtcttcttttct

SEQ ID NO: 1006990 - DNA, 33 bp, Homo sapien
ggtaggctcttcttcatatcagtcttcttttct

SEQ ID NO: 1006991 - DNA, 33 bp, Homo sapien
atggatagattcttccaaaattatcagagagaa

SEQ ID NO: 1006992 - DNA, 33 bp, Homo sapien
atggatagattcttccgaaattatcagagagaa

SEQ ID NO: 1006993 - DNA, 33 bp, Homo sapien
aaacaaaacaagtaaaactcttatgtgaacaat

SEQ ID NO: 1006994 - DNA, 33 bp, Homo sapien
aaacaaaacaagtaaatctcttatgtgaacaat

SEQ ID NO: 1006995 - DNA, 33 bp, Homo sapien
aatcctcagtaccctaactatttatccctcctt

SEQ ID NO: 1006996 - DNA, 33 bp, Homo sapien
aatcctcagtaccctacctatttatccctcctt

SEQ ID NO: 1006997 - DNA, 33 bp, Homo sapien
aagcagtctgcagaagccaaagcttaaaaaagc

SEQ ID NO: 1006998 - DNA, 33 bp, Homo sapien
aagcagtctgcagaaggcaaagcttaaaaaagc

SEQ ID NO: 1006999 - DNA, 33 bp, Homo sapien
acaatgatcgtgaaaaaatttataaaatagata

SEQ ID NO: 1007000 - DNA, 33 bp, Homo sapien
acaatgatcgtgaaaacatttataaaatagata

SEQ ID NO: 1007001 - DNA, 33 bp, Homo sapien
ctgttgctaaataaacacaatacatttcctcct

SEQ ID NO: 1007002 - DNA, 33 bp, Homo sapien
ctgttgctaaataaacccaatacatttcctcct

SEQ ID NO: 1007003 - DNA, 33 bp, Homo sapien
gtcgttacctactaaaactgaatttatgcatac

SEQ ID NO: 1007004 - DNA, 33 bp, Homo sapien
gtcgttacctactaaagctgaatttatgcatac

SEQ ID NO: 1007005 - DNA, 33 bp, Homo sapien
tgtgttctttcgataaatatctattcagatctc

SEQ ID NO: 1007006 - DNA, 33 bp, Homo sapien
tgtgttctttcgataattatctattcagatctc

SEQ ID NO: 1007007 - DNA, 33 bp, Homo sapien
accaaacaagacaaacaaccgacttcactggag

SEQ ID NO: 1007008 - DNA, 33 bp, Homo sapien
accaaacaagacaaacgaccgacttcactggag

SEQ ID NO: 1007009 - DNA, 33 bp, Homo sapien
atagaagaaatgacaaatggtactacagagata

SEQ ID NO: 1007010 - DNA, 33 bp, Homo sapien
atagaagaaatgacaagtggtactacagagata

SEQ ID NO: 1007011 - DNA, 33 bp, Homo sapien
tgccttccatcgttatcaaaggcagaatgttta

SEQ ID NO: 1007012 - DNA, 33 bp, Homo sapien
tgccttccatcgttatgaaaggcagaatgttta

SEQ ID NO: 1007013 - DNA, 33 bp, Homo sapien
gtacttgtaatccatcagatatcttaattataa

SEQ ID NO: 1007014 - DNA, 33 bp, Homo sapien
gtacttgtaatccatcggatatcttaattataa

SEQ ID NO: 1007015 - DNA, 33 bp, Homo sapien
gatgatatagtaaaagaccattttcagcacatg

SEQ ID NO: 1007016 - DNA, 33 bp, Homo sapien
gatgatatagtaaaaggccattttcagcacatg

SEQ ID NO: 1007017 - DNA, 33 bp, Homo sapien
aaagctcaaaaaatacaaagcagtgatatgggc

SEQ ID NO: 1007018 - DNA, 33 bp, Homo sapien
aaagctcaaaaaataccaagcagtgatatgggc

SEQ ID NO: 1007019 - DNA, 33 bp, Homo sapien
acccaatgttaatgaaatatgaaggttctactt

SEQ ID NO: 1007020 - DNA, 33 bp, Homo sapien
acccaatgttaatgaattatgaaggttctactt

SEQ ID NO: 1007021 - DNA, 33 bp, Homo sapien
atgtaaaacagtataacagtctcacctctggct

SEQ ID NO: 1007022 - DNA, 33 bp, Homo sapien
atgtaaaacagtataatagtctcacctctggct

SEQ ID NO: 1007023 - DNA, 33 bp, Homo sapien
tttttgttggacttagcaaataagtttattgat

SEQ ID NO: 1007024 - DNA, 33 bp, Homo sapien
tttttgttggacttaggaaataagtttattgat

SEQ ID NO: 1007025 - DNA, 33 bp, Homo sapien
agcaatgaaattctagaaaaatcaaaatgcccc

SEQ ID NO: 1007026 - DNA, 33 bp, Homo sapien
agcaatgaaattctaggaaaatcaaaatgcccc

SEQ ID NO: 1007027 - DNA, 33 bp, Homo sapien
ggttcatggacagatgcagggaaattttcagat

SEQ ID NO: 1007028 - DNA, 33 bp, Homo sapien
ggttcatggacagatgtagggaaattttcagat

SEQ ID NO: 1007029 - DNA, 33 bp, Homo sapien
attcagaagttcccacagaataaaaacataata

SEQ ID NO: 1007030 - DNA, 33 bp, Homo sapien
attcagaagttcccacggaataaaaacataata

SEQ ID NO: 1007031 - DNA, 33 bp, Homo sapien
caaatagcatcatgataacagcattaaattcaa

SEQ ID NO: 1007032 - DNA, 33 bp, Homo sapien
caaatagcatcatgatgacagcattaaattcaa

SEQ ID NO: 1007033 - DNA, 33 bp, Homo sapien
aaagcctgaatataaaacctgtcttaggtatca

SEQ ID NO: 1007034 - DNA, 33 bp, Homo sapien
aaagcctgaatataaaccctgtcttaggtatca

SEQ ID NO: 1007035 - DNA, 33 bp, Homo sapien
aaataccatgaagtgaataccttataaacaaca

SEQ ID NO: 1007036 - DNA, 33 bp, Homo sapien
aaataccatgaagtgagtaccttataaacaaca

SEQ ID NO: 1007037 - DNA, 33 bp, Homo sapien
ggggtaaagagggatacgtgtaccttggaaatt

SEQ ID NO: 1007038 - DNA, 33 bp, Homo sapien
ggggtaaagagggatatgtgtaccttggaaatt

SEQ ID NO: 1007039 - DNA, 33 bp, Homo sapien
tagggactctctgcaacggcatactgcattatt

SEQ ID NO: 1007040 - DNA, 33 bp, Homo sapien
tagggactctctgcaatggcatactgcattatt

SEQ ID NO: 1007041 - DNA, 33 bp, Homo sapien
aagagcttcctctgtaaaataaagcttggtttc

SEQ ID NO: 1007042 - DNA, 33 bp, Homo sapien
aagagcttcctctgtacaataaagcttggtttc

SEQ ID NO: 1007043 - DNA, 33 bp, Homo sapien
taagccaatgagataaagttataccaaatgcta

SEQ ID NO: 1007044 - DNA, 33 bp, Homo sapien
taagccaatgagataacgttataccaaatgcta

SEQ ID NO: 1007045 - DNA, 33 bp, Homo sapien
gtcagaattacacaagaataaatactctaaatc

SEQ ID NO: 1007046 - DNA, 33 bp, Homo sapien
gtcagaattacacaaggataaatactctaaatc

SEQ ID NO: 1007047 - DNA, 33 bp, Homo sapien
tgtttcactcgctcaaacctaccttcccacccc

SEQ ID NO: 1007048 - DNA, 33 bp, Homo sapien
tgtttcactcgctcaaccctaccttcccacccc

SEQ ID NO: 1007049 - DNA, 33 bp, Homo sapien
cactttaattcctgaaatctttaatacacttaa

SEQ ID NO: 1007050 - DNA, 33 bp, Homo sapien
cactttaattcctgaactctttaatacacttaa

SEQ ID NO: 1007051 - DNA, 33 bp, Homo sapien
ctggaaatgcaggaaaccactcaactcctttga

SEQ ID NO: 1007052 - DNA, 33 bp, Homo sapien
ctggaaatgcaggaaagcactcaactcctttga

SEQ ID NO: 1007053 - DNA, 33 bp, Homo sapien
tgcctttcatacatccaatattcgatggtgaga

SEQ ID NO: 1007054 - DNA, 33 bp, Homo sapien
tgcctttcatacatccgatattcgatggtgaga

SEQ ID NO: 1007055 - DNA, 33 bp, Homo sapien
tgtgtgacataggaggcagttcaaaggagattg

SEQ ID NO: 1007056 - DNA, 33 bp, Homo sapien
tgtgtgacataggagggagttcaaaggagattg

SEQ ID NO: 1007057 - DNA, 33 bp, Homo sapien
taatcattagcacatcaaaagttaattttaaga

SEQ ID NO: 1007058 - DNA, 33 bp, Homo sapien
taatcattagcacatcgaaagttaattttaaga

SEQ ID NO: 1007059 - DNA, 33 bp, Homo sapien
ttactctggaaagaacacttgatcccagcctaa

SEQ ID NO: 1007060 - DNA, 33 bp, Homo sapien
ttactctggaaagaactcttgatcccagcctaa

SEQ ID NO: 1007061 - DNA, 33 bp, Homo sapien
actggtgaactgtgccgacactagcaatatctt

SEQ ID NO: 1007062 - DNA, 33 bp, Homo sapien
actggtgaactgtgcctacactagcaatatctt

SEQ ID NO: 1007063 - DNA, 33 bp, Homo sapien
ctgtatcttattaaaaggtcacacagtaatttg

SEQ ID NO: 1007064 - DNA, 33 bp, Homo sapien
ctgtatcttattaaaatgtcacacagtaatttg

SEQ ID NO: 1007065 - DNA, 33 bp, Homo sapien
ccgtttggcagttcctaagcagtatcctttata

SEQ ID NO: 1007066 - DNA, 33 bp, Homo sapien
ccgtttggcagttcctgagcagtatcctttata

SEQ ID NO: 1007067 - DNA, 33 bp, Homo sapien
cttatatttttcaacccgacctttgcaatttcc

SEQ ID NO: 1007068 - DNA, 33 bp, Homo sapien
cttatatttttcaacctgacctttgcaatttcc

SEQ ID NO: 1007069 - DNA, 33 bp, Homo sapien
attgagaataactttaagtttgaacatgcttaa

SEQ ID NO: 1007070 - DNA, 33 bp, Homo sapien
attgagaataactttaggtttgaacatgcttaa

SEQ ID NO: 1007071 - DNA, 33 bp, Homo sapien
tctctctctctcaaatcaactttgaggttctct

SEQ ID NO: 1007072 - DNA, 33 bp, Homo sapien
tctctctctctcaaatgaactttgaggttctct

SEQ ID NO: 1007073 - DNA, 33 bp, Homo sapien
ataaatatttgttgaaaggaattataatgaaat

SEQ ID NO: 1007074 - DNA, 33 bp, Homo sapien
ataaatatttgttgaagggaattataatgaaat

SEQ ID NO: 1007075 - DNA, 33 bp, Homo sapien
tattcttctgactgaactgagaaaggagagtgc

SEQ ID NO: 1007076 - DNA, 33 bp, Homo sapien
tattcttctgactgaattgagaaaggagagtgc

SEQ ID NO: 1007077 - DNA, 33 bp, Homo sapien
ataaatacagtaaaaacgtgtacaatgtgcatg

SEQ ID NO: 1007078 - DNA, 33 bp, Homo sapien
ataaatacagtaaaaaggtgtacaatgtgcatg

SEQ ID NO: 1007079 - DNA, 33 bp, Homo sapien
agaactgttgttttcacaggttaatgagatact

SEQ ID NO: 1007080 - DNA, 33 bp, Homo sapien
agaactgttgttttcataggttaatgagatact

SEQ ID NO: 1007081 - DNA, 33 bp, Homo sapien
ttgccagaatacaatgaaactaatacagtcttt

SEQ ID NO: 1007082 - DNA, 33 bp, Homo sapien
ttgccagaatacaatggaactaatacagtcttt

SEQ ID NO: 1007083 - DNA, 33 bp, Homo sapien
atcttgttttgaaagcaatgtacttagatgtca

SEQ ID NO: 1007084 - DNA, 33 bp, Homo sapien
atcttgttttgaaagccatgtacttagatgtca

SEQ ID NO: 1007085 - DNA, 33 bp, Homo sapien
cagagttaaaacaacacatagctacatgaagag

SEQ ID NO: 1007086 - DNA, 33 bp, Homo sapien
cagagttaaaacaacatatagctacatgaagag

SEQ ID NO: 1007087 - DNA, 33 bp, Homo sapien
atttctttccatactacagtgaaatcaactcta

SEQ ID NO: 1007088 - DNA, 33 bp, Homo sapien
atttctttccatactagagtgaaatcaactcta

SEQ ID NO: 1007089 - DNA, 33 bp, Homo sapien
ttaacttgttaattgccatagtttgaggcagct

SEQ ID NO: 1007090 - DNA, 33 bp, Homo sapien
ttaacttgttaattgctatagtttgaggcagct

SEQ ID NO: 1007091 - DNA, 33 bp, Homo sapien
tgatgtgtaaaacctacggtatgactggagcaa

SEQ ID NO: 1007092 - DNA, 33 bp, Homo sapien
tgatgtgtaaaacctatggtatgactggagcaa

SEQ ID NO: 1007093 - DNA, 33 bp, Homo sapien
tattgactctcttattaaagacaactatcaagg

SEQ ID NO: 1007094 - DNA, 33 bp, Homo sapien
tattgactctcttattcaagacaactatcaagg

SEQ ID NO: 1007095 - DNA, 33 bp, Homo sapien
tgagggttgacatctggaagtaaatctcccccc

SEQ ID NO: 1007096 - DNA, 33 bp, Homo sapien
tgagggttgacatctgtaagtaaatctcccccc

SEQ ID NO: 1007097 - DNA, 33 bp, Homo sapien
tcataacctgcttttgaaacaacttgctatcta

SEQ ID NO: 1007098 - DNA, 33 bp, Homo sapien
tcataacctgcttttgtaacaacttgctatcta

SEQ ID NO: 1007099 - DNA, 33 bp, Homo sapien
atttgtggcctctcaacttctgctataacaaaa

SEQ ID NO: 1007100 - DNA, 33 bp, Homo sapien
atttgtggcctctcaagttctgctataacaaaa

SEQ ID NO: 1007101 - DNA, 33 bp, Homo sapien
actttatgttgatacaccggaatttcactcatg

SEQ ID NO: 1007102 - DNA, 33 bp, Homo sapien
actttatgttgatacatcggaatttcactcatg

SEQ ID NO: 1007103 - DNA, 33 bp, Homo sapien
caggaaaattgatcaaatgtttcaagtgctgcc

SEQ ID NO: 1007104 - DNA, 33 bp, Homo sapien
caggaaaattgatcaactgtttcaagtgctgcc

SEQ ID NO: 1007105 - DNA, 33 bp, Homo sapien
cttttccatggttttcaactacttggctcaaaa

SEQ ID NO: 1007106 - DNA, 33 bp, Homo sapien
cttttccatggttttcgactacttggctcaaaa

SEQ ID NO: 1007107 - DNA, 33 bp, Homo sapien
ggtcatctacttctcaataaatcaactgcatca

SEQ ID NO: 1007108 - DNA, 33 bp, Homo sapien
ggtcatctacttctcagtaaatcaactgcatca

SEQ ID NO: 1007109 - DNA, 33 bp, Homo sapien
ttaaacaatgtcgataatagacatccttgtcta

SEQ ID NO: 1007110 - DNA, 33 bp, Homo sapien
ttaaacaatgtcgatagtagacatccttgtcta

SEQ ID NO: 1007111 - DNA, 33 bp, Homo sapien
cttttgaagcattgaaggaataaatagaaaaaa

SEQ ID NO: 1007112 - DNA, 33 bp, Homo sapien
cttttgaagcattgaatgaataaatagaaaaaa

SEQ ID NO: 1007113 - DNA, 33 bp, Homo sapien
atttcggcatgattccagcttttcaactgctgt

SEQ ID NO: 1007114 - DNA, 33 bp, Homo sapien
atttcggcatgattccggcttttcaactgctgt

SEQ ID NO: 1007115 - DNA, 33 bp, Homo sapien
taaaagctactctgaaaggaagttcaactcaat

SEQ ID NO: 1007116 - DNA, 33 bp, Homo sapien
taaaagctactctgaatggaagttcaactcaat

SEQ ID NO: 1007117 - DNA, 33 bp, Homo sapien
tgatcttgtaaaggccagcgactaaatttcaag

SEQ ID NO: 1007118 - DNA, 33 bp, Homo sapien
tgatcttgtaaaggccggcgactaaatttcaag

SEQ ID NO: 1007119 - DNA, 33 bp, Homo sapien
tcactgcctgacaatacgcttacctggcagctt

SEQ ID NO: 1007120 - DNA, 33 bp, Homo sapien
tcactgcctgacaatatgcttacctggcagctt

SEQ ID NO: 1007121 - DNA, 33 bp, Homo sapien
ccttgtttggatcgtaccttgaacatctattta

SEQ ID NO: 1007122 - DNA, 33 bp, Homo sapien
ccttgtttggatcgtatcttgaacatctattta

SEQ ID NO: 1007123 - DNA, 33 bp, Homo sapien
gagccaattctattcacgtgggacagttattcc

SEQ ID NO: 1007124 - DNA, 33 bp, Homo sapien
gagccaattctattcaggtgggacagttattcc

SEQ ID NO: 1007125 - DNA, 33 bp, Homo sapien
tggtgcaatatcaccaaactaagctgcaacctg

SEQ ID NO: 1007126 - DNA, 33 bp, Homo sapien
tggtgcaatatcaccagactaagctgcaacctg

SEQ ID NO: 1007127 - DNA, 33 bp, Homo sapien
gctgtgtttggtggacaacagtgttagcaagtt

SEQ ID NO: 1007128 - DNA, 33 bp, Homo sapien
gctgtgtttggtggacgacagtgttagcaagtt

SEQ ID NO: 1007129 - DNA, 33 bp, Homo sapien
ccagcctcctgtctagaatttcattccacttca

SEQ ID NO: 1007130 - DNA, 33 bp, Homo sapien
ccagcctcctgtctaggatttcattccacttca

SEQ ID NO: 1007131 - DNA, 33 bp, Homo sapien
gctgcttggaatgctcaaatttaaaatttattc

SEQ ID NO: 1007132 - DNA, 33 bp, Homo sapien
gctgcttggaatgctcgaatttaaaatttattc

SEQ ID NO: 1007133 - DNA, 33 bp, Homo sapien
accttcatctcttagcaaaaacctcatgccttg

SEQ ID NO: 1007134 - DNA, 33 bp, Homo sapien
accttcatctcttagcgaaaacctcatgccttg

SEQ ID NO: 1007135 - DNA, 33 bp, Homo sapien
gagttcttttctggctcagagctgtttctctta

SEQ ID NO: 1007136 - DNA, 33 bp, Homo sapien
gagttcttttctggcttagagctgtttctctta

SEQ ID NO: 1007137 - DNA, 33 bp, Homo sapien
ttccttcacagagctaccatccctagagggata

SEQ ID NO: 1007138 - DNA, 33 bp, Homo sapien
ttccttcacagagctatcatccctagagggata

SEQ ID NO: 1007139 - DNA, 33 bp, Homo sapien
ttcactctgcctggataaaattgtaacttctct

SEQ ID NO: 1007140 - DNA, 33 bp, Homo sapien
ttcactctgcctggatgaaattgtaacttctct

SEQ ID NO: 1007141 - DNA, 33 bp, Homo sapien
ccattagggagctacaaagaaagagcaccttga

SEQ ID NO: 1007142 - DNA, 33 bp, Homo sapien
ccattagggagctacagagaaagagcaccttga

SEQ ID NO: 1007143 - DNA, 33 bp, Homo sapien
cagcctcaggtgctagaaattgttatctcttaa

SEQ ID NO: 1007144 - DNA, 33 bp, Homo sapien
cagcctcaggtgctagcaattgttatctcttaa

SEQ ID NO: 1007145 - DNA, 33 bp, Homo sapien
ctgccctagaacttacaggattttgaattcttt

SEQ ID NO: 1007146 - DNA, 33 bp, Homo sapien
ctgccctagaacttactggattttgaattcttt

SEQ ID NO: 1007147 - DNA, 33 bp, Homo sapien
gaagtctgatttaaaactatttatgcagcactt

SEQ ID NO: 1007148 - DNA, 33 bp, Homo sapien
gaagtctgatttaaaagtatttatgcagcactt

SEQ ID NO: 1007149 - DNA, 33 bp, Homo sapien
cactgaaaaatgtactcaactttcacagatact

SEQ ID NO: 1007150 - DNA, 33 bp, Homo sapien
cactgaaaaatgtactgaactttcacagatact

SEQ ID NO: 1007151 - DNA, 33 bp, Homo sapien
agtgtctgtattggccaattctcacacttctat

SEQ ID NO: 1007152 - DNA, 33 bp, Homo sapien
agtgtctgtattggcccattctcacacttctat

SEQ ID NO: 1007153 - DNA, 33 bp, Homo sapien
aattataatgactacactctggatgctgtttct

SEQ ID NO: 1007154 - DNA, 33 bp, Homo sapien
aattataatgactacattctggatgctgtttct

SEQ ID NO: 1007155 - DNA, 33 bp, Homo sapien
gacagtgaaatatatactagcagaaataggtaa

SEQ ID NO: 1007156 - DNA, 33 bp, Homo sapien
gacagtgaaatatatagtagcagaaataggtaa

SEQ ID NO: 1007157 - DNA, 33 bp, Homo sapien
ttctttcagcaacttaggttgaaatgactatct

SEQ ID NO: 1007158 - DNA, 33 bp, Homo sapien
ttctttcagcaacttatgttgaaatgactatct

SEQ ID NO: 1007159 - DNA, 33 bp, Homo sapien
ggctacacagagttgaacaatcatagctataca

SEQ ID NO: 1007160 - DNA, 33 bp, Homo sapien
ggctacacagagttgagcaatcatagctataca

SEQ ID NO: 1007161 - DNA, 33 bp, Homo sapien
tcaagggcaatagcaaaccaagataaccttcat

SEQ ID NO: 1007162 - DNA, 33 bp, Homo sapien
tcaagggcaatagcaacccaagataaccttcat

SEQ ID NO: 1007163 - DNA, 33 bp, Homo sapien
gttagggttagctaatgagaagaacttggatga

SEQ ID NO: 1007164 - DNA, 33 bp, Homo sapien
gttagggttagctaattagaagaacttggatga

SEQ ID NO: 1007165 - DNA, 33 bp, Homo sapien
attctaatcagtaggacctcaagtaaatattga

SEQ ID NO: 1007166 - DNA, 33 bp, Homo sapien
attctaatcagtaggatctcaagtaaatattga

SEQ ID NO: 1007167 - DNA, 33 bp, Homo sapien
atacaatttagtgtcacaggcaatttgtattgg

SEQ ID NO: 1007168 - DNA, 33 bp, Homo sapien
atacaatttagtgtcataggcaatttgtattgg

SEQ ID NO: 1007169 - DNA, 33 bp, Homo sapien
aaccctgagtaaccagaaatagaaggatctaaa

SEQ ID NO: 1007170 - DNA, 33 bp, Homo sapien
aaccctgagtaaccaggaatagaaggatctaaa

SEQ ID NO: 1007171 - DNA, 33 bp, Homo sapien
atcttcttgtgtcccacgtattttctgtaaatt

SEQ ID NO: 1007172 - DNA, 33 bp, Homo sapien
atcttcttgtgtcccatgtattttctgtaaatt

SEQ ID NO: 1007173 - DNA, 33 bp, Homo sapien
acaatagccacatacaaacaatatagatacaga

SEQ ID NO: 1007174 - DNA, 33 bp, Homo sapien
acaatagccacatacagacaatatagatacaga

SEQ ID NO: 1007175 - DNA, 33 bp, Homo sapien
gaatgtaggtttttcaaatttaagagtgaggtg

SEQ ID NO: 1007176 - DNA, 33 bp, Homo sapien
gaatgtaggtttttcagatttaagagtgaggtg

SEQ ID NO: 1007177 - DNA, 33 bp, Homo sapien
aaagcaatttttttcaacctctcccacagaaaa

SEQ ID NO: 1007178 - DNA, 33 bp, Homo sapien
aaagcaatttttttcaccctctcccacagaaaa

SEQ ID NO: 1007179 - DNA, 33 bp, Homo sapien
ctcctgttagatttgacatccacacgtgtgatc

SEQ ID NO: 1007180 - DNA, 33 bp, Homo sapien
ctcctgttagatttgagatccacacgtgtgatc

SEQ ID NO: 1007181 - DNA, 33 bp, Homo sapien
ttcactttaggctatcaaattcattacacaaaa

SEQ ID NO: 1007182 - DNA, 33 bp, Homo sapien
ttcactttaggctatcgaattcattacacaaaa

SEQ ID NO: 1007183 - DNA, 33 bp, Homo sapien
agtgctataataagcaaaagaatgcaggtgtct

SEQ ID NO: 1007184 - DNA, 33 bp, Homo sapien
agtgctataataagcacaagaatgcaggtgtct

SEQ ID NO: 1007185 - DNA, 33 bp, Homo sapien
acagtagtgccaaacacgatgaccagcatttga

SEQ ID NO: 1007186 - DNA, 33 bp, Homo sapien
acagtagtgccaaacatgatgaccagcatttga

SEQ ID NO: 1007187 - DNA, 33 bp, Homo sapien
gaaacaaaaggagaaaaaatacagtggaagaat

SEQ ID NO: 1007188 - DNA, 33 bp, Homo sapien
gaaacaaaaggagaaagaatacagtggaagaat

SEQ ID NO: 1007189 - DNA, 33 bp, Homo sapien
taaacactggctgttacccatgaagttacagag

SEQ ID NO: 1007190 - DNA, 33 bp, Homo sapien
taaacactggctgttatccatgaagttacagag

SEQ ID NO: 1007191 - DNA, 33 bp, Homo sapien
gaatgtgaaggaaatccaaaaagtatcacttta

SEQ ID NO: 1007192 - DNA, 33 bp, Homo sapien
gaatgtgaaggaaatctaaaaagtatcacttta

SEQ ID NO: 1007193 - DNA, 33 bp, Homo sapien
gctatcaagccatgaaaatatgtgaatgaaact

SEQ ID NO: 1007194 - DNA, 33 bp, Homo sapien
gctatcaagccatgaagatatgtgaatgaaact

SEQ ID NO: 1007195 - DNA, 33 bp, Homo sapien
aaacttgaacgcatatgaccaagtgatataagc

SEQ ID NO: 1007196 - DNA, 33 bp, Homo sapien
aaacttgaacgcatattaccaagtgatataagc

SEQ ID NO: 1007197 - DNA, 33 bp, Homo sapien
aggctacatactgtacaagtccaacaatatgac

SEQ ID NO: 1007198 - DNA, 33 bp, Homo sapien
aggctacatactgtacgagtccaacaatatgac

SEQ ID NO: 1007199 - DNA, 33 bp, Homo sapien
gttcatagagaaatgcaaagtacagagttccag

SEQ ID NO: 1007200 - DNA, 33 bp, Homo sapien
gttcatagagaaatgcgaagtacagagttccag

SEQ ID NO: 1007201 - DNA, 33 bp, Homo sapien
acaaccagcaattaaacttgaatatcagaaatg

SEQ ID NO: 1007202 - DNA, 33 bp, Homo sapien
acaaccagcaattaaatttgaatatcagaaatg

SEQ ID NO: 1007203 - DNA, 33 bp, Homo sapien
ggtgtacaaatgattacgtcactcaggtattga

SEQ ID NO: 1007204 - DNA, 33 bp, Homo sapien
ggtgtacaaatgattatgtcactcaggtattga

SEQ ID NO: 1007205 - DNA, 33 bp, Homo sapien
atatgtgaagaaggccaaaaaatattaccaata

SEQ ID NO: 1007206 - DNA, 33 bp, Homo sapien
atatgtgaagaaggccgaaaaatattaccaata

SEQ ID NO: 1007207 - DNA, 33 bp, Homo sapien
actatagcataataaagtgggatgttaaggacc

SEQ ID NO: 1007208 - DNA, 33 bp, Homo sapien
actatagcataataaattgggatgttaaggacc

SEQ ID NO: 1007209 - DNA, 33 bp, Homo sapien
tataaagatacttgacaaagagtggaaactact

SEQ ID NO: 1007210 - DNA, 33 bp, Homo sapien
tataaagatacttgacgaagagtggaaactact

SEQ ID NO: 1007211 - DNA, 33 bp, Homo sapien
cttccttttaattcagcaacagagtagatactc

SEQ ID NO: 1007212 - DNA, 33 bp, Homo sapien
cttccttttaattcagtaacagagtagatactc

SEQ ID NO: 1007213 - DNA, 33 bp, Homo sapien
aagtctagggtactctgaaggccaactccaagt

SEQ ID NO: 1007214 - DNA, 33 bp, Homo sapien
aagtctagggtactcttaaggccaactccaagt

SEQ ID NO: 1007215 - DNA, 33 bp, Homo sapien
tatttgcctcatacaacggtttttaattcatga

SEQ ID NO: 1007216 - DNA, 33 bp, Homo sapien
tatttgcctcatacaatggtttttaattcatga

SEQ ID NO: 1007217 - DNA, 33 bp, Homo sapien
aaagcgtgggtatgaccaaggaaactaacaagg

SEQ ID NO: 1007218 - DNA, 33 bp, Homo sapien
aaagcgtgggtatgacgaaggaaactaacaagg

SEQ ID NO: 1007219 - DNA, 33 bp, Homo sapien
gtagtgacctatggtagaattttctgatactca

SEQ ID NO: 1007220 - DNA, 33 bp, Homo sapien
gtagtgacctatggtataattttctgatactca

SEQ ID NO: 1007221 - DNA, 33 bp, Homo sapien
aataatcagtagagcaacttgagtttggttagc

SEQ ID NO: 1007222 - DNA, 33 bp, Homo sapien
aataatcagtagagcatcttgagtttggttagc

SEQ ID NO: 1007223 - DNA, 33 bp, Homo sapien
atgtgtactggaggtaactactgtggaagactt

SEQ ID NO: 1007224 - DNA, 33 bp, Homo sapien
atgtgtactggaggtatctactgtggaagactt

SEQ ID NO: 1007225 - DNA, 33 bp, Homo sapien
ttcagacaacattttcactctcacatgaaattt

SEQ ID NO: 1007226 - DNA, 33 bp, Homo sapien
ttcagacaacattttcgctctcacatgaaattt

SEQ ID NO: 1007227 - DNA, 33 bp, Homo sapien
tggtccagtttcatcccctcaggactcaagtat

SEQ ID NO: 1007228 - DNA, 33 bp, Homo sapien
tggtccagtttcatccgctcaggactcaagtat

SEQ ID NO: 1007229 - DNA, 33 bp, Homo sapien
ttattggccacttacacccaacagtaagctttt

SEQ ID NO: 1007230 - DNA, 33 bp, Homo sapien
ttattggccacttacatccaacagtaagctttt

SEQ ID NO: 1007231 - DNA, 33 bp, Homo sapien
atgtctgcatctttgcgcacaaaaaatatacat

SEQ ID NO: 1007232 - DNA, 33 bp, Homo sapien
atgtctgcatctttgctcacaaaaaatatacat

SEQ ID NO: 1007233 - DNA, 33 bp, Homo sapien
taaatgcaaaatgatacggagaagggtagaaag

SEQ ID NO: 1007234 - DNA, 33 bp, Homo sapien
taaatgcaaaatgatagggagaagggtagaaag

SEQ ID NO: 1007235 - DNA, 33 bp, Homo sapien
tgaattccaatgattagaggaaccaggcttata

SEQ ID NO: 1007236 - DNA, 33 bp, Homo sapien
tgaattccaatgattataggaaccaggcttata

SEQ ID NO: 1007237 - DNA, 33 bp, Homo sapien
gaggtatatggcaacactctgtacttttactgt

SEQ ID NO: 1007238 - DNA, 33 bp, Homo sapien
gaggtatatggcaacagtctgtacttttactgt

SEQ ID NO: 1007239 - DNA, 33 bp, Homo sapien
ttcaccaccacttgaactaagtctcatctctca

SEQ ID NO: 1007240 - DNA, 33 bp, Homo sapien
ttcaccaccacttgaattaagtctcatctctca

SEQ ID NO: 1007241 - DNA, 33 bp, Homo sapien
agtggtggtgaatagaaggatgtccatatttgt

SEQ ID NO: 1007242 - DNA, 33 bp, Homo sapien
agtggtggtgaatagagggatgtccatatttgt

SEQ ID NO: 1007243 - DNA, 33 bp, Homo sapien
caagtgatgaaatgtgaatctcctatatacaaa

SEQ ID NO: 1007244 - DNA, 33 bp, Homo sapien
caagtgatgaaatgtgtatctcctatatacaaa

SEQ ID NO: 1007245 - DNA, 33 bp, Homo sapien
atgcattactgcttgcaaaactcatagatacat

SEQ ID NO: 1007246 - DNA, 33 bp, Homo sapien
atgcattactgcttgcgaaactcatagatacat

SEQ ID NO: 1007247 - DNA, 33 bp, Homo sapien
tcttgccagagtttggaattatacaactcttat

SEQ ID NO: 1007248 - DNA, 33 bp, Homo sapien
tcttgccagagtttgggattatacaactcttat

SEQ ID NO: 1007249 - DNA, 33 bp, Homo sapien
tttatgtttctaaagccccaagttgaaggacaa

SEQ ID NO: 1007250 - DNA, 33 bp, Homo sapien
tttatgtttctaaagctccaagttgaaggacaa

SEQ ID NO: 1007251 - DNA, 33 bp, Homo sapien
cagcttaagttatatacctgatgtgaatcccta

SEQ ID NO: 1007252 - DNA, 33 bp, Homo sapien
cagcttaagttatatagctgatgtgaatcccta

SEQ ID NO: 1007253 - DNA, 33 bp, Homo sapien
gtcctacagactgctacgctttatatttttatt

SEQ ID NO: 1007254 - DNA, 33 bp, Homo sapien
gtcctacagactgctatgctttatatttttatt

SEQ ID NO: 1007255 - DNA, 33 bp, Homo sapien
tagggatatgaagctacagtcaattggatgata

SEQ ID NO: 1007256 - DNA, 33 bp, Homo sapien
tagggatatgaagctagagtcaattggatgata

SEQ ID NO: 1007257 - DNA, 33 bp, Homo sapien
tgcaaccattgactttaaaaattgattttctag

SEQ ID NO: 1007258 - DNA, 33 bp, Homo sapien
tgcaaccattgacttttaaaattgattttctag

SEQ ID NO: 1007259 - DNA, 33 bp, Homo sapien
agggtaagcacatctaccccagtgaaatttcag

SEQ ID NO: 1007260 - DNA, 33 bp, Homo sapien
agggtaagcacatctatcccagtgaaatttcag

SEQ ID NO: 1007261 - DNA, 33 bp, Homo sapien
tccttgcaaaatattgaaagaataacacataat

SEQ ID NO: 1007262 - DNA, 33 bp, Homo sapien
tccttgcaaaatattggaagaataacacataat

SEQ ID NO: 1007263 - DNA, 33 bp, Homo sapien
ctcatgtttgtagttacaagaatcctgcctcat

SEQ ID NO: 1007264 - DNA, 33 bp, Homo sapien
ctcatgtttgtagttataagaatcctgcctcat

SEQ ID NO: 1007265 - DNA, 33 bp, Homo sapien
aagataactgggaaaacgaaccatgaaattcag

SEQ ID NO: 1007266 - DNA, 33 bp, Homo sapien
aagataactgggaaaatgaaccatgaaattcag

SEQ ID NO: 1007267 - DNA, 33 bp, Homo sapien
cctatctcctgaagtacgttaaaaggaatctaa

SEQ ID NO: 1007268 - DNA, 33 bp, Homo sapien
cctatctcctgaagtatgttaaaaggaatctaa

SEQ ID NO: 1007269 - DNA, 33 bp, Homo sapien
gtactaatagtggggaatagtagttattgaaaa

SEQ ID NO: 1007270 - DNA, 33 bp, Homo sapien
gtactaatagtggggagtagtagttattgaaaa

SEQ ID NO: 1007271 - DNA, 33 bp, Homo sapien
ctttgtaaatttcacagagtggagatacaaagc

SEQ ID NO: 1007272 - DNA, 33 bp, Homo sapien
ctttgtaaatttcacatagtggagatacaaagc

SEQ ID NO: 1007273 - DNA, 33 bp, Homo sapien
acctttacctcgggctcaaatcatgtaactctc

SEQ ID NO: 1007274 - DNA, 33 bp, Homo sapien
acctttacctcgggctgaaatcatgtaactctc

SEQ ID NO: 1007275 - DNA, 33 bp, Homo sapien
gccgcctctggtgagacaaaaagctgccaaaac

SEQ ID NO: 1007276 - DNA, 33 bp, Homo sapien
gccgcctctggtgagagaaaaagctgccaaaac

SEQ ID NO: 1007277 - DNA, 33 bp, Homo sapien
aaactcaggacatctaaggagagtcacatttca

SEQ ID NO: 1007278 - DNA, 33 bp, Homo sapien
aaactcaggacatctatggagagtcacatttca

SEQ ID NO: 1007279 - DNA, 33 bp, Homo sapien
aaaaggaggagataggcaaatcattagttatca

SEQ ID NO: 1007280 - DNA, 33 bp, Homo sapien
aaaaggaggagataggtaaatcattagttatca

SEQ ID NO: 1007281 - DNA, 33 bp, Homo sapien
atatgggcagctctaacaaggaagggaaaattg

SEQ ID NO: 1007282 - DNA, 33 bp, Homo sapien
atatgggcagctctaagaaggaagggaaaattg

SEQ ID NO: 1007283 - DNA, 33 bp, Homo sapien
gtgtataaattccataccacttgcttaaaagga

SEQ ID NO: 1007284 - DNA, 33 bp, Homo sapien
gtgtataaattccatatcacttgcttaaaagga

SEQ ID NO: 1007285 - DNA, 33 bp, Homo sapien
taagagaaaaaaggaaaagctgcggtaagaaga

SEQ ID NO: 1007286 - DNA, 33 bp, Homo sapien
taagagaaaaaaggaacagctgcggtaagaaga

SEQ ID NO: 1007287 - DNA, 33 bp, Homo sapien
gaaaaactttgtcaaactgtgaaatactcattt

SEQ ID NO: 1007288 - DNA, 33 bp, Homo sapien
gaaaaactttgtcaaattgtgaaatactcattt

SEQ ID NO: 1007289 - DNA, 33 bp, Homo sapien
tctcaaactgagattaacttactgaacataaat

SEQ ID NO: 1007290 - DNA, 33 bp, Homo sapien
tctcaaactgagattatcttactgaacataaat

SEQ ID NO: 1007291 - DNA, 33 bp, Homo sapien
tactttgccatattagcataaggatgtgctttt

SEQ ID NO: 1007292 - DNA, 33 bp, Homo sapien
tactttgccatattagtataaggatgtgctttt

SEQ ID NO: 1007293 - DNA, 33 bp, Homo sapien
acaaacttctttcaacaactttagcaccaaaca

SEQ ID NO: 1007294 - DNA, 33 bp, Homo sapien
acaaacttctttcaaccactttagcaccaaaca

SEQ ID NO: 1007295 - DNA, 33 bp, Homo sapien
gtagatgaatctgaaaattagactgaggacccc

SEQ ID NO: 1007296 - DNA, 33 bp, Homo sapien
gtagatgaatctgaaagttagactgaggacccc

SEQ ID NO: 1007297 - DNA, 33 bp, Homo sapien
caaattttcacatacaagtagtttcaccacacc

SEQ ID NO: 1007298 - DNA, 33 bp, Homo sapien
caaattttcacatacaggtagtttcaccacacc

SEQ ID NO: 1007299 - DNA, 33 bp, Homo sapien
tcaaacacatttggaaacaagactttggaatgc

SEQ ID NO: 1007300 - DNA, 33 bp, Homo sapien
tcaaacacatttggaagcaagactttggaatgc

SEQ ID NO: 1007301 - DNA, 33 bp, Homo sapien
tctaactcaaaatcacacttttactctgacaaa

SEQ ID NO: 1007302 - DNA, 33 bp, Homo sapien
tctaactcaaaatcacgcttttactctgacaaa

SEQ ID NO: 1007303 - DNA, 33 bp, Homo sapien
atgtaatgtgtagtaccctatccacgaatattg

SEQ ID NO: 1007304 - DNA, 33 bp, Homo sapien
atgtaatgtgtagtactctatccacgaatattg

SEQ ID NO: 1007305 - DNA, 33 bp, Homo sapien
tttttaaagcaacagactctactgtaggcatcc

SEQ ID NO: 1007306 - DNA, 33 bp, Homo sapien
tttttaaagcaacagattctactgtaggcatcc

SEQ ID NO: 1007307 - DNA, 33 bp, Homo sapien
aaagggagggcgaatcgaatcttattccacctt

SEQ ID NO: 1007308 - DNA, 33 bp, Homo sapien
aaagggagggcgaatctaatcttattccacctt

SEQ ID NO: 1007309 - DNA, 33 bp, Homo sapien
tttttccaccgcaaagcattattttcacatgga

SEQ ID NO: 1007310 - DNA, 33 bp, Homo sapien
tttttccaccgcaaagtattattttcacatgga

SEQ ID NO: 1007311 - DNA, 33 bp, Homo sapien
tgtagcttttatttgcacttgaccctatgtttt

SEQ ID NO: 1007312 - DNA, 33 bp, Homo sapien
tgtagcttttatttgcgcttgaccctatgtttt

SEQ ID NO: 1007313 - DNA, 33 bp, Homo sapien
tagctcacaaatcaagaagccgcaagctgcaaa

SEQ ID NO: 1007314 - DNA, 33 bp, Homo sapien
tagctcacaaatcaaggagccgcaagctgcaaa

SEQ ID NO: 1007315 - DNA, 33 bp, Homo sapien
tgtatttatcagcttacaaaaatactgtgattg

SEQ ID NO: 1007316 - DNA, 33 bp, Homo sapien
tgtatttatcagcttagaaaaatactgtgattg

SEQ ID NO: 1007317 - DNA, 33 bp, Homo sapien
aattttgttatacgtcaattcatatcaccctca

SEQ ID NO: 1007318 - DNA, 33 bp, Homo sapien
aattttgttatacgtccattcatatcaccctca

SEQ ID NO: 1007319 - DNA, 33 bp, Homo sapien
ttttcaaatacctgaacccaggaagaagctgtc

SEQ ID NO: 1007320 - DNA, 33 bp, Homo sapien
ttttcaaatacctgaatccaggaagaagctgtc

SEQ ID NO: 1007321 - DNA, 33 bp, Homo sapien
tcttctcaattatgccacacttctatccttgtt

SEQ ID NO: 1007322 - DNA, 33 bp, Homo sapien
tcttctcaattatgcctcacttctatccttgtt

SEQ ID NO: 1007323 - DNA, 33 bp, Homo sapien
gtgatggcactgaagcagaagaagacccagaga

SEQ ID NO: 1007324 - DNA, 33 bp, Homo sapien
gtgatggcactgaagctgaagaagacccagaga

SEQ ID NO: 1007325 - DNA, 33 bp, Homo sapien
atccaaacatttccaaatatctctcctcaaaac

SEQ ID NO: 1007326 - DNA, 33 bp, Homo sapien
atccaaacatttccaagtatctctcctcaaaac

SEQ ID NO: 1007327 - DNA, 33 bp, Homo sapien
agtgttgaataacaaaatgagcacaatggaaga

SEQ ID NO: 1007328 - DNA, 33 bp, Homo sapien
agtgttgaataacaaactgagcacaatggaaga

SEQ ID NO: 1007329 - DNA, 33 bp, Homo sapien
tacatagtaatatcagcctagttgacaaagcag

SEQ ID NO: 1007330 - DNA, 33 bp, Homo sapien
tacatagtaatatcaggctagttgacaaagcag

SEQ ID NO: 1007331 - DNA, 33 bp, Homo sapien
gtctgtgtgacagaacccatcattgtgtttagc

SEQ ID NO: 1007332 - DNA, 33 bp, Homo sapien
gtctgtgtgacagaactcatcattgtgtttagc

SEQ ID NO: 1007333 - DNA, 33 bp, Homo sapien
ctagaatattgcgttacgccagaaagcaagaaa

SEQ ID NO: 1007334 - DNA, 33 bp, Homo sapien
ctagaatattgcgttaggccagaaagcaagaaa

SEQ ID NO: 1007335 - DNA, 33 bp, Homo sapien
gaatcattacagccacaaaagaaaggatgatag

SEQ ID NO: 1007336 - DNA, 33 bp, Homo sapien
gaatcattacagccacgaaagaaaggatgatag

SEQ ID NO: 1007337 - DNA, 33 bp, Homo sapien
actgataacatctacaagcatcaaggccatcca

SEQ ID NO: 1007338 - DNA, 33 bp, Homo sapien
actgataacatctacaggcatcaaggccatcca

SEQ ID NO: 1007339 - DNA, 33 bp, Homo sapien
caggatgaaagtgcaaataagacagtctgtgta

SEQ ID NO: 1007340 - DNA, 33 bp, Homo sapien
caggatgaaagtgcaattaagacagtctgtgta

SEQ ID NO: 1007341 - DNA, 33 bp, Homo sapien
attcgatacaatcaagccttctaaaagtgaatt

SEQ ID NO: 1007342 - DNA, 33 bp, Homo sapien
attcgatacaatcaaggcttctaaaagtgaatt

SEQ ID NO: 1007343 - DNA, 33 bp, Homo sapien
aaccacaaaaacttcaccttgccagcattggca

SEQ ID NO: 1007344 - DNA, 33 bp, Homo sapien
aaccacaaaaacttcagcttgccagcattggca

SEQ ID NO: 1007345 - DNA, 33 bp, Homo sapien
aatgtgaaagtgttaccgaaaagaggttccaat

SEQ ID NO: 1007346 - DNA, 33 bp, Homo sapien
aatgtgaaagtgttactgaaaagaggttccaat

SEQ ID NO: 1007347 - DNA, 33 bp, Homo sapien
taattgtaaactgttgcaaggtcaagttttaag

SEQ ID NO: 1007348 - DNA, 33 bp, Homo sapien
taattgtaaactgttgtaaggtcaagttttaag

SEQ ID NO: 1007349 - DNA, 33 bp, Homo sapien
acttaatgaatgaatactgaccatgtgctccga

SEQ ID NO: 1007350 - DNA, 33 bp, Homo sapien
acttaatgaatgaatattgaccatgtgctccga

SEQ ID NO: 1007351 - DNA, 33 bp, Homo sapien
taggtactggcaatgcaatagtgaaaatgatag

SEQ ID NO: 1007352 - DNA, 33 bp, Homo sapien
taggtactggcaatgcgatagtgaaaatgatag

SEQ ID NO: 1007353 - DNA, 33 bp, Homo sapien
aattggataacataaacaggacaaattcctaga

SEQ ID NO: 1007354 - DNA, 33 bp, Homo sapien
aattggataacataaagaggacaaattcctaga

SEQ ID NO: 1007355 - DNA, 33 bp, Homo sapien
tctgcagatgccaaaacgtttatactctttgtg

SEQ ID NO: 1007356 - DNA, 33 bp, Homo sapien
tctgcagatgccaaaatgtttatactctttgtg

SEQ ID NO: 1007357 - DNA, 33 bp, Homo sapien
tagatgattatgccagaaccaaagacattgata

SEQ ID NO: 1007358 - DNA, 33 bp, Homo sapien
tagatgattatgccaggaccaaagacattgata

SEQ ID NO: 1007359 - DNA, 33 bp, Homo sapien
ttaatcacatcttcgaagtccactttatcacat

SEQ ID NO: 1007360 - DNA, 33 bp, Homo sapien
ttaatcacatcttcgaggtccactttatcacat

SEQ ID NO: 1007361 - DNA, 33 bp, Homo sapien
gtatttatggtaagctcaaaaatgacccccgaa

SEQ ID NO: 1007362 - DNA, 33 bp, Homo sapien
gtatttatggtaagctgaaaaatgacccccgaa

SEQ ID NO: 1007363 - DNA, 33 bp, Homo sapien
ttatcttcaagtgaaagtatgcattcaatctca

SEQ ID NO: 1007364 - DNA, 33 bp, Homo sapien
ttatcttcaagtgaaattatgcattcaatctca

SEQ ID NO: 1007365 - DNA, 33 bp, Homo sapien
tgaaggagacttgacactatcagggtagttctt

SEQ ID NO: 1007366 - DNA, 33 bp, Homo sapien
tgaaggagacttgacagtatcagggtagttctt

SEQ ID NO: 1007367 - DNA, 33 bp, Homo sapien
tgtgtacacatgaaaggctcaaagttattgtga

SEQ ID NO: 1007368 - DNA, 33 bp, Homo sapien
tgtgtacacatgaaagtctcaaagttattgtga

SEQ ID NO: 1007369 - DNA, 33 bp, Homo sapien
tgttcccctccttctacgccaaatgctgctgct

SEQ ID NO: 1007370 - DNA, 33 bp, Homo sapien
tgttcccctccttctaggccaaatgctgctgct

SEQ ID NO: 1007371 - DNA, 33 bp, Homo sapien
gagtctgcgttttacaaattctccaagtaaatc

SEQ ID NO: 1007372 - DNA, 33 bp, Homo sapien
gagtctgcgttttacacattctccaagtaaatc

SEQ ID NO: 1007373 - DNA, 33 bp, Homo sapien
cttgttgccattggcaccaaggaaccagtttta

SEQ ID NO: 1007374 - DNA, 33 bp, Homo sapien
cttgttgccattggcatcaaggaaccagtttta

SEQ ID NO: 1007375 - DNA, 33 bp, Homo sapien
acagtttgtcagcgaaaccttcaatcttaacta

SEQ ID NO: 1007376 - DNA, 33 bp, Homo sapien
acagtttgtcagcgaacccttcaatcttaacta

SEQ ID NO: 1007377 - DNA, 33 bp, Homo sapien
tttccctataatggacaaaggatgtttattaca

SEQ ID NO: 1007378 - DNA, 33 bp, Homo sapien
tttccctataatggaccaaggatgtttattaca

SEQ ID NO: 1007379 - DNA, 33 bp, Homo sapien
ggagagagaaacgtagaaagaataattcgagga

SEQ ID NO: 1007380 - DNA, 33 bp, Homo sapien
ggagagagaaacgtaggaagaataattcgagga

SEQ ID NO: 1007381 - DNA, 33 bp, Homo sapien
aagatgcctaaaattcccagactaagtgatcaa

SEQ ID NO: 1007382 - DNA, 33 bp, Homo sapien
aagatgcctaaaattctcagactaagtgatcaa

SEQ ID NO: 1007383 - DNA, 33 bp, Homo sapien
gtttcatcatgaggaaaggaaaagggagctgac

SEQ ID NO: 1007384 - DNA, 33 bp, Homo sapien
gtttcatcatgaggaacggaaaagggagctgac

SEQ ID NO: 1007385 - DNA, 33 bp, Homo sapien
atgggatgtccacttacatttcctctgatgaac

SEQ ID NO: 1007386 - DNA, 33 bp, Homo sapien
atgggatgtccacttatatttcctctgatgaac

SEQ ID NO: 1007387 - DNA, 33 bp, Homo sapien
ctggtgtcatattggaaaagattttagagtcaa

SEQ ID NO: 1007388 - DNA, 33 bp, Homo sapien
ctggtgtcatattggagaagattttagagtcaa

SEQ ID NO: 1007389 - DNA, 33 bp, Homo sapien
aattccagaagatgacacacgatacggagaagc

SEQ ID NO: 1007390 - DNA, 33 bp, Homo sapien
aattccagaagatgacgcacgatacggagaagc

SEQ ID NO: 1007391 - DNA, 33 bp, Homo sapien
acactatctactataccatgggtttctttgtgt

SEQ ID NO: 1007392 - DNA, 33 bp, Homo sapien
acactatctactatactatgggtttctttgtgt

SEQ ID NO: 1007393 - DNA, 33 bp, Homo sapien
ttacataagatttgacaatttccaagaattcta

SEQ ID NO: 1007394 - DNA, 33 bp, Homo sapien
ttacataagatttgaccatttccaagaattcta

SEQ ID NO: 1007395 - DNA, 33 bp, Homo sapien
tctgcttttcctagtaacttacagaggaatatt

SEQ ID NO: 1007396 - DNA, 33 bp, Homo sapien
tctgcttttcctagtatcttacagaggaatatt

SEQ ID NO: 1007397 - DNA, 33 bp, Homo sapien
gaactgtggtaatctacagaagatcaagcacag

SEQ ID NO: 1007398 - DNA, 33 bp, Homo sapien
gaactgtggtaatctatagaagatcaagcacag

SEQ ID NO: 1007399 - DNA, 33 bp, Homo sapien
ttttttctacattcaacagggttacagtttcaa

SEQ ID NO: 1007400 - DNA, 33 bp, Homo sapien
ttttttctacattcaatagggttacagtttcaa

SEQ ID NO: 1007401 - DNA, 33 bp, Homo sapien
gaatactcattctggaagtatttagactaagac

SEQ ID NO: 1007402 - DNA, 33 bp, Homo sapien
gaatactcattctggatgtatttagactaagac

SEQ ID NO: 1007403 - DNA, 33 bp, Homo sapien
cctttcagcctgaaaacgtcttggttctctgat

SEQ ID NO: 1007404 - DNA, 33 bp, Homo sapien
cctttcagcctgaaaatgtcttggttctctgat

SEQ ID NO: 1007405 - DNA, 33 bp, Homo sapien
ccctatttggaagatacattcagcagctcatgt

SEQ ID NO: 1007406 - DNA, 33 bp, Homo sapien
ccctatttggaagatatattcagcagctcatgt

SEQ ID NO: 1007407 - DNA, 33 bp, Homo sapien
tcaattctgctgctcaataactccagcaaaaga

SEQ ID NO: 1007408 - DNA, 33 bp, Homo sapien
tcaattctgctgctcagtaactccagcaaaaga

SEQ ID NO: 1007409 - DNA, 33 bp, Homo sapien
tctcctctatagcctgaataattttctcataac

SEQ ID NO: 1007410 - DNA, 33 bp, Homo sapien
tctcctctatagcctgcataattttctcataac

SEQ ID NO: 1007411 - DNA, 33 bp, Homo sapien
gataagctaacaggaccgtagtggtgaagcagg

SEQ ID NO: 1007412 - DNA, 33 bp, Homo sapien
gataagctaacaggacggtagtggtgaagcagg

SEQ ID NO: 1007413 - DNA, 33 bp, Homo sapien
agagtaatcttctaagacacaagtcagatttta

SEQ ID NO: 1007414 - DNA, 33 bp, Homo sapien
agagtaatcttctaaggcacaagtcagatttta

SEQ ID NO: 1007415 - DNA, 33 bp, Homo sapien
gttatgtagttcaggacgtttgttgatgatgaa

SEQ ID NO: 1007416 - DNA, 33 bp, Homo sapien
gttatgtagttcaggatgtttgttgatgatgaa

SEQ ID NO: 1007417 - DNA, 33 bp, Homo sapien
atgggaactattattcaagataagatttgggtg

SEQ ID NO: 1007418 - DNA, 33 bp, Homo sapien
atgggaactattattcgagataagatttgggtg

SEQ ID NO: 1007419 - DNA, 33 bp, Homo sapien
ctaataccctgaaccactgagacacagaacagg

SEQ ID NO: 1007420 - DNA, 33 bp, Homo sapien
ctaataccctgaaccattgagacacagaacagg

SEQ ID NO: 1007421 - DNA, 33 bp, Homo sapien
tctgtggagaagtgaactagaccagcagagtaa

SEQ ID NO: 1007422 - DNA, 33 bp, Homo sapien
tctgtggagaagtgaagtagaccagcagagtaa

SEQ ID NO: 1007423 - DNA, 33 bp, Homo sapien
tggttaaatgaggccacaaagaaagtttctaat

SEQ ID NO: 1007424 - DNA, 33 bp, Homo sapien
tggttaaatgaggccagaaagaaagtttctaat

SEQ ID NO: 1007425 - DNA, 33 bp, Homo sapien
gatgtctaatttcctgaacgccatttgttgagg

SEQ ID NO: 1007426 - DNA, 33 bp, Homo sapien
gatgtctaatttcctggacgccatttgttgagg

SEQ ID NO: 1007427 - DNA, 33 bp, Homo sapien
atttcctttctaatcccgactaaatccaagact

SEQ ID NO: 1007428 - DNA, 33 bp, Homo sapien
atttcctttctaatcctgactaaatccaagact

SEQ ID NO: 1007429 - DNA, 33 bp, Homo sapien
atcttctagtgaagtcacagccatcatagtgtc

SEQ ID NO: 1007430 - DNA, 33 bp, Homo sapien
atcttctagtgaagtcgcagccatcatagtgtc

SEQ ID NO: 1007431 - DNA, 33 bp, Homo sapien
acataaaatctgtaaacgccaactagacatgga

SEQ ID NO: 1007432 - DNA, 33 bp, Homo sapien
acataaaatctgtaaatgccaactagacatgga

SEQ ID NO: 1007433 - DNA, 33 bp, Homo sapien
aggagcagtaccaccccgagacaagtcctgaaa

SEQ ID NO: 1007434 - DNA, 33 bp, Homo sapien
aggagcagtaccaccctgagacaagtcctgaaa

SEQ ID NO: 1007435 - DNA, 33 bp, Homo sapien
acttctgaggtgattgaacttgtttggtttcta

SEQ ID NO: 1007436 - DNA, 33 bp, Homo sapien
acttctgaggtgattgtacttgtttggtttcta

SEQ ID NO: 1007437 - DNA, 33 bp, Homo sapien
cgacaagattttggcactgagatatatgtgtca

SEQ ID NO: 1007438 - DNA, 33 bp, Homo sapien
cgacaagattttggcattgagatatatgtgtca

SEQ ID NO: 1007439 - DNA, 33 bp, Homo sapien
actaatgcaaaatgcaaaatttagcttcatttg

SEQ ID NO: 1007440 - DNA, 33 bp, Homo sapien
actaatgcaaaatgcacaatttagcttcatttg

SEQ ID NO: 1007441 - DNA, 33 bp, Homo sapien
aggaaagttttaaaccacagagtattgaattgc

SEQ ID NO: 1007442 - DNA, 33 bp, Homo sapien
aggaaagttttaaaccgcagagtattgaattgc

SEQ ID NO: 1007443 - DNA, 33 bp, Homo sapien
taattcatcatggttgcattagagaactatagt

SEQ ID NO: 1007444 - DNA, 33 bp, Homo sapien
taattcatcatggttgtattagagaactatagt

SEQ ID NO: 1007445 - DNA, 33 bp, Homo sapien
tgcttccatgaatgaaagaagatgaaggtgaac

SEQ ID NO: 1007446 - DNA, 33 bp, Homo sapien
tgcttccatgaatgaaggaagatgaaggtgaac

SEQ ID NO: 1007447 - DNA, 33 bp, Homo sapien
aacactataccacctcacaagtagtactagtaa

SEQ ID NO: 1007448 - DNA, 33 bp, Homo sapien
aacactataccacctcgcaagtagtactagtaa

SEQ ID NO: 1007449 - DNA, 33 bp, Homo sapien; identical to SEQ ID NO: 1007447

SEQ ID NO: 1007450 - DNA, 33 bp, Homo sapien; identical to SEQ ID NO: 1007448

SEQ ID NO: 1007451 - DNA, 33 bp, Homo sapien
atctatgtactgacaagtgttctccagaaaaag

SEQ ID NO: 1007452 - DNA, 33 bp, Homo sapien
atctatgtactgacaattgttctccagaaaaag

SEQ ID NO: 1007453 - DNA, 33 bp, Homo sapien
ccctggttctaattcaactctctaaagcttaag

SEQ ID NO: 1007454 - DNA, 33 bp, Homo sapien
ccctggttctaattcacctctctaaagcttaag

SEQ ID NO: 1007455 - DNA, 33 bp, Homo sapien
ctgtttccactgctggaattgatttagcacatg

SEQ ID NO: 1007456 - DNA, 33 bp, Homo sapien
ctgtttccactgctgggattgatttagcacatg

SEQ ID NO: 1007457 - DNA, 33 bp, Homo sapien
gcattgaataaaatcactcagctacaaatataa

SEQ ID NO: 1007458 - DNA, 33 bp, Homo sapien
gcattgaataaaatcagtcagctacaaatataa

SEQ ID NO: 1007459 - DNA, 33 bp, Homo sapien
gtttcagagttgaacccgagatgctagaaactt

SEQ ID NO: 1007460 - DNA, 33 bp, Homo sapien
gtttcagagttgaacctgagatgctagaaactt

SEQ ID NO: 1007461 - DNA, 33 bp, Homo sapien
agaaagtggggagtacggattggttggattgaa

SEQ ID NO: 1007462 - DNA, 33 bp, Homo sapien
agaaagtggggagtactgattggttggattgaa

SEQ ID NO: 1007463 - DNA, 33 bp, Homo sapien
tggttggattgaagacaggatcatagggagttg

SEQ ID NO: 1007464 - DNA, 33 bp, Homo sapien
tggttggattgaagacgggatcatagggagttg

SEQ ID NO: 1007465 - DNA, 33 bp, Homo sapien
ctctacttcctatacgaccaagatatgaattct

SEQ ID NO: 1007466 - DNA, 33 bp, Homo sapien
ctctacttcctatacgcccaagatatgaattct

SEQ ID NO: 1007467 - DNA, 33 bp, Homo sapien
atggatatagcctctaaaaactagaaaaataat

SEQ ID NO: 1007468 - DNA, 33 bp, Homo sapien
atggatatagcctctacaaactagaaaaataat

SEQ ID NO: 1007469 - DNA, 33 bp, Homo sapien
tgtctatcttggaaaaccaaactagtctatgta

SEQ ID NO: 1007470 - DNA, 33 bp, Homo sapien
tgtctatcttggaaaatcaaactagtctatgta

SEQ ID NO: 1007471 - DNA, 33 bp, Homo sapien
tgggaaatagagtcaccagcaaacagtgcacgc

SEQ ID NO: 1007472 - DNA, 33 bp, Homo sapien
tgggaaatagagtcactagcaaacagtgcacgc

SEQ ID NO: 1007473 - DNA, 33 bp, Homo sapien
tcccttctggaatgtcaaccttgctgtaaggcc

SEQ ID NO: 1007474 - DNA, 33 bp, Homo sapien
tcccttctggaatgtcgaccttgctgtaaggcc

SEQ ID NO: 1007475 - DNA, 33 bp, Homo sapien
cgaccccaactcctgcccactgagcaccttacg

SEQ ID NO: 1007476 - DNA, 33 bp, Homo sapien
cgaccccaactcctgcgcactgagcaccttacg

SEQ ID NO: 1007477 - DNA, 33 bp, Homo sapien
agaggcttagaggaccagacattttgaagtaga

SEQ ID NO: 1007478 - DNA, 33 bp, Homo sapien
agaggcttagaggaccggacattttgaagtaga

SEQ ID NO: 1007479 - DNA, 33 bp, Homo sapien
ctaaatgggagagggcagagatacaatagatac

SEQ ID NO: 1007480 - DNA, 33 bp, Homo sapien
ctaaatgggagagggcggagatacaatagatac

SEQ ID NO: 1007481 - DNA, 33 bp, Homo sapien
agtttgtcctacgtaagtggtctaatggccaag

SEQ ID NO: 1007482 - DNA, 33 bp, Homo sapien
agtttgtcctacgtaattggtctaatggccaag

SEQ ID NO: 1007483 - DNA, 33 bp, Homo sapien
aaccgtattgcagttcaactttttcttctaccc

SEQ ID NO: 1007484 - DNA, 33 bp, Homo sapien
aaccgtattgcagttcgactttttcttctaccc

SEQ ID NO: 1007485 - DNA, 33 bp, Homo sapien
gcagagaattcctagagtaggactcacctgtgt

SEQ ID NO: 1007486 - DNA, 33 bp, Homo sapien
gcagagaattcctagattaggactcacctgtgt

SEQ ID NO: 1007487 - DNA, 33 bp, Homo sapien
cttcacactctgctccaattgacttatttccca

SEQ ID NO: 1007488 - DNA, 33 bp, Homo sapien
cttcacactctgctccgattgacttatttccca

SEQ ID NO: 1007489 - DNA, 33 bp, Homo sapien
agactccttaattaaacactgtacttacagcag

SEQ ID NO: 1007490 - DNA, 33 bp, Homo sapien
agactccttaattaaagactgtacttacagcag

SEQ ID NO: 1007491 - DNA, 33 bp, Homo sapien
gtatactcaatgcttgcaacttgttttaaactc

SEQ ID NO: 1007492 - DNA, 33 bp, Homo sapien
gtatactcaatgcttgtaacttgttttaaactc

SEQ ID NO: 1007493 - DNA, 33 bp, Homo sapien
ctactgcttacttgaaggtgcctgacaaaccca

SEQ ID NO: 1007494 - DNA, 33 bp, Homo sapien
ctactgcttacttgaatgtgcctgacaaaccca

SEQ ID NO: 1007495 - DNA, 33 bp, Homo sapien
attgacattgcttttacgacttagaaggaggtc

SEQ ID NO: 1007496 - DNA, 33 bp, Homo sapien
attgacattgcttttatgacttagaaggaggtc

SEQ ID NO: 1007497 - DNA, 33 bp, Homo sapien
aaacttactcacacccaagatctcccacctata

SEQ ID NO: 1007498 - DNA, 33 bp, Homo sapien
aaacttactcacacccgagatctcccacctata

SEQ ID NO: 1007499 - DNA, 33 bp, Homo sapien
accacattgtaacaaaaggttcaggtggaaaat

SEQ ID NO: 1007500 - DNA, 33 bp, Homo sapien
accacattgtaacaaatggttcaggtggaaaat

SEQ ID NO: 1007501 - DNA, 33 bp, Homo sapien
gcatgaggatagggacaagatagacaatctctt

SEQ ID NO: 1007502 - DNA, 33 bp, Homo sapien
gcatgaggatagggaccagatagacaatctctt

SEQ ID NO: 1007503 - DNA, 33 bp, Homo sapien
tgaaattcaagaggagaatgtcttgaaaggaat

SEQ ID NO: 1007504 - DNA, 33 bp, Homo sapien
tgaaattcaagaggaggatgtcttgaaaggaat

SEQ ID NO: 1007505 - DNA, 33 bp, Homo sapien
tttgggaagaacagaagataagggtgaaactgt

SEQ ID NO: 1007506 - DNA, 33 bp, Homo sapien
tttgggaagaacagaatataagggtgaaactgt

SEQ ID NO: 1007507 - DNA, 33 bp, Homo sapien
ctgtagtttgtagaaactgaccaaattgttcgc

SEQ ID NO: 1007508 - DNA, 33 bp, Homo sapien
ctgtagtttgtagaaattgaccaaattgttcgc

SEQ ID NO: 1007509 - DNA, 33 bp, Homo sapien
gctctctcttcggacacgttcttttctcagctt

SEQ ID NO: 1007510 - DNA, 33 bp, Homo sapien
gctctctcttcggacatgttcttttctcagctt

SEQ ID NO: 1007511 - DNA, 33 bp, Homo sapien
catttgtcttaaattcaacacagacagcagaac

SEQ ID NO: 1007512 - DNA, 33 bp, Homo sapien
catttgtcttaaattcgacacagacagcagaac

SEQ ID NO: 1007513 - DNA, 33 bp, Homo sapien
ttcttagtttgccatgaacagcattttgcaaac

SEQ ID NO: 1007514 - DNA, 33 bp, Homo sapien
ttcttagtttgccatggacagcattttgcaaac

SEQ ID NO: 1007515 - DNA, 33 bp, Homo sapien
tgaaatttgaagcccaaatgaggtaccactaca

SEQ ID NO: 1007516 - DNA, 33 bp, Homo sapien
tgaaatttgaagcccagatgaggtaccactaca

SEQ ID NO: 1007517 - DNA, 33 bp, Homo sapien
ttcacgtaacgtctttcgatgccacattgtcct

SEQ ID NO: 1007518 - DNA, 33 bp, Homo sapien
ttcacgtaacgtcttttgatgccacattgtcct

SEQ ID NO: 1007519 - DNA, 33 bp, Homo sapien
aacaggagaaggaagcagatttgaacaagaaag

SEQ ID NO: 1007520 - DNA, 33 bp, Homo sapien
aacaggagaaggaagcggatttgaacaagaaag

SEQ ID NO: 1007521 - DNA, 33 bp, Homo sapien
agaaatttatgaagaacacacaaccacggtgaa

SEQ ID NO: 1007522 - DNA, 33 bp, Homo sapien
agaaatttatgaagaagacacaaccacggtgaa

SEQ ID NO: 1007523 - DNA, 33 bp, Homo sapien
acaacctactaaaggacctagaacgctatctag

SEQ ID NO: 1007524 - DNA, 33 bp, Homo sapien
acaacctactaaaggatctagaacgctatctag

SEQ ID NO: 1007525 - DNA, 33 bp, Homo sapien
gccctgtgtaattctacggacccagtacagcct

SEQ ID NO: 1007526 - DNA, 33 bp, Homo sapien
gccctgtgtaattctagggacccagtacagcct

SEQ ID NO: 1007527 - DNA, 33 bp, Homo sapien
tcatgtccatgtccaacagaaaagaataagaac

SEQ ID NO: 1007528 - DNA, 33 bp, Homo sapien
tcatgtccatgtccaatagaaaagaataagaac

SEQ ID NO: 1007529 - DNA, 33 bp, Homo sapien
acactttcaaaagatcaaaatacagaccatctg

SEQ ID NO: 1007530 - DNA, 33 bp, Homo sapien
acactttcaaaagatctaaatacagaccatctg

SEQ ID NO: 1007531 - DNA, 33 bp, Homo sapien
agcttcctttacttgccaaggactaaatgtcac

SEQ ID NO: 1007532 - DNA, 33 bp, Homo sapien
agcttcctttacttgctaaggactaaatgtcac

SEQ ID NO: 1007533 - DNA, 33 bp, Homo sapien
ttacagcagatgcagacgttgagtaatttgctt

SEQ ID NO: 1007534 - DNA, 33 bp, Homo sapien
ttacagcagatgcagaggttgagtaatttgctt

SEQ ID NO: 1007535 - DNA, 33 bp, Homo sapien
tatggaactccattagaaattacctgtgtggct

SEQ ID NO: 1007536 - DNA, 33 bp, Homo sapien
tatggaactccattagcaattacctgtgtggct

SEQ ID NO: 1007537 - DNA, 33 bp, Homo sapien
tacagaaacagcagaaagatcatggttaccaga

SEQ ID NO: 1007538 - DNA, 33 bp, Homo sapien
tacagaaacagcagaaggatcatggttaccaga

SEQ ID NO: 1007539 - DNA, 33 bp, Homo sapien
atttacccacgttataacatcataaatagcagt

SEQ ID NO: 1007540 - DNA, 33 bp, Homo sapien
atttacccacgttatagcatcataaatagcagt

SEQ ID NO: 1007541 - DNA, 33 bp, Homo sapien
gatcagtttcacaaaaaacaattttgccatgga

SEQ ID NO: 1007542 - DNA, 33 bp, Homo sapien
gatcagtttcacaaaagacaattttgccatgga

SEQ ID NO: 1007543 - DNA, 33 bp, Homo sapien
aacactttggaacaagacaaagatataagctct

SEQ ID NO: 1007544 - DNA, 33 bp, Homo sapien
aacactttggaacaaggcaaagatataagctct

SEQ ID NO: 1007545 - DNA, 33 bp, Homo sapien
gctccctgtaacaaaaggcaaataaacaaagaa

SEQ ID NO: 1007546 - DNA, 33 bp, Homo sapien
gctccctgtaacaaaatgcaaataaacaaagaa

SEQ ID NO: 1007547 - DNA, 33 bp, Homo sapien
ggtaagcctggtagccaagacaaccatgctgac

SEQ ID NO: 1007548 - DNA, 33 bp, Homo sapien
ggtaagcctggtagccgagacaaccatgctgac

SEQ ID NO: 1007549 - DNA, 33 bp, Homo sapien
ctattatctacttatacgctgaatccaggtaat

SEQ ID NO: 1007550 - DNA, 33 bp, Homo sapien
ctattatctacttatatgctgaatccaggtaat

SEQ ID NO: 1007551 - DNA, 33 bp, Homo sapien
catatattcttttggacctcaattccttaatgt

SEQ ID NO: 1007552 - DNA, 33 bp, Homo sapien
catatattcttttggatctcaattccttaatgt

SEQ ID NO: 1007553 - DNA, 33 bp, Homo sapien
acaaacacctgacaccactctcctattttgatg

SEQ ID NO: 1007554 - DNA, 33 bp, Homo sapien
acaaacacctgacaccgctctcctattttgatg

SEQ ID NO: 1007555 - DNA, 33 bp, Homo sapien
gaaatattaaatcacagcattagaaaggtatga

SEQ ID NO: 1007556 - DNA, 33 bp, Homo sapien
gaaatattaaatcacatcattagaaaggtatga

SEQ ID NO: 1007557 - DNA, 33 bp, Homo sapien
cataaatacaaaatgactatgagcaaaagttca

SEQ ID NO: 1007558 - DNA, 33 bp, Homo sapien
cataaatacaaaatgagtatgagcaaaagttca

SEQ ID NO: 1007559 - DNA, 33 bp, Homo sapien
gctcagtgatgctctacaatttagcttcctgca

SEQ ID NO: 1007560 - DNA, 33 bp, Homo sapien
gctcagtgatgctctataatttagcttcctgca

SEQ ID NO: 1007561 - DNA, 33 bp, Homo sapien
taatgacctgaatctacacctgagtctaaatca

SEQ ID NO: 1007562 - DNA, 33 bp, Homo sapien
taatgacctgaatctatacctgagtctaaatca

SEQ ID NO: 1007563 - DNA, 33 bp, Homo sapien
gctccaccctttgtaccgagggaattgtcatct

SEQ ID NO: 1007564 - DNA, 33 bp, Homo sapien
gctccaccctttgtactgagggaattgtcatct

SEQ ID NO: 1007565 - DNA, 33 bp, Homo sapien
tgcttaaaatagaacaaatggatatgcattttt

SEQ ID NO: 1007566 - DNA, 33 bp, Homo sapien
tgcttaaaatagaacacatggatatgcattttt

SEQ ID NO: 1007567 - DNA, 33 bp, Homo sapien
aataatgagaaagagacgtggatggagcctaga

SEQ ID NO: 1007568 - DNA, 33 bp, Homo sapien
aataatgagaaagagatgtggatggagcctaga

SEQ ID NO: 1007569 - DNA, 33 bp, Homo sapien
actaaacacagccataaaataaatagcactttt

SEQ ID NO: 1007570 - DNA, 33 bp, Homo sapien
actaaacacagccatacaataaatagcactttt

SEQ ID NO: 1007571 - DNA, 33 bp, Homo sapien
taatttttccaaagtagacactgctaaaaacac

SEQ ID NO: 1007572 - DNA, 33 bp, Homo sapien
taatttttccaaagtatacactgctaaaaacac

SEQ ID NO: 1007573 - DNA, 33 bp, Homo sapien
tcctgtgacatttcaaaaagtatttgctatggc

SEQ ID NO: 1007574 - DNA, 33 bp, Homo sapien
tcctgtgacatttcaagaagtatttgctatggc

SEQ ID NO: 1007575 - DNA, 33 bp, Homo sapien
agttttgaagtgctaacataatacccatggaga

SEQ ID NO: 1007576 - DNA, 33 bp, Homo sapien
agttttgaagtgctaatataatacccatggaga

SEQ ID NO: 1007577 - DNA, 33 bp, Homo sapien
tatcacggtccaaaagcaggttgcacactgaag

SEQ ID NO: 1007578 - DNA, 33 bp, Homo sapien
tatcacggtccaaaagtaggttgcacactgaag

SEQ ID NO: 1007579 - DNA, 33 bp, Homo sapien
agtcaacaagattttaagtactgcaaaaacaaa

SEQ ID NO: 1007580 - DNA, 33 bp, Homo sapien
agtcaacaagattttacgtactgcaaaaacaaa

SEQ ID NO: 1007581 - DNA, 33 bp, Homo sapien
gatctgaagaggtgaaaaggtgtaggtaggagt

SEQ ID NO: 1007582 - DNA, 33 bp, Homo sapien
gatctgaagaggtgaacaggtgtaggtaggagt

SEQ ID NO: 1007583 - DNA, 33 bp, Homo sapien
tttgtgtgtaactcagaattaagactctacatg

SEQ ID NO: 1007584 - DNA, 33 bp, Homo sapien
tttgtgtgtaactcaggattaagactctacatg

SEQ ID NO: 1007585 - DNA, 33 bp, Homo sapien
ctcactgattcacctacagtaacttccagtcct

SEQ ID NO: 1007586 - DNA, 33 bp, Homo sapien
ctcactgattcacctatagtaacttccagtcct

SEQ ID NO: 1007587 - DNA, 33 bp, Homo sapien
caaatggatattcaaacggaaaattatttataa

SEQ ID NO: 1007588 - DNA, 33 bp, Homo sapien
caaatggatattcaaatggaaaattatttataa

SEQ ID NO: 1007589 - DNA, 33 bp, Homo sapien
tgcttaccattttgaaacatggaatatgaaaaa

SEQ ID NO: 1007590 - DNA, 33 bp, Homo sapien
tgcttaccattttgaagcatggaatatgaaaaa

SEQ ID NO: 1007591 - DNA, 33 bp, Homo sapien
ttttttaaagaacagactcagagtccaaatctc

SEQ ID NO: 1007592 - DNA, 33 bp, Homo sapien
ttttttaaagaacagattcagagtccaaatctc

SEQ ID NO: 1007593 - DNA, 33 bp, Homo sapien
cccaaatccttgagtacctgaatgagattactt

SEQ ID NO: 1007594 - DNA, 33 bp, Homo sapien
cccaaatccttgagtagctgaatgagattactt

SEQ ID NO: 1007595 - DNA, 33 bp, Homo sapien
tgacaagcttatcagcagatttagacagtaaca

SEQ ID NO: 1007596 - DNA, 33 bp, Homo sapien
tgacaagcttatcagcggatttagacagtaaca

SEQ ID NO: 1007597 - DNA, 33 bp, Homo sapien
ttaaatgttggagctacaaaatatgtaagtcaa

SEQ ID NO: 1007598 - DNA, 33 bp, Homo sapien
ttaaatgttggagctagaaaatatgtaagtcaa

SEQ ID NO: 1007599 - DNA, 33 bp, Homo sapien
ccctcctctgctgtagcatcatagacctaggac

SEQ ID NO: 1007600 - DNA, 33 bp, Homo sapien
ccctcctctgctgtagtatcatagacctaggac

SEQ ID NO: 1007601 - DNA, 33 bp, Homo sapien
attcttggctgaataaactgttaaattgtaggt

SEQ ID NO: 1007602 - DNA, 33 bp, Homo sapien
attcttggctgaataagctgttaaattgtaggt

SEQ ID NO: 1007603 - DNA, 33 bp, Homo sapien
atgggaaccacactcacggaaggaaggaaagga

SEQ ID NO: 1007604 - DNA, 33 bp, Homo sapien
atgggaaccacactcatggaaggaaggaaagga

SEQ ID NO: 1007605 - DNA, 33 bp, Homo sapien
ttagaagatagaacaacaaagaagacatgagca

SEQ ID NO: 1007606 - DNA, 33 bp, Homo sapien
ttagaagatagaacaagaaagaagacatgagca

SEQ ID NO: 1007607 - DNA, 33 bp, Homo sapien
ttatttatcacataaacctctcataataacatg

SEQ ID NO: 1007608 - DNA, 33 bp, Homo sapien
ttatttatcacataaatctctcataataacatg

SEQ ID NO: 1007609 - DNA, 33 bp, Homo sapien
aatcctgaaggagttggatggctacattattta

SEQ ID NO: 1007610 - DNA, 33 bp, Homo sapien
aatcctgaaggagttgtatggctacattattta

SEQ ID NO: 1007611 - DNA, 33 bp, Homo sapien
aggtaaattactaaaaatcgaattactaggcca

SEQ ID NO: 1007612 - DNA, 33 bp, Homo sapien
aggtaaattactaaaactcgaattactaggcca

SEQ ID NO: 1007613 - DNA, 33 bp, Homo sapien
ataaagcttatgtagacaactttaaataaaatt

SEQ ID NO: 1007614 - DNA, 33 bp, Homo sapien
ataaagcttatgtagagaactttaaataaaatt

SEQ ID NO: 1007615 - DNA, 33 bp, Homo sapien
ggttctgggataaagactcagaaattagatggg

SEQ ID NO: 1007616 - DNA, 33 bp, Homo sapien
ggttctgggataaagagtcagaaattagatggg

SEQ ID NO: 1007617 - DNA, 33 bp, Homo sapien
aaacactgacttgctacaaagatgtcactgttc

SEQ ID NO: 1007618 - DNA, 33 bp, Homo sapien
aaacactgacttgctataaagatgtcactgttc

SEQ ID NO: 1007619 - DNA, 33 bp, Homo sapien
ttacggcctgcagatacgtaatttatgctgttt

SEQ ID NO: 1007620 - DNA, 33 bp, Homo sapien
ttacggcctgcagatatgtaatttatgctgttt

SEQ ID NO: 1007621 - DNA, 33 bp, Homo sapien
aagaccatgtctttcaaattagctagaaaaata

SEQ ID NO: 1007622 - DNA, 33 bp, Homo sapien
aagaccatgtctttcagattagctagaaaaata

SEQ ID NO: 1007623 - DNA, 33 bp, Homo sapien
gatttttaattaaggccctatttgcacacttgt

SEQ ID NO: 1007624 - DNA, 33 bp, Homo sapien
gatttttaattaaggctctatttgcacacttgt

SEQ ID NO: 1007625 - DNA, 33 bp, Homo sapien
tagaccctctaggaccaacatgatctctctcct

SEQ ID NO: 1007626 - DNA, 33 bp, Homo sapien
tagaccctctaggacccacatgatctctctcct

SEQ ID NO: 1007627 - DNA, 33 bp, Homo sapien
tctcggttaagacattcaactttctgggcctca

SEQ ID NO: 1007628 - DNA, 33 bp, Homo sapien
tctcggttaagacattgaactttctgggcctca

SEQ ID NO: 1007629 - DNA, 33 bp, Homo sapien
ctcatgtcacgtggagaaacgaatccttccatg

SEQ ID NO: 1007630 - DNA, 33 bp, Homo sapien
ctcatgtcacgtggaggaacgaatccttccatg

SEQ ID NO: 1007631 - DNA, 33 bp, Homo sapien
gaggtcatgactgacgcaaaagacttcagagac

SEQ ID NO: 1007632 - DNA, 33 bp, Homo sapien
gaggtcatgactgacgtaaaagacttcagagac

SEQ ID NO: 1007633 - DNA, 33 bp, Homo sapien
tgattttctgctaaaacagttttacagagactt

SEQ ID NO: 1007634 - DNA, 33 bp, Homo sapien
tgattttctgctaaaatagttttacagagactt

SEQ ID NO: 1007635 - DNA, 33 bp, Homo sapien
tcagaaacactgtggcccagcttgagaggcttt

SEQ ID NO: 1007636 - DNA, 33 bp, Homo sapien
tcagaaacactgtggctcagcttgagaggcttt

SEQ ID NO: 1007637 - DNA, 33 bp, Homo sapien
ggtcctatggggtttcaaccacagcacagttgt

SEQ ID NO: 1007638 - DNA, 33 bp, Homo sapien
ggtcctatggggtttccaccacagcacagttgt

SEQ ID NO: 1007639 - DNA, 33 bp, Homo sapien
agatcactagagtcaaccggtcaactcataaat

SEQ ID NO: 1007640 - DNA, 33 bp, Homo sapien
agatcactagagtcaatcggtcaactcataaat

SEQ ID NO: 1007641 - DNA, 33 bp, Homo sapien
cctgtttaaagttgaacttaaatctctgctcca

SEQ ID NO: 1007642 - DNA, 33 bp, Homo sapien
cctgtttaaagttgaatttaaatctctgctcca

SEQ ID NO: 1007643 - DNA, 33 bp, Homo sapien
aaaccatcatatgaaaataagtgacttgtgttg

SEQ ID NO: 1007644 - DNA, 33 bp, Homo sapien
aaaccatcatatgaaagtaagtgacttgtgttg

SEQ ID NO: 1007645 - DNA, 33 bp, Homo sapien
ctagcttctatgttaacggaaagtaaattcata

SEQ ID NO: 1007646 - DNA, 33 bp, Homo sapien
ctagcttctatgttaatggaaagtaaattcata

SEQ ID NO: 1007647 - DNA, 33 bp, Homo sapien
agttattctgataaaaagcattctcttatagat

SEQ ID NO: 1007648 - DNA, 33 bp, Homo sapien
agttattctgataaaaggcattctcttatagat

SEQ ID NO: 1007649 - DNA, 33 bp, Homo sapien
tactctcagggaggaaaagaatagtggacaggc

SEQ ID NO: 1007650 - DNA, 33 bp, Homo sapien
tactctcagggaggaacagaatagtggacaggc

SEQ ID NO: 1007651 - DNA, 33 bp, Homo sapien
gcaatttcactgcttcgaaataactcatggagt

SEQ ID NO: 1007652 - DNA, 33 bp, Homo sapien
gcaatttcactgcttctaaataactcatggagt

SEQ ID NO: 1007653 - DNA, 33 bp, Homo sapien
tactgagctagaagataatcagaatgacaggca

SEQ ID NO: 1007654 - DNA, 33 bp, Homo sapien
tactgagctagaagatgatcagaatgacaggca

SEQ ID NO: 1007655 - DNA, 33 bp, Homo sapien
ttgtagaatagcaagaggaagctcaaaactgag

SEQ ID NO: 1007656 - DNA, 33 bp, Homo sapien
ttgtagaatagcaagatgaagctcaaaactgag

SEQ ID NO: 1007657 - DNA, 33 bp, Homo sapien
tattctatctaggtaacctttaacaaaattgca

SEQ ID NO: 1007658 - DNA, 33 bp, Homo sapien
tattctatctaggtaatctttaacaaaattgca

SEQ ID NO: 1007659 - DNA, 33 bp, Homo sapien
gttttcaaagtttatacggtaagagggtacggt

SEQ ID NO: 1007660 - DNA, 33 bp, Homo sapien
gttttcaaagtttatatggtaagagggtacggt

SEQ ID NO: 1007661 - DNA, 33 bp, Homo sapien
acttggttggtgtgcactatttaatgcatgcct

SEQ ID NO: 1007662 - DNA, 33 bp, Homo sapien
acttggttggtgtgcagtatttaatgcatgcct

SEQ ID NO: 1007663 - DNA, 33 bp, Homo sapien
aatcttagaagttcaacatttagctaaaggaat

SEQ ID NO: 1007664 - DNA, 33 bp, Homo sapien
aatcttagaagttcaatatttagctaaaggaat

SEQ ID NO: 1007665 - DNA, 33 bp, Homo sapien
aacttcttggctctccagagtattttaatccct

SEQ ID NO: 1007666 - DNA, 33 bp, Homo sapien
aacttcttggctctccggagtattttaatccct

SEQ ID NO: 1007667 - DNA, 33 bp, Homo sapien
cttgtcttgttggctgaacatgtaaactgaaga

SEQ ID NO: 1007668 - DNA, 33 bp, Homo sapien
cttgtcttgttggctggacatgtaaactgaaga

SEQ ID NO: 1007669 - DNA, 33 bp, Homo sapien
aatagaaagtctcttagggcacaagattaacaa

SEQ ID NO: 1007670 - DNA, 33 bp, Homo sapien
aatagaaagtctcttatggcacaagattaacaa

SEQ ID NO: 1007671 - DNA, 33 bp, Homo sapien
cagtgaagctaaactacgcttacatagacaggt

SEQ ID NO: 1007672 - DNA, 33 bp, Homo sapien
cagtgaagctaaactatgcttacatagacaggt

SEQ ID NO: 1007673 - DNA, 33 bp, Homo sapien
gggcctcaaaggccatcaaagagattctggctt

SEQ ID NO: 1007674 - DNA, 33 bp, Homo sapien
gggcctcaaaggccatgaaagagattctggctt

SEQ ID NO: 1007675 - DNA, 33 bp, Homo sapien
attctgggccataaaagctccaggtgactgtta

SEQ ID NO: 1007676 - DNA, 33 bp, Homo sapien
attctgggccataaaatctccaggtgactgtta

SEQ ID NO: 1007677 - DNA, 33 bp, Homo sapien
aaagataagagtggtacagatgggcgatatagg

SEQ ID NO: 1007678 - DNA, 33 bp, Homo sapien
aaagataagagtggtagagatgggcgatatagg

SEQ ID NO: 1007679 - DNA, 33 bp, Homo sapien
ggaatgatatctactacgtgactctgacttaaa

SEQ ID NO: 1007680 - DNA, 33 bp, Homo sapien
ggaatgatatctactatgtgactctgacttaaa

SEQ ID NO: 1007681 - DNA, 33 bp, Homo sapien
gttgttcatattacccaaaggaaacaatagaaa

SEQ ID NO: 1007682 - DNA, 33 bp, Homo sapien
gttgttcatattaccctaaggaaacaatagaaa

SEQ ID NO: 1007683 - DNA, 33 bp, Homo sapien
ctttctcaagcattgccctaaattaacaggaac

SEQ ID NO: 1007684 - DNA, 33 bp, Homo sapien
ctttctcaagcattgctctaaattaacaggaac

SEQ ID NO: 1007685 - DNA, 33 bp, Homo sapien
agtttgataatgtaaactggggaaagtgagtat

SEQ ID NO: 1007686 - DNA, 33 bp, Homo sapien
agtttgataatgtaaattggggaaagtgagtat

SEQ ID NO: 1007687 - DNA, 33 bp, Homo sapien
tatataatgatagatacaatgtgctgtgtaatg

SEQ ID NO: 1007688 - DNA, 33 bp, Homo sapien
tatataatgatagatataatgtgctgtgtaatg

SEQ ID NO: 1007689 - DNA, 33 bp, Homo sapien
ttgtgggacatataaaattaatcctgcctggct

SEQ ID NO: 1007690 - DNA, 33 bp, Homo sapien
ttgtgggacatataaagttaatcctgcctggct

SEQ ID NO: 1007691 - DNA, 33 bp, Homo sapien
tattgcaggaactataaagctacataatatcct

SEQ ID NO: 1007692 - DNA, 33 bp, Homo sapien
tattgcaggaactatatagctacataatatcct

SEQ ID NO: 1007693 - DNA, 33 bp, Homo sapien
gaaaacagactcattcaccaacaaataatggat

SEQ ID NO: 1007694 - DNA, 33 bp, Homo sapien
gaaaacagactcattcgccaacaaataatggat

SEQ ID NO: 1007695 - DNA, 33 bp, Homo sapien
atactacatttctccaaacacagtgatttcatt

SEQ ID NO: 1007696 - DNA, 33 bp, Homo sapien
atactacatttctccagacacagtgatttcatt

SEQ ID NO: 1007697 - DNA, 33 bp, Homo sapien
tcttcatagtcaacccaaagcacctgatacctg

SEQ ID NO: 1007698 - DNA, 33 bp, Homo sapien
tcttcatagtcaaccctaagcacctgatacctg

SEQ ID NO: 1007699 - DNA, 33 bp, Homo sapien
tgtcacgattgcctacagtacagtataaacttc

SEQ ID NO: 1007700 - DNA, 33 bp, Homo sapien
tgtcacgattgcctacggtacagtataaacttc

SEQ ID NO: 1007701 - DNA, 33 bp, Homo sapien
cattttctctgaggtgcagcagaaaatgtgaaa

SEQ ID NO: 1007702 - DNA, 33 bp, Homo sapien
cattttctctgaggtgtagcagaaaatgtgaaa

SEQ ID NO: 1007703 - DNA, 33 bp, Homo sapien
tcagagaacttgggctaaaccaagatgcagtct

SEQ ID NO: 1007704 - DNA, 33 bp, Homo sapien
tcagagaacttgggctcaaccaagatgcagtct

SEQ ID NO: 1007705 - DNA, 33 bp, Homo sapien
gcactgtataatgtcaacttctgcctttctcaa

SEQ ID NO: 1007706 - DNA, 33 bp, Homo sapien
gcactgtataatgtcatcttctgcctttctcaa

SEQ ID NO: 1007707 - DNA, 33 bp, Homo sapien
tgcttgttggccatagacatgttgagaagtgtc

SEQ ID NO: 1007708 - DNA, 33 bp, Homo sapien
tgcttgttggccataggcatgttgagaagtgtc

SEQ ID NO: 1007709 - DNA, 33 bp, Homo sapien
gccagttgtctcagtaacattgattgaataggg

SEQ ID NO: 1007710 - DNA, 33 bp, Homo sapien
gccagttgtctcagtaccattgattgaataggg

SEQ ID NO: 1007711 - DNA, 33 bp, Homo sapien
gaaataaacttcagaaagatggtttcaatcact

SEQ ID NO: 1007712 - DNA, 33 bp, Homo sapien
gaaataaacttcagaaggatggtttcaatcact

SEQ ID NO: 1007713 - DNA, 33 bp, Homo sapien
ttttttaaagctgcaaatggtttaagacaccta

SEQ ID NO: 1007714 - DNA, 33 bp, Homo sapien
ttttttaaagctgcaagtggtttaagacaccta

SEQ ID NO: 1007715 - DNA, 33 bp, Homo sapien
cagataaaaggcatcaaccaagattcaaaaatc

SEQ ID NO: 1007716 - DNA, 33 bp, Homo sapien
cagataaaaggcatcagccaagattcaaaaatc

SEQ ID NO: 1007717 - DNA, 33 bp, Homo sapien
ctccttttcatatatccgaaagcaatgctcaca

SEQ ID NO: 1007718 - DNA, 33 bp, Homo sapien
ctccttttcatatatctgaaagcaatgctcaca

SEQ ID NO: 1007719 - DNA, 33 bp, Homo sapien
gttttggaaaaaagaacgtagtagcttggtagg

SEQ ID NO: 1007720 - DNA, 33 bp, Homo sapien
gttttggaaaaaagaatgtagtagcttggtagg

SEQ ID NO: 1007721 - DNA, 33 bp, Homo sapien
tcaagcaaagggttcaataaattgtagcaagca

SEQ ID NO: 1007722 - DNA, 33 bp, Homo sapien
tcaagcaaagggttcagtaaattgtagcaagca

SEQ ID NO: 1007723 - DNA, 33 bp, Homo sapien
gaaaaacaggccaaaaattctgtcttatgcact

SEQ ID NO: 1007724 - DNA, 33 bp, Homo sapien
gaaaaacaggccaaaagttctgtcttatgcact

SEQ ID NO: 1007725 - DNA, 33 bp, Homo sapien
ttcatttctgtccactcacgcttttggcatctg

SEQ ID NO: 1007726 - DNA, 33 bp, Homo sapien
ttcatttctgtccacttacgcttttggcatctg

SEQ ID NO: 1007727 - DNA, 33 bp, Homo sapien
atgccttcttggaagacagagcaccagatctcc

SEQ ID NO: 1007728 - DNA, 33 bp, Homo sapien
atgccttcttggaagagagagcaccagatctcc

SEQ ID NO: 1007729 - DNA, 33 bp, Homo sapien
agtgactgaaccaggacaaaacaaagacctgaa

SEQ ID NO: 1007730 - DNA, 33 bp, Homo sapien
agtgactgaaccaggagaaaacaaagacctgaa

SEQ ID NO: 1007731 - DNA, 33 bp, Homo sapien
cacactgcacattagaccaagagaaagtattca

SEQ ID NO: 1007732 - DNA, 33 bp, Homo sapien
cacactgcacattagatcaagagaaagtattca

SEQ ID NO: 1007733 - DNA, 33 bp, Homo sapien
atggccatgaaagaaaaagacagttccattgtc

SEQ ID NO: 1007734 - DNA, 33 bp, Homo sapien
atggccatgaaagaaatagacagttccattgtc

SEQ ID NO: 1007735 - DNA, 33 bp, Homo sapien
caatccacttaaagagaaagatgatcagaggaa

SEQ ID NO: 1007736 - DNA, 33 bp, Homo sapien
caatccacttaaagaggaagatgatcagaggaa

SEQ ID NO: 1007737 - DNA, 33 bp, Homo sapien
tctttcggtgagctttaaaagagcataatgtta

SEQ ID NO: 1007738 - DNA, 33 bp, Homo sapien
tctttcggtgagcttttaaagagcataatgtta

SEQ ID NO: 1007739 - DNA, 33 bp, Homo sapien
atacaatgctaaaacaatacctgccacatagta

SEQ ID NO: 1007740 - DNA, 33 bp, Homo sapien
atacaatgctaaaacagtacctgccacatagta

SEQ ID NO: 1007741 - DNA, 33 bp, Homo sapien
agtctagctgcactgtaaaacactgagagacaa

SEQ ID NO: 1007742 - DNA, 33 bp, Homo sapien
agtctagctgcactgtgaaacactgagagacaa

SEQ ID NO: 1007743 - DNA, 33 bp, Homo sapien
tgacaagaagatgagaacttggtttggggcata

SEQ ID NO: 1007744 - DNA, 33 bp, Homo sapien
tgacaagaagatgagaccttggtttggggcata

SEQ ID NO: 1007745 - DNA, 33 bp, Homo sapien
gcacctcatttcataccaattttgggagtatta

SEQ ID NO: 1007746 - DNA, 33 bp, Homo sapien
gcacctcatttcatacgaattttgggagtatta

SEQ ID NO: 1007747 - DNA, 33 bp, Homo sapien
gactttaacacagaacaaatggttgcttctact

SEQ ID NO: 1007748 - DNA, 33 bp, Homo sapien
gactttaacacagaacgaatggttgcttctact

SEQ ID NO: 1007749 - DNA, 33 bp, Homo sapien
tagtctgtacaccagcagaaaaaaagtgcttat

SEQ ID NO: 1007750 - DNA, 33 bp, Homo sapien
tagtctgtacaccagcggaaaaaaagtgcttat

SEQ ID NO: 1007751 - DNA, 33 bp, Homo sapien
aaggtagtagttttcaagtatgctgttttgtcc

SEQ ID NO: 1007752 - DNA, 33 bp, Homo sapien
aaggtagtagttttcacgtatgctgttttgtcc

SEQ ID NO: 1007753 - DNA, 33 bp, Homo sapien
aattgcataaatttaacgtgtaccattgtggtg

SEQ ID NO: 1007754 - DNA, 33 bp, Homo sapien
aattgcataaatttaaggtgtaccattgtggtg

SEQ ID NO: 1007755 - DNA, 33 bp, Homo sapien
acgtttgtgaaacttgcaccataatcaacataa

SEQ ID NO: 1007756 - DNA, 33 bp, Homo sapien
acgtttgtgaaacttgtaccataatcaacataa

SEQ ID NO: 1007757 - DNA, 33 bp, Homo sapien
gatggcagtggtagtaaaaccctttgggtactg

SEQ ID NO: 1007758 - DNA, 33 bp, Homo sapien
gatggcagtggtagtacaaccctttgggtactg

SEQ ID NO: 1007759 - DNA, 33 bp, Homo sapien
tggagactgtcctatgcagcccattgcagccac

SEQ ID NO: 1007760 - DNA, 33 bp, Homo sapien
tggagactgtcctatgtagcccattgcagccac

SEQ ID NO: 1007761 - DNA, 33 bp, Homo sapien
gagtagtaagtctgccaaaaaagctaagctatt

SEQ ID NO: 1007762 - DNA, 33 bp, Homo sapien
gagtagtaagtctgccgaaaaagctaagctatt

SEQ ID NO: 1007763 - DNA, 33 bp, Homo sapien
tatataacactactgacagaattaaaatgacat

SEQ ID NO: 1007764 - DNA, 33 bp, Homo sapien
tatataacactactgatagaattaaaatgacat

SEQ ID NO: 1007765 - DNA, 33 bp, Homo sapien
gcaaagggtgggttgaactagtcctatctcatg

SEQ ID NO: 1007766 - DNA, 33 bp, Homo sapien
gcaaagggtgggttgacctagtcctatctcatg

SEQ ID NO: 1007767 - DNA, 33 bp, Homo sapien
caaagacatggaatcaatctgaaggcctatcaa

SEQ ID NO: 1007768 - DNA, 33 bp, Homo sapien
caaagacatggaatcagtctgaaggcctatcaa

SEQ ID NO: 1007769 - DNA, 33 bp, Homo sapien
tctctgaggtcaggaacaagataaggataccta

SEQ ID NO: 1007770 - DNA, 33 bp, Homo sapien
tctctgaggtcaggaagaagataaggataccta

SEQ ID NO: 1007771 - DNA, 33 bp, Homo sapien
acagctttgtttataacagccaagatatggagt

SEQ ID NO: 1007772 - DNA, 33 bp, Homo sapien
acagctttgtttataatagccaagatatggagt

SEQ ID NO: 1007773 - DNA, 33 bp, Homo sapien
tatagtagcttgaacaaaattctcaattgataa

SEQ ID NO: 1007774 - DNA, 33 bp, Homo sapien
tatagtagcttgaacagaattctcaattgataa

SEQ ID NO: 1007775 - DNA, 33 bp, Homo sapien
catagtaggtgctcggaaaatattttaaattta

SEQ ID NO: 1007776 - DNA, 33 bp, Homo sapien
catagtaggtgctcggtaaatattttaaattta

SEQ ID NO: 1007777 - DNA, 33 bp, Homo sapien
caagaaagatctcaaaaacatgcaatagaaaga

SEQ ID NO: 1007778 - DNA, 33 bp, Homo sapien
caagaaagatctcaaacacatgcaatagaaaga

SEQ ID NO: 1007779 - DNA, 33 bp, Homo sapien
aaagcttaaactgggcaatactatttcaaggta

SEQ ID NO: 1007780 - DNA, 33 bp, Homo sapien
aaagcttaaactgggcgatactatttcaaggta

SEQ ID NO: 1007781 - DNA, 33 bp, Homo sapien
ggagtaaggatagagaagaaggcagatacaacc

SEQ ID NO: 1007782 - DNA, 33 bp, Homo sapien
ggagtaaggatagagaggaaggcagatacaacc

SEQ ID NO: 1007783 - DNA, 33 bp, Homo sapien
cttttgtagccagtaaagtgagggggtgtctca

SEQ ID NO: 1007784 - DNA, 33 bp, Homo sapien
cttttgtagccagtaaggtgagggggtgtctca

SEQ ID NO: 1007785 - DNA, 33 bp, Homo sapien
ttaagtcttgtttgcccgcttcctagatgactt

SEQ ID NO: 1007786 - DNA, 33 bp, Homo sapien
ttaagtcttgtttgcctgcttcctagatgactt

SEQ ID NO: 1007787 - DNA, 33 bp, Homo sapien
gaagttgccacatccactagtcttctacttcca

SEQ ID NO: 1007788 - DNA, 33 bp, Homo sapien
gaagttgccacatccagtagtcttctacttcca

SEQ ID NO: 1007789 - DNA, 33 bp, Homo sapien
gtaacattcgggctccaactgtcctttcttata

SEQ ID NO: 1007790 - DNA, 33 bp, Homo sapien
gtaacattcgggctcctactgtcctttcttata

SEQ ID NO: 1007791 - DNA, 33 bp, Homo sapien
tacattattagtcaaccagatcaggacagaaga

SEQ ID NO: 1007792 - DNA, 33 bp, Homo sapien
tacattattagtcaactagatcaggacagaaga

SEQ ID NO: 1007793 - DNA, 33 bp, Homo sapien
gagtaacagtaggggaagttgtgtgagtgtgga

SEQ ID NO: 1007794 - DNA, 33 bp, Homo sapien
gagtaacagtaggggaggttgtgtgagtgtgga

SEQ ID NO: 1007795 - DNA, 33 bp, Homo sapien
aaaaaaaaaacccatgacacaagtcaaacaaac

SEQ ID NO: 1007796 - DNA, 33 bp, Homo sapien
aaaaaaaaaacccatgtcacaagtcaaacaaac

SEQ ID NO: 1007797 - DNA, 33 bp, Homo sapien
cagggattgtctgagacgccttggaatgctagc

SEQ ID NO: 1007798 - DNA, 33 bp, Homo sapien
cagggattgtctgagatgccttggaatgctagc

SEQ ID NO: 1007799 - DNA, 33 bp, Homo sapien
aaatgcatgtgacataaatgcaaaaaagatagg

SEQ ID NO: 1007800 - DNA, 33 bp, Homo sapien
aaatgcatgtgacatagatgcaaaaaagatagg

SEQ ID NO: 1007801 - DNA, 33 bp, Homo sapien
tgactgtcttcacacacggaagatataatgacc

SEQ ID NO: 1007802 - DNA, 33 bp, Homo sapien
tgactgtcttcacacatggaagatataatgacc

SEQ ID NO: 1007803 - DNA, 33 bp, Homo sapien
acactttagaaagaaggaacaaagcacagccta

SEQ ID NO: 1007804 - DNA, 33 bp, Homo sapien
acactttagaaagaagtaacaaagcacagccta

SEQ ID NO: 1007805 - DNA, 33 bp, Homo sapien
gatgtgtttctcatgactagaatttggttatga

SEQ ID NO: 1007806 - DNA, 33 bp, Homo sapien
gatgtgtttctcatgattagaatttggttatga

SEQ ID NO: 1007807 - DNA, 33 bp, Homo sapien
agctctgaagttaccaataaacgaagacaaaaa

SEQ ID NO: 1007808 - DNA, 33 bp, Homo sapien
agctctgaagttaccagtaaacgaagacaaaaa

SEQ ID NO: 1007809 - DNA, 33 bp, Homo sapien
aacaaaacaactaaaaaagactgccccaggagt

SEQ ID NO: 1007810 - DNA, 33 bp, Homo sapien
aacaaaacaactaaaagagactgccccaggagt

SEQ ID NO: 1007811 - DNA, 33 bp, Homo sapien
tataattgcttctaggaagagttggcatttata

SEQ ID NO: 1007812 - DNA, 33 bp, Homo sapien
tataattgcttctaggtagagttggcatttata

SEQ ID NO: 1007813 - DNA, 33 bp, Homo sapien
gtgcagagagttaacactgaaataatcatcctt

SEQ ID NO: 1007814 - DNA, 33 bp, Homo sapien
gtgcagagagttaacattgaaataatcatcctt

SEQ ID NO: 1007815 - DNA, 33 bp, Homo sapien
agggaagagagagtcaagaagctgattaaagtg

SEQ ID NO: 1007816 - DNA, 33 bp, Homo sapien
agggaagagagagtcaggaagctgattaaagtg

SEQ ID NO: 1007817 - DNA, 33 bp, Homo sapien
attatttgtgtcctaaatcggcaaatagaattt

SEQ ID NO: 1007818 - DNA, 33 bp, Homo sapien
attatttgtgtcctaattcggcaaatagaattt

SEQ ID NO: 1007819 - DNA, 33 bp, Homo sapien
cttagtttggtaaaaggagcataaacttggatg

SEQ ID NO: 1007820 - DNA, 33 bp, Homo sapien
cttagtttggtaaaagtagcataaacttggatg

SEQ ID NO: 1007821 - DNA, 33 bp, Homo sapien
ttagaattgacaaagccatacatgtgacaatgt

SEQ ID NO: 1007822 - DNA, 33 bp, Homo sapien
ttagaattgacaaagcgatacatgtgacaatgt

SEQ ID NO: 1007823 - DNA, 33 bp, Homo sapien
gcattaactgaaaaaacctctgcatcttgctca

SEQ ID NO: 1007824 - DNA, 33 bp, Homo sapien
gcattaactgaaaaaatctctgcatcttgctca

SEQ ID NO: 1007825 - DNA, 33 bp, Homo sapien
atcaagttctgcataaccctaacctggtctgtc

SEQ ID NO: 1007826 - DNA, 33 bp, Homo sapien
atcaagttctgcataatcctaacctggtctgtc

SEQ ID NO: 1007827 - DNA, 33 bp, Homo sapien
gagaggcagcagagacggtaccgcctacgaagc

SEQ ID NO: 1007828 - DNA, 33 bp, Homo sapien
gagaggcagcagagactgtaccgcctacgaagc

SEQ ID NO: 1007829 - DNA, 33 bp, Homo sapien
tatatgtctgagttgtcacaaaggaggagggtt

SEQ ID NO: 1007830 - DNA, 33 bp, Homo sapien
tatatgtctgagttgtgacaaaggaggagggtt

SEQ ID NO: 1007831 - DNA, 33 bp, Homo sapien
atcataaaatattgcagggaatttgaaagttat

SEQ ID NO: 1007832 - DNA, 33 bp, Homo sapien
atcataaaatattgcatggaatttgaaagttat

SEQ ID NO: 1007833 - DNA, 33 bp, Homo sapien
gctttgtaagtagcataacacaaaacacataag

SEQ ID NO: 1007834 - DNA, 33 bp, Homo sapien
gctttgtaagtagcatgacacaaaacacataag

SEQ ID NO: 1007835 - DNA, 33 bp, Homo sapien
gtgatactcacggccactggatagtctcatgca

SEQ ID NO: 1007836 - DNA, 33 bp, Homo sapien
gtgatactcacggccattggatagtctcatgca

SEQ ID NO: 1007837 - DNA, 33 bp, Homo sapien
agttttcttcagtgtacaatgagaaccgtacca

SEQ ID NO: 1007838 - DNA, 33 bp, Homo sapien
agttttcttcagtgtagaatgagaaccgtacca

SEQ ID NO: 1007839 - DNA, 33 bp, Homo sapien
ttggtttattgtgaaacagtctcctaagattgc

SEQ ID NO: 1007840 - DNA, 33 bp, Homo sapien
ttggtttattgtgaaagagtctcctaagattgc

SEQ ID NO: 1007841 - DNA, 33 bp, Homo sapien
tttccagcccacattcacttttcttttgtaggt

SEQ ID NO: 1007842 - DNA, 33 bp, Homo sapien
tttccagcccacattcgcttttcttttgtaggt

SEQ ID NO: 1007843 - DNA, 33 bp, Homo sapien
aatctcacttgttatagatcaagacttgcctgc

SEQ ID NO: 1007844 - DNA, 33 bp, Homo sapien
aatctcacttgttatatatcaagacttgcctgc

SEQ ID NO: 1007845 - DNA, 33 bp, Homo sapien
gagactattggaaaccagccagtagaaagtcat

SEQ ID NO: 1007846 - DNA, 33 bp, Homo sapien
gagactattggaaaccggccagtagaaagtcat

SEQ ID NO: 1007847 - DNA, 33 bp, Homo sapien
taagtattgggatagaagttgacacgaagagag

SEQ ID NO: 1007848 - DNA, 33 bp, Homo sapien
taagtattgggatagatgttgacacgaagagag

SEQ ID NO: 1007849 - DNA, 33 bp, Homo sapien
atctgctctaaagagacggtccttaatgggact

SEQ ID NO: 1007850 - DNA, 33 bp, Homo sapien
atctgctctaaagagagggtccttaatgggact

SEQ ID NO: 1007851 - DNA, 33 bp, Homo sapien
ctctttaacacaacacacttaaatagaagtgag

SEQ ID NO: 1007852 - DNA, 33 bp, Homo sapien
ctctttaacacaacacgcttaaatagaagtgag

SEQ ID NO: 1007853 - DNA, 33 bp, Homo sapien
ggaaacatctgagggtcaaagacaggtagcaac

SEQ ID NO: 1007854 - DNA, 33 bp, Homo sapien
ggaaacatctgagggtgaaagacaggtagcaac

SEQ ID NO: 1007855 - DNA, 33 bp, Homo sapien
ctgaacatatcctttacagctgagcaacagact

SEQ ID NO: 1007856 - DNA, 33 bp, Homo sapien
ctgaacatatcctttatagctgagcaacagact

SEQ ID NO: 1007857 - DNA, 33 bp, Homo sapien
acagaaataaggccaacgaaatgggagaaggtt

SEQ ID NO: 1007858 - DNA, 33 bp, Homo sapien
acagaaataaggccaaggaaatgggagaaggtt

SEQ ID NO: 1007859 - DNA, 33 bp, Homo sapien
ccacactagacacccaataaatagttgctgatt

SEQ ID NO: 1007860 - DNA, 33 bp, Homo sapien
ccacactagacacccagtaaatagttgctgatt

SEQ ID NO: 1007861 - DNA, 33 bp, Homo sapien
tctctcatttagatatcactgcaactcaatttg

SEQ ID NO: 1007862 - DNA, 33 bp, Homo sapien
tctctcatttagatattactgcaactcaatttg

SEQ ID NO: 1007863 - DNA, 33 bp, Homo sapien
aacaaatggatgccgaacagatggtttttaatt

SEQ ID NO: 1007864 - DNA, 33 bp, Homo sapien
aacaaatggatgccgagcagatggtttttaatt

SEQ ID NO: 1007865 - DNA, 33 bp, Homo sapien
taatctcactaaacagaaactcttacattaaag

SEQ ID NO: 1007866 - DNA, 33 bp, Homo sapien
taatctcactaaacaggaactcttacattaaag

SEQ ID NO: 1007867 - DNA, 33 bp, Homo sapien
ccaagagccagttagacgtggttgagtgagcac

SEQ ID NO: 1007868 - DNA, 33 bp, Homo sapien
ccaagagccagttagaggtggttgagtgagcac

SEQ ID NO: 1007869 - DNA, 33 bp, Homo sapien
tagccaggtgccttaaacatagcaaatgttcaa

SEQ ID NO: 1007870 - DNA, 33 bp, Homo sapien
tagccaggtgccttaaccatagcaaatgttcaa

SEQ ID NO: 1007871 - DNA, 33 bp, Homo sapien
acttgtttggttacaactgagagaatttattac

SEQ ID NO: 1007872 - DNA, 33 bp, Homo sapien
acttgtttggttacaattgagagaatttattac

SEQ ID NO: 1007873 - DNA, 33 bp, Homo sapien
ttatctgtttaaatcacaactcaagcacttctt

SEQ ID NO: 1007874 - DNA, 33 bp, Homo sapien
ttatctgtttaaatcataactcaagcacttctt

SEQ ID NO: 1007875 - DNA, 33 bp, Homo sapien
cactggatttggcaaaaacaaaggttggtgttg

SEQ ID NO: 1007876 - DNA, 33 bp, Homo sapien
cactggatttggcaaagacaaaggttggtgttg

SEQ ID NO: 1007877 - DNA, 33 bp, Homo sapien
tgaatccttgaactctgtgtctgaaagtcaaca

SEQ ID NO: 1007878 - DNA, 33 bp, Homo sapien
tgaatccttgaactctttgtctgaaagtcaaca

SEQ ID NO: 1007879 - DNA, 33 bp, Homo sapien
tctgtgcaaaatgttacggataagaagataaag

SEQ ID NO: 1007880 - DNA, 33 bp, Homo sapien
tctgtgcaaaatgttatggataagaagataaag

SEQ ID NO: 1007881 - DNA, 33 bp, Homo sapien
ccagtctctttgctgaagtataacatgaatcac

SEQ ID NO: 1007882 - DNA, 33 bp, Homo sapien
ccagtctctttgctgaggtataacatgaatcac

SEQ ID NO: 1007883 - DNA, 33 bp, Homo sapien
aagtgcttaaatggcactctacctatcattaag

SEQ ID NO: 1007884 - DNA, 33 bp, Homo sapien
aagtgcttaaatggcattctacctatcattaag

SEQ ID NO: 1007885 - DNA, 33 bp, Homo sapien
tccttatgtatccatcacttctgaacttcatct

SEQ ID NO: 1007886 - DNA, 33 bp, Homo sapien
tccttatgtatccatcgcttctgaacttcatct

SEQ ID NO: 1007887 - DNA, 33 bp, Homo sapien
gaaagtaatgtgaataacaactatgacaggctt

SEQ ID NO: 1007888 - DNA, 33 bp, Homo sapien
gaaagtaatgtgaataccaactatgacaggctt

SEQ ID NO: 1007889 - DNA, 33 bp, Homo sapien
tgagtatttggatagacattacattgaacctgt

SEQ ID NO: 1007890 - DNA, 33 bp, Homo sapien
tgagtatttggatagagattacattgaacctgt

SEQ ID NO: 1007891 - DNA, 33 bp, Homo sapien
tgtgccgtggattttgaatcatctgacagacct

SEQ ID NO: 1007892 - DNA, 33 bp, Homo sapien
tgtgccgtggattttggatcatctgacagacct

SEQ ID NO: 1007893 - DNA, 33 bp, Homo sapien
ttacatcaggaccacaaatgagaagaggacaag

SEQ ID NO: 1007894 - DNA, 33 bp, Homo sapien
ttacatcaggaccacagatgagaagaggacaag

SEQ ID NO: 1007895 - DNA, 33 bp, Homo sapien
tgtgaggtacgtttggaaatcaaagtccagtgt

SEQ ID NO: 1007896 - DNA, 33 bp, Homo sapien
tgtgaggtacgtttgggaatcaaagtccagtgt

SEQ ID NO: 1007897 - DNA, 33 bp, Homo sapien
catcagtcttactatgacaaacgctggattaga

SEQ ID NO: 1007898 - DNA, 33 bp, Homo sapien
catcagtcttactatggcaaacgctggattaga

SEQ ID NO: 1007899 - DNA, 33 bp, Homo sapien
ttagcattcactattacgccatgtactgtttta

SEQ ID NO: 1007900 - DNA, 33 bp, Homo sapien
ttagcattcactattatgccatgtactgtttta

SEQ ID NO: 1007901 - DNA, 33 bp, Homo sapien
tactaaattatccccacgtgatagctcggcaca

SEQ ID NO: 1007902 - DNA, 33 bp, Homo sapien
tactaaattatccccatgtgatagctcggcaca

SEQ ID NO: 1007903 - DNA, 33 bp, Homo sapien
ctagagtgatgttaaactcagaagggccagaga

SEQ ID NO: 1007904 - DNA, 33 bp, Homo sapien
ctagagtgatgttaaagtcagaagggccagaga

SEQ ID NO: 1007905 - DNA, 33 bp, Homo sapien
ccacacccaggaaaaaaagaccagatacgtaaa

SEQ ID NO: 1007906 - DNA, 33 bp, Homo sapien
ccacacccaggaaaaagagaccagatacgtaaa

SEQ ID NO: 1007907 - DNA, 33 bp, Homo sapien
aagtggtttgagcaaacttctatgataccacat

SEQ ID NO: 1007908 - DNA, 33 bp, Homo sapien
aagtggtttgagcaaagttctatgataccacat

SEQ ID NO: 1007909 - DNA, 33 bp, Homo sapien
cacagaggcaactggaaggttttcttcgcctgc

SEQ ID NO: 1007910 - DNA, 33 bp, Homo sapien
cacagaggcaactggatggttttcttcgcctgc

SEQ ID NO: 1007911 - DNA, 33 bp, Homo sapien
aattttcgtatagccaatctcccttcttgtaca

SEQ ID NO: 1007912 - DNA, 33 bp, Homo sapien
aattttcgtatagccagtctcccttcttgtaca

SEQ ID NO: 1007913 - DNA, 33 bp, Homo sapien
taaaaaggaaagccagaccactttactatacct

SEQ ID NO: 1007914 - DNA, 33 bp, Homo sapien
taaaaaggaaagccagtccactttactatacct

SEQ ID NO: 1007915 - DNA, 33 bp, Homo sapien
tggatgtccagggctaaacgccaatgctttcag

SEQ ID NO: 1007916 - DNA, 33 bp, Homo sapien
tggatgtccagggctagacgccaatgctttcag

SEQ ID NO: 1007917 - DNA, 33 bp, Homo sapien
tatattgaaatgcccactcccagctcttttttt

SEQ ID NO: 1007918 - DNA, 33 bp, Homo sapien
tatattgaaatgcccattcccagctcttttttt

SEQ ID NO: 1007919 - DNA, 33 bp, Homo sapien
cttctgttactaggtaccacaatgtaaataaca

SEQ ID NO: 1007920 - DNA, 33 bp, Homo sapien
cttctgttactaggtatcacaatgtaaataaca

SEQ ID NO: 1007921 - DNA, 33 bp, Homo sapien
cctcttgtatttatcaacattgattgtgcagac

SEQ ID NO: 1007922 - DNA, 33 bp, Homo sapien
cctcttgtatttatcagcattgattgtgcagac

SEQ ID NO: 1007923 - DNA, 33 bp, Homo sapien
tatttgaatagagagacggtaagtgctaaagac

SEQ ID NO: 1007924 - DNA, 33 bp, Homo sapien
tatttgaatagagagatggtaagtgctaaagac

SEQ ID NO: 1007925 - DNA, 33 bp, Homo sapien
ggaaagcaaaatcaaagattactgggtacattg

SEQ ID NO: 1007926 - DNA, 33 bp, Homo sapien
ggaaagcaaaatcaaatattactgggtacattg

SEQ ID NO: 1007927 - DNA, 33 bp, Homo sapien
ttttcagttggtttgcgattggtttataaaaac

SEQ ID NO: 1007928 - DNA, 33 bp, Homo sapien
ttttcagttggtttgctattggtttataaaaac

SEQ ID NO: 1007929 - DNA, 33 bp, Homo sapien
caatatctttgaggtacgcctatatttcagttt

SEQ ID NO: 1007930 - DNA, 33 bp, Homo sapien
caatatctttgaggtatgcctatatttcagttt

SEQ ID NO: 1007931 - DNA, 33 bp, Homo sapien
tgtaactttgatgttaaagatgttataggaata

SEQ ID NO: 1007932 - DNA, 33 bp, Homo sapien
tgtaactttgatgttacagatgttataggaata

SEQ ID NO: 1007933 - DNA, 33 bp, Homo sapien
ttcagaaagacctctaagtcataatgattccaa

SEQ ID NO: 1007934 - DNA, 33 bp, Homo sapien
ttcagaaagacctctatgtcataatgattccaa

SEQ ID NO: 1007935 - DNA, 33 bp, Homo sapien
atttttgtaccagctccaaaacaagccaagaca

SEQ ID NO: 1007936 - DNA, 33 bp, Homo sapien
atttttgtaccagctcgaaaacaagccaagaca

SEQ ID NO: 1007937 - DNA, 33 bp, Homo sapien
atgtgcacgtgctcgtcaaagagagagggagag

SEQ ID NO: 1007938 - DNA, 33 bp, Homo sapien
atgtgcacgtgctcgttaaagagagagggagag

SEQ ID NO: 1007939 - DNA, 33 bp, Homo sapien
tgaagtgagtagagccagaaagaagtgagaaca

SEQ ID NO: 1007940 - DNA, 33 bp, Homo sapien
tgaagtgagtagagccggaaagaagtgagaaca

SEQ ID NO: 1007941 - DNA, 33 bp, Homo sapien
ttaatccatcactgaaatatatattgagaatat

SEQ ID NO: 1007942 - DNA, 33 bp, Homo sapien
ttaatccatcactgaagtatatattgagaatat

SEQ ID NO: 1007943 - DNA, 33 bp, Homo sapien
taatgatatttgctagcatagtatttgatctaa

SEQ ID NO: 1007944 - DNA, 33 bp, Homo sapien
taatgatatttgctagtatagtatttgatctaa

SEQ ID NO: 1007945 - DNA, 33 bp, Homo sapien
ctaaatttgctcaaagaagtacaatgcaaagga

SEQ ID NO: 1007946 - DNA, 33 bp, Homo sapien
ctaaatttgctcaaagtagtacaatgcaaagga

SEQ ID NO: 1007947 - DNA, 33 bp, Homo sapien
gctcaaggtccttcccaacaaaaatgctcttat

SEQ ID NO: 1007948 - DNA, 33 bp, Homo sapien
gctcaaggtccttccccacaaaaatgctcttat

SEQ ID NO: 1007949 - DNA, 33 bp, Homo sapien
acggtgccagactagacgggaagaggacagtga

SEQ ID NO: 1007950 - DNA, 33 bp, Homo sapien
acggtgccagactagatgggaagaggacagtga

SEQ ID NO: 1007951 - DNA, 33 bp, Homo sapien
cacaatctgaagcccactcctagtatttcattt

SEQ ID NO: 1007952 - DNA, 33 bp, Homo sapien
cacaatctgaagcccattcctagtatttcattt

SEQ ID NO: 1007953 - DNA, 33 bp, Homo sapien
tttgcttgcttctgccgatatctaaaaaggtaa

SEQ ID NO: 1007954 - DNA, 33 bp, Homo sapien
tttgcttgcttctgcctatatctaaaaaggtaa

SEQ ID NO: 1007955 - DNA, 33 bp, Homo sapien
cacacagagaatgttgaataatagacattggag

SEQ ID NO: 1007956 - DNA, 33 bp, Homo sapien
cacacagagaatgttggataatagacattggag

SEQ ID NO: 1007957 - DNA, 33 bp, Homo sapien
ctacttctgtgatgtacattctgtgatgtgtaa

SEQ ID NO: 1007958 - DNA, 33 bp, Homo sapien
ctacttctgtgatgtatattctgtgatgtgtaa

SEQ ID NO: 1007959 - DNA, 33 bp, Homo sapien
atatacacagttgataacatgataggttgaaaa

SEQ ID NO: 1007960 - DNA, 33 bp, Homo sapien
atatacacagttgataccatgataggttgaaaa

SEQ ID NO: 1007961 - DNA, 33 bp, Homo sapien
acatggctatcataaaataaatgtcaacaacat

SEQ ID NO: 1007962 - DNA, 33 bp, Homo sapien
acatggctatcataaagtaaatgtcaacaacat

SEQ ID NO: 1007963 - DNA, 33 bp, Homo sapien
ctagggtagatgctcacagaaatctccacatgt

SEQ ID NO: 1007964 - DNA, 33 bp, Homo sapien
ctagggtagatgctcagagaaatctccacatgt

SEQ ID NO: 1007965 - DNA, 33 bp, Homo sapien
tgctaccaacaaaaaacgtaagtcagatgtgtt

SEQ ID NO: 1007966 - DNA, 33 bp, Homo sapien
tgctaccaacaaaaaaggtaagtcagatgtgtt

SEQ ID NO: 1007967 - DNA, 33 bp, Homo sapien
ggacatgggatcttccactaccaaatctggaaa

SEQ ID NO: 1007968 - DNA, 33 bp, Homo sapien
ggacatgggatcttcctctaccaaatctggaaa

SEQ ID NO: 1007969 - DNA, 33 bp, Homo sapien
tatttaatatgtttcaatcttcacttgatctta

SEQ ID NO: 1007970 - DNA, 33 bp, Homo sapien
tatttaatatgtttcagtcttcacttgatctta

SEQ ID NO: 1007971 - DNA, 33 bp, Homo sapien
atgttttggttctttgaataattaactgaccca

SEQ ID NO: 1007972 - DNA, 33 bp, Homo sapien
atgttttggttctttggataattaactgaccca

SEQ ID NO: 1007973 - DNA, 33 bp, Homo sapien
aaagcacagcatgaccaaggccctgtctacctc

SEQ ID NO: 1007974 - DNA, 33 bp, Homo sapien
aaagcacagcatgacccaggccctgtctacctc

SEQ ID NO: 1007975 - DNA, 33 bp, Homo sapien
ggattttgcaagtatacaagagattaattttct

SEQ ID NO: 1007976 - DNA, 33 bp, Homo sapien
ggattttgcaagtatataagagattaattttct

SEQ ID NO: 1007977 - DNA, 33 bp, Homo sapien
aaagagttcaagtgtcaagtctcagaaaaggaa

SEQ ID NO: 1007978 - DNA, 33 bp, Homo sapien
aaagagttcaagtgtcgagtctcagaaaaggaa

SEQ ID NO: 1007979 - DNA, 33 bp, Homo sapien
actagagattgacaaagttagactagaagctat

SEQ ID NO: 1007980 - DNA, 33 bp, Homo sapien
actagagattgacaaatttagactagaagctat

SEQ ID NO: 1007981 - DNA, 33 bp, Homo sapien
aacaaaggagaacactcaactcgtctgcataaa

SEQ ID NO: 1007982 - DNA, 33 bp, Homo sapien
aacaaaggagaacacttaactcgtctgcataaa

SEQ ID NO: 1007983 - DNA, 33 bp, Homo sapien
agcaagcagaggaaataacaaaaataactaata

SEQ ID NO: 1007984 - DNA, 33 bp, Homo sapien
agcaagcagaggaaattacaaaaataactaata

SEQ ID NO: 1007985 - DNA, 33 bp, Homo sapien
tagctctatgtaaggaaaactttctgtaaagtc

SEQ ID NO: 1007986 - DNA, 33 bp, Homo sapien
tagctctatgtaaggacaactttctgtaaagtc

SEQ ID NO: 1007987 - DNA, 33 bp, Homo sapien
ggtcaccaaaggaaacacagattgtgggtagct

SEQ ID NO: 1007988 - DNA, 33 bp, Homo sapien
ggtcaccaaaggaaacgcagattgtgggtagct

SEQ ID NO: 1007989 - DNA, 33 bp, Homo sapien
agtctctgtccactcaatgagaaaattcaagcc

SEQ ID NO: 1007990 - DNA, 33 bp, Homo sapien
agtctctgtccactcagtgagaaaattcaagcc

SEQ ID NO: 1007991 - DNA, 33 bp, Homo sapien
ctaccaattggcagacggcctacgtgaccaaga

SEQ ID NO: 1007992 - DNA, 33 bp, Homo sapien
ctaccaattggcagactgcctacgtgaccaaga

SEQ ID NO: 1007993 - DNA, 33 bp, Homo sapien
aatcctgtgttctggacatagagcataaatgtg

SEQ ID NO: 1007994 - DNA, 33 bp, Homo sapien
aatcctgtgttctggagatagagcataaatgtg

SEQ ID NO: 1007995 - DNA, 33 bp, Homo sapien
aggaatcctgaatgcacccgaagaagaggagaa

SEQ ID NO: 1007996 - DNA, 33 bp, Homo sapien
aggaatcctgaatgcatccgaagaagaggagaa

SEQ ID NO: 1007997 - DNA, 33 bp, Homo sapien
ctttgttggtgtaccacataccctaatgatgac

SEQ ID NO: 1007998 - DNA, 33 bp, Homo sapien
ctttgttggtgtaccatataccctaatgatgac

SEQ ID NO: 1007999 - DNA, 33 bp, Homo sapien
taagtaatttctgaacacagtgatacatcctgg

SEQ ID NO: 1008000 - DNA, 33 bp, Homo sapien
taagtaatttctgaacgcagtgatacatcctgg

SEQ ID NO: 1008001 - DNA, 33 bp, Homo sapien
gaagcagtttcaactaccattcatatctcactc

SEQ ID NO: 1008002 - DNA, 33 bp, Homo sapien
gaagcagtttcaactatcattcatatctcactc

SEQ ID NO: 1008003 - DNA, 33 bp, Homo sapien
tcagtaaaagttttgacacctggatttgaacat

SEQ ID NO: 1008004 - DNA, 33 bp, Homo sapien
tcagtaaaagttttgatacctggatttgaacat

SEQ ID NO: 1008005 - DNA, 33 bp, Homo sapien
ctcataacctctgcaccgctctgctaaaaacta

SEQ ID NO: 1008006 - DNA, 33 bp, Homo sapien
ctcataacctctgcactgctctgctaaaaacta

SEQ ID NO: 1008007 - DNA, 33 bp, Homo sapien
atgctattggattggaagtgatttgcaatttcc

SEQ ID NO: 1008008 - DNA, 33 bp, Homo sapien
atgctattggattggaggtgatttgcaatttcc

SEQ ID NO: 1008009 - DNA, 33 bp, Homo sapien
gtactttcaatccagggactgagtatcattaac

SEQ ID NO: 1008010 - DNA, 33 bp, Homo sapien
gtactttcaatccaggtactgagtatcattaac

SEQ ID NO: 1008011 - DNA, 33 bp, Homo sapien
acctttcaccattgtcggaatcatcaggtattt

SEQ ID NO: 1008012 - DNA, 33 bp, Homo sapien
acctttcaccattgtctgaatcatcaggtattt

SEQ ID NO: 1008013 - DNA, 33 bp, Homo sapien
cctcaaagcacctttaccttattccacagtcag

SEQ ID NO: 1008014 - DNA, 33 bp, Homo sapien
cctcaaagcacctttagcttattccacagtcag

SEQ ID NO: 1008015 - DNA, 33 bp, Homo sapien
agtgttctctgccaggaatatgatatggtttgg

SEQ ID NO: 1008016 - DNA, 33 bp, Homo sapien
agtgttctctgccagggatatgatatggtttgg

SEQ ID NO: 1008017 - DNA, 33 bp, Homo sapien
ccaacactttgagaaaccaaaacaggaagactg

SEQ ID NO: 1008018 - DNA, 33 bp, Homo sapien
ccaacactttgagaaatcaaaacaggaagactg

SEQ ID NO: 1008019 - DNA, 33 bp, Homo sapien
ttctgcccggtgcataccacagagaaaacgaca

SEQ ID NO: 1008020 - DNA, 33 bp, Homo sapien
ttctgcccggtgcatatcacagagaaaacgaca

SEQ ID NO: 1008021 - DNA, 33 bp, Homo sapien
tactacttgctcaaacggggttctagtccttca

SEQ ID NO: 1008022 - DNA, 33 bp, Homo sapien
tactacttgctcaaactgggttctagtccttca

SEQ ID NO: 1008023 - DNA, 33 bp, Homo sapien
ctaataatggtctaggaaacaagttaagtcccc

SEQ ID NO: 1008024 - DNA, 33 bp, Homo sapien
ctaataatggtctaggcaacaagttaagtcccc

SEQ ID NO: 1008025 - DNA, 33 bp, Homo sapien
gggccaatgttgtgcaatactgttgtaggtcgc

SEQ ID NO: 1008026 - DNA, 33 bp, Homo sapien
gggccaatgttgtgcagtactgttgtaggtcgc

SEQ ID NO: 1008027 - DNA, 33 bp, Homo sapien
aaaagataaatccaccagaatgaattttctcca

SEQ ID NO: 1008028 - DNA, 33 bp, Homo sapien
aaaagataaatccaccggaatgaattttctcca

SEQ ID NO: 1008029 - DNA, 33 bp, Homo sapien
agagatgttttttccacgttcactgccaaagtg

SEQ ID NO: 1008030 - DNA, 33 bp, Homo sapien
agagatgttttttccatgttcactgccaaagtg

SEQ ID NO: 1008031 - DNA, 33 bp, Homo sapien
atagctccgatttcaacaaaggatgagtccaat

SEQ ID NO: 1008032 - DNA, 33 bp, Homo sapien
atagctccgatttcaagaaaggatgagtccaat

SEQ ID NO: 1008033 - DNA, 33 bp, Homo sapien
ataaaagtttcccaggccataacaaaccaatgg

SEQ ID NO: 1008034 - DNA, 33 bp, Homo sapien
ataaaagtttcccaggtcataacaaaccaatgg

SEQ ID NO: 1008035 - DNA, 33 bp, Homo sapien
aagaaacttccaggataacaaatttcaactttt

SEQ ID NO: 1008036 - DNA, 33 bp, Homo sapien
aagaaacttccaggattacaaatttcaactttt

SEQ ID NO: 1008037 - DNA, 33 bp, Homo sapien
cgaaatatctcttaaaacaaaaattggcacatt

SEQ ID NO: 1008038 - DNA, 33 bp, Homo sapien
cgaaatatctcttaaatcaaaaattggcacatt

SEQ ID NO: 1008039 - DNA, 33 bp, Homo sapien
ttgagaagactgatcacgaagttggtgagaaaa

SEQ ID NO: 1008040 - DNA, 33 bp, Homo sapien
ttgagaagactgatcaggaagttggtgagaaaa

SEQ ID NO: 1008041 - DNA, 33 bp, Homo sapien
ggaatgttgcacgctcaaactaaaagttaggtt

SEQ ID NO: 1008042 - DNA, 33 bp, Homo sapien
ggaatgttgcacgctcgaactaaaagttaggtt

SEQ ID NO: 1008043 - DNA, 33 bp, Homo sapien
cacctccccttgtttgcatgagagaagaggaga

SEQ ID NO: 1008044 - DNA, 33 bp, Homo sapien
cacctccccttgtttggatgagagaagaggaga

SEQ ID NO: 1008045 - DNA, 33 bp, Homo sapien
gggtgctcgtgctgacagaagttgggatttcat

SEQ ID NO: 1008046 - DNA, 33 bp, Homo sapien
gggtgctcgtgctgacggaagttgggatttcat

SEQ ID NO: 1008047 - DNA, 33 bp, Homo sapien
aagccagtggtcagacagactttcccacaatac

SEQ ID NO: 1008048 - DNA, 33 bp, Homo sapien
aagccagtggtcagacggactttcccacaatac

SEQ ID NO: 1008049 - DNA, 33 bp, Homo sapien
tctccatttgtggagaaacttctgaaaatagat

SEQ ID NO: 1008050 - DNA, 33 bp, Homo sapien
tctccatttgtggagagacttctgaaaatagat

SEQ ID NO: 1008051 - DNA, 33 bp, Homo sapien
tcctattaacagtaacaaaggtccatcacagag

SEQ ID NO: 1008052 - DNA, 33 bp, Homo sapien
tcctattaacagtaacgaaggtccatcacagag

SEQ ID NO: 1008053 - DNA, 33 bp, Homo sapien
caattgtgtttctaacccctacagcaaacaaaa

SEQ ID NO: 1008054 - DNA, 33 bp, Homo sapien
caattgtgtttctaactcctacagcaaacaaaa

SEQ ID NO: 1008055 - DNA, 33 bp, Homo sapien
atctctgaacagtagccattcaattatttttta

SEQ ID NO: 1008056 - DNA, 33 bp, Homo sapien
atctctgaacagtagcgattcaattatttttta

SEQ ID NO: 1008057 - DNA, 33 bp, Homo sapien
aaaaggactaggtaaaacagataatccttgaca

SEQ ID NO: 1008058 - DNA, 33 bp, Homo sapien
aaaaggactaggtaaagcagataatccttgaca

SEQ ID NO: 1008059 - DNA, 33 bp, Homo sapien
tatgaacctttgggggaaaataaatctcaaaca

SEQ ID NO: 1008060 - DNA, 33 bp, Homo sapien
tatgaacctttggggggaaataaatctcaaaca

SEQ ID NO: 1008061 - DNA, 33 bp, Homo sapien
gtgtgcagaagctcgagagtctaaaagggaaag

SEQ ID NO: 1008062 - DNA, 33 bp, Homo sapien
gtgtgcagaagctcgatagtctaaaagggaaag

SEQ ID NO: 1008063 - DNA, 33 bp, Homo sapien
atgcggcttattggtacgtgttaggaaggttca

SEQ ID NO: 1008064 - DNA, 33 bp, Homo sapien
atgcggcttattggtatgtgttaggaaggttca

SEQ ID NO: 1008065 - DNA, 33 bp, Homo sapien
gctacctgtactttcactatctgcaagcttttt

SEQ ID NO: 1008066 - DNA, 33 bp, Homo sapien
gctacctgtactttcattatctgcaagcttttt

SEQ ID NO: 1008067 - DNA, 33 bp, Homo sapien
atattctgagtgtcaacgatccagctgtcttgg

SEQ ID NO: 1008068 - DNA, 33 bp, Homo sapien
atattctgagtgtcaatgatccagctgtcttgg

SEQ ID NO: 1008069 - DNA, 33 bp, Homo sapien
catagctcttatgcgaaattaagtattattttt

SEQ ID NO: 1008070 - DNA, 33 bp, Homo sapien
catagctcttatgcgacattaagtattattttt

SEQ ID NO: 1008071 - DNA, 33 bp, Homo sapien
tataatcctctatgaacgtaccgttattattag

SEQ ID NO: 1008072 - DNA, 33 bp, Homo sapien
tataatcctctatgaaggtaccgttattattag

SEQ ID NO: 1008073 - DNA, 33 bp, Homo sapien
cgtatattttgctttacacctgaggaatgcgca

SEQ ID NO: 1008074 - DNA, 33 bp, Homo sapien
cgtatattttgctttatacctgaggaatgcgca

SEQ ID NO: 1008075 - DNA, 33 bp, Homo sapien
attgtgattaggaaacactaaatactggtgtgg

SEQ ID NO: 1008076 - DNA, 33 bp, Homo sapien
attgtgattaggaaactctaaatactggtgtgg

SEQ ID NO: 1008077 - DNA, 33 bp, Homo sapien
gtaattgaaaaatcacaacacgatcttcttcaa

SEQ ID NO: 1008078 - DNA, 33 bp, Homo sapien
gtaattgaaaaatcacgacacgatcttcttcaa

SEQ ID NO: 1008079 - DNA, 33 bp, Homo sapien
ttcatccctgtgatacaaactgcaggaatataa

SEQ ID NO: 1008080 - DNA, 33 bp, Homo sapien
ttcatccctgtgatactaactgcaggaatataa

SEQ ID NO: 1008081 - DNA, 33 bp, Homo sapien
aatgtcaaacgcattaagccagagggcccaagg

SEQ ID NO: 1008082 - DNA, 33 bp, Homo sapien
aatgtcaaacgcattaggccagagggcccaagg

SEQ ID NO: 1008083 - DNA, 33 bp, Homo sapien
agcagtgggaattgacaaaaggatctgaagtag

SEQ ID NO: 1008084 - DNA, 33 bp, Homo sapien
agcagtgggaattgactaaaggatctgaagtag

SEQ ID NO: 1008085 - DNA, 33 bp, Homo sapien
tatttgatttagttggccatgctctgtttaaaa

SEQ ID NO: 1008086 - DNA, 33 bp, Homo sapien
tatttgatttagttggtcatgctctgtttaaaa

SEQ ID NO: 1008087 - DNA, 33 bp, Homo sapien
agaaatgtttgttgaaagtccatgtccctactt

SEQ ID NO: 1008088 - DNA, 33 bp, Homo sapien
agaaatgtttgttgaaggtccatgtccctactt

SEQ ID NO: 1008089 - DNA, 33 bp, Homo sapien
gattttttttaaggctcagaacagtctctttct

SEQ ID NO: 1008090 - DNA, 33 bp, Homo sapien
gattttttttaaggcttagaacagtctctttct

SEQ ID NO: 1008091 - DNA, 33 bp, Homo sapien
tactggtgcagagctacgtaccaggtgctcaaa

SEQ ID NO: 1008092 - DNA, 33 bp, Homo sapien
tactggtgcagagctatgtaccaggtgctcaaa

SEQ ID NO: 1008093 - DNA, 33 bp, Homo sapien
caagagtggacaaggaaaagttcaactggtctt

SEQ ID NO: 1008094 - DNA, 33 bp, Homo sapien
caagagtggacaaggagaagttcaactggtctt

SEQ ID NO: 1008095 - DNA, 33 bp, Homo sapien
ttcaggcagctccagcgcaatttgtgtagtaga

SEQ ID NO: 1008096 - DNA, 33 bp, Homo sapien
ttcaggcagctccagctcaatttgtgtagtaga

SEQ ID NO: 1008097 - DNA, 33 bp, Homo sapien
gcagcagcagtaaggaacagtttatttggacaa

SEQ ID NO: 1008098 - DNA, 33 bp, Homo sapien
gcagcagcagtaaggagcagtttatttggacaa

SEQ ID NO: 1008099 - DNA, 33 bp, Homo sapien
tattggaatactaccaaatagaaaatggtgaca

SEQ ID NO: 1008100 - DNA, 33 bp, Homo sapien
tattggaatactaccagatagaaaatggtgaca

SEQ ID NO: 1008101 - DNA, 33 bp, Homo sapien
tggttttaaccatcagaagtaattgactaacga

SEQ ID NO: 1008102 - DNA, 33 bp, Homo sapien
tggttttaaccatcagcagtaattgactaacga

SEQ ID NO: 1008103 - DNA, 33 bp, Homo sapien
gtacaaatttatagaccatgaagttcaaaaatg

SEQ ID NO: 1008104 - DNA, 33 bp, Homo sapien
gtacaaatttatagacgatgaagttcaaaaatg

SEQ ID NO: 1008105 - DNA, 33 bp, Homo sapien
aatagaaacagagactcaaaatatgggaaacag

SEQ ID NO: 1008106 - DNA, 33 bp, Homo sapien
aatagaaacagagactgaaaatatgggaaacag

SEQ ID NO: 1008107 - DNA, 33 bp, Homo sapien
tctggagtgtttgtagacagttacatttatctc

SEQ ID NO: 1008108 - DNA, 33 bp, Homo sapien
tctggagtgtttgtaggcagttacatttatctc

SEQ ID NO: 1008109 - DNA, 33 bp, Homo sapien
tgaatgcagctcaacacaaattcataaactctc

SEQ ID NO: 1008110 - DNA, 33 bp, Homo sapien
tgaatgcagctcaacagaaattcataaactctc

SEQ ID NO: 1008111 - DNA, 33 bp, Homo sapien
tttggctttgtaacacaggctgaaaatatttat

SEQ ID NO: 1008112 - DNA, 33 bp, Homo sapien
tttggctttgtaacaccggctgaaaatatttat

SEQ ID NO: 1008113 - DNA, 33 bp, Homo sapien
ttcttttacagtcagccctctgacaggactgcc

SEQ ID NO: 1008114 - DNA, 33 bp, Homo sapien
ttcttttacagtcagctctctgacaggactgcc

SEQ ID NO: 1008115 - DNA, 33 bp, Homo sapien
gaagatcatcaaaatcactaacacccaaaaagt

SEQ ID NO: 1008116 - DNA, 33 bp, Homo sapien
gaagatcatcaaaatccctaacacccaaaaagt

SEQ ID NO: 1008117 - DNA, 33 bp, Homo sapien
tgtattagtgactccaatatatctgactgcact

SEQ ID NO: 1008118 - DNA, 33 bp, Homo sapien
tgtattagtgactccagtatatctgactgcact

SEQ ID NO: 1008119 - DNA, 33 bp, Homo sapien
atatgtagaaaaaacactgagcaaaatgcctgg

SEQ ID NO: 1008120 - DNA, 33 bp, Homo sapien
atatgtagaaaaaacattgagcaaaatgcctgg

SEQ ID NO: 1008121 - DNA, 33 bp, Homo sapien
agagaccctctttgcccgagaagtaagggaaca

SEQ ID NO: 1008122 - DNA, 33 bp, Homo sapien
agagaccctctttgcctgagaagtaagggaaca

SEQ ID NO: 1008123 - DNA, 33 bp, Homo sapien
tgttcaaatgatgtaactgggaatgtttctctg

SEQ ID NO: 1008124 - DNA, 33 bp, Homo sapien
tgttcaaatgatgtaattgggaatgtttctctg

SEQ ID NO: 1008125 - DNA, 33 bp, Homo sapien
acatcaggaatagcaaacgggctgatatggctg

SEQ ID NO: 1008126 - DNA, 33 bp, Homo sapien
acatcaggaatagcaatcgggctgatatggctg

SEQ ID NO: 1008127 - DNA, 33 bp, Homo sapien
gagaacacgtagagaacagtccaagtgcactga

SEQ ID NO: 1008128 - DNA, 33 bp, Homo sapien
gagaacacgtagagaagagtccaagtgcactga

SEQ ID NO: 1008129 - DNA, 33 bp, Homo sapien
tgaccaaagtcttccaaacaaaattgcttttca

SEQ ID NO: 1008130 - DNA, 33 bp, Homo sapien
tgaccaaagtcttccagacaaaattgcttttca

SEQ ID NO: 1008131 - DNA, 33 bp, Homo sapien
caatcctaacttactagagacagaaccgacagc

SEQ ID NO: 1008132 - DNA, 33 bp, Homo sapien
caatcctaacttactatagacagaaccgacagc

SEQ ID NO: 1008133 - DNA, 33 bp, Homo sapien
tgtttggtgtgatgacagtaaaaaggtcctgag

SEQ ID NO: 1008134 - DNA, 33 bp, Homo sapien
tgtttggtgtgatgacggtaaaaaggtcctgag

SEQ ID NO: 1008135 - DNA, 33 bp, Homo sapien
tcccttaccctctacaactatcatcaccaagtt

SEQ ID NO: 1008136 - DNA, 33 bp, Homo sapien
tcccttaccctctacatctatcatcaccaagtt

SEQ ID NO: 1008137 - DNA, 33 bp, Homo sapien
taacctctgtgaattcaacttctgtgtcacata

SEQ ID NO: 1008138 - DNA, 33 bp, Homo sapien
taacctctgtgaattctacttctgtgtcacata

SEQ ID NO: 1008139 - DNA, 33 bp, Homo sapien
ccaataatttctccaactcctcagatgtcagca

SEQ ID NO: 1008140 - DNA, 33 bp, Homo sapien
ccaataatttctccaattcctcagatgtcagca

SEQ ID NO: 1008141 - DNA, 33 bp, Homo sapien
gctgccatgttttcacaaaataataacctttca

SEQ ID NO: 1008142 - DNA, 33 bp, Homo sapien
gctgccatgttttcacgaaataataacctttca

SEQ ID NO: 1008143 - DNA, 33 bp, Homo sapien
cagcagtaaaagtaacacatccaaagaagcact

SEQ ID NO: 1008144 - DNA, 33 bp, Homo sapien
cagcagtaaaagtaacgcatccaaagaagcact

SEQ ID NO: 1008145 - DNA, 33 bp, Homo sapien
cacaaccaaccagagcgactgaagtcaaacacg

SEQ ID NO: 1008146 - DNA, 33 bp, Homo sapien
cacaaccaaccagagctactgaagtcaaacacg

SEQ ID NO: 1008147 - DNA, 33 bp, Homo sapien
tagtctctggtaaatccgagacaaaaaggcttc

SEQ ID NO: 1008148 - DNA, 33 bp, Homo sapien
tagtctctggtaaatctgagacaaaaaggcttc

SEQ ID NO: 1008149 - DNA, 33 bp, Homo sapien
acttacagacactaaaacttatttctcccagtt

SEQ ID NO: 1008150 - DNA, 33 bp, Homo sapien
acttacagacactaaagcttatttctcccagtt

SEQ ID NO: 1008151 - DNA, 33 bp, Homo sapien
gtcctattagtctcaccctaacgttcaatctaa

SEQ ID NO: 1008152 - DNA, 33 bp, Homo sapien
gtcctattagtctcactctaacgttcaatctaa

SEQ ID NO: 1008153 - DNA, 33 bp, Homo sapien
ttgtgtatataacttgaatcctctgctacctgc

SEQ ID NO: 1008154 - DNA, 33 bp, Homo sapien
ttgtgtatataacttgtatcctctgctacctgc

SEQ ID NO: 1008155 - DNA, 33 bp, Homo sapien
acattaaactaggccacggaaagagttaaacca

SEQ ID NO: 1008156 - DNA, 33 bp, Homo sapien
acattaaactaggccatggaaagagttaaacca

SEQ ID NO: 1008157 - DNA, 33 bp, Homo sapien
attgtattgtataacacaatttatctgtcacct

SEQ ID NO: 1008158 - DNA, 33 bp, Homo sapien
attgtattgtataacataatttatctgtcacct

SEQ ID NO: 1008159 - DNA, 33 bp, Homo sapien
cttaggagtagaacaaatggagtttgaacctct

SEQ ID NO: 1008160 - DNA, 33 bp, Homo sapien
cttaggagtagaacaactggagtttgaacctct

SEQ ID NO: 1008161 - DNA, 33 bp, Homo sapien
acaaaaattgctttcacgtaaatcacttggaac

SEQ ID NO: 1008162 - DNA, 33 bp, Homo sapien
acaaaaattgctttcatgtaaatcacttggaac

SEQ ID NO: 1008163 - DNA, 33 bp, Homo sapien
atttttgagtgcttacaataggtcagacagggt

SEQ ID NO: 1008164 - DNA, 33 bp, Homo sapien
atttttgagtgcttactataggtcagacagggt

SEQ ID NO: 1008165 - DNA, 33 bp, Homo sapien
ttgcccacagttctgacggaagtatatagctaa

SEQ ID NO: 1008166 - DNA, 33 bp, Homo sapien
ttgcccacagttctgatggaagtatatagctaa

SEQ ID NO: 1008167 - DNA, 33 bp, Homo sapien
cagatacttcaaataacagaaaacagcataaaa

SEQ ID NO: 1008168 - DNA, 33 bp, Homo sapien
cagatacttcaaataatagaaaacagcataaaa

SEQ ID NO: 1008169 - DNA, 33 bp, Homo sapien
ctggtagtagaaacaccggataatggcgtgctg

SEQ ID NO: 1008170 - DNA, 33 bp, Homo sapien
ctggtagtagaaacactggataatggcgtgctg

SEQ ID NO: 1008171 - DNA, 33 bp, Homo sapien
ttctgctgctaaaaaacaaatttcgagaccacc

SEQ ID NO: 1008172 - DNA, 33 bp, Homo sapien
ttctgctgctaaaaaataaatttcgagaccacc

SEQ ID NO: 1008173 - DNA, 33 bp, Homo sapien
tgagagggtctgaaaacgaccattggactggga

SEQ ID NO: 1008174 - DNA, 33 bp, Homo sapien
tgagagggtctgaaaatgaccattggactggga

SEQ ID NO: 1008175 - DNA, 33 bp, Homo sapien
ttagaggttcagttcacaggacatcaagaatta

SEQ ID NO: 1008176 - DNA, 33 bp, Homo sapien
ttagaggttcagttcagaggacatcaagaatta

SEQ ID NO: 1008177 - DNA, 33 bp, Homo sapien
ccctcagtaaaaatccccaataagctcttgcac

SEQ ID NO: 1008178 - DNA, 33 bp, Homo sapien
ccctcagtaaaaatcctcaataagctcttgcac

SEQ ID NO: 1008179 - DNA, 33 bp, Homo sapien
aagagcactatcttaccctacaggacccaagaa

SEQ ID NO: 1008180 - DNA, 33 bp, Homo sapien
aagagcactatcttacgctacaggacccaagaa

SEQ ID NO: 1008181 - DNA, 33 bp, Homo sapien
gaaagaattcagctgacggccagaagtaggtat

SEQ ID NO: 1008182 - DNA, 33 bp, Homo sapien
gaaagaattcagctgagggccagaagtaggtat

SEQ ID NO: 1008183 - DNA, 33 bp, Homo sapien
tcattgtctatcaacactggtttctgaattgtg

SEQ ID NO: 1008184 - DNA, 33 bp, Homo sapien
tcattgtctatcaacattggtttctgaattgtg

SEQ ID NO: 1008185 - DNA, 33 bp, Homo sapien
ggttattctcataacaccaaacttaaagcgttt

SEQ ID NO: 1008186 - DNA, 33 bp, Homo sapien
ggttattctcataacatcaaacttaaagcgttt

SEQ ID NO: 1008187 - DNA, 33 bp, Homo sapien
aagaaaagatgttcatcaaaagttaacagtgag

SEQ ID NO: 1008188 - DNA, 33 bp, Homo sapien
aagaaaagatgttcattaaaagttaacagtgag

SEQ ID NO: 1008189 - DNA, 33 bp, Homo sapien
ccagtatcattctctgcagctgaatctaaggtg

SEQ ID NO: 1008190 - DNA, 33 bp, Homo sapien
ccagtatcattctctgtagctgaatctaaggtg

SEQ ID NO: 1008191 - DNA, 33 bp, Homo sapien
aagagagattgacaaaagttgaacagattcagg

SEQ ID NO: 1008192 - DNA, 33 bp, Homo sapien
aagagagattgacaaaggttgaacagattcagg

SEQ ID NO: 1008193 - DNA, 33 bp, Homo sapien
tgtcaaagtactgtcaaaagtatatatgactgc

SEQ ID NO: 1008194 - DNA, 33 bp, Homo sapien
tgtcaaagtactgtcacaagtatatatgactgc

SEQ ID NO: 1008195 - DNA, 33 bp, Homo sapien
aatcattagctttaagaagaaaattattagctt

SEQ ID NO: 1008196 - DNA, 33 bp, Homo sapien
aatcattagctttaaggagaaaattattagctt

SEQ ID NO: 1008197 - DNA, 33 bp, Homo sapien
ctttgttttacatgcccagcatcctcctgaccc

SEQ ID NO: 1008198 - DNA, 33 bp, Homo sapien
ctttgttttacatgcctagcatcctcctgaccc

SEQ ID NO: 1008199 - DNA, 33 bp, Homo sapien
aaaacttatttgacccgcgaacacttttttcac

SEQ ID NO: 1008200 - DNA, 33 bp, Homo sapien
aaaacttatttgaccctcgaacacttttttcac

SEQ ID NO: 1008201 - DNA, 33 bp, Homo sapien
ccaccctttcttgccacgattatcctcctaatg

SEQ ID NO: 1008202 - DNA, 33 bp, Homo sapien
ccaccctttcttgccatgattatcctcctaatg

SEQ ID NO: 1008203 - DNA, 33 bp, Homo sapien
aaagattatggctctgcaaaggaaaggaaggga

SEQ ID NO: 1008204 - DNA, 33 bp, Homo sapien
aaagattatggctctggaaaggaaaggaaggga

SEQ ID NO: 1008205 - DNA, 33 bp, Homo sapien
taattcacataatctccccggtttgctaagaaa

SEQ ID NO: 1008206 - DNA, 33 bp, Homo sapien
taattcacataatctctccggtttgctaagaaa

SEQ ID NO: 1008207 - DNA, 33 bp, Homo sapien
gctgctacaccaacacaagggacagaaaataac

SEQ ID NO: 1008208 - DNA, 33 bp, Homo sapien
gctgctacaccaacacgagggacagaaaataac

SEQ ID NO: 1008209 - DNA, 33 bp, Homo sapien
ggtttttggaagagaacgaggctgatcccaagc

SEQ ID NO: 1008210 - DNA, 33 bp, Homo sapien
ggtttttggaagagaatgaggctgatcccaagc

SEQ ID NO: 1008211 - DNA, 33 bp, Homo sapien
aagttttacagcaaagaaatctaaaatcaattt

SEQ ID NO: 1008212 - DNA, 33 bp, Homo sapien
aagttttacagcaaagtaatctaaaatcaattt

SEQ ID NO: 1008213 - DNA, 33 bp, Homo sapien
ccatgtaccaactgaaacacaggagaaataata

SEQ ID NO: 1008214 - DNA, 33 bp, Homo sapien
ccatgtaccaactgaaccacaggagaaataata

SEQ ID NO: 1008215 - DNA, 33 bp, Homo sapien
gcctgaaacttcttaacaaaaagtagctccaca

SEQ ID NO: 1008216 - DNA, 33 bp, Homo sapien
gcctgaaacttcttaagaaaaagtagctccaca

SEQ ID NO: 1008217 - DNA, 33 bp, Homo sapien
gatgaagaaaatcataccgaaggttctcctgag

SEQ ID NO: 1008218 - DNA, 33 bp, Homo sapien
gatgaagaaaatcatatcgaaggttctcctgag

SEQ ID NO: 1008219 - DNA, 33 bp, Homo sapien
tttctgtcttcacggagattacagtctattgtg

SEQ ID NO: 1008220 - DNA, 33 bp, Homo sapien
tttctgtcttcacggatattacagtctattgtg

SEQ ID NO: 1008221 - DNA, 33 bp, Homo sapien
gtgtctgaaacttccacgacctgaagtccttat

SEQ ID NO: 1008222 - DNA, 33 bp, Homo sapien
gtgtctgaaacttccatgacctgaagtccttat

SEQ ID NO: 1008223 - DNA, 33 bp, Homo sapien
tagataccgcaagatacaaacttaatgaagaat

SEQ ID NO: 1008224 - DNA, 33 bp, Homo sapien
tagataccgcaagatagaaacttaatgaagaat

SEQ ID NO: 1008225 - DNA, 33 bp, Homo sapien
ctttgattgctttgtaacgtggtgcctcttaag

SEQ ID NO: 1008226 - DNA, 33 bp, Homo sapien
ctttgattgctttgtagcgtggtgcctcttaag

SEQ ID NO: 1008227 - DNA, 33 bp, Homo sapien
tttttagcttaagatcaaatcatctactcttga

SEQ ID NO: 1008228 - DNA, 33 bp, Homo sapien
tttttagcttaagatctaatcatctactcttga

SEQ ID NO: 1008229 - DNA, 33 bp, Homo sapien
attaatacatccaaaaggtttgaatgacatcaa

SEQ ID NO: 1008230 - DNA, 33 bp, Homo sapien
attaatacatccaaaatgtttgaatgacatcaa

SEQ ID NO: 1008231 - DNA, 33 bp, Homo sapien
agtcatcaggtatttgcatcagtcaaattaagc

SEQ ID NO: 1008232 - DNA, 33 bp, Homo sapien
agtcatcaggtatttgtatcagtcaaattaagc

SEQ ID NO: 1008233 - DNA, 33 bp, Homo sapien
cttagcaatttgtacccctaccggaagtgcttc

SEQ ID NO: 1008234 - DNA, 33 bp, Homo sapien
cttagcaatttgtacctctaccggaagtgcttc

SEQ ID NO: 1008235 - DNA, 33 bp, Homo sapien
aaggagtaagaagtgaagttggaataacaagca

SEQ ID NO: 1008236 - DNA, 33 bp, Homo sapien
aaggagtaagaagtgaggttggaataacaagca

SEQ ID NO: 1008237 - DNA, 33 bp, Homo sapien
tacccagctcatttcacaggattcttaccatac

SEQ ID NO: 1008238 - DNA, 33 bp, Homo sapien
tacccagctcatttcagaggattcttaccatac

SEQ ID NO: 1008239 - DNA, 33 bp, Homo sapien
ctcagccagcaagtaacaaagtgggaaaggagt

SEQ ID NO: 1008240 - DNA, 33 bp, Homo sapien
ctcagccagcaagtaagaaagtgggaaaggagt

SEQ ID NO: 1008241 - DNA, 33 bp, Homo sapien
tacctacagtcaccagaatgcaatggaacatgt

SEQ ID NO: 1008242 - DNA, 33 bp, Homo sapien
tacctacagtcaccaggatgcaatggaacatgt

SEQ ID NO: 1008243 - DNA, 33 bp, Homo sapien
caattggcattcattcaatatgtatttattcac

SEQ ID NO: 1008244 - DNA, 33 bp, Homo sapien
caattggcattcattccatatgtatttattcac

SEQ ID NO: 1008245 - DNA, 33 bp, Homo sapien
aaaaccaaccgatttgacaaagccactcaccaa

SEQ ID NO: 1008246 - DNA, 33 bp, Homo sapien
aaaaccaaccgatttggcaaagccactcaccaa

SEQ ID NO: 1008247 - DNA, 33 bp, Homo sapien
gtgaaatgggttacaccgaggtcttacaacaaa

SEQ ID NO: 1008248 - DNA, 33 bp, Homo sapien
gtgaaatgggttacactgaggtcttacaacaaa

SEQ ID NO: 1008249 - DNA, 33 bp, Homo sapien
ggagccatgctccccacgtgcaaatctgagctc

SEQ ID NO: 1008250 - DNA, 33 bp, Homo sapien
ggagccatgctccccaggtgcaaatctgagctc

SEQ ID NO: 1008251 - DNA, 33 bp, Homo sapien
tatcacactaatggtcaaaaggttcttatccta

SEQ ID NO: 1008252 - DNA, 33 bp, Homo sapien
tatcacactaatggtcgaaaggttcttatccta

SEQ ID NO: 1008253 - DNA, 33 bp, Homo sapien
aaaagcaaattgcgtaataatatgtattatatt

SEQ ID NO: 1008254 - DNA, 33 bp, Homo sapien
aaaagcaaattgcgtagtaatatgtattatatt

SEQ ID NO: 1008255 - DNA, 33 bp, Homo sapien
tcctttgagggcaacgccaatcatttcaagcat

SEQ ID NO: 1008256 - DNA, 33 bp, Homo sapien
tcctttgagggcaacgtcaatcatttcaagcat

SEQ ID NO: 1008257 - DNA, 33 bp, Homo sapien
gaaggtagaaagagcacaaactttggagacaaa

SEQ ID NO: 1008258 - DNA, 33 bp, Homo sapien
gaaggtagaaagagcagaaactttggagacaaa

SEQ ID NO: 1008259 - DNA, 33 bp, Homo sapien
gtatgaatacacccaacttcccatgttttatta

SEQ ID NO: 1008260 - DNA, 33 bp, Homo sapien
gtatgaatacacccaatttcccatgttttatta

SEQ ID NO: 1008261 - DNA, 33 bp, Homo sapien
gaaagcaactcatttcaaacatttattataaac

SEQ ID NO: 1008262 - DNA, 33 bp, Homo sapien
gaaagcaactcatttccaacatttattataaac

SEQ ID NO: 1008263 - DNA, 33 bp, Homo sapien
gtccaacacaagtaagacctcaagaaacgcttg

SEQ ID NO: 1008264 - DNA, 33 bp, Homo sapien
gtccaacacaagtaagtcctcaagaaacgcttg

SEQ ID NO: 1008265 - DNA, 33 bp, Homo sapien
attatagtgaaacttcacagacgtagatcaagt

SEQ ID NO: 1008266 - DNA, 33 bp, Homo sapien
attatagtgaaacttcgcagacgtagatcaagt

SEQ ID NO: 1008267 - DNA, 33 bp, Homo sapien
gtacaataggggctccaataatcaacagcacca

SEQ ID NO: 1008268 - DNA, 33 bp, Homo sapien
gtacaataggggctccgataatcaacagcacca

SEQ ID NO: 1008269 - DNA, 33 bp, Homo sapien
ccctattgtacaccacaaaatccaggcaacctt

SEQ ID NO: 1008270 - DNA, 33 bp, Homo sapien
ccctattgtacaccacgaaatccaggcaacctt

SEQ ID NO: 1008271 - DNA, 33 bp, Homo sapien
ctgcagcatttatggacaaaactgggatccgca

SEQ ID NO: 1008272 - DNA, 33 bp, Homo sapien
ctgcagcatttatggagaaaactgggatccgca

SEQ ID NO: 1008273 - DNA, 33 bp, Homo sapien
gctagccccagttcggaatttgtttcctgttta

SEQ ID NO: 1008274 - DNA, 33 bp, Homo sapien
gctagccccagttcgggatttgtttcctgttta

SEQ ID NO: 1008275 - DNA, 33 bp, Homo sapien
gctagcattcccaaaaagcatgtccaggggctg

SEQ ID NO: 1008276 - DNA, 33 bp, Homo sapien
gctagcattcccaaaaggcatgtccaggggctg

SEQ ID NO: 1008277 - DNA, 33 bp, Homo sapien
ttgcttaaatccctaaaataccccaaatctcag

SEQ ID NO: 1008278 - DNA, 33 bp, Homo sapien
ttgcttaaatccctaatataccccaaatctcag

SEQ ID NO: 1008279 - DNA, 33 bp, Homo sapien
gaggcgatttggggaaacattttattaagctat

SEQ ID NO: 1008280 - DNA, 33 bp, Homo sapien
gaggcgatttggggaatcattttattaagctat

SEQ ID NO: 1008281 - DNA, 33 bp, Homo sapien
acagggctcctagactcagtacaggattagact

SEQ ID NO: 1008282 - DNA, 33 bp, Homo sapien
acagggctcctagacttagtacaggattagact

SEQ ID NO: 1008283 - DNA, 33 bp, Homo sapien
ggaggaggtaataccaatgctaaaatttatact

SEQ ID NO: 1008284 - DNA, 33 bp, Homo sapien
ggaggaggtaataccagtgctaaaatttatact

SEQ ID NO: 1008285 - DNA, 33 bp, Homo sapien
agaaagatgagattaaaacttgggttgagggtg

SEQ ID NO: 1008286 - DNA, 33 bp, Homo sapien
agaaagatgagattaagacttgggttgagggtg

SEQ ID NO: 1008287 - DNA, 33 bp, Homo sapien
cctctgtgatcttcaccaatcacactgcaatgc

SEQ ID NO: 1008288 - DNA, 33 bp, Homo sapien
cctctgtgatcttcacgaatcacactgcaatgc

SEQ ID NO: 1008289 - DNA, 33 bp, Homo sapien
gccacatcttcataaaaacagggcctaggacat

SEQ ID NO: 1008290 - DNA, 33 bp, Homo sapien
gccacatcttcataaatacagggcctaggacat

SEQ ID NO: 1008291 - DNA, 33 bp, Homo sapien
catttggaaacttcacaacctggccatgtgata

SEQ ID NO: 1008292 - DNA, 33 bp, Homo sapien
catttggaaacttcacgacctggccatgtgata

SEQ ID NO: 1008293 - DNA, 33 bp, Homo sapien
aatatagacaagaggacgaggtgccaggcccct

SEQ ID NO: 1008294 - DNA, 33 bp, Homo sapien
aatatagacaagaggatgaggtgccaggcccct

SEQ ID NO: 1008295 - DNA, 33 bp, Homo sapien
tatcagaggtacagccacaacttggtagaggtc

SEQ ID NO: 1008296 - DNA, 33 bp, Homo sapien
tatcagaggtacagccgcaacttggtagaggtc

SEQ ID NO: 1008297 - DNA, 33 bp, Homo sapien
gaagggcctggtgacaactgtgcagttatcatt

SEQ ID NO: 1008298 - DNA, 33 bp, Homo sapien
gaagggcctggtgacatctgtgcagttatcatt

SEQ ID NO: 1008299 - DNA, 33 bp, Homo sapien
ctgaggagagtagaaaccacttcagaccactgc

SEQ ID NO: 1008300 - DNA, 33 bp, Homo sapien
ctgaggagagtagaaatcacttcagaccactgc

SEQ ID NO: 1008301 - DNA, 33 bp, Homo sapien
ttctttcagtgtagccaagagaggccaaaagat

SEQ ID NO: 1008302 - DNA, 33 bp, Homo sapien
ttctttcagtgtagcccagagaggccaaaagat

SEQ ID NO: 1008303 - DNA, 33 bp, Homo sapien
gtcacatttgtaaaaaataacaagcagtggtaa

SEQ ID NO: 1008304 - DNA, 33 bp, Homo sapien
gtcacatttgtaaaaagtaacaagcagtggtaa

SEQ ID NO: 1008305 - DNA, 33 bp, Homo sapien
caacgccgttgcaaaaatagctcaaattatttc

SEQ ID NO: 1008306 - DNA, 33 bp, Homo sapien
caacgccgttgcaaaagtagctcaaattatttc

SEQ ID NO: 1008307 - DNA, 33 bp, Homo sapien
tacaagcttgggaatcaaactccaaaatgttag

SEQ ID NO: 1008308 - DNA, 33 bp, Homo sapien
tacaagcttgggaatcgaactccaaaatgttag

SEQ ID NO: 1008309 - DNA, 33 bp, Homo sapien
taggttgaaggagaaaacatatccgagagaagg

SEQ ID NO: 1008310 - DNA, 33 bp, Homo sapien
taggttgaaggagaaatcatatccgagagaagg

SEQ ID NO: 1008311 - DNA, 33 bp, Homo sapien
acagataccattttctaacatgggcagtatagg

SEQ ID NO: 1008312 - DNA, 33 bp, Homo sapien
acagataccattttctcacatgggcagtatagg

SEQ ID NO: 1008313 - DNA, 33 bp, Homo sapien
tctaattaatgaagaaaccaaggctcaaagggg

SEQ ID NO: 1008314 - DNA, 33 bp, Homo sapien
tctaattaatgaagaagccaaggctcaaagggg

SEQ ID NO: 1008315 - DNA, 33 bp, Homo sapien
agtgtatttgtcacaggaggattggtgccttgt

SEQ ID NO: 1008316 - DNA, 33 bp, Homo sapien
agtgtatttgtcacagtaggattggtgccttgt

SEQ ID NO: 1008317 - DNA, 33 bp, Homo sapien
caacaacaaccatgaaactatactactagtagc

SEQ ID NO: 1008318 - DNA, 33 bp, Homo sapien
caacaacaaccatgaagctatactactagtagc

SEQ ID NO: 1008319 - DNA, 33 bp, Homo sapien
acagtggaaatgtaagcagcttctcagccagct

SEQ ID NO: 1008320 - DNA, 33 bp, Homo sapien
acagtggaaatgtaagtagcttctcagccagct

SEQ ID NO: 1008321 - DNA, 33 bp, Homo sapien
tggttatgaggacccactggcagaggttgggct

SEQ ID NO: 1008322 - DNA, 33 bp, Homo sapien
tggttatgaggacccagtggcagaggttgggct

SEQ ID NO: 1008323 - DNA, 33 bp, Homo sapien
tgttcttatcgttataacaataccactctgtag

SEQ ID NO: 1008324 - DNA, 33 bp, Homo sapien
tgttcttatcgttatagcaataccactctgtag

SEQ ID NO: 1008325 - DNA, 33 bp, Homo sapien
ccactgcttttcctacaggaccagtgaatactc

SEQ ID NO: 1008326 - DNA, 33 bp, Homo sapien
ccactgcttttcctaccggaccagtgaatactc

SEQ ID NO: 1008327 - DNA, 33 bp, Homo sapien
agttaaaacatctgccaggattaacatcagtgc

SEQ ID NO: 1008328 - DNA, 33 bp, Homo sapien
agttaaaacatctgccgggattaacatcagtgc

SEQ ID NO: 1008329 - DNA, 33 bp, Homo sapien
gcttcatgtaggcttaagattgtaggcaaaaat

SEQ ID NO: 1008330 - DNA, 33 bp, Homo sapien
gcttcatgtaggcttaggattgtaggcaaaaat

SEQ ID NO: 1008331 - DNA, 33 bp, Homo sapien
tcattaaaacacagaaaatgcttggttgtcttt

SEQ ID NO: 1008332 - DNA, 33 bp, Homo sapien
tcattaaaacacagaagatgcttggttgtcttt

SEQ ID NO: 1008333 - DNA, 33 bp, Homo sapien
tgggaacgtacataaacgaagcaaagcagtcat

SEQ ID NO: 1008334 - DNA, 33 bp, Homo sapien
tgggaacgtacataaatgaagcaaagcagtcat

SEQ ID NO: 1008335 - DNA, 33 bp, Homo sapien
cctttatagtaaggtacgtagttggtgttttac

SEQ ID NO: 1008336 - DNA, 33 bp, Homo sapien
cctttatagtaaggtaggtagttggtgttttac

SEQ ID NO: 1008337 - DNA, 33 bp, Homo sapien; identical to SEQ ID NO: 1008335

SEQ ID NO: 1008338 - DNA, 33 bp, Homo sapien; identical to SEQ ID NO: 1008336

SEQ ID NO: 1008339 - DNA, 33 bp, Homo sapien
taaaatccacccaccaatcttaggcatcataat

SEQ ID NO: 1008340 - DNA, 33 bp, Homo sapien
taaaatccacccaccagtcttaggcatcataat

SEQ ID NO: 1008341 - DNA, 33 bp, Homo sapien
atggatccccagccaacctgtattgttttagct

SEQ ID NO: 1008342 - DNA, 33 bp, Homo sapien
atggatccccagccaatctgtattgttttagct

SEQ ID NO: 1008343 - DNA, 33 bp, Homo sapien
ctctaccttaataaaacgtaacgttcaatacta

SEQ ID NO: 1008344 - DNA, 33 bp, Homo sapien
ctctaccttaataaaatgtaacgttcaatacta

SEQ ID NO: 1008345 - DNA, 33 bp, Homo sapien
tgtagaagttgcaacaaattatccaaaagatct

SEQ ID NO: 1008346 - DNA, 33 bp, Homo sapien
tgtagaagttgcaacagattatccaaaagatct

SEQ ID NO: 1008347 - DNA, 33 bp, Homo sapien
actgttgagttagaaaagttatgtattgtaggt

SEQ ID NO: 1008348 - DNA, 33 bp, Homo sapien
actgttgagttagaaaggttatgtattgtaggt

SEQ ID NO: 1008349 - DNA, 33 bp, Homo sapien
tgtttataaccattaaccacactctcttcgtcc

SEQ ID NO: 1008350 - DNA, 33 bp, Homo sapien
tgtttataaccattaagcacactctcttcgtcc

SEQ ID NO: 1008351 - DNA, 33 bp, Homo sapien
accaagtggatggaaacgacacccaaacacaac

SEQ ID NO: 1008352 - DNA, 33 bp, Homo sapien
accaagtggatggaaaggacacccaaacacaac

SEQ ID NO: 1008353 - DNA, 33 bp, Homo sapien
taaatgtgaaaggcaaaacttaacaaagctttt

SEQ ID NO: 1008354 - DNA, 33 bp, Homo sapien
taaatgtgaaaggcaagacttaacaaagctttt

SEQ ID NO: 1008355 - DNA, 33 bp, Homo sapien
cactgtgcacaaaaaaattaaataataattcta

SEQ ID NO: 1008356 - DNA, 33 bp, Homo sapien
cactgtgcacaaaaaatttaaataataattcta

SEQ ID NO: 1008357 - DNA, 33 bp, Homo sapien
tgtttatccctgcaacagtgacaaatgtcttag

SEQ ID NO: 1008358 - DNA, 33 bp, Homo sapien
tgtttatccctgcaacggtgacaaatgtcttag

SEQ ID NO: 1008359 - DNA, 33 bp, Homo sapien
tatataagcaacctgaccaaattgagtttatcc

SEQ ID NO: 1008360 - DNA, 33 bp, Homo sapien
tatataagcaacctgatcaaattgagtttatcc

SEQ ID NO: 1008361 - DNA, 33 bp, Homo sapien
atacttgatctgtgaagtccttcagctcatatc

SEQ ID NO: 1008362 - DNA, 33 bp, Homo sapien
atacttgatctgtgaattccttcagctcatatc

SEQ ID NO: 1008363 - DNA, 33 bp, Homo sapien
agatgctagtgaaatacgctctgtaagacaatt

SEQ ID NO: 1008364 - DNA, 33 bp, Homo sapien
agatgctagtgaaatatgctctgtaagacaatt

SEQ ID NO: 1008365 - DNA, 33 bp, Homo sapien
aaaagtttgggcaatccaataagagaacaggat

SEQ ID NO: 1008366 - DNA, 33 bp, Homo sapien
aaaagtttgggcaatctaataagagaacaggat

SEQ ID NO: 1008367 - DNA, 33 bp, Homo sapien
tactaaatcctattcaaactcccattcaatact

SEQ ID NO: 1008368 - DNA, 33 bp, Homo sapien
tactaaatcctattcagactcccattcaatact

SEQ ID NO: 1008369 - DNA, 33 bp, Homo sapien
atttagtaatagcaagaacatgacttagggaca

SEQ ID NO: 1008370 - DNA, 33 bp, Homo sapien
atttagtaatagcaagcacatgacttagggaca

SEQ ID NO: 1008371 - DNA, 33 bp, Homo sapien
caataatcaaatgaaggattaagacgtttgaaa

SEQ ID NO: 1008372 - DNA, 33 bp, Homo sapien
caataatcaaatgaagtattaagacgtttgaaa

SEQ ID NO: 1008373 - DNA, 33 bp, Homo sapien
ttgagaacctttaaaaattacattctgcatttt

SEQ ID NO: 1008374 - DNA, 33 bp, Homo sapien
ttgagaacctttaaaacttacattctgcatttt

SEQ ID NO: 1008375 - DNA, 33 bp, Homo sapien
ttctaagtagtgcagacgttacaaaaagaactc

SEQ ID NO: 1008376 - DNA, 33 bp, Homo sapien
ttctaagtagtgcagatgttacaaaaagaactc

SEQ ID NO: 1008377 - DNA, 33 bp, Homo sapien
tattttagtgaataagaaactctacaataagaa

SEQ ID NO: 1008378 - DNA, 33 bp, Homo sapien
tattttagtgaataaggaactctacaataagaa

SEQ ID NO: 1008379 - DNA, 33 bp, Homo sapien
atttttgtgattacagaaagtgctgtatccttg

SEQ ID NO: 1008380 - DNA, 33 bp, Homo sapien
atttttgtgattacaggaagtgctgtatccttg

SEQ ID NO: 1008381 - DNA, 33 bp, Homo sapien
tctagctccacattaccgcaaacggtttaacct

SEQ ID NO: 1008382 - DNA, 33 bp, Homo sapien
tctagctccacattactgcaaacggtttaacct

SEQ ID NO: 1008383 - DNA, 33 bp, Homo sapien
ccagtcttagctccaactaatttggttcatttc

SEQ ID NO: 1008384 - DNA, 33 bp, Homo sapien
ccagtcttagctccaattaatttggttcatttc

SEQ ID NO: 1008385 - DNA, 33 bp, Homo sapien
gaaccattctccaagaagccacccttgaactat

SEQ ID NO: 1008386 - DNA, 33 bp, Homo sapien
gaaccattctccaagacgccacccttgaactat

SEQ ID NO: 1008387 - DNA, 33 bp, Homo sapien
aatgtggaacagattccaagcatggtgagcctc

SEQ ID NO: 1008388 - DNA, 33 bp, Homo sapien
aatgtggaacagattctaagcatggtgagcctc

SEQ ID NO: 1008389 - DNA, 33 bp, Homo sapien
agaatcttctgttaaaatgcaaaatatagatga

SEQ ID NO: 1008390 - DNA, 33 bp, Homo sapien
agaatcttctgttaaagtgcaaaatatagatga

SEQ ID NO: 1008391 - DNA, 33 bp, Homo sapien
gtgaccaggctcatcagagacattcataactat

SEQ ID NO: 1008392 - DNA, 33 bp, Homo sapien
gtgaccaggctcatcatagacattcataactat

SEQ ID NO: 1008393 - DNA, 33 bp, Homo sapien
tctaggaaagaccacacggcaccaggatggccg

SEQ ID NO: 1008394 - DNA, 33 bp, Homo sapien
tctaggaaagaccacatggcaccaggatggccg

SEQ ID NO: 1008395 - DNA, 33 bp, Homo sapien
agaaactcacaattcccaagttaatcctctcac

SEQ ID NO: 1008396 - DNA, 33 bp, Homo sapien
agaaactcacaattcctaagttaatcctctcac

SEQ ID NO: 1008397 - DNA, 33 bp, Homo sapien
ttgtctccttttcagacctccccagtgtgccta

SEQ ID NO: 1008398 - DNA, 33 bp, Homo sapien
ttgtctccttttcagagctccccagtgtgccta

SEQ ID NO: 1008399 - DNA, 33 bp, Homo sapien
acctactcaaaaataaaagaaatgtactgcacc

SEQ ID NO: 1008400 - DNA, 33 bp, Homo sapien
acctactcaaaaataagagaaatgtactgcacc

SEQ ID NO: 1008401 - DNA, 33 bp, Homo sapien
ttcagggtgaaaagaaagaccgtggactaaatg

SEQ ID NO: 1008402 - DNA, 33 bp, Homo sapien
ttcagggtgaaaagaaggaccgtggactaaatg

SEQ ID NO: 1008403 - DNA, 33 bp, Homo sapien
ttatccaggacaaagcaatacttcttagaaagt

SEQ ID NO: 1008404 - DNA, 33 bp, Homo sapien
ttatccaggacaaagcgatacttcttagaaagt

SEQ ID NO: 1008405 - DNA, 33 bp, Homo sapien
tcccacatacgctgaaccacctttctctctgat

SEQ ID NO: 1008406 - DNA, 33 bp, Homo sapien
tcccacatacgctgaatcacctttctctctgat

SEQ ID NO: 1008407 - DNA, 33 bp, Homo sapien
ttctctctgatgagcaccacttagaccttcaaa

SEQ ID NO: 1008408 - DNA, 33 bp, Homo sapien
ttctctctgatgagcagcacttagaccttcaaa

SEQ ID NO: 1008409 - DNA, 33 bp, Homo sapien
acattcagcattgaaaaaacacatttgttgcat

SEQ ID NO: 1008410 - DNA, 33 bp, Homo sapien
acattcagcattgaaagaacacatttgttgcat

SEQ ID NO: 1008411 - DNA, 33 bp, Homo sapien
ggaatactctaagacaaaaacggtcaaacaaat

SEQ ID NO: 1008412 - DNA, 33 bp, Homo sapien
ggaatactctaagacacaaacggtcaaacaaat

SEQ ID NO: 1008413 - DNA, 33 bp, Homo sapien
aagtgatggaaggatcaaataagctaatgcatg

SEQ ID NO: 1008414 - DNA, 33 bp, Homo sapien
aagtgatggaaggatccaataagctaatgcatg

SEQ ID NO: 1008415 - DNA, 33 bp, Homo sapien
acaaatgcttcccaacaaatgaagacccaaagg

SEQ ID NO: 1008416 - DNA, 33 bp, Homo sapien
acaaatgcttcccaacgaatgaagacccaaagg

SEQ ID NO: 1008417 - DNA, 33 bp, Homo sapien
atatgagagtatgcaacggttagaatgctgtgt

SEQ ID NO: 1008418 - DNA, 33 bp, Homo sapien
atatgagagtatgcaatggttagaatgctgtgt

SEQ ID NO: 1008419 - DNA, 33 bp, Homo sapien
tggagattccactggacaagataaatacccatt

SEQ ID NO: 1008420 - DNA, 33 bp, Homo sapien
tggagattccactggataagataaatacccatt

SEQ ID NO: 1008421 - DNA, 33 bp, Homo sapien
actatcacaggaaggacgccaaaaacaaaatac

SEQ ID NO: 1008422 - DNA, 33 bp, Homo sapien
actatcacaggaaggaggccaaaaacaaaatac

SEQ ID NO: 1008423 - DNA, 33 bp, Homo sapien
tatcttaatgtcaaacacagaaaagaaatggct

SEQ ID NO: 1008424 - DNA, 33 bp, Homo sapien
tatcttaatgtcaaacccagaaaagaaatggct

SEQ ID NO: 1008425 - DNA, 33 bp, Homo sapien
attgtctgaggccatagaagtaggaatttttca

SEQ ID NO: 1008426 - DNA, 33 bp, Homo sapien
attgtctgaggccatataagtaggaatttttca

SEQ ID NO: 1008427 - DNA, 33 bp, Homo sapien
tttgtctacaatgccaaggctcctctggaacca

SEQ ID NO: 1008428 - DNA, 33 bp, Homo sapien
tttgtctacaatgccacggctcctctggaacca

SEQ ID NO: 1008429 - DNA, 33 bp, Homo sapien
ctgggactgtgcttgacgaaggcctgcacactc

SEQ ID NO: 1008430 - DNA, 33 bp, Homo sapien
ctgggactgtgcttgatgaaggcctgcacactc

SEQ ID NO: 1008431 - DNA, 33 bp, Homo sapien
ttttccaagtgtgtgacagatgatgttagtaag

SEQ ID NO: 1008432 - DNA, 33 bp, Homo sapien
ttttccaagtgtgtgagagatgatgttagtaag

SEQ ID NO: 1008433 - DNA, 33 bp, Homo sapien
atcataaatgaatcaaatagctagaaaataaaa

SEQ ID NO: 1008434 - DNA, 33 bp, Homo sapien
atcataaatgaatcaagtagctagaaaataaaa

SEQ ID NO: 1008435 - DNA, 33 bp, Homo sapien
cattattataggaagaaaggaaactgaggcata

SEQ ID NO: 1008436 - DNA, 33 bp, Homo sapien
cattattataggaagacaggaaactgaggcata

SEQ ID NO: 1008437 - DNA, 33 bp, Homo sapien
atgaattctcattaagcattttgagcttctcag

SEQ ID NO: 1008438 - DNA, 33 bp, Homo sapien
atgaattctcattaagtattttgagcttctcag

SEQ ID NO: 1008439 - DNA, 33 bp, Homo sapien
ctccgtacagactgaacgaggtcctttgttgtg

SEQ ID NO: 1008440 - DNA, 33 bp, Homo sapien
ctccgtacagactgaatgaggtcctttgttgtg

SEQ ID NO: 1008441 - DNA, 33 bp, Homo sapien
cagtcttttctcttaaagcctacaactgattgg

SEQ ID NO: 1008442 - DNA, 33 bp, Homo sapien
cagtcttttctcttaaggcctacaactgattgg

SEQ ID NO: 1008443 - DNA, 33 bp, Homo sapien
aatgtgttttttgatacgattattgaccataac

SEQ ID NO: 1008444 - DNA, 33 bp, Homo sapien
aatgtgttttttgatatgattattgaccataac

SEQ ID NO: 1008445 - DNA, 33 bp, Homo sapien
aattcagttgtgtgaacagaacacagtttgtgt

SEQ ID NO: 1008446 - DNA, 33 bp, Homo sapien
aattcagttgtgtgaatagaacacagtttgtgt

SEQ ID NO: 1008447 - DNA, 33 bp, Homo sapien
aatgaatgttaataaactacatctgtgttgttc

SEQ ID NO: 1008448 - DNA, 33 bp, Homo sapien
aatgaatgttaataaagtacatctgtgttgttc

SEQ ID NO: 1008449 - DNA, 33 bp, Homo sapien
ttgtccctaaagagtacatgttagcactttcaa

SEQ ID NO: 1008450 - DNA, 33 bp, Homo sapien
ttgtccctaaagagtatatgttagcactttcaa

SEQ ID NO: 1008451 - DNA, 33 bp, Homo sapien
aaactttttaaaataacgaatggattggctact

SEQ ID NO: 1008452 - DNA, 33 bp, Homo sapien
aaactttttaaaataatgaatggattggctact

SEQ ID NO: 1008453 - DNA, 33 bp, Homo sapien
ttggaatattcaatcagctatggttgcttatga

SEQ ID NO: 1008454 - DNA, 33 bp, Homo sapien
ttggaatattcaatcatctatggttgcttatga

SEQ ID NO: 1008455 - DNA, 33 bp, Homo sapien
aaaaaagtatatttgactagttgaacatgaaaa

SEQ ID NO: 1008456 - DNA, 33 bp, Homo sapien
aaaaaagtatatttgattagttgaacatgaaaa

SEQ ID NO: 1008457 - DNA, 33 bp, Homo sapien
ttatgttctgccctcacgctcactggatggaag

SEQ ID NO: 1008458 - DNA, 33 bp, Homo sapien
ttatgttctgccctcatgctcactggatggaag

SEQ ID NO: 1008459 - DNA, 33 bp, Homo sapien
gggaaaatgtgaaatacaattgcaggctttccc

SEQ ID NO: 1008460 - DNA, 33 bp, Homo sapien
gggaaaatgtgaaatagaattgcaggctttccc

SEQ ID NO: 1008461 - DNA, 33 bp, Homo sapien
tggcttgggaacggaaatgttttggatatgtga

SEQ ID NO: 1008462 - DNA, 33 bp, Homo sapien
tggcttgggaacggaactgttttggatatgtga

SEQ ID NO: 1008463 - DNA, 33 bp, Homo sapien
ggtgtcatgcagttcacgggattcaaatttggc

SEQ ID NO: 1008464 - DNA, 33 bp, Homo sapien
ggtgtcatgcagttcatgggattcaaatttggc

SEQ ID NO: 1008465 - DNA, 33 bp, Homo sapien
gagactacttactccacaaacaatatgccaaat

SEQ ID NO: 1008466 - DNA, 33 bp, Homo sapien
gagactacttactccagaaacaatatgccaaat

SEQ ID NO: 1008467 - DNA, 33 bp, Homo sapien
tcatcccagttaatgaagaaaaaccaatgctga

SEQ ID NO: 1008468 - DNA, 33 bp, Homo sapien
tcatcccagttaatgatgaaaaaccaatgctga

SEQ ID NO: 1008469 - DNA, 33 bp, Homo sapien
gtcctacattaatccaagcctagagagagccct

SEQ ID NO: 1008470 - DNA, 33 bp, Homo sapien
gtcctacattaatccaggcctagagagagccct

SEQ ID NO: 1008471 - DNA, 33 bp, Homo sapien
gcttaaaaggaaaaaccgaattgaagttgagag

SEQ ID NO: 1008472 - DNA, 33 bp, Homo sapien
gcttaaaaggaaaaactgaattgaagttgagag

SEQ ID NO: 1008473 - DNA, 33 bp, Homo sapien
actatgcgtcaggcaccgatactgtctaatggt

SEQ ID NO: 1008474 - DNA, 33 bp, Homo sapien
actatgcgtcaggcactgatactgtctaatggt

SEQ ID NO: 1008475 - DNA, 33 bp, Homo sapien
acattcaaggatgtataagtagttaaatatgtg

SEQ ID NO: 1008476 - DNA, 33 bp, Homo sapien
acattcaaggatgtatgagtagttaaatatgtg

SEQ ID NO: 1008477 - DNA, 33 bp, Homo sapien
accctcagactgagcaatagatgaggaaaagtg

SEQ ID NO: 1008478 - DNA, 33 bp, Homo sapien
accctcagactgagcagtagatgaggaaaagtg

SEQ ID NO: 1008479 - DNA, 33 bp, Homo sapien
cttggtatctgcatcagaaattagaatgtgctc

SEQ ID NO: 1008480 - DNA, 33 bp, Homo sapien
cttggtatctgcatcataaattagaatgtgctc

SEQ ID NO: 1008481 - DNA, 33 bp, Homo sapien
gtggggcaaagtatgacagaagggtccatcttg

SEQ ID NO: 1008482 - DNA, 33 bp, Homo sapien
gtggggcaaagtatgatagaagggtccatcttg

SEQ ID NO: 1008483 - DNA, 33 bp, Homo sapien
tttgacatccacaaagacttgacatctttatac

SEQ ID NO: 1008484 - DNA, 33 bp, Homo sapien
tttgacatccacaaaggcttgacatctttatac

SEQ ID NO: 1008485 - DNA, 33 bp, Homo sapien
ttactttttaccaaaaatgaagactgaagagaa

SEQ ID NO: 1008486 - DNA, 33 bp, Homo sapien
ttactttttaccaaaagtgaagactgaagagaa

SEQ ID NO: 1008487 - DNA, 33 bp, Homo sapien; identical to SEQ ID NO: 1008485

SEQ ID NO: 1008488 - DNA, 33 bp, Homo sapien; identical to SEQ ID NO: 1008486

SEQ ID NO: 1008489 - DNA, 33 bp, Homo sapien
agtactgaatatacaacgtccaaatatcaattc

SEQ ID NO: 1008490 - DNA, 33 bp, Homo sapien
agtactgaatatacaatgtccaaatatcaattc

SEQ ID NO: 1008491 - DNA, 33 bp, Homo sapien
cttttaaagcatatccagaaaagtttcttgtaa

SEQ ID NO: 1008492 - DNA, 33 bp, Homo sapien
cttttaaagcatatccggaaaagtttcttgtaa

SEQ ID NO: 1008493 - DNA, 33 bp, Homo sapien
tcagcttgtccttttacatgctctggcatctgt

SEQ ID NO: 1008494 - DNA, 33 bp, Homo sapien
tcagcttgtccttttatatgctctggcatctgt

SEQ ID NO: 1008495 - DNA, 33 bp, Homo sapien
ttagagaaaggagtcacggatgacttcagagat

SEQ ID NO: 1008496 - DNA, 33 bp, Homo sapien
ttagagaaaggagtcagggatgacttcagagat

SEQ ID NO: 1008497 - DNA, 33 bp, Homo sapien
tctttatccagtctatcataccaacaccctttt

SEQ ID NO: 1008498 - DNA, 33 bp, Homo sapien
tctttatccagtctatgataccaacaccctttt

SEQ ID NO: 1008499 - DNA, 33 bp, Homo sapien
acatctcatttagacaacctgatttgacttttt

SEQ ID NO: 1008500 - DNA, 33 bp, Homo sapien
acatctcatttagacatcctgatttgacttttt

SEQ ID NO: 1008501 - DNA, 33 bp, Homo sapien
ttattaaggaaaatgagcgtccctggggttatc

SEQ ID NO: 1008502 - DNA, 33 bp, Homo sapien
ttattaaggaaaatgatcgtccctggggttatc

SEQ ID NO: 1008503 - DNA, 33 bp, Homo sapien
ataaacctgagctcaactctctatcagtctgct

SEQ ID NO: 1008504 - DNA, 33 bp, Homo sapien
ataaacctgagctcaagtctctatcagtctgct

SEQ ID NO: 1008505 - DNA, 33 bp, Homo sapien
tgcagcaaaaggaaatcagatagaagtaggacc

SEQ ID NO: 1008506 - DNA, 33 bp, Homo sapien
tgcagcaaaaggaaattagatagaagtaggacc

SEQ ID NO: 1008507 - DNA, 33 bp, Homo sapien
agtttgagaactgcagcagccttcgacagcctt

SEQ ID NO: 1008508 - DNA, 33 bp, Homo sapien
agtttgagaactgcagtagccttcgacagcctt

SEQ ID NO: 1008509 - DNA, 33 bp, Homo sapien
atacagccacagcctaacgtctagcagtgacct

SEQ ID NO: 1008510 - DNA, 33 bp, Homo sapien
atacagccacagcctagcgtctagcagtgacct

SEQ ID NO: 1008511 - DNA, 33 bp, Homo sapien
agtcaccagggagctcaagaaatactggttttc

SEQ ID NO: 1008512 - DNA, 33 bp, Homo sapien
agtcaccagggagctcgagaaatactggttttc

SEQ ID NO: 1008513 - DNA, 33 bp, Homo sapien
tccttctgatgccaaaataggtgctcccttctt

SEQ ID NO: 1008514 - DNA, 33 bp, Homo sapien
tccttctgatgccaaagtaggtgctcccttctt

SEQ ID NO: 1008515 - DNA, 33 bp, Homo sapien
gaagattaatgagtgacatgcatgcatcaataa

SEQ ID NO: 1008516 - DNA, 33 bp, Homo sapien
gaagattaatgagtgatatgcatgcatcaataa

SEQ ID NO: 1008517 - DNA, 33 bp, Homo sapien
ccagctgtttagttacagaaagtgcaatatctt

SEQ ID NO: 1008518 - DNA, 33 bp, Homo sapien
ccagctgtttagttacggaaagtgcaatatctt

SEQ ID NO: 1008519 - DNA, 33 bp, Homo sapien
ctactgtggttaatcacagcctaacatgaccca

SEQ ID NO: 1008520 - DNA, 33 bp, Homo sapien
ctactgtggttaatcagagcctaacatgaccca

SEQ ID NO: 1008521 - DNA, 33 bp, Homo sapien
taatgagcaatagcagcctagggaatcagtata

SEQ ID NO: 1008522 - DNA, 33 bp, Homo sapien
taatgagcaatagcaggctagggaatcagtata

SEQ ID NO: 1008523 - DNA, 33 bp, Homo sapien
tggagatgacttgcagacctattccaatccttg

SEQ ID NO: 1008524 - DNA, 33 bp, Homo sapien
tggagatgacttgcaggcctattccaatccttg

SEQ ID NO: 1008525 - DNA, 33 bp, Homo sapien
agtgtggcttttgttcactgagttcatagacag

SEQ ID NO: 1008526 - DNA, 33 bp, Homo sapien
agtgtggcttttgttccctgagttcatagacag

SEQ ID NO: 1008527 - DNA, 33 bp, Homo sapien
aggcacatcatcctgggatatatggaaaaagtc

SEQ ID NO: 1008528 - DNA, 33 bp, Homo sapien
aggcacatcatcctggtatatatggaaaaagtc

SEQ ID NO: 1008529 - DNA, 33 bp, Homo sapien
ctcagtgttgtgtggcaataatgaaacaaacag

SEQ ID NO: 1008530 - DNA, 33 bp, Homo sapien
ctcagtgttgtgtggccataatgaaacaaacag

SEQ ID NO: 1008531 - DNA, 33 bp, Homo sapien
ttaggttgttggtagggacaatatgataggggc

SEQ ID NO: 1008532 - DNA, 33 bp, Homo sapien
ttaggttgttggtaggtacaatatgataggggc

SEQ ID NO: 1008533 - DNA, 33 bp, Homo sapien
taagcctcacatggccagagagagagtgctgta

SEQ ID NO: 1008534 - DNA, 33 bp, Homo sapien
taagcctcacatggccggagagagagtgctgta

SEQ ID NO: 1008535 - DNA, 33 bp, Homo sapien
tgaaggctcccacgtcacatggcacttatattc

SEQ ID NO: 1008536 - DNA, 33 bp, Homo sapien
tgaaggctcccacgtcgcatggcacttatattc

SEQ ID NO: 1008537 - DNA, 33 bp, Homo sapien
ttgcctacaacacaaactcattaggtttccttc

SEQ ID NO: 1008538 - DNA, 33 bp, Homo sapien
ttgcctacaacacaaattcattaggtttccttc

SEQ ID NO: 1008539 - DNA, 33 bp, Homo sapien
gtggtaagtgcagtaacggtgagatatatttta

SEQ ID NO: 1008540 - DNA, 33 bp, Homo sapien
gtggtaagtgcagtaatggtgagatatatttta

SEQ ID NO: 1008541 - DNA, 33 bp, Homo sapien
aactgggcctagggtacgcttcccagaagggga

SEQ ID NO: 1008542 - DNA, 33 bp, Homo sapien
aactgggcctagggtatgcttcccagaagggga

SEQ ID NO: 1008543 - DNA, 33 bp, Homo sapien
gcttgtcagtagaagaaggatctttcatggcag

SEQ ID NO: 1008544 - DNA, 33 bp, Homo sapien
gcttgtcagtagaagagggatctttcatggcag

SEQ ID NO: 1008545 - DNA, 33 bp, Homo sapien
acctatcttggttccagaatttctttgagcaag

SEQ ID NO: 1008546 - DNA, 33 bp, Homo sapien
acctatcttggttccataatttctttgagcaag

SEQ ID NO: 1008547 - DNA, 33 bp, Homo sapien
ggaattacacttatagaatgatttgagagactt

SEQ ID NO: 1008548 - DNA, 33 bp, Homo sapien
ggaattacacttataggatgatttgagagactt

SEQ ID NO: 1008549 - DNA, 33 bp, Homo sapien
tgatagtaatgcatgacacaggtcacctttagt

SEQ ID NO: 1008550 - DNA, 33 bp, Homo sapien
tgatagtaatgcatgagacaggtcacctttagt

SEQ ID NO: 1008551 - DNA, 33 bp, Homo sapien
tcattcaagtgattcaacagcttttgtgctacc

SEQ ID NO: 1008552 - DNA, 33 bp, Homo sapien
tcattcaagtgattcagcagcttttgtgctacc

SEQ ID NO: 1008553 - DNA, 33 bp, Homo sapien
tctttcctcattccaaacatttaggtgcacctg

SEQ ID NO: 1008554 - DNA, 33 bp, Homo sapien
tctttcctcattccaaccatttaggtgcacctg

SEQ ID NO: 1008555 - DNA, 33 bp, Homo sapien
aatgcagatatatcacaggccaagaactgtcct

SEQ ID NO: 1008556 - DNA, 33 bp, Homo sapien
aatgcagatatatcactggccaagaactgtcct

SEQ ID NO: 1008557 - DNA, 33 bp, Homo sapien
ctttatggttaatttaaaaggccagatggtagg

SEQ ID NO: 1008558 - DNA, 33 bp, Homo sapien
ctttatggttaatttagaaggccagatggtagg

SEQ ID NO: 1008559 - DNA, 33 bp, Homo sapien
attatgattttgcccacagagaatacaggctta

SEQ ID NO: 1008560 - DNA, 33 bp, Homo sapien
attatgattttgcccatagagaatacaggctta

SEQ ID NO: 1008561 - DNA, 33 bp, Homo sapien
atcaattctgcttccacacagatcatttttcca

SEQ ID NO: 1008562 - DNA, 33 bp, Homo sapien
atcaattctgcttccatacagatcatttttcca

SEQ ID NO: 1008563 - DNA, 33 bp, Homo sapien
ggagatatggaaccaggatatggattcagggac

SEQ ID NO: 1008564 - DNA, 33 bp, Homo sapien
ggagatatggaaccagtatatggattcagggac

SEQ ID NO: 1008565 - DNA, 33 bp, Homo sapien
tatagctattcaagtacgctatgctgtgtattt

SEQ ID NO: 1008566 - DNA, 33 bp, Homo sapien
tatagctattcaagtatgctatgctgtgtattt

SEQ ID NO: 1008567 - DNA, 33 bp, Homo sapien
attaccaaggtctagcaactgtctcacaaaagt

SEQ ID NO: 1008568 - DNA, 33 bp, Homo sapien
attaccaaggtctagcgactgtctcacaaaagt

SEQ ID NO: 1008569 - DNA, 33 bp, Homo sapien
agttttaattcaggaaggactgaccctaaaacc

SEQ ID NO: 1008570 - DNA, 33 bp, Homo sapien
agttttaattcaggaatgactgaccctaaaacc

SEQ ID NO: 1008571 - DNA, 33 bp, Homo sapien; identical to SEQ ID NO: 1008569

SEQ ID NO: 1008572 - DNA, 33 bp, Homo sapien; identical to SEQ ID NO: 1008570

SEQ ID NO: 1008573 - DNA, 33 bp, Homo sapien
gaagcgattttaattcccgatgttcaagatggc

SEQ ID NO: 1008574 - DNA, 33 bp, Homo sapien
gaagcgattttaattctcgatgttcaagatggc

SEQ ID NO: 1008575 - DNA, 33 bp, Homo sapien
caccacctatgtttctaactatctctaaacagt

SEQ ID NO: 1008576 - DNA, 33 bp, Homo sapien
caccacctatgtttctgactatctctaaacagt

SEQ ID NO: 1008577 - DNA, 33 bp, Homo sapien
aattagacattgttgacacttccatctcatttg

SEQ ID NO: 1008578 - DNA, 33 bp, Homo sapien
aattagacattgttgatacttccatctcatttg

SEQ ID NO: 1008579 - DNA, 33 bp, Homo sapien
tgtatgtttggacaagccctcctgatgactctg

SEQ ID NO: 1008580 - DNA, 33 bp, Homo sapien
tgtatgtttggacaaggcctcctgatgactctg

SEQ ID NO: 1008581 - DNA, 33 bp, Homo sapien
ctcatttgctggctccgcacctccccaaatcta

SEQ ID NO: 1008582 - DNA, 33 bp, Homo sapien
ctcatttgctggctcctcacctccccaaatcta

SEQ ID NO: 1008583 - DNA, 33 bp, Homo sapien
tgtttacactatgctgaagtctgttatgtgtac

SEQ ID NO: 1008584 - DNA, 33 bp, Homo sapien
tgtttacactatgctgcagtctgttatgtgtac

SEQ ID NO: 1008585 - DNA, 33 bp, Homo sapien
ttacactctcttgccacgtacgatgatccttca

SEQ ID NO: 1008586 - DNA, 33 bp, Homo sapien
ttacactctcttgccaggtacgatgatccttca

SEQ ID NO: 1008587 - DNA, 33 bp, Homo sapien
gtgtcctttcaagctaacaccctatactggtac

SEQ ID NO: 1008588 - DNA, 33 bp, Homo sapien
gtgtcctttcaagctagcaccctatactggtac

SEQ ID NO: 1008589 - DNA, 33 bp, Homo sapien
ttatctgctaaaatgcaaatgaattctgtccag

SEQ ID NO: 1008590 - DNA, 33 bp, Homo sapien
ttatctgctaaaatgccaatgaattctgtccag

SEQ ID NO: 1008591 - DNA, 33 bp, Homo sapien
tatcttcatgctgcaaatagcctggaaattctt

SEQ ID NO: 1008592 - DNA, 33 bp, Homo sapien
tatcttcatgctgcaagtagcctggaaattctt

SEQ ID NO: 1008593 - DNA, 33 bp, Homo sapien
aagtcatactttcttaaccaagagctgggtatt

SEQ ID NO: 1008594 - DNA, 33 bp, Homo sapien
aagtcatactttcttatccaagagctgggtatt

SEQ ID NO: 1008595 - DNA, 33 bp, Homo sapien
acttaaaatgctgcaagagaaaactgcagaagt

SEQ ID NO: 1008596 - DNA, 33 bp, Homo sapien
acttaaaatgctgcaatagaaaactgcagaagt

SEQ ID NO: 1008597 - DNA, 33 bp, Homo sapien
atgcattcttatcataaacttgtgccaaagcat

SEQ ID NO: 1008598 - DNA, 33 bp, Homo sapien
atgcattcttatcatagacttgtgccaaagcat

SEQ ID NO: 1008599 - DNA, 33 bp, Homo sapien
ttgttgaaatctgtcaagtctacctcttaaatg

SEQ ID NO: 1008600 - DNA, 33 bp, Homo sapien
ttgttgaaatctgtcaggtctacctcttaaatg

SEQ ID NO: 1008601 - DNA, 33 bp, Homo sapien
agcaaaggtaggtagcagcgaggaggaagtaaa

SEQ ID NO: 1008602 - DNA, 33 bp, Homo sapien
agcaaaggtaggtagcggcgaggaggaagtaaa

SEQ ID NO: 1008603 - DNA, 33 bp, Homo sapien
tgcctattaagctaaggcactgtttgtccacaa

SEQ ID NO: 1008604 - DNA, 33 bp, Homo sapien
tgcctattaagctaagtcactgtttgtccacaa

SEQ ID NO: 1008605 - DNA, 33 bp, Homo sapien
tcattgtacttggagtcaatttgagcaattttt

SEQ ID NO: 1008606 - DNA, 33 bp, Homo sapien
tcattgtacttggagttaatttgagcaattttt

SEQ ID NO: 1008607 - DNA, 33 bp, Homo sapien
taacagatgtggaatacctgccaaaacaggaat

SEQ ID NO: 1008608 - DNA, 33 bp, Homo sapien
taacagatgtggaatagctgccaaaacaggaat

SEQ ID NO: 1008609 - DNA, 33 bp, Homo sapien
caatgcccatgtatagcaggtactcaaaaatgt

SEQ ID NO: 1008610 - DNA, 33 bp, Homo sapien
caatgcccatgtatagtaggtactcaaaaatgt

SEQ ID NO: 1008611 - DNA, 33 bp, Homo sapien
ccttcggctgataacacaaccaattcatgaggt

SEQ ID NO: 1008612 - DNA, 33 bp, Homo sapien
ccttcggctgataacagaaccaattcatgaggt

SEQ ID NO: 1008613 - DNA, 33 bp, Homo sapien
atgcccctaaccttgccagaaaaatacatagac

SEQ ID NO: 1008614 - DNA, 33 bp, Homo sapien
atgcccctaaccttgcgagaaaaatacatagac

SEQ ID NO: 1008615 - DNA, 33 bp, Homo sapien
ctatgaatctaatgtcaactttgaagcattctt

SEQ ID NO: 1008616 - DNA, 33 bp, Homo sapien
ctatgaatctaatgtctactttgaagcattctt

SEQ ID NO: 1008617 - DNA, 33 bp, Homo sapien
cagtgtgagagcaacaaacctactcatattact

SEQ ID NO: 1008618 - DNA, 33 bp, Homo sapien
cagtgtgagagcaacagacctactcatattact

SEQ ID NO: 1008619 - DNA, 33 bp, Homo sapien
gattgatttgaatgacgccatctcccactccca

SEQ ID NO: 1008620 - DNA, 33 bp, Homo sapien
gattgatttgaatgactccatctcccactccca

SEQ ID NO: 1008621 - DNA, 33 bp, Homo sapien
tgctgtggttaattatgagagtggagccaggtg

SEQ ID NO: 1008622 - DNA, 33 bp, Homo sapien
tgctgtggttaattattagagtggagccaggtg

SEQ ID NO: 1008623 - DNA, 33 bp, Homo sapien
actttctacagtgaacattgatcacaagattga

SEQ ID NO: 1008624 - DNA, 33 bp, Homo sapien
actttctacagtgaacgttgatcacaagattga

SEQ ID NO: 1008625 - DNA, 33 bp, Homo sapien
gaaagaactattatgagatgaatccttgtttct

SEQ ID NO: 1008626 - DNA, 33 bp, Homo sapien
gaaagaactattatgatatgaatccttgtttct

SEQ ID NO: 1008627 - DNA, 33 bp, Homo sapien
ccaattcagttctgcacaggtgctagcttagag

SEQ ID NO: 1008628 - DNA, 33 bp, Homo sapien
ccaattcagttctgcagaggtgctagcttagag

SEQ ID NO: 1008629 - DNA, 33 bp, Homo sapien
gatgagaagaagtgaaccaagcaaagacttgag

SEQ ID NO: 1008630 - DNA, 33 bp, Homo sapien
gatgagaagaagtgaatcaagcaaagacttgag

SEQ ID NO: 1008631 - DNA, 33 bp, Homo sapien
ctcatgcaagtccatgccagtgcctgctttaaa

SEQ ID NO: 1008632 - DNA, 33 bp, Homo sapien
ctcatgcaagtccatgtcagtgcctgctttaaa

SEQ ID NO: 1008633 - DNA, 33 bp, Homo sapien
atgtgaaaattctggaaggaagctttaaaagtc

SEQ ID NO: 1008634 - DNA, 33 bp, Homo sapien
atgtgaaaattctggatggaagctttaaaagtc

SEQ ID NO: 1008635 - DNA, 33 bp, Homo sapien
aaatggtcaaaaagtacgtgaaaaatgctcaat

SEQ ID NO: 1008636 - DNA, 33 bp, Homo sapien
aaatggtcaaaaagtatgtgaaaaatgctcaat

SEQ ID NO: 1008637 - DNA, 33 bp, Homo sapien
acctcttaggcccaggaaaacactgacctattt

SEQ ID NO: 1008638 - DNA, 33 bp, Homo sapien
acctcttaggcccaggcaaacactgacctattt

SEQ ID NO: 1008639 - DNA, 33 bp, Homo sapien
gtgataggtgcgttctaaaactggattatggtg

SEQ ID NO: 1008640 - DNA, 33 bp, Homo sapien
gtgataggtgcgttctgaaactggattatggtg

SEQ ID NO: 1008641 - DNA, 33 bp, Homo sapien
caagaaagcaagaaggaaagagagcaagagagg

SEQ ID NO: 1008642 - DNA, 33 bp, Homo sapien
caagaaagcaagaaggtaagagagcaagagagg

SEQ ID NO: 1008643 - DNA, 33 bp, Homo sapien
caaataactgttaagcccacggtgtccagatca

SEQ ID NO: 1008644 - DNA, 33 bp, Homo sapien
caaataactgttaagctcacggtgtccagatca

SEQ ID NO: 1008645 - DNA, 33 bp, Homo sapien
gcactattaggagaacactctggttataaaaca

SEQ ID NO: 1008646 - DNA, 33 bp, Homo sapien
gcactattaggagaactctctggttataaaaca

SEQ ID NO: 1008647 - DNA, 33 bp, Homo sapien
catacccttcaaaatacgaactgcactatcagg

SEQ ID NO: 1008648 - DNA, 33 bp, Homo sapien
catacccttcaaaatatgaactgcactatcagg

SEQ ID NO: 1008649 - DNA, 33 bp, Homo sapien
tgcacttctttctccacgtctatggaagtagaa

SEQ ID NO: 1008650 - DNA, 33 bp, Homo sapien
tgcacttctttctccaggtctatggaagtagaa

SEQ ID NO: 1008651 - DNA, 33 bp, Homo sapien
ctgtgatttttttttcactgtttacaatatgtc

SEQ ID NO: 1008652 - DNA, 33 bp, Homo sapien
ctgtgatttttttttctctgtttacaatatgtc

SEQ ID NO: 1008653 - DNA, 33 bp, Homo sapien
aaaccattttttccacacaaatgggatcaaaat

SEQ ID NO: 1008654 - DNA, 33 bp, Homo sapien
aaaccattttttccacgcaaatgggatcaaaat

SEQ ID NO: 1008655 - DNA, 33 bp, Homo sapien
aacccactggttctcacaaattggttcaagttc

SEQ ID NO: 1008656 - DNA, 33 bp, Homo sapien
aacccactggttctcataaattggttcaagttc

SEQ ID NO: 1008657 - DNA, 33 bp, Homo sapien
tgatttttattcaaacaagtctttctctgccac

SEQ ID NO: 1008658 - DNA, 33 bp, Homo sapien
tgatttttattcaaacgagtctttctctgccac

SEQ ID NO: 1008659 - DNA, 33 bp, Homo sapien
gaaggcaaggccagaacccctctctcctcgcag

SEQ ID NO: 1008660 - DNA, 33 bp, Homo sapien
gaaggcaaggccagaatccctctctcctcgcag

SEQ ID NO: 1008661 - DNA, 33 bp, Homo sapien
ggcaatttaaaaacagcccagtatagccaggtg

SEQ ID NO: 1008662 - DNA, 33 bp, Homo sapien
ggcaatttaaaaacagtccagtatagccaggtg

SEQ ID NO: 1008663 - DNA, 33 bp, Homo sapien
caaaacacactcataacaaccattgcctttgct

SEQ ID NO: 1008664 - DNA, 33 bp, Homo sapien
caaaacacactcataataaccattgcctttgct

SEQ ID NO: 1008665 - DNA, 33 bp, Homo sapien
taacaaccatgtctaactctccaaaaactgtgg

SEQ ID NO: 1008666 - DNA, 33 bp, Homo sapien
taacaaccatgtctaattctccaaaaactgtgg

SEQ ID NO: 1008667 - DNA, 33 bp, Homo sapien
tttacctggcacaacacacttgactttagcaga

SEQ ID NO: 1008668 - DNA, 33 bp, Homo sapien
tttacctggcacaacagacttgactttagcaga

SEQ ID NO: 1008669 - DNA, 33 bp, Homo sapien
gttttattaccttgccagaggttaaccagtgtt

SEQ ID NO: 1008670 - DNA, 33 bp, Homo sapien
gttttattaccttgccggaggttaaccagtgtt

SEQ ID NO: 1008671 - DNA, 33 bp, Homo sapien
ccatgataataaaaacagtgtgactagtgcaga

SEQ ID NO: 1008672 - DNA, 33 bp, Homo sapien
ccatgataataaaaacggtgtgactagtgcaga

SEQ ID NO: 1008673 - DNA, 33 bp, Homo sapien
ggctttccgagacctgaaagccaactggggcaa

SEQ ID NO: 1008674 - DNA, 33 bp, Homo sapien
ggctttccgagacctgtaagccaactggggcaa

SEQ ID NO: 1008675 - DNA, 33 bp, Homo sapien
tctgtgaattaggtctcaataaagctgtttaaa

SEQ ID NO: 1008676 - DNA, 33 bp, Homo sapien
tctgtgaattaggtctgaataaagctgtttaaa

SEQ ID NO: 1008677 - DNA, 33 bp, Homo sapien
gaatttggtctgggaaacagttttttttagtaa

SEQ ID NO: 1008678 - DNA, 33 bp, Homo sapien
gaatttggtctgggaagcagttttttttagtaa

SEQ ID NO: 1008679 - DNA, 33 bp, Homo sapien
taaagtaataagtttgaaagcagttcaggaata

SEQ ID NO: 1008680 - DNA, 33 bp, Homo sapien
taaagtaataagtttgcaagcagttcaggaata

SEQ ID NO: 1008681 - DNA, 33 bp, Homo sapien
atatgtgctgttaacaagtggaaagcaagtaca

SEQ ID NO: 1008682 - DNA, 33 bp, Homo sapien
atatgtgctgttaacaggtggaaagcaagtaca

SEQ ID NO: 1008683 - DNA, 33 bp, Homo sapien
acaatgagtttctcaacaattctcaatgggttt

SEQ ID NO: 1008684 - DNA, 33 bp, Homo sapien
acaatgagtttctcaagaattctcaatgggttt

SEQ ID NO: 1008685 - DNA, 33 bp, Homo sapien
atacatgcgtgactaccgagggccaggtgggag

SEQ ID NO: 1008686 - DNA, 33 bp, Homo sapien
atacatgcgtgactactgagggccaggtgggag

SEQ ID NO: 1008687 - DNA, 33 bp, Homo sapien
tctccatactcaccataaatttcctagtgctcc

SEQ ID NO: 1008688 - DNA, 33 bp, Homo sapien
tctccatactcaccatgaatttcctagtgctcc

SEQ ID NO: 1008689 - DNA, 33 bp, Homo sapien
gagctcacactgccaacaaatacaaagtgttac

SEQ ID NO: 1008690 - DNA, 33 bp, Homo sapien
gagctcacactgccaagaaatacaaagtgttac

SEQ ID NO: 1008691 - DNA, 33 bp, Homo sapien
cactgcctccaaacagaatctaacttgttcaag

SEQ ID NO: 1008692 - DNA, 33 bp, Homo sapien
cactgcctccaaacagtatctaacttgttcaag

SEQ ID NO: 1008693 - DNA, 33 bp, Homo sapien
cacagcctgtgtagtaaagcggaaagcataaat

SEQ ID NO: 1008694 - DNA, 33 bp, Homo sapien
cacagcctgtgtagtagagcggaaagcataaat

SEQ ID NO: 1008695 - DNA, 33 bp, Homo sapien
tactatgtcaagcatacctatcctctagtgcca

SEQ ID NO: 1008696 - DNA, 33 bp, Homo sapien
tactatgtcaagcatatctatcctctagtgcca

SEQ ID NO: 1008697 - DNA, 33 bp, Homo sapien
ggagcaagatcatgcaagaggtttctttttgct

SEQ ID NO: 1008698 - DNA, 33 bp, Homo sapien
ggagcaagatcatgcaggaggtttctttttgct

SEQ ID NO: 1008699 - DNA, 33 bp, Homo sapien
gcagagctacaagtaaaggactgctaactctgc

SEQ ID NO: 1008700 - DNA, 33 bp, Homo sapien
gcagagctacaagtaagggactgctaactctgc

SEQ ID NO: 1008701 - DNA, 33 bp, Homo sapien
aaagggttggcaaatacgagaaattatttagcc

SEQ ID NO: 1008702 - DNA, 33 bp, Homo sapien
aaagggttggcaaatatgagaaattatttagcc

SEQ ID NO: 1008703 - DNA, 33 bp, Homo sapien
tttgagtaagtgtctacgtttaattgcttcttg

SEQ ID NO: 1008704 - DNA, 33 bp, Homo sapien
tttgagtaagtgtctatgtttaattgcttcttg

SEQ ID NO: 1008705 - DNA, 33 bp, Homo sapien
tgcacccatttaatccccagtacaactaaggca

SEQ ID NO: 1008706 - DNA, 33 bp, Homo sapien
tgcacccatttaatcctcagtacaactaaggca

SEQ ID NO: 1008707 - DNA, 33 bp, Homo sapien
tcagaatctgatctacactcattctcattaaag

SEQ ID NO: 1008708 - DNA, 33 bp, Homo sapien
tcagaatctgatctacgctcattctcattaaag

SEQ ID NO: 1008709 - DNA, 33 bp, Homo sapien
tacaggtcataaggaacagacaaccaaaaagga

SEQ ID NO: 1008710 - DNA, 33 bp, Homo sapien
tacaggtcataaggaatagacaaccaaaaagga

SEQ ID NO: 1008711 - DNA, 33 bp, Homo sapien
acagggtttacaattcactctcaaatggttcag

SEQ ID NO: 1008712 - DNA, 33 bp, Homo sapien
acagggtttacaattcgctctcaaatggttcag

SEQ ID NO: 1008713 - DNA, 33 bp, Homo sapien
aggaacattcacaaaaataaggataattatact

SEQ ID NO: 1008714 - DNA, 33 bp, Homo sapien
aggaacattcacaaaagtaaggataattatact

SEQ ID NO: 1008715 - DNA, 33 bp, Homo sapien
atataggtaggcttgcaaggtagcagacacatg

SEQ ID NO: 1008716 - DNA, 33 bp, Homo sapien
atataggtaggcttgcgaggtagcagacacatg

SEQ ID NO: 1008717 - DNA, 33 bp, Homo sapien
ggtcttgatttgtgacacctaacacttgtgctt

SEQ ID NO: 1008718 - DNA, 33 bp, Homo sapien
ggtcttgatttgtgacgcctaacacttgtgctt

SEQ ID NO: 1008719 - DNA, 33 bp, Homo sapien
ttcatacactgttcccccacctggacaattctt

SEQ ID NO: 1008720 - DNA, 33 bp, Homo sapien
ttcatacactgttccctcacctggacaattctt

SEQ ID NO: 1008721 - DNA, 33 bp, Homo sapien
agcgattcttgctcagaaggtcctaggatcttg

SEQ ID NO: 1008722 - DNA, 33 bp, Homo sapien
agcgattcttgctcagtaggtcctaggatcttg

SEQ ID NO: 1008723 - DNA, 33 bp, Homo sapien
ggaaacaaacctcagagtctcacattgtttttc

SEQ ID NO: 1008724 - DNA, 33 bp, Homo sapien
ggaaacaaacctcagattctcacattgtttttc

SEQ ID NO: 1008725 - DNA, 33 bp, Homo sapien
aaagtggtctgagaaaacagggagggaaaaaag

SEQ ID NO: 1008726 - DNA, 33 bp, Homo sapien
aaagtggtctgagaaagcagggagggaaaaaag

SEQ ID NO: 1008727 - DNA, 33 bp, Homo sapien
ccttctgtatttggggaatatttttgcttttct

SEQ ID NO: 1008728 - DNA, 33 bp, Homo sapien
ccttctgtatttggggtatatttttgcttttct

SEQ ID NO: 1008729 - DNA, 33 bp, Homo sapien
ttgaatgcttagctaccgagtttggcttttctt

SEQ ID NO: 1008730 - DNA, 33 bp, Homo sapien
ttgaatgcttagctactgagtttggcttttctt

SEQ ID NO: 1008731 - DNA, 33 bp, Homo sapien
aggaatcaaggctggaagggtactttgttagtt

SEQ ID NO: 1008732 - DNA, 33 bp, Homo sapien
aggaatcaaggctggaggggtactttgttagtt

SEQ ID NO: 1008733 - DNA, 33 bp, Homo sapien
tctgttgacagccgacaaatctccagtcttgga

SEQ ID NO: 1008734 - DNA, 33 bp, Homo sapien
tctgttgacagccgaccaatctccagtcttgga

SEQ ID NO: 1008735 - DNA, 33 bp, Homo sapien
atgggtgctgttaccaatcatttagtgtgaatc

SEQ ID NO: 1008736 - DNA, 33 bp, Homo sapien
atgggtgctgttaccagtcatttagtgtgaatc

SEQ ID NO: 1008737 - DNA, 33 bp, Homo sapien
aaattccttagcgtgaaattcaggacacaatga

SEQ ID NO: 1008738 - DNA, 33 bp, Homo sapien
aaattccttagcgtgacattcaggacacaatga

SEQ ID NO: 1008739 - DNA, 33 bp, Homo sapien
tttacaaagcatcccaatcataatatagaacat

SEQ ID NO: 1008740 - DNA, 33 bp, Homo sapien
tttacaaagcatcccagtcataatatagaacat

SEQ ID NO: 1008741 - DNA, 33 bp, Homo sapien
ggaggtctcctcaggacagaggcggtacataaa

SEQ ID NO: 1008742 - DNA, 33 bp, Homo sapien
ggaggtctcctcaggatagaggcggtacataaa

SEQ ID NO: 1008743 - DNA, 33 bp, Homo sapien
agatgccagaataaaacgcacaacagaatcaga

SEQ ID NO: 1008744 - DNA, 33 bp, Homo sapien
agatgccagaataaaaggcacaacagaatcaga

SEQ ID NO: 1008745 - DNA, 33 bp, Homo sapien
aaaaaaaggatactacaaacaatggtacatcaa

SEQ ID NO: 1008746 - DNA, 33 bp, Homo sapien
aaaaaaaggatactacgaacaatggtacatcaa

SEQ ID NO: 1008747 - DNA, 33 bp, Homo sapien
gtaattctatgtttaaataattgaagaaccacc

SEQ ID NO: 1008748 - DNA, 33 bp, Homo sapien
gtaattctatgtttaagtaattgaagaaccacc

SEQ ID NO: 1008749 - DNA, 33 bp, Homo sapien
acaccattgaaacactgactcaattatcatctt

SEQ ID NO: 1008750 - DNA, 33 bp, Homo sapien
acaccattgaaacacttactcaattatcatctt

SEQ ID NO: 1008751 - DNA, 33 bp, Homo sapien
aactcctatgccaggtcaatatttccgctagac

SEQ ID NO: 1008752 - DNA, 33 bp, Homo sapien
aactcctatgccaggttaatatttccgctagac

SEQ ID NO: 1008753 - DNA, 33 bp, Homo sapien
atccattcagctgtaagcactttcttctttgaa

SEQ ID NO: 1008754 - DNA, 33 bp, Homo sapien
atccattcagctgtaatcactttcttctttgaa

SEQ ID NO: 1008755 - DNA, 33 bp, Homo sapien
aagacatgggcctcccaaatacccaaaacaata

SEQ ID NO: 1008756 - DNA, 33 bp, Homo sapien
aagacatgggcctccccaatacccaaaacaata

SEQ ID NO: 1008757 - DNA, 33 bp, Homo sapien
tttgctaagtggactgaaacaggatttggtcaa

SEQ ID NO: 1008758 - DNA, 33 bp, Homo sapien
tttgctaagtggactggaacaggatttggtcaa

SEQ ID NO: 1008759 - DNA, 33 bp, Homo sapien
aggcctgaatagacaaaatagttgagtgacgga

SEQ ID NO: 1008760 - DNA, 33 bp, Homo sapien
aggcctgaatagacaacatagttgagtgacgga

SEQ ID NO: 1008761 - DNA, 33 bp, Homo sapien
ttggcccacacacttacagaggcagagaagagt

SEQ ID NO: 1008762 - DNA, 33 bp, Homo sapien
ttggcccacacacttagagaggcagagaagagt

SEQ ID NO: 1008763 - DNA, 33 bp, Homo sapien
aaggctgtctaactccagaagtcatgtactttc

SEQ ID NO: 1008764 - DNA, 33 bp, Homo sapien
aaggctgtctaactccggaagtcatgtactttc

SEQ ID NO: 1008765 - DNA, 33 bp, Homo sapien
agactataaccaaatactatagcatggtgcagt

SEQ ID NO: 1008766 - DNA, 33 bp, Homo sapien
agactataaccaaatattatagcatggtgcagt

SEQ ID NO: 1008767 - DNA, 33 bp, Homo sapien
caatccctcatgctcacctttggccacagtcac

SEQ ID NO: 1008768 - DNA, 33 bp, Homo sapien
caatccctcatgctcatctttggccacagtcac

SEQ ID NO: 1008769 - DNA, 33 bp, Homo sapien
caccaaaatgccatgcaaagtccctgatacttc

SEQ ID NO: 1008770 - DNA, 33 bp, Homo sapien
caccaaaatgccatgcgaagtccctgatacttc

SEQ ID NO: 1008771 - DNA, 33 bp, Homo sapien
ccctgcttgttcaaccaatcacgaccctctcat

SEQ ID NO: 1008772 - DNA, 33 bp, Homo sapien
ccctgcttgttcaaccgatcacgaccctctcat

SEQ ID NO: 1008773 - DNA, 33 bp, Homo sapien
cagattggaaagtagtaacaatatataggtcta

SEQ ID NO: 1008774 - DNA, 33 bp, Homo sapien
cagattggaaagtagtgacaatatataggtcta

SEQ ID NO: 1008775 - DNA, 33 bp, Homo sapien
ttacattatattcctgaatttttcgcaggtgaa

SEQ ID NO: 1008776 - DNA, 33 bp, Homo sapien
ttacattatattcctggatttttcgcaggtgaa

SEQ ID NO: 1008777 - DNA, 33 bp, Homo sapien
tgctctactcagattccagtctggagttttgca

SEQ ID NO: 1008778 - DNA, 33 bp, Homo sapien
tgctctactcagattctagtctggagttttgca

SEQ ID NO: 1008779 - DNA, 33 bp, Homo sapien
gattcagaggtatcaaaggtgtgagcacaaagg

SEQ ID NO: 1008780 - DNA, 33 bp, Homo sapien
gattcagaggtatcaatggtgtgagcacaaagg

SEQ ID NO: 1008781 - DNA, 33 bp, Homo sapien
aagtggaatgaagaaactgaccatctattttgt

SEQ ID NO: 1008782 - DNA, 33 bp, Homo sapien
aagtggaatgaagaaattgaccatctattttgt

SEQ ID NO: 1008783 - DNA, 33 bp, Homo sapien
gatccaagtagtggtgaataccaatagcctgcc

SEQ ID NO: 1008784 - DNA, 33 bp, Homo sapien
gatccaagtagtggtgtataccaatagcctgcc

SEQ ID NO: 1008785 - DNA, 33 bp, Homo sapien
ttttatcactgagtagcattccatcacatggaa

SEQ ID NO: 1008786 - DNA, 33 bp, Homo sapien
ttttatcactgagtagtattccatcacatggaa

SEQ ID NO: 1008787 - DNA, 33 bp, Homo sapien
tccttctctgtaccagaaagagatggatgacaa

SEQ ID NO: 1008788 - DNA, 33 bp, Homo sapien
tccttctctgtaccaggaagagatggatgacaa

SEQ ID NO: 1008789 - DNA, 33 bp, Homo sapien
attagtgatgtaacatgaaacagcttacttacc

SEQ ID NO: 1008790 - DNA, 33 bp, Homo sapien
attagtgatgtaacattaaacagcttacttacc

SEQ ID NO: 1008791 - DNA, 33 bp, Homo sapien
tagtccaatggttacaatatttctcttcagcat

SEQ ID NO: 1008792 - DNA, 33 bp, Homo sapien
tagtccaatggttacagtatttctcttcagcat

SEQ ID NO: 1008793 - DNA, 33 bp, Homo sapien
agagaagactcaggacactgaaggagttagcca

SEQ ID NO: 1008794 - DNA, 33 bp, Homo sapien
agagaagactcaggaccctgaaggagttagcca

SEQ ID NO: 1008795 - DNA, 33 bp, Homo sapien
tacccttgctctgatacaatcggttcttagcaa

SEQ ID NO: 1008796 - DNA, 33 bp, Homo sapien
tacccttgctctgatataatcggttcttagcaa

SEQ ID NO: 1008797 - DNA, 33 bp, Homo sapien
catcccatcagttgaacgcttcaagggcaaaga

SEQ ID NO: 1008798 - DNA, 33 bp, Homo sapien
catcccatcagttgaaggcttcaagggcaaaga

SEQ ID NO: 1008799 - DNA, 33 bp, Homo sapien
tcaagtacttttttctcactctcatagccctta

SEQ ID NO: 1008800 - DNA, 33 bp, Homo sapien
tcaagtacttttttcttactctcatagccctta

SEQ ID NO: 1008801 - DNA, 33 bp, Homo sapien
atgttcttgaattacaaaagctccgggcttggt

SEQ ID NO: 1008802 - DNA, 33 bp, Homo sapien
atgttcttgaattacagaagctccgggcttggt

SEQ ID NO: 1008803 - DNA, 33 bp, Homo sapien
gatgtgcatgaggctacgtgtacaaggatgttc

SEQ ID NO: 1008804 - DNA, 33 bp, Homo sapien
gatgtgcatgaggctatgtgtacaaggatgttc

SEQ ID NO: 1008805 - DNA, 33 bp, Homo sapien
ataatcttccattttaactgtactcatctttca

SEQ ID NO: 1008806 - DNA, 33 bp, Homo sapien
ataatcttccattttatctgtactcatctttca

SEQ ID NO: 1008807 - DNA, 33 bp, Homo sapien
tatatggcaaccacataacatgacaccacatga

SEQ ID NO: 1008808 - DNA, 33 bp, Homo sapien
tatatggcaaccacatgacatgacaccacatga

SEQ ID NO: 1008809 - DNA, 33 bp, Homo sapien
cttgttcatttccttaacattttatgaccagag

SEQ ID NO: 1008810 - DNA, 33 bp, Homo sapien
cttgttcatttccttatcattttatgaccagag

SEQ ID NO: 1008811 - DNA, 33 bp, Homo sapien
ttgtttccagtgtccaagctaaatatactgata

SEQ ID NO: 1008812 - DNA, 33 bp, Homo sapien
ttgtttccagtgtccacgctaaatatactgata

SEQ ID NO: 1008813 - DNA, 33 bp, Homo sapien
tagcttgtaatagaaaccagtctcttggtaaga

SEQ ID NO: 1008814 - DNA, 33 bp, Homo sapien
tagcttgtaatagaaatcagtctcttggtaaga

SEQ ID NO: 1008815 - DNA, 33 bp, Homo sapien
tggagtcaggcaaatcagaattcaagtcctact

SEQ ID NO: 1008816 - DNA, 33 bp, Homo sapien
tggagtcaggcaaatctgaattcaagtcctact

SEQ ID NO: 1008817 - DNA, 33 bp, Homo sapien
gtaggtgtgaaataaacgctagtaccctcccct

SEQ ID NO: 1008818 - DNA, 33 bp, Homo sapien
gtaggtgtgaaataaatgctagtaccctcccct

SEQ ID NO: 1008819 - DNA, 33 bp, Homo sapien
tggcactagtaatagcagcaaagaagtggaaag

SEQ ID NO: 1008820 - DNA, 33 bp, Homo sapien
tggcactagtaatagccgcaaagaagtggaaag

SEQ ID NO: 1008821 - DNA, 33 bp, Homo sapien
cagggtggactgtttcgaagacccctgtggact

SEQ ID NO: 1008822 - DNA, 33 bp, Homo sapien
cagggtggactgtttctaagacccctgtggact

SEQ ID NO: 1008823 - DNA, 33 bp, Homo sapien
acttaagaaccttgcacagtgctccaggtgttg

SEQ ID NO: 1008824 - DNA, 33 bp, Homo sapien
acttaagaaccttgcatagtgctccaggtgttg

SEQ ID NO: 1008825 - DNA, 33 bp, Homo sapien
agactactgcagaggaaaaaaaacctgacacac

SEQ ID NO: 1008826 - DNA, 33 bp, Homo sapien
agactactgcagaggagaaaaaacctgacacac

SEQ ID NO: 1008827 - DNA, 33 bp, Homo sapien
aaatattttgcaattacaaacaatactgcaagg

SEQ ID NO: 1008828 - DNA, 33 bp, Homo sapien
aaatattttgcaattagaaacaatactgcaagg

SEQ ID NO: 1008829 - DNA, 33 bp, Homo sapien
acaatctctcgatccaataggattacaggtata

SEQ ID NO: 1008830 - DNA, 33 bp, Homo sapien
acaatctctcgatccagtaggattacaggtata

SEQ ID NO: 1008831 - DNA, 33 bp, Homo sapien
attgcttaagtacataatataggaaaaatctgt

SEQ ID NO: 1008832 - DNA, 33 bp, Homo sapien
attgcttaagtacatagtataggaaaaatctgt

SEQ ID NO: 1008833 - DNA, 33 bp, Homo sapien
tatatttgccggttgaacatcccactgagaatt

SEQ ID NO: 1008834 - DNA, 33 bp, Homo sapien
tatatttgccggttgagcatcccactgagaatt

SEQ ID NO: 1008835 - DNA, 33 bp, Homo sapien
agtacacagataatcactatagagaacttaaga

SEQ ID NO: 1008836 - DNA, 33 bp, Homo sapien
agtacacagataatcagtatagagaacttaaga

SEQ ID NO: 1008837 - DNA, 33 bp, Homo sapien
gctatttccttccatacaggtgtaacattttgg

SEQ ID NO: 1008838 - DNA, 33 bp, Homo sapien
gctatttccttccatagaggtgtaacattttgg

SEQ ID NO: 1008839 - DNA, 33 bp, Homo sapien
ttcaagtgaggatgtaagactttcaaattgggt

SEQ ID NO: 1008840 - DNA, 33 bp, Homo sapien
ttcaagtgaggatgtaggactttcaaattgggt

SEQ ID NO: 1008841 - DNA, 33 bp, Homo sapien
cagcaaccatgacttacatttgatctgacagtg

SEQ ID NO: 1008842 - DNA, 33 bp, Homo sapien
cagcaaccatgacttagatttgatctgacagtg

SEQ ID NO: 1008843 - DNA, 33 bp, Homo sapien
acagtcttacggatacagaggtacaactgtcta

SEQ ID NO: 1008844 - DNA, 33 bp, Homo sapien
acagtcttacggatacggaggtacaactgtcta

SEQ ID NO: 1008845 - DNA, 33 bp, Homo sapien
ctgggttaacagaaatcatctcttaagggatta

SEQ ID NO: 1008846 - DNA, 33 bp, Homo sapien
ctgggttaacagaaatgatctcttaagggatta

SEQ ID NO: 1008847 - DNA, 33 bp, Homo sapien
atcttctgaaccatagcatgtaggattagtctt

SEQ ID NO: 1008848 - DNA, 33 bp, Homo sapien
atcttctgaaccataggatgtaggattagtctt

SEQ ID NO: 1008849 - DNA, 33 bp, Homo sapien
cataaaaatatgtaaaatatcctcaaagtccaa

SEQ ID NO: 1008850 - DNA, 33 bp, Homo sapien
cataaaaatatgtaaagtatcctcaaagtccaa

SEQ ID NO: 1008851 - DNA, 33 bp, Homo sapien
ttatatatgccagtttaaaaatgccctagatgt

SEQ ID NO: 1008852 - DNA, 33 bp, Homo sapien
ttatatatgccagtttcaaaatgccctagatgt

SEQ ID NO: 1008853 - DNA, 33 bp, Homo sapien
acgatgtgcctggttacgtaatgttgataatga

SEQ ID NO: 1008854 - DNA, 33 bp, Homo sapien
acgatgtgcctggttatgtaatgttgataatga

SEQ ID NO: 1008855 - DNA, 33 bp, Homo sapien
gatgggtggatgaaaaaatagaaattcctatta

SEQ ID NO: 1008856 - DNA, 33 bp, Homo sapien
gatgggtggatgaaaagatagaaattcctatta

SEQ ID NO: 1008857 - DNA, 33 bp, Homo sapien
catttgggatgaccaactgaaggactcagatgt

SEQ ID NO: 1008858 - DNA, 33 bp, Homo sapien
catttgggatgaccaagtgaaggactcagatgt

SEQ ID NO: 1008859 - DNA, 33 bp, Homo sapien
cttgtcagtttcgatacggggaaaaatgatatt

SEQ ID NO: 1008860 - DNA, 33 bp, Homo sapien
cttgtcagtttcgatatggggaaaaatgatatt

SEQ ID NO: 1008861 - DNA, 33 bp, Homo sapien
ttgaaatagataaaaaccagtattggtcaggtt

SEQ ID NO: 1008862 - DNA, 33 bp, Homo sapien
ttgaaatagataaaaatcagtattggtcaggtt

SEQ ID NO: 1008863 - DNA, 33 bp, Homo sapien
atgttattgagctttaagagtgtttgtatattt

SEQ ID NO: 1008864 - DNA, 33 bp, Homo sapien
atgttattgagctttaggagtgtttgtatattt

SEQ ID NO: 1008865 - DNA, 33 bp, Homo sapien
tggtgcaatcatgcaacgtaaaagaaataaaag

SEQ ID NO: 1008866 - DNA, 33 bp, Homo sapien
tggtgcaatcatgcaatgtaaaagaaataaaag

SEQ ID NO: 1008867 - DNA, 33 bp, Homo sapien
tacatccaatgaggcaatcttcaacctttaaaa

SEQ ID NO: 1008868 - DNA, 33 bp, Homo sapien
tacatccaatgaggcattcttcaacctttaaaa

SEQ ID NO: 1008869 - DNA, 33 bp, Homo sapien
tattcgttcatttaaagccctgcaaaattggca

SEQ ID NO: 1008870 - DNA, 33 bp, Homo sapien
tattcgttcatttaaatccctgcaaaattggca

SEQ ID NO: 1008871 - DNA, 33 bp, Homo sapien
aggccattttgactcccgatcctttgcatttga

SEQ ID NO: 1008872 - DNA, 33 bp, Homo sapien
aggccattttgactcctgatcctttgcatttga

SEQ ID NO: 1008873 - DNA, 33 bp, Homo sapien
gcaacatatcaaaagcggacccagtaagtatga

SEQ ID NO: 1008874 - DNA, 33 bp, Homo sapien
gcaacatatcaaaagctgacccagtaagtatga

SEQ ID NO: 1008875 - DNA, 33 bp, Homo sapien
tgaacattactgaaataacagcaaaagatttag

SEQ ID NO: 1008876 - DNA, 33 bp, Homo sapien
tgaacattactgaaatgacagcaaaagatttag

SEQ ID NO: 1008877 - DNA, 33 bp, Homo sapien
acttggcaaggataaaattcctcatactctaac

SEQ ID NO: 1008878 - DNA, 33 bp, Homo sapien
acttggcaaggataaacttcctcatactctaac

SEQ ID NO: 1008879 - DNA, 33 bp, Homo sapien
tgagatgaattatcataagtacatactagttaa

SEQ ID NO: 1008880 - DNA, 33 bp, Homo sapien
tgagatgaattatcatgagtacatactagttaa

SEQ ID NO: 1008881 - DNA, 33 bp, Homo sapien
atggtgccaatttagactactaacaccaatttt

SEQ ID NO: 1008882 - DNA, 33 bp, Homo sapien
atggtgccaatttagattactaacaccaatttt

SEQ ID NO: 1008883 - DNA, 33 bp, Homo sapien
aatcttgagaaagaaccataaagttggagtagt

SEQ ID NO: 1008884 - DNA, 33 bp, Homo sapien
aatcttgagaaagaacgataaagttggagtagt

SEQ ID NO: 1008885 - DNA, 33 bp, Homo sapien
atctctttctaaattacagcagctctttgggta

SEQ ID NO: 1008886 - DNA, 33 bp, Homo sapien
atctctttctaaattatagcagctctttgggta

SEQ ID NO: 1008887 - DNA, 33 bp, Homo sapien
ctatccacagattggaaagtacagaattgaagg

SEQ ID NO: 1008888 - DNA, 33 bp, Homo sapien
ctatccacagattggacagtacagaattgaagg

SEQ ID NO: 1008889 - DNA, 33 bp, Homo sapien
ttaggaggaagatttacggtattttttggcact

SEQ ID NO: 1008890 - DNA, 33 bp, Homo sapien
ttaggaggaagatttatggtattttttggcact

SEQ ID NO: 1008891 - DNA, 33 bp, Homo sapien
gcttgtggtaatcagacctaggacttttctact

SEQ ID NO: 1008892 - DNA, 33 bp, Homo sapien
gcttgtggtaatcagagctaggacttttctact

SEQ ID NO: 1008893 - DNA, 33 bp, Homo sapien
atgatttgcttctcgaaatacaacaaaatgtat

SEQ ID NO: 1008894 - DNA, 33 bp, Homo sapien
atgatttgcttctcgagatacaacaaaatgtat

SEQ ID NO: 1008895 - DNA, 33 bp, Homo sapien
taggtttttttcttcacgatcggaatgttttta

SEQ ID NO: 1008896 - DNA, 33 bp, Homo sapien
taggtttttttcttcatgatcggaatgttttta

SEQ ID NO: 1008897 - DNA, 33 bp, Homo sapien
catccctttactaagaatagggacagttccagg

SEQ ID NO: 1008898 - DNA, 33 bp, Homo sapien
catccctttactaagattagggacagttccagg

SEQ ID NO: 1008899 - DNA, 33 bp, Homo sapien
agacctggcctatagacagtgattaataaagga

SEQ ID NO: 1008900 - DNA, 33 bp, Homo sapien
agacctggcctatagatagtgattaataaagga

SEQ ID NO: 1008901 - DNA, 33 bp, Homo sapien
gtattatctcactaaacccttggaacatccagg

SEQ ID NO: 1008902 - DNA, 33 bp, Homo sapien
gtattatctcactaaatccttggaacatccagg

SEQ ID NO: 1008903 - DNA, 33 bp, Homo sapien
ttttaccacccaccaaatgccaggtattataca

SEQ ID NO: 1008904 - DNA, 33 bp, Homo sapien
ttttaccacccaccaactgccaggtattataca

SEQ ID NO: 1008905 - DNA, 33 bp, Homo sapien
tgtgacttctattagcaccaaagtcactatgct

SEQ ID NO: 1008906 - DNA, 33 bp, Homo sapien
tgtgacttctattagcgccaaagtcactatgct

SEQ ID NO: 1008907 - DNA, 33 bp, Homo sapien
acacgcatattaactacagtatggctgattaca

SEQ ID NO: 1008908 - DNA, 33 bp, Homo sapien
acacgcatattaactatagtatggctgattaca

SEQ ID NO: 1008909 - DNA, 33 bp, Homo sapien
ttatggaattataaaaactccttgtgtatcatg

SEQ ID NO: 1008910 - DNA, 33 bp, Homo sapien
ttatggaattataaaagctccttgtgtatcatg

SEQ ID NO: 1008911 - DNA, 33 bp, Homo sapien
gattaccgtctcagtcaatgttgctcttcagtt

SEQ ID NO: 1008912 - DNA, 33 bp, Homo sapien
gattaccgtctcagtcgatgttgctcttcagtt

SEQ ID NO: 1008913 - DNA, 33 bp, Homo sapien
tgctgttgttggcccacgaggaaactgtgacta

SEQ ID NO: 1008914 - DNA, 33 bp, Homo sapien
tgctgttgttggcccatgaggaaactgtgacta

SEQ ID NO: 1008915 - DNA, 33 bp, Homo sapien
catatatacacatctgccaacaaaatctacacc

SEQ ID NO: 1008916 - DNA, 33 bp, Homo sapien
catatatacacatctgtcaacaaaatctacacc

SEQ ID NO: 1008917 - DNA, 33 bp, Homo sapien
caggaattgaattataaacttgaattgcactcc

SEQ ID NO: 1008918 - DNA, 33 bp, Homo sapien
caggaattgaattatagacttgaattgcactcc

SEQ ID NO: 1008919 - DNA, 33 bp, Homo sapien
agacaattccaattaacactacagatctaaaag

SEQ ID NO: 1008920 - DNA, 33 bp, Homo sapien
agacaattccaattaagactacagatctaaaag

SEQ ID NO: 1008921 - DNA, 33 bp, Homo sapien
caactgaagagcaaagcagtaagcaatttccag

SEQ ID NO: 1008922 - DNA, 33 bp, Homo sapien
caactgaagagcaaagtagtaagcaatttccag

SEQ ID NO: 1008923 - DNA, 33 bp, Homo sapien
ttgaagccatctaagaaaacaggtttgaataag

SEQ ID NO: 1008924 - DNA, 33 bp, Homo sapien
ttgaagccatctaagataacaggtttgaataag

SEQ ID NO: 1008925 - DNA, 33 bp, Homo sapien
cagtcactggtccacaataataatgaaatcttg

SEQ ID NO: 1008926 - DNA, 33 bp, Homo sapien
cagtcactggtccacagtaataatgaaatcttg

SEQ ID NO: 1008927 - DNA, 33 bp, Homo sapien
accagaactagatctaacatggctgcataaggc

SEQ ID NO: 1008928 - DNA, 33 bp, Homo sapien
accagaactagatctaccatggctgcataaggc

SEQ ID NO: 1008929 - DNA, 33 bp, Homo sapien
atctagttctggtgcacacacaattttttaatt

SEQ ID NO: 1008930 - DNA, 33 bp, Homo sapien
atctagttctggtgcatacacaattttttaatt

SEQ ID NO: 1008931 - DNA, 33 bp, Homo sapien
tgcatataaggtgaaagaagaagaggtcaggat

SEQ ID NO: 1008932 - DNA, 33 bp, Homo sapien
tgcatataaggtgaaataagaagaggtcaggat

SEQ ID NO: 1008933 - DNA, 33 bp, Homo sapien
agacatggcttctgcccgattttctttctctct

SEQ ID NO: 1008934 - DNA, 33 bp, Homo sapien
agacatggcttctgcctgattttctttctctct

SEQ ID NO: 1008935 - DNA, 33 bp, Homo sapien
ttcagatgacttcatacaccagccttcagctga

SEQ ID NO: 1008936 - DNA, 33 bp, Homo sapien
ttcagatgacttcatataccagccttcagctga

SEQ ID NO: 1008937 - DNA, 33 bp, Homo sapien
gatgtgtggatgggaaaggaaagtagtagatat

SEQ ID NO: 1008938 - DNA, 33 bp, Homo sapien
gatgtgtggatgggaagggaaagtagtagatat

SEQ ID NO: 1008939 - DNA, 33 bp, Homo sapien
atgctttagacacaaaaattactaactttcaca

SEQ ID NO: 1008940 - DNA, 33 bp, Homo sapien
atgctttagacacaaagattactaactttcaca

SEQ ID NO: 1008941 - DNA, 33 bp, Homo sapien
cttcgctactgaagaaaacagattatcattagt

SEQ ID NO: 1008942 - DNA, 33 bp, Homo sapien
cttcgctactgaagaagacagattatcattagt

SEQ ID NO: 1008943 - DNA, 33 bp, Homo sapien
attttgggctctgttacagtgttacatgttaga

SEQ ID NO: 1008944 - DNA, 33 bp, Homo sapien
attttgggctctgttatagtgttacatgttaga

SEQ ID NO: 1008945 - DNA, 33 bp, Homo sapien
gaggctgagagctgggcattttttttcactggt

SEQ ID NO: 1008946 - DNA, 33 bp, Homo sapien
gaggctgagagctggggattttttttcactggt

SEQ ID NO: 1008947 - DNA, 33 bp, Homo sapien
gcaacctgggcaacaacaaatcagtcacattga

SEQ ID NO: 1008948 - DNA, 33 bp, Homo sapien
gcaacctgggcaacaagaaatcagtcacattga

SEQ ID NO: 1008949 - DNA, 33 bp, Homo sapien
gctgtgcatgataaaacatggagggagttgagc

SEQ ID NO: 1008950 - DNA, 33 bp, Homo sapien
gctgtgcatgataaaagatggagggagttgagc

SEQ ID NO: 1008951 - DNA, 33 bp, Homo sapien
ctgaatttcaaggtgtcaacagggagattcaac

SEQ ID NO: 1008952 - DNA, 33 bp, Homo sapien
ctgaatttcaaggtgtgaacagggagattcaac

SEQ ID NO: 1008953 - DNA, 33 bp, Homo sapien
tgcacattggtgacaaaaaaaagcaagagaagg

SEQ ID NO: 1008954 - DNA, 33 bp, Homo sapien
tgcacattggtgacaagaaaaagcaagagaagg

SEQ ID NO: 1008955 - DNA, 33 bp, Homo sapien
ttaagtcttttatccaacttggattgatttttg

SEQ ID NO: 1008956 - DNA, 33 bp, Homo sapien
ttaagtcttttatccatcttggattgatttttg

SEQ ID NO: 1008957 - DNA, 33 bp, Homo sapien
aattctaaaatttcaactaccaagtagcaaact

SEQ ID NO: 1008958 - DNA, 33 bp, Homo sapien
aattctaaaatttcaagtaccaagtagcaaact

SEQ ID NO: 1008959 - DNA, 33 bp, Homo sapien
attaagagagccttaaatgacagcaaatgaaat

SEQ ID NO: 1008960 - DNA, 33 bp, Homo sapien
attaagagagccttaactgacagcaaatgaaat

SEQ ID NO: 1008961 - DNA, 33 bp, Homo sapien
ttatataaactgaccccgatttgccctattctg

SEQ ID NO: 1008962 - DNA, 33 bp, Homo sapien
ttatataaactgacccggatttgccctattctg

SEQ ID NO: 1008963 - DNA, 33 bp, Homo sapien
cctgaccactggggctcaaagaactaggaaaga

SEQ ID NO: 1008964 - DNA, 33 bp, Homo sapien
cctgaccactggggctgaaagaactaggaaaga

SEQ ID NO: 1008965 - DNA, 33 bp, Homo sapien
aaatgaagtctccataaggtgaccctaggagac

SEQ ID NO: 1008966 - DNA, 33 bp, Homo sapien
aaatgaagtctccatacggtgaccctaggagac

SEQ ID NO: 1008967 - DNA, 33 bp, Homo sapien
agctagttgttcactaccaaagaaaaactgctc

SEQ ID NO: 1008968 - DNA, 33 bp, Homo sapien
agctagttgttcactatcaaagaaaaactgctc

SEQ ID NO: 1008969 - DNA, 33 bp, Homo sapien
agagcccaaggccaaaatgagaagtttgaagtt

SEQ ID NO: 1008970 - DNA, 33 bp, Homo sapien
agagcccaaggccaaagtgagaagtttgaagtt

SEQ ID NO: 1008971 - DNA, 33 bp, Homo sapien
ataggcccattttagaagctttgtgcttggtgg

SEQ ID NO: 1008972 - DNA, 33 bp, Homo sapien
ataggcccattttagaggctttgtgcttggtgg

SEQ ID NO: 1008973 - DNA, 33 bp, Homo sapien
taaggaatgagagaaggcttcaatgaggtgata

SEQ ID NO: 1008974 - DNA, 33 bp, Homo sapien
taaggaatgagagaagtcttcaatgaggtgata

SEQ ID NO: 1008975 - DNA, 33 bp, Homo sapien
tcttacattttggtgacaaatagataacagcca

SEQ ID NO: 1008976 - DNA, 33 bp, Homo sapien
tcttacattttggtgagaaatagataacagcca

SEQ ID NO: 1008977 - DNA, 33 bp, Homo sapien
tattgacatatagataagacagagtatggtggt

SEQ ID NO: 1008978 - DNA, 33 bp, Homo sapien
tattgacatatagataggacagagtatggtggt

SEQ ID NO: 1008979 - DNA, 33 bp, Homo sapien
catattggtaaattacagaattgccactggctt

SEQ ID NO: 1008980 - DNA, 33 bp, Homo sapien
catattggtaaattacggaattgccactggctt

SEQ ID NO: 1008981 - DNA, 33 bp, Homo sapien
ctactagatcagtgataataacaccaatactaa

SEQ ID NO: 1008982 - DNA, 33 bp, Homo sapien
ctactagatcagtgatgataacaccaatactaa

SEQ ID NO: 1008983 - DNA, 33 bp, Homo sapien
agagatgttcttctgagggactggaggaaagca

SEQ ID NO: 1008984 - DNA, 33 bp, Homo sapien
agagatgttcttctgatggactggaggaaagca

SEQ ID NO: 1008985 - DNA, 33 bp, Homo sapien
gcttccaaacccagaagacagtctatctattca

SEQ ID NO: 1008986 - DNA, 33 bp, Homo sapien
gcttccaaacccagaatacagtctatctattca

SEQ ID NO: 1008987 - DNA, 33 bp, Homo sapien
agaaagcaacagtatcaaaatcaacaaaaagaa

SEQ ID NO: 1008988 - DNA, 33 bp, Homo sapien
agaaagcaacagtatcgaaatcaacaaaaagaa

SEQ ID NO: 1008989 - DNA, 33 bp, Homo sapien; identical to SEQ ID NO: 1008987

SEQ ID NO: 1008990 - DNA, 33 bp, Homo sapien; identical to SEQ ID NO: 1008988

SEQ ID NO: 1008991 - DNA, 33 bp, Homo sapien
agataccagccggagcgcttgtatatgaggcgt

SEQ ID NO: 1008992 - DNA, 33 bp, Homo sapien
agataccagccggagctcttgtatatgaggcgt

SEQ ID NO: 1008993 - DNA, 33 bp, Homo sapien; identical to SEQ ID NO: 1008991

SEQ ID NO: 1008994 - DNA, 33 bp, Homo sapien; identical to SEQ ID NO: 1008992

SEQ ID NO: 1008995 - DNA, 33 bp, Homo sapien; identical to SEQ ID NO: 1008991

SEQ ID NO: 1008996 - DNA, 33 bp, Homo sapien; identical to SEQ ID NO: 1008992

SEQ ID NO: 1008997 - DNA, 33 bp, Homo sapien
gagctcagaagtaaagcatcagataatggtcaa

SEQ ID NO: 1008998 - DNA, 33 bp, Homo sapien
gagctcagaagtaaagtatcagataatggtcaa

SEQ ID NO: 1008999 - DNA, 33 bp, Homo sapien
atctgtctgatgaaagcattttggaattctgga

SEQ ID NO: 1009000 - DNA, 33 bp, Homo sapien
atctgtctgatgaaagtattttggaattctgga

SEQ ID NO: 1009001 - DNA, 33 bp, Homo sapien
aaagcggaaaggtcgacgcacattcaaaagtat

SEQ ID NO: 1009002 - DNA, 33 bp, Homo sapien
aaagcggaaaggtcgaggcacattcaaaagtat

SEQ ID NO: 1009003 - DNA, 33 bp, Homo sapien
ccttggataacttgaccggtagtcttcttggac

SEQ ID NO: 1009004 - DNA, 33 bp, Homo sapien
ccttggataacttgactggtagtcttcttggac

SEQ ID NO: 1009005 - DNA, 33 bp, Homo sapien
gctatagcctacttaactatgcttctggttgaa

SEQ ID NO: 1009006 - DNA, 33 bp, Homo sapien
gctatagcctacttaattatgcttctggttgaa

SEQ ID NO: 1009007 - DNA, 33 bp, Homo sapien
tttgaaacgtggaggactcacccaacaaagagc

SEQ ID NO: 1009008 - DNA, 33 bp, Homo sapien
tttgaaacgtggaggagtcacccaacaaagagc

SEQ ID NO: 1009009 - DNA, 33 bp, Homo sapien
ttcatgcttccctataactatgcccttgctctt

SEQ ID NO: 1009010 - DNA, 33 bp, Homo sapien
ttcatgcttccctatacctatgcccttgctctt

SEQ ID NO: 1009011 - DNA, 33 bp, Homo sapien
aaaataaccacccaataaattgtctgtaagtca

SEQ ID NO: 1009012 - DNA, 33 bp, Homo sapien
aaaataaccacccaatgaattgtctgtaagtca

SEQ ID NO: 1009013 - DNA, 33 bp, Homo sapien
atgccacaaagtcatgaaatactggacagtaga

SEQ ID NO: 1009014 - DNA, 33 bp, Homo sapien
atgccacaaagtcatggaatactggacagtaga

SEQ ID NO: 1009015 - DNA, 33 bp, Homo sapien
atcatataatttctgcacatttcagaacacctt

SEQ ID NO: 1009016 - DNA, 33 bp, Homo sapien
atcatataatttctgctcatttcagaacacctt

SEQ ID NO: 1009017 - DNA, 33 bp, Homo sapien
aggaaaatccacattcggaagtgtaaagtaaaa

SEQ ID NO: 1009018 - DNA, 33 bp, Homo sapien
aggaaaatccacattctgaagtgtaaagtaaaa

SEQ ID NO: 1009019 - DNA, 33 bp, Homo sapien
gatcacagaaagttagcaggaaaatccacattc

SEQ ID NO: 1009020 - DNA, 33 bp, Homo sapien
gatcacagaaagttagtaggaaaatccacattc

SEQ ID NO: 1009021 - DNA, 33 bp, Homo sapien
acacacctacacagaagatgatttagaggaagg

SEQ ID NO: 1009022 - DNA, 33 bp, Homo sapien
acacacctacacagaatatgatttagaggaagg

SEQ ID NO: 1009023 - DNA, 33 bp, Homo sapien
attcataaacattcaccatgacaagaatataag

SEQ ID NO: 1009024 - DNA, 33 bp, Homo sapien
attcataaacattcacgatgacaagaatataag

SEQ ID NO: 1009025 - DNA, 33 bp, Homo sapien
taaatgtgatctaggacgaatggaattgtattg

SEQ ID NO: 1009026 - DNA, 33 bp, Homo sapien
taaatgtgatctaggatgaatggaattgtattg

SEQ ID NO: 1009027 - DNA, 33 bp, Homo sapien
acagtcacaattaaaaatgctttctaataacga

SEQ ID NO: 1009028 - DNA, 33 bp, Homo sapien
acagtcacaattaaaagtgctttctaataacga

SEQ ID NO: 1009029 - DNA, 33 bp, Homo sapien
ctactactactcaacaatgtactgaagattata

SEQ ID NO: 1009030 - DNA, 33 bp, Homo sapien
ctactactactcaacattgtactgaagattata

SEQ ID NO: 1009031 - DNA, 33 bp, Homo sapien
tgaattcgggggcagagtattcctgtttctgaa

SEQ ID NO: 1009032 - DNA, 33 bp, Homo sapien
tgaattcgggggcagattattcctgtttctgaa

SEQ ID NO: 1009033 - DNA, 33 bp, Homo sapien
ttctaggacctttaaaatcttgcaaataacatg

SEQ ID NO: 1009034 - DNA, 33 bp, Homo sapien
ttctaggacctttaaagtcttgcaaataacatg

SEQ ID NO: 1009035 - DNA, 33 bp, Homo sapien
gtgatgactgagatgacgttgttaacactgcag

SEQ ID NO: 1009036 - DNA, 33 bp, Homo sapien
gtgatgactgagatgatgttgttaacactgcag

SEQ ID NO: 1009037 - DNA, 33 bp, Homo sapien
agtggattttagcaggaaaaagaaataggggaa

SEQ ID NO: 1009038 - DNA, 33 bp, Homo sapien
agtggattttagcagggaaaagaaataggggaa

SEQ ID NO: 1009039 - DNA, 33 bp, Homo sapien
tcacctggtcaatgcccatcccctgcagtgaga

SEQ ID NO: 1009040 - DNA, 33 bp, Homo sapien
tcacctggtcaatgccgatcccctgcagtgaga

SEQ ID NO: 1009041 - DNA, 33 bp, Homo sapien
caggagcgaatcaggccctaccacatgacagtc

SEQ ID NO: 1009042 - DNA, 33 bp, Homo sapien
caggagcgaatcaggctctaccacatgacagtc

SEQ ID NO: 1009043 - DNA, 33 bp, Homo sapien
gcaccttctccatgagccattaaagaggcttct

SEQ ID NO: 1009044 - DNA, 33 bp, Homo sapien
gcaccttctccatgagtcattaaagaggcttct

SEQ ID NO: 1009045 - DNA, 33 bp, Homo sapien
ggaagagagttggggacattttgagtgggaaag

SEQ ID NO: 1009046 - DNA, 33 bp, Homo sapien
ggaagagagttggggagattttgagtgggaaag

SEQ ID NO: 1009047 - DNA, 33 bp, Homo sapien
atatctcaaagctcaaactaggcctctttcttg

SEQ ID NO: 1009048 - DNA, 33 bp, Homo sapien
atatctcaaagctcaacctaggcctctttcttg

SEQ ID NO: 1009049 - DNA, 33 bp, Homo sapien
gtgagtgaggggtaacaaaagattctttgattt

SEQ ID NO: 1009050 - DNA, 33 bp, Homo sapien
gtgagtgaggggtaacgaaagattctttgattt

SEQ ID NO: 1009051 - DNA, 33 bp, Homo sapien
aaccccatatcctaaccgacattgaatcaagaa

SEQ ID NO: 1009052 - DNA, 33 bp, Homo sapien
aaccccatatcctaactgacattgaatcaagaa

SEQ ID NO: 1009053 - DNA, 33 bp, Homo sapien
ggtactaaagcagaccaaagtagatctagtaca

SEQ ID NO: 1009054 - DNA, 33 bp, Homo sapien
ggtactaaagcagaccgaagtagatctagtaca

SEQ ID NO: 1009055 - DNA, 33 bp, Homo sapien
tcaacatgaagattaacggacttcaaagcagaa

SEQ ID NO: 1009056 - DNA, 33 bp, Homo sapien
tcaacatgaagattaatggacttcaaagcagaa

SEQ ID NO: 1009057 - DNA, 33 bp, Homo sapien
ttcttgtgcccctgaacgctgaatcacaggcaa

SEQ ID NO: 1009058 - DNA, 33 bp, Homo sapien
ttcttgtgcccctgaatgctgaatcacaggcaa

SEQ ID NO: 1009059 - DNA, 33 bp, Homo sapien
aacatggccatgaaatcagtggttgaatgttgc

SEQ ID NO: 1009060 - DNA, 33 bp, Homo sapien
aacatggccatgaaattagtggttgaatgttgc

SEQ ID NO: 1009061 - DNA, 33 bp, Homo sapien
ggcaataatctagccacactagagtcacagtgt

SEQ ID NO: 1009062 - DNA, 33 bp, Homo sapien
ggcaataatctagccagactagagtcacagtgt

SEQ ID NO: 1009063 - DNA, 33 bp, Homo sapien
agtaatgacctccacaatgaaccttggttgcac

SEQ ID NO: 1009064 - DNA, 33 bp, Homo sapien
agtaatgacctccacactgaaccttggttgcac

SEQ ID NO: 1009065 - DNA, 33 bp, Homo sapien
gttcataaataagagccctgtcacaggtggtga

SEQ ID NO: 1009066 - DNA, 33 bp, Homo sapien
gttcataaataagagcgctgtcacaggtggtga

SEQ ID NO: 1009067 - DNA, 33 bp, Homo sapien
agccagaaagctataaagccatgctcacagaaa

SEQ ID NO: 1009068 - DNA, 33 bp, Homo sapien
agccagaaagctataaggccatgctcacagaaa

SEQ ID NO: 1009069 - DNA, 33 bp, Homo sapien
agtgttttacaagagcagctatagggaatgcct

SEQ ID NO: 1009070 - DNA, 33 bp, Homo sapien
agtgttttacaagagccgctatagggaatgcct

SEQ ID NO: 1009071 - DNA, 33 bp, Homo sapien
tatgatagtgaacaatcatatagaacccatata

SEQ ID NO: 1009072 - DNA, 33 bp, Homo sapien
tatgatagtgaacaattatatagaacccatata

SEQ ID NO: 1009073 - DNA, 33 bp, Homo sapien
gctccctaatacaaatcatagtcataataaatt

SEQ ID NO: 1009074 - DNA, 33 bp, Homo sapien
gctccctaatacaaatgatagtcataataaatt

SEQ ID NO: 1009075 - DNA, 33 bp, Homo sapien
gctatttctggtctgactaaggtggaatttatt

SEQ ID NO: 1009076 - DNA, 33 bp, Homo sapien
gctatttctggtctgagtaaggtggaatttatt

SEQ ID NO: 1009077 - DNA, 33 bp, Homo sapien
aataagccgtgaaggaaggagtgctaccagcac

SEQ ID NO: 1009078 - DNA, 33 bp, Homo sapien
aataagccgtgaaggagggagtgctaccagcac

SEQ ID NO: 1009079 - DNA, 33 bp, Homo sapien
gatagatggaccatcaactggaaagagaccagg

SEQ ID NO: 1009080 - DNA, 33 bp, Homo sapien
gatagatggaccatcacctggaaagagaccagg

SEQ ID NO: 1009081 - DNA, 33 bp, Homo sapien
tctacacgtttcccacaagttcagccatcaggg

SEQ ID NO: 1009082 - DNA, 33 bp, Homo sapien
tctacacgtttcccacgagttcagccatcaggg

SEQ ID NO: 1009083 - DNA, 33 bp, Homo sapien
taatactgcctgtccacagcgtttactacgtgc

SEQ ID NO: 1009084 - DNA, 33 bp, Homo sapien
taatactgcctgtccatagcgtttactacgtgc

SEQ ID NO: 1009085 - DNA, 33 bp, Homo sapien
atctctggacttcgtgcacacccgaatgacagc

SEQ ID NO: 1009086 - DNA, 33 bp, Homo sapien
atctctggacttcgtggacacccgaatgacagc

SEQ ID NO: 1009087 - DNA, 33 bp, Homo sapien
tgaaccttgaagccggaagtttccatgttaagt

SEQ ID NO: 1009088 - DNA, 33 bp, Homo sapien
tgaaccttgaagccggcagtttccatgttaagt

SEQ ID NO: 1009089 - DNA, 33 bp, Homo sapien
tgagtagtgattcctaagcatttaaggggtgat

SEQ ID NO: 1009090 - DNA, 33 bp, Homo sapien
tgagtagtgattcctacgcatttaaggggtgat

SEQ ID NO: 1009091 - DNA, 33 bp, Homo sapien
tctaaaatgggtctaactaccccctccaggaat

SEQ ID NO: 1009092 - DNA, 33 bp, Homo sapien
tctaaaatgggtctaagtaccccctccaggaat

SEQ ID NO: 1009093 - DNA, 33 bp, Homo sapien
tctttttgtgagattcaaaaatgctgagagtga

SEQ ID NO: 1009094 - DNA, 33 bp, Homo sapien
tctttttgtgagattcgaaaatgctgagagtga

SEQ ID NO: 1009095 - DNA, 33 bp, Homo sapien
gagactctgtatgggacagacaacaaggtgtgc

SEQ ID NO: 1009096 - DNA, 33 bp, Homo sapien
gagactctgtatgggagagacaacaaggtgtgc

SEQ ID NO: 1009097 - DNA, 33 bp, Homo sapien
ctgagctgcatcttaacgaataggacgagaagg

SEQ ID NO: 1009098 - DNA, 33 bp, Homo sapien
ctgagctgcatcttaatgaataggacgagaagg

SEQ ID NO: 1009099 - DNA, 33 bp, Homo sapien
tctcttactttcaaaccctaacatttgttgttc

SEQ ID NO: 1009100 - DNA, 33 bp, Homo sapien
tctcttactttcaaactctaacatttgttgttc

SEQ ID NO: 1009101 - DNA, 33 bp, Homo sapien
caattcgtacgtggaaatcctaactaccagtac

SEQ ID NO: 1009102 - DNA, 33 bp, Homo sapien
caattcgtacgtggaagtcctaactaccagtac

SEQ ID NO: 1009103 - DNA, 33 bp, Homo sapien
ttttctgctgcccccaagctgtatctctctgac

SEQ ID NO: 1009104 - DNA, 33 bp, Homo sapien
ttttctgctgcccccaggctgtatctctctgac

SEQ ID NO: 1009105 - DNA, 33 bp, Homo sapien
tacccaaagttcagacacgccatcagagccaac

SEQ ID NO: 1009106 - DNA, 33 bp, Homo sapien
tacccaaagttcagacgcgccatcagagccaac

SEQ ID NO: 1009107 - DNA, 33 bp, Homo sapien
tcaacccttatacccaatgcagcccaataactc

SEQ ID NO: 1009108 - DNA, 33 bp, Homo sapien
tcaacccttatacccagtgcagcccaataactc

SEQ ID NO: 1009109 - DNA, 33 bp, Homo sapien
ggtttcctgaattccaagttatctttgggtaat

SEQ ID NO: 1009110 - DNA, 33 bp, Homo sapien
ggtttcctgaattccaggttatctttgggtaat

SEQ ID NO: 1009111 - DNA, 33 bp, Homo sapien
ggaaacagaagctacacgaagtattataagcag

SEQ ID NO: 1009112 - DNA, 33 bp, Homo sapien
ggaaacagaagctacatgaagtattataagcag

SEQ ID NO: 1009113 - DNA, 33 bp, Homo sapien
atactcactccaacaccgaaatagccctatgaa

SEQ ID NO: 1009114 - DNA, 33 bp, Homo sapien
atactcactccaacactgaaatagccctatgaa

SEQ ID NO: 1009115 - DNA, 33 bp, Homo sapien
tactcactgagagcaactgccgttcccaggctg

SEQ ID NO: 1009116 - DNA, 33 bp, Homo sapien
tactcactgagagcaattgccgttcccaggctg

SEQ ID NO: 1009117 - DNA, 33 bp, Homo sapien
ccacaggatgcagggacggctgccagatttaat

SEQ ID NO: 1009118 - DNA, 33 bp, Homo sapien
ccacaggatgcagggagggctgccagatttaat

SEQ ID NO: 1009119 - DNA, 33 bp, Homo sapien
gcaggtcgttaatgcaaatggatgccctgcctg

SEQ ID NO: 1009120 - DNA, 33 bp, Homo sapien
gcaggtcgttaatgcacatggatgccctgcctg

SEQ ID NO: 1009121 - DNA, 33 bp, Homo sapien
aatcccttgttaggcggaagatctgacttctca

SEQ ID NO: 1009122 - DNA, 33 bp, Homo sapien
aatcccttgttaggcgtaagatctgacttctca

SEQ ID NO: 1009123 - DNA, 33 bp, Homo sapien
cgactgaagtttataccgctgaccctgaacttt

SEQ ID NO: 1009124 - DNA, 33 bp, Homo sapien
cgactgaagtttatactgctgaccctgaacttt

SEQ ID NO: 1009125 - DNA, 33 bp, Homo sapien
cctccccaactaagtgaaactgtgagtcaatta

SEQ ID NO: 1009126 - DNA, 33 bp, Homo sapien
cctccccaactaagtggaactgtgagtcaatta

SEQ ID NO: 1009127 - DNA, 33 bp, Homo sapien
gcagggcctgagccctcaagaccgcatggagag

SEQ ID NO: 1009128 - DNA, 33 bp, Homo sapien
gcagggcctgagccctgaagaccgcatggagag

SEQ ID NO: 1009129 - DNA, 33 bp, Homo sapien
gtatactatcgcaaaggaaacacacatctctgg

SEQ ID NO: 1009130 - DNA, 33 bp, Homo sapien
gtatactatcgcaaagtaaacacacatctctgg

SEQ ID NO: 1009131 - DNA, 33 bp, Homo sapien
tcctgacccatgtatgaaaaggccagcccaggg

SEQ ID NO: 1009132 - DNA, 33 bp, Homo sapien
tcctgacccatgtatgcaaaggccagcccaggg

SEQ ID NO: 1009133 - DNA, 33 bp, Homo sapien
tagtaggatcagtccacgtgttattattggaaa

SEQ ID NO: 1009134 - DNA, 33 bp, Homo sapien
tagtaggatcagtccatgtgttattattggaaa

SEQ ID NO: 1009135 - DNA, 33 bp, Homo sapien
cctctagctgacacccaacacgctggtagggag

SEQ ID NO: 1009136 - DNA, 33 bp, Homo sapien
cctctagctgacacccgacacgctggtagggag

SEQ ID NO: 1009137 - DNA, 33 bp, Homo sapien
cttatatcagtaaatacgtgctctatctgagta

SEQ ID NO: 1009138 - DNA, 33 bp, Homo sapien
cttatatcagtaaatatgtgctctatctgagta

SEQ ID NO: 1009139 - DNA, 33 bp, Homo sapien
gcagttcttctagtcccatggccttagactcga

SEQ ID NO: 1009140 - DNA, 33 bp, Homo sapien
gcagttcttctagtcctatggccttagactcga

SEQ ID NO: 1009141 - DNA, 33 bp, Homo sapien
acctgtctttcccatcacagcaactggtagttc

SEQ ID NO: 1009142 - DNA, 33 bp, Homo sapien
acctgtctttcccatcgcagcaactggtagttc

SEQ ID NO: 1009143 - DNA, 33 bp, Homo sapien
caaggataagatagagacactgaaatccaattc

SEQ ID NO: 1009144 - DNA, 33 bp, Homo sapien
caaggataagatagagtcactgaaatccaattc

SEQ ID NO: 1009145 - DNA, 33 bp, Homo sapien
gaagtcagagaggcccaaaacacatttgaggtc

SEQ ID NO: 1009146 - DNA, 33 bp, Homo sapien
gaagtcagagaggcccgaaacacatttgaggtc

SEQ ID NO: 1009147 - DNA, 33 bp, Homo sapien
tttggaaagtttacgacgtgtttaaagccacga

SEQ ID NO: 1009148 - DNA, 33 bp, Homo sapien
tttggaaagtttacgatgtgtttaaagccacga

SEQ ID NO: 1009149 - DNA, 33 bp, Homo sapien
gatgggaaaggtgagaagcatgttagttgaaat

SEQ ID NO: 1009150 - DNA, 33 bp, Homo sapien
gatgggaaaggtgagaggcatgttagttgaaat

SEQ ID NO: 1009151 - DNA, 33 bp, Homo sapien
tgtcatctttgatacaatgcgactcggaccagg

SEQ ID NO: 1009152 - DNA, 33 bp, Homo sapien
tgtcatctttgatacagtgcgactcggaccagg

SEQ ID NO: 1009153 - DNA, 33 bp, Homo sapien
ttggtaatttcctacaaaactttacatgctagg

SEQ ID NO: 1009154 - DNA, 33 bp, Homo sapien
ttggtaatttcctacacaactttacatgctagg

SEQ ID NO: 1009155 - DNA, 33 bp, Homo sapien
tccttagaacaagtcaataagtacagctcacat

SEQ ID NO: 1009156 - DNA, 33 bp, Homo sapien
tccttagaacaagtcagtaagtacagctcacat

SEQ ID NO: 1009157 - DNA, 33 bp, Homo sapien
tagggtgtacctattgaaggaaagaatatcaaa

SEQ ID NO: 1009158 - DNA, 33 bp, Homo sapien
tagggtgtacctattggaggaaagaatatcaaa

SEQ ID NO: 1009159 - DNA, 33 bp, Homo sapien
aatcatctgcctgttacatttaggactgtgtgc

SEQ ID NO: 1009160 - DNA, 33 bp, Homo sapien
aatcatctgcctgttatatttaggactgtgtgc

SEQ ID NO: 1009161 - DNA, 33 bp, Homo sapien
agtttaggcagatcacaggggatttcagtaaag

SEQ ID NO: 1009162 - DNA, 33 bp, Homo sapien
agtttaggcagatcaccggggatttcagtaaag

SEQ ID NO: 1009163 - DNA, 33 bp, Homo sapien
tatatatgtgtttggaagtctgtgtacatgtgg

SEQ ID NO: 1009164 - DNA, 33 bp, Homo sapien
tatatatgtgtttggaggtctgtgtacatgtgg

SEQ ID NO: 1009165 - DNA, 33 bp, Homo sapien
gttgaatgaaataaaccacctagagcattgatt

SEQ ID NO: 1009166 - DNA, 33 bp, Homo sapien
gttgaatgaaataaactacctagagcattgatt

SEQ ID NO: 1009167 - DNA, 33 bp, Homo sapien
agacaagggaaagagacaacattaggcaccatt

SEQ ID NO: 1009168 - DNA, 33 bp, Homo sapien
agacaagggaaagagagaacattaggcaccatt

SEQ ID NO: 1009169 - DNA, 33 bp, Homo sapien
tcacattgccacgacgaaagtccagcacaccct

SEQ ID NO: 1009170 - DNA, 33 bp, Homo sapien
tcacattgccacgacgtaagtccagcacaccct

SEQ ID NO: 1009171 - DNA, 33 bp, Homo sapien
cagacataggactgcagagagaggcggtcactc

SEQ ID NO: 1009172 - DNA, 33 bp, Homo sapien
cagacataggactgcatagagaggcggtcactc

SEQ ID NO: 1009173 - DNA, 33 bp, Homo sapien
tgtgggctaaagcttacgtggtactcacagaat

SEQ ID NO: 1009174 - DNA, 33 bp, Homo sapien
tgtgggctaaagcttatgtggtactcacagaat

SEQ ID NO: 1009175 - DNA, 33 bp, Homo sapien
tgtccccaattttctgaatacgcacatctgaaa

SEQ ID NO: 1009176 - DNA, 33 bp, Homo sapien
tgtccccaattttctggatacgcacatctgaaa

SEQ ID NO: 1009177 - DNA, 33 bp, Homo sapien
tctcttgtctttcctaatactaacaatagttcc

SEQ ID NO: 1009178 - DNA, 33 bp, Homo sapien
tctcttgtctttcctagtactaacaatagttcc

SEQ ID NO: 1009179 - DNA, 33 bp, Homo sapien
agagcctacactcacaatctctccatactttgt

SEQ ID NO: 1009180 - DNA, 33 bp, Homo sapien
agagcctacactcacagtctctccatactttgt

SEQ ID NO: 1009181 - DNA, 33 bp, Homo sapien
gtttgcttcttgctcaatatggtaaacacagca

SEQ ID NO: 1009182 - DNA, 33 bp, Homo sapien
gtttgcttcttgctcagtatggtaaacacagca

SEQ ID NO: 1009183 - DNA, 33 bp, Homo sapien
gagacaaatgaatgaacctttcatggtaataaa

SEQ ID NO: 1009184 - DNA, 33 bp, Homo sapien
gagacaaatgaatgaagctttcatggtaataaa

SEQ ID NO: 1009185 - DNA, 33 bp, Homo sapien
agaacaggatgactaactcaaatgagaagcata

SEQ ID NO: 1009186 - DNA, 33 bp, Homo sapien
agaacaggatgactaagtcaaatgagaagcata

SEQ ID NO: 1009187 - DNA, 33 bp, Homo sapien
agaagtagaactacctgacatgggacattatta

SEQ ID NO: 1009188 - DNA, 33 bp, Homo sapien
agaagtagaactaccttacatgggacattatta

SEQ ID NO: 1009189 - DNA, 33 bp, Homo sapien
ttaaaagcaggagaaagtgtaattgattgggaa

SEQ ID NO: 1009190 - DNA, 33 bp, Homo sapien
ttaaaagcaggagaaattgtaattgattgggaa

SEQ ID NO: 1009191 - DNA, 33 bp, Homo sapien
tttgcatccacagctacggacaagagaagttat

SEQ ID NO: 1009192 - DNA, 33 bp, Homo sapien
tttgcatccacagctatggacaagagaagttat

SEQ ID NO: 1009193 - DNA, 33 bp, Homo sapien
atgttctctgatcaaaagaaagtgggatactct

SEQ ID NO: 1009194 - DNA, 33 bp, Homo sapien
atgttctctgatcaaaggaaagtgggatactct

SEQ ID NO: 1009195 - DNA, 33 bp, Homo sapien
atctcaaaagggcacaacaccataatcacagat

SEQ ID NO: 1009196 - DNA, 33 bp, Homo sapien
atctcaaaagggcacatcaccataatcacagat

SEQ ID NO: 1009197 - DNA, 33 bp, Homo sapien
ccatgagcatatgcagaaagaatgtaccgaggg

SEQ ID NO: 1009198 - DNA, 33 bp, Homo sapien
ccatgagcatatgcagcaagaatgtaccgaggg

SEQ ID NO: 1009199 - DNA, 33 bp, Homo sapien
aagttccttgatccaaattgctctttattcgag

SEQ ID NO: 1009200 - DNA, 33 bp, Homo sapien
aagttccttgatccaagttgctctttattcgag

SEQ ID NO: 1009201 - DNA, 33 bp, Homo sapien
ttttgtcgatattctacaaagagaatcaaatag

SEQ ID NO: 1009202 - DNA, 33 bp, Homo sapien
ttttgtcgatattctagaaagagaatcaaatag

SEQ ID NO: 1009203 - DNA, 33 bp, Homo sapien
attctttcaaatctaccgatctgtactctccaa

SEQ ID NO: 1009204 - DNA, 33 bp, Homo sapien
attctttcaaatctactgatctgtactctccaa

SEQ ID NO: 1009205 - DNA, 33 bp, Homo sapien
ttcctgcaagccgtgacggagggtaggggatgg

SEQ ID NO: 1009206 - DNA, 33 bp, Homo sapien
ttcctgcaagccgtgatggagggtaggggatgg

SEQ ID NO: 1009207 - DNA, 33 bp, Homo sapien
tacatattcacaaaataaggacatcttcctact

SEQ ID NO: 1009208 - DNA, 33 bp, Homo sapien
tacatattcacaaaatgaggacatcttcctact

SEQ ID NO: 1009209 - DNA, 33 bp, Homo sapien
ttaggacatgttggcaatgagatgtcaaattgt

SEQ ID NO: 1009210 - DNA, 33 bp, Homo sapien
ttaggacatgttggcattgagatgtcaaattgt

SEQ ID NO: 1009211 - DNA, 33 bp, Homo sapien
agagagctaagaagtaagcatttcactaccttt

SEQ ID NO: 1009212 - DNA, 33 bp, Homo sapien
agagagctaagaagtaggcatttcactaccttt

SEQ ID NO: 1009213 - DNA, 33 bp, Homo sapien
actctagggtattgctcactcctattttacaga

SEQ ID NO: 1009214 - DNA, 33 bp, Homo sapien
actctagggtattgcttactcctattttacaga

SEQ ID NO: 1009215 - DNA, 33 bp, Homo sapien
tgcttccaaaactacactgatgctatttcctaa

SEQ ID NO: 1009216 - DNA, 33 bp, Homo sapien
tgcttccaaaactacattgatgctatttcctaa

SEQ ID NO: 1009217 - DNA, 33 bp, Homo sapien
tgaaccaattacttcaatacagtttccagaaat

SEQ ID NO: 1009218 - DNA, 33 bp, Homo sapien
tgaaccaattacttcagtacagtttccagaaat

SEQ ID NO: 1009219 - DNA, 33 bp, Homo sapien
attggatgatgacaacagagaccatggggctga

SEQ ID NO: 1009220 - DNA, 33 bp, Homo sapien
attggatgatgacaacggagaccatggggctga

SEQ ID NO: 1009221 - DNA, 33 bp, Homo sapien
aatatagctgggtggacgattagtatataaaac

SEQ ID NO: 1009222 - DNA, 33 bp, Homo sapien
aatatagctgggtggatgattagtatataaaac

SEQ ID NO: 1009223 - DNA, 33 bp, Homo sapien
gctctggttgcagagaaaaaaagttcagttaaa

SEQ ID NO: 1009224 - DNA, 33 bp, Homo sapien
gctctggttgcagagagaaaaagttcagttaaa

SEQ ID NO: 1009225 - DNA, 33 bp, Homo sapien
atagtcttgtggttacccaactacagtctttgg

SEQ ID NO: 1009226 - DNA, 33 bp, Homo sapien
atagtcttgtggttactcaactacagtctttgg

SEQ ID NO: 1009227 - DNA, 33 bp, Homo sapien
aaacagataaatgacactgcaatacaatgatta

SEQ ID NO: 1009228 - DNA, 33 bp, Homo sapien
aaacagataaatgacagtgcaatacaatgatta

SEQ ID NO: 1009229 - DNA, 33 bp, Homo sapien
ctgttctaagaaaacccgattttgtgatttggg

SEQ ID NO: 1009230 - DNA, 33 bp, Homo sapien
ctgttctaagaaaacctgattttgtgatttggg

SEQ ID NO: 1009231 - DNA, 33 bp, Homo sapien
gctgctgtagttcagggactcaggggctgtcac

SEQ ID NO: 1009232 - DNA, 33 bp, Homo sapien
gctgctgtagttcaggtactcaggggctgtcac

SEQ ID NO: 1009233 - DNA, 33 bp, Homo sapien
cagagcccagccttaactgagtcatgtttccta

SEQ ID NO: 1009234 - DNA, 33 bp, Homo sapien
cagagcccagccttaagtgagtcatgtttccta

SEQ ID NO: 1009235 - DNA, 33 bp, Homo sapien
aaatcttcttttgggcaaacgagttcacttttc

SEQ ID NO: 1009236 - DNA, 33 bp, Homo sapien
aaatcttcttttgggcgaacgagttcacttttc

SEQ ID NO: 1009237 - DNA, 33 bp, Homo sapien
aatccacatggctttacgtaatcccttccccct

SEQ ID NO: 1009238 - DNA, 33 bp, Homo sapien
aatccacatggctttatgtaatcccttccccct

SEQ ID NO: 1009239 - DNA, 33 bp, Homo sapien
gctctcaggttctggacgcttctagcattcttt

SEQ ID NO: 1009240 - DNA, 33 bp, Homo sapien
gctctcaggttctggaggcttctagcattcttt

SEQ ID NO: 1009241 - DNA, 33 bp, Homo sapien
aaattctgacattgtaccaagtgcaaacctact

SEQ ID NO: 1009242 - DNA, 33 bp, Homo sapien
aaattctgacattgtagcaagtgcaaacctact

SEQ ID NO: 1009243 - DNA, 33 bp, Homo sapien
cctaaccagcctcaggaactttgatctgtaaat

SEQ ID NO: 1009244 - DNA, 33 bp, Homo sapien
cctaaccagcctcaggtactttgatctgtaaat

SEQ ID NO: 1009245 - DNA, 33 bp, Homo sapien
cctctgtgttgttcaagggttgagtgtatatca

SEQ ID NO: 1009246 - DNA, 33 bp, Homo sapien
cctctgtgttgttcaatggttgagtgtatatca

SEQ ID NO: 1009247 - DNA, 33 bp, Homo sapien
cacaactctgaaaacaatcccttcactaatctc

SEQ ID NO: 1009248 - DNA, 33 bp, Homo sapien
cacaactctgaaaacagtcccttcactaatctc

SEQ ID NO: 1009249 - DNA, 33 bp, Homo sapien
acccagaggctaacagcagacaaggtcttccct

SEQ ID NO: 1009250 - DNA, 33 bp, Homo sapien
acccagaggctaacagtagacaaggtcttccct

SEQ ID NO: 1009251 - DNA, 33 bp, Homo sapien
attatcaccattcatacctcattttctggggtt

SEQ ID NO: 1009252 - DNA, 33 bp, Homo sapien
attatcaccattcatatctcattttctggggtt

SEQ ID NO: 1009253 - DNA, 33 bp, Homo sapien
attttctggggttaccaaagttctgagaaaaat

SEQ ID NO: 1009254 - DNA, 33 bp, Homo sapien
attttctggggttaccgaagttctgagaaaaat

SEQ ID NO: 1009255 - DNA, 33 bp, Homo sapien
ctcattcttacttcctaacagaaccctaacttt

SEQ ID NO: 1009256 - DNA, 33 bp, Homo sapien
ctcattcttacttcctgacagaaccctaacttt

SEQ ID NO: 1009257 - DNA, 33 bp, Homo sapien
ttcaccatgcaaaaaacgtgtgttgtggcttac

SEQ ID NO: 1009258 - DNA, 33 bp, Homo sapien
ttcaccatgcaaaaaatgtgtgttgtggcttac

SEQ ID NO: 1009259 - DNA, 33 bp, Homo sapien
tttaattgctggcaaaagtactctagaacaata

SEQ ID NO: 1009260 - DNA, 33 bp, Homo sapien
tttaattgctggcaaaggtactctagaacaata

SEQ ID NO: 1009261 - DNA, 33 bp, Homo sapien
aaatgccctgtaaacactgaaaagccatatact

SEQ ID NO: 1009262 - DNA, 33 bp, Homo sapien
aaatgccctgtaaacattgaaaagccatatact

SEQ ID NO: 1009263 - DNA, 33 bp, Homo sapien
ttccatcatcattgaaacctggagagtttagag

SEQ ID NO: 1009264 - DNA, 33 bp, Homo sapien
ttccatcatcattgaaccctggagagtttagag

SEQ ID NO: 1009265 - DNA, 33 bp, Homo sapien
aagatagatgatacaccgagatacatttggact

SEQ ID NO: 1009266 - DNA, 33 bp, Homo sapien
aagatagatgatacactgagatacatttggact

SEQ ID NO: 1009267 - DNA, 33 bp, Homo sapien
ggctctgtcagagtgaaggtctagagctgaagg

SEQ ID NO: 1009268 - DNA, 33 bp, Homo sapien
ggctctgtcagagtgacggtctagagctgaagg

SEQ ID NO: 1009269 - DNA, 33 bp, Homo sapien; identical to SEQ ID NO: 1009267

SEQ ID NO: 1009270 - DNA, 33 bp, Homo sapien; identical to SEQ ID NO: 1009268

SEQ ID NO: 1009271 - DNA, 33 bp, Homo sapien
gagatgcttcaagttacaaaacagctcatctct

SEQ ID NO: 1009272 - DNA, 33 bp, Homo sapien
gagatgcttcaagttagaaaacagctcatctct

SEQ ID NO: 1009273 - DNA, 33 bp, Homo sapien
gatcattactaagaaaaaactgccaatttgctt

SEQ ID NO: 1009274 - DNA, 33 bp, Homo sapien
gatcattactaagaaagaactgccaatttgctt

SEQ ID NO: 1009275 - DNA, 33 bp, Homo sapien
ccagctcaggtttaggaaacacagaaactacac

SEQ ID NO: 1009276 - DNA, 33 bp, Homo sapien
ccagctcaggtttagggaacacagaaactacac

SEQ ID NO: 1009277 - DNA, 33 bp, Homo sapien
aggaccctttcaaggacatcagaaagctaaact

SEQ ID NO: 1009278 - DNA, 33 bp, Homo sapien
aggaccctttcaaggagatcagaaagctaaact

SEQ ID NO: 1009279 - DNA, 33 bp, Homo sapien
cttcttacaaaaaacaaagagtgtcggaaaagt

SEQ ID NO: 1009280 - DNA, 33 bp, Homo sapien
cttcttacaaaaaacacagagtgtcggaaaagt

SEQ ID NO: 1009281 - DNA, 33 bp, Homo sapien
gtgtcggaaaagttcacactcaaggtgactgga

SEQ ID NO: 1009282 - DNA, 33 bp, Homo sapien
gtgtcggaaaagttcatactcaaggtgactgga

SEQ ID NO: 1009283 - DNA, 33 bp, Homo sapien
ctggatgacttgagcactgaggattaaagtatg

SEQ ID NO: 1009284 - DNA, 33 bp, Homo sapien
ctggatgacttgagcattgaggattaaagtatg

SEQ ID NO: 1009285 - DNA, 33 bp, Homo sapien
gattcctggtaaaacacggacatattctgttca

SEQ ID NO: 1009286 - DNA, 33 bp, Homo sapien
gattcctggtaaaacagggacatattctgttca

SEQ ID NO: 1009287 - DNA, 33 bp, Homo sapien
aagtcaataatgggaacgtcagcatcggaacca

SEQ ID NO: 1009288 - DNA, 33 bp, Homo sapien
aagtcaataatgggaatgtcagcatcggaacca

SEQ ID NO: 1009289 - DNA, 33 bp, Homo sapien
atgtaccagccttggaccttaaaaataaaacaa

SEQ ID NO: 1009290 - DNA, 33 bp, Homo sapien
atgtaccagccttggagcttaaaaataaaacaa

SEQ ID NO: 1009291 - DNA, 33 bp, Homo sapien
attaatccccccagacacttacattcaccacat

SEQ ID NO: 1009292 - DNA, 33 bp, Homo sapien
attaatccccccagacgcttacattcaccacat

SEQ ID NO: 1009293 - DNA, 33 bp, Homo sapien
gtccataaggttggatcagcaggatgctagggg

SEQ ID NO: 1009294 - DNA, 33 bp, Homo sapien
gtccataaggttggatgagcaggatgctagggg

SEQ ID NO: 1009295 - DNA, 33 bp, Homo sapien
gttagccacagccgaacctatgctcattctcaa

SEQ ID NO: 1009296 - DNA, 33 bp, Homo sapien
gttagccacagccgaatctatgctcattctcaa

SEQ ID NO: 1009297 - DNA, 33 bp, Homo sapien
ttcattcttttcgtacaagtttctgccaaagga

SEQ ID NO: 1009298 - DNA, 33 bp, Homo sapien
ttcattcttttcgtaccagtttctgccaaagga

SEQ ID NO: 1009299 - DNA, 33 bp, Homo sapien
cgaggtctctgtcaacacagcccccagagccaa

SEQ ID NO: 1009300 - DNA, 33 bp, Homo sapien
cgaggtctctgtcaacgcagcccccagagccaa

SEQ ID NO: 1009301 - DNA, 33 bp, Homo sapien
atctgggaagggggaagtgtgtgaagaaagagt

SEQ ID NO: 1009302 - DNA, 33 bp, Homo sapien
atctgggaagggggaattgtgtgaagaaagagt

SEQ ID NO: 1009303 - DNA, 33 bp, Homo sapien
gaagctttacaaactacggtggtgatgtccagt

SEQ ID NO: 1009304 - DNA, 33 bp, Homo sapien
gaagctttacaaactatggtggtgatgtccagt

SEQ ID NO: 1009305 - DNA, 33 bp, Homo sapien
aaaacggtgcaatgaacgcttcttccagttctg

SEQ ID NO: 1009306 - DNA, 33 bp, Homo sapien
aaaacggtgcaatgaatgcttcttccagttctg

SEQ ID NO: 1009307 - DNA, 33 bp, Homo sapien
ctcatattttcttgtaaataacacacgggtctg

SEQ ID NO: 1009308 - DNA, 33 bp, Homo sapien
ctcatattttcttgtagataacacacgggtctg

SEQ ID NO: 1009309 - DNA, 33 bp, Homo sapien
aattgtttaaatgttacggcagctttaacatgt

SEQ ID NO: 1009310 - DNA, 33 bp, Homo sapien
aattgtttaaatgttatggcagctttaacatgt

SEQ ID NO: 1009311 - DNA, 33 bp, Homo sapien
aaagacgtgaaccctagacagtatcagcacttt

SEQ ID NO: 1009312 - DNA, 33 bp, Homo sapien
aaagacgtgaaccctatacagtatcagcacttt

SEQ ID NO: 1009313 - DNA, 33 bp, Homo sapien
gtgcctcagtttaccaatcaagccattctgcct

SEQ ID NO: 1009314 - DNA, 33 bp, Homo sapien
gtgcctcagtttaccagtcaagccattctgcct

SEQ ID NO: 1009315 - DNA, 33 bp, Homo sapien
ccttcaatgcagaggaaaactcaactgagcccc

SEQ ID NO: 1009316 - DNA, 33 bp, Homo sapien
ccttcaatgcagaggagaactcaactgagcccc

SEQ ID NO: 1009317 - DNA, 33 bp, Homo sapien
tgaggatagattcaaacaaagagaaacccatga

SEQ ID NO: 1009318 - DNA, 33 bp, Homo sapien
tgaggatagattcaaagaaagagaaacccatga

SEQ ID NO: 1009319 - DNA, 33 bp, Homo sapien
tctgttggcatcttagaagggacaaggagcaga

SEQ ID NO: 1009320 - DNA, 33 bp, Homo sapien
tctgttggcatcttaggagggacaaggagcaga

SEQ ID NO: 1009321 - DNA, 33 bp, Homo sapien
acaggagagctttaaacgaagagtaggttctcc

SEQ ID NO: 1009322 - DNA, 33 bp, Homo sapien
acaggagagctttaaatgaagagtaggttctcc

SEQ ID NO: 1009323 - DNA, 33 bp, Homo sapien
tgcagtagtctctgacaggtttcctgattcttg

SEQ ID NO: 1009324 - DNA, 33 bp, Homo sapien
tgcagtagtctctgacgggtttcctgattcttg

SEQ ID NO: 1009325 - DNA, 33 bp, Homo sapien
tacatccttgaaaaaaccacaataactaaaata

SEQ ID NO: 1009326 - DNA, 33 bp, Homo sapien
tacatccttgaaaaaatcacaataactaaaata

SEQ ID NO: 1009327 - DNA, 33 bp, Homo sapien
gaatctgcaggagaaaatatctgggggtactag

SEQ ID NO: 1009328 - DNA, 33 bp, Homo sapien
gaatctgcaggagaaagtatctgggggtactag

SEQ ID NO: 1009329 - DNA, 33 bp, Homo sapien
ttgctcccagtgactacaggcaaactggttccc

SEQ ID NO: 1009330 - DNA, 33 bp, Homo sapien
ttgctcccagtgactagaggcaaactggttccc

SEQ ID NO: 1009331 - DNA, 33 bp, Homo sapien
tgtcagagtgagtaaacatctctttgaaaacaa

SEQ ID NO: 1009332 - DNA, 33 bp, Homo sapien
tgtcagagtgagtaaagatctctttgaaaacaa

SEQ ID NO: 1009333 - DNA, 33 bp, Homo sapien
gaggatataatgatcaaattggatgaggttccc

SEQ ID NO: 1009334 - DNA, 33 bp, Homo sapien
gaggatataatgatcagattggatgaggttccc

SEQ ID NO: 1009335 - DNA, 33 bp, Homo sapien
attactacataaactaactcaaatttagaggct

SEQ ID NO: 1009336 - DNA, 33 bp, Homo sapien
attactacataaactatctcaaatttagaggct

SEQ ID NO: 1009337 - DNA, 33 bp, Homo sapien
cttgagcttattccaaagccaggatccttttct

SEQ ID NO: 1009338 - DNA, 33 bp, Homo sapien
cttgagcttattccaaggccaggatccttttct

SEQ ID NO: 1009339 - DNA, 33 bp, Homo sapien
accaataagaaaggcacataacagtaagaaata

SEQ ID NO: 1009340 - DNA, 33 bp, Homo sapien
accaataagaaaggcatataacagtaagaaata

SEQ ID NO: 1009341 - DNA, 33 bp, Homo sapien
tctttgtcacatattaacatcttctgcacacta

SEQ ID NO: 1009342 - DNA, 33 bp, Homo sapien
tctttgtcacatattagcatcttctgcacacta

SEQ ID NO: 1009343 - DNA, 33 bp, Homo sapien
tttaagttcccgggcaatctcatgttctgtggt

SEQ ID NO: 1009344 - DNA, 33 bp, Homo sapien
tttaagttcccgggcagtctcatgttctgtggt

SEQ ID NO: 1009345 - DNA, 33 bp, Homo sapien
atgaaatgcagagtgcaaagtgtagagattaga

SEQ ID NO: 1009346 - DNA, 33 bp, Homo sapien
atgaaatgcagagtgcgaagtgtagagattaga

SEQ ID NO: 1009347 - DNA, 33 bp, Homo sapien
aggggagtgacaaggtaaagtctgtatttttga

SEQ ID NO: 1009348 - DNA, 33 bp, Homo sapien
aggggagtgacaaggtgaagtctgtatttttga

SEQ ID NO: 1009349 - DNA, 33 bp, Homo sapien
cagcatggtcagagaaagcaattgggcctgagg

SEQ ID NO: 1009350 - DNA, 33 bp, Homo sapien
cagcatggtcagagaatgcaattgggcctgagg

SEQ ID NO: 1009351 - DNA, 33 bp, Homo sapien
ccaggtgctagggttaagttttttgtatgtctt

SEQ ID NO: 1009352 - DNA, 33 bp, Homo sapien
ccaggtgctagggttacgttttttgtatgtctt

SEQ ID NO: 1009353 - DNA, 33 bp, Homo sapien
agagttttagctatatcaaaccaagtaagagtg

SEQ ID NO: 1009354 - DNA, 33 bp, Homo sapien
agagttttagctatatgaaaccaagtaagagtg

SEQ ID NO: 1009355 - DNA, 33 bp, Homo sapien
tgttcattcctttgtccatttaacaaacattta

SEQ ID NO: 1009356 - DNA, 33 bp, Homo sapien
tgttcattcctttgtctatttaacaaacattta

SEQ ID NO: 1009357 - DNA, 33 bp, Homo sapien
ataggtgaagaactgacattgtgagggttgaag

SEQ ID NO: 1009358 - DNA, 33 bp, Homo sapien
ataggtgaagaactgagattgtgagggttgaag

SEQ ID NO: 1009359 - DNA, 33 bp, Homo sapien
aacttagggccttgccacagggacacaacatct

SEQ ID NO: 1009360 - DNA, 33 bp, Homo sapien
aacttagggccttgcctcagggacacaacatct

SEQ ID NO: 1009361 - DNA, 33 bp, Homo sapien
actatagaacaagttacgcatcgtttcaaaata

SEQ ID NO: 1009362 - DNA, 33 bp, Homo sapien
actatagaacaagttatgcatcgtttcaaaata

SEQ ID NO: 1009363 - DNA, 33 bp, Homo sapien
tgcaccccaggtcacactgtaggtactcaaaag

SEQ ID NO: 1009364 - DNA, 33 bp, Homo sapien
tgcaccccaggtcacattgtaggtactcaaaag

SEQ ID NO: 1009365 - DNA, 33 bp, Homo sapien
attaagttcaacacaacttcctggctttcttga

SEQ ID NO: 1009366 - DNA, 33 bp, Homo sapien
attaagttcaacacaatttcctggctttcttga

SEQ ID NO: 1009367 - DNA, 33 bp, Homo sapien
agggtgatagttccatcatcagttcagtgtcca

SEQ ID NO: 1009368 - DNA, 33 bp, Homo sapien
agggtgatagttccattatcagttcagtgtcca

SEQ ID NO: 1009369 - DNA, 33 bp, Homo sapien
gccgttgacaattaaaacataaagaagctagtc

SEQ ID NO: 1009370 - DNA, 33 bp, Homo sapien
gccgttgacaattaaagcataaagaagctagtc

SEQ ID NO: 1009371 - DNA, 33 bp, Homo sapien
gcatgcagatattcccaaaagcggactaaacct

SEQ ID NO: 1009372 - DNA, 33 bp, Homo sapien
gcatgcagatattcccgaaagcggactaaacct

SEQ ID NO: 1009373 - DNA, 33 bp, Homo sapien
atgtagatgttcatccaacaagcttttccccat

SEQ ID NO: 1009374 - DNA, 33 bp, Homo sapien
atgtagatgttcatccgacaagcttttccccat

SEQ ID NO: 1009375 - DNA, 33 bp, Homo sapien
atgataaactgctggaaacacacatatcagtaa

SEQ ID NO: 1009376 - DNA, 33 bp, Homo sapien
atgataaactgctggagacacacatatcagtaa

SEQ ID NO: 1009377 - DNA, 33 bp, Homo sapien
atgagccaatgataagaaatattaggaaacaga

SEQ ID NO: 1009378 - DNA, 33 bp, Homo sapien
atgagccaatgataaggaatattaggaaacaga

SEQ ID NO: 1009379 - DNA, 33 bp, Homo sapien
agctaatacacacaaaatctgattcatctttgt

SEQ ID NO: 1009380 - DNA, 33 bp, Homo sapien
agctaatacacacaaagtctgattcatctttgt

SEQ ID NO: 1009381 - DNA, 33 bp, Homo sapien
ttagtaagatggaaagcagaaagatgttaaata

SEQ ID NO: 1009382 - DNA, 33 bp, Homo sapien
ttagtaagatggaaagtagaaagatgttaaata

SEQ ID NO: 1009383 - DNA, 33 bp, Homo sapien
atctgagcaatgtacactcatatcttccccagg

SEQ ID NO: 1009384 - DNA, 33 bp, Homo sapien
atctgagcaatgtacagtcatatcttccccagg

SEQ ID NO: 1009385 - DNA, 33 bp, Homo sapien
agtatcaatctttatacgcagtcagtgtttaca

SEQ ID NO: 1009386 - DNA, 33 bp, Homo sapien
agtatcaatctttatatgcagtcagtgtttaca

SEQ ID NO: 1009387 - DNA, 33 bp, Homo sapien
agtgcttcaacttagcaaatggtgatataatga

SEQ ID NO: 1009388 - DNA, 33 bp, Homo sapien
agtgcttcaacttagcgaatggtgatataatga

SEQ ID NO: 1009389 - DNA, 33 bp, Homo sapien
ccttttatattttataccttagactgcctgaag

SEQ ID NO: 1009390 - DNA, 33 bp, Homo sapien
ccttttatattttatagcttagactgcctgaag

SEQ ID NO: 1009391 - DNA, 33 bp, Homo sapien
aggcaacatttttgtcacctaatctttctttca

SEQ ID NO: 1009392 - DNA, 33 bp, Homo sapien
aggcaacatttttgtcgcctaatctttctttca

SEQ ID NO: 1009393 - DNA, 33 bp, Homo sapien
tttatggagtctcaaacagacattgcctataaa

SEQ ID NO: 1009394 - DNA, 33 bp, Homo sapien
tttatggagtctcaaatagacattgcctataaa

SEQ ID NO: 1009395 - DNA, 33 bp, Homo sapien
agagcagccatcaaatgagtatttaatatatca

SEQ ID NO: 1009396 - DNA, 33 bp, Homo sapien
agagcagccatcaaattagtatttaatatatca

SEQ ID NO: 1009397 - DNA, 33 bp, Homo sapien
agccctatggcaagaacacactgaccttcagac

SEQ ID NO: 1009398 - DNA, 33 bp, Homo sapien
agccctatggcaagaagacactgaccttcagac

SEQ ID NO: 1009399 - DNA, 33 bp, Homo sapien
cagctcaagtccagcacgaggagagaacaatga

SEQ ID NO: 1009400 - DNA, 33 bp, Homo sapien
cagctcaagtccagcatgaggagagaacaatga

SEQ ID NO: 1009401 - DNA, 33 bp, Homo sapien
tatgctgtgataagagccaaatatctttaaaat

SEQ ID NO: 1009402 - DNA, 33 bp, Homo sapien
tatgctgtgataagaggcaaatatctttaaaat

SEQ ID NO: 1009403 - DNA, 33 bp, Homo sapien
aagtggaccattcttgcattttagaagtttcac

SEQ ID NO: 1009404 - DNA, 33 bp, Homo sapien
aagtggaccattcttggattttagaagtttcac

SEQ ID NO: 1009405 - DNA, 33 bp, Homo sapien
caacagtggaaaaggaaacacatctgggagact

SEQ ID NO: 1009406 - DNA, 33 bp, Homo sapien
caacagtggaaaaggacacacatctgggagact

SEQ ID NO: 1009407 - DNA, 33 bp, Homo sapien
tccaagaaagcagggaccacgggtttatctagc

SEQ ID NO: 1009408 - DNA, 33 bp, Homo sapien
tccaagaaagcagggatcacgggtttatctagc

SEQ ID NO: 1009409 - DNA, 33 bp, Homo sapien
aatctttccttgataacaatgtgacaaggagat

SEQ ID NO: 1009410 - DNA, 33 bp, Homo sapien
aatctttccttgataataatgtgacaaggagat

SEQ ID NO: 1009411 - DNA, 33 bp, Homo sapien
catcggtgctagcttaaaatttaaactgtcaaa

SEQ ID NO: 1009412 - DNA, 33 bp, Homo sapien
catcggtgctagcttacaatttaaactgtcaaa

SEQ ID NO: 1009413 - DNA, 33 bp, Homo sapien
aggaggaattttctaccgcatatgatttcttta

SEQ ID NO: 1009414 - DNA, 33 bp, Homo sapien
aggaggaattttctactgcatatgatttcttta

SEQ ID NO: 1009415 - DNA, 33 bp, Homo sapien
gcacctactgtaataaacgtggcaacatggtag

SEQ ID NO: 1009416 - DNA, 33 bp, Homo sapien
gcacctactgtaataagcgtggcaacatggtag

SEQ ID NO: 1009417 - DNA, 33 bp, Homo sapien
tctgggcataaagagccaagaaccaataagaat

SEQ ID NO: 1009418 - DNA, 33 bp, Homo sapien
tctgggcataaagagcgaagaaccaataagaat

SEQ ID NO: 1009419 - DNA, 33 bp, Homo sapien
tcatacactatgctagaccccacaaagttaatt

SEQ ID NO: 1009420 - DNA, 33 bp, Homo sapien
tcatacactatgctagcccccacaaagttaatt

SEQ ID NO: 1009421 - DNA, 33 bp, Homo sapien
atagcatgatttttaaaagtactcagtccttct

SEQ ID NO: 1009422 - DNA, 33 bp, Homo sapien
atagcatgatttttaagagtactcagtccttct

SEQ ID NO: 1009423 - DNA, 33 bp, Homo sapien
agaaacaagctctcatcagtttgattgtgagtt

SEQ ID NO: 1009424 - DNA, 33 bp, Homo sapien
agaaacaagctctcattagtttgattgtgagtt

SEQ ID NO: 1009425 - DNA, 33 bp, Homo sapien
gacacacagcagtcctaaagaccaataaaggta

SEQ ID NO: 1009426 - DNA, 33 bp, Homo sapien
gacacacagcagtcctgaagaccaataaaggta

SEQ ID NO: 1009427 - DNA, 33 bp, Homo sapien
cccacgagacagtcaacagacactggcagggac

SEQ ID NO: 1009428 - DNA, 33 bp, Homo sapien
cccacgagacagtcaatagacactggcagggac

SEQ ID NO: 1009429 - DNA, 33 bp, Homo sapien
gtgcatttagctggaaaagaagggagcagacat

SEQ ID NO: 1009430 - DNA, 33 bp, Homo sapien
gtgcatttagctggaagagaagggagcagacat

SEQ ID NO: 1009431 - DNA, 33 bp, Homo sapien
atctgaatccatatcactcctgagtacagagag

SEQ ID NO: 1009432 - DNA, 33 bp, Homo sapien
atctgaatccatatcattcctgagtacagagag

SEQ ID NO: 1009433 - DNA, 33 bp, Homo sapien
acgtaagtagaagcaaataatcttcagagcaca

SEQ ID NO: 1009434 - DNA, 33 bp, Homo sapien
acgtaagtagaagcaagtaatcttcagagcaca

SEQ ID NO: 1009435 - DNA, 33 bp, Homo sapien
gagattctagccattacaaatctgtgtgttgtt

SEQ ID NO: 1009436 - DNA, 33 bp, Homo sapien
gagattctagccattataaatctgtgtgttgtt

SEQ ID NO: 1009437 - DNA, 33 bp, Homo sapien
tacgtcaatacgcatactacaatggttgggcac

SEQ ID NO: 1009438 - DNA, 33 bp, Homo sapien
tacgtcaatacgcatattacaatggttgggcac

SEQ ID NO: 1009439 - DNA, 33 bp, Homo sapien
atctaaagaatgtaacacttgcagcaaaatagt

SEQ ID NO: 1009440 - DNA, 33 bp, Homo sapien
atctaaagaatgtaacgcttgcagcaaaatagt

SEQ ID NO: 1009441 - DNA, 33 bp, Homo sapien
ctaatttgcaaatccaatgatatggtcaaatga

SEQ ID NO: 1009442 - DNA, 33 bp, Homo sapien
ctaatttgcaaatccagtgatatggtcaaatga

SEQ ID NO: 1009443 - DNA, 33 bp, Homo sapien
agaatttcattaagcaaaaagtgcaaaggcaag

SEQ ID NO: 1009444 - DNA, 33 bp, Homo sapien
agaatttcattaagcagaaagtgcaaaggcaag

SEQ ID NO: 1009445 - DNA, 33 bp, Homo sapien
ctgaggttattttcaccctcctgtcagattctg

SEQ ID NO: 1009446 - DNA, 33 bp, Homo sapien
ctgaggttattttcactctcctgtcagattctg

SEQ ID NO: 1009447 - DNA, 33 bp, Homo sapien
taaattaacaacaaaactatacttcaaggacat

SEQ ID NO: 1009448 - DNA, 33 bp, Homo sapien
taaattaacaacaaaagtatacttcaaggacat

SEQ ID NO: 1009449 - DNA, 33 bp, Homo sapien
atgagcttaatgtcaaccatattcaagtaattt

SEQ ID NO: 1009450 - DNA, 33 bp, Homo sapien
atgagcttaatgtcaatcatattcaagtaattt

SEQ ID NO: 1009451 - DNA, 33 bp, Homo sapien
tatttaagtgatttcaacaagccaagatgggga

SEQ ID NO: 1009452 - DNA, 33 bp, Homo sapien
tatttaagtgatttcaccaagccaagatgggga

SEQ ID NO: 1009453 - DNA, 33 bp, Homo sapien
tcaaggatgcaggggcacccaaattatggtaag

SEQ ID NO: 1009454 - DNA, 33 bp, Homo sapien
tcaaggatgcaggggcgcccaaattatggtaag

SEQ ID NO: 1009455 - DNA, 33 bp, Homo sapien
cccggctaacctcatacgttttaatcccaaatt

SEQ ID NO: 1009456 - DNA, 33 bp, Homo sapien
cccggctaacctcatatgttttaatcccaaatt

SEQ ID NO: 1009457 - DNA, 33 bp, Homo sapien
cttttccacagcaatacagagttagaagaaacc

SEQ ID NO: 1009458 - DNA, 33 bp, Homo sapien
cttttccacagcaatatagagttagaagaaacc

SEQ ID NO: 1009459 - DNA, 33 bp, Homo sapien
ttaaaggcctcagaagccccagaatggttctgg

SEQ ID NO: 1009460 - DNA, 33 bp, Homo sapien
ttaaaggcctcagaagtcccagaatggttctgg

SEQ ID NO: 1009461 - DNA, 33 bp, Homo sapien
gatgattttaagacaacgtaaactgtcacctta

SEQ ID NO: 1009462 - DNA, 33 bp, Homo sapien
gatgattttaagacaatgtaaactgtcacctta

SEQ ID NO: 1009463 - DNA, 33 bp, Homo sapien
aattgcagaagggcacaatgaaacggagagccc

SEQ ID NO: 1009464 - DNA, 33 bp, Homo sapien
aattgcagaagggcacgatgaaacggagagccc

SEQ ID NO: 1009465 - DNA, 33 bp, Homo sapien
cggccatacggatcaagggaaatgagagccaat

SEQ ID NO: 1009466 - DNA, 33 bp, Homo sapien
cggccatacggatcaatggaaatgagagccaat

SEQ ID NO: 1009467 - DNA, 33 bp, Homo sapien
ttgtattattacttcacaaggctaaccagccag

SEQ ID NO: 1009468 - DNA, 33 bp, Homo sapien
ttgtattattacttcataaggctaaccagccag

SEQ ID NO: 1009469 - DNA, 33 bp, Homo sapien
aaaacagttaagactccaacctggacttccagc

SEQ ID NO: 1009470 - DNA, 33 bp, Homo sapien
aaaacagttaagactctaacctggacttccagc

SEQ ID NO: 1009471 - DNA, 33 bp, Homo sapien
tttccgcggcaatcaacagtgaagatgtattta

SEQ ID NO: 1009472 - DNA, 33 bp, Homo sapien
tttccgcggcaatcaagagtgaagatgtattta

SEQ ID NO: 1009473 - DNA, 33 bp, Homo sapien
ctgcttttttcacataagtttttcaatcaccct

SEQ ID NO: 1009474 - DNA, 33 bp, Homo sapien
ctgcttttttcacatacgtttttcaatcaccct

SEQ ID NO: 1009475 - DNA, 33 bp, Homo sapien
aaagagaaaaatgtgcaaacgcatacaaagttg

SEQ ID NO: 1009476 - DNA, 33 bp, Homo sapien
aaagagaaaaatgtgcgaacgcatacaaagttg

SEQ ID NO: 1009477 - DNA, 33 bp, Homo sapien
cacccctccaattgtcaaacacattctcctaga

SEQ ID NO: 1009478 - DNA, 33 bp, Homo sapien
cacccctccaattgtcgaacacattctcctaga

SEQ ID NO: 1009479 - DNA, 33 bp, Homo sapien
catagagcacttgggacgatgagatccctttca

SEQ ID NO: 1009480 - DNA, 33 bp, Homo sapien
catagagcacttgggaggatgagatccctttca

SEQ ID NO: 1009481 - DNA, 33 bp, Homo sapien
agatgtgatactgctagggaaggcagcataatt

SEQ ID NO: 1009482 - DNA, 33 bp, Homo sapien
agatgtgatactgctatggaaggcagcataatt

SEQ ID NO: 1009483 - DNA, 33 bp, Homo sapien
accacctattcatacactggtaggtacttgtaa

SEQ ID NO: 1009484 - DNA, 33 bp, Homo sapien
accacctattcatacattggtaggtacttgtaa

SEQ ID NO: 1009485 - DNA, 33 bp, Homo sapien
attaatatcagtatgcaaactttagattctaca

SEQ ID NO: 1009486 - DNA, 33 bp, Homo sapien
attaatatcagtatgcgaactttagattctaca

SEQ ID NO: 1009487 - DNA, 33 bp, Homo sapien
ccaacagaatcggccaactttacttgtaaacta

SEQ ID NO: 1009488 - DNA, 33 bp, Homo sapien
ccaacagaatcggccagctttacttgtaaacta

SEQ ID NO: 1009489 - DNA, 33 bp, Homo sapien
tgttatgtttaaaacacaaatggctcccttctg

SEQ ID NO: 1009490 - DNA, 33 bp, Homo sapien
tgttatgtttaaaacagaaatggctcccttctg

SEQ ID NO: 1009491 - DNA, 33 bp, Homo sapien
actactccttaaaatgccatactactctagagt

SEQ ID NO: 1009492 - DNA, 33 bp, Homo sapien
actactccttaaaatgtcatactactctagagt

SEQ ID NO: 1009493 - DNA, 33 bp, Homo sapien
ctttcagctggcttaaaataataacaaaactaa

SEQ ID NO: 1009494 - DNA, 33 bp, Homo sapien
ctttcagctggcttaacataataacaaaactaa

SEQ ID NO: 1009495 - DNA, 33 bp, Homo sapien
ttgttgtcatgtaaaacgttcactaacctgtta

SEQ ID NO: 1009496 - DNA, 33 bp, Homo sapien
ttgttgtcatgtaaaatgttcactaacctgtta

SEQ ID NO: 1009497 - DNA, 33 bp, Homo sapien
gcgaattatttctacacgcataacaaaccaggc

SEQ ID NO: 1009498 - DNA, 33 bp, Homo sapien
gcgaattatttctacatgcataacaaaccaggc

SEQ ID NO: 1009499 - DNA, 33 bp, Homo sapien
gagctcagtttgcctacactgggtagcattttg

SEQ ID NO: 1009500 - DNA, 33 bp, Homo sapien
gagctcagtttgcctatactgggtagcattttg

SEQ ID NO: 1009501 - DNA, 33 bp, Homo sapien
ttatgtttcatctaggaatggtgaatgcagcag

SEQ ID NO: 1009502 - DNA, 33 bp, Homo sapien
ttatgtttcatctagggatggtgaatgcagcag

SEQ ID NO: 1009503 - DNA, 33 bp, Homo sapien
aatataaaactgataaaattcctcgttcttaga

SEQ ID NO: 1009504 - DNA, 33 bp, Homo sapien
aatataaaactgataacattcctcgttcttaga

SEQ ID NO: 1009505 - DNA, 33 bp, Homo sapien
tgttttaaagaatctacgagaactgatacctaa

SEQ ID NO: 1009506 - DNA, 33 bp, Homo sapien
tgttttaaagaatctatgagaactgatacctaa

SEQ ID NO: 1009507 - DNA, 33 bp, Homo sapien
ggtagagaattgaagacagagcataattttagt

SEQ ID NO: 1009508 - DNA, 33 bp, Homo sapien
ggtagagaattgaagatagagcataattttagt

SEQ ID NO: 1009509 - DNA, 33 bp, Homo sapien
gatttctacaacagaaaatccttcttacttagg

SEQ ID NO: 1009510 - DNA, 33 bp, Homo sapien
gatttctacaacagaatatccttcttacttagg

SEQ ID NO: 1009511 - DNA, 33 bp, Homo sapien
tcaggagatgcttccactgactggtacttcagc

SEQ ID NO: 1009512 - DNA, 33 bp, Homo sapien
tcaggagatgcttccattgactggtacttcagc

SEQ ID NO: 1009513 - DNA, 33 bp, Homo sapien
aaggaaaacatttaaaacatcactgaagtctaa

SEQ ID NO: 1009514 - DNA, 33 bp, Homo sapien
aaggaaaacatttaaagcatcactgaagtctaa

SEQ ID NO: 1009515 - DNA, 33 bp, Homo sapien
caaattacaaaacttaccatgccaacactacaa

SEQ ID NO: 1009516 - DNA, 33 bp, Homo sapien
caaattacaaaacttatcatgccaacactacaa

SEQ ID NO: 1009517 - DNA, 33 bp, Homo sapien
gaaagtagtacagggcactttaggaataggtag

SEQ ID NO: 1009518 - DNA, 33 bp, Homo sapien
gaaagtagtacagggcgctttaggaataggtag

SEQ ID NO: 1009519 - DNA, 33 bp, Homo sapien
tatgttggaacattcaatcagaagtatttattg

SEQ ID NO: 1009520 - DNA, 33 bp, Homo sapien
tatgttggaacattcagtcagaagtatttattg

SEQ ID NO: 1009521 - DNA, 33 bp, Homo sapien
tagaatcctgaacttacgagtatgttgctttat

SEQ ID NO: 1009522 - DNA, 33 bp, Homo sapien
tagaatcctgaacttatgagtatgttgctttat

SEQ ID NO: 1009523 - DNA, 33 bp, Homo sapien
attatttggttttccaacttccataactagaat

SEQ ID NO: 1009524 - DNA, 33 bp, Homo sapien
attatttggttttccagcttccataactagaat

SEQ ID NO: 1009525 - DNA, 33 bp, Homo sapien
gtctgaattgcatacactggcctgtcatggtgg

SEQ ID NO: 1009526 - DNA, 33 bp, Homo sapien
gtctgaattgcatacagtggcctgtcatggtgg

SEQ ID NO: 1009527 - DNA, 33 bp, Homo sapien
tgattacacaagacaaacaagtgatactgatgc

SEQ ID NO: 1009528 - DNA, 33 bp, Homo sapien
tgattacacaagacaagcaagtgatactgatgc

SEQ ID NO: 1009529 - DNA, 33 bp, Homo sapien
caaatccatcctccaaccaaatctcacagataa

SEQ ID NO: 1009530 - DNA, 33 bp, Homo sapien
caaatccatcctccaatcaaatctcacagataa

SEQ ID NO: 1009531 - DNA, 33 bp, Homo sapien
gtcctcttggctcttacaatgcctggtgtttca

SEQ ID NO: 1009532 - DNA, 33 bp, Homo sapien
gtcctcttggctcttataatgcctggtgtttca

SEQ ID NO: 1009533 - DNA, 33 bp, Homo sapien
gcaggtttggcctgtccactttgttggtatacc

SEQ ID NO: 1009534 - DNA, 33 bp, Homo sapien
gcaggtttggcctgtctactttgttggtatacc

SEQ ID NO: 1009535 - DNA, 33 bp, Homo sapien
ccagtgaatctcattacgacttcaccatctttc

SEQ ID NO: 1009536 - DNA, 33 bp, Homo sapien
ccagtgaatctcattatgacttcaccatctttc

SEQ ID NO: 1009537 - DNA, 33 bp, Homo sapien
gaagtttacatagaaaggaaccttcacacagct

SEQ ID NO: 1009538 - DNA, 33 bp, Homo sapien
gaagtttacatagaaatgaaccttcacacagct

SEQ ID NO: 1009539 - DNA, 33 bp, Homo sapien
acacttttcaagcccacagacaaggaccgaagg

SEQ ID NO: 1009540 - DNA, 33 bp, Homo sapien
acacttttcaagcccatagacaaggaccgaagg

SEQ ID NO: 1009541 - DNA, 33 bp, Homo sapien
aatatttggttggtaaaatagagtagaccatca

SEQ ID NO: 1009542 - DNA, 33 bp, Homo sapien
aatatttggttggtaagatagagtagaccatca

SEQ ID NO: 1009543 - DNA, 33 bp, Homo sapien
gaccatcacacagacactgacttaatattctcc

SEQ ID NO: 1009544 - DNA, 33 bp, Homo sapien
gaccatcacacagacattgacttaatattctcc

SEQ ID NO: 1009545 - DNA, 33 bp, Homo sapien
taataactcatatgcaaatctttcctcaaagag

SEQ ID NO: 1009546 - DNA, 33 bp, Homo sapien
taataactcatatgcacatctttcctcaaagag

SEQ ID NO: 1009547 - DNA, 33 bp, Homo sapien
tatggcgtaatttcccaggattattgggtattg

SEQ ID NO: 1009548 - DNA, 33 bp, Homo sapien
tatggcgtaatttcccgggattattgggtattg

SEQ ID NO: 1009549 - DNA, 33 bp, Homo sapien
tgattttcaccatccaccaatgcctgtgacctg

SEQ ID NO: 1009550 - DNA, 33 bp, Homo sapien
tgattttcaccatccagcaatgcctgtgacctg

SEQ ID NO: 1009551 - DNA, 33 bp, Homo sapien
gagattaattttttaacaagtgccgtgatttcc

SEQ ID NO: 1009552 - DNA, 33 bp, Homo sapien
gagattaattttttaataagtgccgtgatttcc

SEQ ID NO: 1009553 - DNA, 33 bp, Homo sapien
atcaagtctccaaatccagggcaacaaactatg

SEQ ID NO: 1009554 - DNA, 33 bp, Homo sapien
atcaagtctccaaatctagggcaacaaactatg

SEQ ID NO: 1009555 - DNA, 33 bp, Homo sapien
gcttttgatgatatgacggtttgattatggaca

SEQ ID NO: 1009556 - DNA, 33 bp, Homo sapien
gcttttgatgatatgatggtttgattatggaca

SEQ ID NO: 1009557 - DNA, 33 bp, Homo sapien
attttataagaaggcacggtgaataccacagtg

SEQ ID NO: 1009558 - DNA, 33 bp, Homo sapien
attttataagaaggcatggtgaataccacagtg

SEQ ID NO: 1009559 - DNA, 33 bp, Homo sapien
cccaaaacaggtataccctgaactgaagagact

SEQ ID NO: 1009560 - DNA, 33 bp, Homo sapien
cccaaaacaggtatactctgaactgaagagact

SEQ ID NO: 1009561 - DNA, 33 bp, Homo sapien
caagaggggtaaacaccgtcaatactcttacaa

SEQ ID NO: 1009562 - DNA, 33 bp, Homo sapien
caagaggggtaaacactgtcaatactcttacaa

SEQ ID NO: 1009563 - DNA, 33 bp, Homo sapien
atgtgtattacagggaaattagataccacaggg

SEQ ID NO: 1009564 - DNA, 33 bp, Homo sapien
atgtgtattacagggagattagataccacaggg

SEQ ID NO: 1009565 - DNA, 33 bp, Homo sapien
ttgtctttttattatgcagttttaagtgctgtt

SEQ ID NO: 1009566 - DNA, 33 bp, Homo sapien
ttgtctttttattatggagttttaagtgctgtt

SEQ ID NO: 1009567 - DNA, 33 bp, Homo sapien
aggagttattgcaaagaccaacagtttgtgaag

SEQ ID NO: 1009568 - DNA, 33 bp, Homo sapien
aggagttattgcaaagtccaacagtttgtgaag

SEQ ID NO: 1009569 - DNA, 33 bp, Homo sapien
gtacagtgagataggcacagaaacagagaaagg

SEQ ID NO: 1009570 - DNA, 33 bp, Homo sapien
gtacagtgagataggctcagaaacagagaaagg

SEQ ID NO: 1009571 - DNA, 33 bp, Homo sapien
tgttcaaccgaaacatgatgaaaacagggaaag

SEQ ID NO: 1009572 - DNA, 33 bp, Homo sapien
tgttcaaccgaaacattatgaaaacagggaaag

SEQ ID NO: 1009573 - DNA, 33 bp, Homo sapien
ccctccaaaggaagagacaatggccagatctac

SEQ ID NO: 1009574 - DNA, 33 bp, Homo sapien
ccctccaaaggaagagtcaatggccagatctac

SEQ ID NO: 1009575 - DNA, 33 bp, Homo sapien
attcatgcccataaaaccacattaaaatataag

SEQ ID NO: 1009576 - DNA, 33 bp, Homo sapien
attcatgcccataaaagcacattaaaatataag

SEQ ID NO: 1009577 - DNA, 33 bp, Homo sapien
cagggcaatgctccaacagagtgaaagaggaag

SEQ ID NO: 1009578 - DNA, 33 bp, Homo sapien
cagggcaatgctccaagagagtgaaagaggaag

SEQ ID NO: 1009579 - DNA, 33 bp, Homo sapien
gtttcacttgtgatataagagcgatgcaaattg

SEQ ID NO: 1009580 - DNA, 33 bp, Homo sapien
gtttcacttgtgatatgagagcgatgcaaattg

SEQ ID NO: 1009581 - DNA, 33 bp, Homo sapien
taacctacgtttgaggaatagcttgctgtataa

SEQ ID NO: 1009582 - DNA, 33 bp, Homo sapien
taacctacgtttgagggatagcttgctgtataa

SEQ ID NO: 1009583 - DNA, 33 bp, Homo sapien
aattttagtggcaattaaaaaaatcgtcttagg

SEQ ID NO: 1009584 - DNA, 33 bp, Homo sapien
aattttagtggcaatttaaaaaatcgtcttagg

SEQ ID NO: 1009585 - DNA, 33 bp, Homo sapien
ctcattcaagctatcactaccactttgatgtca

SEQ ID NO: 1009586 - DNA, 33 bp, Homo sapien
ctcattcaagctatcattaccactttgatgtca

SEQ ID NO: 1009587 - DNA, 33 bp, Homo sapien
agttaccatatagaggaaaaagtcagcagtcaa

SEQ ID NO: 1009588 - DNA, 33 bp, Homo sapien
agttaccatatagagggaaaagtcagcagtcaa

SEQ ID NO: 1009589 - DNA, 33 bp, Homo sapien
tcgttattagctccataaccaaaaatgaaatgt

SEQ ID NO: 1009590 - DNA, 33 bp, Homo sapien
tcgttattagctccatgaccaaaaatgaaatgt

SEQ ID NO: 1009591 - DNA, 33 bp, Homo sapien
acctgaacacggacaacctgacaccctaattcc

SEQ ID NO: 1009592 - DNA, 33 bp, Homo sapien
acctgaacacggacaatctgacaccctaattcc

SEQ ID NO: 1009593 - DNA, 33 bp, Homo sapien
tgtagaggcaggggacacatgggaagtctgtgt

SEQ ID NO: 1009594 - DNA, 33 bp, Homo sapien
tgtagaggcaggggacgcatgggaagtctgtgt

SEQ ID NO: 1009595 - DNA, 33 bp, Homo sapien
ttcacagcaaaattaacaggaaggtacacagac

SEQ ID NO: 1009596 - DNA, 33 bp, Homo sapien
ttcacagcaaaattaagaggaaggtacacagac

SEQ ID NO: 1009597 - DNA, 33 bp, Homo sapien
ttatctggcaaacttacgtccccagtgacacta

SEQ ID NO: 1009598 - DNA, 33 bp, Homo sapien
ttatctggcaaacttatgtccccagtgacacta

SEQ ID NO: 1009599 - DNA, 33 bp, Homo sapien
gtcagaatgagtcagccaaaacgaggttgttct

SEQ ID NO: 1009600 - DNA, 33 bp, Homo sapien
gtcagaatgagtcagcgaaaacgaggttgttct

SEQ ID NO: 1009601 - DNA, 33 bp, Homo sapien
ttggtggtaacctagtcaatcagaatctgcacg

SEQ ID NO: 1009602 - DNA, 33 bp, Homo sapien
ttggtggtaacctagtgaatcagaatctgcacg

SEQ ID NO: 1009603 - DNA, 33 bp, Homo sapien
gcctttttgtttaagcccacgttatattaatat

SEQ ID NO: 1009604 - DNA, 33 bp, Homo sapien
gcctttttgtttaagctcacgttatattaatat

SEQ ID NO: 1009605 - DNA, 33 bp, Homo sapien
taagaaggatactacaatgaaagtcatgatagg

SEQ ID NO: 1009606 - DNA, 33 bp, Homo sapien
taagaaggatactacagtgaaagtcatgatagg

SEQ ID NO: 1009607 - DNA, 33 bp, Homo sapien
aggatgttgattgctgaagaataaacaccaagt

SEQ ID NO: 1009608 - DNA, 33 bp, Homo sapien
aggatgttgattgctggagaataaacaccaagt

SEQ ID NO: 1009609 - DNA, 33 bp, Homo sapien
ctgtagcataccaaccagcctgatgagcagctt

SEQ ID NO: 1009610 - DNA, 33 bp, Homo sapien
ctgtagcataccaaccggcctgatgagcagctt

SEQ ID NO: 1009611 - DNA, 33 bp, Homo sapien
tccaccaatctggaacgcttgaagaaggaactt

SEQ ID NO: 1009612 - DNA, 33 bp, Homo sapien
tccaccaatctggaactcttgaagaaggaactt

SEQ ID NO: 1009613 - DNA, 33 bp, Homo sapien
ctcctcttacttcctgaaacaaagctacatgag

SEQ ID NO: 1009614 - DNA, 33 bp, Homo sapien
ctcctcttacttcctggaacaaagctacatgag

SEQ ID NO: 1009615 - DNA, 33 bp, Homo sapien
tttttttcatgaggaagtaaggttgttattggg

SEQ ID NO: 1009616 - DNA, 33 bp, Homo sapien
tttttttcatgaggaattaaggttgttattggg

SEQ ID NO: 1009617 - DNA, 33 bp, Homo sapien
atagtcccagaaattacacctggcttcttcaca

SEQ ID NO: 1009618 - DNA, 33 bp, Homo sapien
atagtcccagaaattatacctggcttcttcaca

SEQ ID NO: 1009619 - DNA, 33 bp, Homo sapien
aatatcttgaggagaaaaaaatcaggtgatgat

SEQ ID NO: 1009620 - DNA, 33 bp, Homo sapien
aatatcttgaggagaacaaaatcaggtgatgat

SEQ ID NO: 1009621 - DNA, 33 bp, Homo sapien
agcactcctttcacctaaaatttacattcttct

SEQ ID NO: 1009622 - DNA, 33 bp, Homo sapien
agcactcctttcaccttaaatttacattcttct

SEQ ID NO: 1009623 - DNA, 33 bp, Homo sapien
tgctggaagtcctgaaagaggcagcccaatgtg

SEQ ID NO: 1009624 - DNA, 33 bp, Homo sapien
tgctggaagtcctgaaggaggcagcccaatgtg

SEQ ID NO: 1009625 - DNA, 33 bp, Homo sapien
aaaaagattaggccaaaatttcctttcacctct

SEQ ID NO: 1009626 - DNA, 33 bp, Homo sapien
aaaaagattaggccaagatttcctttcacctct

SEQ ID NO: 1009627 - DNA, 33 bp, Homo sapien
agaaagttaaataaggcatatgcaagccacagg

SEQ ID NO: 1009628 - DNA, 33 bp, Homo sapien
agaaagttaaataagggatatgcaagccacagg

SEQ ID NO: 1009629 - DNA, 33 bp, Homo sapien
attcttctatttttagacatctaggttgcttcc

SEQ ID NO: 1009630 - DNA, 33 bp, Homo sapien
attcttctatttttaggcatctaggttgcttcc

SEQ ID NO: 1009631 - DNA, 33 bp, Homo sapien
gtacatattgttgtaaggagcatatggatatat

SEQ ID NO: 1009632 - DNA, 33 bp, Homo sapien
gtacatattgttgtaatgagcatatggatatat

SEQ ID NO: 1009633 - DNA, 33 bp, Homo sapien
tctatctgctttggagaaatgtccatttagatg

SEQ ID NO: 1009634 - DNA, 33 bp, Homo sapien
tctatctgctttggagcaatgtccatttagatg

SEQ ID NO: 1009635 - DNA, 33 bp, Homo sapien
tcaagaaagtaaggccagatgtggtggttcatg

SEQ ID NO: 1009636 - DNA, 33 bp, Homo sapien
tcaagaaagtaaggcccgatgtggtggttcatg

SEQ ID NO: 1009637 - DNA, 33 bp, Homo sapien
tgggaaggtggtgacaataaagataagatcaga

SEQ ID NO: 1009638 - DNA, 33 bp, Homo sapien
tgggaaggtggtgacactaaagataagatcaga

SEQ ID NO: 1009639 - DNA, 33 bp, Homo sapien
actgtcacagtggtaaaaagaaggcagggagaa

SEQ ID NO: 1009640 - DNA, 33 bp, Homo sapien
actgtcacagtggtaagaagaaggcagggagaa

SEQ ID NO: 1009641 - DNA, 33 bp, Homo sapien
actgataatcaagagcccctgtcgaaagaacta

SEQ ID NO: 1009642 - DNA, 33 bp, Homo sapien
actgataatcaagagctcctgtcgaaagaacta

SEQ ID NO: 1009643 - DNA, 33 bp, Homo sapien
ttaatctcgggtgctaggatcactgctacaaac

SEQ ID NO: 1009644 - DNA, 33 bp, Homo sapien
ttaatctcgggtgctatgatcactgctacaaac

SEQ ID NO: 1009645 - DNA, 33 bp, Homo sapien
cctgccttctagcccaaattgtgttcattatgt

SEQ ID NO: 1009646 - DNA, 33 bp, Homo sapien
cctgccttctagcccagattgtgttcattatgt

SEQ ID NO: 1009647 - DNA, 33 bp, Homo sapien
gagagggtagagtttacgtagtcacttgttcca

SEQ ID NO: 1009648 - DNA, 33 bp, Homo sapien
gagagggtagagtttaggtagtcacttgttcca

SEQ ID NO: 1009649 - DNA, 33 bp, Homo sapien
aggctctgttgtagcacgagtgaggcagtaaaa

SEQ ID NO: 1009650 - DNA, 33 bp, Homo sapien
aggctctgttgtagcatgagtgaggcagtaaaa

SEQ ID NO: 1009651 - DNA, 33 bp, Homo sapien
aactacaggaaaataactggctaggaatcttgg

SEQ ID NO: 1009652 - DNA, 33 bp, Homo sapien
aactacaggaaaataattggctaggaatcttgg

SEQ ID NO: 1009653 - DNA, 33 bp, Homo sapien
ctacatacagctgcctcaaattgcaataatatt

SEQ ID NO: 1009654 - DNA, 33 bp, Homo sapien
ctacatacagctgcctgaaattgcaataatatt

SEQ ID NO: 1009655 - DNA, 33 bp, Homo sapien
ccgtgtgaccagttgacattctattgttatgga

SEQ ID NO: 1009656 - DNA, 33 bp, Homo sapien
ccgtgtgaccagttgatattctattgttatgga

SEQ ID NO: 1009657 - DNA, 33 bp, Homo sapien
ttgtctgcctattgggccacatttttgcaaatc

SEQ ID NO: 1009658 - DNA, 33 bp, Homo sapien
ttgtctgcctattgggtcacatttttgcaaatc

SEQ ID NO: 1009659 - DNA, 33 bp, Homo sapien
gcaaatcatatcaaagcccaggacctgctagga

SEQ ID NO: 1009660 - DNA, 33 bp, Homo sapien
gcaaatcatatcaaagtccaggacctgctagga

SEQ ID NO: 1009661 - DNA, 33 bp, Homo sapien
aaatggagaactgatcaatctactgacatgact

SEQ ID NO: 1009662 - DNA, 33 bp, Homo sapien
aaatggagaactgatctatctactgacatgact

SEQ ID NO: 1009663 - DNA, 33 bp, Homo sapien
ggaggaagaagtagcacatcagggagctaaggt

SEQ ID NO: 1009664 - DNA, 33 bp, Homo sapien
ggaggaagaagtagcatatcagggagctaaggt

SEQ ID NO: 1009665 - DNA, 33 bp, Homo sapien
tgcccaattccaagcacgtttagctttaagtac

SEQ ID NO: 1009666 - DNA, 33 bp, Homo sapien
tgcccaattccaagcatgtttagctttaagtac

SEQ ID NO: 1009667 - DNA, 33 bp, Homo sapien
tcaaaatgctgcaacacaatacgaggggctgga

SEQ ID NO: 1009668 - DNA, 33 bp, Homo sapien
tcaaaatgctgcaacataatacgaggggctgga

SEQ ID NO: 1009669 - DNA, 33 bp, Homo sapien
agatccagattttccaactaatgaaacaatgaa

SEQ ID NO: 1009670 - DNA, 33 bp, Homo sapien
agatccagattttccagctaatgaaacaatgaa

SEQ ID NO: 1009671 - DNA, 33 bp, Homo sapien
aactgtgaagaggctcacctgacttgagatgca

SEQ ID NO: 1009672 - DNA, 33 bp, Homo sapien
aactgtgaagaggctctcctgacttgagatgca

SEQ ID NO: 1009673 - DNA, 33 bp, Homo sapien
ttatggtcaaagtggacgagctgaatgaaacac

SEQ ID NO: 1009674 - DNA, 33 bp, Homo sapien
ttatggtcaaagtggatgagctgaatgaaacac

SEQ ID NO: 1009675 - DNA, 33 bp, Homo sapien
ccagggcatgactaaactggagcagtgttcctt

SEQ ID NO: 1009676 - DNA, 33 bp, Homo sapien
ccagggcatgactaaagtggagcagtgttcctt

SEQ ID NO: 1009677 - DNA, 33 bp, Homo sapien
gggatggaaaagatgaagagaagaggtgtccag

SEQ ID NO: 1009678 - DNA, 33 bp, Homo sapien
gggatggaaaagatgaggagaagaggtgtccag

SEQ ID NO: 1009679 - DNA, 33 bp, Homo sapien
aaaagagatcatgcagcatgtcctttttttccc

SEQ ID NO: 1009680 - DNA, 33 bp, Homo sapien
aaaagagatcatgcagtatgtcctttttttccc

SEQ ID NO: 1009681 - DNA, 33 bp, Homo sapien
caaagtacagttgtccaatgtatcagaactgtg

SEQ ID NO: 1009682 - DNA, 33 bp, Homo sapien
caaagtacagttgtcccatgtatcagaactgtg

SEQ ID NO: 1009683 - DNA, 33 bp, Homo sapien
taatatgaaaaacaagaagatgtgtccagatcc

SEQ ID NO: 1009684 - DNA, 33 bp, Homo sapien
taatatgaaaaacaaggagatgtgtccagatcc

SEQ ID NO: 1009685 - DNA, 33 bp, Homo sapien
aatcacctgcaagtccaaaattgatcatatttg

SEQ ID NO: 1009686 - DNA, 33 bp, Homo sapien
aatcacctgcaagtccgaaattgatcatatttg

SEQ ID NO: 1009687 - DNA, 33 bp, Homo sapien
tgatcatatttgcagaaaacagcccaaattaga

SEQ ID NO: 1009688 - DNA, 33 bp, Homo sapien
tgatcatatttgcagacaacagcccaaattaga

SEQ ID NO: 1009689 - DNA, 33 bp, Homo sapien
gaccccatgttacaatcaaggaatctgagattc

SEQ ID NO: 1009690 - DNA, 33 bp, Homo sapien
gaccccatgttacaattaaggaatctgagattc

SEQ ID NO: 1009691 - DNA, 33 bp, Homo sapien
taagccgaatgatggaaaatgagagcaaaggag

SEQ ID NO: 1009692 - DNA, 33 bp, Homo sapien
taagccgaatgatggataatgagagcaaaggag

SEQ ID NO: 1009693 - DNA, 33 bp, Homo sapien
aaggatgagaaacttcacagggaaagtgggata

SEQ ID NO: 1009694 - DNA, 33 bp, Homo sapien
aaggatgagaaacttcgcagggaaagtgggata

SEQ ID NO: 1009695 - DNA, 33 bp, Homo sapien
tacctcccataatagagaaactctgaaatctca

SEQ ID NO: 1009696 - DNA, 33 bp, Homo sapien
tacctcccataatagataaactctgaaatctca

SEQ ID NO: 1009697 - DNA, 33 bp, Homo sapien
gtaaaatgttcattcaaagtacaagacagatca

SEQ ID NO: 1009698 - DNA, 33 bp, Homo sapien
gtaaaatgttcattcacagtacaagacagatca

SEQ ID NO: 1009699 - DNA, 33 bp, Homo sapien
aaagcctgaggcaaaaccttgtgaggacttctt

SEQ ID NO: 1009700 - DNA, 33 bp, Homo sapien
aaagcctgaggcaaaagcttgtgaggacttctt

SEQ ID NO: 1009701 - DNA, 33 bp, Homo sapien
gaatgctacaccatcaaagataattaattgcta

SEQ ID NO: 1009702 - DNA, 33 bp, Homo sapien
gaatgctacaccatcatagataattaattgcta

SEQ ID NO: 1009703 - DNA, 33 bp, Homo sapien
aatctaactgatacaacgaatgccaaagtgtta

SEQ ID NO: 1009704 - DNA, 33 bp, Homo sapien
aatctaactgatacaaggaatgccaaagtgtta

SEQ ID NO: 1009705 - DNA, 33 bp, Homo sapien
gccttcattcaaaatgaactaggctgccttaga

SEQ ID NO: 1009706 - DNA, 33 bp, Homo sapien
gccttcattcaaaatggactaggctgccttaga

SEQ ID NO: 1009707 - DNA, 33 bp, Homo sapien
cgcccgaaatcattacaggagagcaggctcact

SEQ ID NO: 1009708 - DNA, 33 bp, Homo sapien
cgcccgaaatcattactggagagcaggctcact

SEQ ID NO: 1009709 - DNA, 33 bp, Homo sapien
aagtttagtggacacacaataatttggctttta

SEQ ID NO: 1009710 - DNA, 33 bp, Homo sapien
aagtttagtggacacataataatttggctttta

SEQ ID NO: 1009711 - DNA, 33 bp, Homo sapien
aaaaagagttctgcacaatcccatggagttgat

SEQ ID NO: 1009712 - DNA, 33 bp, Homo sapien
aaaaagagttctgcaccatcccatggagttgat

SEQ ID NO: 1009713 - DNA, 33 bp, Homo sapien
tttcctctcttgctacaagacctaggcattttt

SEQ ID NO: 1009714 - DNA, 33 bp, Homo sapien
tttcctctcttgctacgagacctaggcattttt

SEQ ID NO: 1009715 - DNA, 33 bp, Homo sapien
tccattagcataaaaacggtatgtcaggaatat

SEQ ID NO: 1009716 - DNA, 33 bp, Homo sapien
tccattagcataaaaatggtatgtcaggaatat

SEQ ID NO: 1009717 - DNA, 33 bp, Homo sapien
ccagaatcatatagaaatcactgaaggaatatg

SEQ ID NO: 1009718 - DNA, 33 bp, Homo sapien
ccagaatcatatagaagtcactgaaggaatatg

SEQ ID NO: 1009719 - DNA, 33 bp, Homo sapien
aaaggaaagttgaaacagcaaacagtgccattg

SEQ ID NO: 1009720 - DNA, 33 bp, Homo sapien
aaaggaaagttgaaactgcaaacagtgccattg

SEQ ID NO: 1009721 - DNA, 33 bp, Homo sapien
tcttcaatgctagcaacggcatgtcgaatgctt

SEQ ID NO: 1009722 - DNA, 33 bp, Homo sapien
tcttcaatgctagcaatggcatgtcgaatgctt

SEQ ID NO: 1009723 - DNA, 33 bp, Homo sapien
caaggagtgcaattacaggatcgtatggtaaga

SEQ ID NO: 1009724 - DNA, 33 bp, Homo sapien
caaggagtgcaattactggatcgtatggtaaga

SEQ ID NO: 1009725 - DNA, 33 bp, Homo sapien
acctgatttcaaaaacgactgtaaacttatgat

SEQ ID NO: 1009726 - DNA, 33 bp, Homo sapien
acctgatttcaaaaactactgtaaacttatgat

SEQ ID NO: 1009727 - DNA, 33 bp, Homo sapien
ggccaaaattttctaaagacaacaaaacatata

SEQ ID NO: 1009728 - DNA, 33 bp, Homo sapien
ggccaaaattttctaacgacaacaaaacatata

SEQ ID NO: 1009729 - DNA, 33 bp, Homo sapien
atggttttgtttgttacgaaatgtttgctagga

SEQ ID NO: 1009730 - DNA, 33 bp, Homo sapien
atggttttgtttgttatgaaatgtttgctagga

SEQ ID NO: 1009731 - DNA, 33 bp, Homo sapien
ttatgaagctattttcaagtgtgagtagttgtc

SEQ ID NO: 1009732 - DNA, 33 bp, Homo sapien
ttatgaagctattttccagtgtgagtagttgtc

SEQ ID NO: 1009733 - DNA, 33 bp, Homo sapien
agacttgcttctggaaaatgccaaagccgagaa

SEQ ID NO: 1009734 - DNA, 33 bp, Homo sapien
agacttgcttctggaagatgccaaagccgagaa

SEQ ID NO: 1009735 - DNA, 33 bp, Homo sapien
atatggggaaagttaactgacaaacaagtaagc

SEQ ID NO: 1009736 - DNA, 33 bp, Homo sapien
atatggggaaagttaattgacaaacaagtaagc

SEQ ID NO: 1009737 - DNA, 33 bp, Homo sapien
accgtgcctggcctcaaagggaactattgattc

SEQ ID NO: 1009738 - DNA, 33 bp, Homo sapien
accgtgcctggcctcagagggaactattgattc

SEQ ID NO: 1009739 - DNA, 33 bp, Homo sapien
agggataacacattctaacacgccatttcccag

SEQ ID NO: 1009740 - DNA, 33 bp, Homo sapien
agggataacacattcttacacgccatttcccag

SEQ ID NO: 1009741 - DNA, 33 bp, Homo sapien
gaatgccatctcttcaatcaccaccacttcttt

SEQ ID NO: 1009742 - DNA, 33 bp, Homo sapien
gaatgccatctcttcagtcaccaccacttcttt

SEQ ID NO: 1009743 - DNA, 33 bp, Homo sapien
aactggagtacttttgcaatactgctttgagga

SEQ ID NO: 1009744 - DNA, 33 bp, Homo sapien
aactggagtacttttgtaatactgctttgagga

SEQ ID NO: 1009745 - DNA, 33 bp, Homo sapien
tgaatcacaaaaacacagtatcaacttgtactt

SEQ ID NO: 1009746 - DNA, 33 bp, Homo sapien
tgaatcacaaaaacactgtatcaacttgtactt

SEQ ID NO: 1009747 - DNA, 33 bp, Homo sapien
aggcatatcaaggtacaggattagctattatga

SEQ ID NO: 1009748 - DNA, 33 bp, Homo sapien
aggcatatcaaggtacgggattagctattatga

SEQ ID NO: 1009749 - DNA, 33 bp, Homo sapien
tatcaccttcactagacccaacacaaaacttca

SEQ ID NO: 1009750 - DNA, 33 bp, Homo sapien
tatcaccttcactagatccaacacaaaacttca

SEQ ID NO: 1009751 - DNA, 33 bp, Homo sapien
aaaatggatgccagaccacggcagtgaacaaac

SEQ ID NO: 1009752 - DNA, 33 bp, Homo sapien
aaaatggatgccagactacggcagtgaacaaac

SEQ ID NO: 1009753 - DNA, 33 bp, Homo sapien
tagtgttcataggtacaaactccagcaacctgc

SEQ ID NO: 1009754 - DNA, 33 bp, Homo sapien
tagtgttcataggtacgaactccagcaacctgc

SEQ ID NO: 1009755 - DNA, 33 bp, Homo sapien
ttctcttttgcttttcactgattctttcctgtc

SEQ ID NO: 1009756 - DNA, 33 bp, Homo sapien
ttctcttttgcttttctctgattctttcctgtc

SEQ ID NO: 1009757 - DNA, 33 bp, Homo sapien
tgattttgccagaaaccggatggctccaaacaa

SEQ ID NO: 1009758 - DNA, 33 bp, Homo sapien
tgattttgccagaaactggatggctccaaacaa

SEQ ID NO: 1009759 - DNA, 33 bp, Homo sapien
aacaaaataggattcacgttggtaagcattagg

SEQ ID NO: 1009760 - DNA, 33 bp, Homo sapien
aacaaaataggattcatgttggtaagcattagg

SEQ ID NO: 1009761 - DNA, 33 bp, Homo sapien
tcaggcttgactacaactatcatgtcaatattt

SEQ ID NO: 1009762 - DNA, 33 bp, Homo sapien
tcaggcttgactacaattatcatgtcaatattt

SEQ ID NO: 1009763 - DNA, 33 bp, Homo sapien
taactgtgctgggaaacggatatacatatgcag

SEQ ID NO: 1009764 - DNA, 33 bp, Homo sapien
taactgtgctgggaaatggatatacatatgcag

SEQ ID NO: 1009765 - DNA, 33 bp, Homo sapien
tagttagattgaagacaggttgtttgaaaatac

SEQ ID NO: 1009766 - DNA, 33 bp, Homo sapien
tagttagattgaagacgggttgtttgaaaatac

SEQ ID NO: 1009767 - DNA, 33 bp, Homo sapien
acatccaagtcccttcaaatactaggaaagccc

SEQ ID NO: 1009768 - DNA, 33 bp, Homo sapien
acatccaagtcccttcgaatactaggaaagccc

SEQ ID NO: 1009769 - DNA, 33 bp, Homo sapien
tgcctgtgtttactcaaggactaaggactccac

SEQ ID NO: 1009770 - DNA, 33 bp, Homo sapien
tgcctgtgtttactcagggactaaggactccac

SEQ ID NO: 1009771 - DNA, 33 bp, Homo sapien
aggtgcatgtgacctaataaaataccacccagg

SEQ ID NO: 1009772 - DNA, 33 bp, Homo sapien
aggtgcatgtgacctagtaaaataccacccagg

SEQ ID NO: 1009773 - DNA, 33 bp, Homo sapien
tgcctgggaattgcaaaccttgtggcctagact

SEQ ID NO: 1009774 - DNA, 33 bp, Homo sapien
tgcctgggaattgcaatccttgtggcctagact

SEQ ID NO: 1009775 - DNA, 33 bp, Homo sapien
gcactacaagaaatgcaaaatggaatccttcag

SEQ ID NO: 1009776 - DNA, 33 bp, Homo sapien
gcactacaagaaatgcgaaatggaatccttcag

SEQ ID NO: 1009777 - DNA, 33 bp, Homo sapien
agcactctaattttagacctttgaagacaattt

SEQ ID NO: 1009778 - DNA, 33 bp, Homo sapien
agcactctaattttaggcctttgaagacaattt

SEQ ID NO: 1009779 - DNA, 33 bp, Homo sapien
aagacaatttaattgaagcaaggaaagaagttg

SEQ ID NO: 1009780 - DNA, 33 bp, Homo sapien
aagacaatttaattgacgcaaggaaagaagttg

SEQ ID NO: 1009781 - DNA, 33 bp, Homo sapien
gttattcagaatgataccatttatacttattac

SEQ ID NO: 1009782 - DNA, 33 bp, Homo sapien
gttattcagaatgatagcatttatacttattac

SEQ ID NO: 1009783 - DNA, 33 bp, Homo sapien
cagttcctgtctcttactaaatatgtgtcttat

SEQ ID NO: 1009784 - DNA, 33 bp, Homo sapien
cagttcctgtctcttattaaatatgtgtcttat

SEQ ID NO: 1009785 - DNA, 33 bp, Homo sapien
atctctgtgagagcaggaactttttttgttcac

SEQ ID NO: 1009786 - DNA, 33 bp, Homo sapien
atctctgtgagagcagtaactttttttgttcac

SEQ ID NO: 1009787 - DNA, 33 bp, Homo sapien
ataaaattaagaaaaacgaaatgcaattgtgaa

SEQ ID NO: 1009788 - DNA, 33 bp, Homo sapien
ataaaattaagaaaaatgaaatgcaattgtgaa

SEQ ID NO: 1009789 - DNA, 33 bp, Homo sapien
atacatggatatacacaattttcctgtaacaat

SEQ ID NO: 1009790 - DNA, 33 bp, Homo sapien
atacatggatatacaccattttcctgtaacaat

SEQ ID NO: 1009791 - DNA, 33 bp, Homo sapien
aaagaaagaaggaataaaagagatacggagaca

SEQ ID NO: 1009792 - DNA, 33 bp, Homo sapien
aaagaaagaaggaatagaagagatacggagaca

SEQ ID NO: 1009793 - DNA, 33 bp, Homo sapien
catggatatgaaaggccgattgtacttacataa

SEQ ID NO: 1009794 - DNA, 33 bp, Homo sapien
catggatatgaaaggctgattgtacttacataa

SEQ ID NO: 1009795 - DNA, 33 bp, Homo sapien
ccactcatttttcttcacctgatattttcaatt

SEQ ID NO: 1009796 - DNA, 33 bp, Homo sapien
ccactcatttttcttcgcctgatattttcaatt

SEQ ID NO: 1009797 - DNA, 33 bp, Homo sapien
atatcccttatctgaaatgcttggaacctgaaa

SEQ ID NO: 1009798 - DNA, 33 bp, Homo sapien
atatcccttatctgaagtgcttggaacctgaaa

SEQ ID NO: 1009799 - DNA, 33 bp, Homo sapien
aaagttgccctgaagactatctaaaaaggtacc

SEQ ID NO: 1009800 - DNA, 33 bp, Homo sapien
aaagttgccctgaagattatctaaaaaggtacc

SEQ ID NO: 1009801 - DNA, 33 bp, Homo sapien
taagtgtttttaaggcactcatagcttttcttt

SEQ ID NO: 1009802 - DNA, 33 bp, Homo sapien
taagtgtttttaaggctctcatagcttttcttt

SEQ ID NO: 1009803 - DNA, 33 bp, Homo sapien
acttatgatatggctaaaaccagataaaccaat

SEQ ID NO: 1009804 - DNA, 33 bp, Homo sapien
acttatgatatggctacaaccagataaaccaat

SEQ ID NO: 1009805 - DNA, 33 bp, Homo sapien
ttctgcatttctgtcacgttccaggtcaggctg

SEQ ID NO: 1009806 - DNA, 33 bp, Homo sapien
ttctgcatttctgtcatgttccaggtcaggctg

SEQ ID NO: 1009807 - DNA, 33 bp, Homo sapien
gctcgcaatttgcaacccaaaggtagtcataca

SEQ ID NO: 1009808 - DNA, 33 bp, Homo sapien
gctcgcaatttgcaactcaaaggtagtcataca

SEQ ID NO: 1009809 - DNA, 33 bp, Homo sapien
atagtgttataataaaaattcacaaataaaact

SEQ ID NO: 1009810 - DNA, 33 bp, Homo sapien
atagtgttataataaagattcacaaataaaact

SEQ ID NO: 1009811 - DNA, 33 bp, Homo sapien
ctttgttatgtgttgacaggtttggaattcgta

SEQ ID NO: 1009812 - DNA, 33 bp, Homo sapien
ctttgttatgtgttgagaggtttggaattcgta

SEQ ID NO: 1009813 - DNA, 33 bp, Homo sapien
agccgtgtagtcagtcaacgaatcatttttctt

SEQ ID NO: 1009814 - DNA, 33 bp, Homo sapien
agccgtgtagtcagtccacgaatcatttttctt

SEQ ID NO: 1009815 - DNA, 33 bp, Homo sapien
actgctgagtggtaagaagggaattcagggcag

SEQ ID NO: 1009816 - DNA, 33 bp, Homo sapien
actgctgagtggtaaggagggaattcagggcag

SEQ ID NO: 1009817 - DNA, 33 bp, Homo sapien
tgggacattagtcttcgcttgccttctgacttg

SEQ ID NO: 1009818 - DNA, 33 bp, Homo sapien
tgggacattagtcttctcttgccttctgacttg

SEQ ID NO: 1009819 - DNA, 33 bp, Homo sapien
gaggtgatatgagtagacatatggtaatcagaa

SEQ ID NO: 1009820 - DNA, 33 bp, Homo sapien
gaggtgatatgagtaggcatatggtaatcagaa

SEQ ID NO: 1009821 - DNA, 33 bp, Homo sapien
aaaatgaaaattgatcccatgtgctatatattg

SEQ ID NO: 1009822 - DNA, 33 bp, Homo sapien
aaaatgaaaattgatctcatgtgctatatattg

SEQ ID NO: 1009823 - DNA, 33 bp, Homo sapien
agatgcccatgaaaaacgcaaggaacggctaca

SEQ ID NO: 1009824 - DNA, 33 bp, Homo sapien
agatgcccatgaaaaatgcaaggaacggctaca

SEQ ID NO: 1009825 - DNA, 33 bp, Homo sapien
gcttctttccgcataacgtctttgagattcttt

SEQ ID NO: 1009826 - DNA, 33 bp, Homo sapien
gcttctttccgcataatgtctttgagattcttt

SEQ ID NO: 1009827 - DNA, 33 bp, Homo sapien
cctaaaaaagtacccagctaaagcattttacat

SEQ ID NO: 1009828 - DNA, 33 bp, Homo sapien
cctaaaaaagtacccatctaaagcattttacat

SEQ ID NO: 1009829 - DNA, 33 bp, Homo sapien
agatttgaactcagctaaaactctaacccctaa

SEQ ID NO: 1009830 - DNA, 33 bp, Homo sapien
agatttgaactcagctgaaactctaacccctaa

SEQ ID NO: 1009831 - DNA, 33 bp, Homo sapien
taagagtggatgcagacgtttatgagtttattc

SEQ ID NO: 1009832 - DNA, 33 bp, Homo sapien
taagagtggatgcagatgtttatgagtttattc

SEQ ID NO: 1009833 - DNA, 33 bp, Homo sapien
tctttagcttttttccactgtagattcctcctc

SEQ ID NO: 1009834 - DNA, 33 bp, Homo sapien
tctttagcttttttccgctgtagattcctcctc

SEQ ID NO: 1009835 - DNA, 33 bp, Homo sapien
ctcaggatttgagaacggatgaagatatgaatt

SEQ ID NO: 1009836 - DNA, 33 bp, Homo sapien
ctcaggatttgagaactgatgaagatatgaatt

SEQ ID NO: 1009837 - DNA, 33 bp, Homo sapien
cacaataggatagggcactagttagatttatga

SEQ ID NO: 1009838 - DNA, 33 bp, Homo sapien
cacaataggatagggcgctagttagatttatga

SEQ ID NO: 1009839 - DNA, 33 bp, Homo sapien
gtaggcatcatggtcacgttccaaatcttaaag

SEQ ID NO: 1009840 - DNA, 33 bp, Homo sapien
gtaggcatcatggtcatgttccaaatcttaaag

SEQ ID NO: 1009841 - DNA, 33 bp, Homo sapien
actagaggagactgaactcatttgagggaaaag

SEQ ID NO: 1009842 - DNA, 33 bp, Homo sapien
actagaggagactgaattcatttgagggaaaag

SEQ ID NO: 1009843 - DNA, 33 bp, Homo sapien
aaaattgcaatttataacgtaatgggtcttgaa

SEQ ID NO: 1009844 - DNA, 33 bp, Homo sapien
aaaattgcaatttatagcgtaatgggtcttgaa

SEQ ID NO: 1009845 - DNA, 33 bp, Homo sapien
gtatgaatagctgctcgaagagaacaaaccaaa

SEQ ID NO: 1009846 - DNA, 33 bp, Homo sapien
gtatgaatagctgctctaagagaacaaaccaaa

SEQ ID NO: 1009847 - DNA, 33 bp, Homo sapien
gatttgtcaggcttggccataggtaattacaaa

SEQ ID NO: 1009848 - DNA, 33 bp, Homo sapien
gatttgtcaggcttggtcataggtaattacaaa

SEQ ID NO: 1009849 - DNA, 33 bp, Homo sapien
ggagcagacctaaatccaatattgcctcaaggt

SEQ ID NO: 1009850 - DNA, 33 bp, Homo sapien
ggagcagacctaaatctaatattgcctcaaggt

SEQ ID NO: 1009851 - DNA, 33 bp, Homo sapien
aagtatctttttctagcacgagaggtaggaaaa

SEQ ID NO: 1009852 - DNA, 33 bp, Homo sapien
aagtatctttttctaggacgagaggtaggaaaa

SEQ ID NO: 1009853 - DNA, 33 bp, Homo sapien
ttagtgcagaccctacagattaaggactgtgtc

SEQ ID NO: 1009854 - DNA, 33 bp, Homo sapien
ttagtgcagaccctacggattaaggactgtgtc

SEQ ID NO: 1009855 - DNA, 33 bp, Homo sapien
tgtacttatctgctgacgtttgtttctcccctt

SEQ ID NO: 1009856 - DNA, 33 bp, Homo sapien
tgtacttatctgctgatgtttgtttctcccctt

SEQ ID NO: 1009857 - DNA, 33 bp, Homo sapien
ccgattttccaactcaatgacctaaaggaaaga

SEQ ID NO: 1009858 - DNA, 33 bp, Homo sapien
ccgattttccaactcagtgacctaaaggaaaga

SEQ ID NO: 1009859 - DNA, 33 bp, Homo sapien
cttatgagataaaagaactagctgaaatcagtt

SEQ ID NO: 1009860 - DNA, 33 bp, Homo sapien
cttatgagataaaagacctagctgaaatcagtt

SEQ ID NO: 1009861 - DNA, 33 bp, Homo sapien
tatttctttctcacaacgtatctatgaatatga

SEQ ID NO: 1009862 - DNA, 33 bp, Homo sapien
tatttctttctcacaatgtatctatgaatatga

SEQ ID NO: 1009863 - DNA, 33 bp, Homo sapien
taaagaacactcaaaacttaacaggaagaaatt

SEQ ID NO: 1009864 - DNA, 33 bp, Homo sapien
taaagaacactcaaaatttaacaggaagaaatt

SEQ ID NO: 1009865 - DNA, 33 bp, Homo sapien
tatttaagagaacaccaaaaagttcaaatgttt

SEQ ID NO: 1009866 - DNA, 33 bp, Homo sapien
tatttaagagaacaccgaaaagttcaaatgttt

SEQ ID NO: 1009867 - DNA, 33 bp, Homo sapien
aatagatctattggcccatccagaaaatccaag

SEQ ID NO: 1009868 - DNA, 33 bp, Homo sapien
aatagatctattggcctatccagaaaatccaag

SEQ ID NO: 1009869 - DNA, 33 bp, Homo sapien
aaggaattaccacaatcaattacaattttaatt

SEQ ID NO: 1009870 - DNA, 33 bp, Homo sapien
aaggaattaccacaatgaattacaattttaatt

SEQ ID NO: 1009871 - DNA, 33 bp, Homo sapien
tttttctcattatttacgttgtctctttgttga

SEQ ID NO: 1009872 - DNA, 33 bp, Homo sapien
tttttctcattatttaggttgtctctttgttga

SEQ ID NO: 1009873 - DNA, 33 bp, Homo sapien
cttctcaaaagcaatactagaaaccataagaca

SEQ ID NO: 1009874 - DNA, 33 bp, Homo sapien
cttctcaaaagcaatagtagaaaccataagaca

SEQ ID NO: 1009875 - DNA, 33 bp, Homo sapien
tataagtttggatacaataacaatcacataact

SEQ ID NO: 1009876 - DNA, 33 bp, Homo sapien
tataagtttggatacagtaacaatcacataact

SEQ ID NO: 1009877 - DNA, 33 bp, Homo sapien
aaatagcaaacgtatacattattctcacagttc

SEQ ID NO: 1009878 - DNA, 33 bp, Homo sapien
aaatagcaaacgtatatattattctcacagttc

SEQ ID NO: 1009879 - DNA, 33 bp, Homo sapien
ggttttctatcagttaccattattctctaacaa

SEQ ID NO: 1009880 - DNA, 33 bp, Homo sapien
ggttttctatcagttatcattattctctaacaa

SEQ ID NO: 1009881 - DNA, 33 bp, Homo sapien
actgagcagattttgaactggtaatagaaggca

SEQ ID NO: 1009882 - DNA, 33 bp, Homo sapien
actgagcagattttgagctggtaatagaaggca

SEQ ID NO: 1009883 - DNA, 33 bp, Homo sapien
cctcagataatagttaaaaggaatcctacaggt

SEQ ID NO: 1009884 - DNA, 33 bp, Homo sapien
cctcagataatagttacaaggaatcctacaggt

SEQ ID NO: 1009885 - DNA, 33 bp, Homo sapien
gcatttaattaaaatacgtcgattgatgagaaa

SEQ ID NO: 1009886 - DNA, 33 bp, Homo sapien
gcatttaattaaaatatgtcgattgatgagaaa

SEQ ID NO: 1009887 - DNA, 33 bp, Homo sapien
gatggtatttgccagggattacaaagtccagag

SEQ ID NO: 1009888 - DNA, 33 bp, Homo sapien
gatggtatttgccaggtattacaaagtccagag

SEQ ID NO: 1009889 - DNA, 33 bp, Homo sapien
atctttgtccaaggtaactcttttttacatcca

SEQ ID NO: 1009890 - DNA, 33 bp, Homo sapien
atctttgtccaaggtagctcttttttacatcca

SEQ ID NO: 1009891 - DNA, 33 bp, Homo sapien
agaaatagagaccacagctgatccagaaaactg

SEQ ID NO: 1009892 - DNA, 33 bp, Homo sapien
agaaatagagaccacatctgatccagaaaactg

SEQ ID NO: 1009893 - DNA, 33 bp, Homo sapien
taaaacttgaccagaaaagttatataaattatg

SEQ ID NO: 1009894 - DNA, 33 bp, Homo sapien
taaaacttgaccagaacagttatataaattatg

SEQ ID NO: 1009895 - DNA, 33 bp, Homo sapien
atgggtatacttttgccattttttcctctgaag

SEQ ID NO: 1009896 - DNA, 33 bp, Homo sapien
atgggtatacttttgcgattttttcctctgaag

SEQ ID NO: 1009897 - DNA, 33 bp, Homo sapien
atcagctgatcaatagcaggttacagtcatctc

SEQ ID NO: 1009898 - DNA, 33 bp, Homo sapien
atcagctgatcaatagtaggttacagtcatctc

SEQ ID NO: 1009899 - DNA, 33 bp, Homo sapien
gcacgtgtcctttgacaggtaaatgaataaacc

SEQ ID NO: 1009900 - DNA, 33 bp, Homo sapien
gcacgtgtcctttgacgggtaaatgaataaacc

SEQ ID NO: 1009901 - DNA, 33 bp, Homo sapien
cacgtgcaattacacaccactcttgaaggtcag

SEQ ID NO: 1009902 - DNA, 33 bp, Homo sapien
cacgtgcaattacacatcactcttgaaggtcag

SEQ ID NO: 1009903 - DNA, 33 bp, Homo sapien
agtgcccaatctttcaatagcacagaccaacac

SEQ ID NO: 1009904 - DNA, 33 bp, Homo sapien
agtgcccaatctttcagtagcacagaccaacac

SEQ ID NO: 1009905 - DNA, 33 bp, Homo sapien
gtgcaaataaggcaaacccacatccagagtgtc

SEQ ID NO: 1009906 - DNA, 33 bp, Homo sapien
gtgcaaataaggcaaagccacatccagagtgtc

SEQ ID NO: 1009907 - DNA, 33 bp, Homo sapien
aaagttttacttcctagctggcactgtaacagt

SEQ ID NO: 1009908 - DNA, 33 bp, Homo sapien
aaagttttacttcctatctggcactgtaacagt

SEQ ID NO: 1009909 - DNA, 33 bp, Homo sapien
gcaaactatctagaaaataatgaaaatgagaat

SEQ ID NO: 1009910 - DNA, 33 bp, Homo sapien
gcaaactatctagaaagtaatgaaaatgagaat

SEQ ID NO: 1009911 - DNA, 33 bp, Homo sapien
cctggctgactttctaacacttcttaagtgaat

SEQ ID NO: 1009912 - DNA, 33 bp, Homo sapien
cctggctgactttctaccacttcttaagtgaat

SEQ ID NO: 1009913 - DNA, 33 bp, Homo sapien
taagtgatggtatgaaacaaggataggctgaat

SEQ ID NO: 1009914 - DNA, 33 bp, Homo sapien
taagtgatggtatgaagcaaggataggctgaat

SEQ ID NO: 1009915 - DNA, 33 bp, Homo sapien
ttaacttgtcagactccagggacctatggcaag

SEQ ID NO: 1009916 - DNA, 33 bp, Homo sapien
ttaacttgtcagactctagggacctatggcaag

SEQ ID NO: 1009917 - DNA, 33 bp, Homo sapien
cctgtgaagatgaaaaagataaaagtccatggg

SEQ ID NO: 1009918 - DNA, 33 bp, Homo sapien
cctgtgaagatgaaaaggataaaagtccatggg

SEQ ID NO: 1009919 - DNA, 33 bp, Homo sapien
gtctcacaatcaggagcagctctttgcaatact

SEQ ID NO: 1009920 - DNA, 33 bp, Homo sapien
gtctcacaatcaggagtagctctttgcaatact

SEQ ID NO: 1009921 - DNA, 33 bp, Homo sapien
gaagatgattaagggacggtggcataaaatcgt

SEQ ID NO: 1009922 - DNA, 33 bp, Homo sapien
gaagatgattaagggatggtggcataaaatcgt

SEQ ID NO: 1009923 - DNA, 33 bp, Homo sapien
actttcacctgttcccacttcttcaactctctg

SEQ ID NO: 1009924 - DNA, 33 bp, Homo sapien
actttcacctgttcccgcttcttcaactctctg

SEQ ID NO: 1009925 - DNA, 33 bp, Homo sapien
agaatttaaggaatcacgaattgtagatggaga

SEQ ID NO: 1009926 - DNA, 33 bp, Homo sapien
agaatttaaggaatcatgaattgtagatggaga

SEQ ID NO: 1009927 - DNA, 33 bp, Homo sapien
ggtggtcctgcatgataaagaataggagttgag

SEQ ID NO: 1009928 - DNA, 33 bp, Homo sapien
ggtggtcctgcatgatcaagaataggagttgag

SEQ ID NO: 1009929 - DNA, 33 bp, Homo sapien
attatgtgagtgttgacagcctttctgtacctt

SEQ ID NO: 1009930 - DNA, 33 bp, Homo sapien
attatgtgagtgttgatagcctttctgtacctt

SEQ ID NO: 1009931 - DNA, 33 bp, Homo sapien
ttaaccctgaacatagcatttggctagtcagcc

SEQ ID NO: 1009932 - DNA, 33 bp, Homo sapien
ttaaccctgaacataggatttggctagtcagcc

SEQ ID NO: 1009933 - DNA, 33 bp, Homo sapien
agtgtttttgattgcaacctagaaaaagcagtg

SEQ ID NO: 1009934 - DNA, 33 bp, Homo sapien
agtgtttttgattgcatcctagaaaaagcagtg

SEQ ID NO: 1009935 - DNA, 33 bp, Homo sapien
tcacagataatacagacacttgctagatatagg

SEQ ID NO: 1009936 - DNA, 33 bp, Homo sapien
tcacagataatacagatacttgctagatatagg

SEQ ID NO: 1009937 - DNA, 33 bp, Homo sapien
ctgtgcttctaacctaccagctataaatcaggg

SEQ ID NO: 1009938 - DNA, 33 bp, Homo sapien
ctgtgcttctaacctatcagctataaatcaggg

SEQ ID NO: 1009939 - DNA, 33 bp, Homo sapien
aacgagaccagaagcacagaacgtcagaaccta

SEQ ID NO: 1009940 - DNA, 33 bp, Homo sapien
aacgagaccagaagcatagaacgtcagaaccta

SEQ ID NO: 1009941 - DNA, 33 bp, Homo sapien
ttgggagaaaggcaaaagtggcctgcccatctc

SEQ ID NO: 1009942 - DNA, 33 bp, Homo sapien
ttgggagaaaggcaaacgtggcctgcccatctc

SEQ ID NO: 1009943 - DNA, 33 bp, Homo sapien
agtttagacacaaaaaagtacctgggtgcagaa

SEQ ID NO: 1009944 - DNA, 33 bp, Homo sapien
agtttagacacaaaaaggtacctgggtgcagaa

SEQ ID NO: 1009945 - DNA, 33 bp, Homo sapien
gtttattctacagcacaaagccttcctggatga

SEQ ID NO: 1009946 - DNA, 33 bp, Homo sapien
gtttattctacagcacgaagccttcctggatga

SEQ ID NO: 1009947 - DNA, 33 bp, Homo sapien
atgttcaatattaaaaactgtttgtagttctga

SEQ ID NO: 1009948 - DNA, 33 bp, Homo sapien
atgttcaatattaaaagctgtttgtagttctga

SEQ ID NO: 1009949 - DNA, 33 bp, Homo sapien
tggggagttgtgtaacaggtacagagtttcaga

SEQ ID NO: 1009950 - DNA, 33 bp, Homo sapien
tggggagttgtgtaacgggtacagagtttcaga

SEQ ID NO: 1009951 - DNA, 33 bp, Homo sapien
tctgtccctgactcaaactataccaggctctac

SEQ ID NO: 1009952 - DNA, 33 bp, Homo sapien
tctgtccctgactcaagctataccaggctctac

SEQ ID NO: 1009953 - DNA, 33 bp, Homo sapien
cataaggccggttatcaagggagtttgtgtgtc

SEQ ID NO: 1009954 - DNA, 33 bp, Homo sapien
cataaggccggttatcgagggagtttgtgtgtc

SEQ ID NO: 1009955 - DNA, 33 bp, Homo sapien
tcacttactctacgccagacacttatgtgcatt

SEQ ID NO: 1009956 - DNA, 33 bp, Homo sapien
tcacttactctacgccggacacttatgtgcatt

SEQ ID NO: 1009957 - DNA, 33 bp, Homo sapien
attgttatgccagaaactgaaaaatttgtcaaa

SEQ ID NO: 1009958 - DNA, 33 bp, Homo sapien
attgttatgccagaaagtgaaaaatttgtcaaa

SEQ ID NO: 1009959 - DNA, 33 bp, Homo sapien
acagagcaggaaataaaagagagatgaggacac

SEQ ID NO: 1009960 - DNA, 33 bp, Homo sapien
acagagcaggaaataagagagagatgaggacac

SEQ ID NO: 1009961 - DNA, 33 bp, Homo sapien
cagtccctctccaaagcatggcctccaatatgt

SEQ ID NO: 1009962 - DNA, 33 bp, Homo sapien
cagtccctctccaaagtatggcctccaatatgt

SEQ ID NO: 1009963 - DNA, 33 bp, Homo sapien
agatttttttctagctcaagggagaattgtata

SEQ ID NO: 1009964 - DNA, 33 bp, Homo sapien
agatttttttctagctgaagggagaattgtata

SEQ ID NO: 1009965 - DNA, 33 bp, Homo sapien
ttattctggagctcaaatatttcctgttcatta

SEQ ID NO: 1009966 - DNA, 33 bp, Homo sapien
ttattctggagctcaagtatttcctgttcatta

SEQ ID NO: 1009967 - DNA, 33 bp, Homo sapien
ttgaagccttggaaaccgctccgttgatgaaac

SEQ ID NO: 1009968 - DNA, 33 bp, Homo sapien
ttgaagccttggaaactgctccgttgatgaaac

SEQ ID NO: 1009969 - DNA, 33 bp, Homo sapien
gtttctatcctggagaaaacaaagcccatcata

SEQ ID NO: 1009970 - DNA, 33 bp, Homo sapien
gtttctatcctggagacaacaaagcccatcata

SEQ ID NO: 1009971 - DNA, 33 bp, Homo sapien
tgaaccctaaaaggaaaattctgttgccaagaa

SEQ ID NO: 1009972 - DNA, 33 bp, Homo sapien
tgaaccctaaaaggaatattctgttgccaagaa

SEQ ID NO: 1009973 - DNA, 33 bp, Homo sapien
actgtagttccaataactgtgctttgtagctat

SEQ ID NO: 1009974 - DNA, 33 bp, Homo sapien
actgtagttccaataattgtgctttgtagctat

SEQ ID NO: 1009975 - DNA, 33 bp, Homo sapien
ataacatcatctacaacttcaaataactggatg

SEQ ID NO: 1009976 - DNA, 33 bp, Homo sapien
ataacatcatctacaatttcaaataactggatg

SEQ ID NO: 1009977 - DNA, 33 bp, Homo sapien
caagttctgtgctaggacctagaaatgcattca

SEQ ID NO: 1009978 - DNA, 33 bp, Homo sapien
caagttctgtgctagggcctagaaatgcattca

SEQ ID NO: 1009979 - DNA, 33 bp, Homo sapien
aacgtggagaatgcaaagatggatcaggttatg

SEQ ID NO: 1009980 - DNA, 33 bp, Homo sapien
aacgtggagaatgcaatgatggatcaggttatg

SEQ ID NO: 1009981 - DNA, 33 bp, Homo sapien
gctagtaaacttgcacaatgggaaaataatctt

SEQ ID NO: 1009982 - DNA, 33 bp, Homo sapien
gctagtaaacttgcactatgggaaaataatctt

SEQ ID NO: 1009983 - DNA, 33 bp, Homo sapien
gggtgatgagggttatcaactctatggctagta

SEQ ID NO: 1009984 - DNA, 33 bp, Homo sapien
gggtgatgagggttattaactctatggctagta

SEQ ID NO: 1009985 - DNA, 33 bp, Homo sapien
ctcatcacccttatatcaactggaatttttata

SEQ ID NO: 1009986 - DNA, 33 bp, Homo sapien
ctcatcacccttatatgaactggaatttttata

SEQ ID NO: 1009987 - DNA, 33 bp, Homo sapien
actcttgtgtccactgaacgtactacttaccta

SEQ ID NO: 1009988 - DNA, 33 bp, Homo sapien
actcttgtgtccactgtacgtactacttaccta

SEQ ID NO: 1009989 - DNA, 33 bp, Homo sapien
tccctgaccttgtctccgagaaatgagaagtgt

SEQ ID NO: 1009990 - DNA, 33 bp, Homo sapien
tccctgaccttgtctctgagaaatgagaagtgt

SEQ ID NO: 1009991 - DNA, 33 bp, Homo sapien
ttggaaacactactagaagatagaagcctaaac

SEQ ID NO: 1009992 - DNA, 33 bp, Homo sapien
ttggaaacactactaggagatagaagcctaaac

SEQ ID NO: 1009993 - DNA, 33 bp, Homo sapien
gttacatctggcaacccagaaacaaagttctgt

SEQ ID NO: 1009994 - DNA, 33 bp, Homo sapien
gttacatctggcaacctagaaacaaagttctgt

SEQ ID NO: 1009995 - DNA, 33 bp, Homo sapien
cataaaaacctcaagacaaggccgagcgtggtg

SEQ ID NO: 1009996 - DNA, 33 bp, Homo sapien
cataaaaacctcaagagaaggccgagcgtggtg

SEQ ID NO: 1009997 - DNA, 33 bp, Homo sapien
tgaatagtcagttttcaaagtgaattaagaata

SEQ ID NO: 1009998 - DNA, 33 bp, Homo sapien
tgaatagtcagttttcgaagtgaattaagaata

SEQ ID NO: 1009999 - DNA, 33 bp, Homo sapien
tcattttcatcaaggaactacaggcaagattat

SEQ ID NO: 1010000 - DNA, 33 bp, Homo sapien
tcattttcatcaaggagctacaggcaagattat

SEQ ID NO: 1010001 - DNA, 33 bp, Homo sapien
ttcaaaacatgctcctcaatagatctgaatata

SEQ ID NO: 1010002 - DNA, 33 bp, Homo sapien
ttcaaaacatgctccttaatagatctgaatata

SEQ ID NO: 1010003 - DNA, 33 bp, Homo sapien
gtgctctctgatactacagacataaaaattctt

SEQ ID NO: 1010004 - DNA, 33 bp, Homo sapien
gtgctctctgatactatagacataaaaattctt

SEQ ID NO: 1010005 - DNA, 33 bp, Homo sapien
tacaccactgtgtacacatctttgttcaatttt

SEQ ID NO: 1010006 - DNA, 33 bp, Homo sapien
tacaccactgtgtacatatctttgttcaatttt

SEQ ID NO: 1010007 - DNA, 33 bp, Homo sapien
ataaatggttctgagacaaaagaacagccattt

SEQ ID NO: 1010008 - DNA, 33 bp, Homo sapien
ataaatggttctgagataaaagaacagccattt

SEQ ID NO: 1010009 - DNA, 33 bp, Homo sapien
taacatcttgaaaaacggtagtatggtatcaaa

SEQ ID NO: 1010010 - DNA, 33 bp, Homo sapien
taacatcttgaaaaactgtagtatggtatcaaa

SEQ ID NO: 1010011 - DNA, 33 bp, Homo sapien
tagctggacttaagtaagcatttagttttcaag

SEQ ID NO: 1010012 - DNA, 33 bp, Homo sapien
tagctggacttaagtaggcatttagttttcaag

SEQ ID NO: 1010013 - DNA, 33 bp, Homo sapien
tcaaagagccgagtgacactgccaaatactacc

SEQ ID NO: 1010014 - DNA, 33 bp, Homo sapien
tcaaagagccgagtgatactgccaaatactacc

SEQ ID NO: 1010015 - DNA, 33 bp, Homo sapien
agaggcccaggcccggaaagtgtacagtggcag

SEQ ID NO: 1010016 - DNA, 33 bp, Homo sapien
agaggcccaggcccgggaagtgtacagtggcag

SEQ ID NO: 1010017 - DNA, 33 bp, Homo sapien
catgtgagatgactaccacaaagaaataccaca

SEQ ID NO: 1010018 - DNA, 33 bp, Homo sapien
catgtgagatgactactacaaagaaataccaca

SEQ ID NO: 1010019 - DNA, 33 bp, Homo sapien
ttgaccctcctccaaacgtacagcaattttcct

SEQ ID NO: 1010020 - DNA, 33 bp, Homo sapien
ttgaccctcctccaaaggtacagcaattttcct

SEQ ID NO: 1010021 - DNA, 33 bp, Homo sapien
gatattttgaaggacagaggaatctgggttgac

SEQ ID NO: 1010022 - DNA, 33 bp, Homo sapien
gatattttgaaggacataggaatctgggttgac

SEQ ID NO: 1010023 - DNA, 33 bp, Homo sapien
taacaagtatgattatcagagtcagcaaaataa

SEQ ID NO: 1010024 - DNA, 33 bp, Homo sapien
taacaagtatgattattagagtcagcaaaataa

SEQ ID NO: 1010025 - DNA, 33 bp, Homo sapien
tcagctctggtttccaataccatccttcagtaa

SEQ ID NO: 1010026 - DNA, 33 bp, Homo sapien
tcagctctggtttccagtaccatccttcagtaa

SEQ ID NO: 1010027 - DNA, 33 bp, Homo sapien
ccaggtgatcaaggtgcacgtcatcaacagtga

SEQ ID NO: 1010028 - DNA, 33 bp, Homo sapien
ccaggtgatcaaggtgtacgtcatcaacagtga

SEQ ID NO: 1010029 - DNA, 33 bp, Homo sapien
tctttccaagagtcacacagaatgtgcggttaa

SEQ ID NO: 1010030 - DNA, 33 bp, Homo sapien
tctttccaagagtcacccagaatgtgcggttaa

SEQ ID NO: 1010031 - DNA, 33 bp, Homo sapien
tatttatcctctagaaagccagggaatttgttc

SEQ ID NO: 1010032 - DNA, 33 bp, Homo sapien
tatttatcctctagaaggccagggaatttgttc

SEQ ID NO: 1010033 - DNA, 33 bp, Homo sapien
taaacaatgaaaaacactcagtcaccccttggc

SEQ ID NO: 1010034 - DNA, 33 bp, Homo sapien
taaacaatgaaaaacattcagtcaccccttggc

SEQ ID NO: 1010035 - DNA, 33 bp, Homo sapien
aacaactggaacaggaaataaacaatgaaaaac

SEQ ID NO: 1010036 - DNA, 33 bp, Homo sapien
aacaactggaacaggagataaacaatgaaaaac

SEQ ID NO: 1010037 - DNA, 33 bp, Homo sapien
gatttgtttgtaggccacccaaaaaattaaggt

SEQ ID NO: 1010038 - DNA, 33 bp, Homo sapien
gatttgtttgtaggccgcccaaaaaattaaggt

SEQ ID NO: 1010039 - DNA, 33 bp, Homo sapien
atgacaatagagcaaacgagaagacaagaagaa

SEQ ID NO: 1010040 - DNA, 33 bp, Homo sapien
atgacaatagagcaaaggagaagacaagaagaa

SEQ ID NO: 1010041 - DNA, 33 bp, Homo sapien
cattgaatctctgggaactagaaaatgggctaa

SEQ ID NO: 1010042 - DNA, 33 bp, Homo sapien
cattgaatctctgggagctagaaaatgggctaa

SEQ ID NO: 1010043 - DNA, 33 bp, Homo sapien
gaggaaaataaagccaactatggatttctttag

SEQ ID NO: 1010044 - DNA, 33 bp, Homo sapien
gaggaaaataaagccagctatggatttctttag

SEQ ID NO: 1010045 - DNA, 33 bp, Homo sapien
tactattttgttgaggcaaaaccctacagcaac

SEQ ID NO: 1010046 - DNA, 33 bp, Homo sapien
tactattttgttgaggtaaaaccctacagcaac

SEQ ID NO: 1010047 - DNA, 33 bp, Homo sapien
tttgcctgattaaaagcacaagttccccccatt

SEQ ID NO: 1010048 - DNA, 33 bp, Homo sapien
tttgcctgattaaaagtacaagttccccccatt

SEQ ID NO: 1010049 - DNA, 33 bp, Homo sapien
tgttgcagtcaggatacagaaatttgcctgatt

SEQ ID NO: 1010050 - DNA, 33 bp, Homo sapien
tgttgcagtcaggatagagaaatttgcctgatt

SEQ ID NO: 1010051 - DNA, 33 bp, Homo sapien
atgagaccacaacaagaaaatggagaatcagag

SEQ ID NO: 1010052 - DNA, 33 bp, Homo sapien
atgagaccacaacaaggaaatggagaatcagag

SEQ ID NO: 1010053 - DNA, 33 bp, Homo sapien
tttctggatgaaactacagatatgtttgggcaa

SEQ ID NO: 1010054 - DNA, 33 bp, Homo sapien
tttctggatgaaactatagatatgtttgggcaa

SEQ ID NO: 1010055 - DNA, 33 bp, Homo sapien
aaacaggcttatgtaaaggaccgtgctttaaat

SEQ ID NO: 1010056 - DNA, 33 bp, Homo sapien
aaacaggcttatgtaagggaccgtgctttaaat

SEQ ID NO: 1010057 - DNA, 33 bp, Homo sapien
tattgtaaatggagtgcacaaagataattcagc

SEQ ID NO: 1010058 - DNA, 33 bp, Homo sapien
tattgtaaatggagtgtacaaagataattcagc

SEQ ID NO: 1010059 - DNA, 33 bp, Homo sapien
gacactgagagataagaacttgctgaattatct

SEQ ID NO: 1010060 - DNA, 33 bp, Homo sapien
gacactgagagataaggacttgctgaattatct

SEQ ID NO: 1010061 - DNA, 33 bp, Homo sapien
ccccagagtagagcaaatccagtttgaaaatat

SEQ ID NO: 1010062 - DNA, 33 bp, Homo sapien
ccccagagtagagcaattccagtttgaaaatat

SEQ ID NO: 1010063 - DNA, 33 bp, Homo sapien
ttcaaatttctttaaaactgaatctcgtaatca

SEQ ID NO: 1010064 - DNA, 33 bp, Homo sapien
ttcaaatttctttaaacctgaatctcgtaatca

SEQ ID NO: 1010065 - DNA, 33 bp, Homo sapien
acagcattcagtaatacccagtttcaggcatac

SEQ ID NO: 1010066 - DNA, 33 bp, Homo sapien
acagcattcagtaatatccagtttcaggcatac

SEQ ID NO: 1010067 - DNA, 33 bp, Homo sapien
tcaaaggatgcctgacacagtaactcctcagta

SEQ ID NO: 1010068 - DNA, 33 bp, Homo sapien
tcaaaggatgcctgacccagtaactcctcagta

SEQ ID NO: 1010069 - DNA, 33 bp, Homo sapien
agcataaaagagagaacgtacagaaagcgattt

SEQ ID NO: 1010070 - DNA, 33 bp, Homo sapien
agcataaaagagagaatgtacagaaagcgattt

SEQ ID NO: 1010071 - DNA, 33 bp, Homo sapien
tttagtaccggagacacgatgcgtcaaagaagt

SEQ ID NO: 1010072 - DNA, 33 bp, Homo sapien
tttagtaccggagacatgatgcgtcaaagaagt

SEQ ID NO: 1010073 - DNA, 33 bp, Homo sapien
tgccacactcaatcacaaaaggtttagagtgca

SEQ ID NO: 1010074 - DNA, 33 bp, Homo sapien
tgccacactcaatcacgaaaggtttagagtgca

SEQ ID NO: 1010075 - DNA, 33 bp, Homo sapien
caaaaatcaatggaggcaagtcttcataggtag

SEQ ID NO: 1010076 - DNA, 33 bp, Homo sapien
caaaaatcaatggagggaagtcttcataggtag

SEQ ID NO: 1010077 - DNA, 33 bp, Homo sapien
ctcccctctttgttccaaataaagtcagtctcc

SEQ ID NO: 1010078 - DNA, 33 bp, Homo sapien
ctcccctctttgttcccaataaagtcagtctcc

SEQ ID NO: 1010079 - DNA, 33 bp, Homo sapien
cttatagtcctatctgaagtttaccaaaatttc

SEQ ID NO: 1010080 - DNA, 33 bp, Homo sapien
cttatagtcctatctgcagtttaccaaaatttc

SEQ ID NO: 1010081 - DNA, 33 bp, Homo sapien
gaggaagactagattcacatagaaatctgttac

SEQ ID NO: 1010082 - DNA, 33 bp, Homo sapien
gaggaagactagattcgcatagaaatctgttac

SEQ ID NO: 1010083 - DNA, 33 bp, Homo sapien
cctgattccaaacccactcaaacttctgttccc

SEQ ID NO: 1010084 - DNA, 33 bp, Homo sapien
cctgattccaaacccagtcaaacttctgttccc

SEQ ID NO: 1010085 - DNA, 33 bp, Homo sapien
ttaccccttctcatgacgtggcaaaagtgaagc

SEQ ID NO: 1010086 - DNA, 33 bp, Homo sapien
ttaccccttctcatgatgtggcaaaagtgaagc

SEQ ID NO: 1010087 - DNA, 33 bp, Homo sapien
agtatgtaacaggaaacgctgctgcaatagatg

SEQ ID NO: 1010088 - DNA, 33 bp, Homo sapien
agtatgtaacaggaaaggctgctgcaatagatg

SEQ ID NO: 1010089 - DNA, 33 bp, Homo sapien
tggaaaaaaactgtccaagtctttgtgccctgt

SEQ ID NO: 1010090 - DNA, 33 bp, Homo sapien
tggaaaaaaactgtccgagtctttgtgccctgt

SEQ ID NO: 1010091 - DNA, 33 bp, Homo sapien
tgggattagggaagaacctttattacacagaag

SEQ ID NO: 1010092 - DNA, 33 bp, Homo sapien
tgggattagggaagaagctttattacacagaag

SEQ ID NO: 1010093 - DNA, 33 bp, Homo sapien
taaccagttttgtgaactgaaactacaaactac

SEQ ID NO: 1010094 - DNA, 33 bp, Homo sapien
taaccagttttgtgaattgaaactacaaactac

SEQ ID NO: 1010095 - DNA, 33 bp, Homo sapien
ccttgacaatgcagtacgggtgagtttcctctg

SEQ ID NO: 1010096 - DNA, 33 bp, Homo sapien
ccttgacaatgcagtatgggtgagtttcctctg

SEQ ID NO: 1010097 - DNA, 33 bp, Homo sapien
gcagtctgatttcacaagaccctgcctcttggc

SEQ ID NO: 1010098 - DNA, 33 bp, Homo sapien
gcagtctgatttcacaggaccctgcctcttggc

SEQ ID NO: 1010099 - DNA, 33 bp, Homo sapien
agaagggatttcccacaataattttcaggctgc

SEQ ID NO: 1010100 - DNA, 33 bp, Homo sapien
agaagggatttcccacgataattttcaggctgc

SEQ ID NO: 1010101 - DNA, 33 bp, Homo sapien
aggaggtaattgagaaaatctgaatgtttagaa

SEQ ID NO: 1010102 - DNA, 33 bp, Homo sapien
aggaggtaattgagaagatctgaatgtttagaa

SEQ ID NO: 1010103 - DNA, 33 bp, Homo sapien
tcaacaggtgaatctacataaaaattgcactat

SEQ ID NO: 1010104 - DNA, 33 bp, Homo sapien
tcaacaggtgaatctatataaaaattgcactat

SEQ ID NO: 1010105 - DNA, 33 bp, Homo sapien
taatattattaagatgccaacattattcaaagc

SEQ ID NO: 1010106 - DNA, 33 bp, Homo sapien
taatattattaagatgtcaacattattcaaagc

SEQ ID NO: 1010107 - DNA, 33 bp, Homo sapien
cactggaaaccagcagactctgtggaacgtaca

SEQ ID NO: 1010108 - DNA, 33 bp, Homo sapien
cactggaaaccagcagtctctgtggaacgtaca

SEQ ID NO: 1010109 - DNA, 33 bp, Homo sapien
actagatatttatagcagaacccaccaactcta

SEQ ID NO: 1010110 - DNA, 33 bp, Homo sapien
actagatatttatagccgaacccaccaactcta

SEQ ID NO: 1010111 - DNA, 33 bp, Homo sapien
ttgtgttatggaagtaggttaaccaagaggtat

SEQ ID NO: 1010112 - DNA, 33 bp, Homo sapien
ttgtgttatggaagtatgttaaccaagaggtat

SEQ ID NO: 1010113 - DNA, 33 bp, Homo sapien
aggcaagagcagataggaccttgtcaccattgt

SEQ ID NO: 1010114 - DNA, 33 bp, Homo sapien
aggcaagagcagatagtaccttgtcaccattgt

SEQ ID NO: 1010115 - DNA, 33 bp, Homo sapien
tatcaggtctggccaactgtatcacctccttga

SEQ ID NO: 1010116 - DNA, 33 bp, Homo sapien
tatcaggtctggccaattgtatcacctccttga

SEQ ID NO: 1010117 - DNA, 33 bp, Homo sapien
cccacaggaaatttgacggaatgggaaagagaa

SEQ ID NO: 1010118 - DNA, 33 bp, Homo sapien
cccacaggaaatttgatggaatgggaaagagaa

SEQ ID NO: 1010119 - DNA, 33 bp, Homo sapien
taaagctcctggcttacagtagacaccaattaa

SEQ ID NO: 1010120 - DNA, 33 bp, Homo sapien
taaagctcctggcttagagtagacaccaattaa

SEQ ID NO: 1010121 - DNA, 33 bp, Homo sapien
ttttctgattctgtgacagcacgtgatcacttt

SEQ ID NO: 1010122 - DNA, 33 bp, Homo sapien
ttttctgattctgtgagagcacgtgatcacttt

SEQ ID NO: 1010123 - DNA, 33 bp, Homo sapien
cttgctattaaagccacagcggtaattccaaat

SEQ ID NO: 1010124 - DNA, 33 bp, Homo sapien
cttgctattaaagccagagcggtaattccaaat

SEQ ID NO: 1010125 - DNA, 33 bp, Homo sapien
ctccactttgctagagaaccagcagcctcccct

SEQ ID NO: 1010126 - DNA, 33 bp, Homo sapien
ctccactttgctagaggaccagcagcctcccct

SEQ ID NO: 1010127 - DNA, 33 bp, Homo sapien
ctatttctgctttcgaaaactaccttgagtagg

SEQ ID NO: 1010128 - DNA, 33 bp, Homo sapien
ctatttctgctttcgacaactaccttgagtagg

SEQ ID NO: 1010129 - DNA, 33 bp, Homo sapien
cagccctaaagacctaacttttagcacaagttt

SEQ ID NO: 1010130 - DNA, 33 bp, Homo sapien
cagccctaaagacctagcttttagcacaagttt

SEQ ID NO: 1010131 - DNA, 33 bp, Homo sapien
gaaaaaaagtagatgacgaaagtttctttatag

SEQ ID NO: 1010132 - DNA, 33 bp, Homo sapien
gaaaaaaagtagatgatgaaagtttctttatag

SEQ ID NO: 1010133 - DNA, 33 bp, Homo sapien
actggtactaattccacgaaaaggccctacaga

SEQ ID NO: 1010134 - DNA, 33 bp, Homo sapien
actggtactaattccatgaaaaggccctacaga

SEQ ID NO: 1010135 - DNA, 33 bp, Homo sapien
cagattttcagaaaaactgcaaggtgtgtttaa

SEQ ID NO: 1010136 - DNA, 33 bp, Homo sapien
cagattttcagaaaaattgcaaggtgtgtttaa

SEQ ID NO: 1010137 - DNA, 33 bp, Homo sapien
catcatctggtgtcttaaaaatgtacgaatttt

SEQ ID NO: 1010138 - DNA, 33 bp, Homo sapien
catcatctggtgtctttaaaatgtacgaatttt

SEQ ID NO: 1010139 - DNA, 33 bp, Homo sapien
attcctttagtaccaacgtgaattcaaggcttt

SEQ ID NO: 1010140 - DNA, 33 bp, Homo sapien
attcctttagtaccaatgtgaattcaaggcttt

SEQ ID NO: 1010141 - DNA, 33 bp, Homo sapien
attatcctaagcaaataaaggcagaacagaaat

SEQ ID NO: 1010142 - DNA, 33 bp, Homo sapien
attatcctaagcaaattaaggcagaacagaaat

SEQ ID NO: 1010143 - DNA, 33 bp, Homo sapien
gtccaaagcagcatcaaaacaaagctgaaccca

SEQ ID NO: 1010144 - DNA, 33 bp, Homo sapien
gtccaaagcagcatcagaacaaagctgaaccca

SEQ ID NO: 1010145 - DNA, 33 bp, Homo sapien
atctatatgaaattcactacagaacaagcaggt

SEQ ID NO: 1010146 - DNA, 33 bp, Homo sapien
atctatatgaaattcagtacagaacaagcaggt

SEQ ID NO: 1010147 - DNA, 33 bp, Homo sapien
tgttttaacctgtggcaacccaaacctggctaa

SEQ ID NO: 1010148 - DNA, 33 bp, Homo sapien
tgttttaacctgtggctacccaaacctggctaa

SEQ ID NO: 1010149 - DNA, 33 bp, Homo sapien
ccaactcttctttaggcccattctctaaatacc

SEQ ID NO: 1010150 - DNA, 33 bp, Homo sapien
ccaactcttctttaggtccattctctaaatacc

SEQ ID NO: 1010151 - DNA, 33 bp, Homo sapien
cctcagacctggaggcaattgagtttagaaccc

SEQ ID NO: 1010152 - DNA, 33 bp, Homo sapien
cctcagacctggaggcgattgagtttagaaccc

SEQ ID NO: 1010153 - DNA, 33 bp, Homo sapien
atactacaacaaatacagctctttaccttgaaa

SEQ ID NO: 1010154 - DNA, 33 bp, Homo sapien
atactacaacaaatacggctctttaccttgaaa

SEQ ID NO: 1010155 - DNA, 33 bp, Homo sapien
atgcaactttgtagccactaggagaagagatgt

SEQ ID NO: 1010156 - DNA, 33 bp, Homo sapien
atgcaactttgtagccgctaggagaagagatgt

SEQ ID NO: 1010157 - DNA, 33 bp, Homo sapien
agcaaggctagtgaaacgaaatcagggcatttc

SEQ ID NO: 1010158 - DNA, 33 bp, Homo sapien
agcaaggctagtgaaatgaaatcagggcatttc

SEQ ID NO: 1010159 - DNA, 33 bp, Homo sapien
cataactcatcagccaaaattagtcatatgact

SEQ ID NO: 1010160 - DNA, 33 bp, Homo sapien
cataactcatcagccacaattagtcatatgact

SEQ ID NO: 1010161 - DNA, 33 bp, Homo sapien
agaggctggagaaggacatgctatccatttcag

SEQ ID NO: 1010162 - DNA, 33 bp, Homo sapien
agaggctggagaaggagatgctatccatttcag

SEQ ID NO: 1010163 - DNA, 33 bp, Homo sapien
agttagctgggttagacaagagactgaaaggtc

SEQ ID NO: 1010164 - DNA, 33 bp, Homo sapien
agttagctgggttagagaagagactgaaaggtc

SEQ ID NO: 1010165 - DNA, 33 bp, Homo sapien
gtgacagctccgtgcaagttactgagtgtggag

SEQ ID NO: 1010166 - DNA, 33 bp, Homo sapien
gtgacagctccgtgcatgttactgagtgtggag

SEQ ID NO: 1010167 - DNA, 33 bp, Homo sapien
agataccagacataaacatggcaacacccttcc

SEQ ID NO: 1010168 - DNA, 33 bp, Homo sapien
agataccagacataaatatggcaacacccttcc

SEQ ID NO: 1010169 - DNA, 33 bp, Homo sapien
agtaaagtcaccataaacatcagctttcaggaa

SEQ ID NO: 1010170 - DNA, 33 bp, Homo sapien
agtaaagtcaccataagcatcagctttcaggaa

SEQ ID NO: 1010171 - DNA, 33 bp, Homo sapien
tttttgcaggagtaaactgagtctctttcattg

SEQ ID NO: 1010172 - DNA, 33 bp, Homo sapien
tttttgcaggagtaaattgagtctctttcattg

SEQ ID NO: 1010173 - DNA, 33 bp, Homo sapien
accatctaatattgcactgaggatcactttcga

SEQ ID NO: 1010174 - DNA, 33 bp, Homo sapien
accatctaatattgcattgaggatcactttcga

SEQ ID NO: 1010175 - DNA, 33 bp, Homo sapien
gccctaactactccaaccccttaggccacattt

SEQ ID NO: 1010176 - DNA, 33 bp, Homo sapien
gccctaactactccaatcccttaggccacattt

SEQ ID NO: 1010177 - DNA, 33 bp, Homo sapien
atgatgcaattatgttcaaagaagagtgattct

SEQ ID NO: 1010178 - DNA, 33 bp, Homo sapien
atgatgcaattatgtttaaagaagagtgattct

SEQ ID NO: 1010179 - DNA, 33 bp, Homo sapien
ctgattttggactccaacacagttaggctcaaa

SEQ ID NO: 1010180 - DNA, 33 bp, Homo sapien
ctgattttggactccaccacagttaggctcaaa

SEQ ID NO: 1010181 - DNA, 33 bp, Homo sapien
gtggcagcctgtggaacagcccagcaaataagt

SEQ ID NO: 1010182 - DNA, 33 bp, Homo sapien
gtggcagcctgtggaatagcccagcaaataagt

SEQ ID NO: 1010183 - DNA, 33 bp, Homo sapien
taggtgtggtgaagtgaaaagaggatgaaggac

SEQ ID NO: 1010184 - DNA, 33 bp, Homo sapien
taggtgtggtgaagtggaaagaggatgaaggac

SEQ ID NO: 1010185 - DNA, 33 bp, Homo sapien
attcccctgtctctcacaaactgtggccaagaa

SEQ ID NO: 1010186 - DNA, 33 bp, Homo sapien
attcccctgtctctcataaactgtggccaagaa

SEQ ID NO: 1010187 - DNA, 33 bp, Homo sapien
ttctggcatctttccaccattgttgctatactg

SEQ ID NO: 1010188 - DNA, 33 bp, Homo sapien
ttctggcatctttccatcattgttgctatactg

SEQ ID NO: 1010189 - DNA, 33 bp, Homo sapien
cccataaggtagtttacgattacttcttccatt

SEQ ID NO: 1010190 - DNA, 33 bp, Homo sapien
cccataaggtagtttatgattacttcttccatt

SEQ ID NO: 1010191 - DNA, 33 bp, Homo sapien
ctgcccttggagaaggaaggagccatttagagt

SEQ ID NO: 1010192 - DNA, 33 bp, Homo sapien
ctgcccttggagaagggaggagccatttagagt

SEQ ID NO: 1010193 - DNA, 33 bp, Homo sapien
agggcagccattgtacccaattttgtgtttatc

SEQ ID NO: 1010194 - DNA, 33 bp, Homo sapien
agggcagccattgtactcaattttgtgtttatc

SEQ ID NO: 1010195 - DNA, 33 bp, Homo sapien
ctgttgtgtaccagctaaatatcaaccctgtac

SEQ ID NO: 1010196 - DNA, 33 bp, Homo sapien
ctgttgtgtaccagctgaatatcaaccctgtac

SEQ ID NO: 1010197 - DNA, 33 bp, Homo sapien
gtaataatttggtaaagaggccctactgctctc

SEQ ID NO: 1010198 - DNA, 33 bp, Homo sapien
gtaataatttggtaaataggccctactgctctc

SEQ ID NO: 1010199 - DNA, 33 bp, Homo sapien
tgtggccctagcttaccagatgagcaatgaaca

SEQ ID NO: 1010200 - DNA, 33 bp, Homo sapien
tgtggccctagcttactagatgagcaatgaaca

SEQ ID NO: 1010201 - DNA, 33 bp, Homo sapien
acagatttcatagagcaataactgaagttgtgt

SEQ ID NO: 1010202 - DNA, 33 bp, Homo sapien
acagatttcatagagcgataactgaagttgtgt

SEQ ID NO: 1010203 - DNA, 33 bp, Homo sapien
actctcaagtggttggcaactttaactacagtc

SEQ ID NO: 1010204 - DNA, 33 bp, Homo sapien
actctcaagtggttggtaactttaactacagtc

SEQ ID NO: 1010205 - DNA, 33 bp, Homo sapien
cactacagcttttcaactaattttagccaatga

SEQ ID NO: 1010206 - DNA, 33 bp, Homo sapien
cactacagcttttcaagtaattttagccaatga

SEQ ID NO: 1010207 - DNA, 33 bp, Homo sapien
catgcttatttggcctaaaaacagctattttta

SEQ ID NO: 1010208 - DNA, 33 bp, Homo sapien
catgcttatttggcctgaaaacagctattttta

SEQ ID NO: 1010209 - DNA, 33 bp, Homo sapien
ataagtatgcagaatcaatgagttagagaaatt

SEQ ID NO: 1010210 - DNA, 33 bp, Homo sapien
ataagtatgcagaatcgatgagttagagaaatt

SEQ ID NO: 1010211 - DNA, 33 bp, Homo sapien
agtggtcttttaatacggctggcatggatccct

SEQ ID NO: 1010212 - DNA, 33 bp, Homo sapien
agtggtcttttaatactgctggcatggatccct

SEQ ID NO: 1010213 - DNA, 33 bp, Homo sapien
gatcagacccagaacactggagatggactagcc

SEQ ID NO: 1010214 - DNA, 33 bp, Homo sapien
gatcagacccagaacattggagatggactagcc

SEQ ID NO: 1010215 - DNA, 33 bp, Homo sapien
tgcttaaaacccacgaattgggcagtttgtaca

SEQ ID NO: 1010216 - DNA, 33 bp, Homo sapien
tgcttaaaacccacgatttgggcagtttgtaca

SEQ ID NO: 1010217 - DNA, 33 bp, Homo sapien
gatggtctttgcaaaaagtcatgcaaaaacaat

SEQ ID NO: 1010218 - DNA, 33 bp, Homo sapien
gatggtctttgcaaaacgtcatgcaaaaacaat

SEQ ID NO: 1010219 - DNA, 33 bp, Homo sapien
tctagaagtttccagacaccaaaaaatgcaggc

SEQ ID NO: 1010220 - DNA, 33 bp, Homo sapien
tctagaagtttccagagaccaaaaaatgcaggc

SEQ ID NO: 1010221 - DNA, 33 bp, Homo sapien
gttggtagaaggaaagccttggattacatgatc

SEQ ID NO: 1010222 - DNA, 33 bp, Homo sapien
gttggtagaaggaaaggcttggattacatgatc

SEQ ID NO: 1010223 - DNA, 33 bp, Homo sapien
ctactgcgccttcaacaaaaaatgagtttacca

SEQ ID NO: 1010224 - DNA, 33 bp, Homo sapien
ctactgcgccttcaacgaaaaatgagtttacca

SEQ ID NO: 1010225 - DNA, 33 bp, Homo sapien
tgggactgaggacaagccactatcaccattgaa

SEQ ID NO: 1010226 - DNA, 33 bp, Homo sapien
tgggactgaggacaaggcactatcaccattgaa

SEQ ID NO: 1010227 - DNA, 33 bp, Homo sapien
tatgtgaagttgcaaaagagatacataataagt

SEQ ID NO: 1010228 - DNA, 33 bp, Homo sapien
tatgtgaagttgcaaaggagatacataataagt

SEQ ID NO: 1010229 - DNA, 33 bp, Homo sapien
aggcaccattgaggtagaagattgcattacccc

SEQ ID NO: 1010230 - DNA, 33 bp, Homo sapien
aggcaccattgaggtataagattgcattacccc

SEQ ID NO: 1010231 - DNA, 33 bp, Homo sapien
ttttgaggggacacaaacgttcattatatagct

SEQ ID NO: 1010232 - DNA, 33 bp, Homo sapien
ttttgaggggacacaagcgttcattatatagct

SEQ ID NO: 1010233 - DNA, 33 bp, Homo sapien
gcaaatctgtgctaataagtcaagcatccagtt

SEQ ID NO: 1010234 - DNA, 33 bp, Homo sapien
gcaaatctgtgctaatgagtcaagcatccagtt

SEQ ID NO: 1010235 - DNA, 33 bp, Homo sapien
gctttacttgcaaggacagtatacacagcactc

SEQ ID NO: 1010236 - DNA, 33 bp, Homo sapien
gctttacttgcaaggatagtatacacagcactc

SEQ ID NO: 1010237 - DNA, 33 bp, Homo sapien
ttacagtgggataaaagttcagaatcatacaga

SEQ ID NO: 1010238 - DNA, 33 bp, Homo sapien
ttacagtgggataaaatttcagaatcatacaga

SEQ ID NO: 1010239 - DNA, 33 bp, Homo sapien
atactggaatggccaccatatccctcttacagt

SEQ ID NO: 1010240 - DNA, 33 bp, Homo sapien
atactggaatggccactatatccctcttacagt

SEQ ID NO: 1010241 - DNA, 33 bp, Homo sapien
acataaattagaagctcaaaacatattacacaa

SEQ ID NO: 1010242 - DNA, 33 bp, Homo sapien
acataaattagaagctgaaaacatattacacaa

SEQ ID NO: 1010243 - DNA, 33 bp, Homo sapien
cagaagtccaaagaaacagagagagcaggaaaa

SEQ ID NO: 1010244 - DNA, 33 bp, Homo sapien
cagaagtccaaagaaagagagagagcaggaaaa

SEQ ID NO: 1010245 - DNA, 33 bp, Homo sapien
gaatcaaagtcttttccaatattgtcctaaagt

SEQ ID NO: 1010246 - DNA, 33 bp, Homo sapien
gaatcaaagtcttttctaatattgtcctaaagt

SEQ ID NO: 1010247 - DNA, 33 bp, Homo sapien
atacatgtttatataacgtttaagtcactgcaa

SEQ ID NO: 1010248 - DNA, 33 bp, Homo sapien
atacatgtttatataatgtttaagtcactgcaa

SEQ ID NO: 1010249 - DNA, 33 bp, Homo sapien
tcaaccatcatggctacgcacacttcattcagt

SEQ ID NO: 1010250 - DNA, 33 bp, Homo sapien
tcaaccatcatggctatgcacacttcattcagt

SEQ ID NO: 1010251 - DNA, 33 bp, Homo sapien
tccagaattgaatgtcgatccttttagaatcaa

SEQ ID NO: 1010252 - DNA, 33 bp, Homo sapien
tccagaattgaatgtctatccttttagaatcaa

SEQ ID NO: 1010253 - DNA, 33 bp, Homo sapien
ttacataatgaagtgaaccgtattaaaaaacgg

SEQ ID NO: 1010254 - DNA, 33 bp, Homo sapien
ttacataatgaagtgacccgtattaaaaaacgg

SEQ ID NO: 1010255 - DNA, 33 bp, Homo sapien
attcgccactactgtcaagacacagaagagttt

SEQ ID NO: 1010256 - DNA, 33 bp, Homo sapien
attcgccactactgtcgagacacagaagagttt

SEQ ID NO: 1010257 - DNA, 33 bp, Homo sapien
ttggggcctccagctcacagaatcaattattca

SEQ ID NO: 1010258 - DNA, 33 bp, Homo sapien
ttggggcctccagctcgcagaatcaattattca

SEQ ID NO: 1010259 - DNA, 33 bp, Homo sapien
cccacccttcttcaggcatggatgcatttgtgt

SEQ ID NO: 1010260 - DNA, 33 bp, Homo sapien
cccacccttcttcaggtatggatgcatttgtgt

SEQ ID NO: 1010261 - DNA, 33 bp, Homo sapien
aactccatgctttttgaaggtaggaatcaagtt

SEQ ID NO: 1010262 - DNA, 33 bp, Homo sapien
aactccatgctttttggaggtaggaatcaagtt

SEQ ID NO: 1010263 - DNA, 33 bp, Homo sapien
ctctgattcataaatggcatcttctagctgtgt

SEQ ID NO: 1010264 - DNA, 33 bp, Homo sapien
ctctgattcataaatgtcatcttctagctgtgt

SEQ ID NO: 1010265 - DNA, 33 bp, Homo sapien
catgaaaaaaacatgaagttaagcagagagaca

SEQ ID NO: 1010266 - DNA, 33 bp, Homo sapien
catgaaaaaaacatgacgttaagcagagagaca

SEQ ID NO: 1010267 - DNA, 33 bp, Homo sapien
agaaagttcagtaccaatacatgaaaaaaacat

SEQ ID NO: 1010268 - DNA, 33 bp, Homo sapien
agaaagttcagtaccagtacatgaaaaaaacat

SEQ ID NO: 1010269 - DNA, 33 bp, Homo sapien
attcctaaggagagtacgtggtcattgcagaaa

SEQ ID NO: 1010270 - DNA, 33 bp, Homo sapien
attcctaaggagagtaggtggtcattgcagaaa

SEQ ID NO: 1010271 - DNA, 33 bp, Homo sapien
ttcaattcagttgtccacatggcagaagtccag

SEQ ID NO: 1010272 - DNA, 33 bp, Homo sapien
ttcaattcagttgtccgcatggcagaagtccag

SEQ ID NO: 1010273 - DNA, 33 bp, Homo sapien
ttgaagacataccagaaagaaatagtcctgagt

SEQ ID NO: 1010274 - DNA, 33 bp, Homo sapien
ttgaagacataccagatagaaatagtcctgagt

SEQ ID NO: 1010275 - DNA, 33 bp, Homo sapien
aaaactcaatgtgaacaattatcagaaagaaga

SEQ ID NO: 1010276 - DNA, 33 bp, Homo sapien
aaaactcaatgtgaacgattatcagaaagaaga

SEQ ID NO: 1010277 - DNA, 33 bp, Homo sapien
agcataattttaaatgcattcccttgcctatcc

SEQ ID NO: 1010278 - DNA, 33 bp, Homo sapien
agcataattttaaatggattcccttgcctatcc

SEQ ID NO: 1010279 - DNA, 33 bp, Homo sapien
tgtcacagcaatctgacgttattgttttattgc

SEQ ID NO: 1010280 - DNA, 33 bp, Homo sapien
tgtcacagcaatctgatgttattgttttattgc

SEQ ID NO: 1010281 - DNA, 33 bp, Homo sapien
aataggtgttaatctacaggaatctgtgggcag

SEQ ID NO: 1010282 - DNA, 33 bp, Homo sapien
aataggtgttaatctataggaatctgtgggcag

SEQ ID NO: 1010283 - DNA, 33 bp, Homo sapien
tctgactctgacaggtacttaaaaccaagtgaa

SEQ ID NO: 1010284 - DNA, 33 bp, Homo sapien
tctgactctgacaggtccttaaaaccaagtgaa

SEQ ID NO: 1010285 - DNA, 33 bp, Homo sapien
acaagaacagcactgacgatacttaggggtttc

SEQ ID NO: 1010286 - DNA, 33 bp, Homo sapien
acaagaacagcactgatgatacttaggggtttc

SEQ ID NO: 1010287 - DNA, 33 bp, Homo sapien
gaaggaaccttcttaccctgaaggccaaatatc

SEQ ID NO: 1010288 - DNA, 33 bp, Homo sapien
gaaggaaccttcttactctgaaggccaaatatc

SEQ ID NO: 1010289 - DNA, 33 bp, Homo sapien
actcaaaacaataatacgtgtcaagtgagtgtg

SEQ ID NO: 1010290 - DNA, 33 bp, Homo sapien
actcaaaacaataatatgtgtcaagtgagtgtg

SEQ ID NO: 1010291 - DNA, 33 bp, Homo sapien
cttgggaaagggagaacaatacaggacagcagc

SEQ ID NO: 1010292 - DNA, 33 bp, Homo sapien
cttgggaaagggagaataatacaggacagcagc

SEQ ID NO: 1010293 - DNA, 33 bp, Homo sapien
gccttgtacacacataaaaatcacattcaacat

SEQ ID NO: 1010294 - DNA, 33 bp, Homo sapien
gccttgtacacacatacaaatcacattcaacat

SEQ ID NO: 1010295 - DNA, 33 bp, Homo sapien
tcagagtaaatagtaagagaggagacagaattc

SEQ ID NO: 1010296 - DNA, 33 bp, Homo sapien
tcagagtaaatagtaatagaggagacagaattc

SEQ ID NO: 1010297 - DNA, 33 bp, Homo sapien
acacaccacagtcaagacttcaaaggaaaaaaa

SEQ ID NO: 1010298 - DNA, 33 bp, Homo sapien
acacaccacagtcaaggcttcaaaggaaaaaaa

SEQ ID NO: 1010299 - DNA, 33 bp, Homo sapien
tgttcctctaggcaaccagaaaatagcaggaca

SEQ ID NO: 1010300 - DNA, 33 bp, Homo sapien
tgttcctctaggcaactagaaaatagcaggaca

SEQ ID NO: 1010301 - DNA, 33 bp, Homo sapien
tttctgccactaacaaactcaaaactcacttct

SEQ ID NO: 1010302 - DNA, 33 bp, Homo sapien
tttctgccactaacaatctcaaaactcacttct

SEQ ID NO: 1010303 - DNA, 33 bp, Homo sapien
actcagaagagagtaaagcttttgtgatctttt

SEQ ID NO: 1010304 - DNA, 33 bp, Homo sapien
actcagaagagagtaatgcttttgtgatctttt

SEQ ID NO: 1010305 - DNA, 33 bp, Homo sapien
atgtagaccttgatgtcaatattactgctatag

SEQ ID NO: 1010306 - DNA, 33 bp, Homo sapien
atgtagaccttgatgtgaatattactgctatag

SEQ ID NO: 1010307 - DNA, 33 bp, Homo sapien
atagtttccaagagaaaactttaatgcacaaaa

SEQ ID NO: 1010308 - DNA, 33 bp, Homo sapien
atagtttccaagagaagactttaatgcacaaaa

SEQ ID NO: 1010309 - DNA, 33 bp, Homo sapien
gtgtttgagagcagaacttctctctccttttta

SEQ ID NO: 1010310 - DNA, 33 bp, Homo sapien
gtgtttgagagcagaagttctctctccttttta

SEQ ID NO: 1010311 - DNA, 33 bp, Homo sapien
cacactggtattcaaaaattgattcagaaagca

SEQ ID NO: 1010312 - DNA, 33 bp, Homo sapien
cacactggtattcaaagattgattcagaaagca

SEQ ID NO: 1010313 - DNA, 33 bp, Homo sapien
tggaaacattggagcccatagttgaatctttgg

SEQ ID NO: 1010314 - DNA, 33 bp, Homo sapien
tggaaacattggagcctatagttgaatctttgg

SEQ ID NO: 1010315 - DNA, 33 bp, Homo sapien
ttactcactggtctacactagatctcatgcaga

SEQ ID NO: 1010316 - DNA, 33 bp, Homo sapien
ttactcactggtctactctagatctcatgcaga

SEQ ID NO: 1010317 - DNA, 33 bp, Homo sapien
tgctcttagctatgtcaaccaagtcagatgggt

SEQ ID NO: 1010318 - DNA, 33 bp, Homo sapien
tgctcttagctatgtcgaccaagtcagatgggt

SEQ ID NO: 1010319 - DNA, 33 bp, Homo sapien
acagttcaagcatgaacctgatcctaaaccaac

SEQ ID NO: 1010320 - DNA, 33 bp, Homo sapien
acagttcaagcatgaatctgatcctaaaccaac

SEQ ID NO: 1010321 - DNA, 33 bp, Homo sapien
cactcagcaccttttaaaggcacaggtctgccc

SEQ ID NO: 1010322 - DNA, 33 bp, Homo sapien
cactcagcaccttttacaggcacaggtctgccc

SEQ ID NO: 1010323 - DNA, 33 bp, Homo sapien
agggaaccactgttaacggctgggagacaggat

SEQ ID NO: 1010324 - DNA, 33 bp, Homo sapien
agggaaccactgttaatggctgggagacaggat

SEQ ID NO: 1010325 - DNA, 33 bp, Homo sapien
acaaaggcatatttaacgttggaggaaagagag

SEQ ID NO: 1010326 - DNA, 33 bp, Homo sapien
acaaaggcatatttaatgttggaggaaagagag

SEQ ID NO: 1010327 - DNA, 33 bp, Homo sapien
aagatctgctgtataacatcctgcctatagtta

SEQ ID NO: 1010328 - DNA, 33 bp, Homo sapien
aagatctgctgtataagatcctgcctatagtta

SEQ ID NO: 1010329 - DNA, 33 bp, Homo sapien
tatttggtactgactgaacacacgccatgattt

SEQ ID NO: 1010330 - DNA, 33 bp, Homo sapien
tatttggtactgactggacacacgccatgattt

SEQ ID NO: 1010331 - DNA, 33 bp, Homo sapien
tagtctagaaagcttacagcgatgatcaaggga

SEQ ID NO: 1010332 - DNA, 33 bp, Homo sapien
tagtctagaaagcttatagcgatgatcaaggga

SEQ ID NO: 1010333 - DNA, 33 bp, Homo sapien
tgcagcaattcctcagaaattcttatttataga

SEQ ID NO: 1010334 - DNA, 33 bp, Homo sapien
tgcagcaattcctcagcaattcttatttataga

SEQ ID NO: 1010335 - DNA, 33 bp, Homo sapien
aatatgcttaggggaactacttgttcaatctct

SEQ ID NO: 1010336 - DNA, 33 bp, Homo sapien
aatatgcttaggggaagtacttgttcaatctct

SEQ ID NO: 1010337 - DNA, 33 bp, Homo sapien
agctgtgtggcctgtaaagaactaataaatact

SEQ ID NO: 1010338 - DNA, 33 bp, Homo sapien
agctgtgtggcctgtagagaactaataaatact

SEQ ID NO: 1010339 - DNA, 33 bp, Homo sapien
tgatttctccactacaataatattctttcaagt

SEQ ID NO: 1010340 - DNA, 33 bp, Homo sapien
tgatttctccactacagtaatattctttcaagt

SEQ ID NO: 1010341 - DNA, 33 bp, Homo sapien
aataattttataccacaatcagggacaacaata

SEQ ID NO: 1010342 - DNA, 33 bp, Homo sapien
aataattttataccacgatcagggacaacaata

SEQ ID NO: 1010343 - DNA, 33 bp, Homo sapien
ccctcgcctaatttgaagtttgttggaggaaat

SEQ ID NO: 1010344 - DNA, 33 bp, Homo sapien
ccctcgcctaatttgacgtttgttggaggaaat

SEQ ID NO: 1010345 - DNA, 33 bp, Homo sapien
tggtggcatcaagtagaataaggactgattaga

SEQ ID NO: 1010346 - DNA, 33 bp, Homo sapien
tggtggcatcaagtagtataaggactgattaga

SEQ ID NO: 1010347 - DNA, 33 bp, Homo sapien
aatattttaaaatgggccagaacagtaatagaa

SEQ ID NO: 1010348 - DNA, 33 bp, Homo sapien
aatattttaaaatgggtcagaacagtaatagaa

SEQ ID NO: 1010349 - DNA, 33 bp, Homo sapien
tttggatgtaggctagacattgtgatttctacc

SEQ ID NO: 1010350 - DNA, 33 bp, Homo sapien
tttggatgtaggctaggcattgtgatttctacc

SEQ ID NO: 1010351 - DNA, 33 bp, Homo sapien
tgtgacctgggacaaactattcaattgcaacta

SEQ ID NO: 1010352 - DNA, 33 bp, Homo sapien
tgtgacctgggacaaattattcaattgcaacta

SEQ ID NO: 1010353 - DNA, 33 bp, Homo sapien
cagttacacactgaaacgctgtctttacaactc

SEQ ID NO: 1010354 - DNA, 33 bp, Homo sapien
cagttacacactgaaatgctgtctttacaactc

SEQ ID NO: 1010355 - DNA, 33 bp, Homo sapien
tctcagtgctgacagcaaagactccttaaaaca

SEQ ID NO: 1010356 - DNA, 33 bp, Homo sapien
tctcagtgctgacagcgaagactccttaaaaca

SEQ ID NO: 1010357 - DNA, 33 bp, Homo sapien
attaccagatcccatgaaaattacagtctaata

SEQ ID NO: 1010358 - DNA, 33 bp, Homo sapien
attaccagatcccatggaaattacagtctaata

SEQ ID NO: 1010359 - DNA, 33 bp, Homo sapien
tgtttataaatgcaaaactcattaccctggtgg

SEQ ID NO: 1010360 - DNA, 33 bp, Homo sapien
tgtttataaatgcaaatctcattaccctggtgg

SEQ ID NO: 1010361 - DNA, 33 bp, Homo sapien
tcactttctctgctacagccttagaacatgagc

SEQ ID NO: 1010362 - DNA, 33 bp, Homo sapien
tcactttctctgctacggccttagaacatgagc

SEQ ID NO: 1010363 - DNA, 33 bp, Homo sapien
ccaccatcacaacttcaataactgtaagggagt

SEQ ID NO: 1010364 - DNA, 33 bp, Homo sapien
ccaccatcacaacttccataactgtaagggagt

SEQ ID NO: 1010365 - DNA, 33 bp, Homo sapien
actgggatttatataacgacttcggagaaaact

SEQ ID NO: 1010366 - DNA, 33 bp, Homo sapien
actgggatttatataatgacttcggagaaaact

SEQ ID NO: 1010367 - DNA, 33 bp, Homo sapien
atcaaaccctgctctacagtatttcaaaacaca

SEQ ID NO: 1010368 - DNA, 33 bp, Homo sapien
atcaaaccctgctctatagtatttcaaaacaca

SEQ ID NO: 1010369 - DNA, 33 bp, Homo sapien
tagagacacagtaagccagttctaggagtccca

SEQ ID NO: 1010370 - DNA, 33 bp, Homo sapien
tagagacacagtaagcgagttctaggagtccca

SEQ ID NO: 1010371 - DNA, 33 bp, Homo sapien
catttgtgatgaatgaaagcttcccaaagtggg

SEQ ID NO: 1010372 - DNA, 33 bp, Homo sapien
catttgtgatgaatgagagcttcccaaagtggg

SEQ ID NO: 1010373 - DNA, 33 bp, Homo sapien
ataccaggccagagacagctatcctttgaaagg

SEQ ID NO: 1010374 - DNA, 33 bp, Homo sapien
ataccaggccagagactgctatcctttgaaagg

SEQ ID NO: 1010375 - DNA, 33 bp, Homo sapien
catggaaagcagtaatggaaataaagatcccag

SEQ ID NO: 1010376 - DNA, 33 bp, Homo sapien
catggaaagcagtaattgaaataaagatcccag

SEQ ID NO: 1010377 - DNA, 33 bp, Homo sapien
taaggttttaaagaacacatattatgaaaagaa

SEQ ID NO: 1010378 - DNA, 33 bp, Homo sapien
taaggttttaaagaacgcatattatgaaaagaa

SEQ ID NO: 1010379 - DNA, 33 bp, Homo sapien
aaatgcatagattctccgacttccgtgttaaaa

SEQ ID NO: 1010380 - DNA, 33 bp, Homo sapien
aaatgcatagattctctgacttccgtgttaaaa

SEQ ID NO: 1010381 - DNA, 33 bp, Homo sapien
tgtgatagactagaaaacaaattctcagaaagt

SEQ ID NO: 1010382 - DNA, 33 bp, Homo sapien
tgtgatagactagaaaccaaattctcagaaagt

SEQ ID NO: 1010383 - DNA, 33 bp, Homo sapien
tactagctcatactgtaaaaagaaatccctggt

SEQ ID NO: 1010384 - DNA, 33 bp, Homo sapien
tactagctcatactgtgaaaagaaatccctggt

SEQ ID NO: 1010385 - DNA, 33 bp, Homo sapien
ataactcacatgatctcaagagcccaaatctag

SEQ ID NO: 1010386 - DNA, 33 bp, Homo sapien
ataactcacatgatctgaagagcccaaatctag

SEQ ID NO: 1010387 - DNA, 33 bp, Homo sapien
tggttttcagcactacacttcctaagtaatgtt

SEQ ID NO: 1010388 - DNA, 33 bp, Homo sapien
tggttttcagcactactcttcctaagtaatgtt

SEQ ID NO: 1010389 - DNA, 33 bp, Homo sapien
gagttttagagttagacctgtatttgaatgctg

SEQ ID NO: 1010390 - DNA, 33 bp, Homo sapien
gagttttagagttagatctgtatttgaatgctg

SEQ ID NO: 1010391 - DNA, 33 bp, Homo sapien
attggacctggccacacagataacctgtaatca

SEQ ID NO: 1010392 - DNA, 33 bp, Homo sapien
attggacctggccacagagataacctgtaatca

SEQ ID NO: 1010393 - DNA, 33 bp, Homo sapien
aactgacgggtgtacaatctcaaaatccagtga

SEQ ID NO: 1010394 - DNA, 33 bp, Homo sapien
aactgacgggtgtacagtctcaaaatccagtga

SEQ ID NO: 1010395 - DNA, 33 bp, Homo sapien
gtaaatcccttatgataagtaaggctgagaacc

SEQ ID NO: 1010396 - DNA, 33 bp, Homo sapien
gtaaatcccttatgatgagtaaggctgagaacc

SEQ ID NO: 1010397 - DNA, 33 bp, Homo sapien
ataaggtggttaatcactccgtgcctcagtttt

SEQ ID NO: 1010398 - DNA, 33 bp, Homo sapien
ataaggtggttaatcagtccgtgcctcagtttt

SEQ ID NO: 1010399 - DNA, 33 bp, Homo sapien
tgagacttcattttgccgactgtagaatgggta

SEQ ID NO: 1010400 - DNA, 33 bp, Homo sapien
tgagacttcattttgctgactgtagaatgggta

SEQ ID NO: 1010401 - DNA, 33 bp, Homo sapien
tgtccataggttcacactgggactattcagtct

SEQ ID NO: 1010402 - DNA, 33 bp, Homo sapien
tgtccataggttcacattgggactattcagtct

SEQ ID NO: 1010403 - DNA, 33 bp, Homo sapien
ctgaattagcaaatgaagtccaagtgaactgta

SEQ ID NO: 1010404 - DNA, 33 bp, Homo sapien
ctgaattagcaaatgaggtccaagtgaactgta

SEQ ID NO: 1010405 - DNA, 33 bp, Homo sapien
gtgttactttttcatacggttccagaacatcct

SEQ ID NO: 1010406 - DNA, 33 bp, Homo sapien
gtgttactttttcatatggttccagaacatcct

SEQ ID NO: 1010407 - DNA, 33 bp, Homo sapien
ataagcattgatttctcgcactgagtctaacag

SEQ ID NO: 1010408 - DNA, 33 bp, Homo sapien
ataagcattgatttctggcactgagtctaacag

SEQ ID NO: 1010409 - DNA, 33 bp, Homo sapien
aaatgaagaggacagaaatttaacaaaagcaac

SEQ ID NO: 1010410 - DNA, 33 bp, Homo sapien
aaatgaagaggacagacatttaacaaaagcaac

SEQ ID NO: 1010411 - DNA, 33 bp, Homo sapien
gatcaaggttccacagacgaaaagcaagctagg

SEQ ID NO: 1010412 - DNA, 33 bp, Homo sapien
gatcaaggttccacaggcgaaaagcaagctagg

SEQ ID NO: 1010413 - DNA, 33 bp, Homo sapien
agtgatctgactgagaccacatagccagcaagt

SEQ ID NO: 1010414 - DNA, 33 bp, Homo sapien
agtgatctgactgagagcacatagccagcaagt

SEQ ID NO: 1010415 - DNA, 33 bp, Homo sapien
cagaaccagaaagaggcataggtaaagttaaac

SEQ ID NO: 1010416 - DNA, 33 bp, Homo sapien
cagaaccagaaagaggtataggtaaagttaaac

SEQ ID NO: 1010417 - DNA, 33 bp, Homo sapien
ctgtttgggtggtcacaatcacaaaatttttga

SEQ ID NO: 1010418 - DNA, 33 bp, Homo sapien
ctgtttgggtggtcacgatcacaaaatttttga

SEQ ID NO: 1010419 - DNA, 33 bp, Homo sapien
atttttaagggattgccacatttttgcaactga

SEQ ID NO: 1010420 - DNA, 33 bp, Homo sapien
atttttaagggattgctacatttttgcaactga

SEQ ID NO: 1010421 - DNA, 33 bp, Homo sapien
aaatactataccacaacgcttcatgcttattcc

SEQ ID NO: 1010422 - DNA, 33 bp, Homo sapien
aaatactataccacaatgcttcatgcttattcc

SEQ ID NO: 1010423 - DNA, 33 bp, Homo sapien
attgacaggagaataacttagcataggcatgag

SEQ ID NO: 1010424 - DNA, 33 bp, Homo sapien
attgacaggagaataatttagcataggcatgag

SEQ ID NO: 1010425 - DNA, 33 bp, Homo sapien
caacaactggataacacacacagttgacaatgt

SEQ ID NO: 1010426 - DNA, 33 bp, Homo sapien
caacaactggataacagacacagttgacaatgt

SEQ ID NO: 1010427 - DNA, 33 bp, Homo sapien
aaagagtcctagattaccaatgatcccaaatgc

SEQ ID NO: 1010428 - DNA, 33 bp, Homo sapien
aaagagtcctagattagcaatgatcccaaatgc

SEQ ID NO: 1010429 - DNA, 33 bp, Homo sapien
aacatcctatggatcccctaaagtgttacctag

SEQ ID NO: 1010430 - DNA, 33 bp, Homo sapien
aacatcctatggatcctctaaagtgttacctag

SEQ ID NO: 1010431 - DNA, 33 bp, Homo sapien
tcagatcacttgcctacgcataagtcttcacct

SEQ ID NO: 1010432 - DNA, 33 bp, Homo sapien
tcagatcacttgcctatgcataagtcttcacct

SEQ ID NO: 1010433 - DNA, 33 bp, Homo sapien
gagcaagagagtataccatgaaatctgccttcc

SEQ ID NO: 1010434 - DNA, 33 bp, Homo sapien
gagcaagagagtatactatgaaatctgccttcc

SEQ ID NO: 1010435 - DNA, 33 bp, Homo sapien
gagtaccttaccaaaacaatgacctgtcaaaga

SEQ ID NO: 1010436 - DNA, 33 bp, Homo sapien
gagtaccttaccaaaagaatgacctgtcaaaga

SEQ ID NO: 1010437 - DNA, 33 bp, Homo sapien
gtctattaaaagtatcaaataccttgctgcaat

SEQ ID NO: 1010438 - DNA, 33 bp, Homo sapien
gtctattaaaagtatccaataccttgctgcaat

SEQ ID NO: 1010439 - DNA, 33 bp, Homo sapien
ggtagctgtaataataccttaagacaacaatgc

SEQ ID NO: 1010440 - DNA, 33 bp, Homo sapien
ggtagctgtaataatatcttaagacaacaatgc

SEQ ID NO: 1010441 - DNA, 33 bp, Homo sapien
ttatcccattttttggcatataactgctcataa

SEQ ID NO: 1010442 - DNA, 33 bp, Homo sapien
ttatcccattttttggtatataactgctcataa

SEQ ID NO: 1010443 - DNA, 33 bp, Homo sapien
gccgccaccttagaaactaaagtatcaccattt

SEQ ID NO: 1010444 - DNA, 33 bp, Homo sapien
gccgccaccttagaaagtaaagtatcaccattt

SEQ ID NO: 1010445 - DNA, 33 bp, Homo sapien
gtaaagtctttttggcacttcctgcctgacata

SEQ ID NO: 1010446 - DNA, 33 bp, Homo sapien
gtaaagtctttttggcgcttcctgcctgacata

SEQ ID NO: 1010447 - DNA, 33 bp, Homo sapien
aggtttactccttttgaaaatattgaaattatg

SEQ ID NO: 1010448 - DNA, 33 bp, Homo sapien
aggtttactccttttggaaatattgaaattatg

SEQ ID NO: 1010449 - DNA, 33 bp, Homo sapien
ctcactcatcatgacagctacatcatagaaacc

SEQ ID NO: 1010450 - DNA, 33 bp, Homo sapien
ctcactcatcatgacatctacatcatagaaacc

SEQ ID NO: 1010451 - DNA, 33 bp, Homo sapien
agcacgtcacctattaccttatttcatcttaca

SEQ ID NO: 1010452 - DNA, 33 bp, Homo sapien
agcacgtcacctattatcttatttcatcttaca

SEQ ID NO: 1010453 - DNA, 33 bp, Homo sapien
actaagaaaaccagcacgaataggaataaaaat

SEQ ID NO: 1010454 - DNA, 33 bp, Homo sapien
actaagaaaaccagcatgaataggaataaaaat

SEQ ID NO: 1010455 - DNA, 33 bp, Homo sapien
tatgatatgcgtgccacctacaatagttctctt

SEQ ID NO: 1010456 - DNA, 33 bp, Homo sapien
tatgatatgcgtgccagctacaatagttctctt

SEQ ID NO: 1010457 - DNA, 33 bp, Homo sapien
gccaggcaaaccctacaacttcattttagataa

SEQ ID NO: 1010458 - DNA, 33 bp, Homo sapien
gccaggcaaaccctacgacttcattttagataa

SEQ ID NO: 1010459 - DNA, 33 bp, Homo sapien
tatttgatgatttagacaggactctactgccct

SEQ ID NO: 1010460 - DNA, 33 bp, Homo sapien
tatttgatgatttagagaggactctactgccct

SEQ ID NO: 1010461 - DNA, 33 bp, Homo sapien
actgtatagctggagagaaatgatatgtatata

SEQ ID NO: 1010462 - DNA, 33 bp, Homo sapien
actgtatagctggagataaatgatatgtatata

SEQ ID NO: 1010463 - DNA, 33 bp, Homo sapien
ttatctgttctagtaactaacattgctctaaca

SEQ ID NO: 1010464 - DNA, 33 bp, Homo sapien
ttatctgttctagtaattaacattgctctaaca

SEQ ID NO: 1010465 - DNA, 33 bp, Homo sapien
acattttccaagcacacctggtacctagccagg

SEQ ID NO: 1010466 - DNA, 33 bp, Homo sapien
acattttccaagcacatctggtacctagccagg

SEQ ID NO: 1010467 - DNA, 33 bp, Homo sapien
actcagtatttctcacaagctggttacctttgc

SEQ ID NO: 1010468 - DNA, 33 bp, Homo sapien
actcagtatttctcactagctggttacctttgc

SEQ ID NO: 1010469 - DNA, 33 bp, Homo sapien
taatcctagaagaccagcctgtgtcagagcagt

SEQ ID NO: 1010470 - DNA, 33 bp, Homo sapien
taatcctagaagaccatcctgtgtcagagcagt

SEQ ID NO: 1010471 - DNA, 33 bp, Homo sapien
agaatttgcctaccaccatagtttcttgttaac

SEQ ID NO: 1010472 - DNA, 33 bp, Homo sapien
agaatttgcctaccacgatagtttcttgttaac

SEQ ID NO: 1010473 - DNA, 33 bp, Homo sapien
taattttctacatggccaaaaactatcaaataa

SEQ ID NO: 1010474 - DNA, 33 bp, Homo sapien
taattttctacatggctaaaaactatcaaataa

SEQ ID NO: 1010475 - DNA, 33 bp, Homo sapien
cgaaacttatttcatcaatccaagatactttta

SEQ ID NO: 1010476 - DNA, 33 bp, Homo sapien
cgaaacttatttcatcgatccaagatactttta

SEQ ID NO: 1010477 - DNA, 33 bp, Homo sapien
tatatgcactttataaggaatgtgtgtcatact

SEQ ID NO: 1010478 - DNA, 33 bp, Homo sapien
tatatgcactttataatgaatgtgtgtcatact

SEQ ID NO: 1010479 - DNA, 33 bp, Homo sapien
aaccgctgagagtatcaaatcttttatatacta

SEQ ID NO: 1010480 - DNA, 33 bp, Homo sapien
aaccgctgagagtatcgaatcttttatatacta

SEQ ID NO: 1010481 - DNA, 33 bp, Homo sapien
tagaaaactcctataacgaagggctaagtagta

SEQ ID NO: 1010482 - DNA, 33 bp, Homo sapien
tagaaaactcctataatgaagggctaagtagta

SEQ ID NO: 1010483 - DNA, 33 bp, Homo sapien
agtgtaactgtcggaacgggtggagagctctgg

SEQ ID NO: 1010484 - DNA, 33 bp, Homo sapien
agtgtaactgtcggaatgggtggagagctctgg

SEQ ID NO: 1010485 - DNA, 33 bp, Homo sapien
aggcaaaagcaactcaagttcaaggccaaggcc

SEQ ID NO: 1010486 - DNA, 33 bp, Homo sapien
aggcaaaagcaactcaggttcaaggccaaggcc

SEQ ID NO: 1010487 - DNA, 33 bp, Homo sapien
agaatcactggttaaacagctatttcaggccac

SEQ ID NO: 1010488 - DNA, 33 bp, Homo sapien
agaatcactggttaaagagctatttcaggccac

SEQ ID NO: 1010489 - DNA, 33 bp, Homo sapien
acaccaaatgacccaactaaaaaaaatgggcaa

SEQ ID NO: 1010490 - DNA, 33 bp, Homo sapien
acaccaaatgacccaagtaaaaaaaatgggcaa

SEQ ID NO: 1010491 - DNA, 33 bp, Homo sapien
tgaatcactgccaaaactatggcctaaaaccat

SEQ ID NO: 1010492 - DNA, 33 bp, Homo sapien
tgaatcactgccaaaagtatggcctaaaaccat

SEQ ID NO: 1010493 - DNA, 33 bp, Homo sapien
ataaatataattgaaacagacatttccacatga

SEQ ID NO: 1010494 - DNA, 33 bp, Homo sapien
ataaatataattgaaagagacatttccacatga

SEQ ID NO: 1010495 - DNA, 33 bp, Homo sapien
taggtgttgcctgaagcctcttttaaaaggacc

SEQ ID NO: 1010496 - DNA, 33 bp, Homo sapien
taggtgttgcctgaagtctcttttaaaaggacc

SEQ ID NO: 1010497 - DNA, 33 bp, Homo sapien
tgtattacaaacaactcaaactagggtgtatta

SEQ ID NO: 1010498 - DNA, 33 bp, Homo sapien
tgtattacaaacaactgaaactagggtgtatta

SEQ ID NO: 1010499 - DNA, 33 bp, Homo sapien
gacttgtgcttgtaaccgatactcacttcattg

SEQ ID NO: 1010500 - DNA, 33 bp, Homo sapien
gacttgtgcttgtaactgatactcacttcattg

SEQ ID NO: 1010501 - DNA, 33 bp, Homo sapien
gtcacaaaaggagcaaaatgagagggccaggac

SEQ ID NO: 1010502 - DNA, 33 bp, Homo sapien
gtcacaaaaggagcaacatgagagggccaggac

SEQ ID NO: 1010503 - DNA, 33 bp, Homo sapien
tccaatctgtaccttacccctgaccctgtatgc

SEQ ID NO: 1010504 - DNA, 33 bp, Homo sapien
tccaatctgtaccttatccctgaccctgtatgc

SEQ ID NO: 1010505 - DNA, 33 bp, Homo sapien
cagtgtctaggaacatcaataggcaaaagtgat

SEQ ID NO: 1010506 - DNA, 33 bp, Homo sapien
cagtgtctaggaacattaataggcaaaagtgat

SEQ ID NO: 1010507 - DNA, 33 bp, Homo sapien
agagctcgagcttttgaagctgggcagtctggg

SEQ ID NO: 1010508 - DNA, 33 bp, Homo sapien
agagctcgagcttttggagctgggcagtctggg

SEQ ID NO: 1010509 - DNA, 33 bp, Homo sapien
aacttgtccaaaatccaaaattcatcctaaaca

SEQ ID NO: 1010510 - DNA, 33 bp, Homo sapien
aacttgtccaaaatccgaaattcatcctaaaca

SEQ ID NO: 1010511 - DNA, 33 bp, Homo sapien
tggaactcagcatgaaagacagaggggcaatat

SEQ ID NO: 1010512 - DNA, 33 bp, Homo sapien
tggaactcagcatgaaggacagaggggcaatat

SEQ ID NO: 1010513 - DNA, 33 bp, Homo sapien
cagttttctcatctgcacatttagaataccagt

SEQ ID NO: 1010514 - DNA, 33 bp, Homo sapien
cagttttctcatctgcgcatttagaataccagt

SEQ ID NO: 1010515 - DNA, 33 bp, Homo sapien
gttttaattatttggacagaagtatattgaata

SEQ ID NO: 1010516 - DNA, 33 bp, Homo sapien
gttttaattatttggagagaagtatattgaata

SEQ ID NO: 1010517 - DNA, 33 bp, Homo sapien
ttgaaacttaattgaaagcaacaaactgttgat

SEQ ID NO: 1010518 - DNA, 33 bp, Homo sapien
ttgaaacttaattgaaggcaacaaactgttgat

SEQ ID NO: 1010519 - DNA, 33 bp, Homo sapien
cctattataagccgacaagcgtatacaggattt

SEQ ID NO: 1010520 - DNA, 33 bp, Homo sapien
cctattataagccgaccagcgtatacaggattt

SEQ ID NO: 1010521 - DNA, 33 bp, Homo sapien
caggtaattctaacacaggcaaaatagcctgtt

SEQ ID NO: 1010522 - DNA, 33 bp, Homo sapien
caggtaattctaacacgggcaaaatagcctgtt

SEQ ID NO: 1010523 - DNA, 33 bp, Homo sapien
agatttggcttgaataacaaagagacttgaaag

SEQ ID NO: 1010524 - DNA, 33 bp, Homo sapien
agatttggcttgaatagcaaagagacttgaaag

SEQ ID NO: 1010525 - DNA, 33 bp, Homo sapien
ttcccaccaaagagaaccctttatgctgaagga

SEQ ID NO: 1010526 - DNA, 33 bp, Homo sapien
ttcccaccaaagagaagcctttatgctgaagga

SEQ ID NO: 1010527 - DNA, 33 bp, Homo sapien
ttttccatcaagaccaatcgggatgtctgtagc

SEQ ID NO: 1010528 - DNA, 33 bp, Homo sapien
ttttccatcaagaccagtcgggatgtctgtagc

SEQ ID NO: 1010529 - DNA, 33 bp, Homo sapien
cacaggtagcctggaaaggatgtccagaatgca

SEQ ID NO: 1010530 - DNA, 33 bp, Homo sapien
cacaggtagcctggaatggatgtccagaatgca

SEQ ID NO: 1010531 - DNA, 33 bp, Homo sapien
gcttctgccagtcttaggctacacatggctatt

SEQ ID NO: 1010532 - DNA, 33 bp, Homo sapien
gcttctgccagtcttatgctacacatggctatt

SEQ ID NO: 1010533 - DNA, 33 bp, Homo sapien
tgcatctttttctttacggtgctgtgcagttcc

SEQ ID NO: 1010534 - DNA, 33 bp, Homo sapien
tgcatctttttctttatggtgctgtgcagttcc

SEQ ID NO: 1010535 - DNA, 33 bp, Homo sapien
ttttatgctcgtaatccgaaacgaacaacctta

SEQ ID NO: 1010536 - DNA, 33 bp, Homo sapien
ttttatgctcgtaatctgaaacgaacaacctta

SEQ ID NO: 1010537 - DNA, 33 bp, Homo sapien
gattagggaaacagtacaggcagtttgggatga

SEQ ID NO: 1010538 - DNA, 33 bp, Homo sapien
gattagggaaacagtataggcagtttgggatga

SEQ ID NO: 1010539 - DNA, 33 bp, Homo sapien
gataataatagtagtacgagttaaggccaaagg

SEQ ID NO: 1010540 - DNA, 33 bp, Homo sapien
gataataatagtagtaggagttaaggccaaagg

SEQ ID NO: 1010541 - DNA, 33 bp, Homo sapien
tctgtatgaagatctacgtcaaaggctttgctg

SEQ ID NO: 1010542 - DNA, 33 bp, Homo sapien
tctgtatgaagatctatgtcaaaggctttgctg

SEQ ID NO: 1010543 - DNA, 33 bp, Homo sapien
gttgaagtgcaaatcacattgaggtggctgttc

SEQ ID NO: 1010544 - DNA, 33 bp, Homo sapien
gttgaagtgcaaatcagattgaggtggctgttc

SEQ ID NO: 1010545 - DNA, 33 bp, Homo sapien
atgaatgagatagccacgtaagatctctgattc

SEQ ID NO: 1010546 - DNA, 33 bp, Homo sapien
atgaatgagatagccaggtaagatctctgattc

SEQ ID NO: 1010547 - DNA, 33 bp, Homo sapien
gtttgttcattatacaaagaggatgtcattcat

SEQ ID NO: 1010548 - DNA, 33 bp, Homo sapien
gtttgttcattatacagagaggatgtcattcat

SEQ ID NO: 1010549 - DNA, 33 bp, Homo sapien
cctgcctgcttcctcaaagactactattgtggt

SEQ ID NO: 1010550 - DNA, 33 bp, Homo sapien
cctgcctgcttcctcagagactactattgtggt

SEQ ID NO: 1010551 - DNA, 33 bp, Homo sapien
tgccgcatatactaaaatccgtgcattctcaaa

SEQ ID NO: 1010552 - DNA, 33 bp, Homo sapien
tgccgcatatactaaactccgtgcattctcaaa

SEQ ID NO: 1010553 - DNA, 33 bp, Homo sapien
ttctgccatttggagacgaatcagatcaaattt

SEQ ID NO: 1010554 - DNA, 33 bp, Homo sapien
ttctgccatttggagatgaatcagatcaaattt

SEQ ID NO: 1010555 - DNA, 33 bp, Homo sapien
cactggaatcttcagaaagctcaagttggagtc

SEQ ID NO: 1010556 - DNA, 33 bp, Homo sapien
cactggaatcttcagagagctcaagttggagtc

SEQ ID NO: 1010557 - DNA, 33 bp, Homo sapien
tttctctcttgacttgcaaaataaatactctat

SEQ ID NO: 1010558 - DNA, 33 bp, Homo sapien
tttctctcttgacttggaaaataaatactctat

SEQ ID NO: 1010559 - DNA, 33 bp, Homo sapien
ttaacttctatccataaatgacttgcagtaatt

SEQ ID NO: 1010560 - DNA, 33 bp, Homo sapien
ttaacttctatccatagatgacttgcagtaatt

SEQ ID NO: 1010561 - DNA, 33 bp, Homo sapien
tgttataaatgtgacaagaaaaactacaatcac

SEQ ID NO: 1010562 - DNA, 33 bp, Homo sapien
tgttataaatgtgacaggaaaaactacaatcac

SEQ ID NO: 1010563 - DNA, 33 bp, Homo sapien
acatacatccctttgcaaagcaataacagcatt

SEQ ID NO: 1010564 - DNA, 33 bp, Homo sapien
acatacatccctttgccaagcaataacagcatt

SEQ ID NO: 1010565 - DNA, 33 bp, Homo sapien
tctgtaccctttgttgcagatatttaggctttc

SEQ ID NO: 1010566 - DNA, 33 bp, Homo sapien
tctgtaccctttgttggagatatttaggctttc

SEQ ID NO: 1010567 - DNA, 33 bp, Homo sapien
cagcaacataaaaccaatggaaagtactgacca

SEQ ID NO: 1010568 - DNA, 33 bp, Homo sapien
cagcaacataaaaccactggaaagtactgacca

SEQ ID NO: 1010569 - DNA, 33 bp, Homo sapien
tctgttgaggaaatgacggtaacctggctttgt

SEQ ID NO: 1010570 - DNA, 33 bp, Homo sapien
tctgttgaggaaatgatggtaacctggctttgt

SEQ ID NO: 1010571 - DNA, 33 bp, Homo sapien
tagtattatgaggatcaaataagtacgtgtaag

SEQ ID NO: 1010572 - DNA, 33 bp, Homo sapien
tagtattatgaggatcgaataagtacgtgtaag

SEQ ID NO: 1010573 - DNA, 33 bp, Homo sapien
gaagaccactgcaagaagagtctgaatgggggc

SEQ ID NO: 1010574 - DNA, 33 bp, Homo sapien
gaagaccactgcaagacgagtctgaatgggggc

SEQ ID NO: 1010575 - DNA, 33 bp, Homo sapien
gatttgctgaggaaaccggaacgttaatagatt

SEQ ID NO: 1010576 - DNA, 33 bp, Homo sapien
gatttgctgaggaaactggaacgttaatagatt

SEQ ID NO: 1010577 - DNA, 33 bp, Homo sapien
ttccatctaatctaaccagaggtccgtccaaac

SEQ ID NO: 1010578 - DNA, 33 bp, Homo sapien
ttccatctaatctaactagaggtccgtccaaac

SEQ ID NO: 1010579 - DNA, 33 bp, Homo sapien
tcagcagttttctagaagagctataatccaggc

SEQ ID NO: 1010580 - DNA, 33 bp, Homo sapien
tcagcagttttctagatgagctataatccaggc

SEQ ID NO: 1010581 - DNA, 33 bp, Homo sapien
acaaggcacatgaaaaatatcaaggaactttag

SEQ ID NO: 1010582 - DNA, 33 bp, Homo sapien
acaaggcacatgaaaagtatcaaggaactttag

SEQ ID NO: 1010583 - DNA, 33 bp, Homo sapien
agaatgaaggcttttacatttaatgtgtacctg

SEQ ID NO: 1010584 - DNA, 33 bp, Homo sapien
agaatgaaggcttttatatttaatgtgtacctg

SEQ ID NO: 1010585 - DNA, 33 bp, Homo sapien
tgacccaggaacataccgagtagaatcctttcc

SEQ ID NO: 1010586 - DNA, 33 bp, Homo sapien
tgacccaggaacatactgagtagaatcctttcc

SEQ ID NO: 1010587 - DNA, 33 bp, Homo sapien
tccttaaagtcattaaacttcctatccacagag

SEQ ID NO: 1010588 - DNA, 33 bp, Homo sapien
tccttaaagtcattaatcttcctatccacagag

SEQ ID NO: 1010589 - DNA, 33 bp, Homo sapien
tggcaccactgttctcgacttgtatgacattgg

SEQ ID NO: 1010590 - DNA, 33 bp, Homo sapien
tggcaccactgttctctacttgtatgacattgg

SEQ ID NO: 1010591 - DNA, 33 bp, Homo sapien
ataattcataaatttccagctcaaggcttgtat

SEQ ID NO: 1010592 - DNA, 33 bp, Homo sapien
ataattcataaatttctagctcaaggcttgtat

SEQ ID NO: 1010593 - DNA, 33 bp, Homo sapien
gaaacttaaaggacaaactccacaattcagcct

SEQ ID NO: 1010594 - DNA, 33 bp, Homo sapien
gaaacttaaaggacaagctccacaattcagcct

SEQ ID NO: 1010595 - DNA, 33 bp, Homo sapien
tttttcatgtcatttcacctcttctcaggttgt

SEQ ID NO: 1010596 - DNA, 33 bp, Homo sapien
tttttcatgtcatttcgcctcttctcaggttgt

SEQ ID NO: 1010597 - DNA, 33 bp, Homo sapien
gtatgtttcttctagcactattcacaatagcaa

SEQ ID NO: 1010598 - DNA, 33 bp, Homo sapien
gtatgtttcttctagccctattcacaatagcaa

SEQ ID NO: 1010599 - DNA, 33 bp, Homo sapien
caaatgaatttaggaaagcctatgcacaaagtt

SEQ ID NO: 1010600 - DNA, 33 bp, Homo sapien
caaatgaatttaggaatgcctatgcacaaagtt

SEQ ID NO: 1010601 - DNA, 33 bp, Homo sapien
tttttaaactgggtacccttaatcactgcactg

SEQ ID NO: 1010602 - DNA, 33 bp, Homo sapien
tttttaaactgggtactcttaatcactgcactg

SEQ ID NO: 1010603 - DNA, 33 bp, Homo sapien
aagttcctgctgcatacgtaccacagtgcagtg

SEQ ID NO: 1010604 - DNA, 33 bp, Homo sapien
aagttcctgctgcatatgtaccacagtgcagtg

SEQ ID NO: 1010605 - DNA, 33 bp, Homo sapien
tcatgactgctgagaacagagagtgctggccat

SEQ ID NO: 1010606 - DNA, 33 bp, Homo sapien
tcatgactgctgagaatagagagtgctggccat

SEQ ID NO: 1010607 - DNA, 33 bp, Homo sapien
tcatgctccttatttccatggtttcaatgtgtg

SEQ ID NO: 1010608 - DNA, 33 bp, Homo sapien
tcatgctccttatttctatggtttcaatgtgtg

SEQ ID NO: 1010609 - DNA, 33 bp, Homo sapien
attaggaagaaatcaacgttcctgcaattagaa

SEQ ID NO: 1010610 - DNA, 33 bp, Homo sapien
attaggaagaaatcaatgttcctgcaattagaa

SEQ ID NO: 1010611 - DNA, 33 bp, Homo sapien
ttatatgcaagaaaaccgagactgagagaggtt

SEQ ID NO: 1010612 - DNA, 33 bp, Homo sapien
ttatatgcaagaaaactgagactgagagaggtt

SEQ ID NO: 1010613 - DNA, 33 bp, Homo sapien
aaccagacacatttcagtctggggattattaaa

SEQ ID NO: 1010614 - DNA, 33 bp, Homo sapien
aaccagacacatttcattctggggattattaaa

SEQ ID NO: 1010615 - DNA, 33 bp, Homo sapien
gctagttaaacactgaacattcagagtaatggt

SEQ ID NO: 1010616 - DNA, 33 bp, Homo sapien
gctagttaaacactgagcattcagagtaatggt

SEQ ID NO: 1010617 - DNA, 33 bp, Homo sapien
ctgattacatacctcaaagagaacctggcaaag

SEQ ID NO: 1010618 - DNA, 33 bp, Homo sapien
ctgattacatacctcagagagaacctggcaaag

SEQ ID NO: 1010619 - DNA, 33 bp, Homo sapien
ctcattcaattctcacaactaccttgaaaattg

SEQ ID NO: 1010620 - DNA, 33 bp, Homo sapien
ctcattcaattctcaccactaccttgaaaattg

SEQ ID NO: 1010621 - DNA, 33 bp, Homo sapien
aaaaccactcagatccacataaagaaataataa

SEQ ID NO: 1010622 - DNA, 33 bp, Homo sapien
aaaaccactcagatccgcataaagaaataataa

SEQ ID NO: 1010623 - DNA, 33 bp, Homo sapien
tcatccagtagctggtaaatttccacgtatgtt

SEQ ID NO: 1010624 - DNA, 33 bp, Homo sapien
tcatccagtagctggtgaatttccacgtatgtt

SEQ ID NO: 1010625 - DNA, 33 bp, Homo sapien
gcttgtgaaagagcaacaatgtctgtgcattga

SEQ ID NO: 1010626 - DNA, 33 bp, Homo sapien
gcttgtgaaagagcaataatgtctgtgcattga

SEQ ID NO: 1010627 - DNA, 33 bp, Homo sapien; identical to SEQ ID NO: 1010625

SEQ ID NO: 1010628 - DNA, 33 bp, Homo sapien; identical to SEQ ID NO: 1010626

SEQ ID NO: 1010629 - DNA, 33 bp, Homo sapien
atctacttctgtcccaaagcagattccaagaag

SEQ ID NO: 1010630 - DNA, 33 bp, Homo sapien
atctacttctgtcccacagcagattccaagaag

SEQ ID NO: 1010631 - DNA, 33 bp, Homo sapien
ttcttatagccccacaaaatcttgctggaatcc

SEQ ID NO: 1010632 - DNA, 33 bp, Homo sapien
ttcttatagccccacagaatcttgctggaatcc

SEQ ID NO: 1010633 - DNA, 33 bp, Homo sapien
acaggtgacaaaaccaaagcaactgcctatatc

SEQ ID NO: 1010634 - DNA, 33 bp, Homo sapien
acaggtgacaaaaccagagcaactgcctatatc

SEQ ID NO: 1010635 - DNA, 33 bp, Homo sapien
taagtgagaaccatccactgctgcagtctataa

SEQ ID NO: 1010636 - DNA, 33 bp, Homo sapien
taagtgagaaccatccgctgctgcagtctataa

SEQ ID NO: 1010637 - DNA, 33 bp, Homo sapien
gcttagtacctgggcaatgaagtaatctgtaca

SEQ ID NO: 1010638 - DNA, 33 bp, Homo sapien
gcttagtacctgggcagtgaagtaatctgtaca

SEQ ID NO: 1010639 - DNA, 33 bp, Homo sapien
cacctatatgtattcgcaatagcaccataacag

SEQ ID NO: 1010640 - DNA, 33 bp, Homo sapien
cacctatatgtattcgtaatagcaccataacag

SEQ ID NO: 1010641 - DNA, 33 bp, Homo sapien
tgtatttattttttaactgcaaactcaggtctt

SEQ ID NO: 1010642 - DNA, 33 bp, Homo sapien
tgtatttattttttaattgcaaactcaggtctt

SEQ ID NO: 1010643 - DNA, 33 bp, Homo sapien
catgtttgtacagaaagtatttgtagccccatg

SEQ ID NO: 1010644 - DNA, 33 bp, Homo sapien
catgtttgtacagaaattatttgtagccccatg

SEQ ID NO: 1010645 - DNA, 33 bp, Homo sapien
acatactgacaaaatgcaattgattcgtttacc

SEQ ID NO: 1010646 - DNA, 33 bp, Homo sapien
acatactgacaaaatggaattgattcgtttacc

SEQ ID NO: 1010647 - DNA, 33 bp, Homo sapien
ttttgactccttctacaacaatgcagttaagca

SEQ ID NO: 1010648 - DNA, 33 bp, Homo sapien
ttttgactccttctacgacaatgcagttaagca

SEQ ID NO: 1010649 - DNA, 33 bp, Homo sapien
gcacctgtgtaggcaacggtatctatgtcagga

SEQ ID NO: 1010650 - DNA, 33 bp, Homo sapien
gcacctgtgtaggcaatggtatctatgtcagga

SEQ ID NO: 1010651 - DNA, 33 bp, Homo sapien
tccctctcactcaggcaataatcctgacataga

SEQ ID NO: 1010652 - DNA, 33 bp, Homo sapien
tccctctcactcaggcgataatcctgacataga

SEQ ID NO: 1010653 - DNA, 33 bp, Homo sapien
ttaagagtaataaaaccgtcacgaagatgtaaa

SEQ ID NO: 1010654 - DNA, 33 bp, Homo sapien
ttaagagtaataaaactgtcacgaagatgtaaa

SEQ ID NO: 1010655 - DNA, 33 bp, Homo sapien
atgcctatggagctgacactttattttatttta

SEQ ID NO: 1010656 - DNA, 33 bp, Homo sapien
atgcctatggagctgatactttattttatttta

SEQ ID NO: 1010657 - DNA, 33 bp, Homo sapien
aaatacaaaatactacaccccacagatgaaatt

SEQ ID NO: 1010658 - DNA, 33 bp, Homo sapien
aaatacaaaatactaccccccacagatgaaatt

SEQ ID NO: 1010659 - DNA, 33 bp, Homo sapien
aagagaaatgaagcaactcaggctggtacaaac

SEQ ID NO: 1010660 - DNA, 33 bp, Homo sapien
aagagaaatgaagcaagtcaggctggtacaaac

SEQ ID NO: 1010661 - DNA, 33 bp, Homo sapien
gtcagaaccaaaaatcactctctgctcaggaaa

SEQ ID NO: 1010662 - DNA, 33 bp, Homo sapien
gtcagaaccaaaaatcgctctctgctcaggaaa

SEQ ID NO: 1010663 - DNA, 33 bp, Homo sapien
aactaattatccatcaacttggtcaactgatca

SEQ ID NO: 1010664 - DNA, 33 bp, Homo sapien
aactaattatccatcatcttggtcaactgatca

SEQ ID NO: 1010665 - DNA, 33 bp, Homo sapien
taagcaagaaaatccaataaagaagtgaaagat

SEQ ID NO: 1010666 - DNA, 33 bp, Homo sapien
taagcaagaaaatccagtaaagaagtgaaagat

SEQ ID NO: 1010667 - DNA, 33 bp, Homo sapien
ctgcttgaataacccacaggcacaacaagcccg

SEQ ID NO: 1010668 - DNA, 33 bp, Homo sapien
ctgcttgaataacccataggcacaacaagcccg

SEQ ID NO: 1010669 - DNA, 33 bp, Homo sapien
ctggcagatgtatataaaaagataatgactcat

SEQ ID NO: 1010670 - DNA, 33 bp, Homo sapien
ctggcagatgtatatagaaagataatgactcat

SEQ ID NO: 1010671 - DNA, 33 bp, Homo sapien
atcccagggtatgagacattctgtagggtttct

SEQ ID NO: 1010672 - DNA, 33 bp, Homo sapien
atcccagggtatgagatattctgtagggtttct

SEQ ID NO: 1010673 - DNA, 33 bp, Homo sapien
gagtttagcatccatcactttttcttggccctg

SEQ ID NO: 1010674 - DNA, 33 bp, Homo sapien
gagtttagcatccatcgctttttcttggccctg

SEQ ID NO: 1010675 - DNA, 33 bp, Homo sapien
agactccccttttataaagcagcaggtgacatg

SEQ ID NO: 1010676 - DNA, 33 bp, Homo sapien
agactccccttttatagagcagcaggtgacatg

SEQ ID NO: 1010677 - DNA, 33 bp, Homo sapien
actgagtttgaagttgaaagggactgtggacac

SEQ ID NO: 1010678 - DNA, 33 bp, Homo sapien
actgagtttgaagttggaagggactgtggacac

SEQ ID NO: 1010679 - DNA, 33 bp, Homo sapien
accgtgatcttagtcactatatagctgctgcag

SEQ ID NO: 1010680 - DNA, 33 bp, Homo sapien
accgtgatcttagtcattatatagctgctgcag

SEQ ID NO: 1010681 - DNA, 33 bp, Homo sapien
aacatcatttacttttcgtcatgctggatttgg

SEQ ID NO: 1010682 - DNA, 33 bp, Homo sapien
aacatcatttacttttggtcatgctggatttgg

SEQ ID NO: 1010683 - DNA, 33 bp, Homo sapien
tctaacagcatataatcacatgcatgagcaaag

SEQ ID NO: 1010684 - DNA, 33 bp, Homo sapien
tctaacagcatataatgacatgcatgagcaaag

SEQ ID NO: 1010685 - DNA, 33 bp, Homo sapien
tctaacaaggaagtgacagttggacacaggata

SEQ ID NO: 1010686 - DNA, 33 bp, Homo sapien
tctaacaaggaagtgatagttggacacaggata

SEQ ID NO: 1010687 - DNA, 33 bp, Homo sapien
cttgcctcttcactcaaactgagctctgctgaa

SEQ ID NO: 1010688 - DNA, 33 bp, Homo sapien
cttgcctcttcactcacactgagctctgctgaa

SEQ ID NO: 1010689 - DNA, 33 bp, Homo sapien
ggagacgtttaagaaccaaatccagactttcaa

SEQ ID NO: 1010690 - DNA, 33 bp, Homo sapien
ggagacgtttaagaactaaatccagactttcaa

SEQ ID NO: 1010691 - DNA, 33 bp, Homo sapien
cagtgggactaacaacggcctgggaaagctatt

SEQ ID NO: 1010692 - DNA, 33 bp, Homo sapien
cagtgggactaacaactgcctgggaaagctatt

SEQ ID NO: 1010693 - DNA, 33 bp, Homo sapien
attgcttacttaattcccctcctccacatacgt

SEQ ID NO: 1010694 - DNA, 33 bp, Homo sapien
attgcttacttaattctcctcctccacatacgt

SEQ ID NO: 1010695 - DNA, 33 bp, Homo sapien
atttgctgctagtatacatggattttgttagtg

SEQ ID NO: 1010696 - DNA, 33 bp, Homo sapien
atttgctgctagtatatatggattttgttagtg

SEQ ID NO: 1010697 - DNA, 33 bp, Homo sapien
ggataactcctacttaggccttaccattcagca

SEQ ID NO: 1010698 - DNA, 33 bp, Homo sapien
ggataactcctacttatgccttaccattcagca

SEQ ID NO: 1010699 - DNA, 33 bp, Homo sapien
caatagcagtaagttacagagaagacaccactt

SEQ ID NO: 1010700 - DNA, 33 bp, Homo sapien
caatagcagtaagttatagagaagacaccactt

SEQ ID NO: 1010701 - DNA, 33 bp, Homo sapien
agaggagacttggcaaggtcaaagctaaatatt

SEQ ID NO: 1010702 - DNA, 33 bp, Homo sapien
agaggagacttggcaatgtcaaagctaaatatt

SEQ ID NO: 1010703 - DNA, 33 bp, Homo sapien
aaaattctaatatgaactagaggctgctttgga

SEQ ID NO: 1010704 - DNA, 33 bp, Homo sapien
aaaattctaatatgaagtagaggctgctttgga

SEQ ID NO: 1010705 - DNA, 33 bp, Homo sapien
caccatgggtcagttacattgtcaacttctatt

SEQ ID NO: 1010706 - DNA, 33 bp, Homo sapien
caccatgggtcagttatattgtcaacttctatt

SEQ ID NO: 1010707 - DNA, 33 bp, Homo sapien
cagagctaccctgctgaaggagttaggtatgca

SEQ ID NO: 1010708 - DNA, 33 bp, Homo sapien
cagagctaccctgctggaggagttaggtatgca

SEQ ID NO: 1010709 - DNA, 33 bp, Homo sapien
attctgaataagaacactggattacacagaagt

SEQ ID NO: 1010710 - DNA, 33 bp, Homo sapien
attctgaataagaacattggattacacagaagt

SEQ ID NO: 1010711 - DNA, 33 bp, Homo sapien
aaaataccatgcggtacctgccatcattattat

SEQ ID NO: 1010712 - DNA, 33 bp, Homo sapien
aaaataccatgcggtagctgccatcattattat

SEQ ID NO: 1010713 - DNA, 33 bp, Homo sapien
actccagagttcttaactgtgtttttccctgct

SEQ ID NO: 1010714 - DNA, 33 bp, Homo sapien
actccagagttcttaattgtgtttttccctgct

SEQ ID NO: 1010715 - DNA, 33 bp, Homo sapien
cagatccaagtgtgttgaaaaatagtgtcccag

SEQ ID NO: 1010716 - DNA, 33 bp, Homo sapien
cagatccaagtgtgtttaaaaatagtgtcccag

SEQ ID NO: 1010717 - DNA, 33 bp, Homo sapien
ttcatagattcacagaagggaagatagccatgc

SEQ ID NO: 1010718 - DNA, 33 bp, Homo sapien
ttcatagattcacagaggggaagatagccatgc

SEQ ID NO: 1010719 - DNA, 33 bp, Homo sapien
accgtccttgagattccattggatttacttcca

SEQ ID NO: 1010720 - DNA, 33 bp, Homo sapien
accgtccttgagattctattggatttacttcca

SEQ ID NO: 1010721 - DNA, 33 bp, Homo sapien
cttgttggcttcccaaaacaccatgtttctctt

SEQ ID NO: 1010722 - DNA, 33 bp, Homo sapien
cttgttggcttcccaatacaccatgtttctctt

SEQ ID NO: 1010723 - DNA, 33 bp, Homo sapien
aatgcttagcaatgaaagcttaaatgagaaact

SEQ ID NO: 1010724 - DNA, 33 bp, Homo sapien
aatgcttagcaatgaatgcttaaatgagaaact

SEQ ID NO: 1010725 - DNA, 33 bp, Homo sapien
tacaggtattatgcttaaaaaaaggttttcttt

SEQ ID NO: 1010726 - DNA, 33 bp, Homo sapien
tacaggtattatgcttcaaaaaaggttttcttt

SEQ ID NO: 1010727 - DNA, 33 bp, Homo sapien
tgttctggctcctaacacagtggattagttttg

SEQ ID NO: 1010728 - DNA, 33 bp, Homo sapien
tgttctggctcctaacccagtggattagttttg

SEQ ID NO: 1010729 - DNA, 33 bp, Homo sapien
cataaatgaatctcacaaacataaaattgaatg

SEQ ID NO: 1010730 - DNA, 33 bp, Homo sapien
cataaatgaatctcaccaacataaaattgaatg

SEQ ID NO: 1010731 - DNA, 33 bp, Homo sapien
gctgcagtttcacacacgaactttccttaagac

SEQ ID NO: 1010732 - DNA, 33 bp, Homo sapien
gctgcagtttcacacatgaactttccttaagac

SEQ ID NO: 1010733 - DNA, 33 bp, Homo sapien
tatgagccatatgttcactatcacaaccacgca

SEQ ID NO: 1010734 - DNA, 33 bp, Homo sapien
tatgagccatatgttctctatcacaaccacgca

SEQ ID NO: 1010735 - DNA, 33 bp, Homo sapien
gactaagtgcttcactcacaatatagcaggtgg

SEQ ID NO: 1010736 - DNA, 33 bp, Homo sapien
gactaagtgcttcactgacaatatagcaggtgg

SEQ ID NO: 1010737 - DNA, 33 bp, Homo sapien
tgtttattgctgcctcaaaagataggatcaagt

SEQ ID NO: 1010738 - DNA, 33 bp, Homo sapien
tgtttattgctgcctctaaagataggatcaagt

SEQ ID NO: 1010739 - DNA, 33 bp, Homo sapien
ccttgttcatctagtcgcaagctttcttgactc

SEQ ID NO: 1010740 - DNA, 33 bp, Homo sapien
ccttgttcatctagtctcaagctttcttgactc

SEQ ID NO: 1010741 - DNA, 33 bp, Homo sapien
gcacttcaccatgtgcccctaatctaatgtctc

SEQ ID NO: 1010742 - DNA, 33 bp, Homo sapien
gcacttcaccatgtgctcctaatctaatgtctc

SEQ ID NO: 1010743 - DNA, 33 bp, Homo sapien
agctgggctgcagctaagttctgactgtaccca

SEQ ID NO: 1010744 - DNA, 33 bp, Homo sapien
agctgggctgcagctatgttctgactgtaccca

SEQ ID NO: 1010745 - DNA, 33 bp, Homo sapien
cagccactaccacttccagttgccttcgacttc

SEQ ID NO: 1010746 - DNA, 33 bp, Homo sapien
cagccactaccacttcgagttgccttcgacttc

SEQ ID NO: 1010747 - DNA, 33 bp, Homo sapien
agaacagaatcactagacctgaagtgaaaatgt

SEQ ID NO: 1010748 - DNA, 33 bp, Homo sapien
agaacagaatcactaggcctgaagtgaaaatgt

SEQ ID NO: 1010749 - DNA, 33 bp, Homo sapien
ggctgggaatggtgggaagtaatcactgaattg

SEQ ID NO: 1010750 - DNA, 33 bp, Homo sapien
ggctgggaatggtgggtagtaatcactgaattg

SEQ ID NO: 1010751 - DNA, 33 bp, Homo sapien
ttcaaagctatccagacagtatctcatttatct

SEQ ID NO: 1010752 - DNA, 33 bp, Homo sapien
ttcaaagctatccagagagtatctcatttatct

SEQ ID NO: 1010753 - DNA, 33 bp, Homo sapien
gttttatctcactgaaaagaagtggatacaatt

SEQ ID NO: 1010754 - DNA, 33 bp, Homo sapien
gttttatctcactgaatagaagtggatacaatt

SEQ ID NO: 1010755 - DNA, 33 bp, Homo sapien
tgaggaatctagactaaaggactatgattccgt

SEQ ID NO: 1010756 - DNA, 33 bp, Homo sapien
tgaggaatctagactagaggactatgattccgt

SEQ ID NO: 1010757 - DNA, 33 bp, Homo sapien
tctatcaagattccaccgaaccttctccatctt

SEQ ID NO: 1010758 - DNA, 33 bp, Homo sapien
tctatcaagattccactgaaccttctccatctt

SEQ ID NO: 1010759 - DNA, 33 bp, Homo sapien
tgttgattgcctttccacaaggctaaagacttt

SEQ ID NO: 1010760 - DNA, 33 bp, Homo sapien
tgttgattgcctttccgcaaggctaaagacttt

SEQ ID NO: 1010761 - DNA, 33 bp, Homo sapien
agaatgatttggtgaccgctttagatggatgtg

SEQ ID NO: 1010762 - DNA, 33 bp, Homo sapien
agaatgatttggtgactgctttagatggatgtg

SEQ ID NO: 1010763 - DNA, 33 bp, Homo sapien
ggattcaaaaatccaacgtgcataataattaac

SEQ ID NO: 1010764 - DNA, 33 bp, Homo sapien
ggattcaaaaatccaatgtgcataataattaac

SEQ ID NO: 1010765 - DNA, 33 bp, Homo sapien
taggattccatgttaggaggagtatcacctgga

SEQ ID NO: 1010766 - DNA, 33 bp, Homo sapien
taggattccatgttagtaggagtatcacctgga

SEQ ID NO: 1010767 - DNA, 33 bp, Homo sapien
gggatgctagaacaaacggtacagatagatttg

SEQ ID NO: 1010768 - DNA, 33 bp, Homo sapien
gggatgctagaacaaatggtacagatagatttg

SEQ ID NO: 1010769 - DNA, 33 bp, Homo sapien
cagggttctgcatacaccctgaggttccttcct

SEQ ID NO: 1010770 - DNA, 33 bp, Homo sapien
cagggttctgcatacatcctgaggttccttcct

SEQ ID NO: 1010771 - DNA, 33 bp, Homo sapien
aagagtcttcaatgataataattcacaattcat

SEQ ID NO: 1010772 - DNA, 33 bp, Homo sapien
aagagtcttcaatgattataattcacaattcat

SEQ ID NO: 1010773 - DNA, 33 bp, Homo sapien
cctgttgcaagaaagactacgacccataaataa

SEQ ID NO: 1010774 - DNA, 33 bp, Homo sapien
cctgttgcaagaaagattacgacccataaataa

SEQ ID NO: 1010775 - DNA, 33 bp, Homo sapien
tgaaataaagcagactcagagagaagtactggg

SEQ ID NO: 1010776 - DNA, 33 bp, Homo sapien
tgaaataaagcagactgagagagaagtactggg

SEQ ID NO: 1010777 - DNA, 33 bp, Homo sapien
gcttccctatttgacactgagacattcagagag

SEQ ID NO: 1010778 - DNA, 33 bp, Homo sapien
gcttccctatttgacattgagacattcagagag

SEQ ID NO: 1010779 - DNA, 33 bp, Homo sapien
tctaaattgcacattcacaaagaattttgtgat

SEQ ID NO: 1010780 - DNA, 33 bp, Homo sapien
tctaaattgcacattcgcaaagaattttgtgat

SEQ ID NO: 1010781 - DNA, 33 bp, Homo sapien
acaagaataatgctacaacatggataaatcttg

SEQ ID NO: 1010782 - DNA, 33 bp, Homo sapien
acaagaataatgctacgacatggataaatcttg

SEQ ID NO: 1010783 - DNA, 33 bp, Homo sapien
agatttggcttcaggacctcaaacctgtttgct

SEQ ID NO: 1010784 - DNA, 33 bp, Homo sapien
agatttggcttcaggatctcaaacctgtttgct

SEQ ID NO: 1010785 - DNA, 33 bp, Homo sapien
ttggatgctgacgtacaagttttagccatatgt

SEQ ID NO: 1010786 - DNA, 33 bp, Homo sapien
ttggatgctgacgtacgagttttagccatatgt

SEQ ID NO: 1010787 - DNA, 33 bp, Homo sapien
ggcagctcttacacaaaaggagagcctgacata

SEQ ID NO: 1010788 - DNA, 33 bp, Homo sapien
ggcagctcttacacaacaggagagcctgacata

SEQ ID NO: 1010789 - DNA, 33 bp, Homo sapien
ccttttcatgaccaaccgtcccttgtacattaa

SEQ ID NO: 1010790 - DNA, 33 bp, Homo sapien
ccttttcatgaccaactgtcccttgtacattaa

SEQ ID NO: 1010791 - DNA, 33 bp, Homo sapien
tgtgatgtttcccttccagcctcatcagtgaaa

SEQ ID NO: 1010792 - DNA, 33 bp, Homo sapien
tgtgatgtttcccttctagcctcatcagtgaaa

SEQ ID NO: 1010793 - DNA, 33 bp, Homo sapien
gaggtggaactggtagaagtaaaagaatagggg

SEQ ID NO: 1010794 - DNA, 33 bp, Homo sapien
gaggtggaactggtaggagtaaaagaatagggg

SEQ ID NO: 1010795 - DNA, 33 bp, Homo sapien
aggggaaaacagaatacggaggatggttgagaa

SEQ ID NO: 1010796 - DNA, 33 bp, Homo sapien
aggggaaaacagaatatggaggatggttgagaa

SEQ ID NO: 1010797 - DNA, 33 bp, Homo sapien
attatactagcctgacacttgagagaaaatctg

SEQ ID NO: 1010798 - DNA, 33 bp, Homo sapien
attatactagcctgactcttgagagaaaatctg

SEQ ID NO: 1010799 - DNA, 33 bp, Homo sapien
aactagacaaatggaacctgctagattgctact

SEQ ID NO: 1010800 - DNA, 33 bp, Homo sapien
aactagacaaatggaagctgctagattgctact

SEQ ID NO: 1010801 - DNA, 33 bp, Homo sapien
caatttagggcctttcaatagaacacaaacttt

SEQ ID NO: 1010802 - DNA, 33 bp, Homo sapien
caatttagggcctttcgatagaacacaaacttt

SEQ ID NO: 1010803 - DNA, 33 bp, Homo sapien
gtttctcactttagatcactgggtacctacaca

SEQ ID NO: 1010804 - DNA, 33 bp, Homo sapien
gtttctcactttagatgactgggtacctacaca

SEQ ID NO: 1010805 - DNA, 33 bp, Homo sapien
gggggtggccaacaggaaatcactaaattgcct

SEQ ID NO: 1010806 - DNA, 33 bp, Homo sapien
gggggtggccaacagggaatcactaaattgcct

SEQ ID NO: 1010807 - DNA, 33 bp, Homo sapien
ctatactatttagaccagctttctgtagatata

SEQ ID NO: 1010808 - DNA, 33 bp, Homo sapien
ctatactatttagaccggctttctgtagatata

SEQ ID NO: 1010809 - DNA, 33 bp, Homo sapien
acagccagttctggaacagtctcacctactggg

SEQ ID NO: 1010810 - DNA, 33 bp, Homo sapien
acagccagttctggaatagtctcacctactggg

SEQ ID NO: 1010811 - DNA, 33 bp, Homo sapien
cttgaggtgaaatcaacaccagggtgtccgata

SEQ ID NO: 1010812 - DNA, 33 bp, Homo sapien
cttgaggtgaaatcaataccagggtgtccgata

SEQ ID NO: 1010813 - DNA, 33 bp, Homo sapien
tgaaatgacttgctcgaatcataggtatatatt

SEQ ID NO: 1010814 - DNA, 33 bp, Homo sapien
tgaaatgacttgctcgtatcataggtatatatt

SEQ ID NO: 1010815 - DNA, 33 bp, Homo sapien
acataaggaacttaaactgagcaagcaaaaaac

SEQ ID NO: 1010816 - DNA, 33 bp, Homo sapien
acataaggaacttaaattgagcaagcaaaaaac

SEQ ID NO: 1010817 - DNA, 33 bp, Homo sapien
ggttaagactgggacaatataatataatatcac

SEQ ID NO: 1010818 - DNA, 33 bp, Homo sapien
ggttaagactgggacactataatataatatcac

SEQ ID NO: 1010819 - DNA, 33 bp, Homo sapien
cccttcagcaatgtcacgcaaccattaggtgat

SEQ ID NO: 1010820 - DNA, 33 bp, Homo sapien
cccttcagcaatgtcaggcaaccattaggtgat

SEQ ID NO: 1010821 - DNA, 33 bp, Homo sapien
cttaataaattggctcaacctggccagcaggca

SEQ ID NO: 1010822 - DNA, 33 bp, Homo sapien
cttaataaattggctccacctggccagcaggca

SEQ ID NO: 1010823 - DNA, 33 bp, Homo sapien
tattttcagagcaaaaactggttggagaaaggg

SEQ ID NO: 1010824 - DNA, 33 bp, Homo sapien
tattttcagagcaaaagctggttggagaaaggg

SEQ ID NO: 1010825 - DNA, 33 bp, Homo sapien
cttcttggtttgagacacgagtttcaagacgtg

SEQ ID NO: 1010826 - DNA, 33 bp, Homo sapien
cttcttggtttgagacgcgagtttcaagacgtg

SEQ ID NO: 1010827 - DNA, 33 bp, Homo sapien
gtaagttgctgacataatacctcattgcccagt

SEQ ID NO: 1010828 - DNA, 33 bp, Homo sapien
gtaagttgctgacatagtacctcattgcccagt

SEQ ID NO: 1010829 - DNA, 33 bp, Homo sapien
caatgtgactttaagaagactcatatcttttga

SEQ ID NO: 1010830 - DNA, 33 bp, Homo sapien
caatgtgactttaagatgactcatatcttttga

SEQ ID NO: 1010831 - DNA, 33 bp, Homo sapien
ttcttgtcaatgaatgaaagtctacctcattct

SEQ ID NO: 1010832 - DNA, 33 bp, Homo sapien
ttcttgtcaatgaatgtaagtctacctcattct

SEQ ID NO: 1010833 - DNA, 33 bp, Homo sapien
aatgcaaggccttaatcaagtcataaatctgga

SEQ ID NO: 1010834 - DNA, 33 bp, Homo sapien
aatgcaaggccttaatgaagtcataaatctgga

SEQ ID NO: 1010835 - DNA, 33 bp, Homo sapien
ctgtgggagaagacaagcaactttaattttcac

SEQ ID NO: 1010836 - DNA, 33 bp, Homo sapien
ctgtgggagaagacaatcaactttaattttcac

SEQ ID NO: 1010837 - DNA, 33 bp, Homo sapien
tgttcatcttgaattgaaaacacttttaggaaa

SEQ ID NO: 1010838 - DNA, 33 bp, Homo sapien
tgttcatcttgaattggaaacacttttaggaaa

SEQ ID NO: 1010839 - DNA, 33 bp, Homo sapien
tctcttgccataaatactagaaaatgggataaa

SEQ ID NO: 1010840 - DNA, 33 bp, Homo sapien
tctcttgccataaatattagaaaatgggataaa

SEQ ID NO: 1010841 - DNA, 33 bp, Homo sapien
ttgacatatagtgaaacggaactaagccaatga

SEQ ID NO: 1010842 - DNA, 33 bp, Homo sapien
ttgacatatagtgaaagggaactaagccaatga

SEQ ID NO: 1010843 - DNA, 33 bp, Homo sapien
accacaagctcctggcagcatctaggcatctac

SEQ ID NO: 1010844 - DNA, 33 bp, Homo sapien
accacaagctcctggcggcatctaggcatctac

SEQ ID NO: 1010845 - DNA, 33 bp, Homo sapien
aagagctgggtcagcaaacaagtagcagctctg

SEQ ID NO: 1010846 - DNA, 33 bp, Homo sapien
aagagctgggtcagcacacaagtagcagctctg

SEQ ID NO: 1010847 - DNA, 33 bp, Homo sapien
actccttcatgtatccactgactagcccatgcc

SEQ ID NO: 1010848 - DNA, 33 bp, Homo sapien
actccttcatgtatccgctgactagcccatgcc

SEQ ID NO: 1010849 - DNA, 33 bp, Homo sapien
cttgaacaagaaagcccacttgggaatctaact

SEQ ID NO: 1010850 - DNA, 33 bp, Homo sapien
cttgaacaagaaagcctacttgggaatctaact

SEQ ID NO: 1010851 - DNA, 33 bp, Homo sapien
tggagggatgactgaacgcagatttccaaccca

SEQ ID NO: 1010852 - DNA, 33 bp, Homo sapien
tggagggatgactgaatgcagatttccaaccca

SEQ ID NO: 1010853 - DNA, 33 bp, Homo sapien
cttttctcacaaagccaacctgtaaactaggaa

SEQ ID NO: 1010854 - DNA, 33 bp, Homo sapien
cttttctcacaaagcccacctgtaaactaggaa

SEQ ID NO: 1010855 - DNA, 33 bp, Homo sapien
ggtcaggaggtgacacaaatttggatctgactt

SEQ ID NO: 1010856 - DNA, 33 bp, Homo sapien
ggtcaggaggtgacacgaatttggatctgactt

SEQ ID NO: 1010857 - DNA, 33 bp, Homo sapien
tctcttacaagtttgaaggccaaaagtccaaga

SEQ ID NO: 1010858 - DNA, 33 bp, Homo sapien
tctcttacaagtttgagggccaaaagtccaaga

SEQ ID NO: 1010859 - DNA, 33 bp, Homo sapien
tctaaaagagttgtgacacaccctcaagtgaac

SEQ ID NO: 1010860 - DNA, 33 bp, Homo sapien
tctaaaagagttgtgagacaccctcaagtgaac

SEQ ID NO: 1010861 - DNA, 33 bp, Homo sapien
gacttgagtttgtgtgcattttgatatatgcag

SEQ ID NO: 1010862 - DNA, 33 bp, Homo sapien
gacttgagtttgtgtggattttgatatatgcag

SEQ ID NO: 1010863 - DNA, 33 bp, Homo sapien
tagcagatgttggctacatgttggctaaaggcc

SEQ ID NO: 1010864 - DNA, 33 bp, Homo sapien
tagcagatgttggctagatgttggctaaaggcc

SEQ ID NO: 1010865 - DNA, 33 bp, Homo sapien
tgcctcaagctttgccacctttctcatgggtaa

SEQ ID NO: 1010866 - DNA, 33 bp, Homo sapien
tgcctcaagctttgccgcctttctcatgggtaa

SEQ ID NO: 1010867 - DNA, 33 bp, Homo sapien
ccatctagtctgtgccaacactgaactagaacg

SEQ ID NO: 1010868 - DNA, 33 bp, Homo sapien
ccatctagtctgtgccgacactgaactagaacg

SEQ ID NO: 1010869 - DNA, 33 bp, Homo sapien
gaatgttgatcatgcaatctctcaggctctcct

SEQ ID NO: 1010870 - DNA, 33 bp, Homo sapien
gaatgttgatcatgcagtctctcaggctctcct

SEQ ID NO: 1010871 - DNA, 33 bp, Homo sapien
cacaatggtgccaaaaaaatacacgttcagtat

SEQ ID NO: 1010872 - DNA, 33 bp, Homo sapien
cacaatggtgccaaaacaatacacgttcagtat

SEQ ID NO: 1010873 - DNA, 33 bp, Homo sapien
catacttggccaagtacgaaggcaaaccctcac

SEQ ID NO: 1010874 - DNA, 33 bp, Homo sapien
catacttggccaagtatgaaggcaaaccctcac

SEQ ID NO: 1010875 - DNA, 33 bp, Homo sapien
ctcagttccatgaaggccccattctccttccac

SEQ ID NO: 1010876 - DNA, 33 bp, Homo sapien
ctcagttccatgaaggtcccattctccttccac

SEQ ID NO: 1010877 - DNA, 33 bp, Homo sapien
agagaagactaaattgcatgacatgataaagga

SEQ ID NO: 1010878 - DNA, 33 bp, Homo sapien
agagaagactaaattgtatgacatgataaagga

SEQ ID NO: 1010879 - DNA, 33 bp, Homo sapien
gggaaacagaggaaagactttcagaaatcaagg

SEQ ID NO: 1010880 - DNA, 33 bp, Homo sapien
gggaaacagaggaaaggctttcagaaatcaagg

SEQ ID NO: 1010881 - DNA, 33 bp, Homo sapien
ctggggtcataattcccgagctgctatactttt

SEQ ID NO: 1010882 - DNA, 33 bp, Homo sapien
ctggggtcataattcctgagctgctatactttt

SEQ ID NO: 1010883 - DNA, 33 bp, Homo sapien
aaatattttaaaatgcagaactcaaaagtatag

SEQ ID NO: 1010884 - DNA, 33 bp, Homo sapien
aaatattttaaaatgccgaactcaaaagtatag

SEQ ID NO: 1010885 - DNA, 33 bp, Homo sapien
gctgtcattttaggacaagcacatccaggctct

SEQ ID NO: 1010886 - DNA, 33 bp, Homo sapien
gctgtcattttaggaccagcacatccaggctct

SEQ ID NO: 1010887 - DNA, 33 bp, Homo sapien
atctggatcagagaaaacctcacagaccaactt

SEQ ID NO: 1010888 - DNA, 33 bp, Homo sapien
atctggatcagagaaaccctcacagaccaactt

SEQ ID NO: 1010889 - DNA, 33 bp, Homo sapien
agtgctgtatatattaactcacttaatcttcag

SEQ ID NO: 1010890 - DNA, 33 bp, Homo sapien
agtgctgtatatattacctcacttaatcttcag

SEQ ID NO: 1010891 - DNA, 33 bp, Homo sapien
agtgagctgggacaaactccctcattttctgta

SEQ ID NO: 1010892 - DNA, 33 bp, Homo sapien
agtgagctgggacaaattccctcattttctgta

SEQ ID NO: 1010893 - DNA, 33 bp, Homo sapien
tttaaattccaactcaactcactagccatgtga

SEQ ID NO: 1010894 - DNA, 33 bp, Homo sapien
tttaaattccaactcacctcactagccatgtga

SEQ ID NO: 1010895 - DNA, 33 bp, Homo sapien
gggcattttatttccacatggagtaaaggttaa

SEQ ID NO: 1010896 - DNA, 33 bp, Homo sapien
gggcattttatttccagatggagtaaaggttaa

SEQ ID NO: 1010897 - DNA, 33 bp, Homo sapien
aatgtttgaagaatgaaaagaactggccaatct

SEQ ID NO: 1010898 - DNA, 33 bp, Homo sapien
aatgtttgaagaatgagaagaactggccaatct

SEQ ID NO: 1010899 - DNA, 33 bp, Homo sapien
catctttgtgagaagtcaacgacaatagacata

SEQ ID NO: 1010900 - DNA, 33 bp, Homo sapien
catctttgtgagaagttaacgacaatagacata

SEQ ID NO: 1010901 - DNA, 33 bp, Homo sapien
tgtctcattctctgaagctcccttcttacattc

SEQ ID NO: 1010902 - DNA, 33 bp, Homo sapien
tgtctcattctctgaatctcccttcttacattc

SEQ ID NO: 1010903 - DNA, 33 bp, Homo sapien
aattactcactctcaactatttttgttacagca

SEQ ID NO: 1010904 - DNA, 33 bp, Homo sapien
aattactcactctcaagtatttttgttacagca

SEQ ID NO: 1010905 - DNA, 33 bp, Homo sapien
cacctgagcatatctccagtcttgtcagctttt

SEQ ID NO: 1010906 - DNA, 33 bp, Homo sapien
cacctgagcatatctctagtcttgtcagctttt

SEQ ID NO: 1010907 - DNA, 33 bp, Homo sapien
tctcagggatgccgcaaaaacctcccttcaaag

SEQ ID NO: 1010908 - DNA, 33 bp, Homo sapien
tctcagggatgccgcagaaacctcccttcaaag

SEQ ID NO: 1010909 - DNA, 33 bp, Homo sapien
tagaagccgtgggagacgcgcaataagcgtgct

SEQ ID NO: 1010910 - DNA, 33 bp, Homo sapien
tagaagccgtgggagatgcgcaataagcgtgct

SEQ ID NO: 1010911 - DNA, 33 bp, Homo sapien
attcaccagttcacagactattctgaaattggt

SEQ ID NO: 1010912 - DNA, 33 bp, Homo sapien
attcaccagttcacaggctattctgaaattggt

SEQ ID NO: 1010913 - DNA, 33 bp, Homo sapien
aaaagcaatgctcagaaatggttcacacttctt

SEQ ID NO: 1010914 - DNA, 33 bp, Homo sapien
aaaagcaatgctcagacatggttcacacttctt

SEQ ID NO: 1010915 - DNA, 33 bp, Homo sapien
acatgcttagaataaacataatcatctggcctt

SEQ ID NO: 1010916 - DNA, 33 bp, Homo sapien
acatgcttagaataaatataatcatctggcctt

SEQ ID NO: 1010917 - DNA, 33 bp, Homo sapien
ccttccattggtatagaccctttctggtactcc

SEQ ID NO: 1010918 - DNA, 33 bp, Homo sapien
ccttccattggtataggccctttctggtactcc

SEQ ID NO: 1010919 - DNA, 33 bp, Homo sapien
ctggtgttttccaactcagctaccttcatgaat

SEQ ID NO: 1010920 - DNA, 33 bp, Homo sapien
ctggtgttttccaacttagctaccttcatgaat

SEQ ID NO: 1010921 - DNA, 33 bp, Homo sapien
tttttcatcacagaaactaaaatgcaatacttt

SEQ ID NO: 1010922 - DNA, 33 bp, Homo sapien
tttttcatcacagaaattaaaatgcaatacttt

SEQ ID NO: 1010923 - DNA, 33 bp, Homo sapien
ggtgatgaggccattgacaaaatcctaccccac

SEQ ID NO: 1010924 - DNA, 33 bp, Homo sapien
ggtgatgaggccattggcaaaatcctaccccac

SEQ ID NO: 1010925 - DNA, 33 bp, Homo sapien
acattccagagtggtaccttccttcccccagag

SEQ ID NO: 1010926 - DNA, 33 bp, Homo sapien
acattccagagtggtatcttccttcccccagag

SEQ ID NO: 1010927 - DNA, 33 bp, Homo sapien
caaccctctggactcaagtgtcttttgccttag

SEQ ID NO: 1010928 - DNA, 33 bp, Homo sapien
caaccctctggactcatgtgtcttttgccttag

SEQ ID NO: 1010929 - DNA, 33 bp, Homo sapien
acttgatggaggtgtaaaacacagcacaagagc

SEQ ID NO: 1010930 - DNA, 33 bp, Homo sapien
acttgatggaggtgtagaacacagcacaagagc

SEQ ID NO: 1010931 - DNA, 33 bp, Homo sapien
gagtttcactctcttcacaagcaatctaggacc

SEQ ID NO: 1010932 - DNA, 33 bp, Homo sapien
gagtttcactctcttcgcaagcaatctaggacc

SEQ ID NO: 1010933 - DNA, 33 bp, Homo sapien
taataggtaagactaaacaccttctgtatctga

SEQ ID NO: 1010934 - DNA, 33 bp, Homo sapien
taataggtaagactaagcaccttctgtatctga

SEQ ID NO: 1010935 - DNA, 33 bp, Homo sapien
ctattatatcctgatcacctgattatcccactg

SEQ ID NO: 1010936 - DNA, 33 bp, Homo sapien
ctattatatcctgatcccctgattatcccactg

SEQ ID NO: 1010937 - DNA, 33 bp, Homo sapien
tggcagtgtgcccttacggccaaggaagcagac

SEQ ID NO: 1010938 - DNA, 33 bp, Homo sapien
tggcagtgtgcccttatggccaaggaagcagac

SEQ ID NO: 1010939 - DNA, 33 bp, Homo sapien
agatgttccaggcttaccttgtatttctctacc

SEQ ID NO: 1010940 - DNA, 33 bp, Homo sapien
agatgttccaggcttatcttgtatttctctacc

SEQ ID NO: 1010941 - DNA, 33 bp, Homo sapien
agaggaaatgatgaaaataagccatcaccattt

SEQ ID NO: 1010942 - DNA, 33 bp, Homo sapien
agaggaaatgatgaaactaagccatcaccattt

SEQ ID NO: 1010943 - DNA, 33 bp, Homo sapien
tgccagtttataagagaaggcaaccacagcggg

SEQ ID NO: 1010944 - DNA, 33 bp, Homo sapien
tgccagtttataagagtaggcaaccacagcggg

SEQ ID NO: 1010945 - DNA, 33 bp, Homo sapien
gtaaatgatctacacaaggtaataaaattatta

SEQ ID NO: 1010946 - DNA, 33 bp, Homo sapien
gtaaatgatctacacatggtaataaaattatta

SEQ ID NO: 1010947 - DNA, 33 bp, Homo sapien
ttctaactgaaccctgaataatggctgtgaaaa

SEQ ID NO: 1010948 - DNA, 33 bp, Homo sapien
ttctaactgaaccctgcataatggctgtgaaaa

SEQ ID NO: 1010949 - DNA, 33 bp, Homo sapien
tccccaactccaaaacccttttcctctacatct

SEQ ID NO: 1010950 - DNA, 33 bp, Homo sapien
tccccaactccaaaactcttttcctctacatct

SEQ ID NO: 1010951 - DNA, 33 bp, Homo sapien
attaaaaagcttgaaacagtgtgagaattagca

SEQ ID NO: 1010952 - DNA, 33 bp, Homo sapien
attaaaaagcttgaaatagtgtgagaattagca

SEQ ID NO: 1010953 - DNA, 33 bp, Homo sapien
ctcccttggtcctcaaaggttacaatctgtaag

SEQ ID NO: 1010954 - DNA, 33 bp, Homo sapien
ctcccttggtcctcaatggttacaatctgtaag

SEQ ID NO: 1010955 - DNA, 33 bp, Homo sapien
actcagctgaaataccaaaggtcttggtagcac

SEQ ID NO: 1010956 - DNA, 33 bp, Homo sapien
actcagctgaaatacctaaggtcttggtagcac

SEQ ID NO: 1010957 - DNA, 33 bp, Homo sapien
tcttggtagcacataactcaggtacctggcttt

SEQ ID NO: 1010958 - DNA, 33 bp, Homo sapien
tcttggtagcacataattcaggtacctggcttt

SEQ ID NO: 1010959 - DNA, 33 bp, Homo sapien
gcaccttcaaaacattgaacatacttccctgcc

SEQ ID NO: 1010960 - DNA, 33 bp, Homo sapien
gcaccttcaaaacatttaacatacttccctgcc

SEQ ID NO: 1010961 - DNA, 33 bp, Homo sapien
aacaaaaggaagtagacagcttctacaggctta

SEQ ID NO: 1010962 - DNA, 33 bp, Homo sapien
aacaaaaggaagtagagagcttctacaggctta

SEQ ID NO: 1010963 - DNA, 33 bp, Homo sapien
atcactcaactcttcaaatatggcaagcctctc

SEQ ID NO: 1010964 - DNA, 33 bp, Homo sapien
atcactcaactcttcacatatggcaagcctctc

SEQ ID NO: 1010965 - DNA, 33 bp, Homo sapien
ctggataagaaacaggacaaatcagaaaggaga

SEQ ID NO: 1010966 - DNA, 33 bp, Homo sapien
ctggataagaaacagggcaaatcagaaaggaga

SEQ ID NO: 1010967 - DNA, 33 bp, Homo sapien
cattaccatttaggaacgcagtcacaatactgt

SEQ ID NO: 1010968 - DNA, 33 bp, Homo sapien
cattaccatttaggaatgcagtcacaatactgt

SEQ ID NO: 1010969 - DNA, 33 bp, Homo sapien
ttttaaatgatggaccagggaaagctcctggaa

SEQ ID NO: 1010970 - DNA, 33 bp, Homo sapien
ttttaaatgatggaccggggaaagctcctggaa

SEQ ID NO: 1010971 - DNA, 33 bp, Homo sapien
agccatgacgtgaagcaatacttttgtgggaaa

SEQ ID NO: 1010972 - DNA, 33 bp, Homo sapien
agccatgacgtgaagcgatacttttgtgggaaa

SEQ ID NO: 1010973 - DNA, 33 bp, Homo sapien
tagagtctctgttacaaattaagaggaaggaaa

SEQ ID NO: 1010974 - DNA, 33 bp, Homo sapien
tagagtctctgttacacattaagaggaaggaaa

SEQ ID NO: 1010975 - DNA, 33 bp, Homo sapien
tagggcggcctggaccacaagatcgagtgcctg

SEQ ID NO: 1010976 - DNA, 33 bp, Homo sapien
tagggcggcctggaccgcaagatcgagtgcctg

SEQ ID NO: 1010977 - DNA, 33 bp, Homo sapien
agggcccactctgagagtatcaattcaacggcc

SEQ ID NO: 1010978 - DNA, 33 bp, Homo sapien
agggcccactctgagattatcaattcaacggcc

SEQ ID NO: 1010979 - DNA, 33 bp, Homo sapien
gttctgtttactcgaaagaaaatttaagtggcc

SEQ ID NO: 1010980 - DNA, 33 bp, Homo sapien
gttctgtttactcgaaggaaaatttaagtggcc

SEQ ID NO: 1010981 - DNA, 33 bp, Homo sapien
aaagactccagatgtgaaaactgacagtataga

SEQ ID NO: 1010982 - DNA, 33 bp, Homo sapien
aaagactccagatgtgtaaactgacagtataga

SEQ ID NO: 1010983 - DNA, 33 bp, Homo sapien
gccttttccctatccaatatctcctacatagtt

SEQ ID NO: 1010984 - DNA, 33 bp, Homo sapien
gccttttccctatccagtatctcctacatagtt

SEQ ID NO: 1010985 - DNA, 33 bp, Homo sapien
gttgtatgttcactaaatggttaatataatagc

SEQ ID NO: 1010986 - DNA, 33 bp, Homo sapien
gttgtatgttcactaagtggttaatataatagc

SEQ ID NO: 1010987 - DNA, 33 bp, Homo sapien
atgtgctgaccagtcacatagatgaaccaccaa

SEQ ID NO: 1010988 - DNA, 33 bp, Homo sapien
atgtgctgaccagtcagatagatgaaccaccaa

SEQ ID NO: 1010989 - DNA, 33 bp, Homo sapien
tcaaatgagactggccaaaatctgatacagtgg

SEQ ID NO: 1010990 - DNA, 33 bp, Homo sapien
tcaaatgagactggccgaaatctgatacagtgg

SEQ ID NO: 1010991 - DNA, 33 bp, Homo sapien
gagcagactacttccacgtcccagaaacttagc

SEQ ID NO: 1010992 - DNA, 33 bp, Homo sapien
gagcagactacttccatgtcccagaaacttagc

SEQ ID NO: 1010993 - DNA, 33 bp, Homo sapien
ttgtctttcagacttccatgatataatctcgtt

SEQ ID NO: 1010994 - DNA, 33 bp, Homo sapien
ttgtctttcagacttcgatgatataatctcgtt

SEQ ID NO: 1010995 - DNA, 33 bp, Homo sapien
tcatgacctttcacctaactgaactacagccta

SEQ ID NO: 1010996 - DNA, 33 bp, Homo sapien
tcatgacctttcacctgactgaactacagccta

SEQ ID NO: 1010997 - DNA, 33 bp, Homo sapien
cctgcttaactgataacctgcaagaaaacatac

SEQ ID NO: 1010998 - DNA, 33 bp, Homo sapien
cctgcttaactgataatctgcaagaaaacatac

SEQ ID NO: 1010999 - DNA, 33 bp, Homo sapien
gcttggcttgatcttgaatgttctgtggtacac

SEQ ID NO: 1011000 - DNA, 33 bp, Homo sapien
gcttggcttgatcttggatgttctgtggtacac

SEQ ID NO: 1011001 - DNA, 33 bp, Homo sapien
acttatttcagaacaccgggataagactctccc

SEQ ID NO: 1011002 - DNA, 33 bp, Homo sapien
acttatttcagaacactgggataagactctccc

SEQ ID NO: 1011003 - DNA, 33 bp, Homo sapien
cacacacacacacacaacaaacagcttcgtagg

SEQ ID NO: 1011004 - DNA, 33 bp, Homo sapien
cacacacacacacacaccaaacagcttcgtagg

SEQ ID NO: 1011005 - DNA, 33 bp, Homo sapien
tcttaggagcaagaaccccgctgtgaactgcac

SEQ ID NO: 1011006 - DNA, 33 bp, Homo sapien
tcttaggagcaagaacgccgctgtgaactgcac

SEQ ID NO: 1011007 - DNA, 33 bp, Homo sapien
cactgttacagaatgaataagaatctagggggc

SEQ ID NO: 1011008 - DNA, 33 bp, Homo sapien
cactgttacagaatgagtaagaatctagggggc

SEQ ID NO: 1011009 - DNA, 33 bp, Homo sapien
gaccatgagatacaccactcagatatccttcta

SEQ ID NO: 1011010 - DNA, 33 bp, Homo sapien
gaccatgagatacaccgctcagatatccttcta

SEQ ID NO: 1011011 - DNA, 33 bp, Homo sapien
tggatctatttgaggaaatttttagctatgacc

SEQ ID NO: 1011012 - DNA, 33 bp, Homo sapien
tggatctatttgaggacatttttagctatgacc

SEQ ID NO: 1011013 - DNA, 33 bp, Homo sapien
tagtttgcctctcttccaagcagtttaatcatt

SEQ ID NO: 1011014 - DNA, 33 bp, Homo sapien
tagtttgcctctcttctaagcagtttaatcatt

SEQ ID NO: 1011015 - DNA, 33 bp, Homo sapien
cttgtggacttgtctccctctcaagcctctttc

SEQ ID NO: 1011016 - DNA, 33 bp, Homo sapien
cttgtggacttgtctctctctcaagcctctttc

SEQ ID NO: 1011017 - DNA, 33 bp, Homo sapien
caaacctcagtaatcacaatgttgtatcttaag

SEQ ID NO: 1011018 - DNA, 33 bp, Homo sapien
caaacctcagtaatcagaatgttgtatcttaag

SEQ ID NO: 1011019 - DNA, 33 bp, Homo sapien
tccttaccacacactacgtattgttctaagccc

SEQ ID NO: 1011020 - DNA, 33 bp, Homo sapien
tccttaccacacactaggtattgttctaagccc

SEQ ID NO: 1011021 - DNA, 33 bp, Homo sapien
ttatgggtgagatagaagagttttggccagtcc

SEQ ID NO: 1011022 - DNA, 33 bp, Homo sapien
ttatgggtgagatagaggagttttggccagtcc

SEQ ID NO: 1011023 - DNA, 33 bp, Homo sapien
tgtcttgtttcagctcgcaaggggtatgcttcc

SEQ ID NO: 1011024 - DNA, 33 bp, Homo sapien
tgtcttgtttcagctctcaaggggtatgcttcc

SEQ ID NO: 1011025 - DNA, 33 bp, Homo sapien
aatggagaacaagtcacggtgaactcacttctc

SEQ ID NO: 1011026 - DNA, 33 bp, Homo sapien
aatggagaacaagtcatggtgaactcacttctc

SEQ ID NO: 1011027 - DNA, 33 bp, Homo sapien
caagggaatcaagaacgcagacacataagaagt

SEQ ID NO: 1011028 - DNA, 33 bp, Homo sapien
caagggaatcaagaactcagacacataagaagt

SEQ ID NO: 1011029 - DNA, 33 bp, Homo sapien
tggctcaaactctgcacgtaaaatgagaataga

SEQ ID NO: 1011030 - DNA, 33 bp, Homo sapien
tggctcaaactctgcatgtaaaatgagaataga

SEQ ID NO: 1011031 - DNA, 33 bp, Homo sapien
cacctgtaaccctaagaactttgcaagactaag

SEQ ID NO: 1011032 - DNA, 33 bp, Homo sapien
cacctgtaaccctaaggactttgcaagactaag

SEQ ID NO: 1011033 - DNA, 33 bp, Homo sapien
aaaagacattatgcaacagttatctgtttgtac

SEQ ID NO: 1011034 - DNA, 33 bp, Homo sapien
aaaagacattatgcaagagttatctgtttgtac

SEQ ID NO: 1011035 - DNA, 33 bp, Homo sapien
caggcttgaattttaacgctgtggaggctctct

SEQ ID NO: 1011036 - DNA, 33 bp, Homo sapien
caggcttgaattttaatgctgtggaggctctct

SEQ ID NO: 1011037 - DNA, 33 bp, Homo sapien
ctgagaaattgacccactgagcctgcttaattg

SEQ ID NO: 1011038 - DNA, 33 bp, Homo sapien
ctgagaaattgacccattgagcctgcttaattg

SEQ ID NO: 1011039 - DNA, 33 bp, Homo sapien
gcttaagtgggtaaacaatagtaccatttactg

SEQ ID NO: 1011040 - DNA, 33 bp, Homo sapien
gcttaagtgggtaaacgatagtaccatttactg

SEQ ID NO: 1011041 - DNA, 33 bp, Homo sapien
cccacttaagccacaaactggaaatcatacttg

SEQ ID NO: 1011042 - DNA, 33 bp, Homo sapien
cccacttaagccacaagctggaaatcatacttg

SEQ ID NO: 1011043 - DNA, 33 bp, Homo sapien
taaatatgatgaaaaaatatgaggggccttcaa

SEQ ID NO: 1011044 - DNA, 33 bp, Homo sapien
taaatatgatgaaaaactatgaggggccttcaa

SEQ ID NO: 1011045 - DNA, 33 bp, Homo sapien
atgcctgtatgacatccaggtggagattagtga

SEQ ID NO: 1011046 - DNA, 33 bp, Homo sapien
atgcctgtatgacatctaggtggagattagtga

SEQ ID NO: 1011047 - DNA, 33 bp, Homo sapien
gatatagacctgttcacgttgcatatgtcacaa

SEQ ID NO: 1011048 - DNA, 33 bp, Homo sapien
gatatagacctgttcatgttgcatatgtcacaa

SEQ ID NO: 1011049 - DNA, 33 bp, Homo sapien
tccttctcattaaagcactcttctcttatatat

SEQ ID NO: 1011050 - DNA, 33 bp, Homo sapien
tccttctcattaaagcgctcttctcttatatat

SEQ ID NO: 1011051 - DNA, 33 bp, Homo sapien
gaagagaagaaaagcacgttctattaggacaaa

SEQ ID NO: 1011052 - DNA, 33 bp, Homo sapien
gaagagaagaaaagcaggttctattaggacaaa

SEQ ID NO: 1011053 - DNA, 33 bp, Homo sapien
ttgggaagacagagtgaaaatcttggcaggaga

SEQ ID NO: 1011054 - DNA, 33 bp, Homo sapien
ttgggaagacagagtggaaatcttggcaggaga

SEQ ID NO: 1011055 - DNA, 33 bp, Homo sapien
tatgtatggcttatggcattgcttttatctttg

SEQ ID NO: 1011056 - DNA, 33 bp, Homo sapien
tatgtatggcttatggtattgcttttatctttg

SEQ ID NO: 1011057 - DNA, 33 bp, Homo sapien
ttataaaggatgatgcagaaattcatgtgcctg

SEQ ID NO: 1011058 - DNA, 33 bp, Homo sapien
ttataaaggatgatgcggaaattcatgtgcctg

SEQ ID NO: 1011059 - DNA, 33 bp, Homo sapien
cattcccctattctacaaagacactgactctgc

SEQ ID NO: 1011060 - DNA, 33 bp, Homo sapien
cattcccctattctacgaagacactgactctgc

SEQ ID NO: 1011061 - DNA, 33 bp, Homo sapien
attgatagacactcagaccctaaacatatacat

SEQ ID NO: 1011062 - DNA, 33 bp, Homo sapien
attgatagacactcaggccctaaacatatacat

SEQ ID NO: 1011063 - DNA, 33 bp, Homo sapien
aacagaaaacaatgaagtactgatatatgtaca

SEQ ID NO: 1011064 - DNA, 33 bp, Homo sapien
aacagaaaacaatgaattactgatatatgtaca

SEQ ID NO: 1011065 - DNA, 33 bp, Homo sapien
aaagtggcattcggaaacaacttaccaaaggtc

SEQ ID NO: 1011066 - DNA, 33 bp, Homo sapien
aaagtggcattcggaagcaacttaccaaaggtc

SEQ ID NO: 1011067 - DNA, 33 bp, Homo sapien
cagattacaaatgagaaactggctatggttaaa

SEQ ID NO: 1011068 - DNA, 33 bp, Homo sapien
cagattacaaatgagacactggctatggttaaa

SEQ ID NO: 1011069 - DNA, 33 bp, Homo sapien
aacattcctgttccccaaaacacttgaaaaact

SEQ ID NO: 1011070 - DNA, 33 bp, Homo sapien
aacattcctgttccccgaaacacttgaaaaact

SEQ ID NO: 1011071 - DNA, 33 bp, Homo sapien
caagattcttttcagccatcagttgactttctt

SEQ ID NO: 1011072 - DNA, 33 bp, Homo sapien
caagattcttttcagcgatcagttgactttctt

SEQ ID NO: 1011073 - DNA, 33 bp, Homo sapien
acaatttcagcgaccaatacaattttgagggat

SEQ ID NO: 1011074 - DNA, 33 bp, Homo sapien
acaatttcagcgaccagtacaattttgagggat

SEQ ID NO: 1011075 - DNA, 33 bp, Homo sapien
cctttccatatgttgacgtctttaaaaggtaca

SEQ ID NO: 1011076 - DNA, 33 bp, Homo sapien
cctttccatatgttgatgtctttaaaaggtaca

SEQ ID NO: 1011077 - DNA, 33 bp, Homo sapien
agccataatcagaaaactgaaacttccttacac

SEQ ID NO: 1011078 - DNA, 33 bp, Homo sapien
agccataatcagaaaagtgaaacttccttacac

SEQ ID NO: 1011079 - DNA, 33 bp, Homo sapien
cactcctatgtgggaaagagagaaagatccgca

SEQ ID NO: 1011080 - DNA, 33 bp, Homo sapien
cactcctatgtgggaaggagagaaagatccgca

SEQ ID NO: 1011081 - DNA, 33 bp, Homo sapien
agcggtttaagaattacgcacaggtcagagagg

SEQ ID NO: 1011082 - DNA, 33 bp, Homo sapien
agcggtttaagaattaggcacaggtcagagagg

SEQ ID NO: 1011083 - DNA, 33 bp, Homo sapien
caggcacgtcgtaaccacagacaggacactgac

SEQ ID NO: 1011084 - DNA, 33 bp, Homo sapien
caggcacgtcgtaaccgcagacaggacactgac

SEQ ID NO: 1011085 - DNA, 33 bp, Homo sapien
tctgtcacatggtagagctcagcaaatacttgt

SEQ ID NO: 1011086 - DNA, 33 bp, Homo sapien
tctgtcacatggtagatctcagcaaatacttgt

SEQ ID NO: 1011087 - DNA, 33 bp, Homo sapien
tttattatccaggaaccctccctaatgtgcctt

SEQ ID NO: 1011088 - DNA, 33 bp, Homo sapien
tttattatccaggaactctccctaatgtgcctt

SEQ ID NO: 1011089 - DNA, 33 bp, Homo sapien
aaattacaaattaccaaattagggtccatttat

SEQ ID NO: 1011090 - DNA, 33 bp, Homo sapien
aaattacaaattaccacattagggtccatttat

SEQ ID NO: 1011091 - DNA, 33 bp, Homo sapien
gaatatttgtaccataagacaaagtttaaatcc

SEQ ID NO: 1011092 - DNA, 33 bp, Homo sapien
gaatatttgtaccatatgacaaagtttaaatcc

SEQ ID NO: 1011093 - DNA, 33 bp, Homo sapien
aacctgtggcttcatcgcacagtgaagaaaagc

SEQ ID NO: 1011094 - DNA, 33 bp, Homo sapien
aacctgtggcttcatctcacagtgaagaaaagc

SEQ ID NO: 1011095 - DNA, 33 bp, Homo sapien
tgacctctggctaatgaaatgtgatatatagcc

SEQ ID NO: 1011096 - DNA, 33 bp, Homo sapien
tgacctctggctaatgcaatgtgatatatagcc

SEQ ID NO: 1011097 - DNA, 33 bp, Homo sapien
tgctgcaggattgaaaatgtcagctctctctgg

SEQ ID NO: 1011098 - DNA, 33 bp, Homo sapien
tgctgcaggattgaaagtgtcagctctctctgg

SEQ ID NO: 1011099 - DNA, 33 bp, Homo sapien
gtagactttaagtaaaataggctccctccataa

SEQ ID NO: 1011100 - DNA, 33 bp, Homo sapien
gtagactttaagtaaagtaggctccctccataa

SEQ ID NO: 1011101 - DNA, 33 bp, Homo sapien
gagccattacttggaacagccggagaagctgga

SEQ ID NO: 1011102 - DNA, 33 bp, Homo sapien
gagccattacttggaagagccggagaagctgga

SEQ ID NO: 1011103 - DNA, 33 bp, Homo sapien
gggctggctaggaagaccttactcaatgttccc

SEQ ID NO: 1011104 - DNA, 33 bp, Homo sapien
gggctggctaggaagatcttactcaatgttccc

SEQ ID NO: 1011105 - DNA, 33 bp, Homo sapien
aaaagtttaagtgagacaacatgtaacaattca

SEQ ID NO: 1011106 - DNA, 33 bp, Homo sapien
aaaagtttaagtgagataacatgtaacaattca

SEQ ID NO: 1011107 - DNA, 33 bp, Homo sapien
caatgccagagtgaacaacctctaatgttctct

SEQ ID NO: 1011108 - DNA, 33 bp, Homo sapien
caatgccagagtgaacgacctctaatgttctct

SEQ ID NO: 1011109 - DNA, 33 bp, Homo sapien
ggttgcatccaagtgaagccctaatgtataaat

SEQ ID NO: 1011110 - DNA, 33 bp, Homo sapien
ggttgcatccaagtgaggccctaatgtataaat

SEQ ID NO: 1011111 - DNA, 33 bp, Homo sapien
ccaggcagatagcatgaaggcatcagatccatg

SEQ ID NO: 1011112 - DNA, 33 bp, Homo sapien
ccaggcagatagcatgtaggcatcagatccatg

SEQ ID NO: 1011113 - DNA, 33 bp, Homo sapien
ccatgagatcaatcagcagctttacaaatccta

SEQ ID NO: 1011114 - DNA, 33 bp, Homo sapien
ccatgagatcaatcagtagctttacaaatccta

SEQ ID NO: 1011115 - DNA, 33 bp, Homo sapien
taccattgcatttccccaattctatttctcatt

SEQ ID NO: 1011116 - DNA, 33 bp, Homo sapien
taccattgcatttcccgaattctatttctcatt

SEQ ID NO: 1011117 - DNA, 33 bp, Homo sapien
tatagacactaggagacgctaaaggagaatgga

SEQ ID NO: 1011118 - DNA, 33 bp, Homo sapien
tatagacactaggagatgctaaaggagaatgga

SEQ ID NO: 1011119 - DNA, 33 bp, Homo sapien
ttcttcagtggtgtaacagaaattttagtgtaa

SEQ ID NO: 1011120 - DNA, 33 bp, Homo sapien
ttcttcagtggtgtaatagaaattttagtgtaa

SEQ ID NO: 1011121 - DNA, 33 bp, Homo sapien
accataatccagcctagattggatttttcaagg

SEQ ID NO: 1011122 - DNA, 33 bp, Homo sapien
accataatccagcctatattggatttttcaagg

SEQ ID NO: 1011123 - DNA, 33 bp, Homo sapien
gagaaatgctcaaaaacatcttcctactattaa

SEQ ID NO: 1011124 - DNA, 33 bp, Homo sapien
gagaaatgctcaaaaatatcttcctactattaa

SEQ ID NO: 1011125 - DNA, 33 bp, Homo sapien
caagctaccaatgaataacttttttcacagaat

SEQ ID NO: 1011126 - DNA, 33 bp, Homo sapien
caagctaccaatgaatgacttttttcacagaat

SEQ ID NO: 1011127 - DNA, 33 bp, Homo sapien
gagcactttgtatagaactctaagatcatacca

SEQ ID NO: 1011128 - DNA, 33 bp, Homo sapien
gagcactttgtatagacctctaagatcatacca

SEQ ID NO: 1011129 - DNA, 33 bp, Homo sapien
tcagggtataaataatcagtgaacgtttgtgtt

SEQ ID NO: 1011130 - DNA, 33 bp, Homo sapien
tcagggtataaataatgagtgaacgtttgtgtt

SEQ ID NO: 1011131 - DNA, 33 bp, Homo sapien
ggcagagcaggaaagaaaaagagggaatggaga

SEQ ID NO: 1011132 - DNA, 33 bp, Homo sapien
ggcagagcaggaaagacaaagagggaatggaga

SEQ ID NO: 1011133 - DNA, 33 bp, Homo sapien
ccaacccattattcaagggcacaaccacttgaa

SEQ ID NO: 1011134 - DNA, 33 bp, Homo sapien
ccaacccattattcaatggcacaaccacttgaa

SEQ ID NO: 1011135 - DNA, 33 bp, Homo sapien
aaaatgctaattccgacgtgctgcttcccagtg

SEQ ID NO: 1011136 - DNA, 33 bp, Homo sapien
aaaatgctaattccgatgtgctgcttcccagtg

SEQ ID NO: 1011137 - DNA, 33 bp, Homo sapien
tcctagcgtggcagcacagaccctatattctcc

SEQ ID NO: 1011138 - DNA, 33 bp, Homo sapien
tcctagcgtggcagcagagaccctatattctcc

SEQ ID NO: 1011139 - DNA, 33 bp, Homo sapien
gggctgttgttcttaactgatatcctagcgtgg

SEQ ID NO: 1011140 - DNA, 33 bp, Homo sapien
gggctgttgttcttaattgatatcctagcgtgg

SEQ ID NO: 1011141 - DNA, 33 bp, Homo sapien
ggacttactttgaaaaacattagctagttacaa

SEQ ID NO: 1011142 - DNA, 33 bp, Homo sapien
ggacttactttgaaaagcattagctagttacaa

SEQ ID NO: 1011143 - DNA, 33 bp, Homo sapien
tttccactgacttttgcagagctcctgtatgac

SEQ ID NO: 1011144 - DNA, 33 bp, Homo sapien
tttccactgacttttgtagagctcctgtatgac

SEQ ID NO: 1011145 - DNA, 33 bp, Homo sapien
agtcacaaactgtgaacaacagcaaacaaggtg

SEQ ID NO: 1011146 - DNA, 33 bp, Homo sapien
agtcacaaactgtgaagaacagcaaacaaggtg

SEQ ID NO: 1011147 - DNA, 33 bp, Homo sapien
aaactcaccacaaatcacccagcagagacagtg

SEQ ID NO: 1011148 - DNA, 33 bp, Homo sapien
aaactcaccacaaatcgcccagcagagacagtg

SEQ ID NO: 1011149 - DNA, 33 bp, Homo sapien
catctacttccataataatagcaaccctttctg

SEQ ID NO: 1011150 - DNA, 33 bp, Homo sapien
catctacttccataatgatagcaaccctttctg

SEQ ID NO: 1011151 - DNA, 33 bp, Homo sapien
tttttacttatgtgtgcatgtaatgtttttata

SEQ ID NO: 1011152 - DNA, 33 bp, Homo sapien
tttttacttatgtgtgtatgtaatgtttttata

SEQ ID NO: 1011153 - DNA, 33 bp, Homo sapien
ggccctaaagaattaggaaatatgaggtaaatc

SEQ ID NO: 1011154 - DNA, 33 bp, Homo sapien
ggccctaaagaattagtaaatatgaggtaaatc

SEQ ID NO: 1011155 - DNA, 33 bp, Homo sapien
tccccctctgtgtacacatcatcaatggactcc

SEQ ID NO: 1011156 - DNA, 33 bp, Homo sapien
tccccctctgtgtacagatcatcaatggactcc

SEQ ID NO: 1011157 - DNA, 33 bp, Homo sapien
ctccccctataatggaaacccctggcagaatgt

SEQ ID NO: 1011158 - DNA, 33 bp, Homo sapien
ctccccctataatggagacccctggcagaatgt

SEQ ID NO: 1011159 - DNA, 33 bp, Homo sapien
attctcataatgggcaacatttacaatcggatt

SEQ ID NO: 1011160 - DNA, 33 bp, Homo sapien
attctcataatgggcagcatttacaatcggatt

SEQ ID NO: 1011161 - DNA, 33 bp, Homo sapien
atcacactagccaaaagagtgacttttttgttt

SEQ ID NO: 1011162 - DNA, 33 bp, Homo sapien
atcacactagccaaaatagtgacttttttgttt

SEQ ID NO: 1011163 - DNA, 33 bp, Homo sapien
tttgttgaacgcatacagagtgcccctttactc

SEQ ID NO: 1011164 - DNA, 33 bp, Homo sapien
tttgttgaacgcatacggagtgcccctttactc

SEQ ID NO: 1011165 - DNA, 33 bp, Homo sapien
taattttgtggattcgaaatttgagcagggatt

SEQ ID NO: 1011166 - DNA, 33 bp, Homo sapien
taattttgtggattcggaatttgagcagggatt

SEQ ID NO: 1011167 - DNA, 33 bp, Homo sapien
gggacaaggatgaaccaactctaccggtaggaa

SEQ ID NO: 1011168 - DNA, 33 bp, Homo sapien
gggacaaggatgaaccgactctaccggtaggaa

SEQ ID NO: 1011169 - DNA, 33 bp, Homo sapien
acagcttttacttcctcaactcaatggcaactc

SEQ ID NO: 1011170 - DNA, 33 bp, Homo sapien
acagcttttacttccttaactcaatggcaactc

SEQ ID NO: 1011171 - DNA, 33 bp, Homo sapien
ttcctgtaaaactagtcaagaatgtgtgcattg

SEQ ID NO: 1011172 - DNA, 33 bp, Homo sapien
ttcctgtaaaactagttaagaatgtgtgcattg

SEQ ID NO: 1011173 - DNA, 33 bp, Homo sapien
agaggccacttaaagaatagttatgcctacagg

SEQ ID NO: 1011174 - DNA, 33 bp, Homo sapien
agaggccacttaaagagtagttatgcctacagg

SEQ ID NO: 1011175 - DNA, 33 bp, Homo sapien
atggagaagggcttataaccatagacactgtgt

SEQ ID NO: 1011176 - DNA, 33 bp, Homo sapien
atggagaagggcttattaccatagacactgtgt

SEQ ID NO: 1011177 - DNA, 33 bp, Homo sapien
gaagattaaatgggacaatgcacatcaaatcac

SEQ ID NO: 1011178 - DNA, 33 bp, Homo sapien
gaagattaaatgggacgatgcacatcaaatcac

SEQ ID NO: 1011179 - DNA, 33 bp, Homo sapien
agagagagaatagagacactctgtttatatctt

SEQ ID NO: 1011180 - DNA, 33 bp, Homo sapien
agagagagaatagagagactctgtttatatctt

SEQ ID NO: 1011181 - DNA, 33 bp, Homo sapien
acattgataatcaaagaaggctatgaaccctcc

SEQ ID NO: 1011182 - DNA, 33 bp, Homo sapien
acattgataatcaaagcaggctatgaaccctcc

SEQ ID NO: 1011183 - DNA, 33 bp, Homo sapien
aatcttatttctttccactgtccatatttcctt

SEQ ID NO: 1011184 - DNA, 33 bp, Homo sapien
aatcttatttctttccgctgtccatatttcctt

SEQ ID NO: 1011185 - DNA, 33 bp, Homo sapien
tggcccagcaaaatggcagctatggtcactcac

SEQ ID NO: 1011186 - DNA, 33 bp, Homo sapien
tggcccagcaaaatggtagctatggtcactcac

SEQ ID NO: 1011187 - DNA, 33 bp, Homo sapien
tggatgctaattttgaataggcacgaggatctg

SEQ ID NO: 1011188 - DNA, 33 bp, Homo sapien
tggatgctaattttgagtaggcacgaggatctg

SEQ ID NO: 1011189 - DNA, 33 bp, Homo sapien
gaaagaaagctattggaatgaagactattgatc

SEQ ID NO: 1011190 - DNA, 33 bp, Homo sapien
gaaagaaagctattgggatgaagactattgatc

SEQ ID NO: 1011191 - DNA, 33 bp, Homo sapien
tctttccaggtgaaaacttgatctactgaagtt

SEQ ID NO: 1011192 - DNA, 33 bp, Homo sapien
tctttccaggtgaaaagttgatctactgaagtt

SEQ ID NO: 1011193 - DNA, 33 bp, Homo sapien
tgaagccaaaggtccaagcaagacagagtacaa

SEQ ID NO: 1011194 - DNA, 33 bp, Homo sapien
tgaagccaaaggtccaggcaagacagagtacaa

SEQ ID NO: 1011195 - DNA, 33 bp, Homo sapien
atggttttctcctcaactggttagtggcaccac

SEQ ID NO: 1011196 - DNA, 33 bp, Homo sapien
atggttttctcctcaattggttagtggcaccac

SEQ ID NO: 1011197 - DNA, 33 bp, Homo sapien
tcactacaagcaggaagcagggacattttaaga

SEQ ID NO: 1011198 - DNA, 33 bp, Homo sapien
tcactacaagcaggaatcagggacattttaaga

SEQ ID NO: 1011199 - DNA, 33 bp, Homo sapien
gaaggtaaaactcaaacgcttatcctttataat

SEQ ID NO: 1011200 - DNA, 33 bp, Homo sapien
gaaggtaaaactcaaatgcttatcctttataat

SEQ ID NO: 1011201 - DNA, 33 bp, Homo sapien
gtgccatttaacctgaagactagggctgcagac

SEQ ID NO: 1011202 - DNA, 33 bp, Homo sapien
gtgccatttaacctgacgactagggctgcagac

SEQ ID NO: 1011203 - DNA, 33 bp, Homo sapien
gtgattcagggcaccaatgaaaacagacatttc

SEQ ID NO: 1011204 - DNA, 33 bp, Homo sapien
gtgattcagggcaccagtgaaaacagacatttc

SEQ ID NO: 1011205 - DNA, 33 bp, Homo sapien
cttcagactaagctggaagagaaactgattgag

SEQ ID NO: 1011206 - DNA, 33 bp, Homo sapien
cttcagactaagctggcagagaaactgattgag

SEQ ID NO: 1011207 - DNA, 33 bp, Homo sapien
taaagggagcttgcaccgatccttagtgtctat

SEQ ID NO: 1011208 - DNA, 33 bp, Homo sapien
taaagggagcttgcactgatccttagtgtctat

SEQ ID NO: 1011209 - DNA, 33 bp, Homo sapien
tgacatagtgtactcaaatagaaggaaccagaa

SEQ ID NO: 1011210 - DNA, 33 bp, Homo sapien
tgacatagtgtactcagatagaaggaaccagaa

SEQ ID NO: 1011211 - DNA, 33 bp, Homo sapien; identical to SEQ ID NO: 1011209

SEQ ID NO: 1011212 - DNA, 33 bp, Homo sapien; identical to SEQ ID NO: 1011210

SEQ ID NO: 1011213 - DNA, 33 bp, Homo sapien
actacaccacccaacaatctagtttgtgtagca

SEQ ID NO: 1011214 - DNA, 33 bp, Homo sapien
actacaccacccaacactctagtttgtgtagca

SEQ ID NO: 1011215 - DNA, 33 bp, Homo sapien
attttcaaattctcaccgctaagacaaaattaa

SEQ ID NO: 1011216 - DNA, 33 bp, Homo sapien
attttcaaattctcactgctaagacaaaattaa

SEQ ID NO: 1011217 - DNA, 33 bp, Homo sapien
gtactaggcccctcatcaagttgatttccctgt

SEQ ID NO: 1011218 - DNA, 33 bp, Homo sapien
gtactaggcccctcattaagttgatttccctgt

SEQ ID NO: 1011219 - DNA, 33 bp, Homo sapien
tataccaagtagtgaaacatttaaaaatataca

SEQ ID NO: 1011220 - DNA, 33 bp, Homo sapien
tataccaagtagtgaatcatttaaaaatataca

SEQ ID NO: 1011221 - DNA, 33 bp, Homo sapien
ggtagaccagatttcaaatagtaaattaggact

SEQ ID NO: 1011222 - DNA, 33 bp, Homo sapien
ggtagaccagatttcatatagtaaattaggact

SEQ ID NO: 1011223 - DNA, 33 bp, Homo sapien
aaagccccctaggatgaagaaatgaaggacctt

SEQ ID NO: 1011224 - DNA, 33 bp, Homo sapien
aaagccccctaggatgtagaaatgaaggacctt

SEQ ID NO: 1011225 - DNA, 33 bp, Homo sapien
gaatcctcgtcctaaacgtggaactgactgacc

SEQ ID NO: 1011226 - DNA, 33 bp, Homo sapien
gaatcctcgtcctaaatgtggaactgactgacc

SEQ ID NO: 1011227 - DNA, 33 bp, Homo sapien
agtatgctgaatgaaacaatgaataagccatca

SEQ ID NO: 1011228 - DNA, 33 bp, Homo sapien
agtatgctgaatgaaataatgaataagccatca

SEQ ID NO: 1011229 - DNA, 33 bp, Homo sapien
gcatcatatgacaaaacaaaaaagaagatgacc

SEQ ID NO: 1011230 - DNA, 33 bp, Homo sapien
gcatcatatgacaaaataaaaaagaagatgacc

SEQ ID NO: 1011231 - DNA, 33 bp, Homo sapien
aaatcccaaagcaaacagcacataaaatattgg

SEQ ID NO: 1011232 - DNA, 33 bp, Homo sapien
aaatcccaaagcaaacggcacataaaatattgg

SEQ ID NO: 1011233 - DNA, 33 bp, Homo sapien
tctttattgttagcagaaatatgaaatacatta

SEQ ID NO: 1011234 - DNA, 33 bp, Homo sapien
tctttattgttagcaggaatatgaaatacatta

SEQ ID NO: 1011235 - DNA, 33 bp, Homo sapien
accttctagatgctggaagcacacgcactctcc

SEQ ID NO: 1011236 - DNA, 33 bp, Homo sapien
accttctagatgctggtagcacacgcactctcc

SEQ ID NO: 1011237 - DNA, 33 bp, Homo sapien
cgaagccctaggaaaacagcttattatgaagac

SEQ ID NO: 1011238 - DNA, 33 bp, Homo sapien
cgaagccctaggaaaatagcttattatgaagac

SEQ ID NO: 1011239 - DNA, 33 bp, Homo sapien
ctttttaaaggaaatacgtgcaagaatataatg

SEQ ID NO: 1011240 - DNA, 33 bp, Homo sapien
ctttttaaaggaaatatgtgcaagaatataatg

SEQ ID NO: 1011241 - DNA, 33 bp, Homo sapien
gcattaaaaatacatacaaaggccaccatgact

SEQ ID NO: 1011242 - DNA, 33 bp, Homo sapien
gcattaaaaatacatataaaggccaccatgact

SEQ ID NO: 1011243 - DNA, 33 bp, Homo sapien
aagatgagtaagtcaaatatggcctacctcagg

SEQ ID NO: 1011244 - DNA, 33 bp, Homo sapien
aagatgagtaagtcaagtatggcctacctcagg

SEQ ID NO: 1011245 - DNA, 33 bp, Homo sapien
tacttctatgagatcaacccctttttttcttag

SEQ ID NO: 1011246 - DNA, 33 bp, Homo sapien
tacttctatgagatcaccccctttttttcttag

SEQ ID NO: 1011247 - DNA, 33 bp, Homo sapien
tggagtgatcctggtaactcttccaagttttct

SEQ ID NO: 1011248 - DNA, 33 bp, Homo sapien
tggagtgatcctggtatctcttccaagttttct

SEQ ID NO: 1011249 - DNA, 33 bp, Homo sapien
cgttagataaatgaagccaaaccccaaaatgca

SEQ ID NO: 1011250 - DNA, 33 bp, Homo sapien
cgttagataaatgaagtcaaaccccaaaatgca

SEQ ID NO: 1011251 - DNA, 33 bp, Homo sapien
tgtatgtttaccttcaaataaagccaataaaac

SEQ ID NO: 1011252 - DNA, 33 bp, Homo sapien
tgtatgtttaccttcagataaagccaataaaac

SEQ ID NO: 1011253 - DNA, 33 bp, Homo sapien
tatgcttatgacatcaacacttttatggcaatt

SEQ ID NO: 1011254 - DNA, 33 bp, Homo sapien
tatgcttatgacatcagcacttttatggcaatt

SEQ ID NO: 1011255 - DNA, 33 bp, Homo sapien
aggagagaaccgtggaagtggaaaagaagccaa

SEQ ID NO: 1011256 - DNA, 33 bp, Homo sapien
aggagagaaccgtggatgtggaaaagaagccaa

SEQ ID NO: 1011257 - DNA, 33 bp, Homo sapien
gtgttgtgtcctgtaactgaaagaggattgcat

SEQ ID NO: 1011258 - DNA, 33 bp, Homo sapien
gtgttgtgtcctgtaattgaaagaggattgcat

SEQ ID NO: 1011259 - DNA, 33 bp, Homo sapien
aatgccagaatcagggaaaaataattctctgga

SEQ ID NO: 1011260 - DNA, 33 bp, Homo sapien
aatgccagaatcaggggaaaataattctctgga

SEQ ID NO: 1011261 - DNA, 33 bp, Homo sapien
gtatgaaaatgactgactacatatttgaacatg

SEQ ID NO: 1011262 - DNA, 33 bp, Homo sapien
gtatgaaaatgactgattacatatttgaacatg

SEQ ID NO: 1011263 - DNA, 33 bp, Homo sapien
cccaccaagacattcacccattacctgtagctg

SEQ ID NO: 1011264 - DNA, 33 bp, Homo sapien
cccaccaagacattcatccattacctgtagctg

SEQ ID NO: 1011265 - DNA, 33 bp, Homo sapien
aaacaaaataaggaaaatatcaccatgctgtat

SEQ ID NO: 1011266 - DNA, 33 bp, Homo sapien
aaacaaaataaggaaagtatcaccatgctgtat

SEQ ID NO: 1011267 - DNA, 33 bp, Homo sapien
tgccaataacaaagagaatgttgaatactgctg

SEQ ID NO: 1011268 - DNA, 33 bp, Homo sapien
tgccaataacaaagaggatgttgaatactgctg

SEQ ID NO: 1011269 - DNA, 33 bp, Homo sapien
caaagtgttcaaaactcaacaaccatatatatg

SEQ ID NO: 1011270 - DNA, 33 bp, Homo sapien
caaagtgttcaaaacttaacaaccatatatatg

SEQ ID NO: 1011271 - DNA, 33 bp, Homo sapien
ccctgcttgaagtagaagactctaagatcctag

SEQ ID NO: 1011272 - DNA, 33 bp, Homo sapien
ccctgcttgaagtagaggactctaagatcctag

SEQ ID NO: 1011273 - DNA, 33 bp, Homo sapien
tcccattgaatgaggaacttatatctactctgg

SEQ ID NO: 1011274 - DNA, 33 bp, Homo sapien
tcccattgaatgaggagcttatatctactctgg

SEQ ID NO: 1011275 - DNA, 33 bp, Homo sapien
tagaccctacatcccacaatgaatgagtcccca

SEQ ID NO: 1011276 - DNA, 33 bp, Homo sapien
tagaccctacatcccagaatgaatgagtcccca

SEQ ID NO: 1011277 - DNA, 33 bp, Homo sapien
ttgttttcgtccctgaacttacttttgaaattt

SEQ ID NO: 1011278 - DNA, 33 bp, Homo sapien
ttgttttcgtccctgaccttacttttgaaattt

SEQ ID NO: 1011279 - DNA, 33 bp, Homo sapien
ccctcagaatgccctaaccatcatcatggattt

SEQ ID NO: 1011280 - DNA, 33 bp, Homo sapien
ccctcagaatgccctatccatcatcatggattt

SEQ ID NO: 1011281 - DNA, 33 bp, Homo sapien
atcatggatttctgtaaagtattgagtctgatc

SEQ ID NO: 1011282 - DNA, 33 bp, Homo sapien
atcatggatttctgtacagtattgagtctgatc

SEQ ID NO: 1011283 - DNA, 33 bp, Homo sapien
gcctttctctagtgatcaatgacgttgaacatt

SEQ ID NO: 1011284 - DNA, 33 bp, Homo sapien
gcctttctctagtgattaatgacgttgaacatt

SEQ ID NO: 1011285 - DNA, 33 bp, Homo sapien
tctgtcatgtatccaactaaacgtctctgtcct

SEQ ID NO: 1011286 - DNA, 33 bp, Homo sapien
tctgtcatgtatccaagtaaacgtctctgtcct

SEQ ID NO: 1011287 - DNA, 33 bp, Homo sapien
caggaccagcttagccaacatcgtgaaacccca

SEQ ID NO: 1011288 - DNA, 33 bp, Homo sapien
caggaccagcttagccgacatcgtgaaacccca

SEQ ID NO: 1011289 - DNA, 33 bp, Homo sapien
aaggacttgggcattaggatgtaagctgtatct

SEQ ID NO: 1011290 - DNA, 33 bp, Homo sapien
aaggacttgggcattatgatgtaagctgtatct

SEQ ID NO: 1011291 - DNA, 33 bp, Homo sapien
atctgacttaaccagaagaaggctgtaaagaat

SEQ ID NO: 1011292 - DNA, 33 bp, Homo sapien
atctgacttaaccagatgaaggctgtaaagaat

SEQ ID NO: 1011293 - DNA, 33 bp, Homo sapien
agggtagaatgggacaagaaaacaaggacaact

SEQ ID NO: 1011294 - DNA, 33 bp, Homo sapien
agggtagaatgggacaggaaaacaaggacaact

SEQ ID NO: 1011295 - DNA, 33 bp, Homo sapien
gagccctggccccagaccatcagtgtgagctag

SEQ ID NO: 1011296 - DNA, 33 bp, Homo sapien
gagccctggccccagatcatcagtgtgagctag

SEQ ID NO: 1011297 - DNA, 33 bp, Homo sapien
caaagaccctgaagtacaactagttagtcataa

SEQ ID NO: 1011298 - DNA, 33 bp, Homo sapien
caaagaccctgaagtagaactagttagtcataa

SEQ ID NO: 1011299 - DNA, 33 bp, Homo sapien
cctagtgtcttgagcaaattggcatttcaaagc

SEQ ID NO: 1011300 - DNA, 33 bp, Homo sapien
cctagtgtcttgagcagattggcatttcaaagc

SEQ ID NO: 1011301 - DNA, 33 bp, Homo sapien
caaaaatggagcattgcagcagttaggtaattt

SEQ ID NO: 1011302 - DNA, 33 bp, Homo sapien
caaaaatggagcattggagcagttaggtaattt

SEQ ID NO: 1011303 - DNA, 33 bp, Homo sapien
tcgccaaatgagaaaactggatggtaattagat

SEQ ID NO: 1011304 - DNA, 33 bp, Homo sapien
tcgccaaatgagaaaagtggatggtaattagat

SEQ ID NO: 1011305 - DNA, 33 bp, Homo sapien
gtaaacagtgaccccacattgttatcagtcaag

SEQ ID NO: 1011306 - DNA, 33 bp, Homo sapien
gtaaacagtgaccccatattgttatcagtcaag

SEQ ID NO: 1011307 - DNA, 33 bp, Homo sapien
tctaggacaatgctggacacaaaacaggtgacc

SEQ ID NO: 1011308 - DNA, 33 bp, Homo sapien
tctaggacaatgctgggcacaaaacaggtgacc

SEQ ID NO: 1011309 - DNA, 33 bp, Homo sapien
tgaaggttcagggtacaatagtcatataacatg

SEQ ID NO: 1011310 - DNA, 33 bp, Homo sapien
tgaaggttcagggtacgatagtcatataacatg

SEQ ID NO: 1011311 - DNA, 33 bp, Homo sapien
cttcatctgaacctcacagtaatccatgctgcc

SEQ ID NO: 1011312 - DNA, 33 bp, Homo sapien
cttcatctgaacctcagagtaatccatgctgcc

SEQ ID NO: 1011313 - DNA, 33 bp, Homo sapien
aaatgggctcaagacaacaagtatcctccccag

SEQ ID NO: 1011314 - DNA, 33 bp, Homo sapien
aaatgggctcaagacagcaagtatcctccccag

SEQ ID NO: 1011315 - DNA, 33 bp, Homo sapien
aaaataggtaaattcacagtgacaaaagtagtt

SEQ ID NO: 1011316 - DNA, 33 bp, Homo sapien
aaaataggtaaattcatagtgacaaaagtagtt

SEQ ID NO: 1011317 - DNA, 33 bp, Homo sapien
tattattaggcaataaaaaagaacgaagcgctg

SEQ ID NO: 1011318 - DNA, 33 bp, Homo sapien
tattattaggcaataagaaagaacgaagcgctg

SEQ ID NO: 1011319 - DNA, 33 bp, Homo sapien
caccaaagtaaaacacagcttgccttacataag

SEQ ID NO: 1011320 - DNA, 33 bp, Homo sapien
caccaaagtaaaacacggcttgccttacataag

SEQ ID NO: 1011321 - DNA, 33 bp, Homo sapien
gtaaatatacaaaccactaacatcgtcatttat

SEQ ID NO: 1011322 - DNA, 33 bp, Homo sapien
gtaaatatacaaaccagtaacatcgtcatttat

SEQ ID NO: 1011323 - DNA, 33 bp, Homo sapien
gtattcgcataccacaatacggtcccattaaac

SEQ ID NO: 1011324 - DNA, 33 bp, Homo sapien
gtattcgcataccacagtacggtcccattaaac

SEQ ID NO: 1011325 - DNA, 33 bp, Homo sapien
agtgaacttaggtaaagtctcataaccgtgagt

SEQ ID NO: 1011326 - DNA, 33 bp, Homo sapien
agtgaacttaggtaaattctcataaccgtgagt

SEQ ID NO: 1011327 - DNA, 33 bp, Homo sapien
tgttatgtacactagaatccagaaacaagacta

SEQ ID NO: 1011328 - DNA, 33 bp, Homo sapien
tgttatgtacactagactccagaaacaagacta

SEQ ID NO: 1011329 - DNA, 33 bp, Homo sapien
gtacagtagaaatatgacagagaagattaaaaa

SEQ ID NO: 1011330 - DNA, 33 bp, Homo sapien
gtacagtagaaatatggcagagaagattaaaaa

SEQ ID NO: 1011331 - DNA, 33 bp, Homo sapien
gttgatgagctgactcaaagcttgatgacacaa

SEQ ID NO: 1011332 - DNA, 33 bp, Homo sapien
gttgatgagctgactccaagcttgatgacacaa

SEQ ID NO: 1011333 - DNA, 33 bp, Homo sapien
ggggatgacagtggtgaaacgatttttcctaga

SEQ ID NO: 1011334 - DNA, 33 bp, Homo sapien
ggggatgacagtggtgcaacgatttttcctaga

SEQ ID NO: 1011335 - DNA, 33 bp, Homo sapien
gtcaacttccaatgtgcatatgaattgtcagga

SEQ ID NO: 1011336 - DNA, 33 bp, Homo sapien
gtcaacttccaatgtgtatatgaattgtcagga

SEQ ID NO: 1011337 - DNA, 33 bp, Homo sapien
aaatctgtccagggccagcaaggtttttgcata

SEQ ID NO: 1011338 - DNA, 33 bp, Homo sapien
aaatctgtccagggccggcaaggtttttgcata

SEQ ID NO: 1011339 - DNA, 33 bp, Homo sapien
aagaacctttgagtgacagaagcattccacaaa

SEQ ID NO: 1011340 - DNA, 33 bp, Homo sapien
aagaacctttgagtgagagaagcattccacaaa

SEQ ID NO: 1011341 - DNA, 33 bp, Homo sapien
actgattcttctcctacgttctgccaattatct

SEQ ID NO: 1011342 - DNA, 33 bp, Homo sapien
actgattcttctcctatgttctgccaattatct

SEQ ID NO: 1011343 - DNA, 33 bp, Homo sapien
agtaatagatagctaacatatcacccttgaatc

SEQ ID NO: 1011344 - DNA, 33 bp, Homo sapien
agtaatagatagctaatatatcacccttgaatc

SEQ ID NO: 1011345 - DNA, 33 bp, Homo sapien
tccctctgcctccaaccctctttctcgtcattt

SEQ ID NO: 1011346 - DNA, 33 bp, Homo sapien
tccctctgcctccaacgctctttctcgtcattt

SEQ ID NO: 1011347 - DNA, 33 bp, Homo sapien
ttttaatatttcaacaacttgcactatcatact

SEQ ID NO: 1011348 - DNA, 33 bp, Homo sapien
ttttaatatttcaacagcttgcactatcatact

SEQ ID NO: 1011349 - DNA, 33 bp, Homo sapien
tacttaagcgtccatacagcattttggtaaatg

SEQ ID NO: 1011350 - DNA, 33 bp, Homo sapien
tacttaagcgtccatatagcattttggtaaatg

SEQ ID NO: 1011351 - DNA, 33 bp, Homo sapien
ggggcaaacagagatccgaaaagcacttatggg

SEQ ID NO: 1011352 - DNA, 33 bp, Homo sapien
ggggcaaacagagatctgaaaagcacttatggg

SEQ ID NO: 1011353 - DNA, 33 bp, Homo sapien
gtccaattagggcatacgactattctgtggggc

SEQ ID NO: 1011354 - DNA, 33 bp, Homo sapien
gtccaattagggcatatgactattctgtggggc

SEQ ID NO: 1011355 - DNA, 33 bp, Homo sapien
tttctcttcaatcaccccaattctgccaattta

SEQ ID NO: 1011356 - DNA, 33 bp, Homo sapien
tttctcttcaatcacctcaattctgccaattta

SEQ ID NO: 1011357 - DNA, 33 bp, Homo sapien
ctagcatcgatctctacaaatggccttgctctc

SEQ ID NO: 1011358 - DNA, 33 bp, Homo sapien
ctagcatcgatctctataaatggccttgctctc

SEQ ID NO: 1011359 - DNA, 33 bp, Homo sapien
agaatttcaggcaatgaagaggattaccttagg

SEQ ID NO: 1011360 - DNA, 33 bp, Homo sapien
agaatttcaggcaatggagaggattaccttagg

SEQ ID NO: 1011361 - DNA, 33 bp, Homo sapien
cactatcagcgttaaccggagcttgttagaaat

SEQ ID NO: 1011362 - DNA, 33 bp, Homo sapien
cactatcagcgttaactggagcttgttagaaat

SEQ ID NO: 1011363 - DNA, 33 bp, Homo sapien
ggaagtgacactggaaagctggtagagttagag

SEQ ID NO: 1011364 - DNA, 33 bp, Homo sapien
ggaagtgacactggaaggctggtagagttagag

SEQ ID NO: 1011365 - DNA, 33 bp, Homo sapien
actcaggcctcaaatgaaagtgagaaatcaaat

SEQ ID NO: 1011366 - DNA, 33 bp, Homo sapien
actcaggcctcaaatggaagtgagaaatcaaat

SEQ ID NO: 1011367 - DNA, 33 bp, Homo sapien
acaattaaaagatttacagcagcaatgtgactt

SEQ ID NO: 1011368 - DNA, 33 bp, Homo sapien
acaattaaaagatttatagcagcaatgtgactt

SEQ ID NO: 1011369 - DNA, 33 bp, Homo sapien
tacagatgctctgcaacttacaacagggttaca

SEQ ID NO: 1011370 - DNA, 33 bp, Homo sapien
tacagatgctctgcaatttacaacagggttaca

SEQ ID NO: 1011371 - DNA, 33 bp, Homo sapien
ctttttaaaatttgaactatcctagtggtgtgc

SEQ ID NO: 1011372 - DNA, 33 bp, Homo sapien
ctttttaaaatttgaagtatcctagtggtgtgc

SEQ ID NO: 1011373 - DNA, 33 bp, Homo sapien
ataaatgacacttcacacacttaagaaagttag

SEQ ID NO: 1011374 - DNA, 33 bp, Homo sapien
ataaatgacacttcacgcacttaagaaagttag

SEQ ID NO: 1011375 - DNA, 33 bp, Homo sapien
caaaggctaagaaacaaggaggaccaggaatag

SEQ ID NO: 1011376 - DNA, 33 bp, Homo sapien
caaaggctaagaaacagggaggaccaggaatag

SEQ ID NO: 1011377 - DNA, 33 bp, Homo sapien
acttctcaaatcccacccgctcactctgtatat

SEQ ID NO: 1011378 - DNA, 33 bp, Homo sapien
acttctcaaatcccactcgctcactctgtatat

SEQ ID NO: 1011379 - DNA, 33 bp, Homo sapien
tcttctttcacgcgtaccttttagacttaaaaa

SEQ ID NO: 1011380 - DNA, 33 bp, Homo sapien
tcttctttcacgcgtatcttttagacttaaaaa

SEQ ID NO: 1011381 - DNA, 33 bp, Homo sapien
atccataaaatagggaactgttatgagcaaagt

SEQ ID NO: 1011382 - DNA, 33 bp, Homo sapien
atccataaaatagggagctgttatgagcaaagt

SEQ ID NO: 1011383 - DNA, 33 bp, Homo sapien
atgaaattatgctgaaaccaaaggccagtgatt

SEQ ID NO: 1011384 - DNA, 33 bp, Homo sapien
atgaaattatgctgaagccaaaggccagtgatt

SEQ ID NO: 1011385 - DNA, 33 bp, Homo sapien
tcctcaaataagcaagcatcagtgtaagaatac

SEQ ID NO: 1011386 - DNA, 33 bp, Homo sapien
tcctcaaataagcaaggatcagtgtaagaatac

SEQ ID NO: 1011387 - DNA, 33 bp, Homo sapien
tgctcaaacacctcctaaatttccatctgtcta

SEQ ID NO: 1011388 - DNA, 33 bp, Homo sapien
tgctcaaacacctcctcaatttccatctgtcta

SEQ ID NO: 1011389 - DNA, 33 bp, Homo sapien
aacaagttttgtagtgacaccttttacagctca

SEQ ID NO: 1011390 - DNA, 33 bp, Homo sapien
aacaagttttgtagtggcaccttttacagctca

SEQ ID NO: 1011391 - DNA, 33 bp, Homo sapien
aattctgcattatttaacgtagaaagcattttg

SEQ ID NO: 1011392 - DNA, 33 bp, Homo sapien
aattctgcattatttatcgtagaaagcattttg

SEQ ID NO: 1011393 - DNA, 33 bp, Homo sapien
ataccagctgtaaaaacggaaatcggagttacg

SEQ ID NO: 1011394 - DNA, 33 bp, Homo sapien
ataccagctgtaaaaagggaaatcggagttacg

SEQ ID NO: 1011395 - DNA, 33 bp, Homo sapien
gattaatcattttgaactgttggaaacttaatt

SEQ ID NO: 1011396 - DNA, 33 bp, Homo sapien
gattaatcattttgaattgttggaaacttaatt

SEQ ID NO: 1011397 - DNA, 33 bp, Homo sapien
atatcactttccctcacgttacattgctggatt

SEQ ID NO: 1011398 - DNA, 33 bp, Homo sapien
atatcactttccctcatgttacattgctggatt

SEQ ID NO: 1011399 - DNA, 33 bp, Homo sapien
taatatctacctcacacagttttaagttactag

SEQ ID NO: 1011400 - DNA, 33 bp, Homo sapien
taatatctacctcacagagttttaagttactag

SEQ ID NO: 1011401 - DNA, 33 bp, Homo sapien
tcagattttttctacagtggagcataagtaaca

SEQ ID NO: 1011402 - DNA, 33 bp, Homo sapien
tcagattttttctacattggagcataagtaaca

SEQ ID NO: 1011403 - DNA, 33 bp, Homo sapien
gtggcaatgaatatatcagcatatgtgtctgtt

SEQ ID NO: 1011404 - DNA, 33 bp, Homo sapien
gtggcaatgaatatatgagcatatgtgtctgtt

SEQ ID NO: 1011405 - DNA, 33 bp, Homo sapien
taagaaataatggaaacgtataagctccattca

SEQ ID NO: 1011406 - DNA, 33 bp, Homo sapien
taagaaataatggaaatgtataagctccattca

SEQ ID NO: 1011407 - DNA, 33 bp, Homo sapien
agtcccaagagaagaccagctttcagatgagca

SEQ ID NO: 1011408 - DNA, 33 bp, Homo sapien
agtcccaagagaagacgagctttcagatgagca

SEQ ID NO: 1011409 - DNA, 33 bp, Homo sapien
aggccgggtggtaacaaactccctcaacatttg

SEQ ID NO: 1011410 - DNA, 33 bp, Homo sapien
aggccgggtggtaacagactccctcaacatttg

SEQ ID NO: 1011411 - DNA, 33 bp, Homo sapien
cacaatgaagccagcacaataaccagcaaagac

SEQ ID NO: 1011412 - DNA, 33 bp, Homo sapien
cacaatgaagccagcataataaccagcaaagac

SEQ ID NO: 1011413 - DNA, 33 bp, Homo sapien
tagaaattttgagagacaaagtttatgacccaa

SEQ ID NO: 1011414 - DNA, 33 bp, Homo sapien
tagaaattttgagagataaagtttatgacccaa

SEQ ID NO: 1011415 - DNA, 33 bp, Homo sapien
gtaaaaagaaaaaaccaatgacaggaaagataa

SEQ ID NO: 1011416 - DNA, 33 bp, Homo sapien
gtaaaaagaaaaaaccgatgacaggaaagataa

SEQ ID NO: 1011417 - DNA, 33 bp, Homo sapien
tataagcctgtatgcaagtgatttctggagaat

SEQ ID NO: 1011418 - DNA, 33 bp, Homo sapien
tataagcctgtatgcaggtgatttctggagaat

SEQ ID NO: 1011419 - DNA, 33 bp, Homo sapien
ttcctccagtgactaacctaaatttgtctgctg

SEQ ID NO: 1011420 - DNA, 33 bp, Homo sapien
ttcctccagtgactaagctaaatttgtctgctg

SEQ ID NO: 1011421 - DNA, 33 bp, Homo sapien
gcttcaactggctttaaaaatgagccctctgga

SEQ ID NO: 1011422 - DNA, 33 bp, Homo sapien
gcttcaactggctttagaaatgagccctctgga

SEQ ID NO: 1011423 - DNA, 33 bp, Homo sapien
tatccaggtcataataagagttctaaaaattga

SEQ ID NO: 1011424 - DNA, 33 bp, Homo sapien
tatccaggtcataataggagttctaaaaattga

SEQ ID NO: 1011425 - DNA, 33 bp, Homo sapien
gtaggaaattgcaaaactagaatttgaaccttt

SEQ ID NO: 1011426 - DNA, 33 bp, Homo sapien
gtaggaaattgcaaaattagaatttgaaccttt

SEQ ID NO: 1011427 - DNA, 33 bp, Homo sapien
tatctgctcaactgcacgttgcattaatataac

SEQ ID NO: 1011428 - DNA, 33 bp, Homo sapien
tatctgctcaactgcatgttgcattaatataac

SEQ ID NO: 1011429 - DNA, 33 bp, Homo sapien
aatatataggggtataacttcacgactttggat

SEQ ID NO: 1011430 - DNA, 33 bp, Homo sapien
aatatataggggtatatcttcacgactttggat

SEQ ID NO: 1011431 - DNA, 33 bp, Homo sapien
gttcaggaactatgtaaaggaaatgcttgcaca

SEQ ID NO: 1011432 - DNA, 33 bp, Homo sapien
gttcaggaactatgtagaggaaatgcttgcaca

SEQ ID NO: 1011433 - DNA, 33 bp, Homo sapien
tatttatggcttattcgctgtggtatcttcagt

SEQ ID NO: 1011434 - DNA, 33 bp, Homo sapien
tatttatggcttattctctgtggtatcttcagt

SEQ ID NO: 1011435 - DNA, 33 bp, Homo sapien
atccaaacttcagatgccaaccttgtgtgagat

SEQ ID NO: 1011436 - DNA, 33 bp, Homo sapien
atccaaacttcagatggcaaccttgtgtgagat

SEQ ID NO: 1011437 - DNA, 33 bp, Homo sapien
ataaaagtctataataagaggcacctatgcaaa

SEQ ID NO: 1011438 - DNA, 33 bp, Homo sapien
ataaaagtctataatatgaggcacctatgcaaa

SEQ ID NO: 1011439 - DNA, 33 bp, Homo sapien
gttaggtttgaaaacacattccaaaatgttttg

SEQ ID NO: 1011440 - DNA, 33 bp, Homo sapien
gttaggtttgaaaacagattccaaaatgttttg

SEQ ID NO: 1011441 - DNA, 33 bp, Homo sapien
aatgggtgaagtacccacaactgacctgcaggt

SEQ ID NO: 1011442 - DNA, 33 bp, Homo sapien
aatgggtgaagtacccgcaactgacctgcaggt

SEQ ID NO: 1011443 - DNA, 33 bp, Homo sapien
tgttacatggagcccaatacattttattaagtg

SEQ ID NO: 1011444 - DNA, 33 bp, Homo sapien
tgttacatggagcccagtacattttattaagtg

SEQ ID NO: 1011445 - DNA, 33 bp, Homo sapien
ataaaaaaatcttcaacgtgcagtaatatgtgg

SEQ ID NO: 1011446 - DNA, 33 bp, Homo sapien
ataaaaaaatcttcaatgtgcagtaatatgtgg

SEQ ID NO: 1011447 - DNA, 33 bp, Homo sapien
aacttaacagagctcacctagcctggctggcat

SEQ ID NO: 1011448 - DNA, 33 bp, Homo sapien
aacttaacagagctcatctagcctggctggcat

SEQ ID NO: 1011449 - DNA, 33 bp, Homo sapien
acaacttgcttctccaacatattgatacattta

SEQ ID NO: 1011450 - DNA, 33 bp, Homo sapien
acaacttgcttctccagcatattgatacattta

SEQ ID NO: 1011451 - DNA, 33 bp, Homo sapien
taattttcttgtaataccatagcttgccactaa

SEQ ID NO: 1011452 - DNA, 33 bp, Homo sapien
taattttcttgtaatagcatagcttgccactaa

SEQ ID NO: 1011453 - DNA, 33 bp, Homo sapien
tatgatccataatacaaaatagggcacttactt

SEQ ID NO: 1011454 - DNA, 33 bp, Homo sapien
tatgatccataatacagaatagggcacttactt

SEQ ID NO: 1011455 - DNA, 33 bp, Homo sapien
ccacatggatggctacccccagattctcaacca

SEQ ID NO: 1011456 - DNA, 33 bp, Homo sapien
ccacatggatggctactcccagattctcaacca

SEQ ID NO: 1011457 - DNA, 33 bp, Homo sapien
gcacagctagtccagaaagcattccgacagtat

SEQ ID NO: 1011458 - DNA, 33 bp, Homo sapien
gcacagctagtccagagagcattccgacagtat

SEQ ID NO: 1011459 - DNA, 33 bp, Homo sapien
catcagaatcacatggacacttattagaaatgc

SEQ ID NO: 1011460 - DNA, 33 bp, Homo sapien
catcagaatcacatgggcacttattagaaatgc

SEQ ID NO: 1011461 - DNA, 33 bp, Homo sapien
gtgtattagctaggcccgacataagaaaatggc

SEQ ID NO: 1011462 - DNA, 33 bp, Homo sapien
gtgtattagctaggcctgacataagaaaatggc

SEQ ID NO: 1011463 - DNA, 33 bp, Homo sapien
atatcgacaataacataacctttgtcagtgagg

SEQ ID NO: 1011464 - DNA, 33 bp, Homo sapien
atatcgacaataacattacctttgtcagtgagg

SEQ ID NO: 1011465 - DNA, 33 bp, Homo sapien
atttattccttcagtgaatgttactcagtattt

SEQ ID NO: 1011466 - DNA, 33 bp, Homo sapien
atttattccttcagtggatgttactcagtattt

SEQ ID NO: 1011467 - DNA, 33 bp, Homo sapien
gggcatatgagtgacaaggtaaataagttaact

SEQ ID NO: 1011468 - DNA, 33 bp, Homo sapien
gggcatatgagtgacagggtaaataagttaact

SEQ ID NO: 1011469 - DNA, 33 bp, Homo sapien
gaatgaaaaatctgtaactacactcaacatatg

SEQ ID NO: 1011470 - DNA, 33 bp, Homo sapien
gaatgaaaaatctgtacctacactcaacatatg

SEQ ID NO: 1011471 - DNA, 33 bp, Homo sapien
ggactgagccaaagaaaggtgcccatatctttt

SEQ ID NO: 1011472 - DNA, 33 bp, Homo sapien
ggactgagccaaagaagggtgcccatatctttt

SEQ ID NO: 1011473 - DNA, 33 bp, Homo sapien
ctgtgctgcagacttccagtgcacttcccacat

SEQ ID NO: 1011474 - DNA, 33 bp, Homo sapien
ctgtgctgcagacttctagtgcacttcccacat

SEQ ID NO: 1011475 - DNA, 33 bp, Homo sapien
catggccacaaatcatcaccgactgatgtctgg

SEQ ID NO: 1011476 - DNA, 33 bp, Homo sapien
catggccacaaatcattaccgactgatgtctgg

SEQ ID NO: 1011477 - DNA, 33 bp, Homo sapien
ctctgaactttagatacctgaactgtatgtaaa

SEQ ID NO: 1011478 - DNA, 33 bp, Homo sapien
ctctgaactttagatatctgaactgtatgtaaa

SEQ ID NO: 1011479 - DNA, 33 bp, Homo sapien
caaagaaaaagagatacggtatgaaaatgcttg

SEQ ID NO: 1011480 - DNA, 33 bp, Homo sapien
caaagaaaaagagatatggtatgaaaatgcttg

SEQ ID NO: 1011481 - DNA, 33 bp, Homo sapien
tgtttcacttccaccaatgcctattcctctcta

SEQ ID NO: 1011482 - DNA, 33 bp, Homo sapien
tgtttcacttccaccagtgcctattcctctcta

SEQ ID NO: 1011483 - DNA, 33 bp, Homo sapien
ctgctccttcataggtaacccgtgaaacttgat

SEQ ID NO: 1011484 - DNA, 33 bp, Homo sapien
ctgctccttcataggtgacccgtgaaacttgat

SEQ ID NO: 1011485 - DNA, 33 bp, Homo sapien
tccactgccaacaccaatgcaactactgagtga

SEQ ID NO: 1011486 - DNA, 33 bp, Homo sapien
tccactgccaacaccagtgcaactactgagtga

SEQ ID NO: 1011487 - DNA, 33 bp, Homo sapien
aaaaatatttccaatagagaaacctgtgaagat

SEQ ID NO: 1011488 - DNA, 33 bp, Homo sapien
aaaaatatttccaatatagaaacctgtgaagat

SEQ ID NO: 1011489 - DNA, 33 bp, Homo sapien
acacacggttatttagcaggagaactggcactg

SEQ ID NO: 1011490 - DNA, 33 bp, Homo sapien
acacacggttatttagtaggagaactggcactg

SEQ ID NO: 1011491 - DNA, 33 bp, Homo sapien
ttacagtgtcatccccaaatacatgaaatatca

SEQ ID NO: 1011492 - DNA, 33 bp, Homo sapien
ttacagtgtcatccccgaatacatgaaatatca

SEQ ID NO: 1011493 - DNA, 33 bp, Homo sapien
aataaaactgctgatactagctttcagaattca

SEQ ID NO: 1011494 - DNA, 33 bp, Homo sapien
aataaaactgctgatagtagctttcagaattca

SEQ ID NO: 1011495 - DNA, 33 bp, Homo sapien
atgtgttgctattgaacacatttgttgaatgga

SEQ ID NO: 1011496 - DNA, 33 bp, Homo sapien
atgtgttgctattgaatacatttgttgaatgga

SEQ ID NO: 1011497 - DNA, 33 bp, Homo sapien
cagaatactacagaccaggtaactgataatgaa

SEQ ID NO: 1011498 - DNA, 33 bp, Homo sapien
cagaatactacagaccgggtaactgataatgaa

SEQ ID NO: 1011499 - DNA, 33 bp, Homo sapien
attttattgctgactacccttccaggttaacct

SEQ ID NO: 1011500 - DNA, 33 bp, Homo sapien
attttattgctgactatccttccaggttaacct

SEQ ID NO: 1011501 - DNA, 33 bp, Homo sapien
aactccatgatgacacaggtttttgtcccattg

SEQ ID NO: 1011502 - DNA, 33 bp, Homo sapien
aactccatgatgacacgggtttttgtcccattg

SEQ ID NO: 1011503 - DNA, 33 bp, Homo sapien
ggcaaggtaactctagcaatttgagcagaagga

SEQ ID NO: 1011504 - DNA, 33 bp, Homo sapien
ggcaaggtaactctaggaatttgagcagaagga

SEQ ID NO: 1011505 - DNA, 33 bp, Homo sapien
ctatagctatatctcaatcaacatatcattgga

SEQ ID NO: 1011506 - DNA, 33 bp, Homo sapien
ctatagctatatctcagtcaacatatcattgga

SEQ ID NO: 1011507 - DNA, 33 bp, Homo sapien
agcttgatacattttcacaactgaacacaatca

SEQ ID NO: 1011508 - DNA, 33 bp, Homo sapien
agcttgatacattttcgcaactgaacacaatca

SEQ ID NO: 1011509 - DNA, 33 bp, Homo sapien
atgcaagtgatccagaaagcatttgttgagaaa

SEQ ID NO: 1011510 - DNA, 33 bp, Homo sapien
atgcaagtgatccagagagcatttgttgagaaa

SEQ ID NO: 1011511 - DNA, 33 bp, Homo sapien
caaaatctagagtccacacgaattgccagcaga

SEQ ID NO: 1011512 - DNA, 33 bp, Homo sapien
caaaatctagagtccatacgaattgccagcaga

SEQ ID NO: 1011513 - DNA, 33 bp, Homo sapien
cccacgaaaggtgtagcattcccgcatgcgcaa

SEQ ID NO: 1011514 - DNA, 33 bp, Homo sapien
cccacgaaaggtgtaggattcccgcatgcgcaa

SEQ ID NO: 1011515 - DNA, 33 bp, Homo sapien
attgccgaactatcacccgacatttctagtggg

SEQ ID NO: 1011516 - DNA, 33 bp, Homo sapien
attgccgaactatcactcgacatttctagtggg

SEQ ID NO: 1011517 - DNA, 33 bp, Homo sapien
ggcataagaaaaaagcagcttctcaaacaatat

SEQ ID NO: 1011518 - DNA, 33 bp, Homo sapien
ggcataagaaaaaagctgcttctcaaacaatat

SEQ ID NO: 1011519 - DNA, 33 bp, Homo sapien
tttcaattccaaggcaacaagcaggaagaatgc

SEQ ID NO: 1011520 - DNA, 33 bp, Homo sapien
tttcaattccaaggcatcaagcaggaagaatgc

SEQ ID NO: 1011521 - DNA, 33 bp, Homo sapien
tcacaaatgtacccagaatgtttgaccaaattt

SEQ ID NO: 1011522 - DNA, 33 bp, Homo sapien
tcacaaatgtacccaggatgtttgaccaaattt

SEQ ID NO: 1011523 - DNA, 33 bp, Homo sapien
gctttcctgttgcaaaccatcatatatgaagaa

SEQ ID NO: 1011524 - DNA, 33 bp, Homo sapien
gctttcctgttgcaaatcatcatatatgaagaa

SEQ ID NO: 1011525 - DNA, 33 bp, Homo sapien
ttggggtaagagttagcagggttggaatcctca

SEQ ID NO: 1011526 - DNA, 33 bp, Homo sapien
ttggggtaagagttagtagggttggaatcctca

SEQ ID NO: 1011527 - DNA, 33 bp, Homo sapien
gacaaccaaacctgtacaaataagcacaaatcc

SEQ ID NO: 1011528 - DNA, 33 bp, Homo sapien
gacaaccaaacctgtataaataagcacaaatcc

SEQ ID NO: 1011529 - DNA, 33 bp, Homo sapien
ctagccattacctaggaaatctgggaaccaggc

SEQ ID NO: 1011530 - DNA, 33 bp, Homo sapien
ctagccattacctagggaatctgggaaccaggc

SEQ ID NO: 1011531 - DNA, 33 bp, Homo sapien
caatcaatatgtgtaaaaattgagaaaactttg

SEQ ID NO: 1011532 - DNA, 33 bp, Homo sapien
caatcaatatgtgtaagaattgagaaaactttg

SEQ ID NO: 1011533 - DNA, 33 bp, Homo sapien
ccccagctgacattaactgatgcaggcaacctg

SEQ ID NO: 1011534 - DNA, 33 bp, Homo sapien
ccccagctgacattaagtgatgcaggcaacctg

SEQ ID NO: 1011535 - DNA, 33 bp, Homo sapien
gtcatcattagttcaaatcactaagtttagggg

SEQ ID NO: 1011536 - DNA, 33 bp, Homo sapien
gtcatcattagttcaagtcactaagtttagggg

SEQ ID NO: 1011537 - DNA, 33 bp, Homo sapien
ccacctcacatgcaagaaaattgagacacagaa

SEQ ID NO: 1011538 - DNA, 33 bp, Homo sapien
ccacctcacatgcaaggaaattgagacacagaa

SEQ ID NO: 1011539 - DNA, 33 bp, Homo sapien
tctcttgcatccacttaaagctccagacaaatt

SEQ ID NO: 1011540 - DNA, 33 bp, Homo sapien
tctcttgcatccactttaagctccagacaaatt

SEQ ID NO: 1011541 - DNA, 33 bp, Homo sapien
gatttaaaactagatacgttcttcctaatatac

SEQ ID NO: 1011542 - DNA, 33 bp, Homo sapien
gatttaaaactagatatgttcttcctaatatac

SEQ ID NO: 1011543 - DNA, 33 bp, Homo sapien
tgggactctttttactaaatggatggattgaca

SEQ ID NO: 1011544 - DNA, 33 bp, Homo sapien
tgggactctttttactcaatggatggattgaca

SEQ ID NO: 1011545 - DNA, 33 bp, Homo sapien
caagtcttgccccatccaaacctccaaagcata

SEQ ID NO: 1011546 - DNA, 33 bp, Homo sapien
caagtcttgccccatcgaaacctccaaagcata

SEQ ID NO: 1011547 - DNA, 33 bp, Homo sapien
gaaatatctgattaaaaaggctagcttcagttt

SEQ ID NO: 1011548 - DNA, 33 bp, Homo sapien
gaaatatctgattaaagaggctagcttcagttt

SEQ ID NO: 1011549 - DNA, 33 bp, Homo sapien
caactctacaaaaattaaaaattgccttcaaga

SEQ ID NO: 1011550 - DNA, 33 bp, Homo sapien
caactctacaaaaattgaaaattgccttcaaga

SEQ ID NO: 1011551 - DNA, 33 bp, Homo sapien
ctgttatggcaacaccaaatggatgaaggcaga

SEQ ID NO: 1011552 - DNA, 33 bp, Homo sapien
ctgttatggcaacaccgaatggatgaaggcaga

SEQ ID NO: 1011553 - DNA, 33 bp, Homo sapien
atgaatgataagcgtcacagtgagtagcagtag

SEQ ID NO: 1011554 - DNA, 33 bp, Homo sapien
atgaatgataagcgtcgcagtgagtagcagtag

SEQ ID NO: 1011555 - DNA, 33 bp, Homo sapien
ctgagagtttaaagcacaggggatttggtgcag

SEQ ID NO: 1011556 - DNA, 33 bp, Homo sapien
ctgagagtttaaagcagaggggatttggtgcag

SEQ ID NO: 1011557 - DNA, 33 bp, Homo sapien
tgtccttgccattttcaagatattacccactgt

SEQ ID NO: 1011558 - DNA, 33 bp, Homo sapien
tgtccttgccattttccagatattacccactgt

SEQ ID NO: 1011559 - DNA, 33 bp, Homo sapien
tgtttcttttttgttacatggagagaatgagaa

SEQ ID NO: 1011560 - DNA, 33 bp, Homo sapien
tgtttcttttttgttagatggagagaatgagaa

SEQ ID NO: 1011561 - DNA, 33 bp, Homo sapien
ctcagggaactttgaaagtatgccattcttgat

SEQ ID NO: 1011562 - DNA, 33 bp, Homo sapien
ctcagggaactttgaatgtatgccattcttgat

SEQ ID NO: 1011563 - DNA, 33 bp, Homo sapien
aaatggcatggagagacaaaaatccagcaatct

SEQ ID NO: 1011564 - DNA, 33 bp, Homo sapien
aaatggcatggagagagaaaaatccagcaatct

SEQ ID NO: 1011565 - DNA, 33 bp, Homo sapien
agcccagctaagtgggccccaaagtcgatgtat

SEQ ID NO: 1011566 - DNA, 33 bp, Homo sapien
agcccagctaagtgggtcccaaagtcgatgtat

SEQ ID NO: 1011567 - DNA, 33 bp, Homo sapien
agtgaaaacctacaaaattccagaacatgctct

SEQ ID NO: 1011568 - DNA, 33 bp, Homo sapien
agtgaaaacctacaaagttccagaacatgctct

SEQ ID NO: 1011569 - DNA, 33 bp, Homo sapien
gaacatcagtcctgcaaggaagaagggcgcatt

SEQ ID NO: 1011570 - DNA, 33 bp, Homo sapien
gaacatcagtcctgcatggaagaagggcgcatt

SEQ ID NO: 1011571 - DNA, 33 bp, Homo sapien
catgtggtttaaagagcaatcaaattattcatc

SEQ ID NO: 1011572 - DNA, 33 bp, Homo sapien
catgtggtttaaagaggaatcaaattattcatc

SEQ ID NO: 1011573 - DNA, 33 bp, Homo sapien
aacaaagttattaaccactttttgtgagccaaa

SEQ ID NO: 1011574 - DNA, 33 bp, Homo sapien
aacaaagttattaaccgctttttgtgagccaaa

SEQ ID NO: 1011575 - DNA, 33 bp, Homo sapien
aaacttgtggacagaactgttactaagttaggg

SEQ ID NO: 1011576 - DNA, 33 bp, Homo sapien
aaacttgtggacagaagtgttactaagttaggg

SEQ ID NO: 1011577 - DNA, 33 bp, Homo sapien
ggtttagagagttctgccaccttttcttcaaag

SEQ ID NO: 1011578 - DNA, 33 bp, Homo sapien
ggtttagagagttctgtcaccttttcttcaaag

SEQ ID NO: 1011579 - DNA, 33 bp, Homo sapien
gaattcacctgttaaccgctcaaagagccactc

SEQ ID NO: 1011580 - DNA, 33 bp, Homo sapien
gaattcacctgttaactgctcaaagagccactc

SEQ ID NO: 1011581 - DNA, 33 bp, Homo sapien
ctttagttcattttcactaagatagagggactt

SEQ ID NO: 1011582 - DNA, 33 bp, Homo sapien
ctttagttcattttcattaagatagagggactt

SEQ ID NO: 1011583 - DNA, 33 bp, Homo sapien
agagggatggaacaaggaaaagccacaggaggt

SEQ ID NO: 1011584 - DNA, 33 bp, Homo sapien
agagggatggaacaagtaaaagccacaggaggt

SEQ ID NO: 1011585 - DNA, 33 bp, Homo sapien
cccaagcctactacctcagaagccaataaaccc

SEQ ID NO: 1011586 - DNA, 33 bp, Homo sapien
cccaagcctactaccttagaagccaataaaccc

SEQ ID NO: 1011587 - DNA, 33 bp, Homo sapien
ttctttagcaaagctacagccacgaaggaaaag

SEQ ID NO: 1011588 - DNA, 33 bp, Homo sapien
ttctttagcaaagctatagccacgaaggaaaag

SEQ ID NO: 1011589 - DNA, 33 bp, Homo sapien
ttctaactcagcttttaaaaaagaaactttaat

SEQ ID NO: 1011590 - DNA, 33 bp, Homo sapien
ttctaactcagcttttgaaaaagaaactttaat

SEQ ID NO: 1011591 - DNA, 33 bp, Homo sapien
tggcaattttggacaacggtttgctaggtgatt

SEQ ID NO: 1011592 - DNA, 33 bp, Homo sapien
tggcaattttggacaatggtttgctaggtgatt

SEQ ID NO: 1011593 - DNA, 33 bp, Homo sapien
aattcaagttgttgaaggagatttctgaagttt

SEQ ID NO: 1011594 - DNA, 33 bp, Homo sapien
aattcaagttgttgaatgagatttctgaagttt

SEQ ID NO: 1011595 - DNA, 33 bp, Homo sapien
ttaaatccacattttacggctctctactacaaa

SEQ ID NO: 1011596 - DNA, 33 bp, Homo sapien
ttaaatccacattttatggctctctactacaaa

SEQ ID NO: 1011597 - DNA, 33 bp, Homo sapien
agacataaagccaacaatgggactcaacatggg

SEQ ID NO: 1011598 - DNA, 33 bp, Homo sapien
agacataaagccaacagtgggactcaacatggg

SEQ ID NO: 1011599 - DNA, 33 bp, Homo sapien
atgtttcttattctgtaaaatgtttgttcatgt

SEQ ID NO: 1011600 - DNA, 33 bp, Homo sapien
atgtttcttattctgtgaaatgtttgttcatgt

SEQ ID NO: 1011601 - DNA, 33 bp, Homo sapien
aatacatacctctccacaacaccattactcatt

SEQ ID NO: 1011602 - DNA, 33 bp, Homo sapien
aatacatacctctccagaacaccattactcatt

SEQ ID NO: 1011603 - DNA, 33 bp, Homo sapien
aggctgacaatctttcaatcttcttcaagaaac

SEQ ID NO: 1011604 - DNA, 33 bp, Homo sapien
aggctgacaatctttcgatcttcttcaagaaac

SEQ ID NO: 1011605 - DNA, 33 bp, Homo sapien
agatattcaacctgtaactaaaactaggatgag

SEQ ID NO: 1011606 - DNA, 33 bp, Homo sapien
agatattcaacctgtatctaaaactaggatgag

SEQ ID NO: 1011607 - DNA, 33 bp, Homo sapien
gaggtttactgtgaaccatgattgcgtgactgc

SEQ ID NO: 1011608 - DNA, 33 bp, Homo sapien
gaggtttactgtgaactatgattgcgtgactgc

SEQ ID NO: 1011609 - DNA, 33 bp, Homo sapien
tcaaaattgtgcctaaaaagctaaaaccacatt

SEQ ID NO: 1011610 - DNA, 33 bp, Homo sapien
tcaaaattgtgcctaacaagctaaaaccacatt

SEQ ID NO: 1011611 - DNA, 33 bp, Homo sapien
atcacacattctaaaactccacagaccagtttc

SEQ ID NO: 1011612 - DNA, 33 bp, Homo sapien
atcacacattctaaaagtccacagaccagtttc

SEQ ID NO: 1011613 - DNA, 33 bp, Homo sapien
aaggaaagtaactttgaaatggtcatccacttt

SEQ ID NO: 1011614 - DNA, 33 bp, Homo sapien
aaggaaagtaactttgcaatggtcatccacttt

SEQ ID NO: 1011615 - DNA, 33 bp, Homo sapien
cttttaaatgtgatttaaaacatcttggcttag

SEQ ID NO: 1011616 - DNA, 33 bp, Homo sapien
cttttaaatgtgattttaaacatcttggcttag

SEQ ID NO: 1011617 - DNA, 33 bp, Homo sapien
ttttcctaacctcaaagtcatactgcaatgata

SEQ ID NO: 1011618 - DNA, 33 bp, Homo sapien
ttttcctaacctcaaattcatactgcaatgata

SEQ ID NO: 1011619 - DNA, 33 bp, Homo sapien
atgttgggcctaaagcactgtttatctgtagag

SEQ ID NO: 1011620 - DNA, 33 bp, Homo sapien
atgttgggcctaaagctctgtttatctgtagag

SEQ ID NO: 1011621 - DNA, 33 bp, Homo sapien
catgctgtagtatccaatagtaaatggcaacgc

SEQ ID NO: 1011622 - DNA, 33 bp, Homo sapien
catgctgtagtatccagtagtaaatggcaacgc

SEQ ID NO: 1011623 - DNA, 33 bp, Homo sapien
tgcccattttataactcaaccatcttattattc

SEQ ID NO: 1011624 - DNA, 33 bp, Homo sapien
tgcccattttataactgaaccatcttattattc

SEQ ID NO: 1011625 - DNA, 33 bp, Homo sapien
caactaaagagtgagaaccatttttatctagag

SEQ ID NO: 1011626 - DNA, 33 bp, Homo sapien
caactaaagagtgagatccatttttatctagag

SEQ ID NO: 1011627 - DNA, 33 bp, Homo sapien
caatggtgctgttttacggactgtggaacaaca

SEQ ID NO: 1011628 - DNA, 33 bp, Homo sapien
caatggtgctgttttagggactgtggaacaaca

SEQ ID NO: 1011629 - DNA, 33 bp, Homo sapien
tacagtgtacctttcaggagatccttcttcatc

SEQ ID NO: 1011630 - DNA, 33 bp, Homo sapien
tacagtgtacctttcatgagatccttcttcatc

SEQ ID NO: 1011631 - DNA, 33 bp, Homo sapien
ccgtggcgtatctgcaacagtccatgcagggta

SEQ ID NO: 1011632 - DNA, 33 bp, Homo sapien
ccgtggcgtatctgcagcagtccatgcagggta

SEQ ID NO: 1011633 - DNA, 33 bp, Homo sapien
gggaggtggttgtacacggcaggtatctggctc

SEQ ID NO: 1011634 - DNA, 33 bp, Homo sapien
gggaggtggttgtacatggcaggtatctggctc

SEQ ID NO: 1011635 - DNA, 33 bp, Homo sapien
caatgacgtacatagtgaaactcacagaatatc

SEQ ID NO: 1011636 - DNA, 33 bp, Homo sapien
caatgacgtacatagttaaactcacagaatatc

SEQ ID NO: 1011637 - DNA, 33 bp, Homo sapien
acatttgggaatagcaaagtgttagaagagaat

SEQ ID NO: 1011638 - DNA, 33 bp, Homo sapien
acatttgggaatagcagagtgttagaagagaat

SEQ ID NO: 1011639 - DNA, 33 bp, Homo sapien
taattttgcttagaaacgccatgttttactttg

SEQ ID NO: 1011640 - DNA, 33 bp, Homo sapien
taattttgcttagaaatgccatgttttactttg

SEQ ID NO: 1011641 - DNA, 33 bp, Homo sapien
acaagcatgagctagaagtatgagctctacctc

SEQ ID NO: 1011642 - DNA, 33 bp, Homo sapien
acaagcatgagctagacgtatgagctctacctc

SEQ ID NO: 1011643 - DNA, 33 bp, Homo sapien
caaatattgcccatcaatctttcaaaggcattc

SEQ ID NO: 1011644 - DNA, 33 bp, Homo sapien
caaatattgcccatcagtctttcaaaggcattc

SEQ ID NO: 1011645 - DNA, 33 bp, Homo sapien
caggtactttatgcgacccattctgaagatgaa

SEQ ID NO: 1011646 - DNA, 33 bp, Homo sapien
caggtactttatgcgatccattctgaagatgaa

SEQ ID NO: 1011647 - DNA, 33 bp, Homo sapien
tattgttcttattgtacgattccctcttttctt

SEQ ID NO: 1011648 - DNA, 33 bp, Homo sapien
tattgttcttattgtatgattccctcttttctt

SEQ ID NO: 1011649 - DNA, 33 bp, Homo sapien
gacctggctttaggacagtaagattagatagtg

SEQ ID NO: 1011650 - DNA, 33 bp, Homo sapien
gacctggctttaggacggtaagattagatagtg

SEQ ID NO: 1011651 - DNA, 33 bp, Homo sapien
agacgttggcgtccaacactgctataataagaa

SEQ ID NO: 1011652 - DNA, 33 bp, Homo sapien
agacgttggcgtccaatactgctataataagaa

SEQ ID NO: 1011653 - DNA, 33 bp, Homo sapien
ggattttacttgccaaatggatttctatcctga

SEQ ID NO: 1011654 - DNA, 33 bp, Homo sapien
ggattttacttgccaagtggatttctatcctga

SEQ ID NO: 1011655 - DNA, 33 bp, Homo sapien
gagaagccattctgtgaataatgaacagcccat

SEQ ID NO: 1011656 - DNA, 33 bp, Homo sapien
gagaagccattctgtggataatgaacagcccat

SEQ ID NO: 1011657 - DNA, 33 bp, Homo sapien
tttccaacttctaacaactgacctagatgactt

SEQ ID NO: 1011658 - DNA, 33 bp, Homo sapien
tttccaacttctaacagctgacctagatgactt

SEQ ID NO: 1011659 - DNA, 33 bp, Homo sapien
tctaggatgttaagaagcttggagagagttgac

SEQ ID NO: 1011660 - DNA, 33 bp, Homo sapien
tctaggatgttaagaatcttggagagagttgac

SEQ ID NO: 1011661 - DNA, 33 bp, Homo sapien
tgaaggaaaactaaatcacattctgaaacaatt

SEQ ID NO: 1011662 - DNA, 33 bp, Homo sapien
tgaaggaaaactaaattacattctgaaacaatt

SEQ ID NO: 1011663 - DNA, 33 bp, Homo sapien
ctgaaacaggtggctccaagttttctggttata

SEQ ID NO: 1011664 - DNA, 33 bp, Homo sapien
ctgaaacaggtggctctaagttttctggttata

SEQ ID NO: 1011665 - DNA, 33 bp, Homo sapien
tttctgactcttcctaagtagtagttcggagaa

SEQ ID NO: 1011666 - DNA, 33 bp, Homo sapien
tttctgactcttcctatgtagtagttcggagaa

SEQ ID NO: 1011667 - DNA, 33 bp, Homo sapien
aataacgtgttccactaaatgcaactaaatctc

SEQ ID NO: 1011668 - DNA, 33 bp, Homo sapien
aataacgtgttccactcaatgcaactaaatctc

SEQ ID NO: 1011669 - DNA, 33 bp, Homo sapien
tcaaatgttggtttaacagactccttgtatggt

SEQ ID NO: 1011670 - DNA, 33 bp, Homo sapien
tcaaatgttggtttaagagactccttgtatggt

SEQ ID NO: 1011671 - DNA, 33 bp, Homo sapien
aaaaggtgcacaattacggaagaagaatcctta

SEQ ID NO: 1011672 - DNA, 33 bp, Homo sapien
aaaaggtgcacaattatggaagaagaatcctta

SEQ ID NO: 1011673 - DNA, 33 bp, Homo sapien
tagtgaggcaatcagaaaccaaaagccagtcct

SEQ ID NO: 1011674 - DNA, 33 bp, Homo sapien
tagtgaggcaatcagagaccaaaagccagtcct

SEQ ID NO: 1011675 - DNA, 33 bp, Homo sapien
caataattaataaagacagatggacaaatctgg

SEQ ID NO: 1011676 - DNA, 33 bp, Homo sapien
caataattaataaagatagatggacaaatctgg

SEQ ID NO: 1011677 - DNA, 33 bp, Homo sapien
caggaaggctgggtaaagcaattttttaagcag

SEQ ID NO: 1011678 - DNA, 33 bp, Homo sapien
caggaaggctgggtaatgcaattttttaagcag

SEQ ID NO: 1011679 - DNA, 33 bp, Homo sapien
ttaatcattagggaaacgcaagtgaaaactgca

SEQ ID NO: 1011680 - DNA, 33 bp, Homo sapien
ttaatcattagggaaatgcaagtgaaaactgca

SEQ ID NO: 1011681 - DNA, 33 bp, Homo sapien
tgatgtggatgtggaaaaagtagaatttgcata

SEQ ID NO: 1011682 - DNA, 33 bp, Homo sapien
tgatgtggatgtggaacaagtagaatttgcata

SEQ ID NO: 1011683 - DNA, 33 bp, Homo sapien
tctgtgttctttctcaatcaagcactatttctc

SEQ ID NO: 1011684 - DNA, 33 bp, Homo sapien
tctgtgttctttctcagtcaagcactatttctc

SEQ ID NO: 1011685 - DNA, 33 bp, Homo sapien
ctaaatagaaaaagcacctttgttagtgtggct

SEQ ID NO: 1011686 - DNA, 33 bp, Homo sapien
ctaaatagaaaaagcatctttgttagtgtggct

SEQ ID NO: 1011687 - DNA, 33 bp, Homo sapien
aatatgtaaaggaaaaatcattcaatacgttgg

SEQ ID NO: 1011688 - DNA, 33 bp, Homo sapien
aatatgtaaaggaaaagtcattcaatacgttgg

SEQ ID NO: 1011689 - DNA, 33 bp, Homo sapien
agggaataaaaatgaacagcaggagttaaagag

SEQ ID NO: 1011690 - DNA, 33 bp, Homo sapien
agggaataaaaatgaagagcaggagttaaagag

SEQ ID NO: 1011691 - DNA, 33 bp, Homo sapien
gagtagcaagagcctacgtaattgatgcctctg

SEQ ID NO: 1011692 - DNA, 33 bp, Homo sapien
gagtagcaagagcctatgtaattgatgcctctg

SEQ ID NO: 1011693 - DNA, 33 bp, Homo sapien
ctgtcttactcttactcagataggtacttatga

SEQ ID NO: 1011694 - DNA, 33 bp, Homo sapien
ctgtcttactcttacttagataggtacttatga

SEQ ID NO: 1011695 - DNA, 33 bp, Homo sapien
ttggaatgaagtttccaattagagcttctatac

SEQ ID NO: 1011696 - DNA, 33 bp, Homo sapien
ttggaatgaagtttcccattagagcttctatac

SEQ ID NO: 1011697 - DNA, 33 bp, Homo sapien
tttcttgacattttcaataatgcttacatgggc

SEQ ID NO: 1011698 - DNA, 33 bp, Homo sapien
tttcttgacattttcagtaatgcttacatgggc

SEQ ID NO: 1011699 - DNA, 33 bp, Homo sapien
gtgccttaaaagcatgacacaaaaagttcactt

SEQ ID NO: 1011700 - DNA, 33 bp, Homo sapien
gtgccttaaaagcatgtcacaaaaagttcactt

SEQ ID NO: 1011701 - DNA, 33 bp, Homo sapien
gtggtttcctaggcaactcatatttaggctggt

SEQ ID NO: 1011702 - DNA, 33 bp, Homo sapien
gtggtttcctaggcaattcatatttaggctggt

SEQ ID NO: 1011703 - DNA, 33 bp, Homo sapien
tgctgcaggaggccgaactataactgcagcaca

SEQ ID NO: 1011704 - DNA, 33 bp, Homo sapien
tgctgcaggaggccgacctataactgcagcaca

SEQ ID NO: 1011705 - DNA, 33 bp, Homo sapien
tctttcatcttgcgtaaaatttccattctgtca

SEQ ID NO: 1011706 - DNA, 33 bp, Homo sapien
tctttcatcttgcgtataatttccattctgtca

SEQ ID NO: 1011707 - DNA, 33 bp, Homo sapien
tcacagtgctttctacacaggaattggatgtga

SEQ ID NO: 1011708 - DNA, 33 bp, Homo sapien
tcacagtgctttctacgcaggaattggatgtga

SEQ ID NO: 1011709 - DNA, 33 bp, Homo sapien
ctcaaaatggctaacacggtgtggaagagaact

SEQ ID NO: 1011710 - DNA, 33 bp, Homo sapien
ctcaaaatggctaacatggtgtggaagagaact

SEQ ID NO: 1011711 - DNA, 33 bp, Homo sapien
ttatccatttctaaaacaatgcagcaatgcatg

SEQ ID NO: 1011712 - DNA, 33 bp, Homo sapien
ttatccatttctaaaataatgcagcaatgcatg

SEQ ID NO: 1011713 - DNA, 33 bp, Homo sapien
ttctgtaatctctcaccgcctaacttgctgact

SEQ ID NO: 1011714 - DNA, 33 bp, Homo sapien
ttctgtaatctctcactgcctaacttgctgact

SEQ ID NO: 1011715 - DNA, 33 bp, Homo sapien
agttcacttgtaaaaaaagggcttgaaataata

SEQ ID NO: 1011716 - DNA, 33 bp, Homo sapien
agttcacttgtaaaaacagggcttgaaataata

SEQ ID NO: 1011717 - DNA, 33 bp, Homo sapien
acagtgcttcttataaatcggaattttggtttt

SEQ ID NO: 1011718 - DNA, 33 bp, Homo sapien
acagtgcttcttataagtcggaattttggtttt

SEQ ID NO: 1011719 - DNA, 33 bp, Homo sapien
acacagtataatggtgcaacttgcaattcctgg

SEQ ID NO: 1011720 - DNA, 33 bp, Homo sapien
acacagtataatggtgtaacttgcaattcctgg

SEQ ID NO: 1011721 - DNA, 33 bp, Homo sapien
taactaaaattccagacagtttcagcaaagttg

SEQ ID NO: 1011722 - DNA, 33 bp, Homo sapien
taactaaaattccagatagtttcagcaaagttg

SEQ ID NO: 1011723 - DNA, 33 bp, Homo sapien
taaaaaaatacactcaataacatctcacataaa

SEQ ID NO: 1011724 - DNA, 33 bp, Homo sapien
taaaaaaatacactcagtaacatctcacataaa

SEQ ID NO: 1011725 - DNA, 33 bp, Homo sapien
ctatgttctgaagtaaatgacataatgcaagaa

SEQ ID NO: 1011726 - DNA, 33 bp, Homo sapien
ctatgttctgaagtaagtgacataatgcaagaa

SEQ ID NO: 1011727 - DNA, 33 bp, Homo sapien
acagaggggtgtctatcacttacctgtatttat

SEQ ID NO: 1011728 - DNA, 33 bp, Homo sapien
acagaggggtgtctattacttacctgtatttat

SEQ ID NO: 1011729 - DNA, 33 bp, Homo sapien
tatttgatcgttaccacgtttgtctctttttaa

SEQ ID NO: 1011730 - DNA, 33 bp, Homo sapien
tatttgatcgttaccatgtttgtctctttttaa

SEQ ID NO: 1011731 - DNA, 33 bp, Homo sapien
tcttaaaaaaatcgacaatcagctattatctta

SEQ ID NO: 1011732 - DNA, 33 bp, Homo sapien
tcttaaaaaaatcgacgatcagctattatctta

SEQ ID NO: 1011733 - DNA, 33 bp, Homo sapien
aacttcattcctagcaatctaagataacagacc

SEQ ID NO: 1011734 - DNA, 33 bp, Homo sapien
aacttcattcctagcagtctaagataacagacc

SEQ ID NO: 1011735 - DNA, 33 bp, Homo sapien
actgtactctcttgaaacttaccccactctctt

SEQ ID NO: 1011736 - DNA, 33 bp, Homo sapien
actgtactctcttgaatcttaccccactctctt

SEQ ID NO: 1011737 - DNA, 33 bp, Homo sapien
ctttgaaggcctagtaggtacagttattggtga

SEQ ID NO: 1011738 - DNA, 33 bp, Homo sapien
ctttgaaggcctagtatgtacagttattggtga

SEQ ID NO: 1011739 - DNA, 33 bp, Homo sapien
caccggaatgatcatcaaaaataaaaatatggt

SEQ ID NO: 1011740 - DNA, 33 bp, Homo sapien
caccggaatgatcatcgaaaataaaaatatggt

SEQ ID NO: 1011741 - DNA, 33 bp, Homo sapien
aaggcacactgtaggtaaaagagcaattcactc

SEQ ID NO: 1011742 - DNA, 33 bp, Homo sapien
aaggcacactgtaggtgaaagagcaattcactc

SEQ ID NO: 1011743 - DNA, 33 bp, Homo sapien
acctgttttgacaaagaagtactatcagatgtt

SEQ ID NO: 1011744 - DNA, 33 bp, Homo sapien
acctgttttgacaaaggagtactatcagatgtt

SEQ ID NO: 1011745 - DNA, 33 bp, Homo sapien
ggtgctgagagaaaacccttgattgcatccttg

SEQ ID NO: 1011746 - DNA, 33 bp, Homo sapien
ggtgctgagagaaaacgcttgattgcatccttg

SEQ ID NO: 1011747 - DNA, 33 bp, Homo sapien
acgcccaggaatgccaagaaattaacacagaac

SEQ ID NO: 1011748 - DNA, 33 bp, Homo sapien
acgcccaggaatgccaggaaattaacacagaac

SEQ ID NO: 1011749 - DNA, 33 bp, Homo sapien
ccccctctttatcccacgtaacgcttttcactt

SEQ ID NO: 1011750 - DNA, 33 bp, Homo sapien
ccccctctttatcccatgtaacgcttttcactt

SEQ ID NO: 1011751 - DNA, 33 bp, Homo sapien
agagtctattataacaactatcgtgaaaagctc

SEQ ID NO: 1011752 - DNA, 33 bp, Homo sapien
agagtctattataacatctatcgtgaaaagctc

SEQ ID NO: 1011753 - DNA, 33 bp, Homo sapien
tctgcaaaattgctgaagaaagtcctggaatca

SEQ ID NO: 1011754 - DNA, 33 bp, Homo sapien
tctgcaaaattgctgaggaaagtcctggaatca

SEQ ID NO: 1011755 - DNA, 33 bp, Homo sapien
tcaaagacatacagtgaattccgaaaacccaaa

SEQ ID NO: 1011756 - DNA, 33 bp, Homo sapien
tcaaagacatacagtggattccgaaaacccaaa

SEQ ID NO: 1011757 - DNA, 33 bp, Homo sapien
gtatagcacatcacaactgggattagccatagt

SEQ ID NO: 1011758 - DNA, 33 bp, Homo sapien
gtatagcacatcacaattgggattagccatagt

SEQ ID NO: 1011759 - DNA, 33 bp, Homo sapien
ctccaactctaagccactattcttcaatccctt

SEQ ID NO: 1011760 - DNA, 33 bp, Homo sapien
ctccaactctaagccattattcttcaatccctt

SEQ ID NO: 1011761 - DNA, 33 bp, Homo sapien
agacgagctaggagaacgggcttgaaaaaacag

SEQ ID NO: 1011762 - DNA, 33 bp, Homo sapien
agacgagctaggagaatgggcttgaaaaaacag

SEQ ID NO: 1011763 - DNA, 33 bp, Homo sapien
tataaagttatatatgaatttaccacatgacgt

SEQ ID NO: 1011764 - DNA, 33 bp, Homo sapien
tataaagttatatatgcatttaccacatgacgt

SEQ ID NO: 1011765 - DNA, 33 bp, Homo sapien
gcaagaccttccactcacaaaaatattaggagt

SEQ ID NO: 1011766 - DNA, 33 bp, Homo sapien
gcaagaccttccactcgcaaaaatattaggagt

SEQ ID NO: 1011767 - DNA, 33 bp, Homo sapien
tttggctggtagactacgtggatttaaatcacc

SEQ ID NO: 1011768 - DNA, 33 bp, Homo sapien
tttggctggtagactatgtggatttaaatcacc

SEQ ID NO: 1011769 - DNA, 33 bp, Homo sapien
caatcttatgtttcctcactaaaaactgtaatt

SEQ ID NO: 1011770 - DNA, 33 bp, Homo sapien
caatcttatgtttcctgactaaaaactgtaatt

SEQ ID NO: 1011771 - DNA, 33 bp, Homo sapien
ccatctgtaaaatggaaggataacaatgctcac

SEQ ID NO: 1011772 - DNA, 33 bp, Homo sapien
ccatctgtaaaatggagggataacaatgctcac

SEQ ID NO: 1011773 - DNA, 33 bp, Homo sapien
cctttgtcaaataagaagtcatagaaatgagaa

SEQ ID NO: 1011774 - DNA, 33 bp, Homo sapien
cctttgtcaaataagaggtcatagaaatgagaa

SEQ ID NO: 1011775 - DNA, 33 bp, Homo sapien
atgttactcaaaatgacccagctggtagcacac

SEQ ID NO: 1011776 - DNA, 33 bp, Homo sapien
atgttactcaaaatgatccagctggtagcacac

SEQ ID NO: 1011777 - DNA, 33 bp, Homo sapien
attattgagaaaattccctttaccacacttaga

SEQ ID NO: 1011778 - DNA, 33 bp, Homo sapien
attattgagaaaattcgctttaccacacttaga

SEQ ID NO: 1011779 - DNA, 33 bp, Homo sapien
ctctcaaagaagagtacaagcggtccagcttca

SEQ ID NO: 1011780 - DNA, 33 bp, Homo sapien
ctctcaaagaagagtataagcggtccagcttca

SEQ ID NO: 1011781 - DNA, 33 bp, Homo sapien
ttattttttcaaaatcagaggccagaaaaactc

SEQ ID NO: 1011782 - DNA, 33 bp, Homo sapien
ttattttttcaaaatcggaggccagaaaaactc

SEQ ID NO: 1011783 - DNA, 33 bp, Homo sapien
accagcagctagctacaataattggtacgtaaa

SEQ ID NO: 1011784 - DNA, 33 bp, Homo sapien
accagcagctagctacgataattggtacgtaaa

SEQ ID NO: 1011785 - DNA, 33 bp, Homo sapien
cccatttggccctttcaaaagtataagcacaga

SEQ ID NO: 1011786 - DNA, 33 bp, Homo sapien
cccatttggccctttccaaagtataagcacaga

SEQ ID NO: 1011787 - DNA, 33 bp, Homo sapien
aactggagccagaacaatgccatgtaacttatt

SEQ ID NO: 1011788 - DNA, 33 bp, Homo sapien
aactggagccagaacagtgccatgtaacttatt

SEQ ID NO: 1011789 - DNA, 33 bp, Homo sapien
aagaatatcacggtaacgaagctgattcctgag

SEQ ID NO: 1011790 - DNA, 33 bp, Homo sapien
aagaatatcacggtaatgaagctgattcctgag

SEQ ID NO: 1011791 - DNA, 33 bp, Homo sapien
aaatattcggtcttaacatagaaaacctatcaa

SEQ ID NO: 1011792 - DNA, 33 bp, Homo sapien
aaatattcggtcttaagatagaaaacctatcaa

SEQ ID NO: 1011793 - DNA, 33 bp, Homo sapien
tgtccattgaggaaatcacacctagtggaaaag

SEQ ID NO: 1011794 - DNA, 33 bp, Homo sapien
tgtccattgaggaaatgacacctagtggaaaag

SEQ ID NO: 1011795 - DNA, 33 bp, Homo sapien
tttctttatctctaccaattatgctgctatttc

SEQ ID NO: 1011796 - DNA, 33 bp, Homo sapien
tttctttatctctaccgattatgctgctatttc

SEQ ID NO: 1011797 - DNA, 33 bp, Homo sapien
caatacggctcttgacaaggtaaaatctagagg

SEQ ID NO: 1011798 - DNA, 33 bp, Homo sapien
caatacggctcttgacgaggtaaaatctagagg

SEQ ID NO: 1011799 - DNA, 33 bp, Homo sapien
gaaagaggacagatcacgcaagttcaaaaaaag

SEQ ID NO: 1011800 - DNA, 33 bp, Homo sapien
gaaagaggacagatcatgcaagttcaaaaaaag

SEQ ID NO: 1011801 - DNA, 33 bp, Homo sapien
tcaccccgattaagaaagagatttgtacttatt

SEQ ID NO: 1011802 - DNA, 33 bp, Homo sapien
tcaccccgattaagaaggagatttgtacttatt

SEQ ID NO: 1011803 - DNA, 33 bp, Homo sapien
tctaaatataaggaacactttgagatacaattg

SEQ ID NO: 1011804 - DNA, 33 bp, Homo sapien
tctaaatataaggaacgctttgagatacaattg

SEQ ID NO: 1011805 - DNA, 33 bp, Homo sapien
ttatgggtgtctattacgtgccactatacaagt

SEQ ID NO: 1011806 - DNA, 33 bp, Homo sapien
ttatgggtgtctattatgtgccactatacaagt

SEQ ID NO: 1011807 - DNA, 33 bp, Homo sapien
atatccaggaacaagacaagggcatccacactt

SEQ ID NO: 1011808 - DNA, 33 bp, Homo sapien
atatccaggaacaagataagggcatccacactt

SEQ ID NO: 1011809 - DNA, 33 bp, Homo sapien
tttttttattttttgacgctagtaattggggct

SEQ ID NO: 1011810 - DNA, 33 bp, Homo sapien
tttttttattttttgaggctagtaattggggct

SEQ ID NO: 1011811 - DNA, 33 bp, Homo sapien
aatccaagatttgccaacagtgggccacatgat

SEQ ID NO: 1011812 - DNA, 33 bp, Homo sapien
aatccaagatttgccagcagtgggccacatgat

SEQ ID NO: 1011813 - DNA, 33 bp, Homo sapien
aaacatatatatatccaaagtctcctggtttcc

SEQ ID NO: 1011814 - DNA, 33 bp, Homo sapien
aaacatatatatatccgaagtctcctggtttcc

SEQ ID NO: 1011815 - DNA, 33 bp, Homo sapien
tcaggtcatcccttaactgaagaggacagaggg

SEQ ID NO: 1011816 - DNA, 33 bp, Homo sapien
tcaggtcatcccttaattgaagaggacagaggg

SEQ ID NO: 1011817 - DNA, 33 bp, Homo sapien
ctaattgtctgcataactctaatataggaagga

SEQ ID NO: 1011818 - DNA, 33 bp, Homo sapien
ctaattgtctgcataattctaatataggaagga

SEQ ID NO: 1011819 - DNA, 33 bp, Homo sapien
tctcttcctgagctgaatattatcaatttttgt

SEQ ID NO: 1011820 - DNA, 33 bp, Homo sapien
tctcttcctgagctgagtattatcaatttttgt

SEQ ID NO: 1011821 - DNA, 33 bp, Homo sapien
tatgcagcactttgaaatcaaatggagattatt

SEQ ID NO: 1011822 - DNA, 33 bp, Homo sapien
tatgcagcactttgaagtcaaatggagattatt

SEQ ID NO: 1011823 - DNA, 33 bp, Homo sapien
ggaaagggagaatttcacttttcatacaaaatg

SEQ ID NO: 1011824 - DNA, 33 bp, Homo sapien
ggaaagggagaatttcgcttttcatacaaaatg

SEQ ID NO: 1011825 - DNA, 33 bp, Homo sapien
cagagagaatgaagaacgaatggaggcctgggg

SEQ ID NO: 1011826 - DNA, 33 bp, Homo sapien
cagagagaatgaagaatgaatggaggcctgggg

SEQ ID NO: 1011827 - DNA, 33 bp, Homo sapien
tacaaaaatgggatggaacggtatgatgcatat

SEQ ID NO: 1011828 - DNA, 33 bp, Homo sapien
tacaaaaatgggatgggacggtatgatgcatat

SEQ ID NO: 1011829 - DNA, 33 bp, Homo sapien
ctgcactggatcacaaagtctacaaaagttaaa

SEQ ID NO: 1011830 - DNA, 33 bp, Homo sapien
ctgcactggatcacaaggtctacaaaagttaaa

SEQ ID NO: 1011831 - DNA, 33 bp, Homo sapien
ggaggcacacatacaaacagtatagtttatgaa

SEQ ID NO: 1011832 - DNA, 33 bp, Homo sapien
ggaggcacacatacaatcagtatagtttatgaa

SEQ ID NO: 1011833 - DNA, 33 bp, Homo sapien
gtaatgtttgatactacagtgctggtctggaga

SEQ ID NO: 1011834 - DNA, 33 bp, Homo sapien
gtaatgtttgatactatagtgctggtctggaga

SEQ ID NO: 1011835 - DNA, 33 bp, Homo sapien
actataagtgtccatgcaatgtgtctatagtag

SEQ ID NO: 1011836 - DNA, 33 bp, Homo sapien
actataagtgtccatgtaatgtgtctatagtag

SEQ ID NO: 1011837 - DNA, 33 bp, Homo sapien
gcaggcaacttacataaagggatggcccagtgg

SEQ ID NO: 1011838 - DNA, 33 bp, Homo sapien
gcaggcaacttacatacagggatggcccagtgg

SEQ ID NO: 1011839 - DNA, 33 bp, Homo sapien
cttggttccttcttgacgtaaaacacaatgtcc

SEQ ID NO: 1011840 - DNA, 33 bp, Homo sapien
cttggttccttcttgatgtaaaacacaatgtcc

SEQ ID NO: 1011841 - DNA, 33 bp, Homo sapien
tcaagtgcttaaaagccacagggctaatgtcta

SEQ ID NO: 1011842 - DNA, 33 bp, Homo sapien
tcaagtgcttaaaagctacagggctaatgtcta

SEQ ID NO: 1011843 - DNA, 33 bp, Homo sapien
ggtgaaaagagcaaacaaactccctttggtctt

SEQ ID NO: 1011844 - DNA, 33 bp, Homo sapien
ggtgaaaagagcaaacgaactccctttggtctt

SEQ ID NO: 1011845 - DNA, 33 bp, Homo sapien
gattggaagtagggacagaaaagtgagaaagaa

SEQ ID NO: 1011846 - DNA, 33 bp, Homo sapien
gattggaagtagggacggaaaagtgagaaagaa

SEQ ID NO: 1011847 - DNA, 33 bp, Homo sapien
caaattgcttcattcaaaacccttgacttcatc

SEQ ID NO: 1011848 - DNA, 33 bp, Homo sapien
caaattgcttcattcagaacccttgacttcatc

SEQ ID NO: 1011849 - DNA, 33 bp, Homo sapien
tgtttttgccatcagactataggaaacttaaaa

SEQ ID NO: 1011850 - DNA, 33 bp, Homo sapien
tgtttttgccatcagagtataggaaacttaaaa

SEQ ID NO: 1011851 - DNA, 33 bp, Homo sapien
taacctctaactgacaatgaacttagactgtaa

SEQ ID NO: 1011852 - DNA, 33 bp, Homo sapien
taacctctaactgacagtgaacttagactgtaa

SEQ ID NO: 1011853 - DNA, 33 bp, Homo sapien
tggtgcttgctgagccaaaaaaatgaactgttt

SEQ ID NO: 1011854 - DNA, 33 bp, Homo sapien
tggtgcttgctgagcctaaaaaatgaactgttt

SEQ ID NO: 1011855 - DNA, 33 bp, Homo sapien
tcttctgactctattaccagatgctggctctct

SEQ ID NO: 1011856 - DNA, 33 bp, Homo sapien
tcttctgactctattagcagatgctggctctct

SEQ ID NO: 1011857 - DNA, 33 bp, Homo sapien
cagaaaggacagaagccatggcaggtccccatg

SEQ ID NO: 1011858 - DNA, 33 bp, Homo sapien
cagaaaggacagaagctatggcaggtccccatg

SEQ ID NO: 1011859 - DNA, 33 bp, Homo sapien
tagctgtaacactgtaactttaaaatttacatt

SEQ ID NO: 1011860 - DNA, 33 bp, Homo sapien
tagctgtaacactgtatctttaaaatttacatt

SEQ ID NO: 1011861 - DNA, 33 bp, Homo sapien
caggatataaacaacacagacaaggatagagaa

SEQ ID NO: 1011862 - DNA, 33 bp, Homo sapien
caggatataaacaacagagacaaggatagagaa

SEQ ID NO: 1011863 - DNA, 33 bp, Homo sapien
ccaggaaaacctggacgataattgatgaattgg

SEQ ID NO: 1011864 - DNA, 33 bp, Homo sapien
ccaggaaaacctggactataattgatgaattgg

SEQ ID NO: 1011865 - DNA, 33 bp, Homo sapien
atgtgcaattctgccaactctttgctttagctc

SEQ ID NO: 1011866 - DNA, 33 bp, Homo sapien
atgtgcaattctgccagctctttgctttagctc

SEQ ID NO: 1011867 - DNA, 33 bp, Homo sapien
attctgttcggtaatcaatgttttgttttatcc

SEQ ID NO: 1011868 - DNA, 33 bp, Homo sapien
attctgttcggtaatcgatgttttgttttatcc

SEQ ID NO: 1011869 - DNA, 33 bp, Homo sapien
aatgctgatttttgtaagttcattttgtatcct

SEQ ID NO: 1011870 - DNA, 33 bp, Homo sapien
aatgctgatttttgtatgttcattttgtatcct

SEQ ID NO: 1011871 - DNA, 33 bp, Homo sapien
attccataagggcaagcattatgcatctcatac

SEQ ID NO: 1011872 - DNA, 33 bp, Homo sapien
attccataagggcaaggattatgcatctcatac

SEQ ID NO: 1011873 - DNA, 33 bp, Homo sapien
cacacatgctttttacaaaatatgacaacctgt

SEQ ID NO: 1011874 - DNA, 33 bp, Homo sapien
cacacatgctttttacgaaatatgacaacctgt

SEQ ID NO: 1011875 - DNA, 33 bp, Homo sapien
ttatcttcacagagcacaggatcctttttctgg

SEQ ID NO: 1011876 - DNA, 33 bp, Homo sapien
ttatcttcacagagcagaggatcctttttctgg

SEQ ID NO: 1011877 - DNA, 33 bp, Homo sapien
aaagaacagttgtgacaattagatacatccagc

SEQ ID NO: 1011878 - DNA, 33 bp, Homo sapien
aaagaacagttgtgacgattagatacatccagc

SEQ ID NO: 1011879 - DNA, 33 bp, Homo sapien
tggtgtagcaccagacggcatttggaggaaagt

SEQ ID NO: 1011880 - DNA, 33 bp, Homo sapien
tggtgtagcaccagactgcatttggaggaaagt

SEQ ID NO: 1011881 - DNA, 33 bp, Homo sapien
agttatactatgatcccagagtgttcctaagag

SEQ ID NO: 1011882 - DNA, 33 bp, Homo sapien
agttatactatgatcctagagtgttcctaagag

SEQ ID NO: 1011883 - DNA, 33 bp, Homo sapien
gttgctgcctcagtaactggacacagagaaaac

SEQ ID NO: 1011884 - DNA, 33 bp, Homo sapien
gttgctgcctcagtaagtggacacagagaaaac

SEQ ID NO: 1011885 - DNA, 33 bp, Homo sapien
ttcagattttttcaaacgttggtaaatatggac

SEQ ID NO: 1011886 - DNA, 33 bp, Homo sapien
ttcagattttttcaaatgttggtaaatatggac

SEQ ID NO: 1011887 - DNA, 33 bp, Homo sapien
tatttttaatggcaataacttttgcagcaactt

SEQ ID NO: 1011888 - DNA, 33 bp, Homo sapien
tatttttaatggcaattacttttgcagcaactt

SEQ ID NO: 1011889 - DNA, 33 bp, Homo sapien
tcttgtaggaaactgagtagagtgcttcactgg

SEQ ID NO: 1011890 - DNA, 33 bp, Homo sapien
tcttgtaggaaactgattagagtgcttcactgg

SEQ ID NO: 1011891 - DNA, 33 bp, Homo sapien
tacaactgatgagggcactgtagagcacattgg

SEQ ID NO: 1011892 - DNA, 33 bp, Homo sapien
tacaactgatgagggcgctgtagagcacattgg

SEQ ID NO: 1011893 - DNA, 33 bp, Homo sapien
gtagctcttagggaaaaaaaagccccagataag

SEQ ID NO: 1011894 - DNA, 33 bp, Homo sapien
gtagctcttagggaaacaaaagccccagataag

SEQ ID NO: 1011895 - DNA, 33 bp, Homo sapien
aggggtgagtaaaataagcatacagtgagccat

SEQ ID NO: 1011896 - DNA, 33 bp, Homo sapien
aggggtgagtaaaataggcatacagtgagccat

SEQ ID NO: 1011897 - DNA, 33 bp, Homo sapien
acaaactcaggggaaagataggtacagtattca

SEQ ID NO: 1011898 - DNA, 33 bp, Homo sapien
acaaactcaggggaaatataggtacagtattca

SEQ ID NO: 1011899 - DNA, 33 bp, Homo sapien
tgatcgtgattactaaaaatcaatgcaaagtct

SEQ ID NO: 1011900 - DNA, 33 bp, Homo sapien
tgatcgtgattactaacaatcaatgcaaagtct

SEQ ID NO: 1011901 - DNA, 33 bp, Homo sapien
gtagaagaacacattacatacagtaaccatttt

SEQ ID NO: 1011902 - DNA, 33 bp, Homo sapien
gtagaagaacacattatatacagtaaccatttt

SEQ ID NO: 1011903 - DNA, 33 bp, Homo sapien
ttgatgctattgcaaacgtggtttttttttaag

SEQ ID NO: 1011904 - DNA, 33 bp, Homo sapien
ttgatgctattgcaaatgtggtttttttttaag

SEQ ID NO: 1011905 - DNA, 33 bp, Homo sapien
tctccagtgacttaacaggacagggcacataat

SEQ ID NO: 1011906 - DNA, 33 bp, Homo sapien
tctccagtgacttaacgggacagggcacataat

SEQ ID NO: 1011907 - DNA, 33 bp, Homo sapien
aaacagatagaaatctaaagccttgtggacatt

SEQ ID NO: 1011908 - DNA, 33 bp, Homo sapien
aaacagatagaaatctgaagccttgtggacatt

SEQ ID NO: 1011909 - DNA, 33 bp, Homo sapien
gtgacaactgcagaaaaaagaacctattgaaat

SEQ ID NO: 1011910 - DNA, 33 bp, Homo sapien
gtgacaactgcagaaataagaacctattgaaat

SEQ ID NO: 1011911 - DNA, 33 bp, Homo sapien
ggaaacagaaggcgacaatcttaccaggagtag

SEQ ID NO: 1011912 - DNA, 33 bp, Homo sapien
ggaaacagaaggcgactatcttaccaggagtag

SEQ ID NO: 1011913 - DNA, 33 bp, Homo sapien; identical to SEQ ID NO: 1011911

SEQ ID NO: 1011914 - DNA, 33 bp, Homo sapien; identical to SEQ ID NO: 1011912

SEQ ID NO: 1011915 - DNA, 33 bp, Homo sapien
gataatgtattagtcaatcaggatcatttccat

SEQ ID NO: 1011916 - DNA, 33 bp, Homo sapien
gataatgtattagtcagtcaggatcatttccat

SEQ ID NO: 1011917 - DNA, 33 bp, Homo sapien; identical to SEQ ID NO: 1011915

SEQ ID NO: 1011918 - DNA, 33 bp, Homo sapien; identical to SEQ ID NO: 1011916

SEQ ID NO: 1011919 - DNA, 33 bp, Homo sapien
atccaacagggccacagtggcaaagcagcaggg

SEQ ID NO: 1011920 - DNA, 33 bp, Homo sapien
atccaacagggccacattggcaaagcagcaggg

SEQ ID NO: 1011921 - DNA, 33 bp, Homo sapien; identical to SEQ ID NO: 1011919

SEQ ID NO: 1011922 - DNA, 33 bp, Homo sapien; identical to SEQ ID NO: 1011920

SEQ ID NO: 1011923 - DNA, 33 bp, Homo sapien
ttcaactgaaacaaccaggtgcacacattgaga

SEQ ID NO: 1011924 - DNA, 33 bp, Homo sapien
ttcaactgaaacaaccgggtgcacacattgaga

SEQ ID NO: 1011925 - DNA, 33 bp, Homo sapien
tgcatgtcagactaaacgccctggtagagtggg

SEQ ID NO: 1011926 - DNA, 33 bp, Homo sapien
tgcatgtcagactaaatgccctggtagagtggg

SEQ ID NO: 1011927 - DNA, 33 bp, Homo sapien
tctttgtttacaagctaacatcatgccacagtc

SEQ ID NO: 1011928 - DNA, 33 bp, Homo sapien
tctttgtttacaagcttacatcatgccacagtc

SEQ ID NO: 1011929 - DNA, 33 bp, Homo sapien
tcttttctctgtgcaaatcctctggagaaatat

SEQ ID NO: 1011930 - DNA, 33 bp, Homo sapien
tcttttctctgtgcaattcctctggagaaatat

SEQ ID NO: 1011931 - DNA, 33 bp, Homo sapien
aaactgtttcttggcacagaacaaaatatttct

SEQ ID NO: 1011932 - DNA, 33 bp, Homo sapien
aaactgtttcttggcagagaacaaaatatttct

SEQ ID NO: 1011933 - DNA, 33 bp, Homo sapien
ataatacactggattaaaacaaattgtgattaa

SEQ ID NO: 1011934 - DNA, 33 bp, Homo sapien
ataatacactggattacaacaaattgtgattaa

SEQ ID NO: 1011935 - DNA, 33 bp, Homo sapien
ttcgaaactgcggtccactagaaaacagtggtg

SEQ ID NO: 1011936 - DNA, 33 bp, Homo sapien
ttcgaaactgcggtccgctagaaaacagtggtg

SEQ ID NO: 1011937 - DNA, 33 bp, Homo sapien; identical to SEQ ID NO: 1011935

SEQ ID NO: 1011938 - DNA, 33 bp, Homo sapien; identical to SEQ ID NO: 1011936

SEQ ID NO: 1011939 - DNA, 33 bp, Homo sapien
aagagagaagagttgacagccaaatagccagta

SEQ ID NO: 1011940 - DNA, 33 bp, Homo sapien
aagagagaagagttgatagccaaatagccagta

SEQ ID NO: 1011941 - DNA, 33 bp, Homo sapien; identical to SEQ ID NO: 1011939

SEQ ID NO: 1011942 - DNA, 33 bp, Homo sapien; identical to SEQ ID NO: 1011940

SEQ ID NO: 1011943 - DNA, 33 bp, Homo sapien
atagccagtatgaaaaagaacctaacggaccta

SEQ ID NO: 1011944 - DNA, 33 bp, Homo sapien
atagccagtatgaaaaggaacctaacggaccta

SEQ ID NO: 1011945 - DNA, 33 bp, Homo sapien
gtctctttaaaggatgcaagtgattcctagatt

SEQ ID NO: 1011946 - DNA, 33 bp, Homo sapien
gtctctttaaaggatggaagtgattcctagatt

SEQ ID NO: 1011947 - DNA, 33 bp, Homo sapien
aatggagggaagtaataagttggacccgccaaa

SEQ ID NO: 1011948 - DNA, 33 bp, Homo sapien
aatggagggaagtaatgagttggacccgccaaa

SEQ ID NO: 1011949 - DNA, 33 bp, Homo sapien
cctccattgcaaaggcagatctttcacaatttt

SEQ ID NO: 1011950 - DNA, 33 bp, Homo sapien
cctccattgcaaaggcggatctttcacaatttt

SEQ ID NO: 1011951 - DNA, 33 bp, Homo sapien
caaaaattgaactgaacaatctcttgagtggag

SEQ ID NO: 1011952 - DNA, 33 bp, Homo sapien
caaaaattgaactgaataatctcttgagtggag

SEQ ID NO: 1011953 - DNA, 33 bp, Homo sapien
ttagcaggcctattaaactttaaattgtacaag

SEQ ID NO: 1011954 - DNA, 33 bp, Homo sapien
ttagcaggcctattaacctttaaattgtacaag

SEQ ID NO: 1011955 - DNA, 33 bp, Homo sapien
tttattgtcagtcacacattgttaacacttaca

SEQ ID NO: 1011956 - DNA, 33 bp, Homo sapien
tttattgtcagtcacagattgttaacacttaca

SEQ ID NO: 1011957 - DNA, 33 bp, Homo sapien
aggagagaagattaaagtggttgctaagagcac

SEQ ID NO: 1011958 - DNA, 33 bp, Homo sapien
aggagagaagattaaattggttgctaagagcac

SEQ ID NO: 1011959 - DNA, 33 bp, Homo sapien
tgtcctggaacagtaacctacagccatatattt

SEQ ID NO: 1011960 - DNA, 33 bp, Homo sapien
tgtcctggaacagtaagctacagccatatattt

SEQ ID NO: 1011961 - DNA, 33 bp, Homo sapien
cataaaaaaggcaaaaatttgagagtacaatat

SEQ ID NO: 1011962 - DNA, 33 bp, Homo sapien
cataaaaaaggcaaaattttgagagtacaatat

SEQ ID NO: 1011963 - DNA, 33 bp, Homo sapien
ctctgcataataggtaagtgatgatgtaccaag

SEQ ID NO: 1011964 - DNA, 33 bp, Homo sapien
ctctgcataataggtaggtgatgatgtaccaag

SEQ ID NO: 1011965 - DNA, 33 bp, Homo sapien
gatatcagtgaccaaacaagactgataggttct

SEQ ID NO: 1011966 - DNA, 33 bp, Homo sapien
gatatcagtgaccaaagaagactgataggttct

SEQ ID NO: 1011967 - DNA, 33 bp, Homo sapien
ctcaaagtaagtcagcacaatcaacacagcagc

SEQ ID NO: 1011968 - DNA, 33 bp, Homo sapien
ctcaaagtaagtcagcgcaatcaacacagcagc

SEQ ID NO: 1011969 - DNA, 33 bp, Homo sapien
tgcagtaacatgaatgaacatttatccaaagga

SEQ ID NO: 1011970 - DNA, 33 bp, Homo sapien
tgcagtaacatgaatggacatttatccaaagga

SEQ ID NO: 1011971 - DNA, 33 bp, Homo sapien
ttgtgtaaaatctggacggatgaactgttctaa

SEQ ID NO: 1011972 - DNA, 33 bp, Homo sapien
ttgtgtaaaatctggagggatgaactgttctaa

SEQ ID NO: 1011973 - DNA, 33 bp, Homo sapien
agatcactggcttgtgcaaaagggcctgttaaa

SEQ ID NO: 1011974 - DNA, 33 bp, Homo sapien
agatcactggcttgtgtaaaagggcctgttaaa

SEQ ID NO: 1011975 - DNA, 33 bp, Homo sapien
ccttctaataccatcaactcagtgttaggattt

SEQ ID NO: 1011976 - DNA, 33 bp, Homo sapien
ccttctaataccatcacctcagtgttaggattt

SEQ ID NO: 1011977 - DNA, 33 bp, Homo sapien
gtgaaggctggatttcccaaatctgaaggccag

SEQ ID NO: 1011978 - DNA, 33 bp, Homo sapien
gtgaaggctggatttctcaaatctgaaggccag

SEQ ID NO: 1011979 - DNA, 33 bp, Homo sapien
tggaaaacacctgagtaatacagtgaccaaagc

SEQ ID NO: 1011980 - DNA, 33 bp, Homo sapien
tggaaaacacctgagtcatacagtgaccaaagc

SEQ ID NO: 1011981 - DNA, 33 bp, Homo sapien
agactctactggaaaagcactgatcagtctaga

SEQ ID NO: 1011982 - DNA, 33 bp, Homo sapien
agactctactggaaaatcactgatcagtctaga

SEQ ID NO: 1011983 - DNA, 33 bp, Homo sapien
tgatagtagacacccacagtaggatcatgcagt

SEQ ID NO: 1011984 - DNA, 33 bp, Homo sapien
tgatagtagacacccagagtaggatcatgcagt

SEQ ID NO: 1011985 - DNA, 33 bp, Homo sapien
caagagggaatgatgacaaaaatgtatttagaa

SEQ ID NO: 1011986 - DNA, 33 bp, Homo sapien
caagagggaatgatgataaaaatgtatttagaa

SEQ ID NO: 1011987 - DNA, 33 bp, Homo sapien
caacaattaaacaaaaaggatacagcagttatt

SEQ ID NO: 1011988 - DNA, 33 bp, Homo sapien
caacaattaaacaaaagggatacagcagttatt

SEQ ID NO: 1011989 - DNA, 33 bp, Homo sapien
ggagatggagcaatacaaatgggagcactgaat

SEQ ID NO: 1011990 - DNA, 33 bp, Homo sapien
ggagatggagcaataccaatgggagcactgaat

SEQ ID NO: 1011991 - DNA, 33 bp, Homo sapien
tgaacactttcaaagaacaatagcctgaaaatc

SEQ ID NO: 1011992 - DNA, 33 bp, Homo sapien
tgaacactttcaaagaccaatagcctgaaaatc

SEQ ID NO: 1011993 - DNA, 33 bp, Homo sapien
ggatacacagttctggaatttagagtgcatggc

SEQ ID NO: 1011994 - DNA, 33 bp, Homo sapien
ggatacacagttctgggatttagagtgcatggc

SEQ ID NO: 1011995 - DNA, 33 bp, Homo sapien
cagctaaaaaggagaagatgtgagctgagaaca

SEQ ID NO: 1011996 - DNA, 33 bp, Homo sapien
cagctaaaaaggagaatatgtgagctgagaaca

SEQ ID NO: 1011997 - DNA, 33 bp, Homo sapien
ttgctaggtagtttcagccatttcgtatttatt

SEQ ID NO: 1011998 - DNA, 33 bp, Homo sapien
ttgctaggtagtttcatccatttcgtatttatt

SEQ ID NO: 1011999 - DNA, 33 bp, Homo sapien
ctctgtcctccttccacgttctcaggctgctgc

SEQ ID NO: 1012000 - DNA, 33 bp, Homo sapien
ctctgtcctccttccatgttctcaggctgctgc

SEQ ID NO: 1012001 - DNA, 33 bp, Homo sapien
gggaagcacactaaagaattggctaggaaatct

SEQ ID NO: 1012002 - DNA, 33 bp, Homo sapien
gggaagcacactaaagcattggctaggaaatct

SEQ ID NO: 1012003 - DNA, 33 bp, Homo sapien
aatggacctcactatcacatggaaaatggatgg

SEQ ID NO: 1012004 - DNA, 33 bp, Homo sapien
aatggacctcactatcgcatggaaaatggatgg

SEQ ID NO: 1012005 - DNA, 33 bp, Homo sapien
ggtgatgaaccaaacacaagacactgtgcacca

SEQ ID NO: 1012006 - DNA, 33 bp, Homo sapien
ggtgatgaaccaaacataagacactgtgcacca

SEQ ID NO: 1012007 - DNA, 33 bp, Homo sapien
ttgggtatgtagcttaagtttgatcctcagtgc

SEQ ID NO: 1012008 - DNA, 33 bp, Homo sapien
ttgggtatgtagcttatgtttgatcctcagtgc

SEQ ID NO: 1012009 - DNA, 33 bp, Homo sapien
cccattctgtgaaaagactatatacgcaaagcg

SEQ ID NO: 1012010 - DNA, 33 bp, Homo sapien
cccattctgtgaaaaggctatatacgcaaagcg

SEQ ID NO: 1012011 - DNA, 33 bp, Homo sapien
tatgcatggcttttaacaggaaacaaatagttt

SEQ ID NO: 1012012 - DNA, 33 bp, Homo sapien
tatgcatggcttttaataggaaacaaatagttt

SEQ ID NO: 1012013 - DNA, 33 bp, Homo sapien
atacatttactggggcaaacaacatgttttaca

SEQ ID NO: 1012014 - DNA, 33 bp, Homo sapien
atacatttactggggcgaacaacatgttttaca

SEQ ID NO: 1012015 - DNA, 33 bp, Homo sapien
catcccatcttcatcaacagaactataagggca

SEQ ID NO: 1012016 - DNA, 33 bp, Homo sapien
catcccatcttcatcatcagaactataagggca

SEQ ID NO: 1012017 - DNA, 33 bp, Homo sapien
gtggctctcacttccacgtgacctgcagtaagt

SEQ ID NO: 1012018 - DNA, 33 bp, Homo sapien
gtggctctcacttccatgtgacctgcagtaagt

SEQ ID NO: 1012019 - DNA, 33 bp, Homo sapien
cccaggagcagactaaaattgaagcctgtcaac

SEQ ID NO: 1012020 - DNA, 33 bp, Homo sapien
cccaggagcagactaatattgaagcctgtcaac

SEQ ID NO: 1012021 - DNA, 33 bp, Homo sapien; identical to SEQ ID NO: 1012019

SEQ ID NO: 1012022 - DNA, 33 bp, Homo sapien; identical to SEQ ID NO: 1012020

SEQ ID NO: 1012023 - DNA, 33 bp, Homo sapien
gcagaaataggaccaccaatctagaagttctag

SEQ ID NO: 1012024 - DNA, 33 bp, Homo sapien
gcagaaataggaccacgaatctagaagttctag

SEQ ID NO: 1012025 - DNA, 33 bp, Homo sapien
gatgaggctatagaaaaacaaggataggcatca

SEQ ID NO: 1012026 - DNA, 33 bp, Homo sapien
gatgaggctatagaaacacaaggataggcatca

SEQ ID NO: 1012027 - DNA, 33 bp, Homo sapien
cccttcaagttagaataagcgtgccgtacatgg

SEQ ID NO: 1012028 - DNA, 33 bp, Homo sapien
cccttcaagttagaatgagcgtgccgtacatgg

SEQ ID NO: 1012029 - DNA, 33 bp, Homo sapien
tatagaatagtatggaatagcagtgtcctcaat

SEQ ID NO: 1012030 - DNA, 33 bp, Homo sapien
tatagaatagtatggagtagcagtgtcctcaat

SEQ ID NO: 1012031 - DNA, 33 bp, Homo sapien
atatcttaccaacagcaaagtttatcccaggct

SEQ ID NO: 1012032 - DNA, 33 bp, Homo sapien
atatcttaccaacagcgaagtttatcccaggct

SEQ ID NO: 1012033 - DNA, 33 bp, Homo sapien
gtggcctagttatcaacagaaaaatttatccta

SEQ ID NO: 1012034 - DNA, 33 bp, Homo sapien
gtggcctagttatcaagagaaaaatttatccta

SEQ ID NO: 1012035 - DNA, 33 bp, Homo sapien
caggcattctaggtggaaatcatcacagaaaag

SEQ ID NO: 1012036 - DNA, 33 bp, Homo sapien
caggcattctaggtggcaatcatcacagaaaag

SEQ ID NO: 1012037 - DNA, 33 bp, Homo sapien
gcaggacttcaaaggggcagagaataaataaat

SEQ ID NO: 1012038 - DNA, 33 bp, Homo sapien
gcaggacttcaaagggtcagagaataaataaat

SEQ ID NO: 1012039 - DNA, 33 bp, Homo sapien
tttgtaaagaaaattgaataacagcaactatct

SEQ ID NO: 1012040 - DNA, 33 bp, Homo sapien
tttgtaaagaaaattgcataacagcaactatct

SEQ ID NO: 1012041 - DNA, 33 bp, Homo sapien
actgatataagtataacgattaaaaccacatgc

SEQ ID NO: 1012042 - DNA, 33 bp, Homo sapien
actgatataagtataatgattaaaaccacatgc

SEQ ID NO: 1012043 - DNA, 33 bp, Homo sapien
gataaatgagtaaacactgattaactgttttgc

SEQ ID NO: 1012044 - DNA, 33 bp, Homo sapien
gataaatgagtaaacattgattaactgttttgc

SEQ ID NO: 1012045 - DNA, 33 bp, Homo sapien
ttcatcattccaaaagaaagcattctgagctca

SEQ ID NO: 1012046 - DNA, 33 bp, Homo sapien
ttcatcattccaaaaggaagcattctgagctca

SEQ ID NO: 1012047 - DNA, 33 bp, Homo sapien
tgtgtgcattatgtctgactttggtcttagttg

SEQ ID NO: 1012048 - DNA, 33 bp, Homo sapien
tgtgtgcattatgtcttactttggtcttagttg

SEQ ID NO: 1012049 - DNA, 33 bp, Homo sapien
gggaaattcctctgaaatgtgtgcattatgtct

SEQ ID NO: 1012050 - DNA, 33 bp, Homo sapien
gggaaattcctctgaagtgtgtgcattatgtct

SEQ ID NO: 1012051 - DNA, 33 bp, Homo sapien
aaaccatgctgttataaaggaatataagtcatt

SEQ ID NO: 1012052 - DNA, 33 bp, Homo sapien
aaaccatgctgttatacaggaatataagtcatt

SEQ ID NO: 1012053 - DNA, 33 bp, Homo sapien
tctaaatatggaaaaacagttatcagccactaa

SEQ ID NO: 1012054 - DNA, 33 bp, Homo sapien
tctaaatatggaaaaagagttatcagccactaa

SEQ ID NO: 1012055 - DNA, 33 bp, Homo sapien
cactgaggataggcaacgtgaggacatagtaag

SEQ ID NO: 1012056 - DNA, 33 bp, Homo sapien
cactgaggataggcaatgtgaggacatagtaag

SEQ ID NO: 1012057 - DNA, 33 bp, Homo sapien
ctggtgggccagttccagatatttatgggatgt

SEQ ID NO: 1012058 - DNA, 33 bp, Homo sapien
ctggtgggccagttccggatatttatgggatgt

SEQ ID NO: 1012059 - DNA, 33 bp, Homo sapien
gttgatatatccaatacactgaggtagaaggca

SEQ ID NO: 1012060 - DNA, 33 bp, Homo sapien
gttgatatatccaatatactgaggtagaaggca

SEQ ID NO: 1012061 - DNA, 33 bp, Homo sapien
caatcattggtaaaagccacctttccagtttac

SEQ ID NO: 1012062 - DNA, 33 bp, Homo sapien
caatcattggtaaaagtcacctttccagtttac

SEQ ID NO: 1012063 - DNA, 33 bp, Homo sapien
gtttttatttaaacaagtcctacagtgctgagg

SEQ ID NO: 1012064 - DNA, 33 bp, Homo sapien
gtttttatttaaacaattcctacagtgctgagg

SEQ ID NO: 1012065 - DNA, 33 bp, Homo sapien
tatcagctccattcaagacttaatcaatcagaa

SEQ ID NO: 1012066 - DNA, 33 bp, Homo sapien
tatcagctccattcaatacttaatcaatcagaa

SEQ ID NO: 1012067 - DNA, 33 bp, Homo sapien
atctacttcatgcagacgtaaaatgatatgatg

SEQ ID NO: 1012068 - DNA, 33 bp, Homo sapien
atctacttcatgcagatgtaaaatgatatgatg

SEQ ID NO: 1012069 - DNA, 33 bp, Homo sapien
tggtgggaccaaagagaagccctgttgaggttc

SEQ ID NO: 1012070 - DNA, 33 bp, Homo sapien
tggtgggaccaaagaggagccctgttgaggttc

SEQ ID NO: 1012071 - DNA, 33 bp, Homo sapien
tctttggcagcaattacctttcccctactcaca

SEQ ID NO: 1012072 - DNA, 33 bp, Homo sapien
tctttggcagcaattatctttcccctactcaca

SEQ ID NO: 1012073 - DNA, 33 bp, Homo sapien
caccatatactttttaacaccatgctgttttag

SEQ ID NO: 1012074 - DNA, 33 bp, Homo sapien
caccatatactttttaccaccatgctgttttag

SEQ ID NO: 1012075 - DNA, 33 bp, Homo sapien
gttgagggttcctgaaaattcagactaaagtgt

SEQ ID NO: 1012076 - DNA, 33 bp, Homo sapien
gttgagggttcctgaacattcagactaaagtgt

SEQ ID NO: 1012077 - DNA, 33 bp, Homo sapien
acattacatttaatagccatctttccataggct

SEQ ID NO: 1012078 - DNA, 33 bp, Homo sapien
acattacatttaatagtcatctttccataggct

SEQ ID NO: 1012079 - DNA, 33 bp, Homo sapien
ctctgaggctaatcaacaaagaaacagccaact

SEQ ID NO: 1012080 - DNA, 33 bp, Homo sapien
ctctgaggctaatcaagaaagaaacagccaact

SEQ ID NO: 1012081 - DNA, 33 bp, Homo sapien
tatcaaaaattaatgaagtgttttacattaatt

SEQ ID NO: 1012082 - DNA, 33 bp, Homo sapien
tatcaaaaattaatgacgtgttttacattaatt

SEQ ID NO: 1012083 - DNA, 33 bp, Homo sapien
cagttattcagtctcaacaactcaacataggga

SEQ ID NO: 1012084 - DNA, 33 bp, Homo sapien
cagttattcagtctcatcaactcaacataggga

SEQ ID NO: 1012085 - DNA, 33 bp, Homo sapien
gtaagaatcatctgaggctaagaacaaaacaaa

SEQ ID NO: 1012086 - DNA, 33 bp, Homo sapien
gtaagaatcatctgagtctaagaacaaaacaaa

SEQ ID NO: 1012087 - DNA, 33 bp, Homo sapien
cttatgagagagatcaccttgcaattttctttt

SEQ ID NO: 1012088 - DNA, 33 bp, Homo sapien
cttatgagagagatcagcttgcaattttctttt

SEQ ID NO: 1012089 - DNA, 33 bp, Homo sapien
tttgtgttttaggaaaattagccaatggcctgc

SEQ ID NO: 1012090 - DNA, 33 bp, Homo sapien
tttgtgttttaggaaatttagccaatggcctgc

SEQ ID NO: 1012091 - DNA, 33 bp, Homo sapien
gtttgaatgatgtcaactagaacttgctgtagc

SEQ ID NO: 1012092 - DNA, 33 bp, Homo sapien
gtttgaatgatgtcaagtagaacttgctgtagc

SEQ ID NO: 1012093 - DNA, 33 bp, Homo sapien
caatgctttccatgtaacttgtcctccttttca

SEQ ID NO: 1012094 - DNA, 33 bp, Homo sapien
caatgctttccatgtagcttgtcctccttttca

SEQ ID NO: 1012095 - DNA, 33 bp, Homo sapien
actctggagccatagacactgggagctgaacct

SEQ ID NO: 1012096 - DNA, 33 bp, Homo sapien
actctggagccatagagactgggagctgaacct

SEQ ID NO: 1012097 - DNA, 33 bp, Homo sapien
ccaagatatcttccaccctactcgttgttctat

SEQ ID NO: 1012098 - DNA, 33 bp, Homo sapien
ccaagatatcttccactctactcgttgttctat

SEQ ID NO: 1012099 - DNA, 33 bp, Homo sapien
ctggatatcacaaaaagttcacaccaactttat

SEQ ID NO: 1012100 - DNA, 33 bp, Homo sapien
ctggatatcacaaaaatttcacaccaactttat

SEQ ID NO: 1012101 - DNA, 33 bp, Homo sapien
gagttgtaaccagagacgtctccttatcataat

SEQ ID NO: 1012102 - DNA, 33 bp, Homo sapien
gagttgtaaccagagatgtctccttatcataat

SEQ ID NO: 1012103 - DNA, 33 bp, Homo sapien
tttctttcattgcaacaaccaaactgaacacca

SEQ ID NO: 1012104 - DNA, 33 bp, Homo sapien
tttctttcattgcaacgaccaaactgaacacca

SEQ ID NO: 1012105 - DNA, 33 bp, Homo sapien
atcaagttgatctttacgtaaaatattgactag

SEQ ID NO: 1012106 - DNA, 33 bp, Homo sapien
atcaagttgatctttatgtaaaatattgactag

SEQ ID NO: 1012107 - DNA, 33 bp, Homo sapien
tcttgaacgcttcaaaggtctcttaacactttg

SEQ ID NO: 1012108 - DNA, 33 bp, Homo sapien
tcttgaacgcttcaaatgtctcttaacactttg

SEQ ID NO: 1012109 - DNA, 33 bp, Homo sapien
ctcatatcaagaacaacgtgactttgatgctat

SEQ ID NO: 1012110 - DNA, 33 bp, Homo sapien
ctcatatcaagaacaatgtgactttgatgctat

SEQ ID NO: 1012111 - DNA, 33 bp, Homo sapien
aaataatttgtatttcactgggatagcagaatt

SEQ ID NO: 1012112 - DNA, 33 bp, Homo sapien
aaataatttgtatttcgctgggatagcagaatt

SEQ ID NO: 1012113 - DNA, 33 bp, Homo sapien
ggtatggggagctgaaaaagatttctttataac

SEQ ID NO: 1012114 - DNA, 33 bp, Homo sapien
ggtatggggagctgaagaagatttctttataac

SEQ ID NO: 1012115 - DNA, 33 bp, Homo sapien
acagtcactgtattcactccttggaaaccagta

SEQ ID NO: 1012116 - DNA, 33 bp, Homo sapien
acagtcactgtattcattccttggaaaccagta

SEQ ID NO: 1012117 - DNA, 33 bp, Homo sapien
agaacatgaaaatctccataacctcttgcaaaa

SEQ ID NO: 1012118 - DNA, 33 bp, Homo sapien
agaacatgaaaatctctataacctcttgcaaaa

SEQ ID NO: 1012119 - DNA, 33 bp, Homo sapien
attcttgtcattttaactgaggtaaacgctaaa

SEQ ID NO: 1012120 - DNA, 33 bp, Homo sapien
attcttgtcattttaattgaggtaaacgctaaa

SEQ ID NO: 1012121 - DNA, 33 bp, Homo sapien
gagtattcgtataagcaatttcctaagccttat

SEQ ID NO: 1012122 - DNA, 33 bp, Homo sapien
gagtattcgtataagccatttcctaagccttat

SEQ ID NO: 1012123 - DNA, 33 bp, Homo sapien
aggacacaagaaggaacaagaaggaaagctgga

SEQ ID NO: 1012124 - DNA, 33 bp, Homo sapien
aggacacaagaaggaagaagaaggaaagctgga

SEQ ID NO: 1012125 - DNA, 33 bp, Homo sapien
gatcaataaaacgaaacttgttcagtcaaataa

SEQ ID NO: 1012126 - DNA, 33 bp, Homo sapien
gatcaataaaacgaaagttgttcagtcaaataa

SEQ ID NO: 1012127 - DNA, 33 bp, Homo sapien
agaaagcaacactaataacagctgccatttatt

SEQ ID NO: 1012128 - DNA, 33 bp, Homo sapien
agaaagcaacactaatgacagctgccatttatt

SEQ ID NO: 1012129 - DNA, 33 bp, Homo sapien
aggagctttgctctaaaatggtcaggtcattct

SEQ ID NO: 1012130 - DNA, 33 bp, Homo sapien
aggagctttgctctaacatggtcaggtcattct

SEQ ID NO: 1012131 - DNA, 33 bp, Homo sapien
tgtgaacgttcaatggcaaagtatctgaggatt

SEQ ID NO: 1012132 - DNA, 33 bp, Homo sapien
tgtgaacgttcaatggtaaagtatctgaggatt

SEQ ID NO: 1012133 - DNA, 33 bp, Homo sapien
tttgataagaacgtaacggagttgcccagagca

SEQ ID NO: 1012134 - DNA, 33 bp, Homo sapien
tttgataagaacgtaagggagttgcccagagca

SEQ ID NO: 1012135 - DNA, 33 bp, Homo sapien
tcatttcagtgaactcaacagtgttactgtagt

SEQ ID NO: 1012136 - DNA, 33 bp, Homo sapien
tcatttcagtgaactcgacagtgttactgtagt

SEQ ID NO: 1012137 - DNA, 33 bp, Homo sapien
tgttgctgcctggaatcacagaagccatcaggt

SEQ ID NO: 1012138 - DNA, 33 bp, Homo sapien
tgttgctgcctggaattacagaagccatcaggt

SEQ ID NO: 1012139 - DNA, 33 bp, Homo sapien
ccaaggcctagagtcagtccatcaatgctttgg

SEQ ID NO: 1012140 - DNA, 33 bp, Homo sapien
ccaaggcctagagtcattccatcaatgctttgg

SEQ ID NO: 1012141 - DNA, 33 bp, Homo sapien
gtaggtctgcatcccaactatactgtctccttg

SEQ ID NO: 1012142 - DNA, 33 bp, Homo sapien
gtaggtctgcatcccatctatactgtctccttg

SEQ ID NO: 1012143 - DNA, 33 bp, Homo sapien
gtatgatccaggcaaagatggaattatgtgagt

SEQ ID NO: 1012144 - DNA, 33 bp, Homo sapien
gtatgatccaggcaaatatggaattatgtgagt

SEQ ID NO: 1012145 - DNA, 33 bp, Homo sapien
caataaattaaacaccaatcaaaatcagagttt

SEQ ID NO: 1012146 - DNA, 33 bp, Homo sapien
caataaattaaacaccgatcaaaatcagagttt

SEQ ID NO: 1012147 - DNA, 33 bp, Homo sapien
gggcacctgaacacccacgggctgctcctggtg

SEQ ID NO: 1012148 - DNA, 33 bp, Homo sapien
gggcacctgaacacccgcgggctgctcctggtg

SEQ ID NO: 1012149 - DNA, 33 bp, Homo sapien
ttcagcctgcaaagtacagattactccaggcag

SEQ ID NO: 1012150 - DNA, 33 bp, Homo sapien
ttcagcctgcaaagtatagattactccaggcag

SEQ ID NO: 1012151 - DNA, 33 bp, Homo sapien
tctcggactggcggggacattgatgtgccggtg

SEQ ID NO: 1012152 - DNA, 33 bp, Homo sapien
tctcggactggcgggggcattgatgtgccggtg

SEQ ID NO: 1012153 - DNA, 33 bp, Homo sapien
gccaggagatctctacaaaggctacagtctgct

SEQ ID NO: 1012154 - DNA, 33 bp, Homo sapien
gccaggagatctctacgaaggctacagtctgct

SEQ ID NO: 1012155 - DNA, 33 bp, Homo sapien
tcagtcatctatatccaaaatgtatctgagtta

SEQ ID NO: 1012156 - DNA, 33 bp, Homo sapien
tcagtcatctatatccgaaatgtatctgagtta

SEQ ID NO: 1012157 - DNA, 33 bp, Homo sapien
gtgagaaaaatcagaaatatgattgctcagaag

SEQ ID NO: 1012158 - DNA, 33 bp, Homo sapien
gtgagaaaaatcagaactatgattgctcagaag

SEQ ID NO: 1012159 - DNA, 33 bp, Homo sapien
agatccagttgctccacgttgttttgttcactg

SEQ ID NO: 1012160 - DNA, 33 bp, Homo sapien
agatccagttgctccatgttgttttgttcactg

SEQ ID NO: 1012161 - DNA, 33 bp, Homo sapien
ccagactgggaaaaaacgtttgaaatgcaaagg

SEQ ID NO: 1012162 - DNA, 33 bp, Homo sapien
ccagactgggaaaaaatgtttgaaatgcaaagg

SEQ ID NO: 1012163 - DNA, 33 bp, Homo sapien
tggtacaagctagagcggaaacttgagtaaagc

SEQ ID NO: 1012164 - DNA, 33 bp, Homo sapien
tggtacaagctagagctgaaacttgagtaaagc

SEQ ID NO: 1012165 - DNA, 33 bp, Homo sapien
agctggattctgtaagacatttaggacattctg

SEQ ID NO: 1012166 - DNA, 33 bp, Homo sapien
agctggattctgtaagtcatttaggacattctg

SEQ ID NO: 1012167 - DNA, 33 bp, Homo sapien
ctactgaaactattccaaaaggtttagaaggag

SEQ ID NO: 1012168 - DNA, 33 bp, Homo sapien
ctactgaaactattccgaaaggtttagaaggag

SEQ ID NO: 1012169 - DNA, 33 bp, Homo sapien
cttatatttaagataagtagcctgccacaatta

SEQ ID NO: 1012170 - DNA, 33 bp, Homo sapien
cttatatttaagataattagcctgccacaatta

SEQ ID NO: 1012171 - DNA, 33 bp, Homo sapien
actctattagatcttgaaacagcactctcttct

SEQ ID NO: 1012172 - DNA, 33 bp, Homo sapien
actctattagatcttgcaacagcactctcttct

SEQ ID NO: 1012173 - DNA, 33 bp, Homo sapien
tttggcatatgtgcaacgagtaaattttctgta

SEQ ID NO: 1012174 - DNA, 33 bp, Homo sapien
tttggcatatgtgcaatgagtaaattttctgta

SEQ ID NO: 1012175 - DNA, 33 bp, Homo sapien
tcgtgtgctatattagcatttgctttatacctt

SEQ ID NO: 1012176 - DNA, 33 bp, Homo sapien
tcgtgtgctatattagtatttgctttatacctt

SEQ ID NO: 1012177 - DNA, 33 bp, Homo sapien
ggtttacctgacatagcatttaactttgctttt

SEQ ID NO: 1012178 - DNA, 33 bp, Homo sapien
ggtttacctgacataggatttaactttgctttt

SEQ ID NO: 1012179 - DNA, 33 bp, Homo sapien
agaatgtagaggcagacgaaatacagtgaggga

SEQ ID NO: 1012180 - DNA, 33 bp, Homo sapien
agaatgtagaggcagaggaaatacagtgaggga

SEQ ID NO: 1012181 - DNA, 33 bp, Homo sapien
cccctgactgcactggacaattttagatttcag

SEQ ID NO: 1012182 - DNA, 33 bp, Homo sapien
cccctgactgcactggtcaattttagatttcag

SEQ ID NO: 1012183 - DNA, 33 bp, Homo sapien
caaataactactcagacatcaaagagacaatat

SEQ ID NO: 1012184 - DNA, 33 bp, Homo sapien
caaataactactcagatatcaaagagacaatat

SEQ ID NO: 1012185 - DNA, 33 bp, Homo sapien
tcatgtaaaccccatacctttcctattcatcca

SEQ ID NO: 1012186 - DNA, 33 bp, Homo sapien
tcatgtaaaccccatatctttcctattcatcca

SEQ ID NO: 1012187 - DNA, 33 bp, Homo sapien
gtaacttccatgctctcacttttttatacctct

SEQ ID NO: 1012188 - DNA, 33 bp, Homo sapien
gtaacttccatgctcttacttttttatacctct

SEQ ID NO: 1012189 - DNA, 33 bp, Homo sapien
aaaaggatttaagtccaatagtaaaaggagcga

SEQ ID NO: 1012190 - DNA, 33 bp, Homo sapien
aaaaggatttaagtccgatagtaaaaggagcga

SEQ ID NO: 1012191 - DNA, 33 bp, Homo sapien
caagttaaagtcatccacagtaaaactgagaac

SEQ ID NO: 1012192 - DNA, 33 bp, Homo sapien
caagttaaagtcatccgcagtaaaactgagaac

SEQ ID NO: 1012193 - DNA, 33 bp, Homo sapien
accttcctgagtcatacaaagtcacttgacctc

SEQ ID NO: 1012194 - DNA, 33 bp, Homo sapien
accttcctgagtcatagaaagtcacttgacctc

SEQ ID NO: 1012195 - DNA, 33 bp, Homo sapien
tgtcatccaacggaagcactgctaagccagaca

SEQ ID NO: 1012196 - DNA, 33 bp, Homo sapien
tgtcatccaacggaagtactgctaagccagaca

SEQ ID NO: 1012197 - DNA, 33 bp, Homo sapien
ctgtgtgtctcaataactagcctataagttctt

SEQ ID NO: 1012198 - DNA, 33 bp, Homo sapien
ctgtgtgtctcaataattagcctataagttctt

SEQ ID NO: 1012199 - DNA, 33 bp, Homo sapien
gagggatgattgtgtccattcaagatgtctgtc

SEQ ID NO: 1012200 - DNA, 33 bp, Homo sapien
gagggatgattgtgtctattcaagatgtctgtc

SEQ ID NO: 1012201 - DNA, 33 bp, Homo sapien
atgagcatcctttaagacagtgaaaaagatggc

SEQ ID NO: 1012202 - DNA, 33 bp, Homo sapien
atgagcatcctttaaggcagtgaaaaagatggc

SEQ ID NO: 1012203 - DNA, 33 bp, Homo sapien
tgtttcctctaatgaacgggcataatactgctc

SEQ ID NO: 1012204 - DNA, 33 bp, Homo sapien
tgtttcctctaatgaaggggcataatactgctc

SEQ ID NO: 1012205 - DNA, 33 bp, Homo sapien
ggacccacttcccagcactgttgcactggaaat

SEQ ID NO: 1012206 - DNA, 33 bp, Homo sapien
ggacccacttcccagctctgttgcactggaaat

SEQ ID NO: 1012207 - DNA, 33 bp, Homo sapien
ctactgctttaagattcaacattgcttaccctg

SEQ ID NO: 1012208 - DNA, 33 bp, Homo sapien
ctactgctttaagatttaacattgcttaccctg

SEQ ID NO: 1012209 - DNA, 33 bp, Homo sapien
taattaaatacaaactcagcccattactttcac

SEQ ID NO: 1012210 - DNA, 33 bp, Homo sapien
taattaaatacaaactgagcccattactttcac

SEQ ID NO: 1012211 - DNA, 33 bp, Homo sapien
aacagcctaaagatgacgtgtaagagcataata

SEQ ID NO: 1012212 - DNA, 33 bp, Homo sapien
aacagcctaaagatgatgtgtaagagcataata

SEQ ID NO: 1012213 - DNA, 33 bp, Homo sapien
actgggtaaatacatacaatgagatgctatatg

SEQ ID NO: 1012214 - DNA, 33 bp, Homo sapien
actgggtaaatacatagaatgagatgctatatg

SEQ ID NO: 1012215 - DNA, 33 bp, Homo sapien
ccacagctttatcttcccgggctcaagcaatcc

SEQ ID NO: 1012216 - DNA, 33 bp, Homo sapien
ccacagctttatcttctcgggctcaagcaatcc

SEQ ID NO: 1012217 - DNA, 33 bp, Homo sapien
attctatatgtgtttacggggtgtaatctctgt

SEQ ID NO: 1012218 - DNA, 33 bp, Homo sapien
attctatatgtgtttatggggtgtaatctctgt

SEQ ID NO: 1012219 - DNA, 33 bp, Homo sapien
atgttctaaaaattccaaagttcaactcttaga

SEQ ID NO: 1012220 - DNA, 33 bp, Homo sapien
atgttctaaaaattccgaagttcaactcttaga

SEQ ID NO: 1012221 - DNA, 33 bp, Homo sapien
cataccatcatgattcaagatttcaggaacagc

SEQ ID NO: 1012222 - DNA, 33 bp, Homo sapien
cataccatcatgattctagatttcaggaacagc

SEQ ID NO: 1012223 - DNA, 33 bp, Homo sapien
ggtacacctgattaaaagttccaattttctgcc

SEQ ID NO: 1012224 - DNA, 33 bp, Homo sapien
ggtacacctgattaaaggttccaattttctgcc

SEQ ID NO: 1012225 - DNA, 33 bp, Homo sapien
cttcagacttaagacacaaacatcatgcctggt

SEQ ID NO: 1012226 - DNA, 33 bp, Homo sapien
cttcagacttaagacagaaacatcatgcctggt

SEQ ID NO: 1012227 - DNA, 33 bp, Homo sapien
acagacaccctgggaaacaacttagtgtggtgg

SEQ ID NO: 1012228 - DNA, 33 bp, Homo sapien
acagacaccctgggaagcaacttagtgtggtgg

SEQ ID NO: 1012229 - DNA, 33 bp, Homo sapien
gggcaacatgtgttgaagggcaccaaagtagga

SEQ ID NO: 1012230 - DNA, 33 bp, Homo sapien
gggcaacatgtgttgacgggcaccaaagtagga

SEQ ID NO: 1012231 - DNA, 33 bp, Homo sapien
gccacctggagtgagaataattcaagcaatctt

SEQ ID NO: 1012232 - DNA, 33 bp, Homo sapien
gccacctggagtgagagtaattcaagcaatctt

SEQ ID NO: 1012233 - DNA, 33 bp, Homo sapien
gaaccactgctttagacgcttttgaggcacagg

SEQ ID NO: 1012234 - DNA, 33 bp, Homo sapien
gaaccactgctttagatgcttttgaggcacagg

SEQ ID NO: 1012235 - DNA, 33 bp, Homo sapien
gctgtgcttgccaaaactgttatggcaaccaga

SEQ ID NO: 1012236 - DNA, 33 bp, Homo sapien
gctgtgcttgccaaaattgttatggcaaccaga

SEQ ID NO: 1012237 - DNA, 33 bp, Homo sapien
agcaagcgcacatacactaagacatggctgtca

SEQ ID NO: 1012238 - DNA, 33 bp, Homo sapien
agcaagcgcacatacagtaagacatggctgtca

SEQ ID NO: 1012239 - DNA, 33 bp, Homo sapien
aactagaccttctgcaatgataataaataaagc

SEQ ID NO: 1012240 - DNA, 33 bp, Homo sapien
aactagaccttctgcattgataataaataaagc

SEQ ID NO: 1012241 - DNA, 33 bp, Homo sapien
tgctcagagaggtcaaattcatgacgaaggtca

SEQ ID NO: 1012242 - DNA, 33 bp, Homo sapien
tgctcagagaggtcaagttcatgacgaaggtca

SEQ ID NO: 1012243 - DNA, 33 bp, Homo sapien
acttgtaattcagacagtcagaagtaaatgtga

SEQ ID NO: 1012244 - DNA, 33 bp, Homo sapien
acttgtaattcagacattcagaagtaaatgtga

SEQ ID NO: 1012245 - DNA, 33 bp, Homo sapien
ttaagaaaatgaaccacgatgactgcaggactg

SEQ ID NO: 1012246 - DNA, 33 bp, Homo sapien
ttaagaaaatgaaccaggatgactgcaggactg

SEQ ID NO: 1012247 - DNA, 33 bp, Homo sapien
atttttctattggctgaatgcaagtcccaggtt

SEQ ID NO: 1012248 - DNA, 33 bp, Homo sapien
atttttctattggctggatgcaagtcccaggtt

SEQ ID NO: 1012249 - DNA, 33 bp, Homo sapien
gtcccaggttcactgaccctttatacagagcat

SEQ ID NO: 1012250 - DNA, 33 bp, Homo sapien
gtcccaggttcactgatcctttatacagagcat

SEQ ID NO: 1012251 - DNA, 33 bp, Homo sapien
aaaaaaaaaagcaagcaagtctgtggcactgcc

SEQ ID NO: 1012252 - DNA, 33 bp, Homo sapien
aaaaaaaaaagcaagcgagtctgtggcactgcc

SEQ ID NO: 1012253 - DNA, 33 bp, Homo sapien
agactagaaagaaaacaggtattgccatcagat

SEQ ID NO: 1012254 - DNA, 33 bp, Homo sapien
agactagaaagaaaaccggtattgccatcagat

SEQ ID NO: 1012255 - DNA, 33 bp, Homo sapien
tctgctctgccagtaaattaattgactcacgat

SEQ ID NO: 1012256 - DNA, 33 bp, Homo sapien
tctgctctgccagtaagttaattgactcacgat

SEQ ID NO: 1012257 - DNA, 33 bp, Homo sapien
gtggaataaatgaccacccgcagaaagggagaa

SEQ ID NO: 1012258 - DNA, 33 bp, Homo sapien
gtggaataaatgaccatccgcagaaagggagaa

SEQ ID NO: 1012259 - DNA, 33 bp, Homo sapien
tttcagaagcctggaaatagaactcaacacacc

SEQ ID NO: 1012260 - DNA, 33 bp, Homo sapien
tttcagaagcctggaagtagaactcaacacacc

SEQ ID NO: 1012261 - DNA, 33 bp, Homo sapien
tagtacattgtaggcaggtagatgtgttgagaa

SEQ ID NO: 1012262 - DNA, 33 bp, Homo sapien
tagtacattgtaggcatgtagatgtgttgagaa

SEQ ID NO: 1012263 - DNA, 33 bp, Homo sapien
acattcttgaccgtcaatcctaactgctgagag

SEQ ID NO: 1012264 - DNA, 33 bp, Homo sapien
acattcttgaccgtcagtcctaactgctgagag

SEQ ID NO: 1012265 - DNA, 33 bp, Homo sapien
gaaaatccatgccaaacataacagcagattata

SEQ ID NO: 1012266 - DNA, 33 bp, Homo sapien
gaaaatccatgccaaatataacagcagattata

SEQ ID NO: 1012267 - DNA, 33 bp, Homo sapien
gtcattctcaaaaccacgaaaatccatgccaaa

SEQ ID NO: 1012268 - DNA, 33 bp, Homo sapien
gtcattctcaaaaccatgaaaatccatgccaaa

SEQ ID NO: 1012269 - DNA, 33 bp, Homo sapien
gaaaaagtgattcaataataaggagaaaaatga

SEQ ID NO: 1012270 - DNA, 33 bp, Homo sapien
gaaaaagtgattcaatcataaggagaaaaatga

SEQ ID NO: 1012271 - DNA, 33 bp, Homo sapien
ggcaaccagcaatcaccgctgagatcttgcccc

SEQ ID NO: 1012272 - DNA, 33 bp, Homo sapien
ggcaaccagcaatcacggctgagatcttgcccc

SEQ ID NO: 1012273 - DNA, 33 bp, Homo sapien
agcttttgcctgttgactatgatgttagctgtg

SEQ ID NO: 1012274 - DNA, 33 bp, Homo sapien
agcttttgcctgttgagtatgatgttagctgtg

SEQ ID NO: 1012275 - DNA, 33 bp, Homo sapien
gattttgtacctagaaaactccatagtgaacac

SEQ ID NO: 1012276 - DNA, 33 bp, Homo sapien
gattttgtacctagaagactccatagtgaacac

SEQ ID NO: 1012277 - DNA, 33 bp, Homo sapien
tgttgttatgtttaccagattaagcaaaagtta

SEQ ID NO: 1012278 - DNA, 33 bp, Homo sapien
tgttgttatgtttacccgattaagcaaaagtta

SEQ ID NO: 1012279 - DNA, 33 bp, Homo sapien
accaaaaacttgaccccggagcataacagggat

SEQ ID NO: 1012280 - DNA, 33 bp, Homo sapien
accaaaaacttgaccctggagcataacagggat

SEQ ID NO: 1012281 - DNA, 33 bp, Homo sapien
ggccctcaaaatcacaatgggacagtcggtcag

SEQ ID NO: 1012282 - DNA, 33 bp, Homo sapien
ggccctcaaaatcacagtgggacagtcggtcag

SEQ ID NO: 1012283 - DNA, 33 bp, Homo sapien
gagaggaaatacgtaactctatgtctatgcttg

SEQ ID NO: 1012284 - DNA, 33 bp, Homo sapien
gagaggaaatacgtaattctatgtctatgcttg

SEQ ID NO: 1012285 - DNA, 33 bp, Homo sapien
aatgggttctaatggactaaactcaaaattctc

SEQ ID NO: 1012286 - DNA, 33 bp, Homo sapien
aatgggttctaatggagtaaactcaaaattctc

SEQ ID NO: 1012287 - DNA, 33 bp, Homo sapien
atacagacttcctctaaaaacacatgactcatg

SEQ ID NO: 1012288 - DNA, 33 bp, Homo sapien
atacagacttcctctagaaacacatgactcatg

SEQ ID NO: 1012289 - DNA, 33 bp, Homo sapien
caggaggttgtgacccacagcaaattctggcag

SEQ ID NO: 1012290 - DNA, 33 bp, Homo sapien
caggaggttgtgaccctcagcaaattctggcag

SEQ ID NO: 1012291 - DNA, 33 bp, Homo sapien
caagctaagctgccaccggatgtttttaagaat

SEQ ID NO: 1012292 - DNA, 33 bp, Homo sapien
caagctaagctgccactggatgtttttaagaat

SEQ ID NO: 1012293 - DNA, 33 bp, Homo sapien
cgtagggaagctacgggattccgccgaggagcg

SEQ ID NO: 1012294 - DNA, 33 bp, Homo sapien
cgtagggaagctacggtattccgccgaggagcg

SEQ ID NO: 1012295 - DNA, 33 bp, Homo sapien
taatctttcaactgcacgcttcaagtggttcct

SEQ ID NO: 1012296 - DNA, 33 bp, Homo sapien
taatctttcaactgcatgcttcaagtggttcct

SEQ ID NO: 1012297 - DNA, 33 bp, Homo sapien
aacgtttccatctaaaaggaatggcaaatactt

SEQ ID NO: 1012298 - DNA, 33 bp, Homo sapien
aacgtttccatctaaagggaatggcaaatactt

SEQ ID NO: 1012299 - DNA, 33 bp, Homo sapien
tggactttctaaaattcaagagtactcaaagaa

SEQ ID NO: 1012300 - DNA, 33 bp, Homo sapien
tggactttctaaaattgaagagtactcaaagaa

SEQ ID NO: 1012301 - DNA, 33 bp, Homo sapien
ttaaagaaaaaaataacctgagccttctgaagt

SEQ ID NO: 1012302 - DNA, 33 bp, Homo sapien
ttaaagaaaaaaataatctgagccttctgaagt

SEQ ID NO: 1012303 - DNA, 33 bp, Homo sapien
gtttggggaggaggagaacaagacaagggatat

SEQ ID NO: 1012304 - DNA, 33 bp, Homo sapien
gtttggggaggaggaggacaagacaagggatat

SEQ ID NO: 1012305 - DNA, 33 bp, Homo sapien
taataacaaacaataacagtacttgcagcttaa

SEQ ID NO: 1012306 - DNA, 33 bp, Homo sapien
taataacaaacaataagagtacttgcagcttaa

SEQ ID NO: 1012307 - DNA, 33 bp, Homo sapien
tgtcgtcgcttgcacagcctctcttacccctct

SEQ ID NO: 1012308 - DNA, 33 bp, Homo sapien
tgtcgtcgcttgcacatcctctcttacccctct

SEQ ID NO: 1012309 - DNA, 33 bp, Homo sapien
cagacatcttaagaaacacggagttattttgaa

SEQ ID NO: 1012310 - DNA, 33 bp, Homo sapien
cagacatcttaagaaagacggagttattttgaa

SEQ ID NO: 1012311 - DNA, 33 bp, Homo sapien
gccaggttgccactctcaatctcgaactagttt

SEQ ID NO: 1012312 - DNA, 33 bp, Homo sapien
gccaggttgccactcttaatctcgaactagttt

SEQ ID NO: 1012313 - DNA, 33 bp, Homo sapien
ttgcattagtaaccaaacttaaactactgctga

SEQ ID NO: 1012314 - DNA, 33 bp, Homo sapien
ttgcattagtaaccaaccttaaactactgctga

SEQ ID NO: 1012315 - DNA, 33 bp, Homo sapien
aacatgaaatcttgaaaaattagctatctgtaa

SEQ ID NO: 1012316 - DNA, 33 bp, Homo sapien
aacatgaaatcttgaataattagctatctgtaa

SEQ ID NO: 1012317 - DNA, 33 bp, Homo sapien
atagggatggaggaaaacattgtagctagctga

SEQ ID NO: 1012318 - DNA, 33 bp, Homo sapien
atagggatggaggaaagcattgtagctagctga

SEQ ID NO: 1012319 - DNA, 33 bp, Homo sapien
aaattagggatacacactcctccctgagctcta

SEQ ID NO: 1012320 - DNA, 33 bp, Homo sapien
aaattagggatacacagtcctccctgagctcta

SEQ ID NO: 1012321 - DNA, 33 bp, Homo sapien
tgtctgcatttcagtacagagaaaattgcatta

SEQ ID NO: 1012322 - DNA, 33 bp, Homo sapien
tgtctgcatttcagtatagagaaaattgcatta

SEQ ID NO: 1012323 - DNA, 33 bp, Homo sapien
tatcaagtcagttacaatcttctgtattctagc

SEQ ID NO: 1012324 - DNA, 33 bp, Homo sapien
tatcaagtcagttacattcttctgtattctagc

SEQ ID NO: 1012325 - DNA, 33 bp, Homo sapien
aggcacccctgaatccactagcacccagctgga

SEQ ID NO: 1012326 - DNA, 33 bp, Homo sapien
aggcacccctgaatccgctagcacccagctgga

SEQ ID NO: 1012327 - DNA, 33 bp, Homo sapien
caattcaaatctataacggcagagttttctgaa

SEQ ID NO: 1012328 - DNA, 33 bp, Homo sapien
caattcaaatctataatggcagagttttctgaa

SEQ ID NO: 1012329 - DNA, 33 bp, Homo sapien
caggactatttgccacaacatttcaaaggattc

SEQ ID NO: 1012330 - DNA, 33 bp, Homo sapien
caggactatttgccacgacatttcaaaggattc

SEQ ID NO: 1012331 - DNA, 33 bp, Homo sapien
ccacaccctaactaccacaaagaaagtcatggg

SEQ ID NO: 1012332 - DNA, 33 bp, Homo sapien
ccacaccctaactaccgcaaagaaagtcatggg

SEQ ID NO: 1012333 - DNA, 33 bp, Homo sapien
tttagcttcttaaaccagcatcatggaacgtta

SEQ ID NO: 1012334 - DNA, 33 bp, Homo sapien
tttagcttcttaaaccggcatcatggaacgtta

SEQ ID NO: 1012335 - DNA, 33 bp, Homo sapien
ggctaacatattcccacaacagtgtgactgctc

SEQ ID NO: 1012336 - DNA, 33 bp, Homo sapien
ggctaacatattcccagaacagtgtgactgctc

SEQ ID NO: 1012337 - DNA, 33 bp, Homo sapien
taagaaaatttttgaacgttcttgctccaaaca

SEQ ID NO: 1012338 - DNA, 33 bp, Homo sapien
taagaaaatttttgaatgttcttgctccaaaca

SEQ ID NO: 1012339 - DNA, 33 bp, Homo sapien
atctctttttctgttacgtatgtcctaagtaaa

SEQ ID NO: 1012340 - DNA, 33 bp, Homo sapien
atctctttttctgttatgtatgtcctaagtaaa

SEQ ID NO: 1012341 - DNA, 33 bp, Homo sapien
taatagataccactaactgagcacctcctatgt

SEQ ID NO: 1012342 - DNA, 33 bp, Homo sapien
taatagataccactaattgagcacctcctatgt

SEQ ID NO: 1012343 - DNA, 33 bp, Homo sapien
caggaaaataaaggacagctaagtttatatagt

SEQ ID NO: 1012344 - DNA, 33 bp, Homo sapien
caggaaaataaaggacggctaagtttatatagt

SEQ ID NO: 1012345 - DNA, 33 bp, Homo sapien
cccatccccaataagcccaacattttctcccca

SEQ ID NO: 1012346 - DNA, 33 bp, Homo sapien
cccatccccaataagctcaacattttctcccca

SEQ ID NO: 1012347 - DNA, 33 bp, Homo sapien
tatgaaaagaggagaaaccaaagggaggaaggt

SEQ ID NO: 1012348 - DNA, 33 bp, Homo sapien
tatgaaaagaggagaagccaaagggaggaaggt

SEQ ID NO: 1012349 - DNA, 33 bp, Homo sapien
gatctgctcttttataagaaaaatcatgcttag

SEQ ID NO: 1012350 - DNA, 33 bp, Homo sapien
gatctgctcttttatatgaaaaatcatgcttag

SEQ ID NO: 1012351 - DNA, 33 bp, Homo sapien
cgctctgtatgacctacccatttcccacgcatt

SEQ ID NO: 1012352 - DNA, 33 bp, Homo sapien
cgctctgtatgacctatccatttcccacgcatt

SEQ ID NO: 1012353 - DNA, 33 bp, Homo sapien
tacatcacctagctcagagttggtgttcagtaa

SEQ ID NO: 1012354 - DNA, 33 bp, Homo sapien
tacatcacctagctcatagttggtgttcagtaa

SEQ ID NO: 1012355 - DNA, 33 bp, Homo sapien
cacctgcactgctcagcactttcccctgtccct

SEQ ID NO: 1012356 - DNA, 33 bp, Homo sapien
cacctgcactgctcaggactttcccctgtccct

SEQ ID NO: 1012357 - DNA, 33 bp, Homo sapien
aattaatttgattcaccaaagtaagtttctagt

SEQ ID NO: 1012358 - DNA, 33 bp, Homo sapien
aattaatttgattcacgaaagtaagtttctagt

SEQ ID NO: 1012359 - DNA, 33 bp, Homo sapien
aaataacattttctgacgagattgatgtgaata

SEQ ID NO: 1012360 - DNA, 33 bp, Homo sapien
aaataacattttctgatgagattgatgtgaata

SEQ ID NO: 1012361 - DNA, 33 bp, Homo sapien
ctgtgtgtattttatcaatatggcccagatttg

SEQ ID NO: 1012362 - DNA, 33 bp, Homo sapien
ctgtgtgtattttatccatatggcccagatttg

SEQ ID NO: 1012363 - DNA, 33 bp, Homo sapien
ttgtgattctgaataacattttttccaacatta

SEQ ID NO: 1012364 - DNA, 33 bp, Homo sapien
ttgtgattctgaataatattttttccaacatta

SEQ ID NO: 1012365 - DNA, 33 bp, Homo sapien
aaacattgcaacattcacttcttacgacctttc

SEQ ID NO: 1012366 - DNA, 33 bp, Homo sapien
aaacattgcaacattcgcttcttacgacctttc

SEQ ID NO: 1012367 - DNA, 33 bp, Homo sapien
aaatgcattctatagcacaggatgttccagtca

SEQ ID NO: 1012368 - DNA, 33 bp, Homo sapien
aaatgcattctatagcgcaggatgttccagtca

SEQ ID NO: 1012369 - DNA, 33 bp, Homo sapien
atgtcctgtttggaacaccaactctgtatcagt

SEQ ID NO: 1012370 - DNA, 33 bp, Homo sapien
atgtcctgtttggaacgccaactctgtatcagt

SEQ ID NO: 1012371 - DNA, 33 bp, Homo sapien
aagtcaggatccaagcactacccatcctgcagt

SEQ ID NO: 1012372 - DNA, 33 bp, Homo sapien
aagtcaggatccaagcgctacccatcctgcagt

SEQ ID NO: 1012373 - DNA, 33 bp, Homo sapien
tcttggcagatgtttcgaacaaaggagagagtt

SEQ ID NO: 1012374 - DNA, 33 bp, Homo sapien
tcttggcagatgtttctaacaaaggagagagtt

SEQ ID NO: 1012375 - DNA, 33 bp, Homo sapien
acaggcacagttattacacccatattgaatgag

SEQ ID NO: 1012376 - DNA, 33 bp, Homo sapien
acaggcacagttattatacccatattgaatgag

SEQ ID NO: 1012377 - DNA, 33 bp, Homo sapien
tcaataattcgacattgaaacatctcctcaaaa

SEQ ID NO: 1012378 - DNA, 33 bp, Homo sapien
tcaataattcgacatttaaacatctcctcaaaa

SEQ ID NO: 1012379 - DNA, 33 bp, Homo sapien
catatgatcaacagttcaaaagcagccactcgc

SEQ ID NO: 1012380 - DNA, 33 bp, Homo sapien
catatgatcaacagttgaaaagcagccactcgc

SEQ ID NO: 1012381 - DNA, 33 bp, Homo sapien
aagaagatagatagccagcacaatacatataca

SEQ ID NO: 1012382 - DNA, 33 bp, Homo sapien
aagaagatagatagcctgcacaatacatataca

SEQ ID NO: 1012383 - DNA, 33 bp, Homo sapien
agcatttcccattacaccctgagttacaaacaa

SEQ ID NO: 1012384 - DNA, 33 bp, Homo sapien
agcatttcccattacatcctgagttacaaacaa

SEQ ID NO: 1012385 - DNA, 33 bp, Homo sapien
ttaatgagagagtagaaatgagaattcacattc

SEQ ID NO: 1012386 - DNA, 33 bp, Homo sapien
ttaatgagagagtagagatgagaattcacattc

SEQ ID NO: 1012387 - DNA, 33 bp, Homo sapien
tccagctttagttttcccatgacagtaagtcta

SEQ ID NO: 1012388 - DNA, 33 bp, Homo sapien
tccagctttagttttctcatgacagtaagtcta

SEQ ID NO: 1012389 - DNA, 33 bp, Homo sapien
tgttctgagaatatcaataaagtcaaaaacctt

SEQ ID NO: 1012390 - DNA, 33 bp, Homo sapien
tgttctgagaatatcagtaaagtcaaaaacctt

SEQ ID NO: 1012391 - DNA, 33 bp, Homo sapien
cttagtttttgtcctaactggcagagaaacatc

SEQ ID NO: 1012392 - DNA, 33 bp, Homo sapien
cttagtttttgtcctatctggcagagaaacatc

SEQ ID NO: 1012393 - DNA, 33 bp, Homo sapien
gaaggtctgagtcaccccattaggctaaaaacc

SEQ ID NO: 1012394 - DNA, 33 bp, Homo sapien
gaaggtctgagtcacctcattaggctaaaaacc

SEQ ID NO: 1012395 - DNA, 33 bp, Homo sapien
atgacttatttaaggaacagaataccagatata

SEQ ID NO: 1012396 - DNA, 33 bp, Homo sapien
atgacttatttaaggagcagaataccagatata

SEQ ID NO: 1012397 - DNA, 33 bp, Homo sapien
tctttgaagtacaaccggattttcttaggctct

SEQ ID NO: 1012398 - DNA, 33 bp, Homo sapien
tctttgaagtacaacctgattttcttaggctct

SEQ ID NO: 1012399 - DNA, 33 bp, Homo sapien
agtgttggaaggtcaccaataatcccaaataac

SEQ ID NO: 1012400 - DNA, 33 bp, Homo sapien
agtgttggaaggtcactaataatcccaaataac

SEQ ID NO: 1012401 - DNA, 33 bp, Homo sapien
ctgtactcctgttgtacgacaccagaaggcatg

SEQ ID NO: 1012402 - DNA, 33 bp, Homo sapien
ctgtactcctgttgtatgacaccagaaggcatg

SEQ ID NO: 1012403 - DNA, 33 bp, Homo sapien
tcgattttcagaataaagagttggtgaccttgc

SEQ ID NO: 1012404 - DNA, 33 bp, Homo sapien
tcgattttcagaataatgagttggtgaccttgc

SEQ ID NO: 1012405 - DNA, 33 bp, Homo sapien
atcaatcgtttccatagagtagagtatctgaat

SEQ ID NO: 1012406 - DNA, 33 bp, Homo sapien
atcaatcgtttccatatagtagagtatctgaat

SEQ ID NO: 1012407 - DNA, 33 bp, Homo sapien
aattatgatgggatacaatgatacttctcttgt

SEQ ID NO: 1012408 - DNA, 33 bp, Homo sapien
aattatgatgggatacgatgatacttctcttgt

SEQ ID NO: 1012409 - DNA, 33 bp, Homo sapien
attagtagattttgaaaagtggtttaatcataa

SEQ ID NO: 1012410 - DNA, 33 bp, Homo sapien
attagtagattttgaagagtggtttaatcataa

SEQ ID NO: 1012411 - DNA, 33 bp, Homo sapien
agtgtgatcaattgcaaaacacctttcccactt

SEQ ID NO: 1012412 - DNA, 33 bp, Homo sapien
agtgtgatcaattgcagaacacctttcccactt

SEQ ID NO: 1012413 - DNA, 33 bp, Homo sapien
ttttactttgcttcacagtcagctgcacaggag

SEQ ID NO: 1012414 - DNA, 33 bp, Homo sapien
ttttactttgcttcacggtcagctgcacaggag

SEQ ID NO: 1012415 - DNA, 33 bp, Homo sapien
ctaaactgccttgagaaatctgtcagtcaatgt

SEQ ID NO: 1012416 - DNA, 33 bp, Homo sapien
ctaaactgccttgagatatctgtcagtcaatgt

SEQ ID NO: 1012417 - DNA, 33 bp, Homo sapien
gcattctccttctcataaatgaatctgaaaacc

SEQ ID NO: 1012418 - DNA, 33 bp, Homo sapien
gcattctccttctcatcaatgaatctgaaaacc

SEQ ID NO: 1012419 - DNA, 33 bp, Homo sapien
aatatagtttgtttaacatctacctgcttgtcc

SEQ ID NO: 1012420 - DNA, 33 bp, Homo sapien
aatatagtttgtttaagatctacctgcttgtcc

SEQ ID NO: 1012421 - DNA, 33 bp, Homo sapien
tttgcggatgaaatataataatggatttcttaa

SEQ ID NO: 1012422 - DNA, 33 bp, Homo sapien
tttgcggatgaaatatgataatggatttcttaa

SEQ ID NO: 1012423 - DNA, 33 bp, Homo sapien
ggagcacttagaatatcactgaacctgtgctaa

SEQ ID NO: 1012424 - DNA, 33 bp, Homo sapien
ggagcacttagaatattactgaacctgtgctaa

SEQ ID NO: 1012425 - DNA, 33 bp, Homo sapien
aatactctggtgcttacgaataccacattttag

SEQ ID NO: 1012426 - DNA, 33 bp, Homo sapien
aatactctggtgcttatgaataccacattttag

SEQ ID NO: 1012427 - DNA, 33 bp, Homo sapien
attatcaaataggtagacctggaaatttcaatt

SEQ ID NO: 1012428 - DNA, 33 bp, Homo sapien
attatcaaataggtagtcctggaaatttcaatt

SEQ ID NO: 1012429 - DNA, 33 bp, Homo sapien
agcatggtaagtgttacaacagagtcatacaca

SEQ ID NO: 1012430 - DNA, 33 bp, Homo sapien
agcatggtaagtgttagaacagagtcatacaca

SEQ ID NO: 1012431 - DNA, 33 bp, Homo sapien
tctccccaccagaccacgcttctcaaagtagcc

SEQ ID NO: 1012432 - DNA, 33 bp, Homo sapien
tctccccaccagaccatgcttctcaaagtagcc

SEQ ID NO: 1012433 - DNA, 33 bp, Homo sapien
ataaaacataatctctaaacttaaggaccttca

SEQ ID NO: 1012434 - DNA, 33 bp, Homo sapien
ataaaacataatctctgaacttaaggaccttca

SEQ ID NO: 1012435 - DNA, 33 bp, Homo sapien
aatagcctagcataaaattgatactaacagtgg

SEQ ID NO: 1012436 - DNA, 33 bp, Homo sapien
aatagcctagcataaagttgatactaacagtgg

SEQ ID NO: 1012437 - DNA, 33 bp, Homo sapien
tataggtgtacaagagaaagaagaaatggaaaa

SEQ ID NO: 1012438 - DNA, 33 bp, Homo sapien
tataggtgtacaagaggaagaagaaatggaaaa

SEQ ID NO: 1012439 - DNA, 33 bp, Homo sapien
cagatctgtgagtcaactacaccttttttcttt

SEQ ID NO: 1012440 - DNA, 33 bp, Homo sapien
cagatctgtgagtcaattacaccttttttcttt

SEQ ID NO: 1012441 - DNA, 33 bp, Homo sapien
actatgtgagaaaatgcagaaaatgcctaacac

SEQ ID NO: 1012442 - DNA, 33 bp, Homo sapien
actatgtgagaaaatggagaaaatgcctaacac

SEQ ID NO: 1012443 - DNA, 33 bp, Homo sapien
tgctgaagaaatctgccgagaccagtgtcctga

SEQ ID NO: 1012444 - DNA, 33 bp, Homo sapien
tgctgaagaaatctgctgagaccagtgtcctga

SEQ ID NO: 1012445 - DNA, 33 bp, Homo sapien
atggagccacaaaagacgcagaatagccatgct

SEQ ID NO: 1012446 - DNA, 33 bp, Homo sapien
atggagccacaaaagatgcagaatagccatgct

SEQ ID NO: 1012447 - DNA, 33 bp, Homo sapien
gctgctatgttacaagaattcaaagcaaattcg

SEQ ID NO: 1012448 - DNA, 33 bp, Homo sapien
gctgctatgttacaaggattcaaagcaaattcg

SEQ ID NO: 1012449 - DNA, 33 bp, Homo sapien
ggtgttaagtattttcacattgtttcgcaacag

SEQ ID NO: 1012450 - DNA, 33 bp, Homo sapien
ggtgttaagtattttcgcattgtttcgcaacag

SEQ ID NO: 1012451 - DNA, 33 bp, Homo sapien
catgtagagtattagaacactcacgggaatatt

SEQ ID NO: 1012452 - DNA, 33 bp, Homo sapien
catgtagagtattagagcactcacgggaatatt

SEQ ID NO: 1012453 - DNA, 33 bp, Homo sapien
acattcatacagatcacaatgaggctggggatt

SEQ ID NO: 1012454 - DNA, 33 bp, Homo sapien
acattcatacagatcataatgaggctggggatt

SEQ ID NO: 1012455 - DNA, 33 bp, Homo sapien
actgtaatcagttttcaaaaatgagacctagga

SEQ ID NO: 1012456 - DNA, 33 bp, Homo sapien
actgtaatcagttttcgaaaatgagacctagga

SEQ ID NO: 1012457 - DNA, 33 bp, Homo sapien
gcacttagataaatgacgcagatgtaaaaaaca

SEQ ID NO: 1012458 - DNA, 33 bp, Homo sapien
gcacttagataaatgatgcagatgtaaaaaaca

SEQ ID NO: 1012459 - DNA, 33 bp, Homo sapien
atatttataattgcaaagagtattgattatcag

SEQ ID NO: 1012460 - DNA, 33 bp, Homo sapien
atatttataattgcaaggagtattgattatcag

SEQ ID NO: 1012461 - DNA, 33 bp, Homo sapien
agaggcgaggaaataaaaacatcaagtacaaaa

SEQ ID NO: 1012462 - DNA, 33 bp, Homo sapien
agaggcgaggaaataacaacatcaagtacaaaa

SEQ ID NO: 1012463 - DNA, 33 bp, Homo sapien
gctggatttgtgagataactaagaggttaaatc

SEQ ID NO: 1012464 - DNA, 33 bp, Homo sapien
gctggatttgtgagatgactaagaggttaaatc

SEQ ID NO: 1012465 - DNA, 33 bp, Homo sapien
atgagacagattgctaagagcttagtaaaggaa

SEQ ID NO: 1012466 - DNA, 33 bp, Homo sapien
atgagacagattgctaggagcttagtaaaggaa

SEQ ID NO: 1012467 - DNA, 33 bp, Homo sapien
tccttaccttcccaaccgatcagagaggcacag

SEQ ID NO: 1012468 - DNA, 33 bp, Homo sapien
tccttaccttcccaactgatcagagaggcacag

SEQ ID NO: 1012469 - DNA, 33 bp, Homo sapien
tccagcattgtattcaaaactattacatgaaat

SEQ ID NO: 1012470 - DNA, 33 bp, Homo sapien
tccagcattgtattcacaactattacatgaaat

SEQ ID NO: 1012471 - DNA, 33 bp, Homo sapien
ttacacacttgctacacgctgcagagtctaaga

SEQ ID NO: 1012472 - DNA, 33 bp, Homo sapien
ttacacacttgctacatgctgcagagtctaaga

SEQ ID NO: 1012473 - DNA, 33 bp, Homo sapien
tgaccagggagatagaaattgaaacacccggga

SEQ ID NO: 1012474 - DNA, 33 bp, Homo sapien
tgaccagggagatagagattgaaacacccggga

SEQ ID NO: 1012475 - DNA, 33 bp, Homo sapien
gctttgtttcctctgcacctaaagccttatctg

SEQ ID NO: 1012476 - DNA, 33 bp, Homo sapien
gctttgtttcctctgcgcctaaagccttatctg

SEQ ID NO: 1012477 - DNA, 33 bp, Homo sapien
cgactctttgagttgaaaaaaagctgagaattg

SEQ ID NO: 1012478 - DNA, 33 bp, Homo sapien
cgactctttgagttgagaaaaagctgagaattg

SEQ ID NO: 1012479 - DNA, 33 bp, Homo sapien
ataggaagtttttctacctatgctcccctcctt

SEQ ID NO: 1012480 - DNA, 33 bp, Homo sapien
ataggaagtttttctatctatgctcccctcctt

SEQ ID NO: 1012481 - DNA, 33 bp, Homo sapien
gtgaaacatttcctcacaattcagtccttagac

SEQ ID NO: 1012482 - DNA, 33 bp, Homo sapien
gtgaaacatttcctcataattcagtccttagac

SEQ ID NO: 1012483 - DNA, 33 bp, Homo sapien
aaacaactttgaatcaccaacatttgtttgatt

SEQ ID NO: 1012484 - DNA, 33 bp, Homo sapien
aaacaactttgaatcagcaacatttgtttgatt

SEQ ID NO: 1012485 - DNA, 33 bp, Homo sapien
ccatatgaatttgccaccaataacaataatact

SEQ ID NO: 1012486 - DNA, 33 bp, Homo sapien
ccatatgaatttgccatcaataacaataatact

SEQ ID NO: 1012487 - DNA, 33 bp, Homo sapien
accacatattctcacaagtttataaatttgact

SEQ ID NO: 1012488 - DNA, 33 bp, Homo sapien
accacatattctcacaggtttataaatttgact

SEQ ID NO: 1012489 - DNA, 33 bp, Homo sapien
ttgaatcagctatataccaggaactatgctaaa

SEQ ID NO: 1012490 - DNA, 33 bp, Homo sapien
ttgaatcagctatatatcaggaactatgctaaa

SEQ ID NO: 1012491 - DNA, 33 bp, Homo sapien
ttgaatattccagactaacacacaaggaaaaat

SEQ ID NO: 1012492 - DNA, 33 bp, Homo sapien
ttgaatattccagactgacacacaaggaaaaat

SEQ ID NO: 1012493 - DNA, 33 bp, Homo sapien
accaatttgggcaacacgatacagagaaagttc

SEQ ID NO: 1012494 - DNA, 33 bp, Homo sapien
accaatttgggcaacatgatacagagaaagttc

SEQ ID NO: 1012495 - DNA, 33 bp, Homo sapien
aatgtgaaaattctaagccagcatgagtcatct

SEQ ID NO: 1012496 - DNA, 33 bp, Homo sapien
aatgtgaaaattctaatccagcatgagtcatct

SEQ ID NO: 1012497 - DNA, 33 bp, Homo sapien
actttacatggaaatactagaaccgattattca

SEQ ID NO: 1012498 - DNA, 33 bp, Homo sapien
actttacatggaaatattagaaccgattattca

SEQ ID NO: 1012499 - DNA, 33 bp, Homo sapien
aatgcaccaaagaaaggcttagcaagatcaggc

SEQ ID NO: 1012500 - DNA, 33 bp, Homo sapien
aatgcaccaaagaaagtcttagcaagatcaggc

SEQ ID NO: 1012501 - DNA, 33 bp, Homo sapien
ctaaagtcgttatagaactttgaaagtcatgag

SEQ ID NO: 1012502 - DNA, 33 bp, Homo sapien
ctaaagtcgttatagagctttgaaagtcatgag

SEQ ID NO: 1012503 - DNA, 33 bp, Homo sapien
cagaaggaaagggagcccagtaagcttggagat

SEQ ID NO: 1012504 - DNA, 33 bp, Homo sapien
cagaaggaaagggagcgcagtaagcttggagat

SEQ ID NO: 1012505 - DNA, 33 bp, Homo sapien
catgacaatagtagcaacaatggctcactgtac

SEQ ID NO: 1012506 - DNA, 33 bp, Homo sapien
catgacaatagtagcaccaatggctcactgtac

SEQ ID NO: 1012507 - DNA, 33 bp, Homo sapien
tattagttaacaacacactcagatagttaaagt

SEQ ID NO: 1012508 - DNA, 33 bp, Homo sapien
tattagttaacaacacgctcagatagttaaagt

SEQ ID NO: 1012509 - DNA, 33 bp, Homo sapien
atctgaagtatcttccccaaatagcttatttta

SEQ ID NO: 1012510 - DNA, 33 bp, Homo sapien
atctgaagtatcttcctcaaatagcttatttta

SEQ ID NO: 1012511 - DNA, 33 bp, Homo sapien
ttagagacaaggaggcaaccagaagttacactt

SEQ ID NO: 1012512 - DNA, 33 bp, Homo sapien
ttagagacaaggaggcgaccagaagttacactt

SEQ ID NO: 1012513 - DNA, 33 bp, Homo sapien
aaaatattcagctccacgctacccttggagtta

SEQ ID NO: 1012514 - DNA, 33 bp, Homo sapien
aaaatattcagctccatgctacccttggagtta

SEQ ID NO: 1012515 - DNA, 33 bp, Homo sapien
tgtggccagacaggaaacttgggagaaatcagc

SEQ ID NO: 1012516 - DNA, 33 bp, Homo sapien
tgtggccagacaggaaccttgggagaaatcagc

SEQ ID NO: 1012517 - DNA, 33 bp, Homo sapien
taagataatgaatttgcattggttaaagctgct

SEQ ID NO: 1012518 - DNA, 33 bp, Homo sapien
taagataatgaatttgtattggttaaagctgct

SEQ ID NO: 1012519 - DNA, 33 bp, Homo sapien
ttcctcctccatccaaaccccaatcattttccc

SEQ ID NO: 1012520 - DNA, 33 bp, Homo sapien
ttcctcctccatccaacccccaatcattttccc

SEQ ID NO: 1012521 - DNA, 33 bp, Homo sapien
ccatcccttctgtcagacattgctgtgatatcg

SEQ ID NO: 1012522 - DNA, 33 bp, Homo sapien
ccatcccttctgtcagtcattgctgtgatatcg

SEQ ID NO: 1012523 - DNA, 33 bp, Homo sapien
actaaggagaaacaaaactaaggctacttttta

SEQ ID NO: 1012524 - DNA, 33 bp, Homo sapien
actaaggagaaacaaacctaaggctacttttta

SEQ ID NO: 1012525 - DNA, 33 bp, Homo sapien
tgaatttctatcttaacatggacatcaactttt

SEQ ID NO: 1012526 - DNA, 33 bp, Homo sapien
tgaatttctatcttaatatggacatcaactttt

SEQ ID NO: 1012527 - DNA, 33 bp, Homo sapien
agaaagtgtatgtataagcctaatcctctctcc

SEQ ID NO: 1012528 - DNA, 33 bp, Homo sapien
agaaagtgtatgtataggcctaatcctctctcc

SEQ ID NO: 1012529 - DNA, 33 bp, Homo sapien
ttgggtgggaaaataccaaatttctacagtgcc

SEQ ID NO: 1012530 - DNA, 33 bp, Homo sapien
ttgggtgggaaaatactaaatttctacagtgcc

SEQ ID NO: 1012531 - DNA, 33 bp, Homo sapien
aaattgagaaaaaagacgttgactgtgaattcc

SEQ ID NO: 1012532 - DNA, 33 bp, Homo sapien
aaattgagaaaaaagatgttgactgtgaattcc

SEQ ID NO: 1012533 - DNA, 33 bp, Homo sapien
tttgattgatcctgtcaaaaaaattggattgtc

SEQ ID NO: 1012534 - DNA, 33 bp, Homo sapien
tttgattgatcctgtcgaaaaaattggattgtc

SEQ ID NO: 1012535 - DNA, 33 bp, Homo sapien
tatgtactgattaaacaagaagaaaacaatgaa

SEQ ID NO: 1012536 - DNA, 33 bp, Homo sapien
tatgtactgattaaacgagaagaaaacaatgaa

SEQ ID NO: 1012537 - DNA, 33 bp, Homo sapien
gtagactgattaaagaaaatgtggtgtatatat

SEQ ID NO: 1012538 - DNA, 33 bp, Homo sapien
gtagactgattaaagagaatgtggtgtatatat

SEQ ID NO: 1012539 - DNA, 33 bp, Homo sapien
gacaaagacagaaaagaagtacggtgaagtgag

SEQ ID NO: 1012540 - DNA, 33 bp, Homo sapien
gacaaagacagaaaagcagtacggtgaagtgag

SEQ ID NO: 1012541 - DNA, 33 bp, Homo sapien
tttcttctcttcataactcaaaaggaacacatg

SEQ ID NO: 1012542 - DNA, 33 bp, Homo sapien
tttcttctcttcataattcaaaaggaacacatg

SEQ ID NO: 1012543 - DNA, 33 bp, Homo sapien
ggatattctttcaaccactgttcatgtgttcct

SEQ ID NO: 1012544 - DNA, 33 bp, Homo sapien
ggatattctttcaaccgctgttcatgtgttcct

SEQ ID NO: 1012545 - DNA, 33 bp, Homo sapien
ataaataaaaataatgcaagaaaaatgagctga

SEQ ID NO: 1012546 - DNA, 33 bp, Homo sapien
ataaataaaaataatggaagaaaaatgagctga

SEQ ID NO: 1012547 - DNA, 33 bp, Homo sapien
ctagaaatgtcataaacggcaaaattaacacac

SEQ ID NO: 1012548 - DNA, 33 bp, Homo sapien
ctagaaatgtcataaatggcaaaattaacacac

SEQ ID NO: 1012549 - DNA, 33 bp, Homo sapien
ggtctagtttacccagcaccatatctatttata

SEQ ID NO: 1012550 - DNA, 33 bp, Homo sapien
ggtctagtttacccaggaccatatctatttata

SEQ ID NO: 1012551 - DNA, 33 bp, Homo sapien
gaatatttaagtgagacgatttttctgataatt

SEQ ID NO: 1012552 - DNA, 33 bp, Homo sapien
gaatatttaagtgagatgatttttctgataatt

SEQ ID NO: 1012553 - DNA, 33 bp, Homo sapien
gcattacaaggagccaaaaaaagttgttccaca

SEQ ID NO: 1012554 - DNA, 33 bp, Homo sapien
gcattacaaggagccagaaaaagttgttccaca

SEQ ID NO: 1012555 - DNA, 33 bp, Homo sapien
tagaaaatgatccagcaatagatggggatagaa

SEQ ID NO: 1012556 - DNA, 33 bp, Homo sapien
tagaaaatgatccagcgatagatggggatagaa

SEQ ID NO: 1012557 - DNA, 33 bp, Homo sapien
tcattttaatgattaaacttcaacatactaact

SEQ ID NO: 1012558 - DNA, 33 bp, Homo sapien
tcattttaatgattaatcttcaacatactaact

SEQ ID NO: 1012559 - DNA, 33 bp, Homo sapien
caagataaatggatgaaggaagttcacttcttt

SEQ ID NO: 1012560 - DNA, 33 bp, Homo sapien
caagataaatggatgagggaagttcacttcttt

SEQ ID NO: 1012561 - DNA, 33 bp, Homo sapien
tgttgttcaaatttcacatataaccaatgtaag

SEQ ID NO: 1012562 - DNA, 33 bp, Homo sapien
tgttgttcaaatttcatatataaccaatgtaag

SEQ ID NO: 1012563 - DNA, 33 bp, Homo sapien
gaagttgcaaaaagtacctggcatttaggaaat

SEQ ID NO: 1012564 - DNA, 33 bp, Homo sapien
gaagttgcaaaaagtagctggcatttaggaaat

SEQ ID NO: 1012565 - DNA, 33 bp, Homo sapien
ttcatttcactgatacacaattttgacaagatt

SEQ ID NO: 1012566 - DNA, 33 bp, Homo sapien
ttcatttcactgatacccaattttgacaagatt

SEQ ID NO: 1012567 - DNA, 33 bp, Homo sapien
aatgtttccaaaggagaccaattcgatgaatta

SEQ ID NO: 1012568 - DNA, 33 bp, Homo sapien
aatgtttccaaaggagcccaattcgatgaatta

SEQ ID NO: 1012569 - DNA, 33 bp, Homo sapien
tgtatagggttttataccacagtgagtcaggtt

SEQ ID NO: 1012570 - DNA, 33 bp, Homo sapien
tgtatagggttttatatcacagtgagtcaggtt

SEQ ID NO: 1012571 - DNA, 33 bp, Homo sapien
ttcctttttatttactaagatggaatgaatgcc

SEQ ID NO: 1012572 - DNA, 33 bp, Homo sapien
ttcctttttatttacttagatggaatgaatgcc

SEQ ID NO: 1012573 - DNA, 33 bp, Homo sapien
gccaatagattagctgaaaattcataactatta

SEQ ID NO: 1012574 - DNA, 33 bp, Homo sapien
gccaatagattagctggaaattcataactatta

SEQ ID NO: 1012575 - DNA, 33 bp, Homo sapien
agttaacacagcatcacctaacaagactaatta

SEQ ID NO: 1012576 - DNA, 33 bp, Homo sapien
agttaacacagcatcatctaacaagactaatta

SEQ ID NO: 1012577 - DNA, 33 bp, Homo sapien
aaggagagagtgaaaacgtcaaaatcttttaat

SEQ ID NO: 1012578 - DNA, 33 bp, Homo sapien
aaggagagagtgaaaatgtcaaaatcttttaat

SEQ ID NO: 1012579 - DNA, 33 bp, Homo sapien
tcagggagccagcagacgtatcaaaacaaagtc

SEQ ID NO: 1012580 - DNA, 33 bp, Homo sapien
tcagggagccagcagatgtatcaaaacaaagtc

SEQ ID NO: 1012581 - DNA, 33 bp, Homo sapien
gacagaaataagatgtaaaaattctgtatgcta

SEQ ID NO: 1012582 - DNA, 33 bp, Homo sapien
gacagaaataagatgtgaaaattctgtatgcta

SEQ ID NO: 1012583 - DNA, 33 bp, Homo sapien
ttatagatgttgctaactggatccaaacgggtt

SEQ ID NO: 1012584 - DNA, 33 bp, Homo sapien
ttatagatgttgctaattggatccaaacgggtt

SEQ ID NO: 1012585 - DNA, 33 bp, Homo sapien
attattctattaggctaaaaagaaatcaattat

SEQ ID NO: 1012586 - DNA, 33 bp, Homo sapien
attattctattaggcttaaaagaaatcaattat

SEQ ID NO: 1012587 - DNA, 33 bp, Homo sapien
tcttggctgcagaaaaggtggcatctttcataa

SEQ ID NO: 1012588 - DNA, 33 bp, Homo sapien
tcttggctgcagaaaatgtggcatctttcataa

SEQ ID NO: 1012589 - DNA, 33 bp, Homo sapien
gtttgttttctgatgacagaggtagttcaaaga

SEQ ID NO: 1012590 - DNA, 33 bp, Homo sapien
gtttgttttctgatgatagaggtagttcaaaga

SEQ ID NO: 1012591 - DNA, 33 bp, Homo sapien
aggagctcagtaatcaagtatagagacaatatg

SEQ ID NO: 1012592 - DNA, 33 bp, Homo sapien
aggagctcagtaatcatgtatagagacaatatg

SEQ ID NO: 1012593 - DNA, 33 bp, Homo sapien
ctactaggtcagagaaattagtctctatcataa

SEQ ID NO: 1012594 - DNA, 33 bp, Homo sapien
ctactaggtcagagaagttagtctctatcataa

SEQ ID NO: 1012595 - DNA, 33 bp, Homo sapien
atctaatccagcagaaatcctgtcagctttgtg

SEQ ID NO: 1012596 - DNA, 33 bp, Homo sapien
atctaatccagcagaactcctgtcagctttgtg

SEQ ID NO: 1012597 - DNA, 33 bp, Homo sapien
tgactcttcactgtggaaccatcaaaaattcct

SEQ ID NO: 1012598 - DNA, 33 bp, Homo sapien
tgactcttcactgtgggaccatcaaaaattcct

SEQ ID NO: 1012599 - DNA, 33 bp, Homo sapien
gaacagccaaacaaaggccaaactaggaacata

SEQ ID NO: 1012600 - DNA, 33 bp, Homo sapien
gaacagccaaacaaagtccaaactaggaacata

SEQ ID NO: 1012601 - DNA, 33 bp, Homo sapien
actcaagatgaaagaaagacttaaacatcagac

SEQ ID NO: 1012602 - DNA, 33 bp, Homo sapien
actcaagatgaaagaaggacttaaacatcagac

SEQ ID NO: 1012603 - DNA, 33 bp, Homo sapien; identical to SEQ ID NO: 1012601

SEQ ID NO: 1012604 - DNA, 33 bp, Homo sapien; identical to SEQ ID NO: 1012602

SEQ ID NO: 1012605 - DNA, 33 bp, Homo sapien
tcacttctatttgacaatgcgaaagagaattaa

SEQ ID NO: 1012606 - DNA, 33 bp, Homo sapien
tcacttctatttgacagtgcgaaagagaattaa

SEQ ID NO: 1012607 - DNA, 33 bp, Homo sapien
gagctgcccaaagccaaaaaactcaaagtaagc

SEQ ID NO: 1012608 - DNA, 33 bp, Homo sapien
gagctgcccaaagccagaaaactcaaagtaagc

SEQ ID NO: 1012609 - DNA, 33 bp, Homo sapien
tgtttaaatgttagctcaatggttaaagtttgc

SEQ ID NO: 1012610 - DNA, 33 bp, Homo sapien
tgtttaaatgttagctgaatggttaaagtttgc

SEQ ID NO: 1012611 - DNA, 33 bp, Homo sapien
ccatgtagttgagttgaacattctggtctcaac

SEQ ID NO: 1012612 - DNA, 33 bp, Homo sapien
ccatgtagttgagttggacattctggtctcaac

SEQ ID NO: 1012613 - DNA, 33 bp, Homo sapien
actaaggggactgagacaagtcacacccattgt

SEQ ID NO: 1012614 - DNA, 33 bp, Homo sapien
actaaggggactgagagaagtcacacccattgt

SEQ ID NO: 1012615 - DNA, 33 bp, Homo sapien
caccctgaagtgtgccaatcaagtgttacatat

SEQ ID NO: 1012616 - DNA, 33 bp, Homo sapien
caccctgaagtgtgcctatcaagtgttacatat

SEQ ID NO: 1012617 - DNA, 33 bp, Homo sapien
caaagaaattggcaaaactgacactaccaaaga

SEQ ID NO: 1012618 - DNA, 33 bp, Homo sapien
caaagaaattggcaaagctgacactaccaaaga

SEQ ID NO: 1012619 - DNA, 33 bp, Homo sapien
cagaacacacctgatgcagattatgtttttaac

SEQ ID NO: 1012620 - DNA, 33 bp, Homo sapien
cagaacacacctgatgtagattatgtttttaac

SEQ ID NO: 1012621 - DNA, 33 bp, Homo sapien
tagaactcagtgaatacctttattacaacaaga

SEQ ID NO: 1012622 - DNA, 33 bp, Homo sapien
tagaactcagtgaatagctttattacaacaaga

SEQ ID NO: 1012623 - DNA, 33 bp, Homo sapien
ctgttcacccaaaagacatatgcctgttatttt

SEQ ID NO: 1012624 - DNA, 33 bp, Homo sapien
ctgttcacccaaaagatatatgcctgttatttt

SEQ ID NO: 1012625 - DNA, 33 bp, Homo sapien
tgaggtgttaggaaaacgactggaattagatca

SEQ ID NO: 1012626 - DNA, 33 bp, Homo sapien
tgaggtgttaggaaaatgactggaattagatca

SEQ ID NO: 1012627 - DNA, 33 bp, Homo sapien
tatataaattagaaaacaaaagcagttctttac

SEQ ID NO: 1012628 - DNA, 33 bp, Homo sapien
tatataaattagaaaagaaaagcagttctttac

SEQ ID NO: 1012629 - DNA, 33 bp, Homo sapien
agctggcattcaagacaccaaagtcctctttgc

SEQ ID NO: 1012630 - DNA, 33 bp, Homo sapien
agctggcattcaagacgccaaagtcctctttgc

SEQ ID NO: 1012631 - DNA, 33 bp, Homo sapien
catggaccattcttaaaatcttaggacccttaa

SEQ ID NO: 1012632 - DNA, 33 bp, Homo sapien
catggaccattcttaatatcttaggacccttaa

SEQ ID NO: 1012633 - DNA, 33 bp, Homo sapien
tttattttttattagacgaaggatggtcttcta

SEQ ID NO: 1012634 - DNA, 33 bp, Homo sapien
tttattttttattagatgaaggatggtcttcta

SEQ ID NO: 1012635 - DNA, 33 bp, Homo sapien
ccaaaatgcctcccaggattctttcattgtcat

SEQ ID NO: 1012636 - DNA, 33 bp, Homo sapien
ccaaaatgcctcccagtattctttcattgtcat

SEQ ID NO: 1012637 - DNA, 33 bp, Homo sapien
tccagtagtaaaaagaccgctggtggtccatcg

SEQ ID NO: 1012638 - DNA, 33 bp, Homo sapien
tccagtagtaaaaagagcgctggtggtccatcg

SEQ ID NO: 1012639 - DNA, 33 bp, Homo sapien
actggaccttagtaaaaacagaatgcttgactt

SEQ ID NO: 1012640 - DNA, 33 bp, Homo sapien
actggaccttagtaaagacagaatgcttgactt

SEQ ID NO: 1012641 - DNA, 33 bp, Homo sapien
gcatattctgcaaaaccgtatgtaaaccatgac

SEQ ID NO: 1012642 - DNA, 33 bp, Homo sapien
gcatattctgcaaaactgtatgtaaaccatgac

SEQ ID NO: 1012643 - DNA, 33 bp, Homo sapien
atcttcttcacaatctaaagggttccctgctca

SEQ ID NO: 1012644 - DNA, 33 bp, Homo sapien
atcttcttcacaatctgaagggttccctgctca

SEQ ID NO: 1012645 - DNA, 33 bp, Homo sapien
ctttaaagatctaaagaagacatttgccatcta

SEQ ID NO: 1012646 - DNA, 33 bp, Homo sapien
ctttaaagatctaaaggagacatttgccatcta

SEQ ID NO: 1012647 - DNA, 33 bp, Homo sapien
ttcacctggaaagctccgacattatttaatcta

SEQ ID NO: 1012648 - DNA, 33 bp, Homo sapien
ttcacctggaaagctctgacattatttaatcta

SEQ ID NO: 1012649 - DNA, 33 bp, Homo sapien
ttttgcttccccttcaacaaacactgcctatgg

SEQ ID NO: 1012650 - DNA, 33 bp, Homo sapien
ttttgcttccccttcaccaaacactgcctatgg

SEQ ID NO: 1012651 - DNA, 33 bp, Homo sapien
aaatgatctagtagaccgtatttccagattgct

SEQ ID NO: 1012652 - DNA, 33 bp, Homo sapien
aaatgatctagtagactgtatttccagattgct

SEQ ID NO: 1012653 - DNA, 33 bp, Homo sapien
gacaaagtgaagtaatcagcccaagtttacaca

SEQ ID NO: 1012654 - DNA, 33 bp, Homo sapien
gacaaagtgaagtaattagcccaagtttacaca

SEQ ID NO: 1012655 - DNA, 33 bp, Homo sapien
gctcaatgaagacttacggcaatgtcagggata

SEQ ID NO: 1012656 - DNA, 33 bp, Homo sapien
gctcaatgaagacttatggcaatgtcagggata

SEQ ID NO: 1012657 - DNA, 33 bp, Homo sapien
tttaagttcacacaaacatctccaattccaatc

SEQ ID NO: 1012658 - DNA, 33 bp, Homo sapien
tttaagttcacacaaatatctccaattccaatc

SEQ ID NO: 1012659 - DNA, 33 bp, Homo sapien
tggaagaagaaacatcaaagcagcgaagcattc

SEQ ID NO: 1012660 - DNA, 33 bp, Homo sapien
tggaagaagaaacatcgaagcagcgaagcattc

SEQ ID NO: 1012661 - DNA, 33 bp, Homo sapien
cctcacctctttagacggaaccaatatacacct

SEQ ID NO: 1012662 - DNA, 33 bp, Homo sapien
cctcacctctttagactgaaccaatatacacct

SEQ ID NO: 1012663 - DNA, 33 bp, Homo sapien
acaaagagagtctgtacgaaaatctaggcattt

SEQ ID NO: 1012664 - DNA, 33 bp, Homo sapien
acaaagagagtctgtatgaaaatctaggcattt

SEQ ID NO: 1012665 - DNA, 33 bp, Homo sapien
gtatgctatcagagtaaattttcaagctcaaac

SEQ ID NO: 1012666 - DNA, 33 bp, Homo sapien
gtatgctatcagagtacattttcaagctcaaac

SEQ ID NO: 1012667 - DNA, 33 bp, Homo sapien
gttgctaaaaattcacaactattgcaagaaaaa

SEQ ID NO: 1012668 - DNA, 33 bp, Homo sapien
gttgctaaaaattcacgactattgcaagaaaaa

SEQ ID NO: 1012669 - DNA, 33 bp, Homo sapien
ggatacatagcttaacagtacatggcccatttt

SEQ ID NO: 1012670 - DNA, 33 bp, Homo sapien
ggatacatagcttaaccgtacatggcccatttt

SEQ ID NO: 1012671 - DNA, 33 bp, Homo sapien
aggatgtcataaataccgaaaaggcaaatctac

SEQ ID NO: 1012672 - DNA, 33 bp, Homo sapien
aggatgtcataaatactgaaaaggcaaatctac

SEQ ID NO: 1012673 - DNA, 33 bp, Homo sapien
tttacacttaagttcacgtagagcaacaatttc

SEQ ID NO: 1012674 - DNA, 33 bp, Homo sapien
tttacacttaagttcatgtagagcaacaatttc

SEQ ID NO: 1012675 - DNA, 33 bp, Homo sapien
gatggggagaaacatacaaacaccacaagagaa

SEQ ID NO: 1012676 - DNA, 33 bp, Homo sapien
gatggggagaaacatataaacaccacaagagaa

SEQ ID NO: 1012677 - DNA, 33 bp, Homo sapien
tttcacttgaaatgaacgttgaatgatggacag

SEQ ID NO: 1012678 - DNA, 33 bp, Homo sapien
tttcacttgaaatgaatgttgaatgatggacag

SEQ ID NO: 1012679 - DNA, 33 bp, Homo sapien
gcagagttagatctgacagcataaacactaacc

SEQ ID NO: 1012680 - DNA, 33 bp, Homo sapien
gcagagttagatctgagagcataaacactaacc

SEQ ID NO: 1012681 - DNA, 33 bp, Homo sapien
tattttcaggctagacactttagatttagttta

SEQ ID NO: 1012682 - DNA, 33 bp, Homo sapien
tattttcaggctagacgctttagatttagttta

SEQ ID NO: 1012683 - DNA, 33 bp, Homo sapien
tgattgggaggggaaaatagaaagatcttgaaa

SEQ ID NO: 1012684 - DNA, 33 bp, Homo sapien
tgattgggaggggaaagtagaaagatcttgaaa

SEQ ID NO: 1012685 - DNA, 33 bp, Homo sapien
taatgcttgagttataagagttaaacaagtaaa

SEQ ID NO: 1012686 - DNA, 33 bp, Homo sapien
taatgcttgagttatatgagttaaacaagtaaa

SEQ ID NO: 1012687 - DNA, 33 bp, Homo sapien
ttagtgtgatagcatacacagggaagcaaaaca

SEQ ID NO: 1012688 - DNA, 33 bp, Homo sapien
ttagtgtgatagcatagacagggaagcaaaaca

SEQ ID NO: 1012689 - DNA, 33 bp, Homo sapien
ttccttctctggatcaacgaaactgcatggact

SEQ ID NO: 1012690 - DNA, 33 bp, Homo sapien
ttccttctctggatcagcgaaactgcatggact

SEQ ID NO: 1012691 - DNA, 33 bp, Homo sapien
taatgcttcaaaaaccaatgacataattgattt

SEQ ID NO: 1012692 - DNA, 33 bp, Homo sapien
taatgcttcaaaaaccgatgacataattgattt

SEQ ID NO: 1012693 - DNA, 33 bp, Homo sapien
taacgaaaacccactcacactacttttgccaaa

SEQ ID NO: 1012694 - DNA, 33 bp, Homo sapien
taacgaaaacccactcgcactacttttgccaaa

SEQ ID NO: 1012695 - DNA, 33 bp, Homo sapien
gttagttttcaatgtaccctaggatctacgctg

SEQ ID NO: 1012696 - DNA, 33 bp, Homo sapien
gttagttttcaatgtagcctaggatctacgctg

SEQ ID NO: 1012697 - DNA, 33 bp, Homo sapien
tcacacaggtgcttcacaggctgactttgagat

SEQ ID NO: 1012698 - DNA, 33 bp, Homo sapien
tcacacaggtgcttcagaggctgactttgagat

SEQ ID NO: 1012699 - DNA, 33 bp, Homo sapien
caggataagttacatcaaatatcctcatactat

SEQ ID NO: 1012700 - DNA, 33 bp, Homo sapien
caggataagttacatcgaatatcctcatactat

SEQ ID NO: 1012701 - DNA, 33 bp, Homo sapien
catactgtctgatatacaccttaaattgtgcta

SEQ ID NO: 1012702 - DNA, 33 bp, Homo sapien
catactgtctgatatataccttaaattgtgcta

SEQ ID NO: 1012703 - DNA, 33 bp, Homo sapien
atctaaaattcacttaactaaacttccacttta

SEQ ID NO: 1012704 - DNA, 33 bp, Homo sapien
atctaaaattcacttatctaaacttccacttta

SEQ ID NO: 1012705 - DNA, 33 bp, Homo sapien
gaaacctgaattgtgaaacaacatgaaatatct

SEQ ID NO: 1012706 - DNA, 33 bp, Homo sapien
gaaacctgaattgtgacacaacatgaaatatct

SEQ ID NO: 1012707 - DNA, 33 bp, Homo sapien
tgtaagactgtacacaaaactgtcaatggacaa

SEQ ID NO: 1012708 - DNA, 33 bp, Homo sapien
tgtaagactgtacacacaactgtcaatggacaa

SEQ ID NO: 1012709 - DNA, 33 bp, Homo sapien
catactatacttgtcacgctctcactgtatgat

SEQ ID NO: 1012710 - DNA, 33 bp, Homo sapien
catactatacttgtcaggctctcactgtatgat

SEQ ID NO: 1012711 - DNA, 33 bp, Homo sapien
caatctcttgctgaacaaattttgcaaaaccaa

SEQ ID NO: 1012712 - DNA, 33 bp, Homo sapien
caatctcttgctgaaccaattttgcaaaaccaa

SEQ ID NO: 1012713 - DNA, 33 bp, Homo sapien
tccatatgtcagaaaccggaaactacatatctg

SEQ ID NO: 1012714 - DNA, 33 bp, Homo sapien
tccatatgtcagaaactggaaactacatatctg

SEQ ID NO: 1012715 - DNA, 33 bp, Homo sapien
cctccttccagagtgcggagaaaataaaccttt

SEQ ID NO: 1012716 - DNA, 33 bp, Homo sapien
cctccttccagagtgctgagaaaataaaccttt

SEQ ID NO: 1012717 - DNA, 33 bp, Homo sapien
acaatacatttacttactaaacagcaacaacaa

SEQ ID NO: 1012718 - DNA, 33 bp, Homo sapien
acaatacatttacttattaaacagcaacaacaa

SEQ ID NO: 1012719 - DNA, 33 bp, Homo sapien
aagtacgaaaatgcataaaaccccaagtcaaaa

SEQ ID NO: 1012720 - DNA, 33 bp, Homo sapien
aagtacgaaaatgcattaaaccccaagtcaaaa

SEQ ID NO: 1012721 - DNA, 33 bp, Homo sapien
catttcttggccactgaattaacttaatgaaat

SEQ ID NO: 1012722 - DNA, 33 bp, Homo sapien
catttcttggccactgcattaacttaatgaaat

SEQ ID NO: 1012723 - DNA, 33 bp, Homo sapien
ggctccaggtgtgacacagcacattcttagctg

SEQ ID NO: 1012724 - DNA, 33 bp, Homo sapien
ggctccaggtgtgacatagcacattcttagctg

SEQ ID NO: 1012725 - DNA, 33 bp, Homo sapien
atactttctccaaaaaaaatacagtctgtctgt

SEQ ID NO: 1012726 - DNA, 33 bp, Homo sapien
atactttctccaaaaataatacagtctgtctgt

SEQ ID NO: 1012727 - DNA, 33 bp, Homo sapien
aatatatgcagaaaaacgtacagaacaatgatt

SEQ ID NO: 1012728 - DNA, 33 bp, Homo sapien
aatatatgcagaaaaatgtacagaacaatgatt

SEQ ID NO: 1012729 - DNA, 33 bp, Homo sapien
caaaataagctaactgacaaatagcacaacata

SEQ ID NO: 1012730 - DNA, 33 bp, Homo sapien
caaaataagctaactgtcaaatagcacaacata

SEQ ID NO: 1012731 - DNA, 33 bp, Homo sapien
aatgtaaatagctatactactggcaaatctaat

SEQ ID NO: 1012732 - DNA, 33 bp, Homo sapien
aatgtaaatagctatagtactggcaaatctaat

SEQ ID NO: 1012733 - DNA, 33 bp, Homo sapien
tggacatggtggcctaaatctgtcagctttgct

SEQ ID NO: 1012734 - DNA, 33 bp, Homo sapien
tggacatggtggcctacatctgtcagctttgct

SEQ ID NO: 1012735 - DNA, 33 bp, Homo sapien
aaatatcgaaggccagaaaggatgtatgtcagg

SEQ ID NO: 1012736 - DNA, 33 bp, Homo sapien
aaatatcgaaggccaggaaggatgtatgtcagg

SEQ ID NO: 1012737 - DNA, 33 bp, Homo sapien
tataacgtgtaatgtaagtcaaggtatttgggg

SEQ ID NO: 1012738 - DNA, 33 bp, Homo sapien
tataacgtgtaatgtacgtcaaggtatttgggg

SEQ ID NO: 1012739 - DNA, 33 bp, Homo sapien
aagtggggggaactgaaccttctattaccctca

SEQ ID NO: 1012740 - DNA, 33 bp, Homo sapien
aagtggggggaactgagccttctattaccctca

SEQ ID NO: 1012741 - DNA, 33 bp, Homo sapien
atgtatggtacagccagcggacttactgactta

SEQ ID NO: 1012742 - DNA, 33 bp, Homo sapien
atgtatggtacagccatcggacttactgactta

SEQ ID NO: 1012743 - DNA, 33 bp, Homo sapien
ggctttttctaactcactccgtttccaggtaat

SEQ ID NO: 1012744 - DNA, 33 bp, Homo sapien
ggctttttctaactcattccgtttccaggtaat

SEQ ID NO: 1012745 - DNA, 33 bp, Homo sapien
atttcctgacttattcacttctgtatcaccagc

SEQ ID NO: 1012746 - DNA, 33 bp, Homo sapien
atttcctgacttattctcttctgtatcaccagc

SEQ ID NO: 1012747 - DNA, 33 bp, Homo sapien
actgtcacatcccctccgagacttcagggtcat

SEQ ID NO: 1012748 - DNA, 33 bp, Homo sapien
actgtcacatcccctctgagacttcagggtcat

SEQ ID NO: 1012749 - DNA, 33 bp, Homo sapien
ctgcattaaaggttgagttttccttagtgctca

SEQ ID NO: 1012750 - DNA, 33 bp, Homo sapien
ctgcattaaaggttgatttttccttagtgctca

SEQ ID NO: 1012751 - DNA, 33 bp, Homo sapien
ttggatgtcaaaaagaccagacatataatacag

SEQ ID NO: 1012752 - DNA, 33 bp, Homo sapien
ttggatgtcaaaaagatcagacatataatacag

SEQ ID NO: 1012753 - DNA, 33 bp, Homo sapien
ggccatcagaggtcaaccttgccagttcctcag

SEQ ID NO: 1012754 - DNA, 33 bp, Homo sapien
ggccatcagaggtcaagcttgccagttcctcag

SEQ ID NO: 1012755 - DNA, 33 bp, Homo sapien
aaaccatctgtgtctgcagttttctttatggga

SEQ ID NO: 1012756 - DNA, 33 bp, Homo sapien
aaaccatctgtgtctggagttttctttatggga

SEQ ID NO: 1012757 - DNA, 33 bp, Homo sapien
ctgctttatggtaaaaagttgtatcttcagcag

SEQ ID NO: 1012758 - DNA, 33 bp, Homo sapien
ctgctttatggtaaaaggttgtatcttcagcag

SEQ ID NO: 1012759 - DNA, 33 bp, Homo sapien
aatgttaatcgtgattaaaaaataatgctatgg

SEQ ID NO: 1012760 - DNA, 33 bp, Homo sapien
aatgttaatcgtgatttaaaaataatgctatgg

SEQ ID NO: 1012761 - DNA, 33 bp, Homo sapien
ttctgcatgcatgggaaaagttagctccagtcc

SEQ ID NO: 1012762 - DNA, 33 bp, Homo sapien
ttctgcatgcatgggacaagttagctccagtcc

SEQ ID NO: 1012763 - DNA, 33 bp, Homo sapien
ggtaagaagttcagcaaaattttaggatgcaaa

SEQ ID NO: 1012764 - DNA, 33 bp, Homo sapien
ggtaagaagttcagcagaattttaggatgcaaa

SEQ ID NO: 1012765 - DNA, 33 bp, Homo sapien
gggaagataaaatagacgttgttgacattcttt

SEQ ID NO: 1012766 - DNA, 33 bp, Homo sapien
gggaagataaaatagaggttgttgacattcttt

SEQ ID NO: 1012767 - DNA, 33 bp, Homo sapien
aagtctaagaatgaacccaaatggactggacca

SEQ ID NO: 1012768 - DNA, 33 bp, Homo sapien
aagtctaagaatgaacgcaaatggactggacca

SEQ ID NO: 1012769 - DNA, 33 bp, Homo sapien
cctctgtgttcagagagaatacccttactgaat

SEQ ID NO: 1012770 - DNA, 33 bp, Homo sapien
cctctgtgttcagagataatacccttactgaat

SEQ ID NO: 1012771 - DNA, 33 bp, Homo sapien
tttctgaggttatggaacaattctgtcctttga

SEQ ID NO: 1012772 - DNA, 33 bp, Homo sapien
tttctgaggttatggagcaattctgtcctttga

SEQ ID NO: 1012773 - DNA, 33 bp, Homo sapien
gagtgatcacaaagtgcatcttagccagtgttg

SEQ ID NO: 1012774 - DNA, 33 bp, Homo sapien
gagtgatcacaaagtggatcttagccagtgttg

SEQ ID NO: 1012775 - DNA, 33 bp, Homo sapien
cttgataatgctaggaccttgacacactttaac

SEQ ID NO: 1012776 - DNA, 33 bp, Homo sapien
cttgataatgctaggatcttgacacactttaac

SEQ ID NO: 1012777 - DNA, 33 bp, Homo sapien
ttgctaagcacagtagaaaaataaagagcaggt

SEQ ID NO: 1012778 - DNA, 33 bp, Homo sapien
ttgctaagcacagtagcaaaataaagagcaggt

SEQ ID NO: 1012779 - DNA, 33 bp, Homo sapien
gagaacaaacagcacactgagaaaaggaatctc

SEQ ID NO: 1012780 - DNA, 33 bp, Homo sapien
gagaacaaacagcacagtgagaaaaggaatctc

SEQ ID NO: 1012781 - DNA, 33 bp, Homo sapien
aatacagtataagtcaatcacctctccattctg

SEQ ID NO: 1012782 - DNA, 33 bp, Homo sapien
aatacagtataagtcagtcacctctccattctg

SEQ ID NO: 1012783 - DNA, 33 bp, Homo sapien
gctaatcctatcaaacaaacaaagtcatttttt

SEQ ID NO: 1012784 - DNA, 33 bp, Homo sapien
gctaatcctatcaaaccaacaaagtcatttttt

SEQ ID NO: 1012785 - DNA, 33 bp, Homo sapien
ttgaagttaggtagtgcaatgcccctggctttg

SEQ ID NO: 1012786 - DNA, 33 bp, Homo sapien
ttgaagttaggtagtgtaatgcccctggctttg

SEQ ID NO: 1012787 - DNA, 33 bp, Homo sapien
tacagccatctcataactaaattgctaaaaatc

SEQ ID NO: 1012788 - DNA, 33 bp, Homo sapien
tacagccatctcataattaaattgctaaaaatc

SEQ ID NO: 1012789 - DNA, 33 bp, Homo sapien
cagagcaaaaaggaacacagcacatagggaaaa

SEQ ID NO: 1012790 - DNA, 33 bp, Homo sapien
cagagcaaaaaggaacccagcacatagggaaaa

SEQ ID NO: 1012791 - DNA, 33 bp, Homo sapien
tgttgagatttcagaacaggtatgaagatacct

SEQ ID NO: 1012792 - DNA, 33 bp, Homo sapien
tgttgagatttcagaagaggtatgaagatacct

SEQ ID NO: 1012793 - DNA, 33 bp, Homo sapien
gttgaatggcttttcccagaatgtggacaacta

SEQ ID NO: 1012794 - DNA, 33 bp, Homo sapien
gttgaatggcttttcctagaatgtggacaacta

SEQ ID NO: 1012795 - DNA, 33 bp, Homo sapien
accacaggcagtttacagatcatattttcattg

SEQ ID NO: 1012796 - DNA, 33 bp, Homo sapien
accacaggcagtttacggatcatattttcattg

SEQ ID NO: 1012797 - DNA, 33 bp, Homo sapien
ataccttgcttcttgaccacattcatagtttct

SEQ ID NO: 1012798 - DNA, 33 bp, Homo sapien
ataccttgcttcttgatcacattcatagtttct

SEQ ID NO: 1012799 - DNA, 33 bp, Homo sapien
ctacagtttatacacactggacactcaaatata

SEQ ID NO: 1012800 - DNA, 33 bp, Homo sapien
ctacagtttatacacagtggacactcaaatata

SEQ ID NO: 1012801 - DNA, 33 bp, Homo sapien
atcaagaatatacaacagagagaacaccgtctc

SEQ ID NO: 1012802 - DNA, 33 bp, Homo sapien
atcaagaatatacaacggagagaacaccgtctc

SEQ ID NO: 1012803 - DNA, 33 bp, Homo sapien
taccatgacctgagcaaaacacttaaggtccct

SEQ ID NO: 1012804 - DNA, 33 bp, Homo sapien
taccatgacctgagcacaacacttaaggtccct

SEQ ID NO: 1012805 - DNA, 33 bp, Homo sapien
gtgcttatcaagtccactagcctttgatacaag

SEQ ID NO: 1012806 - DNA, 33 bp, Homo sapien
gtgcttatcaagtccattagcctttgatacaag

SEQ ID NO: 1012807 - DNA, 33 bp, Homo sapien
cagcatttagggacaactgaggggcaaacagaa

SEQ ID NO: 1012808 - DNA, 33 bp, Homo sapien
cagcatttagggacaattgaggggcaaacagaa

SEQ ID NO: 1012809 - DNA, 33 bp, Homo sapien
tattcacccatcttcaataagctcaccttttgt

SEQ ID NO: 1012810 - DNA, 33 bp, Homo sapien
tattcacccatcttcagtaagctcaccttttgt

SEQ ID NO: 1012811 - DNA, 33 bp, Homo sapien
tatctctcttttctaaatcaccacaatccattg

SEQ ID NO: 1012812 - DNA, 33 bp, Homo sapien
tatctctcttttctaattcaccacaatccattg

SEQ ID NO: 1012813 - DNA, 33 bp, Homo sapien
cagatgccacaggaaaacattttcttctcttca

SEQ ID NO: 1012814 - DNA, 33 bp, Homo sapien
cagatgccacaggaaagcattttcttctcttca

SEQ ID NO: 1012815 - DNA, 33 bp, Homo sapien
cctcacctgtaaattggaaatggtgatatttac

SEQ ID NO: 1012816 - DNA, 33 bp, Homo sapien
cctcacctgtaaattgtaaatggtgatatttac

SEQ ID NO: 1012817 - DNA, 33 bp, Homo sapien
cctctaaactgccacacaatttcaacaccgtag

SEQ ID NO: 1012818 - DNA, 33 bp, Homo sapien
cctctaaactgccacagaatttcaacaccgtag

SEQ ID NO: 1012819 - DNA, 33 bp, Homo sapien
ttgggaagtgtttagccacaagtattatttgcg

SEQ ID NO: 1012820 - DNA, 33 bp, Homo sapien
ttgggaagtgtttagctacaagtattatttgcg

SEQ ID NO: 1012821 - DNA, 33 bp, Homo sapien
aataaggtaagcaaaactctctgagaaaagcag

SEQ ID NO: 1012822 - DNA, 33 bp, Homo sapien
aataaggtaagcaaaagtctctgagaaaagcag

SEQ ID NO: 1012823 - DNA, 33 bp, Homo sapien
aaacaaaataaaacacaaattgtgacagaaaac

SEQ ID NO: 1012824 - DNA, 33 bp, Homo sapien
aaacaaaataaaacacgaattgtgacagaaaac

SEQ ID NO: 1012825 - DNA, 33 bp, Homo sapien
ttgtctctcttacccactataattcaacctcct

SEQ ID NO: 1012826 - DNA, 33 bp, Homo sapien
ttgtctctcttacccagtataattcaacctcct

SEQ ID NO: 1012827 - DNA, 33 bp, Homo sapien
cacatgtcactatcccacaatgggattcttcct

SEQ ID NO: 1012828 - DNA, 33 bp, Homo sapien
cacatgtcactatcccccaatgggattcttcct

SEQ ID NO: 1012829 - DNA, 33 bp, Homo sapien
tgcaatatatcctgcaaggaatgtatgaatgaa

SEQ ID NO: 1012830 - DNA, 33 bp, Homo sapien
tgcaatatatcctgcagggaatgtatgaatgaa

SEQ ID NO: 1012831 - DNA, 33 bp, Homo sapien
ctcaacaaaggtaccactaaggatagaatatca

SEQ ID NO: 1012832 - DNA, 33 bp, Homo sapien
ctcaacaaaggtaccattaaggatagaatatca

SEQ ID NO: 1012833 - DNA, 33 bp, Homo sapien
tggagtcctccatctacgtctgttagttgtatc

SEQ ID NO: 1012834 - DNA, 33 bp, Homo sapien
tggagtcctccatctatgtctgttagttgtatc

SEQ ID NO: 1012835 - DNA, 33 bp, Homo sapien
agaagcctccccatgacagacacaatgtgagta

SEQ ID NO: 1012836 - DNA, 33 bp, Homo sapien
agaagcctccccatgatagacacaatgtgagta

SEQ ID NO: 1012837 - DNA, 33 bp, Homo sapien
gtctactcaagatggaagaatacaaataatcct

SEQ ID NO: 1012838 - DNA, 33 bp, Homo sapien
gtctactcaagatggatgaatacaaataatcct

SEQ ID NO: 1012839 - DNA, 33 bp, Homo sapien
actgatacagaacacaatgacctttcatttatt

SEQ ID NO: 1012840 - DNA, 33 bp, Homo sapien
actgatacagaacacagtgacctttcatttatt

SEQ ID NO: 1012841 - DNA, 33 bp, Homo sapien
agggaaaaatgactaccgcaaactaaagtcctt

SEQ ID NO: 1012842 - DNA, 33 bp, Homo sapien
agggaaaaatgactactgcaaactaaagtcctt

SEQ ID NO: 1012843 - DNA, 33 bp, Homo sapien
ggccttacagcagtccagagaactaagacctat

SEQ ID NO: 1012844 - DNA, 33 bp, Homo sapien
ggccttacagcagtccggagaactaagacctat

SEQ ID NO: 1012845 - DNA, 33 bp, Homo sapien
ccacctaattgcttgcccatcaccactctcttg

SEQ ID NO: 1012846 - DNA, 33 bp, Homo sapien
ccacctaattgcttgctcatcaccactctcttg

SEQ ID NO: 1012847 - DNA, 33 bp, Homo sapien
atgttaactatggacacaatgctttatattaga

SEQ ID NO: 1012848 - DNA, 33 bp, Homo sapien
atgttaactatggacagaatgctttatattaga

SEQ ID NO: 1012849 - DNA, 33 bp, Homo sapien
tcccacttagtggttcactttcctttgctgtga

SEQ ID NO: 1012850 - DNA, 33 bp, Homo sapien
tcccacttagtggttcgctttcctttgctgtga

SEQ ID NO: 1012851 - DNA, 33 bp, Homo sapien
tttgggtgccagggaagatgatattgatgtaca

SEQ ID NO: 1012852 - DNA, 33 bp, Homo sapien
tttgggtgccagggaatatgatattgatgtaca

SEQ ID NO: 1012853 - DNA, 33 bp, Homo sapien
gaaagatgtgaattgacctatactaggaaactc

SEQ ID NO: 1012854 - DNA, 33 bp, Homo sapien
gaaagatgtgaattgagctatactaggaaactc

SEQ ID NO: 1012855 - DNA, 33 bp, Homo sapien
ctttacctcaaattccacagcagaaaatagcaa

SEQ ID NO: 1012856 - DNA, 33 bp, Homo sapien
ctttacctcaaattccgcagcagaaaatagcaa

SEQ ID NO: 1012857 - DNA, 33 bp, Homo sapien
cagaaaatagcaaaaagaacacgtcctacttac

SEQ ID NO: 1012858 - DNA, 33 bp, Homo sapien
cagaaaatagcaaaaataacacgtcctacttac

SEQ ID NO: 1012859 - DNA, 33 bp, Homo sapien
aactttataggactccaaaagtcaacctttgag

SEQ ID NO: 1012860 - DNA, 33 bp, Homo sapien
aactttataggactccgaaagtcaacctttgag

SEQ ID NO: 1012861 - DNA, 33 bp, Homo sapien
tcccctaactctgaaccctgagcatttctgaaa

SEQ ID NO: 1012862 - DNA, 33 bp, Homo sapien
tcccctaactctgaactctgagcatttctgaaa

SEQ ID NO: 1012863 - DNA, 33 bp, Homo sapien
taaggctcactagatacggctttctttgtattt

SEQ ID NO: 1012864 - DNA, 33 bp, Homo sapien
taaggctcactagatatggctttctttgtattt

SEQ ID NO: 1012865 - DNA, 33 bp, Homo sapien
aggaagccattttatacctggtggataagggtt

SEQ ID NO: 1012866 - DNA, 33 bp, Homo sapien
aggaagccattttatagctggtggataagggtt

SEQ ID NO: 1012867 - DNA, 33 bp, Homo sapien
gaattgtctttatgaaacgacaaagctcagaac

SEQ ID NO: 1012868 - DNA, 33 bp, Homo sapien
gaattgtctttatgaatcgacaaagctcagaac

SEQ ID NO: 1012869 - DNA, 33 bp, Homo sapien
tggtgtggaaggaattcaaagtagagagaggag

SEQ ID NO: 1012870 - DNA, 33 bp, Homo sapien
tggtgtggaaggaattgaaagtagagagaggag

SEQ ID NO: 1012871 - DNA, 33 bp, Homo sapien
agggcatatccttccaatatcattcattatatc

SEQ ID NO: 1012872 - DNA, 33 bp, Homo sapien
agggcatatccttccagtatcattcattatatc

SEQ ID NO: 1012873 - DNA, 33 bp, Homo sapien
aaaagtttgatttcaccatgcctagtatgttta

SEQ ID NO: 1012874 - DNA, 33 bp, Homo sapien
aaaagtttgatttcactatgcctagtatgttta

SEQ ID NO: 1012875 - DNA, 33 bp, Homo sapien
accaggctgatgctatcaaaagggattattagg

SEQ ID NO: 1012876 - DNA, 33 bp, Homo sapien
accaggctgatgctatgaaaagggattattagg

SEQ ID NO: 1012877 - DNA, 33 bp, Homo sapien
tgactcagcacaacaccaagaggcccaggcttg

SEQ ID NO: 1012878 - DNA, 33 bp, Homo sapien
tgactcagcacaacacgaagaggcccaggcttg

SEQ ID NO: 1012879 - DNA, 33 bp, Homo sapien
atcttatctttcttaaccacaacaggaatgagt

SEQ ID NO: 1012880 - DNA, 33 bp, Homo sapien
atcttatctttcttaatcacaacaggaatgagt

SEQ ID NO: 1012881 - DNA, 33 bp, Homo sapien
attcttttggatcaacaaactttttgagtgccc

SEQ ID NO: 1012882 - DNA, 33 bp, Homo sapien
attcttttggatcaaccaactttttgagtgccc

SEQ ID NO: 1012883 - DNA, 33 bp, Homo sapien
tggacactaacattaacatgccccgagttatag

SEQ ID NO: 1012884 - DNA, 33 bp, Homo sapien
tggacactaacattaatatgccccgagttatag

SEQ ID NO: 1012885 - DNA, 33 bp, Homo sapien
tgaatgcagccagagaaactaagccaggattgt

SEQ ID NO: 1012886 - DNA, 33 bp, Homo sapien
tgaatgcagccagagagactaagccaggattgt

SEQ ID NO: 1012887 - DNA, 33 bp, Homo sapien
ctagacagaagaggtacggctcttgattggtta

SEQ ID NO: 1012888 - DNA, 33 bp, Homo sapien
ctagacagaagaggtatggctcttgattggtta

SEQ ID NO: 1012889 - DNA, 33 bp, Homo sapien
agatattttgagatgcactccaagtagaaatat

SEQ ID NO: 1012890 - DNA, 33 bp, Homo sapien
agatattttgagatgcgctccaagtagaaatat

SEQ ID NO: 1012891 - DNA, 33 bp, Homo sapien
ttctttgtcaagattccatgccaaacagtggaa

SEQ ID NO: 1012892 - DNA, 33 bp, Homo sapien
ttctttgtcaagattctatgccaaacagtggaa

SEQ ID NO: 1012893 - DNA, 33 bp, Homo sapien
tctacttctgttttagcaacacagtaacaggca

SEQ ID NO: 1012894 - DNA, 33 bp, Homo sapien
tctacttctgttttagtaacacagtaacaggca

SEQ ID NO: 1012895 - DNA, 33 bp, Homo sapien
tgcatttccttgttcacccaaaagctatattta

SEQ ID NO: 1012896 - DNA, 33 bp, Homo sapien
tgcatttccttgttcatccaaaagctatattta

SEQ ID NO: 1012897 - DNA, 33 bp, Homo sapien
tctctcttacttggggaagggtcagactttttt

SEQ ID NO: 1012898 - DNA, 33 bp, Homo sapien
tctctcttacttgggggagggtcagactttttt

SEQ ID NO: 1012899 - DNA, 33 bp, Homo sapien
aagataaggcaaacataataagcctcaacaaat

SEQ ID NO: 1012900 - DNA, 33 bp, Homo sapien
aagataaggcaaacatcataagcctcaacaaat

SEQ ID NO: 1012901 - DNA, 33 bp, Homo sapien
tccatccaagttattacaaccacttctaataca

SEQ ID NO: 1012902 - DNA, 33 bp, Homo sapien
tccatccaagttattataaccacttctaataca

SEQ ID NO: 1012903 - DNA, 33 bp, Homo sapien
cactggtttcaaccaacggtttcaagaggtaga

SEQ ID NO: 1012904 - DNA, 33 bp, Homo sapien
cactggtttcaaccaatggtttcaagaggtaga

SEQ ID NO: 1012905 - DNA, 33 bp, Homo sapien
ggaaggccaaattaaacctcactgcgatactcc

SEQ ID NO: 1012906 - DNA, 33 bp, Homo sapien
ggaaggccaaattaaagctcactgcgatactcc

SEQ ID NO: 1012907 - DNA, 33 bp, Homo sapien
tatgggtaccactagaccatttattcacacctg

SEQ ID NO: 1012908 - DNA, 33 bp, Homo sapien
tatgggtaccactagagcatttattcacacctg

SEQ ID NO: 1012909 - DNA, 33 bp, Homo sapien
tccacatgaggaagaacagtaacaggcaaagtg

SEQ ID NO: 1012910 - DNA, 33 bp, Homo sapien
tccacatgaggaagaatagtaacaggcaaagtg

SEQ ID NO: 1012911 - DNA, 33 bp, Homo sapien
ggcactggctctgttcaacatataaggaaactg

SEQ ID NO: 1012912 - DNA, 33 bp, Homo sapien
ggcactggctctgttctacatataaggaaactg

SEQ ID NO: 1012913 - DNA, 33 bp, Homo sapien
gattattttctgaataaatattatgccacagtg

SEQ ID NO: 1012914 - DNA, 33 bp, Homo sapien
gattattttctgaatagatattatgccacagtg

SEQ ID NO: 1012915 - DNA, 33 bp, Homo sapien
agcaaaatcatgagcgccatttcttctgttata

SEQ ID NO: 1012916 - DNA, 33 bp, Homo sapien
agcaaaatcatgagcggcatttcttctgttata

SEQ ID NO: 1012917 - DNA, 33 bp, Homo sapien
gtcttatttggaaaatcaacttgggcacatatt

SEQ ID NO: 1012918 - DNA, 33 bp, Homo sapien
gtcttatttggaaaattaacttgggcacatatt

SEQ ID NO: 1012919 - DNA, 33 bp, Homo sapien
tcatcccttccaggcaccatgtagtcttatttg

SEQ ID NO: 1012920 - DNA, 33 bp, Homo sapien
tcatcccttccaggcatcatgtagtcttatttg

SEQ ID NO: 1012921 - DNA, 33 bp, Homo sapien
ttgggggtgattggaaatacttgccatgtgctt

SEQ ID NO: 1012922 - DNA, 33 bp, Homo sapien
ttgggggtgattggaagtacttgccatgtgctt

SEQ ID NO: 1012923 - DNA, 33 bp, Homo sapien
aggtctgaagttaatacggaacaccagcactaa

SEQ ID NO: 1012924 - DNA, 33 bp, Homo sapien
aggtctgaagttaatatggaacaccagcactaa

SEQ ID NO: 1012925 - DNA, 33 bp, Homo sapien
tgtactggctcttgcccacaccttcagctggga

SEQ ID NO: 1012926 - DNA, 33 bp, Homo sapien
tgtactggctcttgcctacaccttcagctggga

SEQ ID NO: 1012927 - DNA, 33 bp, Homo sapien
tgtttgtaaattcaggacagtaaggctatgtct

SEQ ID NO: 1012928 - DNA, 33 bp, Homo sapien
tgtttgtaaattcaggtcagtaaggctatgtct

SEQ ID NO: 1012929 - DNA, 33 bp, Homo sapien
atagagacaataaaaacatcagtgatttccaga

SEQ ID NO: 1012930 - DNA, 33 bp, Homo sapien
atagagacaataaaaagatcagtgatttccaga

SEQ ID NO: 1012931 - DNA, 33 bp, Homo sapien
cttacagatacaagaagattgacattggtggac

SEQ ID NO: 1012932 - DNA, 33 bp, Homo sapien
cttacagatacaagaatattgacattggtggac

SEQ ID NO: 1012933 - DNA, 33 bp, Homo sapien
ggatcaggaaagccaacgctgaaaaatttaagc

SEQ ID NO: 1012934 - DNA, 33 bp, Homo sapien
ggatcaggaaagccaatgctgaaaaatttaagc

SEQ ID NO: 1012935 - DNA, 33 bp, Homo sapien
ctgatttaggtgccgcagaggaactggaatgga

SEQ ID NO: 1012936 - DNA, 33 bp, Homo sapien
ctgatttaggtgccgctgaggaactggaatgga

SEQ ID NO: 1012937 - DNA, 33 bp, Homo sapien
ctttctctggattacaagaactcaatctgtata

SEQ ID NO: 1012938 - DNA, 33 bp, Homo sapien
ctttctctggattacaggaactcaatctgtata

SEQ ID NO: 1012939 - DNA, 33 bp, Homo sapien
actgtaggctgtttcaacaaaccttagcaccat

SEQ ID NO: 1012940 - DNA, 33 bp, Homo sapien
actgtaggctgtttcagcaaaccttagcaccat

SEQ ID NO: 1012941 - DNA, 33 bp, Homo sapien
ccttctctgacagccaactttttaaacaagcat

SEQ ID NO: 1012942 - DNA, 33 bp, Homo sapien
ccttctctgacagccagctttttaaacaagcat

SEQ ID NO: 1012943 - DNA, 33 bp, Homo sapien
acaagtgaaattagtccctggagtcagcagcta

SEQ ID NO: 1012944 - DNA, 33 bp, Homo sapien
acaagtgaaattagtctctggagtcagcagcta

SEQ ID NO: 1012945 - DNA, 33 bp, Homo sapien
tgtgagcggccttacacgaatctcagtccatgg

SEQ ID NO: 1012946 - DNA, 33 bp, Homo sapien
tgtgagcggccttacatgaatctcagtccatgg

SEQ ID NO: 1012947 - DNA, 33 bp, Homo sapien
ttcaaactgtagcagaccctttgcaaccaattc

SEQ ID NO: 1012948 - DNA, 33 bp, Homo sapien
ttcaaactgtagcagatcctttgcaaccaattc

SEQ ID NO: 1012949 - DNA, 33 bp, Homo sapien
atcccagccctggaagacatccaaccaaagctg

SEQ ID NO: 1012950 - DNA, 33 bp, Homo sapien
atcccagccctggaagccatccaaccaaagctg

SEQ ID NO: 1012951 - DNA, 33 bp, Homo sapien
ctggactctgttctcaaggtcttgttgttctaa

SEQ ID NO: 1012952 - DNA, 33 bp, Homo sapien
ctggactctgttctcagggtcttgttgttctaa

SEQ ID NO: 1012953 - DNA, 33 bp, Homo sapien
caggttaccttttggcaattaacaccataatat

SEQ ID NO: 1012954 - DNA, 33 bp, Homo sapien
caggttaccttttggctattaacaccataatat

SEQ ID NO: 1012955 - DNA, 33 bp, Homo sapien
gagaggaatgtccctaccaagttctacggaact

SEQ ID NO: 1012956 - DNA, 33 bp, Homo sapien
gagaggaatgtccctagcaagttctacggaact

SEQ ID NO: 1012957 - DNA, 33 bp, Homo sapien
aaacatatttataaaccaaaatgtagcatcacc

SEQ ID NO: 1012958 - DNA, 33 bp, Homo sapien
aaacatatttataaacgaaaatgtagcatcacc

SEQ ID NO: 1012959 - DNA, 33 bp, Homo sapien
caatgccataatttaccagccctgtggtcttga

SEQ ID NO: 1012960 - DNA, 33 bp, Homo sapien
caatgccataatttactagccctgtggtcttga

SEQ ID NO: 1012961 - DNA, 33 bp, Homo sapien
tgctgtattcaaattacgctacaggaagtgtcg

SEQ ID NO: 1012962 - DNA, 33 bp, Homo sapien
tgctgtattcaaattatgctacaggaagtgtcg

SEQ ID NO: 1012963 - DNA, 33 bp, Homo sapien
ttggttggagacctcaatatgcggttctcttct

SEQ ID NO: 1012964 - DNA, 33 bp, Homo sapien
ttggttggagacctcagtatgcggttctcttct

SEQ ID NO: 1012965 - DNA, 33 bp, Homo sapien
gagctcagaaaaggcaacgggtgctctacatgg

SEQ ID NO: 1012966 - DNA, 33 bp, Homo sapien
gagctcagaaaaggcagcgggtgctctacatgg

SEQ ID NO: 1012967 - DNA, 33 bp, Homo sapien
atttattaagatattaagtacatggaaaatgaa

SEQ ID NO: 1012968 - DNA, 33 bp, Homo sapien
atttattaagatattaggtacatggaaaatgaa

SEQ ID NO: 1012969 - DNA, 33 bp, Homo sapien
tatcagggacaaaatagatctgtgtgatgattt

SEQ ID NO: 1012970 - DNA, 33 bp, Homo sapien
tatcagggacaaaatatatctgtgtgatgattt

SEQ ID NO: 1012971 - DNA, 33 bp, Homo sapien
cttctttctccacaaaagcaagcatcaggcagc

SEQ ID NO: 1012972 - DNA, 33 bp, Homo sapien
cttctttctccacaaaggcaagcatcaggcagc

SEQ ID NO: 1012973 - DNA, 33 bp, Homo sapien
atcactcctgactacagaagatcactccctgcc

SEQ ID NO: 1012974 - DNA, 33 bp, Homo sapien
atcactcctgactacataagatcactccctgcc

SEQ ID NO: 1012975 - DNA, 33 bp, Homo sapien
taaagtacaactggtacataacttctgcccttt

SEQ ID NO: 1012976 - DNA, 33 bp, Homo sapien
taaagtacaactggtagataacttctgcccttt

SEQ ID NO: 1012977 - DNA, 33 bp, Homo sapien
acctaagccagtaaaacgtaaaatgagcgattc

SEQ ID NO: 1012978 - DNA, 33 bp, Homo sapien
acctaagccagtaaaatgtaaaatgagcgattc

SEQ ID NO: 1012979 - DNA, 33 bp, Homo sapien
tgtactataactagaaaaaaaactgctttgcaa

SEQ ID NO: 1012980 - DNA, 33 bp, Homo sapien
tgtactataactagaagaaaaactgctttgcaa

SEQ ID NO: 1012981 - DNA, 33 bp, Homo sapien
tgcttaggtaacaaaacgatccatcaattccaa

SEQ ID NO: 1012982 - DNA, 33 bp, Homo sapien
tgcttaggtaacaaaatgatccatcaattccaa

SEQ ID NO: 1012983 - DNA, 33 bp, Homo sapien
ctaaagtcaatcgcaacggtctcaacttttcaa

SEQ ID NO: 1012984 - DNA, 33 bp, Homo sapien
ctaaagtcaatcgcaatggtctcaacttttcaa

SEQ ID NO: 1012985 - DNA, 33 bp, Homo sapien
ttaaatagttcatgtaaaattgttcatacgaaa

SEQ ID NO: 1012986 - DNA, 33 bp, Homo sapien
ttaaatagttcatgtacaattgttcatacgaaa

SEQ ID NO: 1012987 - DNA, 33 bp, Homo sapien
tttttacagaattcaccctgcattttatttgac

SEQ ID NO: 1012988 - DNA, 33 bp, Homo sapien
tttttacagaattcactctgcattttatttgac

SEQ ID NO: 1012989 - DNA, 33 bp, Homo sapien
aagtcaggaattaaaacgtggagaaaaacgtga

SEQ ID NO: 1012990 - DNA, 33 bp, Homo sapien
aagtcaggaattaaaatgtggagaaaaacgtga

SEQ ID NO: 1012991 - DNA, 33 bp, Homo sapien
ccaagtccatgtgaaaaaaaaattctcgttaga

SEQ ID NO: 1012992 - DNA, 33 bp, Homo sapien
ccaagtccatgtgaaacaaaaattctcgttaga

SEQ ID NO: 1012993 - DNA, 33 bp, Homo sapien
tgcccattcccactgccccataaatgctatgtc

SEQ ID NO: 1012994 - DNA, 33 bp, Homo sapien
tgcccattcccactgctccataaatgctatgtc

SEQ ID NO: 1012995 - DNA, 33 bp, Homo sapien
atgtctacctgtctggaagtcaacagtaccact

SEQ ID NO: 1012996 - DNA, 33 bp, Homo sapien
atgtctacctgtctggcagtcaacagtaccact

SEQ ID NO: 1012997 - DNA, 33 bp, Homo sapien
ctgccaaactaaactaccaagcaactaggatcc

SEQ ID NO: 1012998 - DNA, 33 bp, Homo sapien
ctgccaaactaaactatcaagcaactaggatcc

SEQ ID NO: 1012999 - DNA, 33 bp, Homo sapien
cagcacacccaaagctcagacaaagactactga

SEQ ID NO: 1013000 - DNA, 33 bp, Homo sapien
cagcacacccaaagctgagacaaagactactga

SEQ ID NO: 1013001 - DNA, 33 bp, Homo sapien
tgttgattacctctgaataggtagtgccttgca

SEQ ID NO: 1013002 - DNA, 33 bp, Homo sapien
tgttgattacctctgagtaggtagtgccttgca

SEQ ID NO: 1013003 - DNA, 33 bp, Homo sapien
acgaaccacttctaagcagagaagccacatcac

SEQ ID NO: 1013004 - DNA, 33 bp, Homo sapien
acgaaccacttctaagtagagaagccacatcac

SEQ ID NO: 1013005 - DNA, 33 bp, Homo sapien
atcacttgctcaaataccatcaattgtatacat

SEQ ID NO: 1013006 - DNA, 33 bp, Homo sapien
atcacttgctcaaatatcatcaattgtatacat

SEQ ID NO: 1013007 - DNA, 33 bp, Homo sapien
tcaagttttcaactcccgaagacaatcttacct

SEQ ID NO: 1013008 - DNA, 33 bp, Homo sapien
tcaagttttcaactcctgaagacaatcttacct

SEQ ID NO: 1013009 - DNA, 33 bp, Homo sapien
aactagactgcaaacacataccataaattctta

SEQ ID NO: 1013010 - DNA, 33 bp, Homo sapien
aactagactgcaaacagataccataaattctta

SEQ ID NO: 1013011 - DNA, 33 bp, Homo sapien
ggctgaaatcagatccaagaagcaactcagttt

SEQ ID NO: 1013012 - DNA, 33 bp, Homo sapien
ggctgaaatcagatcccagaagcaactcagttt

SEQ ID NO: 1013013 - DNA, 33 bp, Homo sapien
ccttttggtgactttaagcacttacatttctag

SEQ ID NO: 1013014 - DNA, 33 bp, Homo sapien
ccttttggtgactttaggcacttacatttctag

SEQ ID NO: 1013015 - DNA, 33 bp, Homo sapien
ctttggtgtgtgttaacgtctagtgagatgaat

SEQ ID NO: 1013016 - DNA, 33 bp, Homo sapien
ctttggtgtgtgttaatgtctagtgagatgaat

SEQ ID NO: 1013017 - DNA, 33 bp, Homo sapien
tttgcattggctcttacgcactttgttacattt

SEQ ID NO: 1013018 - DNA, 33 bp, Homo sapien
tttgcattggctcttatgcactttgttacattt

SEQ ID NO: 1013019 - DNA, 33 bp, Homo sapien
ttggccaatctaatacagatgctcctgataaac

SEQ ID NO: 1013020 - DNA, 33 bp, Homo sapien
ttggccaatctaatacggatgctcctgataaac

SEQ ID NO: 1013021 - DNA, 33 bp, Homo sapien
ggtattgtcatgcaaaataacagaactcgtata

SEQ ID NO: 1013022 - DNA, 33 bp, Homo sapien
ggtattgtcatgcaaagtaacagaactcgtata

SEQ ID NO: 1013023 - DNA, 33 bp, Homo sapien
gacagaaaacaccgtcccaagctttgcaaatct

SEQ ID NO: 1013024 - DNA, 33 bp, Homo sapien
gacagaaaacaccgtctcaagctttgcaaatct

SEQ ID NO: 1013025 - DNA, 33 bp, Homo sapien
ttacattgtgtctgtaaactcctgttcaagggg

SEQ ID NO: 1013026 - DNA, 33 bp, Homo sapien
ttacattgtgtctgtagactcctgttcaagggg

SEQ ID NO: 1013027 - DNA, 33 bp, Homo sapien
attcagctttaataagcagaacttgagccaagt

SEQ ID NO: 1013028 - DNA, 33 bp, Homo sapien
attcagctttaataaggagaacttgagccaagt

SEQ ID NO: 1013029 - DNA, 33 bp, Homo sapien
tggtataaagctatataagcaggatccaagcta

SEQ ID NO: 1013030 - DNA, 33 bp, Homo sapien
tggtataaagctatatgagcaggatccaagcta

SEQ ID NO: 1013031 - DNA, 33 bp, Homo sapien
attcatatattgttataacccagagataggtgt

SEQ ID NO: 1013032 - DNA, 33 bp, Homo sapien
attcatatattgttattacccagagataggtgt

SEQ ID NO: 1013033 - DNA, 33 bp, Homo sapien
tttttatgagagctacaaaaaacaaaaacttag

SEQ ID NO: 1013034 - DNA, 33 bp, Homo sapien
tttttatgagagctacgaaaaacaaaaacttag

SEQ ID NO: 1013035 - DNA, 33 bp, Homo sapien
ctatacaagcagccaaaaaacttaggaaaaaat

SEQ ID NO: 1013036 - DNA, 33 bp, Homo sapien
ctatacaagcagccaacaaacttaggaaaaaat

SEQ ID NO: 1013037 - DNA, 33 bp, Homo sapien
ggcaaactatgcgtcccgcaaagactaagattc

SEQ ID NO: 1013038 - DNA, 33 bp, Homo sapien
ggcaaactatgcgtcctgcaaagactaagattc

SEQ ID NO: 1013039 - DNA, 33 bp, Homo sapien
attttgatagggattacgttgaacctgtatatc

SEQ ID NO: 1013040 - DNA, 33 bp, Homo sapien
attttgatagggattatgttgaacctgtatatc

SEQ ID NO: 1013041 - DNA, 33 bp, Homo sapien
gtggatttggttaaaaatgcacacacttgaagt

SEQ ID NO: 1013042 - DNA, 33 bp, Homo sapien
gtggatttggttaaaactgcacacacttgaagt

SEQ ID NO: 1013043 - DNA, 33 bp, Homo sapien
atacagacttttccccagatacatttcctaagt

SEQ ID NO: 1013044 - DNA, 33 bp, Homo sapien
atacagacttttccccggatacatttcctaagt

SEQ ID NO: 1013045 - DNA, 33 bp, Homo sapien
ataaccaagtgttggcagaacaaaagtgaaaaa

SEQ ID NO: 1013046 - DNA, 33 bp, Homo sapien
ataaccaagtgttggcggaacaaaagtgaaaaa

SEQ ID NO: 1013047 - DNA, 33 bp, Homo sapien
ttgggatggaaggaaccactttagattaggtgg

SEQ ID NO: 1013048 - DNA, 33 bp, Homo sapien
ttgggatggaaggaactactttagattaggtgg

SEQ ID NO: 1013049 - DNA, 33 bp, Homo sapien
agctgaagaggaagtacggaaaatttcaaagta

SEQ ID NO: 1013050 - DNA, 33 bp, Homo sapien
agctgaagaggaagtatggaaaatttcaaagta

SEQ ID NO: 1013051 - DNA, 33 bp, Homo sapien
aaattgatatgttacacgaagtagtaagcccac

SEQ ID NO: 1013052 - DNA, 33 bp, Homo sapien
aaattgatatgttacatgaagtagtaagcccac

SEQ ID NO: 1013053 - DNA, 33 bp, Homo sapien
ttttcctcaatatatcagaactactgtagtccc

SEQ ID NO: 1013054 - DNA, 33 bp, Homo sapien
ttttcctcaatatatctgaactactgtagtccc

SEQ ID NO: 1013055 - DNA, 33 bp, Homo sapien
aaaccatatcatatcacgttgtccgagtgcttg

SEQ ID NO: 1013056 - DNA, 33 bp, Homo sapien
aaaccatatcatatcatgttgtccgagtgcttg

SEQ ID NO: 1013057 - DNA, 33 bp, Homo sapien
atccaaaacacaggcaataatgaatgctggtga

SEQ ID NO: 1013058 - DNA, 33 bp, Homo sapien
atccaaaacacaggcactaatgaatgctggtga

SEQ ID NO: 1013059 - DNA, 33 bp, Homo sapien
caatttttacacagaacaaaaggaagtgccctt

SEQ ID NO: 1013060 - DNA, 33 bp, Homo sapien
caatttttacacagaagaaaaggaagtgccctt

SEQ ID NO: 1013061 - DNA, 33 bp, Homo sapien
atttatattttaaaagccctgctagcaaaagtt

SEQ ID NO: 1013062 - DNA, 33 bp, Homo sapien
atttatattttaaaagtcctgctagcaaaagtt

SEQ ID NO: 1013063 - DNA, 33 bp, Homo sapien
tgtctatgcccaagtacgtaacaaactgagaaa

SEQ ID NO: 1013064 - DNA, 33 bp, Homo sapien
tgtctatgcccaagtatgtaacaaactgagaaa

SEQ ID NO: 1013065 - DNA, 33 bp, Homo sapien
catgcctcttgattcacgagagtagatgaggcc

SEQ ID NO: 1013066 - DNA, 33 bp, Homo sapien
catgcctcttgattcatgagagtagatgaggcc

SEQ ID NO: 1013067 - DNA, 33 bp, Homo sapien
taatagaggagtggtaagtagtcaagttatccc

SEQ ID NO: 1013068 - DNA, 33 bp, Homo sapien
taatagaggagtggtaggtagtcaagttatccc

SEQ ID NO: 1013069 - DNA, 33 bp, Homo sapien
aaactattgagtctataacaggaaaagaacatt

SEQ ID NO: 1013070 - DNA, 33 bp, Homo sapien
aaactattgagtctatcacaggaaaagaacatt

SEQ ID NO: 1013071 - DNA, 33 bp, Homo sapien
atcacaagcctggataaaaacacagagcaggtc

SEQ ID NO: 1013072 - DNA, 33 bp, Homo sapien
atcacaagcctggatagaaacacagagcaggtc

SEQ ID NO: 1013073 - DNA, 33 bp, Homo sapien
ggtgcctcaaattcaacgtccagactgaactat

SEQ ID NO: 1013074 - DNA, 33 bp, Homo sapien
ggtgcctcaaattcaatgtccagactgaactat

SEQ ID NO: 1013075 - DNA, 33 bp, Homo sapien
agatgactcctgggtaaaatagtagtgccattc

SEQ ID NO: 1013076 - DNA, 33 bp, Homo sapien
agatgactcctgggtagaatagtagtgccattc

SEQ ID NO: 1013077 - DNA, 33 bp, Homo sapien
atacagaggcatagaacattaagatggtaagat

SEQ ID NO: 1013078 - DNA, 33 bp, Homo sapien
atacagaggcatagaatattaagatggtaagat

SEQ ID NO: 1013079 - DNA, 33 bp, Homo sapien
ctccaatgcatcgtgcaactaaggttttcctct

SEQ ID NO: 1013080 - DNA, 33 bp, Homo sapien
ctccaatgcatcgtgcgactaaggttttcctct

SEQ ID NO: 1013081 - DNA, 33 bp, Homo sapien
tatcttaatgttgtcacgcacttggatttgtac

SEQ ID NO: 1013082 - DNA, 33 bp, Homo sapien
tatcttaatgttgtcatgcacttggatttgtac

SEQ ID NO: 1013083 - DNA, 33 bp, Homo sapien
gattgaagatgtgaagaaaaactatgctttaaa

SEQ ID NO: 1013084 - DNA, 33 bp, Homo sapien
gattgaagatgtgaagcaaaactatgctttaaa

SEQ ID NO: 1013085 - DNA, 33 bp, Homo sapien
atttcttaacctcaaaatcatttagaagatact

SEQ ID NO: 1013086 - DNA, 33 bp, Homo sapien
atttcttaacctcaaagtcatttagaagatact

SEQ ID NO: 1013087 - DNA, 33 bp, Homo sapien
tcatttagaagatactcacttgcatggtctctc

SEQ ID NO: 1013088 - DNA, 33 bp, Homo sapien
tcatttagaagatactgacttgcatggtctctc

SEQ ID NO: 1013089 - DNA, 33 bp, Homo sapien
ttccgtactgtgagaaataaatttatgctgctt

SEQ ID NO: 1013090 - DNA, 33 bp, Homo sapien
ttccgtactgtgagaagtaaatttatgctgctt

SEQ ID NO: 1013091 - DNA, 33 bp, Homo sapien
ttcttccaaatggagacgttgaccaatactata

SEQ ID NO: 1013092 - DNA, 33 bp, Homo sapien
ttcttccaaatggagaggttgaccaatactata

SEQ ID NO: 1013093 - DNA, 33 bp, Homo sapien
ttgcttcacttttcaaagttttttagcaccttt

SEQ ID NO: 1013094 - DNA, 33 bp, Homo sapien
ttgcttcacttttcaatgttttttagcaccttt

SEQ ID NO: 1013095 - DNA, 33 bp, Homo sapien
attagctttttttacccccttcagcagaaaaga

SEQ ID NO: 1013096 - DNA, 33 bp, Homo sapien
attagctttttttacctccttcagcagaaaaga

SEQ ID NO: 1013097 - DNA, 33 bp, Homo sapien
gccaggaactgtattacgtcattctctagattt

SEQ ID NO: 1013098 - DNA, 33 bp, Homo sapien
gccaggaactgtattatgtcattctctagattt

SEQ ID NO: 1013099 - DNA, 33 bp, Homo sapien
ggtgcggaaaggaaaaaagagttctctatgtaa

SEQ ID NO: 1013100 - DNA, 33 bp, Homo sapien
ggtgcggaaaggaaaacagagttctctatgtaa

SEQ ID NO: 1013101 - DNA, 33 bp, Homo sapien
atgtacatacatacatcactcccttccttccag

SEQ ID NO: 1013102 - DNA, 33 bp, Homo sapien
atgtacatacatacatgactcccttccttccag

SEQ ID NO: 1013103 - DNA, 33 bp, Homo sapien
ccctctagaagaaccacgtctgaggcaactcat

SEQ ID NO: 1013104 - DNA, 33 bp, Homo sapien
ccctctagaagaaccatgtctgaggcaactcat

SEQ ID NO: 1013105 - DNA, 33 bp, Homo sapien
aaactgataaaagggcacacatcaggagaacgt

SEQ ID NO: 1013106 - DNA, 33 bp, Homo sapien
aaactgataaaagggctcacatcaggagaacgt

SEQ ID NO: 1013107 - DNA, 33 bp, Homo sapien
taattattgaattaaacgctttgccaaataagg

SEQ ID NO: 1013108 - DNA, 33 bp, Homo sapien
taattattgaattaaatgctttgccaaataagg

SEQ ID NO: 1013109 - DNA, 33 bp, Homo sapien
caaatagactgtaaaaaccaggataacgtcctt

SEQ ID NO: 1013110 - DNA, 33 bp, Homo sapien
caaatagactgtaaaagccaggataacgtcctt

SEQ ID NO: 1013111 - DNA, 33 bp, Homo sapien
caggttatttgtcatgcatttctgcctccttgc

SEQ ID NO: 1013112 - DNA, 33 bp, Homo sapien
caggttatttgtcatgtatttctgcctccttgc

SEQ ID NO: 1013113 - DNA, 33 bp, Homo sapien
tctccaattcatgttcacaacccgggcactttt

SEQ ID NO: 1013114 - DNA, 33 bp, Homo sapien
tctccaattcatgttcgcaacccgggcactttt

SEQ ID NO: 1013115 - DNA, 33 bp, Homo sapien
aatttgtgagcaataacgttccccaagtccatg

SEQ ID NO: 1013116 - DNA, 33 bp, Homo sapien
aatttgtgagcaataatgttccccaagtccatg

SEQ ID NO: 1013117 - DNA, 33 bp, Homo sapien
tcgttttctgtttcacaactacattctattccc

SEQ ID NO: 1013118 - DNA, 33 bp, Homo sapien
tcgttttctgtttcactactacattctattccc

SEQ ID NO: 1013119 - DNA, 33 bp, Homo sapien
tttggatcaagagcaaagggaaagttatgatct

SEQ ID NO: 1013120 - DNA, 33 bp, Homo sapien
tttggatcaagagcaacgggaaagttatgatct

SEQ ID NO: 1013121 - DNA, 33 bp, Homo sapien
tacaaagattgtcaaaaacacttctgcttgaaa

SEQ ID NO: 1013122 - DNA, 33 bp, Homo sapien
tacaaagattgtcaaacacacttctgcttgaaa

SEQ ID NO: 1013123 - DNA, 33 bp, Homo sapien
aaggagatgatatttgcaacttcacatgtagga

SEQ ID NO: 1013124 - DNA, 33 bp, Homo sapien
aaggagatgatatttgtaacttcacatgtagga

SEQ ID NO: 1013125 - DNA, 33 bp, Homo sapien
gcctgatgaggcttgaaaattaagtagaggtca

SEQ ID NO: 1013126 - DNA, 33 bp, Homo sapien
gcctgatgaggcttgagaattaagtagaggtca

SEQ ID NO: 1013127 - DNA, 33 bp, Homo sapien
gctctcttatgaaggggatctttgatttcagat

SEQ ID NO: 1013128 - DNA, 33 bp, Homo sapien
gctctcttatgaagggtatctttgatttcagat

SEQ ID NO: 1013129 - DNA, 33 bp, Homo sapien
gccagaagacaatgctaaattataaatgttaat

SEQ ID NO: 1013130 - DNA, 33 bp, Homo sapien
gccagaagacaatgctcaattataaatgttaat

SEQ ID NO: 1013131 - DNA, 33 bp, Homo sapien
gtgaaaagagcttcacaggcagtttaaatccag

SEQ ID NO: 1013132 - DNA, 33 bp, Homo sapien
gtgaaaagagcttcactggcagtttaaatccag

SEQ ID NO: 1013133 - DNA, 33 bp, Homo sapien
aaacctggcttacattaaaaagagctaactcaa

SEQ ID NO: 1013134 - DNA, 33 bp, Homo sapien
aaacctggcttacatttaaaagagctaactcaa

SEQ ID NO: 1013135 - DNA, 33 bp, Homo sapien
tctacacgcagccttaccttctgagtctcttag

SEQ ID NO: 1013136 - DNA, 33 bp, Homo sapien
tctacacgcagccttatcttctgagtctcttag

SEQ ID NO: 1013137 - DNA, 33 bp, Homo sapien
accccatacgcaaactcagaaagctgaactgcc

SEQ ID NO: 1013138 - DNA, 33 bp, Homo sapien
accccatacgcaaactgagaaagctgaactgcc

SEQ ID NO: 1013139 - DNA, 33 bp, Homo sapien
gtagtatagctaggtgaaaatatcaagaaaata

SEQ ID NO: 1013140 - DNA, 33 bp, Homo sapien
gtagtatagctaggtggaaatatcaagaaaata

SEQ ID NO: 1013141 - DNA, 33 bp, Homo sapien
tccttgtgggagtggaaccacctcttgttctcc

SEQ ID NO: 1013142 - DNA, 33 bp, Homo sapien
tccttgtgggagtggagccacctcttgttctcc

SEQ ID NO: 1013143 - DNA, 33 bp, Homo sapien
cccactctcatacatccatgttcttaccttagt

SEQ ID NO: 1013144 - DNA, 33 bp, Homo sapien
cccactctcatacatctatgttcttaccttagt

SEQ ID NO: 1013145 - DNA, 33 bp, Homo sapien
aatagtacactgaacaactaaatttacttagta

SEQ ID NO: 1013146 - DNA, 33 bp, Homo sapien
aatagtacactgaacatctaaatttacttagta

SEQ ID NO: 1013147 - DNA, 33 bp, Homo sapien
cctgttcttatgcacaataaacttgtacctttt

SEQ ID NO: 1013148 - DNA, 33 bp, Homo sapien
cctgttcttatgcacagtaaacttgtacctttt

SEQ ID NO: 1013149 - DNA, 33 bp, Homo sapien
caaggcctgaatcaaagctcagagacttgaagc

SEQ ID NO: 1013150 - DNA, 33 bp, Homo sapien
caaggcctgaatcaaatctcagagacttgaagc

SEQ ID NO: 1013151 - DNA, 33 bp, Homo sapien
atttgaaactatccaaatgaatgaagcttctat

SEQ ID NO: 1013152 - DNA, 33 bp, Homo sapien
atttgaaactatccaagtgaatgaagcttctat

SEQ ID NO: 1013153 - DNA, 33 bp, Homo sapien
tcagcaggttccaagaaaggtgaaatacaaaag

SEQ ID NO: 1013154 - DNA, 33 bp, Homo sapien
tcagcaggttccaagagaggtgaaatacaaaag

SEQ ID NO: 1013155 - DNA, 33 bp, Homo sapien
atcagatgctaggagtcaataaattgcttggaa

SEQ ID NO: 1013156 - DNA, 33 bp, Homo sapien
atcagatgctaggagtgaataaattgcttggaa

SEQ ID NO: 1013157 - DNA, 33 bp, Homo sapien
acatctctggtaagaaccaaaggcaaaattgaa

SEQ ID NO: 1013158 - DNA, 33 bp, Homo sapien
acatctctggtaagaatcaaaggcaaaattgaa

SEQ ID NO: 1013159 - DNA, 33 bp, Homo sapien
atacttaatatctctcaacctcagtttgttcat

SEQ ID NO: 1013160 - DNA, 33 bp, Homo sapien
atacttaatatctctccacctcagtttgttcat

SEQ ID NO: 1013161 - DNA, 33 bp, Homo sapien
agaactgttggaaaataatggaaatctatggac

SEQ ID NO: 1013162 - DNA, 33 bp, Homo sapien
agaactgttggaaaatgatggaaatctatggac

SEQ ID NO: 1013163 - DNA, 33 bp, Homo sapien
cctacaagagttaacaatggcacttaaataagt

SEQ ID NO: 1013164 - DNA, 33 bp, Homo sapien
cctacaagagttaacagtggcacttaaataagt

SEQ ID NO: 1013165 - DNA, 33 bp, Homo sapien
ctccatatcttgggaaggtaaccacagagaata

SEQ ID NO: 1013166 - DNA, 33 bp, Homo sapien
ctccatatcttgggaatgtaaccacagagaata

SEQ ID NO: 1013167 - DNA, 33 bp, Homo sapien
ccacagttctgtcttaaatccttctcctatgaa

SEQ ID NO: 1013168 - DNA, 33 bp, Homo sapien
ccacagttctgtcttagatccttctcctatgaa

SEQ ID NO: 1013169 - DNA, 33 bp, Homo sapien
gacaatactaattacaatgacagaaccgagtac

SEQ ID NO: 1013170 - DNA, 33 bp, Homo sapien
gacaatactaattacactgacagaaccgagtac

SEQ ID NO: 1013171 - DNA, 33 bp, Homo sapien
tagcaggagcaaatcaggaaatccaattgaaaa

SEQ ID NO: 1013172 - DNA, 33 bp, Homo sapien
tagcaggagcaaatcatgaaatccaattgaaaa

SEQ ID NO: 1013173 - DNA, 33 bp, Homo sapien
gcactggtgcaggctacctcttctcactgccct

SEQ ID NO: 1013174 - DNA, 33 bp, Homo sapien
gcactggtgcaggctatctcttctcactgccct

SEQ ID NO: 1013175 - DNA, 33 bp, Homo sapien
gaaatatttatctcctcaaaagagagaaggaaa

SEQ ID NO: 1013176 - DNA, 33 bp, Homo sapien
gaaatatttatctcctgaaaagagagaaggaaa

SEQ ID NO: 1013177 - DNA, 33 bp, Homo sapien
tgcaaagtggttcacacagtgaccgtggcaggt

SEQ ID NO: 1013178 - DNA, 33 bp, Homo sapien
tgcaaagtggttcacagagtgaccgtggcaggt

SEQ ID NO: 1013179 - DNA, 33 bp, Homo sapien
atggtcatggcacaaacgaattaatattttcct

SEQ ID NO: 1013180 - DNA, 33 bp, Homo sapien
atggtcatggcacaaatgaattaatattttcct

SEQ ID NO: 1013181 - DNA, 33 bp, Homo sapien
taaatgtacatcaacaatcagacagcttccaga

SEQ ID NO: 1013182 - DNA, 33 bp, Homo sapien
taaatgtacatcaacagtcagacagcttccaga

SEQ ID NO: 1013183 - DNA, 33 bp, Homo sapien
tgtataagcttgcgtaactccactgaaaattgc

SEQ ID NO: 1013184 - DNA, 33 bp, Homo sapien
tgtataagcttgcgtatctccactgaaaattgc

SEQ ID NO: 1013185 - DNA, 33 bp, Homo sapien
gtttctgctgggaaaacggggaagatgattagg

SEQ ID NO: 1013186 - DNA, 33 bp, Homo sapien
gtttctgctgggaaaatggggaagatgattagg

SEQ ID NO: 1013187 - DNA, 33 bp, Homo sapien
atgataataacacctcaaaagaacctaaatatc

SEQ ID NO: 1013188 - DNA, 33 bp, Homo sapien
atgataataacacctcgaaagaacctaaatatc

SEQ ID NO: 1013189 - DNA, 33 bp, Homo sapien
aaaattgtttttccaacttcagtagataatacc

SEQ ID NO: 1013190 - DNA, 33 bp, Homo sapien
aaaattgtttttccaatttcagtagataatacc

SEQ ID NO: 1013191 - DNA, 33 bp, Homo sapien
acttaatgtcgacatagctgttggatgcaataa

SEQ ID NO: 1013192 - DNA, 33 bp, Homo sapien
acttaatgtcgacatatctgttggatgcaataa

SEQ ID NO: 1013193 - DNA, 33 bp, Homo sapien
atatttgtgtgaaatacatccaactttcttaat

SEQ ID NO: 1013194 - DNA, 33 bp, Homo sapien
atatttgtgtgaaatatatccaactttcttaat

SEQ ID NO: 1013195 - DNA, 33 bp, Homo sapien
cacagctcaggttctaccacggactaaggctga

SEQ ID NO: 1013196 - DNA, 33 bp, Homo sapien
cacagctcaggttctatcacggactaaggctga

SEQ ID NO: 1013197 - DNA, 33 bp, Homo sapien
gctcaccacaattaacactcaaagtacaatagt

SEQ ID NO: 1013198 - DNA, 33 bp, Homo sapien
gctcaccacaattaacgctcaaagtacaatagt

SEQ ID NO: 1013199 - DNA, 33 bp, Homo sapien
ccctatatggtttaaacgtttgtggaaatttat

SEQ ID NO: 1013200 - DNA, 33 bp, Homo sapien
ccctatatggtttaaatgtttgtggaaatttat

SEQ ID NO: 1013201 - DNA, 33 bp, Homo sapien
aaatttatcttctcaccgatgaattttaaatgc

SEQ ID NO: 1013202 - DNA, 33 bp, Homo sapien
aaatttatcttctcactgatgaattttaaatgc

SEQ ID NO: 1013203 - DNA, 33 bp, Homo sapien
tctcaagtggtctgccaaactttaggtcctcag

SEQ ID NO: 1013204 - DNA, 33 bp, Homo sapien
tctcaagtggtctgccgaactttaggtcctcag

SEQ ID NO: 1013205 - DNA, 33 bp, Homo sapien
agtgcaaaaggaacgaagaatttggctcctaga

SEQ ID NO: 1013206 - DNA, 33 bp, Homo sapien
agtgcaaaaggaacgatgaatttggctcctaga

SEQ ID NO: 1013207 - DNA, 33 bp, Homo sapien
atgagggaagaaatgcaagttcataatagagtt

SEQ ID NO: 1013208 - DNA, 33 bp, Homo sapien
atgagggaagaaatgcgagttcataatagagtt

SEQ ID NO: 1013209 - DNA, 33 bp, Homo sapien
cagcatttgatgataaaggttagcataaatctg

SEQ ID NO: 1013210 - DNA, 33 bp, Homo sapien
cagcatttgatgataatggttagcataaatctg

SEQ ID NO: 1013211 - DNA, 33 bp, Homo sapien
ggcctaaatatgtgtccagactcatccaatctt

SEQ ID NO: 1013212 - DNA, 33 bp, Homo sapien
ggcctaaatatgtgtcgagactcatccaatctt

SEQ ID NO: 1013213 - DNA, 33 bp, Homo sapien
accagtaaagggccacacacagagataaataac

SEQ ID NO: 1013214 - DNA, 33 bp, Homo sapien
accagtaaagggccacgcacagagataaataac

SEQ ID NO: 1013215 - DNA, 33 bp, Homo sapien
cccctgctgttgccaccggaaaaacatagcata

SEQ ID NO: 1013216 - DNA, 33 bp, Homo sapien
cccctgctgttgccactggaaaaacatagcata

SEQ ID NO: 1013217 - DNA, 33 bp, Homo sapien
ctcctttctagttttccatgatacgacctttat

SEQ ID NO: 1013218 - DNA, 33 bp, Homo sapien
ctcctttctagttttctatgatacgacctttat

SEQ ID NO: 1013219 - DNA, 33 bp, Homo sapien
gactttatatttttcaaatgcattcacttgttc

SEQ ID NO: 1013220 - DNA, 33 bp, Homo sapien
gactttatatttttcagatgcattcacttgttc

SEQ ID NO: 1013221 - DNA, 33 bp, Homo sapien
gcctgtgggaggcaccactatatcactttacag

SEQ ID NO: 1013222 - DNA, 33 bp, Homo sapien
gcctgtgggaggcaccgctatatcactttacag

SEQ ID NO: 1013223 - DNA, 33 bp, Homo sapien
agctcaattttgattacgtggttgaacgattct

SEQ ID NO: 1013224 - DNA, 33 bp, Homo sapien
agctcaattttgattatgtggttgaacgattct

SEQ ID NO: 1013225 - DNA, 33 bp, Homo sapien
agagataactgtttacaatcttctttgagtaaa

SEQ ID NO: 1013226 - DNA, 33 bp, Homo sapien
agagataactgtttacgatcttctttgagtaaa

SEQ ID NO: 1013227 - DNA, 33 bp, Homo sapien
aattctttagccaaaaacagtcacagctgagat

SEQ ID NO: 1013228 - DNA, 33 bp, Homo sapien
aattctttagccaaaagcagtcacagctgagat

SEQ ID NO: 1013229 - DNA, 33 bp, Homo sapien
gtgtgtgtagttaccaagaggcttaagtgaaac

SEQ ID NO: 1013230 - DNA, 33 bp, Homo sapien
gtgtgtgtagttaccatgaggcttaagtgaaac

SEQ ID NO: 1013231 - DNA, 33 bp, Homo sapien
gtttccaggtttgtaaccatgaccacaggtggt

SEQ ID NO: 1013232 - DNA, 33 bp, Homo sapien
gtttccaggtttgtaatcatgaccacaggtggt

SEQ ID NO: 1013233 - DNA, 33 bp, Homo sapien
gagtataggttattcactgaaaaaattatgtgc

SEQ ID NO: 1013234 - DNA, 33 bp, Homo sapien
gagtataggttattcattgaaaaaattatgtgc

SEQ ID NO: 1013235 - DNA, 33 bp, Homo sapien
atactgcattcaatccgcacatactgtcataga

SEQ ID NO: 1013236 - DNA, 33 bp, Homo sapien
atactgcattcaatcctcacatactgtcataga

SEQ ID NO: 1013237 - DNA, 33 bp, Homo sapien
tgaagaaaattatggtaaatgagtttcagtaac

SEQ ID NO: 1013238 - DNA, 33 bp, Homo sapien
tgaagaaaattatggtgaatgagtttcagtaac

SEQ ID NO: 1013239 - DNA, 33 bp, Homo sapien
cccttgaagtctttcaatctagctggaatctca

SEQ ID NO: 1013240 - DNA, 33 bp, Homo sapien
cccttgaagtctttcagtctagctggaatctca

SEQ ID NO: 1013241 - DNA, 33 bp, Homo sapien
gaaagaactcacaaccgccgcaatgaaaacata

SEQ ID NO: 1013242 - DNA, 33 bp, Homo sapien
gaaagaactcacaacctccgcaatgaaaacata

SEQ ID NO: 1013243 - DNA, 33 bp, Homo sapien
ggcaatatctcaagtacgtttgacaccatgctg

SEQ ID NO: 1013244 - DNA, 33 bp, Homo sapien
ggcaatatctcaagtatgtttgacaccatgctg

SEQ ID NO: 1013245 - DNA, 33 bp, Homo sapien
gcaggttggagaaagacagattttgaatcttga

SEQ ID NO: 1013246 - DNA, 33 bp, Homo sapien
gcaggttggagaaagagagattttgaatcttga

SEQ ID NO: 1013247 - DNA, 33 bp, Homo sapien
tgaacctcaaagatgaatatcctcaaactctta

SEQ ID NO: 1013248 - DNA, 33 bp, Homo sapien
tgaacctcaaagatgagtatcctcaaactctta

SEQ ID NO: 1013249 - DNA, 33 bp, Homo sapien
taatacataagcatctgaaagagtaaaggtgga

SEQ ID NO: 1013250 - DNA, 33 bp, Homo sapien
taatacataagcatcttaaagagtaaaggtgga

SEQ ID NO: 1013251 - DNA, 33 bp, Homo sapien
aaactcagaaagaccacgctagctcctaagtac

SEQ ID NO: 1013252 - DNA, 33 bp, Homo sapien
aaactcagaaagaccaggctagctcctaagtac

SEQ ID NO: 1013253 - DNA, 33 bp, Homo sapien
tgttgttgtttttccacagagaactacacaggt

SEQ ID NO: 1013254 - DNA, 33 bp, Homo sapien
tgttgttgtttttccagagagaactacacaggt

SEQ ID NO: 1013255 - DNA, 33 bp, Homo sapien
aaaaattgtatctggaacacatcgataatattt

SEQ ID NO: 1013256 - DNA, 33 bp, Homo sapien
aaaaattgtatctggagcacatcgataatattt

SEQ ID NO: 1013257 - DNA, 33 bp, Homo sapien
gttgttacactagtgccacatgtttgatgttac

SEQ ID NO: 1013258 - DNA, 33 bp, Homo sapien
gttgttacactagtgcgacatgtttgatgttac

SEQ ID NO: 1013259 - DNA, 33 bp, Homo sapien
gttacagacatgggtaaatacacctgttacaaa

SEQ ID NO: 1013260 - DNA, 33 bp, Homo sapien
gttacagacatgggtacatacacctgttacaaa

SEQ ID NO: 1013261 - DNA, 33 bp, Homo sapien
tgttttattactcaataatgtgcaaaatagata

SEQ ID NO: 1013262 - DNA, 33 bp, Homo sapien
tgttttattactcaattatgtgcaaaatagata

SEQ ID NO: 1013263 - DNA, 33 bp, Homo sapien
gttccatagacgaaaactatgcctcgtatttct

SEQ ID NO: 1013264 - DNA, 33 bp, Homo sapien
gttccatagacgaaaagtatgcctcgtatttct

SEQ ID NO: 1013265 - DNA, 33 bp, Homo sapien
tgaaaacagattaatgcaagctctttccttcat

SEQ ID NO: 1013266 - DNA, 33 bp, Homo sapien
tgaaaacagattaatggaagctctttccttcat

SEQ ID NO: 1013267 - DNA, 33 bp, Homo sapien
agggccgttgtctaaaacatctggaaaggatca

SEQ ID NO: 1013268 - DNA, 33 bp, Homo sapien
agggccgttgtctaaagcatctggaaaggatca

SEQ ID NO: 1013269 - DNA, 33 bp, Homo sapien
ctcatagattatttagccagtcctggttatatt

SEQ ID NO: 1013270 - DNA, 33 bp, Homo sapien
ctcatagattatttagtcagtcctggttatatt

SEQ ID NO: 1013271 - DNA, 33 bp, Homo sapien
atttaaaagctaagcaaagtgaagatacaatct

SEQ ID NO: 1013272 - DNA, 33 bp, Homo sapien
atttaaaagctaagcagagtgaagatacaatct

SEQ ID NO: 1013273 - DNA, 33 bp, Homo sapien
agataaagaccagacacaggaaaatgatcttaa

SEQ ID NO: 1013274 - DNA, 33 bp, Homo sapien
agataaagaccagacagaggaaaatgatcttaa

SEQ ID NO: 1013275 - DNA, 33 bp, Homo sapien
ttgagcactatgctccaaagaggtaaaacatat

SEQ ID NO: 1013276 - DNA, 33 bp, Homo sapien
ttgagcactatgctccgaagaggtaaaacatat

SEQ ID NO: 1013277 - DNA, 33 bp, Homo sapien
atctttttataaatcaccaaataagaattttgg

SEQ ID NO: 1013278 - DNA, 33 bp, Homo sapien
atctttttataaatcagcaaataagaattttgg

SEQ ID NO: 1013279 - DNA, 33 bp, Homo sapien
atggtagaaaccgatacatacgtcctcaagaaa

SEQ ID NO: 1013280 - DNA, 33 bp, Homo sapien
atggtagaaaccgatatatacgtcctcaagaaa

SEQ ID NO: 1013281 - DNA, 33 bp, Homo sapien
ttcagcctaaggacacaatacactaggtttgca

SEQ ID NO: 1013282 - DNA, 33 bp, Homo sapien
ttcagcctaaggacaccatacactaggtttgca

SEQ ID NO: 1013283 - DNA, 33 bp, Homo sapien
tttgagtactaagaacagaactaatcgtcaaga

SEQ ID NO: 1013284 - DNA, 33 bp, Homo sapien
tttgagtactaagaaccgaactaatcgtcaaga

SEQ ID NO: 1013285 - DNA, 33 bp, Homo sapien
gattctccatgaggacacttcatttgcagcaca

SEQ ID NO: 1013286 - DNA, 33 bp, Homo sapien
gattctccatgaggacccttcatttgcagcaca

SEQ ID NO: 1013287 - DNA, 33 bp, Homo sapien
tcattagtcaaaaggagcccagattctttcatg

SEQ ID NO: 1013288 - DNA, 33 bp, Homo sapien
tcattagtcaaaaggatcccagattctttcatg

SEQ ID NO: 1013289 - DNA, 33 bp, Homo sapien
ttcatagacttctccactagctctactttgtgg

SEQ ID NO: 1013290 - DNA, 33 bp, Homo sapien
ttcatagacttctccagtagctctactttgtgg

SEQ ID NO: 1013291 - DNA, 33 bp, Homo sapien
tcccttgttccctgaaaatcactattatcctgt

SEQ ID NO: 1013292 - DNA, 33 bp, Homo sapien
tcccttgttccctgaagatcactattatcctgt

SEQ ID NO: 1013293 - DNA, 33 bp, Homo sapien
acgtaaagcctggtgtaaatgtttctgctattt

SEQ ID NO: 1013294 - DNA, 33 bp, Homo sapien
acgtaaagcctggtgtgaatgtttctgctattt

SEQ ID NO: 1013295 - DNA, 33 bp, Homo sapien
tgtccttgaaagtctgcaagaaaattaaggaca

SEQ ID NO: 1013296 - DNA, 33 bp, Homo sapien
tgtccttgaaagtctggaagaaaattaaggaca

SEQ ID NO: 1013297 - DNA, 33 bp, Homo sapien
ctgtggacctaaacgacctctctaccaccatca

SEQ ID NO: 1013298 - DNA, 33 bp, Homo sapien
ctgtggacctaaacgatctctctaccaccatca

SEQ ID NO: 1013299 - DNA, 33 bp, Homo sapien
acaaacctataaccacaaggacaagacataata

SEQ ID NO: 1013300 - DNA, 33 bp, Homo sapien
acaaacctataaccacgaggacaagacataata

SEQ ID NO: 1013301 - DNA, 33 bp, Homo sapien
aactcaagtttccattaaagagagcaaaatagg

SEQ ID NO: 1013302 - DNA, 33 bp, Homo sapien
aactcaagtttccattgaagagagcaaaatagg

SEQ ID NO: 1013303 - DNA, 33 bp, Homo sapien
cctttgttcaaactggaattaaaaatcagaaat

SEQ ID NO: 1013304 - DNA, 33 bp, Homo sapien
cctttgttcaaactgggattaaaaatcagaaat

SEQ ID NO: 1013305 - DNA, 33 bp, Homo sapien
taaataatttaaggtcactgagataactatata

SEQ ID NO: 1013306 - DNA, 33 bp, Homo sapien
taaataatttaaggtcgctgagataactatata

SEQ ID NO: 1013307 - DNA, 33 bp, Homo sapien
tcagagcctcaagaagaaatcaaacttgacaac

SEQ ID NO: 1013308 - DNA, 33 bp, Homo sapien
tcagagcctcaagaaggaatcaaacttgacaac

SEQ ID NO: 1013309 - DNA, 33 bp, Homo sapien
caatcaaatcagtgaactgagatttcaggtttt

SEQ ID NO: 1013310 - DNA, 33 bp, Homo sapien
caatcaaatcagtgaattgagatttcaggtttt

SEQ ID NO: 1013311 - DNA, 33 bp, Homo sapien
ttcattgcttcaactaggtgatctttttttgtc

SEQ ID NO: 1013312 - DNA, 33 bp, Homo sapien
ttcattgcttcaactatgtgatctttttttgtc

SEQ ID NO: 1013313 - DNA, 33 bp, Homo sapien
gtaaaaatcagagtgacgtatgttagctgagaa

SEQ ID NO: 1013314 - DNA, 33 bp, Homo sapien
gtaaaaatcagagtgaggtatgttagctgagaa

SEQ ID NO: 1013315 - DNA, 33 bp, Homo sapien
gatgtgtagcttgtgaatattttccaccattct

SEQ ID NO: 1013316 - DNA, 33 bp, Homo sapien
gatgtgtagcttgtgactattttccaccattct

SEQ ID NO: 1013317 - DNA, 33 bp, Homo sapien
atctctgggtggcctacacactcagtggactgt

SEQ ID NO: 1013318 - DNA, 33 bp, Homo sapien
atctctgggtggcctatacactcagtggactgt

SEQ ID NO: 1013319 - DNA, 33 bp, Homo sapien
agtttcctgtcaggtaaaataggctgcattttt

SEQ ID NO: 1013320 - DNA, 33 bp, Homo sapien
agtttcctgtcaggtacaataggctgcattttt

SEQ ID NO: 1013321 - DNA, 33 bp, Homo sapien
gaacattagcaaagacaacaattgaaaactgac

SEQ ID NO: 1013322 - DNA, 33 bp, Homo sapien
gaacattagcaaagacgacaattgaaaactgac

SEQ ID NO: 1013323 - DNA, 33 bp, Homo sapien
cagaattttgaagttgaaaaatgtaactgtacc

SEQ ID NO: 1013324 - DNA, 33 bp, Homo sapien
cagaattttgaagttggaaaatgtaactgtacc

SEQ ID NO: 1013325 - DNA, 33 bp, Homo sapien
gctctggcttcattaaacatagtcagtttgcga

SEQ ID NO: 1013326 - DNA, 33 bp, Homo sapien
gctctggcttcattaaccatagtcagtttgcga

SEQ ID NO: 1013327 - DNA, 33 bp, Homo sapien
gtgattaaaattagtacgcccagtgcattttat

SEQ ID NO: 1013328 - DNA, 33 bp, Homo sapien
gtgattaaaattagtatgcccagtgcattttat

SEQ ID NO: 1013329 - DNA, 33 bp, Homo sapien
attccagaacaggcaacgttaaagtgatgtgaa

SEQ ID NO: 1013330 - DNA, 33 bp, Homo sapien
attccagaacaggcaatgttaaagtgatgtgaa

SEQ ID NO: 1013331 - DNA, 33 bp, Homo sapien
ggcagatctacagagtaaaatgttaaagggtgt

SEQ ID NO: 1013332 - DNA, 33 bp, Homo sapien
ggcagatctacagagttaaatgttaaagggtgt

SEQ ID NO: 1013333 - DNA, 33 bp, Homo sapien
acctggccagagtagagatttcttgagagaggc

SEQ ID NO: 1013334 - DNA, 33 bp, Homo sapien
acctggccagagtagatatttcttgagagaggc

SEQ ID NO: 1013335 - DNA, 33 bp, Homo sapien
atacagtgtcatcacgcatttgcttgtgtccct

SEQ ID NO: 1013336 - DNA, 33 bp, Homo sapien
atacagtgtcatcacgtatttgcttgtgtccct

SEQ ID NO: 1013337 - DNA, 33 bp, Homo sapien
ttaactagttacacacaaagttagacataaaca

SEQ ID NO: 1013338 - DNA, 33 bp, Homo sapien
ttaactagttacacacgaagttagacataaaca

SEQ ID NO: 1013339 - DNA, 33 bp, Homo sapien
gaatactacacaacaacgaacaggaacaaacta

SEQ ID NO: 1013340 - DNA, 33 bp, Homo sapien
gaatactacacaacaatgaacaggaacaaacta

SEQ ID NO: 1013341 - DNA, 33 bp, Homo sapien
tgcaggaatgcttgagaattcttattgcttcat

SEQ ID NO: 1013342 - DNA, 33 bp, Homo sapien
tgcaggaatgcttgaggattcttattgcttcat

SEQ ID NO: 1013343 - DNA, 33 bp, Homo sapien
atgcttccacttttcacgataattcatagctgt

SEQ ID NO: 1013344 - DNA, 33 bp, Homo sapien
atgcttccacttttcatgataattcatagctgt

SEQ ID NO: 1013345 - DNA, 33 bp, Homo sapien
caggggaaaggcaagacaccacaccagcgctgc

SEQ ID NO: 1013346 - DNA, 33 bp, Homo sapien
caggggaaaggcaagataccacaccagcgctgc

SEQ ID NO: 1013347 - DNA, 33 bp, Homo sapien
aaactccattacagagaaacaataacttttgaa

SEQ ID NO: 1013348 - DNA, 33 bp, Homo sapien
aaactccattacagaggaacaataacttttgaa

SEQ ID NO: 1013349 - DNA, 33 bp, Homo sapien
ccccagacctacgtcaaagagtaccatgtggct

SEQ ID NO: 1013350 - DNA, 33 bp, Homo sapien
ccccagacctacgtcagagagtaccatgtggct

SEQ ID NO: 1013351 - DNA, 33 bp, Homo sapien
agctcttctagttacaaaggcagtgcaccttcc

SEQ ID NO: 1013352 - DNA, 33 bp, Homo sapien
agctcttctagttacacaggcagtgcaccttcc

SEQ ID NO: 1013353 - DNA, 33 bp, Homo sapien
tattcaaggaaatttgaatccgtgctctcaggt

SEQ ID NO: 1013354 - DNA, 33 bp, Homo sapien
tattcaaggaaatttggatccgtgctctcaggt

SEQ ID NO: 1013355 - DNA, 33 bp, Homo sapien
acacaatgacttaagacaccaaaatagacacca

SEQ ID NO: 1013356 - DNA, 33 bp, Homo sapien
acacaatgacttaagagaccaaaatagacacca

SEQ ID NO: 1013357 - DNA, 33 bp, Homo sapien
aattattattaccatactacccgaccactttgt

SEQ ID NO: 1013358 - DNA, 33 bp, Homo sapien
aattattattaccatagtacccgaccactttgt

SEQ ID NO: 1013359 - DNA, 33 bp, Homo sapien
ataaggaagagatcaccggatgaaaatgtctgt

SEQ ID NO: 1013360 - DNA, 33 bp, Homo sapien
ataaggaagagatcactggatgaaaatgtctgt

SEQ ID NO: 1013361 - DNA, 33 bp, Homo sapien
gctgaaacccactacccaagctttgatcttggc

SEQ ID NO: 1013362 - DNA, 33 bp, Homo sapien
gctgaaacccactacctaagctttgatcttggc

SEQ ID NO: 1013363 - DNA, 33 bp, Homo sapien
tgggaagcaggtgaccaacatgatttttgataa

SEQ ID NO: 1013364 - DNA, 33 bp, Homo sapien
tgggaagcaggtgaccgacatgatttttgataa

SEQ ID NO: 1013365 - DNA, 33 bp, Homo sapien
tgcatagacataaatccagggcatatatagact

SEQ ID NO: 1013366 - DNA, 33 bp, Homo sapien
tgcatagacataaatcgagggcatatatagact

SEQ ID NO: 1013367 - DNA, 33 bp, Homo sapien
aaatttaattcctgtccaatcaatgatctgtct

SEQ ID NO: 1013368 - DNA, 33 bp, Homo sapien
aaatttaattcctgtctaatcaatgatctgtct

SEQ ID NO: 1013369 - DNA, 33 bp, Homo sapien
aggatttggtaaaataaagcaattccttcatct

SEQ ID NO: 1013370 - DNA, 33 bp, Homo sapien
aggatttggtaaaatagagcaattccttcatct

SEQ ID NO: 1013371 - DNA, 33 bp, Homo sapien
ggttatacatgagggaaatgaggcatgggaaga

SEQ ID NO: 1013372 - DNA, 33 bp, Homo sapien
ggttatacatgagggagatgaggcatgggaaga

SEQ ID NO: 1013373 - DNA, 33 bp, Homo sapien
acaactgacacttcaacgaaattccttgttttt

SEQ ID NO: 1013374 - DNA, 33 bp, Homo sapien
acaactgacacttcaatgaaattccttgttttt

SEQ ID NO: 1013375 - DNA, 33 bp, Homo sapien
tagtctgttcttcccaataatttgtatatattt

SEQ ID NO: 1013376 - DNA, 33 bp, Homo sapien
tagtctgttcttcccactaatttgtatatattt

SEQ ID NO: 1013377 - DNA, 33 bp, Homo sapien
agatagctagataatacatatacacacagctaa

SEQ ID NO: 1013378 - DNA, 33 bp, Homo sapien
agatagctagataatagatatacacacagctaa

SEQ ID NO: 1013379 - DNA, 33 bp, Homo sapien
gccagtgaccagtatacgtaattgaaaaacgca

SEQ ID NO: 1013380 - DNA, 33 bp, Homo sapien
gccagtgaccagtatatgtaattgaaaaacgca

SEQ ID NO: 1013381 - DNA, 33 bp, Homo sapien
tcatccaacaatacaaaaaatgtagcagggtca

SEQ ID NO: 1013382 - DNA, 33 bp, Homo sapien
tcatccaacaatacaagaaatgtagcagggtca

SEQ ID NO: 1013383 - DNA, 33 bp, Homo sapien
atattcttggacatcaatctatcatcagggtgg

SEQ ID NO: 1013384 - DNA, 33 bp, Homo sapien
atattcttggacatcagtctatcatcagggtgg

SEQ ID NO: 1013385 - DNA, 33 bp, Homo sapien
accattttcagaatcaccaaacaaacaaggaaa

SEQ ID NO: 1013386 - DNA, 33 bp, Homo sapien
accattttcagaatcatcaaacaaacaaggaaa

SEQ ID NO: 1013387 - DNA, 33 bp, Homo sapien
gtgaattcaaagtaaaatatttgcaatgctaat

SEQ ID NO: 1013388 - DNA, 33 bp, Homo sapien
gtgaattcaaagtaaagtatttgcaatgctaat

SEQ ID NO: 1013389 - DNA, 33 bp, Homo sapien
tcagcagacttctccaaaacatttgaaaagcta

SEQ ID NO: 1013390 - DNA, 33 bp, Homo sapien
tcagcagacttctccagaacatttgaaaagcta

SEQ ID NO: 1013391 - DNA, 33 bp, Homo sapien
tgattgctttgattggaatacattttaaataaa

SEQ ID NO: 1013392 - DNA, 33 bp, Homo sapien
tgattgctttgattgggatacattttaaataaa

SEQ ID NO: 1013393 - DNA, 33 bp, Homo sapien
tttgttccttcttacacatgtgagtttactttt

SEQ ID NO: 1013394 - DNA, 33 bp, Homo sapien
tttgttccttcttacatatgtgagtttactttt

SEQ ID NO: 1013395 - DNA, 33 bp, Homo sapien
aactagaaaaaaatggaaaagcctaaatgttat

SEQ ID NO: 1013396 - DNA, 33 bp, Homo sapien
aactagaaaaaaatgggaaagcctaaatgttat

SEQ ID NO: 1013397 - DNA, 33 bp, Homo sapien
catgctaagacaaaaaccctgtatctgttggaa

SEQ ID NO: 1013398 - DNA, 33 bp, Homo sapien
catgctaagacaaaaatcctgtatctgttggaa

SEQ ID NO: 1013399 - DNA, 33 bp, Homo sapien
tcacttgaattttatacgattaatgtgaaagag

SEQ ID NO: 1013400 - DNA, 33 bp, Homo sapien
tcacttgaattttatatgattaatgtgaaagag

SEQ ID NO: 1013401 - DNA, 33 bp, Homo sapien
caaatgatctaaagtccgaagaatccagagcca

SEQ ID NO: 1013402 - DNA, 33 bp, Homo sapien
caaatgatctaaagtctgaagaatccagagcca

SEQ ID NO: 1013403 - DNA, 33 bp, Homo sapien
ctataagggcctgaaacattactttctttgagt

SEQ ID NO: 1013404 - DNA, 33 bp, Homo sapien
ctataagggcctgaaatattactttctttgagt

SEQ ID NO: 1013405 - DNA, 33 bp, Homo sapien
agaggctgtcagtaaacgtggaactgtccacgg

SEQ ID NO: 1013406 - DNA, 33 bp, Homo sapien
agaggctgtcagtaaatgtggaactgtccacgg

SEQ ID NO: 1013407 - DNA, 33 bp, Homo sapien
cttacaatcagatcagaagttcacgggacatct

SEQ ID NO: 1013408 - DNA, 33 bp, Homo sapien
cttacaatcagatcagtagttcacgggacatct

SEQ ID NO: 1013409 - DNA, 33 bp, Homo sapien
ctgtgtcttcacaatacggtagaatcatggata

SEQ ID NO: 1013410 - DNA, 33 bp, Homo sapien
ctgtgtcttcacaatagggtagaatcatggata

SEQ ID NO: 1013411 - DNA, 33 bp, Homo sapien
tgaaacactggtaacacacagatatgcaaaaac

SEQ ID NO: 1013412 - DNA, 33 bp, Homo sapien
tgaaacactggtaacatacagatatgcaaaaac

SEQ ID NO: 1013413 - DNA, 33 bp, Homo sapien
gggacatttttttgcccgaatatgtttaggaag

SEQ ID NO: 1013414 - DNA, 33 bp, Homo sapien
gggacatttttttgcctgaatatgtttaggaag

SEQ ID NO: 1013415 - DNA, 33 bp, Homo sapien
agatgacaacttttgaaactagtacctgctctt

SEQ ID NO: 1013416 - DNA, 33 bp, Homo sapien
agatgacaacttttgagactagtacctgctctt

SEQ ID NO: 1013417 - DNA, 33 bp, Homo sapien
agaaggccttctaatcgatctgaaatatctaag

SEQ ID NO: 1013418 - DNA, 33 bp, Homo sapien
agaaggccttctaatctatctgaaatatctaag

SEQ ID NO: 1013419 - DNA, 33 bp, Homo sapien
tcaaaaaaacatatccagagttttggagctaag

SEQ ID NO: 1013420 - DNA, 33 bp, Homo sapien
tcaaaaaaacatatccggagttttggagctaag

SEQ ID NO: 1013421 - DNA, 33 bp, Homo sapien
aaagatggaccatgaacgctgtaatttctattt

SEQ ID NO: 1013422 - DNA, 33 bp, Homo sapien
aaagatggaccatgaaggctgtaatttctattt

SEQ ID NO: 1013423 - DNA, 33 bp, Homo sapien
tgtgaagctgggtagaaattaaacatggtgatt

SEQ ID NO: 1013424 - DNA, 33 bp, Homo sapien
tgtgaagctgggtagagattaaacatggtgatt

SEQ ID NO: 1013425 - DNA, 33 bp, Homo sapien
cacaggtattacagacaaagctgagtaaagagt

SEQ ID NO: 1013426 - DNA, 33 bp, Homo sapien
cacaggtattacagaccaagctgagtaaagagt

SEQ ID NO: 1013427 - DNA, 33 bp, Homo sapien
aaacgatttaaatttacgtaggcactgtgcaag

SEQ ID NO: 1013428 - DNA, 33 bp, Homo sapien
aaacgatttaaatttatgtaggcactgtgcaag

SEQ ID NO: 1013429 - DNA, 33 bp, Homo sapien
tttatggcattcttaacataaagttccaagtga

SEQ ID NO: 1013430 - DNA, 33 bp, Homo sapien
tttatggcattcttaagataaagttccaagtga

SEQ ID NO: 1013431 - DNA, 33 bp, Homo sapien
cccaactttctgctgccgaggctaagttctagg

SEQ ID NO: 1013432 - DNA, 33 bp, Homo sapien
cccaactttctgctgctgaggctaagttctagg

SEQ ID NO: 1013433 - DNA, 33 bp, Homo sapien
gctttaaattcaccaagagctcagtttataaag

SEQ ID NO: 1013434 - DNA, 33 bp, Homo sapien
gctttaaattcaccaatagctcagtttataaag

SEQ ID NO: 1013435 - DNA, 33 bp, Homo sapien
ttaacttcacttacaaattgcacaatattgtat

SEQ ID NO: 1013436 - DNA, 33 bp, Homo sapien
ttaacttcacttacaagttgcacaatattgtat

SEQ ID NO: 1013437 - DNA, 33 bp, Homo sapien
ataggcaaaaacataaatctgtctgagcataag

SEQ ID NO: 1013438 - DNA, 33 bp, Homo sapien
ataggcaaaaacataattctgtctgagcataag

SEQ ID NO: 1013439 - DNA, 33 bp, Homo sapien
gaactgtgagtcaaataaaccaattttctccat

SEQ ID NO: 1013440 - DNA, 33 bp, Homo sapien
gaactgtgagtcaaatcaaccaattttctccat

SEQ ID NO: 1013441 - DNA, 33 bp, Homo sapien
taactgaatgtggtaaccaaacagaattatttt

SEQ ID NO: 1013442 - DNA, 33 bp, Homo sapien
taactgaatgtggtaatcaaacagaattatttt

SEQ ID NO: 1013443 - DNA, 33 bp, Homo sapien
tgtcctggatcaattacgagcatttatgcctgt

SEQ ID NO: 1013444 - DNA, 33 bp, Homo sapien
tgtcctggatcaattatgagcatttatgcctgt

SEQ ID NO: 1013445 - DNA, 33 bp, Homo sapien
ggaaggtgaagaaaagaacaggcataaatgctc

SEQ ID NO: 1013446 - DNA, 33 bp, Homo sapien
ggaaggtgaagaaaaggacaggcataaatgctc

SEQ ID NO: 1013447 - DNA, 33 bp, Homo sapien
attgatgtaccatacacatcccctttcagtaat

SEQ ID NO: 1013448 - DNA, 33 bp, Homo sapien
attgatgtaccatacagatcccctttcagtaat

SEQ ID NO: 1013449 - DNA, 33 bp, Homo sapien
tatagcagtgatgtgactcaatctgggaaataa

SEQ ID NO: 1013450 - DNA, 33 bp, Homo sapien
tatagcagtgatgtgagtcaatctgggaaataa

SEQ ID NO: 1013451 - DNA, 33 bp, Homo sapien
gcagcagacagaagaaaatgagagccaattgaa

SEQ ID NO: 1013452 - DNA, 33 bp, Homo sapien
gcagcagacagaagaacatgagagccaattgaa

SEQ ID NO: 1013453 - DNA, 33 bp, Homo sapien
catttgctatcctaggcatcttgtgcttcctca

SEQ ID NO: 1013454 - DNA, 33 bp, Homo sapien
catttgctatcctaggtatcttgtgcttcctca

SEQ ID NO: 1013455 - DNA, 33 bp, Homo sapien
tcaatgccttcccacaaggaactggagccacag

SEQ ID NO: 1013456 - DNA, 33 bp, Homo sapien
tcaatgccttcccacatggaactggagccacag

SEQ ID NO: 1013457 - DNA, 33 bp, Homo sapien
aaagaggattaaggaactcagagtttcacatgg

SEQ ID NO: 1013458 - DNA, 33 bp, Homo sapien
aaagaggattaaggaattcagagtttcacatgg

SEQ ID NO: 1013459 - DNA, 33 bp, Homo sapien
agtttagaattattgcacaatccttccctttat

SEQ ID NO: 1013460 - DNA, 33 bp, Homo sapien
agtttagaattattgctcaatccttccctttat

SEQ ID NO: 1013461 - DNA, 33 bp, Homo sapien
acactgtgttccacaacggatattgaactaatt

SEQ ID NO: 1013462 - DNA, 33 bp, Homo sapien
acactgtgttccacaatggatattgaactaatt

SEQ ID NO: 1013463 - DNA, 33 bp, Homo sapien
tcatagagaataataacaacgcagaacatcaaa

SEQ ID NO: 1013464 - DNA, 33 bp, Homo sapien
tcatagagaataataataacgcagaacatcaaa

SEQ ID NO: 1013465 - DNA, 33 bp, Homo sapien
tctagtaagattaggaacaagtcaaggatattc

SEQ ID NO: 1013466 - DNA, 33 bp, Homo sapien
tctagtaagattaggagcaagtcaaggatattc

SEQ ID NO: 1013467 - DNA, 33 bp, Homo sapien
tataatcaatgacctacgatattagtgcttaaa

SEQ ID NO: 1013468 - DNA, 33 bp, Homo sapien
tataatcaatgacctatgatattagtgcttaaa

SEQ ID NO: 1013469 - DNA, 33 bp, Homo sapien
tgttattttggatacagaggcatttctcatctc

SEQ ID NO: 1013470 - DNA, 33 bp, Homo sapien
tgttattttggatacataggcatttctcatctc

SEQ ID NO: 1013471 - DNA, 33 bp, Homo sapien
agtctggtttaaattacatagcctaatgagcac

SEQ ID NO: 1013472 - DNA, 33 bp, Homo sapien
agtctggtttaaattagatagcctaatgagcac

SEQ ID NO: 1013473 - DNA, 33 bp, Homo sapien
atcttcacttacaaacaaacatagtaaaatagc

SEQ ID NO: 1013474 - DNA, 33 bp, Homo sapien
atcttcacttacaaacgaacatagtaaaatagc

SEQ ID NO: 1013475 - DNA, 33 bp, Homo sapien
agtcacagcaatgtaccggtgaaggaaaggcaa

SEQ ID NO: 1013476 - DNA, 33 bp, Homo sapien
agtcacagcaatgtactggtgaaggaaaggcaa

SEQ ID NO: 1013477 - DNA, 33 bp, Homo sapien
gaatgttccaaagttacagcaatgaggatgtaa

SEQ ID NO: 1013478 - DNA, 33 bp, Homo sapien
gaatgttccaaagttatagcaatgaggatgtaa

SEQ ID NO: 1013479 - DNA, 33 bp, Homo sapien
tgaatgaacttgaagacagattaacagaaatta

SEQ ID NO: 1013480 - DNA, 33 bp, Homo sapien
tgaatgaacttgaagatagattaacagaaatta

SEQ ID NO: 1013481 - DNA, 33 bp, Homo sapien
aagagaagcataaacaaagtgtagtgaaagaga

SEQ ID NO: 1013482 - DNA, 33 bp, Homo sapien
aagagaagcataaacacagtgtagtgaaagaga

SEQ ID NO: 1013483 - DNA, 33 bp, Homo sapien
ttacttcggtctaatacctcctcacatatttac

SEQ ID NO: 1013484 - DNA, 33 bp, Homo sapien
ttacttcggtctaatatctcctcacatatttac

SEQ ID NO: 1013485 - DNA, 33 bp, Homo sapien
ggaagtgagattataactgcagtgctttaggac

SEQ ID NO: 1013486 - DNA, 33 bp, Homo sapien
ggaagtgagattataattgcagtgctttaggac

SEQ ID NO: 1013487 - DNA, 33 bp, Homo sapien
aaatatccatgtttccagcaattggattgagct

SEQ ID NO: 1013488 - DNA, 33 bp, Homo sapien
aaatatccatgtttcctgcaattggattgagct

SEQ ID NO: 1013489 - DNA, 33 bp, Homo sapien
aatatacaaacaagtaaataatgcaacagaggt

SEQ ID NO: 1013490 - DNA, 33 bp, Homo sapien
aatatacaaacaagtagataatgcaacagaggt

SEQ ID NO: 1013491 - DNA, 33 bp, Homo sapien
gattatcagacgcagaaaaggtcttcaataaga

SEQ ID NO: 1013492 - DNA, 33 bp, Homo sapien
gattatcagacgcagagaaggtcttcaataaga

SEQ ID NO: 1013493 - DNA, 33 bp, Homo sapien
ccactcacctggattacggcagccggtgagaat

SEQ ID NO: 1013494 - DNA, 33 bp, Homo sapien
ccactcacctggattatggcagccggtgagaat

SEQ ID NO: 1013495 - DNA, 33 bp, Homo sapien
aggcaagaaatgaataaagcacaagaatacaca

SEQ ID NO: 1013496 - DNA, 33 bp, Homo sapien
aggcaagaaatgaatagagcacaagaatacaca

SEQ ID NO: 1013497 - DNA, 33 bp, Homo sapien
cataagtcacaagaataaataagaatttctgag

SEQ ID NO: 1013498 - DNA, 33 bp, Homo sapien
cataagtcacaagaattaataagaatttctgag

SEQ ID NO: 1013499 - DNA, 33 bp, Homo sapien
gagaccatgatattgactaaaacaccaaggtct

SEQ ID NO: 1013500 - DNA, 33 bp, Homo sapien
gagaccatgatattgattaaaacaccaaggtct

SEQ ID NO: 1013501 - DNA, 33 bp, Homo sapien
taccttacctcagccacagtaatgtcaactatc

SEQ ID NO: 1013502 - DNA, 33 bp, Homo sapien
taccttacctcagccatagtaatgtcaactatc

SEQ ID NO: 1013503 - DNA, 33 bp, Homo sapien
ctttcaagttctctgactactactttgtttcca

SEQ ID NO: 1013504 - DNA, 33 bp, Homo sapien
ctttcaagttctctgattactactttgtttcca

SEQ ID NO: 1013505 - DNA, 33 bp, Homo sapien
cttcctcaaatatctgaaattctctacctcaga

SEQ ID NO: 1013506 - DNA, 33 bp, Homo sapien
cttcctcaaatatctggaattctctacctcaga

SEQ ID NO: 1013507 - DNA, 33 bp, Homo sapien
atcttttcagcagcaccctattctctgtaccaa

SEQ ID NO: 1013508 - DNA, 33 bp, Homo sapien
atcttttcagcagcactctattctctgtaccaa

SEQ ID NO: 1013509 - DNA, 33 bp, Homo sapien
gaaaaaccctaacagaagtgtcacaattatgac

SEQ ID NO: 1013510 - DNA, 33 bp, Homo sapien
gaaaaaccctaacagaggtgtcacaattatgac

SEQ ID NO: 1013511 - DNA, 33 bp, Homo sapien
actatatagaagagtccacaaaatcgagagcaa

SEQ ID NO: 1013512 - DNA, 33 bp, Homo sapien
actatatagaagagtctacaaaatcgagagcaa

SEQ ID NO: 1013513 - DNA, 33 bp, Homo sapien
tctagtcaccagaagaatatgtctaggaattga

SEQ ID NO: 1013514 - DNA, 33 bp, Homo sapien
tctagtcaccagaagactatgtctaggaattga

SEQ ID NO: 1013515 - DNA, 33 bp, Homo sapien
ctggtgatcactggtagggtaagtatattcagt

SEQ ID NO: 1013516 - DNA, 33 bp, Homo sapien
ctggtgatcactggtatggtaagtatattcagt

SEQ ID NO: 1013517 - DNA, 33 bp, Homo sapien
aactcccaggtaggacaaacgaggggagaagaa

SEQ ID NO: 1013518 - DNA, 33 bp, Homo sapien
aactcccaggtaggaccaacgaggggagaagaa

SEQ ID NO: 1013519 - DNA, 33 bp, Homo sapien
aaacagattttaccccaatattttatgctggca

SEQ ID NO: 1013520 - DNA, 33 bp, Homo sapien
aaacagattttaccccgatattttatgctggca

SEQ ID NO: 1013521 - DNA, 33 bp, Homo sapien
aattcgaatttgagaacgtctctgctatagcat

SEQ ID NO: 1013522 - DNA, 33 bp, Homo sapien
aattcgaatttgagaatgtctctgctatagcat

SEQ ID NO: 1013523 - DNA, 33 bp, Homo sapien
tttaacattgtggtgaataaaatgacagcacac

SEQ ID NO: 1013524 - DNA, 33 bp, Homo sapien
tttaacattgtggtgattaaaatgacagcacac

SEQ ID NO: 1013525 - DNA, 33 bp, Homo sapien
cacacatatcccagcactctttttggtcagggt

SEQ ID NO: 1013526 - DNA, 33 bp, Homo sapien
cacacatatcccagcattctttttggtcagggt

SEQ ID NO: 1013527 - DNA, 33 bp, Homo sapien
tgctaaataatatttacggagcatatgggcctt

SEQ ID NO: 1013528 - DNA, 33 bp, Homo sapien
tgctaaataatatttatggagcatatgggcctt

SEQ ID NO: 1013529 - DNA, 33 bp, Homo sapien
gcctcagaagtgtgtgcacctttgctgtgtgat

SEQ ID NO: 1013530 - DNA, 33 bp, Homo sapien
gcctcagaagtgtgtgtacctttgctgtgtgat

SEQ ID NO: 1013531 - DNA, 33 bp, Homo sapien
aagtagtgttaaaaaacggagagtaattgacaa

SEQ ID NO: 1013532 - DNA, 33 bp, Homo sapien
aagtagtgttaaaaaatggagagtaattgacaa

SEQ ID NO: 1013533 - DNA, 33 bp, Homo sapien
ctatgtccaactttccgagtaatgccatcacaa

SEQ ID NO: 1013534 - DNA, 33 bp, Homo sapien
ctatgtccaactttcctagtaatgccatcacaa

SEQ ID NO: 1013535 - DNA, 33 bp, Homo sapien
tgttacagttcataaaaatggcacgtctggagt

SEQ ID NO: 1013536 - DNA, 33 bp, Homo sapien
tgttacagttcataaagatggcacgtctggagt

SEQ ID NO: 1013537 - DNA, 33 bp, Homo sapien
cttactacaactgagtcaatgtgatactgacat

SEQ ID NO: 1013538 - DNA, 33 bp, Homo sapien
cttactacaactgagtgaatgtgatactgacat

SEQ ID NO: 1013539 - DNA, 33 bp, Homo sapien
atttgcgtctgagtccaaagaggggccagactc

SEQ ID NO: 1013540 - DNA, 33 bp, Homo sapien
atttgcgtctgagtccgaagaggggccagactc

SEQ ID NO: 1013541 - DNA, 33 bp, Homo sapien
tgcagttattttgtccaagattatgtcattttt

SEQ ID NO: 1013542 - DNA, 33 bp, Homo sapien
tgcagttattttgtcccagattatgtcattttt

SEQ ID NO: 1013543 - DNA, 33 bp, Homo sapien
atgaaagttgaaagaaaacctgctattaaatca

SEQ ID NO: 1013544 - DNA, 33 bp, Homo sapien
atgaaagttgaaagaagacctgctattaaatca

SEQ ID NO: 1013545 - DNA, 33 bp, Homo sapien
cagagctccaaggataacaccgacttctaatta

SEQ ID NO: 1013546 - DNA, 33 bp, Homo sapien
cagagctccaaggataccaccgacttctaatta

SEQ ID NO: 1013547 - DNA, 33 bp, Homo sapien
acagatgatagggctacaatattcatattccac

SEQ ID NO: 1013548 - DNA, 33 bp, Homo sapien
acagatgatagggctataatattcatattccac

SEQ ID NO: 1013549 - DNA, 33 bp, Homo sapien
attcgtcatgaaaatcagatcactacagtctgt

SEQ ID NO: 1013550 - DNA, 33 bp, Homo sapien
attcgtcatgaaaatcggatcactacagtctgt

SEQ ID NO: 1013551 - DNA, 33 bp, Homo sapien
tttactggtattcttaaacaaatggattgcaat

SEQ ID NO: 1013552 - DNA, 33 bp, Homo sapien
tttactggtattcttagacaaatggattgcaat

SEQ ID NO: 1013553 - DNA, 33 bp, Homo sapien
gagtgtctgattgacccagctcattggactatc

SEQ ID NO: 1013554 - DNA, 33 bp, Homo sapien
gagtgtctgattgaccgagctcattggactatc

SEQ ID NO: 1013555 - DNA, 33 bp, Homo sapien
ttgtggaaacttcttcccttgatttctcagaga

SEQ ID NO: 1013556 - DNA, 33 bp, Homo sapien
ttgtggaaacttcttctcttgatttctcagaga

SEQ ID NO: 1013557 - DNA, 33 bp, Homo sapien
gaatgagaagaacaaagcttagagaaacatggc

SEQ ID NO: 1013558 - DNA, 33 bp, Homo sapien
gaatgagaagaacaaatcttagagaaacatggc

SEQ ID NO: 1013559 - DNA, 33 bp, Homo sapien
cagtgtttagcatccaatcaaagaatatcagaa

SEQ ID NO: 1013560 - DNA, 33 bp, Homo sapien
cagtgtttagcatccagtcaaagaatatcagaa

SEQ ID NO: 1013561 - DNA, 33 bp, Homo sapien
ttagcataattcaaagcatgtggtaagcccata

SEQ ID NO: 1013562 - DNA, 33 bp, Homo sapien
ttagcataattcaaagtatgtggtaagcccata

SEQ ID NO: 1013563 - DNA, 33 bp, Homo sapien
agaaggtaagagtacactgacatatgcttaaga

SEQ ID NO: 1013564 - DNA, 33 bp, Homo sapien
agaaggtaagagtacattgacatatgcttaaga

SEQ ID NO: 1013565 - DNA, 33 bp, Homo sapien
caatagagtgaagacacaacctggcgggtagaa

SEQ ID NO: 1013566 - DNA, 33 bp, Homo sapien
caatagagtgaagacagaacctggcgggtagaa

SEQ ID NO: 1013567 - DNA, 33 bp, Homo sapien
gcatatacattttaaaacagaagctgtagcatg

SEQ ID NO: 1013568 - DNA, 33 bp, Homo sapien
gcatatacattttaaatcagaagctgtagcatg

SEQ ID NO: 1013569 - DNA, 33 bp, Homo sapien
ttgtatagatgtggaaatagttggagagaattt

SEQ ID NO: 1013570 - DNA, 33 bp, Homo sapien
ttgtatagatgtggaagtagttggagagaattt

SEQ ID NO: 1013571 - DNA, 33 bp, Homo sapien
atgcagcaatgcatgcacaatggcgacacgtcc

SEQ ID NO: 1013572 - DNA, 33 bp, Homo sapien
atgcagcaatgcatgctcaatggcgacacgtcc

SEQ ID NO: 1013573 - DNA, 33 bp, Homo sapien
ctgagacttcatttcccgactcactaaattaaa

SEQ ID NO: 1013574 - DNA, 33 bp, Homo sapien
ctgagacttcatttcctgactcactaaattaaa

SEQ ID NO: 1013575 - DNA, 33 bp, Homo sapien
caacttccctatttcaatcagttctcctcaggc

SEQ ID NO: 1013576 - DNA, 33 bp, Homo sapien
caacttccctatttcagtcagttctcctcaggc

SEQ ID NO: 1013577 - DNA, 33 bp, Homo sapien
tcagttaaagccataacgattgttcctttaaat

SEQ ID NO: 1013578 - DNA, 33 bp, Homo sapien
tcagttaaagccataatgattgttcctttaaat

SEQ ID NO: 1013579 - DNA, 33 bp, Homo sapien
tgatagctattactaaatcctagagtggatatt

SEQ ID NO: 1013580 - DNA, 33 bp, Homo sapien
tgatagctattactaagtcctagagtggatatt

SEQ ID NO: 1013581 - DNA, 33 bp, Homo sapien
tccttttaacattaagaattatggcaacattta

SEQ ID NO: 1013582 - DNA, 33 bp, Homo sapien
tccttttaacattaagcattatggcaacattta

SEQ ID NO: 1013583 - DNA, 33 bp, Homo sapien
tcttagacctcagtaaacttcttaaataatgat

SEQ ID NO: 1013584 - DNA, 33 bp, Homo sapien
tcttagacctcagtaagcttcttaaataatgat

SEQ ID NO: 1013585 - DNA, 33 bp, Homo sapien
ataagttaatgtaaaaaatatccattcgatatg

SEQ ID NO: 1013586 - DNA, 33 bp, Homo sapien
ataagttaatgtaaaagatatccattcgatatg

SEQ ID NO: 1013587 - DNA, 33 bp, Homo sapien
gttattgagctaaagaagtttcttacactttta

SEQ ID NO: 1013588 - DNA, 33 bp, Homo sapien
gttattgagctaaagacgtttcttacactttta

SEQ ID NO: 1013589 - DNA, 33 bp, Homo sapien
aaaggttatgattcctcacttggcacaatttta

SEQ ID NO: 1013590 - DNA, 33 bp, Homo sapien
aaaggttatgattccttacttggcacaatttta

SEQ ID NO: 1013591 - DNA, 33 bp, Homo sapien
gcacaaaagaaattcagtaagaagctgaagaag

SEQ ID NO: 1013592 - DNA, 33 bp, Homo sapien
gcacaaaagaaattcattaagaagctgaagaag

SEQ ID NO: 1013593 - DNA, 33 bp, Homo sapien
ttgtgactaggacaaagctcatattcaggctat

SEQ ID NO: 1013594 - DNA, 33 bp, Homo sapien
ttgtgactaggacaaatctcatattcaggctat

SEQ ID NO: 1013595 - DNA, 33 bp, Homo sapien
gcagagatcataatcaccctgttaccaatacga

SEQ ID NO: 1013596 - DNA, 33 bp, Homo sapien
gcagagatcataatcatcctgttaccaatacga

SEQ ID NO: 1013597 - DNA, 33 bp, Homo sapien
cctttgtaaaaggaataaagtctcaataaagtc

SEQ ID NO: 1013598 - DNA, 33 bp, Homo sapien
cctttgtaaaaggaattaagtctcaataaagtc

SEQ ID NO: 1013599 - DNA, 33 bp, Homo sapien
aatccacatctcaagacaatatcagactccact

SEQ ID NO: 1013600 - DNA, 33 bp, Homo sapien
aatccacatctcaagataatatcagactccact

SEQ ID NO: 1013601 - DNA, 33 bp, Homo sapien
tggttcctcaaccaacaaagacttagacttttt

SEQ ID NO: 1013602 - DNA, 33 bp, Homo sapien
tggttcctcaaccaacgaagacttagacttttt

SEQ ID NO: 1013603 - DNA, 33 bp, Homo sapien
aggtctgctagtaacaaattacctcagcatttg

SEQ ID NO: 1013604 - DNA, 33 bp, Homo sapien
aggtctgctagtaacagattacctcagcatttg

SEQ ID NO: 1013605 - DNA, 33 bp, Homo sapien
aattgctcaaaaatgtaaactaattaggtgtaa

SEQ ID NO: 1013606 - DNA, 33 bp, Homo sapien
aattgctcaaaaatgtgaactaattaggtgtaa

SEQ ID NO: 1013607 - DNA, 33 bp, Homo sapien
tctgtaaagtttatgaaggtaagacatatgata

SEQ ID NO: 1013608 - DNA, 33 bp, Homo sapien
tctgtaaagtttatgagggtaagacatatgata

SEQ ID NO: 1013609 - DNA, 33 bp, Homo sapien
cactggactccagctgaactctggttccgtacc

SEQ ID NO: 1013610 - DNA, 33 bp, Homo sapien
cactggactccagctgtactctggttccgtacc

SEQ ID NO: 1013611 - DNA, 33 bp, Homo sapien
cagctaaggaggaacacggccttcttgtctcag

SEQ ID NO: 1013612 - DNA, 33 bp, Homo sapien
cagctaaggaggaacatggccttcttgtctcag

SEQ ID NO: 1013613 - DNA, 33 bp, Homo sapien
catatgaaaaatagtagctaccactagggacat

SEQ ID NO: 1013614 - DNA, 33 bp, Homo sapien
catatgaaaaatagtatctaccactagggacat

SEQ ID NO: 1013615 - DNA, 33 bp, Homo sapien
cttcacataagtttgacgctttccttctgatgt

SEQ ID NO: 1013616 - DNA, 33 bp, Homo sapien
cttcacataagtttgatgctttccttctgatgt

SEQ ID NO: 1013617 - DNA, 33 bp, Homo sapien
tatttacagaagcataaaagtcaggcaaatagc

SEQ ID NO: 1013618 - DNA, 33 bp, Homo sapien
tatttacagaagcatagaagtcaggcaaatagc

SEQ ID NO: 1013619 - DNA, 33 bp, Homo sapien
aaatataaggtacaagcctgtgataatgcagca

SEQ ID NO: 1013620 - DNA, 33 bp, Homo sapien
aaatataaggtacaaggctgtgataatgcagca

SEQ ID NO: 1013621 - DNA, 33 bp, Homo sapien
actctaaaagcaagtaccaggctcagaatacga

SEQ ID NO: 1013622 - DNA, 33 bp, Homo sapien
actctaaaagcaagtagcaggctcagaatacga

SEQ ID NO: 1013623 - DNA, 33 bp, Homo sapien
atcattacccttactgcagttatacaaaataac

SEQ ID NO: 1013624 - DNA, 33 bp, Homo sapien
atcattacccttactggagttatacaaaataac

SEQ ID NO: 1013625 - DNA, 33 bp, Homo sapien
tcaatgtcatcttctcacacttctttgtttttg

SEQ ID NO: 1013626 - DNA, 33 bp, Homo sapien
tcaatgtcatcttctcgcacttctttgtttttg

SEQ ID NO: 1013627 - DNA, 33 bp, Homo sapien
tgaagttggctctccacgcaaaaattcaaaaac

SEQ ID NO: 1013628 - DNA, 33 bp, Homo sapien
tgaagttggctctccatgcaaaaattcaaaaac

SEQ ID NO: 1013629 - DNA, 33 bp, Homo sapien
taatagcgtaatagcacctctcaaaacccttct

SEQ ID NO: 1013630 - DNA, 33 bp, Homo sapien
taatagcgtaatagcatctctcaaaacccttct

SEQ ID NO: 1013631 - DNA, 33 bp, Homo sapien
acttctctttatttgacctgactcaaggttcat

SEQ ID NO: 1013632 - DNA, 33 bp, Homo sapien
acttctctttatttgatctgactcaaggttcat

SEQ ID NO: 1013633 - DNA, 33 bp, Homo sapien
tgcctctgacactccagcatttacaacattgcc

SEQ ID NO: 1013634 - DNA, 33 bp, Homo sapien
tgcctctgacactccatcatttacaacattgcc

SEQ ID NO: 1013635 - DNA, 33 bp, Homo sapien
ttcttacctgaaaaaaagttgatatctattcat

SEQ ID NO: 1013636 - DNA, 33 bp, Homo sapien
ttcttacctgaaaaaacgttgatatctattcat

SEQ ID NO: 1013637 - DNA, 33 bp, Homo sapien
ggacagagagaattgacattgtttaaatggcca

SEQ ID NO: 1013638 - DNA, 33 bp, Homo sapien
ggacagagagaattgatattgtttaaatggcca

SEQ ID NO: 1013639 - DNA, 33 bp, Homo sapien
agctatcttgaaaaaaaaagcttcgtgttctat

SEQ ID NO: 1013640 - DNA, 33 bp, Homo sapien
agctatcttgaaaaaacaagcttcgtgttctat

SEQ ID NO: 1013641 - DNA, 33 bp, Homo sapien
atttcaaaacagcagccactgcagccatacaaa

SEQ ID NO: 1013642 - DNA, 33 bp, Homo sapien
atttcaaaacagcagctactgcagccatacaaa

SEQ ID NO: 1013643 - DNA, 33 bp, Homo sapien
atgcaataatcacttagaaatggctgcagggaa

SEQ ID NO: 1013644 - DNA, 33 bp, Homo sapien
atgcaataatcacttataaatggctgcagggaa

SEQ ID NO: 1013645 - DNA, 33 bp, Homo sapien
atatgatcaaactttccctggaatattcctaat

SEQ ID NO: 1013646 - DNA, 33 bp, Homo sapien
atatgatcaaactttctctggaatattcctaat

SEQ ID NO: 1013647 - DNA, 33 bp, Homo sapien
atagattcctgtcctgaacatagaatatggctc

SEQ ID NO: 1013648 - DNA, 33 bp, Homo sapien
atagattcctgtcctgcacatagaatatggctc

SEQ ID NO: 1013649 - DNA, 33 bp, Homo sapien
tcagaaacttagcaaacggcagtaaacatttga

SEQ ID NO: 1013650 - DNA, 33 bp, Homo sapien
tcagaaacttagcaaatggcagtaaacatttga

SEQ ID NO: 1013651 - DNA, 33 bp, Homo sapien
ctaatgctaatgtctcaccctggttttctgtgt

SEQ ID NO: 1013652 - DNA, 33 bp, Homo sapien
ctaatgctaatgtctcgccctggttttctgtgt

SEQ ID NO: 1013653 - DNA, 33 bp, Homo sapien
ttaactggttcattacaggtttttctgcactaa

SEQ ID NO: 1013654 - DNA, 33 bp, Homo sapien
ttaactggttcattacgggtttttctgcactaa

SEQ ID NO: 1013655 - DNA, 33 bp, Homo sapien
tgaacttcagtgaagtaaaaatgtaatatgcag

SEQ ID NO: 1013656 - DNA, 33 bp, Homo sapien
tgaacttcagtgaagtgaaaatgtaatatgcag

SEQ ID NO: 1013657 - DNA, 33 bp, Homo sapien
aggggtgcaggagtaacctattttaatcaacat

SEQ ID NO: 1013658 - DNA, 33 bp, Homo sapien
aggggtgcaggagtaatctattttaatcaacat

SEQ ID NO: 1013659 - DNA, 33 bp, Homo sapien
atgataatgatattgacgccttttcataagctt

SEQ ID NO: 1013660 - DNA, 33 bp, Homo sapien
atgataatgatattgatgccttttcataagctt

SEQ ID NO: 1013661 - DNA, 33 bp, Homo sapien
aacctgttcctttaacactgtaagtcagtttga

SEQ ID NO: 1013662 - DNA, 33 bp, Homo sapien
aacctgttcctttaacgctgtaagtcagtttga

SEQ ID NO: 1013663 - DNA, 33 bp, Homo sapien
ttctattactgttgcccgaagagctgcttccta

SEQ ID NO: 1013664 - DNA, 33 bp, Homo sapien
ttctattactgttgcctgaagagctgcttccta

SEQ ID NO: 1013665 - DNA, 33 bp, Homo sapien
caggcattcacatttccacctcctttcctcaaa

SEQ ID NO: 1013666 - DNA, 33 bp, Homo sapien
caggcattcacatttctacctcctttcctcaaa

SEQ ID NO: 1013667 - DNA, 33 bp, Homo sapien
agtatgttttggatacgcatataaggcaaagta

SEQ ID NO: 1013668 - DNA, 33 bp, Homo sapien
agtatgttttggatactcatataaggcaaagta

SEQ ID NO: 1013669 - DNA, 33 bp, Homo sapien
ttatctagttgtttaacgtgtttctatgactat

SEQ ID NO: 1013670 - DNA, 33 bp, Homo sapien
ttatctagttgtttaatgtgtttctatgactat

SEQ ID NO: 1013671 - DNA, 33 bp, Homo sapien
aaaatttatgtgtgaactggtaagttgagagat

SEQ ID NO: 1013672 - DNA, 33 bp, Homo sapien
aaaatttatgtgtgaattggtaagttgagagat

SEQ ID NO: 1013673 - DNA, 33 bp, Homo sapien
gctctcgccaaagttacgtattcacaaatcacc

SEQ ID NO: 1013674 - DNA, 33 bp, Homo sapien
gctctcgccaaagttatgtattcacaaatcacc

SEQ ID NO: 1013675 - DNA, 33 bp, Homo sapien
ctgactgtattctgtaactgagtcagagggtgc

SEQ ID NO: 1013676 - DNA, 33 bp, Homo sapien
ctgactgtattctgtagctgagtcagagggtgc

SEQ ID NO: 1013677 - DNA, 33 bp, Homo sapien
aactattcattcgacaaaggtctactatctggc

SEQ ID NO: 1013678 - DNA, 33 bp, Homo sapien
aactattcattcgacagaggtctactatctggc

SEQ ID NO: 1013679 - DNA, 33 bp, Homo sapien
actcactcatttactcaacaaccaaaaatatat

SEQ ID NO: 1013680 - DNA, 33 bp, Homo sapien
actcactcatttactcgacaaccaaaaatatat

SEQ ID NO: 1013681 - DNA, 33 bp, Homo sapien
gcttaaaaactctccaatgaattcagattttac

SEQ ID NO: 1013682 - DNA, 33 bp, Homo sapien
gcttaaaaactctccagtgaattcagattttac

SEQ ID NO: 1013683 - DNA, 33 bp, Homo sapien
aatctgagaggaaacactgtgaataagtctctg

SEQ ID NO: 1013684 - DNA, 33 bp, Homo sapien
aatctgagaggaaacattgtgaataagtctctg

SEQ ID NO: 1013685 - DNA, 33 bp, Homo sapien
agactatagaagaaaactcaggatacaacactc

SEQ ID NO: 1013686 - DNA, 33 bp, Homo sapien
agactatagaagaaaagtcaggatacaacactc

SEQ ID NO: 1013687 - DNA, 33 bp, Homo sapien
atccaggcctacagaacatgatgaacttaattg

SEQ ID NO: 1013688 - DNA, 33 bp, Homo sapien
atccaggcctacagaagatgatgaacttaattg

SEQ ID NO: 1013689 - DNA, 33 bp, Homo sapien
tatgttctcacaatacaagatttcaacaactgt

SEQ ID NO: 1013690 - DNA, 33 bp, Homo sapien
tatgttctcacaatacgagatttcaacaactgt

SEQ ID NO: 1013691 - DNA, 33 bp, Homo sapien
tcagctcagtaaggcactactcagaagaactca

SEQ ID NO: 1013692 - DNA, 33 bp, Homo sapien
tcagctcagtaaggcagtactcagaagaactca

SEQ ID NO: 1013693 - DNA, 33 bp, Homo sapien
aaataaaatgctcataggttgggttaaagctaa

SEQ ID NO: 1013694 - DNA, 33 bp, Homo sapien
aaataaaatgctcatatgttgggttaaagctaa

SEQ ID NO: 1013695 - DNA, 33 bp, Homo sapien
aatggataaactcaaccaactaaaaacacatta

SEQ ID NO: 1013696 - DNA, 33 bp, Homo sapien
aatggataaactcaacgaactaaaaacacatta

SEQ ID NO: 1013697 - DNA, 33 bp, Homo sapien
aggccaacccccaaaacctatgaaacaagaagt

SEQ ID NO: 1013698 - DNA, 33 bp, Homo sapien
aggccaacccccaaaagctatgaaacaagaagt

SEQ ID NO: 1013699 - DNA, 33 bp, Homo sapien
tatacagtggtgagaaaaaaatagatatgcaca

SEQ ID NO: 1013700 - DNA, 33 bp, Homo sapien
tatacagtggtgagaagaaaatagatatgcaca

SEQ ID NO: 1013701 - DNA, 33 bp, Homo sapien
gctcttataggatagcaatttttttttactggt

SEQ ID NO: 1013702 - DNA, 33 bp, Homo sapien
gctcttataggatagcgatttttttttactggt

SEQ ID NO: 1013703 - DNA, 33 bp, Homo sapien
atatttcattcaatgcaatgaccttaaatatgt

SEQ ID NO: 1013704 - DNA, 33 bp, Homo sapien
atatttcattcaatgccatgaccttaaatatgt

SEQ ID NO: 1013705 - DNA, 33 bp, Homo sapien
atgctcaaaaatcttcaacatgggaaacaattt

SEQ ID NO: 1013706 - DNA, 33 bp, Homo sapien
atgctcaaaaatcttcgacatgggaaacaattt

SEQ ID NO: 1013707 - DNA, 33 bp, Homo sapien
cccactcgttggatcaccattaatgttatgtta

SEQ ID NO: 1013708 - DNA, 33 bp, Homo sapien
cccactcgttggatcatcattaatgttatgtta

SEQ ID NO: 1013709 - DNA, 33 bp, Homo sapien
taattttctatactcaataatgtactataaagt

SEQ ID NO: 1013710 - DNA, 33 bp, Homo sapien
taattttctatactcagtaatgtactataaagt

SEQ ID NO: 1013711 - DNA, 33 bp, Homo sapien
aaatatgtttccccaaatctctgcatggcttaa

SEQ ID NO: 1013712 - DNA, 33 bp, Homo sapien
aaatatgtttccccaattctctgcatggcttaa

SEQ ID NO: 1013713 - DNA, 33 bp, Homo sapien
taaaatgccaagtgacaatgatgaaccacttaa

SEQ ID NO: 1013714 - DNA, 33 bp, Homo sapien
taaaatgccaagtgacgatgatgaaccacttaa

SEQ ID NO: 1013715 - DNA, 33 bp, Homo sapien
agctgtttgtgcctaccgattaaatactgaata

SEQ ID NO: 1013716 - DNA, 33 bp, Homo sapien
agctgtttgtgcctactgattaaatactgaata

SEQ ID NO: 1013717 - DNA, 33 bp, Homo sapien
aagttcacctatactcacttctctagctgcata

SEQ ID NO: 1013718 - DNA, 33 bp, Homo sapien
aagttcacctatactcgcttctctagctgcata

SEQ ID NO: 1013719 - DNA, 33 bp, Homo sapien
tggcaggctctcctaaagtcagtaagttctgct

SEQ ID NO: 1013720 - DNA, 33 bp, Homo sapien
tggcaggctctcctaaggtcagtaagttctgct

SEQ ID NO: 1013721 - DNA, 33 bp, Homo sapien
ttctgctatgtggcaacagaaaataaaactctg

SEQ ID NO: 1013722 - DNA, 33 bp, Homo sapien
ttctgctatgtggcaatagaaaataaaactctg

SEQ ID NO: 1013723 - DNA, 33 bp, Homo sapien
ctccttcagaagaggcaacttgatttcttcata

SEQ ID NO: 1013724 - DNA, 33 bp, Homo sapien
ctccttcagaagaggcgacttgatttcttcata

SEQ ID NO: 1013725 - DNA, 33 bp, Homo sapien
agttggtttcagccaaataggtggccatatacc

SEQ ID NO: 1013726 - DNA, 33 bp, Homo sapien
agttggtttcagccaagtaggtggccatatacc

SEQ ID NO: 1013727 - DNA, 33 bp, Homo sapien
tttgccatgttggtaacaagtacattcctggtg

SEQ ID NO: 1013728 - DNA, 33 bp, Homo sapien
tttgccatgttggtaataagtacattcctggtg

SEQ ID NO: 1013729 - DNA, 33 bp, Homo sapien
cgatagttagaaacgaagagctttaacttatta

SEQ ID NO: 1013730 - DNA, 33 bp, Homo sapien
cgatagttagaaacgaggagctttaacttatta

SEQ ID NO: 1013731 - DNA, 33 bp, Homo sapien
aataaatagaaagtaactgcatttcagacatct

SEQ ID NO: 1013732 - DNA, 33 bp, Homo sapien
aataaatagaaagtaattgcatttcagacatct

SEQ ID NO: 1013733 - DNA, 33 bp, Homo sapien
cttcctcactaagaaaatcttgagctttatcaa

SEQ ID NO: 1013734 - DNA, 33 bp, Homo sapien
cttcctcactaagaaagtcttgagctttatcaa

SEQ ID NO: 1013735 - DNA, 33 bp, Homo sapien
atggccaatctaaactaaaaggttgatggtgaa

SEQ ID NO: 1013736 - DNA, 33 bp, Homo sapien
atggccaatctaaactgaaaggttgatggtgaa

SEQ ID NO: 1013737 - DNA, 33 bp, Homo sapien
tagtacaagaacactaagtccagcaaaagctta

SEQ ID NO: 1013738 - DNA, 33 bp, Homo sapien
tagtacaagaacactatgtccagcaaaagctta

SEQ ID NO: 1013739 - DNA, 33 bp, Homo sapien
aattaagttgtgtaaccagaactcacttagaga

SEQ ID NO: 1013740 - DNA, 33 bp, Homo sapien
aattaagttgtgtaactagaactcacttagaga

SEQ ID NO: 1013741 - DNA, 33 bp, Homo sapien
tttgatctaggacatccaatctccagaactatg

SEQ ID NO: 1013742 - DNA, 33 bp, Homo sapien
tttgatctaggacatctaatctccagaactatg

SEQ ID NO: 1013743 - DNA, 33 bp, Homo sapien
tatgtccatttcattaagttaaggaattttgct

SEQ ID NO: 1013744 - DNA, 33 bp, Homo sapien
tatgtccatttcattatgttaaggaattttgct

SEQ ID NO: 1013745 - DNA, 33 bp, Homo sapien
aagtttgacctatgtacgatgtgagtagggaaa

SEQ ID NO: 1013746 - DNA, 33 bp, Homo sapien
aagtttgacctatgtaggatgtgagtagggaaa

SEQ ID NO: 1013747 - DNA, 33 bp, Homo sapien
acattttaaacaatcacgaagtactgagaacta

SEQ ID NO: 1013748 - DNA, 33 bp, Homo sapien
acattttaaacaatcatgaagtactgagaacta

SEQ ID NO: 1013749 - DNA, 33 bp, Homo sapien
aatagaaatacaaagacaggccacaatgataga

SEQ ID NO: 1013750 - DNA, 33 bp, Homo sapien
aatagaaatacaaagataggccacaatgataga

SEQ ID NO: 1013751 - DNA, 33 bp, Homo sapien
tgttctcatgaacaaacagattcctaagaacag

SEQ ID NO: 1013752 - DNA, 33 bp, Homo sapien
tgttctcatgaacaaagagattcctaagaacag

SEQ ID NO: 1013753 - DNA, 33 bp, Homo sapien
gtactttggaatatcacaggaaaaggaaacaca

SEQ ID NO: 1013754 - DNA, 33 bp, Homo sapien
gtactttggaatatcagaggaaaaggaaacaca

SEQ ID NO: 1013755 - DNA, 33 bp, Homo sapien
gtgacatagtgggatacaaggacaaagccacgc

SEQ ID NO: 1013756 - DNA, 33 bp, Homo sapien
gtgacatagtgggatagaaggacaaagccacgc

SEQ ID NO: 1013757 - DNA, 33 bp, Homo sapien
acccttatgccacaccaattctatttatttatt

SEQ ID NO: 1013758 - DNA, 33 bp, Homo sapien
acccttatgccacaccgattctatttatttatt

SEQ ID NO: 1013759 - DNA, 33 bp, Homo sapien
tcagattcctcagagacgaaaaattctgtattg

SEQ ID NO: 1013760 - DNA, 33 bp, Homo sapien
tcagattcctcagagatgaaaaattctgtattg

SEQ ID NO: 1013761 - DNA, 33 bp, Homo sapien
tcctgccattgtacccaaagaaccttggatagc

SEQ ID NO: 1013762 - DNA, 33 bp, Homo sapien
tcctgccattgtacccgaagaaccttggatagc

SEQ ID NO: 1013763 - DNA, 33 bp, Homo sapien
ctcttctttcttctaaatctgattccgatacct

SEQ ID NO: 1013764 - DNA, 33 bp, Homo sapien
ctcttctttcttctaactctgattccgatacct

SEQ ID NO: 1013765 - DNA, 33 bp, Homo sapien
gtacagaaatgtcataaaggagttagtgcctgg

SEQ ID NO: 1013766 - DNA, 33 bp, Homo sapien
gtacagaaatgtcatataggagttagtgcctgg

SEQ ID NO: 1013767 - DNA, 33 bp, Homo sapien
gactaccatatgattcaagaaacccatttatgg

SEQ ID NO: 1013768 - DNA, 33 bp, Homo sapien
gactaccatatgattcgagaaacccatttatgg

SEQ ID NO: 1013769 - DNA, 33 bp, Homo sapien
ttatgtacaacttgaaccacacttacacacaca

SEQ ID NO: 1013770 - DNA, 33 bp, Homo sapien
ttatgtacaacttgaatcacacttacacacaca

SEQ ID NO: 1013771 - DNA, 33 bp, Homo sapien
aatagagcagtttttccagcaaggaatggcagc

SEQ ID NO: 1013772 - DNA, 33 bp, Homo sapien
aatagagcagtttttctagcaaggaatggcagc

SEQ ID NO: 1013773 - DNA, 33 bp, Homo sapien
cagaaatacaacctcacaatggtacacttgtca

SEQ ID NO: 1013774 - DNA, 33 bp, Homo sapien
cagaaatacaacctcataatggtacacttgtca

SEQ ID NO: 1013775 - DNA, 33 bp, Homo sapien
gatactccagcctgtacctgccttaagcttcag

SEQ ID NO: 1013776 - DNA, 33 bp, Homo sapien
gatactccagcctgtatctgccttaagcttcag

SEQ ID NO: 1013777 - DNA, 33 bp, Homo sapien
ctcttcaggataatgacagaaggaagaactctg

SEQ ID NO: 1013778 - DNA, 33 bp, Homo sapien
ctcttcaggataatgatagaaggaagaactctg

SEQ ID NO: 1013779 - DNA, 33 bp, Homo sapien
ttccagacttgacttcaatactacctcccctta

SEQ ID NO: 1013780 - DNA, 33 bp, Homo sapien
ttccagacttgacttctatactacctcccctta

SEQ ID NO: 1013781 - DNA, 33 bp, Homo sapien
aatcacatttcaaaggccacaaaagtaaacaga

SEQ ID NO: 1013782 - DNA, 33 bp, Homo sapien
aatcacatttcaaaggtcacaaaagtaaacaga

SEQ ID NO: 1013783 - DNA, 33 bp, Homo sapien
tcagtgattatttgtaagggctacatggatatt

SEQ ID NO: 1013784 - DNA, 33 bp, Homo sapien
tcagtgattatttgtaggggctacatggatatt

SEQ ID NO: 1013785 - DNA, 33 bp, Homo sapien
tatggacaaaatagaggaccaaaggatcaaaat

SEQ ID NO: 1013786 - DNA, 33 bp, Homo sapien
tatggacaaaatagagtaccaaaggatcaaaat

SEQ ID NO: 1013787 - DNA, 33 bp, Homo sapien
tgcttagtgagcatcaatacatctcatcatggg

SEQ ID NO: 1013788 - DNA, 33 bp, Homo sapien
tgcttagtgagcatcagtacatctcatcatggg

SEQ ID NO: 1013789 - DNA, 33 bp, Homo sapien
gtgtaaggaattcagaataattttcagatttct

SEQ ID NO: 1013790 - DNA, 33 bp, Homo sapien
gtgtaaggaattcagagtaattttcagatttct

SEQ ID NO: 1013791 - DNA, 33 bp, Homo sapien
gtgtatgtgtgaaaaactagttgtcttatgtca

SEQ ID NO: 1013792 - DNA, 33 bp, Homo sapien
gtgtatgtgtgaaaaagtagttgtcttatgtca

SEQ ID NO: 1013793 - DNA, 33 bp, Homo sapien
tcaataaaactgtttaacattttcagcgagcta

SEQ ID NO: 1013794 - DNA, 33 bp, Homo sapien
tcaataaaactgtttagcattttcagcgagcta

SEQ ID NO: 1013795 - DNA, 33 bp, Homo sapien
aggtaaaatgtatgaccggtgccaacctacagg

SEQ ID NO: 1013796 - DNA, 33 bp, Homo sapien
aggtaaaatgtatgactggtgccaacctacagg

SEQ ID NO: 1013797 - DNA, 33 bp, Homo sapien
cagaagctactaagaaatcactactagatttgg

SEQ ID NO: 1013798 - DNA, 33 bp, Homo sapien
cagaagctactaagaagtcactactagatttgg

SEQ ID NO: 1013799 - DNA, 33 bp, Homo sapien
acctttttagagaaatcattagctccttgcact

SEQ ID NO: 1013800 - DNA, 33 bp, Homo sapien
acctttttagagaaatgattagctccttgcact

SEQ ID NO: 1013801 - DNA, 33 bp, Homo sapien
gtcttcctgcgtagggaaatgcttggcacaaag

SEQ ID NO: 1013802 - DNA, 33 bp, Homo sapien
gtcttcctgcgtagggcaatgcttggcacaaag

SEQ ID NO: 1013803 - DNA, 33 bp, Homo sapien
aaaaagcaagttcactaaagtcctagtcttcac

SEQ ID NO: 1013804 - DNA, 33 bp, Homo sapien
aaaaagcaagttcactgaagtcctagtcttcac

SEQ ID NO: 1013805 - DNA, 33 bp, Homo sapien
cggctaagtcttccataaaaggaagttggttta

SEQ ID NO: 1013806 - DNA, 33 bp, Homo sapien
cggctaagtcttccatgaaaggaagttggttta

SEQ ID NO: 1013807 - DNA, 33 bp, Homo sapien
aagattcattcacattcaagttggaaatcagca

SEQ ID NO: 1013808 - DNA, 33 bp, Homo sapien
aagattcattcacattgaagttggaaatcagca

SEQ ID NO: 1013809 - DNA, 33 bp, Homo sapien
atctctaaaaggtaaactgtcatctttcttatt

SEQ ID NO: 1013810 - DNA, 33 bp, Homo sapien
atctctaaaaggtaaattgtcatctttcttatt

SEQ ID NO: 1013811 - DNA, 33 bp, Homo sapien
aacctcaaacgtccagccagtcttttcagacat

SEQ ID NO: 1013812 - DNA, 33 bp, Homo sapien
aacctcaaacgtccagtcagtcttttcagacat

SEQ ID NO: 1013813 - DNA, 33 bp, Homo sapien
aaaaatgaatgcataaaatgaagtaagagatgt

SEQ ID NO: 1013814 - DNA, 33 bp, Homo sapien
aaaaatgaatgcataagatgaagtaagagatgt

SEQ ID NO: 1013815 - DNA, 33 bp, Homo sapien
accgtgcttcgtcatactaccagaattattttt

SEQ ID NO: 1013816 - DNA, 33 bp, Homo sapien
accgtgcttcgtcatattaccagaattattttt

SEQ ID NO: 1013817 - DNA, 33 bp, Homo sapien
catctcaaaatgctaacgttgaatgtaaatggc

SEQ ID NO: 1013818 - DNA, 33 bp, Homo sapien
catctcaaaatgctaatgttgaatgtaaatggc

SEQ ID NO: 1013819 - DNA, 33 bp, Homo sapien; identical to SEQ ID NO: 1013817

SEQ ID NO: 1013820 - DNA, 33 bp, Homo sapien; identical to SEQ ID NO: 1013818

SEQ ID NO: 1013821 - DNA, 33 bp, Homo sapien
actgataggccccttcacgctcatccttctcct

SEQ ID NO: 1013822 - DNA, 33 bp, Homo sapien
actgataggccccttcgcgctcatccttctcct

SEQ ID NO: 1013823 - DNA, 33 bp, Homo sapien
tgtcttagctgattagccaaacttgcgacattc

SEQ ID NO: 1013824 - DNA, 33 bp, Homo sapien
tgtcttagctgattagtcaaacttgcgacattc

SEQ ID NO: 1013825 - DNA, 33 bp, Homo sapien
ttagggttaggcagtgaaaagtcacagttaggg

SEQ ID NO: 1013826 - DNA, 33 bp, Homo sapien
ttagggttaggcagtggaaagtcacagttaggg

SEQ ID NO: 1013827 - DNA, 33 bp, Homo sapien
taattactcaaatctaagacataataccataca

SEQ ID NO: 1013828 - DNA, 33 bp, Homo sapien
taattactcaaatctaggacataataccataca

SEQ ID NO: 1013829 - DNA, 33 bp, Homo sapien
tgttcttatgttgccaatagagacattccgaag

SEQ ID NO: 1013830 - DNA, 33 bp, Homo sapien
tgttcttatgttgccagtagagacattccgaag

SEQ ID NO: 1013831 - DNA, 33 bp, Homo sapien
ctgtagaaacaaacacaaatacagcttatccaa

SEQ ID NO: 1013832 - DNA, 33 bp, Homo sapien
ctgtagaaacaaacacgaatacagcttatccaa

SEQ ID NO: 1013833 - DNA, 33 bp, Homo sapien
ctcaacatttgaaaataacacttgtaggagttt

SEQ ID NO: 1013834 - DNA, 33 bp, Homo sapien
ctcaacatttgaaaatgacacttgtaggagttt

SEQ ID NO: 1013835 - DNA, 33 bp, Homo sapien
gatttatggccaaaaacgacttactcaatgagg

SEQ ID NO: 1013836 - DNA, 33 bp, Homo sapien
gatttatggccaaaaatgacttactcaatgagg

SEQ ID NO: 1013837 - DNA, 33 bp, Homo sapien
gattcacataggaatgaattaacgatgttagaa

SEQ ID NO: 1013838 - DNA, 33 bp, Homo sapien
gattcacataggaatgcattaacgatgttagaa

SEQ ID NO: 1013839 - DNA, 33 bp, Homo sapien
aatacagtatgatattcaagatgctggctcctg

SEQ ID NO: 1013840 - DNA, 33 bp, Homo sapien
aatacagtatgatattgaagatgctggctcctg

SEQ ID NO: 1013841 - DNA, 33 bp, Homo sapien
gcttggagatattctgcagaagcttctatagat

SEQ ID NO: 1013842 - DNA, 33 bp, Homo sapien
gcttggagatattctgtagaagcttctatagat

SEQ ID NO: 1013843 - DNA, 33 bp, Homo sapien
cctattgctttagtaccgcatacacaacatctc

SEQ ID NO: 1013844 - DNA, 33 bp, Homo sapien
cctattgctttagtactgcatacacaacatctc

SEQ ID NO: 1013845 - DNA, 33 bp, Homo sapien
gtggaacacagtcaccaatttatcccatgtagg

SEQ ID NO: 1013846 - DNA, 33 bp, Homo sapien
gtggaacacagtcaccgatttatcccatgtagg

SEQ ID NO: 1013847 - DNA, 33 bp, Homo sapien
agccaagaaaatgctacgtcgaacctccacgca

SEQ ID NO: 1013848 - DNA, 33 bp, Homo sapien
agccaagaaaatgctatgtcgaacctccacgca

SEQ ID NO: 1013849 - DNA, 33 bp, Homo sapien
accttgccagcgagaacttaaaatggttcaatc

SEQ ID NO: 1013850 - DNA, 33 bp, Homo sapien
accttgccagcgagaatttaaaatggttcaatc

SEQ ID NO: 1013851 - DNA, 33 bp, Homo sapien
tatccttttatttctacggccggaatgggtccc

SEQ ID NO: 1013852 - DNA, 33 bp, Homo sapien
tatccttttatttctatggccggaatgggtccc

SEQ ID NO: 1013853 - DNA, 33 bp, Homo sapien
gtacactcaaaggcaaccatgttttcactttcc

SEQ ID NO: 1013854 - DNA, 33 bp, Homo sapien
gtacactcaaaggcaatcatgttttcactttcc

SEQ ID NO: 1013855 - DNA, 33 bp, Homo sapien
actttgactactattaaacagagattccttcta

SEQ ID NO: 1013856 - DNA, 33 bp, Homo sapien
actttgactactattacacagagattccttcta

SEQ ID NO: 1013857 - DNA, 33 bp, Homo sapien
ttcaaggacataaagaaaaccattttacttctt

SEQ ID NO: 1013858 - DNA, 33 bp, Homo sapien
ttcaaggacataaagagaaccattttacttctt

SEQ ID NO: 1013859 - DNA, 33 bp, Homo sapien
tttgctcccgtgcctgcaaatgttactcaagga

SEQ ID NO: 1013860 - DNA, 33 bp, Homo sapien
tttgctcccgtgcctggaaatgttactcaagga

SEQ ID NO: 1013861 - DNA, 33 bp, Homo sapien
atgagaggtggaaaaacgctctgggacccactt

SEQ ID NO: 1013862 - DNA, 33 bp, Homo sapien
atgagaggtggaaaaatgctctgggacccactt

SEQ ID NO: 1013863 - DNA, 33 bp, Homo sapien
ggatacagagtttagacaatgagagtgacagct

SEQ ID NO: 1013864 - DNA, 33 bp, Homo sapien
ggatacagagtttagataatgagagtgacagct

SEQ ID NO: 1013865 - DNA, 33 bp, Homo sapien
gatggtatggtaaagacgactgctattacttaa

SEQ ID NO: 1013866 - DNA, 33 bp, Homo sapien
gatggtatggtaaagatgactgctattacttaa

SEQ ID NO: 1013867 - DNA, 33 bp, Homo sapien
actgtggcattgaaaacataggtaatttgctga

SEQ ID NO: 1013868 - DNA, 33 bp, Homo sapien
actgtggcattgaaaatataggtaatttgctga

SEQ ID NO: 1013869 - DNA, 33 bp, Homo sapien
ccaaatattaatgtaacctggcaactatgttct

SEQ ID NO: 1013870 - DNA, 33 bp, Homo sapien
ccaaatattaatgtaagctggcaactatgttct

SEQ ID NO: 1013871 - DNA, 33 bp, Homo sapien
atggaatttcagacaacaattttattttattta

SEQ ID NO: 1013872 - DNA, 33 bp, Homo sapien
atggaatttcagacaagaattttattttattta

SEQ ID NO: 1013873 - DNA, 33 bp, Homo sapien
gtaattaagaacaccaaaaccatgaaacactgt

SEQ ID NO: 1013874 - DNA, 33 bp, Homo sapien
gtaattaagaacaccacaaccatgaaacactgt

SEQ ID NO: 1013875 - DNA, 33 bp, Homo sapien
atgagccattatccctcaaagaccctggaaaac

SEQ ID NO: 1013876 - DNA, 33 bp, Homo sapien
atgagccattatccctgaaagaccctggaaaac

SEQ ID NO: 1013877 - DNA, 33 bp, Homo sapien
cagggcccattcaagaaaactgaaaccttacca

SEQ ID NO: 1013878 - DNA, 33 bp, Homo sapien
cagggcccattcaagagaactgaaaccttacca

SEQ ID NO: 1013879 - DNA, 33 bp, Homo sapien
tgggccatatgacctaaaagatacaatggtgct

SEQ ID NO: 1013880 - DNA, 33 bp, Homo sapien
tgggccatatgacctagaagatacaatggtgct

SEQ ID NO: 1013881 - DNA, 33 bp, Homo sapien
tatcatggaaagcgataaggtttgtcctcactg

SEQ ID NO: 1013882 - DNA, 33 bp, Homo sapien
tatcatggaaagcgatgaggtttgtcctcactg

SEQ ID NO: 1013883 - DNA, 33 bp, Homo sapien
gtctgaactgtcttacacagataatctgtacta

SEQ ID NO: 1013884 - DNA, 33 bp, Homo sapien
gtctgaactgtcttacgcagataatctgtacta

SEQ ID NO: 1013885 - DNA, 33 bp, Homo sapien
aggcctcatctctacaatcaatcaacttgattc

SEQ ID NO: 1013886 - DNA, 33 bp, Homo sapien
aggcctcatctctacagtcaatcaacttgattc

SEQ ID NO: 1013887 - DNA, 33 bp, Homo sapien
tagagtaattatgtgacagaattcatttaacat

SEQ ID NO: 1013888 - DNA, 33 bp, Homo sapien
tagagtaattatgtgagagaattcatttaacat

SEQ ID NO: 1013889 - DNA, 33 bp, Homo sapien
gcttaccaatactataaactaaaacttttcacc

SEQ ID NO: 1013890 - DNA, 33 bp, Homo sapien
gcttaccaatactatagactaaaacttttcacc

SEQ ID NO: 1013891 - DNA, 33 bp, Homo sapien
ctttgaagtaactacaatagtgtctcattaaat

SEQ ID NO: 1013892 - DNA, 33 bp, Homo sapien
ctttgaagtaactacagtagtgtctcattaaat

SEQ ID NO: 1013893 - DNA, 33 bp, Homo sapien
catttctatagttatagctatcctgagttagag

SEQ ID NO: 1013894 - DNA, 33 bp, Homo sapien
catttctatagttatatctatcctgagttagag

SEQ ID NO: 1013895 - DNA, 33 bp, Homo sapien
catgtcatagttcttacatatcacatagctggc

SEQ ID NO: 1013896 - DNA, 33 bp, Homo sapien
catgtcatagttcttatatatcacatagctggc

SEQ ID NO: 1013897 - DNA, 33 bp, Homo sapien
gataggcatgaagaaacttaattatcacagtat

SEQ ID NO: 1013898 - DNA, 33 bp, Homo sapien
gataggcatgaagaaagttaattatcacagtat

SEQ ID NO: 1013899 - DNA, 33 bp, Homo sapien
tcactttgttcattgacgaaaggaagatatgag

SEQ ID NO: 1013900 - DNA, 33 bp, Homo sapien
tcactttgttcattgaggaaaggaagatatgag

SEQ ID NO: 1013901 - DNA, 33 bp, Homo sapien
tcacaacttgttgcctaaactgggatgtctgac

SEQ ID NO: 1013902 - DNA, 33 bp, Homo sapien
tcacaacttgttgcctgaactgggatgtctgac

SEQ ID NO: 1013903 - DNA, 33 bp, Homo sapien
ttggaagcaaagtaaaattattgtttgaagata

SEQ ID NO: 1013904 - DNA, 33 bp, Homo sapien
ttggaagcaaagtaaacttattgtttgaagata

SEQ ID NO: 1013905 - DNA, 33 bp, Homo sapien
ttcatataaaatggaactgtagtttgatgaaaa

SEQ ID NO: 1013906 - DNA, 33 bp, Homo sapien
ttcatataaaatggaagtgtagtttgatgaaaa

SEQ ID NO: 1013907 - DNA, 33 bp, Homo sapien
tatccagactctataaaggctagggtgagccgt

SEQ ID NO: 1013908 - DNA, 33 bp, Homo sapien
tatccagactctataagggctagggtgagccgt

SEQ ID NO: 1013909 - DNA, 33 bp, Homo sapien
aaaaggcaaaaagtaacaaatcaaagcatacca

SEQ ID NO: 1013910 - DNA, 33 bp, Homo sapien
aaaaggcaaaaagtaagaaatcaaagcatacca

SEQ ID NO: 1013911 - DNA, 33 bp, Homo sapien
ataatagtcaattcatcaaaagaacaattataa

SEQ ID NO: 1013912 - DNA, 33 bp, Homo sapien
ataatagtcaattcattaaaagaacaattataa

SEQ ID NO: 1013913 - DNA, 33 bp, Homo sapien
actcagtgtctggtgaagtttacttgctggttc

SEQ ID NO: 1013914 - DNA, 33 bp, Homo sapien
actcagtgtctggtgaggtttacttgctggttc

SEQ ID NO: 1013915 - DNA, 33 bp, Homo sapien
ggcccttttgtcatataaggatagagtgaaaag

SEQ ID NO: 1013916 - DNA, 33 bp, Homo sapien
ggcccttttgtcatatgaggatagagtgaaaag

SEQ ID NO: 1013917 - DNA, 33 bp, Homo sapien
gttattaagaagtgtaccatatattcagtagga

SEQ ID NO: 1013918 - DNA, 33 bp, Homo sapien
gttattaagaagtgtatcatatattcagtagga

SEQ ID NO: 1013919 - DNA, 33 bp, Homo sapien
cacctaaatcctggagcctactaccagcgctaa

SEQ ID NO: 1013920 - DNA, 33 bp, Homo sapien
cacctaaatcctggaggctactaccagcgctaa

SEQ ID NO: 1013921 - DNA, 33 bp, Homo sapien
tgctgcctgtggagaactgctactggattttct

SEQ ID NO: 1013922 - DNA, 33 bp, Homo sapien
tgctgcctgtggagaattgctactggattttct

SEQ ID NO: 1013923 - DNA, 33 bp, Homo sapien
tgatgacaattgagaacagggactaatatgact

SEQ ID NO: 1013924 - DNA, 33 bp, Homo sapien
tgatgacaattgagaatagggactaatatgact

SEQ ID NO: 1013925 - DNA, 33 bp, Homo sapien
tgggcaccttgctccaagttgcaggtgaattta

SEQ ID NO: 1013926 - DNA, 33 bp, Homo sapien
tgggcaccttgctccacgttgcaggtgaattta

SEQ ID NO: 1013927 - DNA, 33 bp, Homo sapien
aaaattagacttttacccagaaactggcagata

SEQ ID NO: 1013928 - DNA, 33 bp, Homo sapien
aaaattagacttttactcagaaactggcagata

SEQ ID NO: 1013929 - DNA, 33 bp, Homo sapien
cttgatgctgttcttccctctatatgagttctc

SEQ ID NO: 1013930 - DNA, 33 bp, Homo sapien
cttgatgctgttcttctctctatatgagttctc

SEQ ID NO: 1013931 - DNA, 33 bp, Homo sapien
aaccaagacacttagcactcaaaatttcaacaa

SEQ ID NO: 1013932 - DNA, 33 bp, Homo sapien
aaccaagacacttagcgctcaaaatttcaacaa

SEQ ID NO: 1013933 - DNA, 33 bp, Homo sapien
cagctgattcattccgacagtggagccctgaag

SEQ ID NO: 1013934 - DNA, 33 bp, Homo sapien
cagctgattcattccggcagtggagccctgaag

SEQ ID NO: 1013935 - DNA, 33 bp, Homo sapien
ccacttcaccttgttaagtagaggcaagggtaa

SEQ ID NO: 1013936 - DNA, 33 bp, Homo sapien
ccacttcaccttgttaggtagaggcaagggtaa

SEQ ID NO: 1013937 - DNA, 33 bp, Homo sapien
cctggacttcaacctcaattccttatttgtgct

SEQ ID NO: 1013938 - DNA, 33 bp, Homo sapien
cctggacttcaacctccattccttatttgtgct

SEQ ID NO: 1013939 - DNA, 33 bp, Homo sapien
cagctgtataatgcaactgtcttgcacaggact

SEQ ID NO: 1013940 - DNA, 33 bp, Homo sapien
cagctgtataatgcaattgtcttgcacaggact

SEQ ID NO: 1013941 - DNA, 33 bp, Homo sapien
tctagaatcaaaattaccaatactcagatttgt

SEQ ID NO: 1013942 - DNA, 33 bp, Homo sapien
tctagaatcaaaattagcaatactcagatttgt

SEQ ID NO: 1013943 - DNA, 33 bp, Homo sapien
tccttatcctgagaagaagtatgaaacagagga

SEQ ID NO: 1013944 - DNA, 33 bp, Homo sapien
tccttatcctgagaagcagtatgaaacagagga

SEQ ID NO: 1013945 - DNA, 33 bp, Homo sapien
agttttactatttgttcaaagtgtctgccactt

SEQ ID NO: 1013946 - DNA, 33 bp, Homo sapien
agttttactatttgttgaaagtgtctgccactt

SEQ ID NO: 1013947 - DNA, 33 bp, Homo sapien
gtttttcttccccataaaacaactgcaataata

SEQ ID NO: 1013948 - DNA, 33 bp, Homo sapien
gtttttcttccccatagaacaactgcaataata

SEQ ID NO: 1013949 - DNA, 33 bp, Homo sapien
aagagaaaatcattgaaaactggagacaagcca

SEQ ID NO: 1013950 - DNA, 33 bp, Homo sapien
aagagaaaatcattgagaactggagacaagcca

SEQ ID NO: 1013951 - DNA, 33 bp, Homo sapien
ggtgaagtccaggcaaattaaaagatattgaga

SEQ ID NO: 1013952 - DNA, 33 bp, Homo sapien
ggtgaagtccaggcaagttaaaagatattgaga

SEQ ID NO: 1013953 - DNA, 33 bp, Homo sapien
ctggttcagaaaataccgatgatggctcagatg

SEQ ID NO: 1013954 - DNA, 33 bp, Homo sapien
ctggttcagaaaatactgatgatggctcagatg

SEQ ID NO: 1013955 - DNA, 33 bp, Homo sapien
cctacaatgtgagtgactaatcttggaaggaga

SEQ ID NO: 1013956 - DNA, 33 bp, Homo sapien
cctacaatgtgagtgagtaatcttggaaggaga

SEQ ID NO: 1013957 - DNA, 33 bp, Homo sapien
atgttacaaggtcatacagtgtttaccctgatc

SEQ ID NO: 1013958 - DNA, 33 bp, Homo sapien
atgttacaaggtcatatagtgtttaccctgatc

SEQ ID NO: 1013959 - DNA, 33 bp, Homo sapien
tgtcaatgggcctttaaggctgtcccaaacttc

SEQ ID NO: 1013960 - DNA, 33 bp, Homo sapien
tgtcaatgggcctttatggctgtcccaaacttc

SEQ ID NO: 1013961 - DNA, 33 bp, Homo sapien
caaggaatccaagtggaattgcacttaacagat

SEQ ID NO: 1013962 - DNA, 33 bp, Homo sapien
caaggaatccaagtggtattgcacttaacagat

SEQ ID NO: 1013963 - DNA, 33 bp, Homo sapien
ggttggataaggatggaattataggacaaagat

SEQ ID NO: 1013964 - DNA, 33 bp, Homo sapien
ggttggataaggatggtattataggacaaagat

SEQ ID NO: 1013965 - DNA, 33 bp, Homo sapien
gaggtaggcagaaatacagagttcagttgagga

SEQ ID NO: 1013966 - DNA, 33 bp, Homo sapien
gaggtaggcagaaatatagagttcagttgagga

SEQ ID NO: 1013967 - DNA, 33 bp, Homo sapien
ccatttatgcaatagacagtcctttcaccattg

SEQ ID NO: 1013968 - DNA, 33 bp, Homo sapien
ccatttatgcaatagagagtcctttcaccattg

SEQ ID NO: 1013969 - DNA, 33 bp, Homo sapien
cggggtgcagacagaaatgaggactacagatct

SEQ ID NO: 1013970 - DNA, 33 bp, Homo sapien
cggggtgcagacagaactgaggactacagatct

SEQ ID NO: 1013971 - DNA, 33 bp, Homo sapien
ggtagtgaactatgtaccttcctggtctagaca

SEQ ID NO: 1013972 - DNA, 33 bp, Homo sapien
ggtagtgaactatgtatcttcctggtctagaca

SEQ ID NO: 1013973 - DNA, 33 bp, Homo sapien
agccctgtgaagatacagaagcacagagttgca

SEQ ID NO: 1013974 - DNA, 33 bp, Homo sapien
agccctgtgaagatacggaagcacagagttgca

SEQ ID NO: 1013975 - DNA, 33 bp, Homo sapien
aaatcccactactacccagtaaccttagagaac

SEQ ID NO: 1013976 - DNA, 33 bp, Homo sapien
aaatcccactactacctagtaaccttagagaac

SEQ ID NO: 1013977 - DNA, 33 bp, Homo sapien
agaaaggcctgcttgcaaacgtggcccttagct

SEQ ID NO: 1013978 - DNA, 33 bp, Homo sapien
agaaaggcctgcttgccaacgtggcccttagct

SEQ ID NO: 1013979 - DNA, 33 bp, Homo sapien
ttgtctacacggatataacactttctttaaatt

SEQ ID NO: 1013980 - DNA, 33 bp, Homo sapien
ttgtctacacggatatgacactttctttaaatt

SEQ ID NO: 1013981 - DNA, 33 bp, Homo sapien
attctgtttattccaaagggagaatcgctttga

SEQ ID NO: 1013982 - DNA, 33 bp, Homo sapien
attctgtttattccaatgggagaatcgctttga

SEQ ID NO: 1013983 - DNA, 33 bp, Homo sapien
gaaaatggaagacttacaacctattgttaagga

SEQ ID NO: 1013984 - DNA, 33 bp, Homo sapien
gaaaatggaagacttataacctattgttaagga

SEQ ID NO: 1013985 - DNA, 33 bp, Homo sapien
cttagctaaatcctgccctaaagtgttaacagt

SEQ ID NO: 1013986 - DNA, 33 bp, Homo sapien
cttagctaaatcctgctctaaagtgttaacagt

SEQ ID NO: 1013987 - DNA, 33 bp, Homo sapien
acttatagtatttagaagtaggcatataactga

SEQ ID NO: 1013988 - DNA, 33 bp, Homo sapien
acttatagtatttagacgtaggcatataactga

SEQ ID NO: 1013989 - DNA, 33 bp, Homo sapien
caaggtaatcactaaaagctgtgctacaggatt

SEQ ID NO: 1013990 - DNA, 33 bp, Homo sapien
caaggtaatcactaaacgctgtgctacaggatt

SEQ ID NO: 1013991 - DNA, 33 bp, Homo sapien
acaacatgaaagtcaacatcaggtaacactgta

SEQ ID NO: 1013992 - DNA, 33 bp, Homo sapien
acaacatgaaagtcaatatcaggtaacactgta

SEQ ID NO: 1013993 - DNA, 33 bp, Homo sapien
agatattcagttccaacgtgaggctcttaccaa

SEQ ID NO: 1013994 - DNA, 33 bp, Homo sapien
agatattcagttccaatgtgaggctcttaccaa

SEQ ID NO: 1013995 - DNA, 33 bp, Homo sapien
caatttggaactatggaaggtagaaattaagag

SEQ ID NO: 1013996 - DNA, 33 bp, Homo sapien
caatttggaactatggcaggtagaaattaagag

SEQ ID NO: 1013997 - DNA, 33 bp, Homo sapien
taattactccttactgaaaagtatcctaattta

SEQ ID NO: 1013998 - DNA, 33 bp, Homo sapien
taattactccttactggaaagtatcctaattta

SEQ ID NO: 1013999 - DNA, 33 bp, Homo sapien
tcttattttcagccctgaaagagtttcttagaa

SEQ ID NO: 1014000 - DNA, 33 bp, Homo sapien
tcttattttcagcccttaaagagtttcttagaa

SEQ ID NO: 1014001 - DNA, 33 bp, Homo sapien
atagctgagagactcacagatggctcacatcat

SEQ ID NO: 1014002 - DNA, 33 bp, Homo sapien
atagctgagagactcatagatggctcacatcat

SEQ ID NO: 1014003 - DNA, 33 bp, Homo sapien
caatgcaatcactactaaaatttcaaaggtatt

SEQ ID NO: 1014004 - DNA, 33 bp, Homo sapien
caatgcaatcactactgaaatttcaaaggtatt

SEQ ID NO: 1014005 - DNA, 33 bp, Homo sapien
cgtggataaacttcacagatattatttatttat

SEQ ID NO: 1014006 - DNA, 33 bp, Homo sapien
cgtggataaacttcactgatattatttatttat

SEQ ID NO: 1014007 - DNA, 33 bp, Homo sapien
agtcttaagaaatcaactataaagctgctagaa

SEQ ID NO: 1014008 - DNA, 33 bp, Homo sapien
agtcttaagaaatcaattataaagctgctagaa

SEQ ID NO: 1014009 - DNA, 33 bp, Homo sapien
gttaattagggcataacggagtgaagtgaggtt

SEQ ID NO: 1014010 - DNA, 33 bp, Homo sapien
gttaattagggcataatggagtgaagtgaggtt

SEQ ID NO: 1014011 - DNA, 33 bp, Homo sapien
ggtaacagtgaccctacattcctaacttgggtc

SEQ ID NO: 1014012 - DNA, 33 bp, Homo sapien
ggtaacagtgaccctatattcctaacttgggtc

SEQ ID NO: 1014013 - DNA, 33 bp, Homo sapien
taagtccttgaccgaacaatgtccagacaatgc

SEQ ID NO: 1014014 - DNA, 33 bp, Homo sapien
taagtccttgaccgaagaatgtccagacaatgc

SEQ ID NO: 1014015 - DNA, 33 bp, Homo sapien
gaagtatttgtggtaaccaagttgtattagtga

SEQ ID NO: 1014016 - DNA, 33 bp, Homo sapien
gaagtatttgtggtaatcaagttgtattagtga

SEQ ID NO: 1014017 - DNA, 33 bp, Homo sapien
caagctactggatggacatatttattgggatcc

SEQ ID NO: 1014018 - DNA, 33 bp, Homo sapien
caagctactggatggagatatttattgggatcc

SEQ ID NO: 1014019 - DNA, 33 bp, Homo sapien
tacaaggtcctattaactctaacatttatcaag

SEQ ID NO: 1014020 - DNA, 33 bp, Homo sapien
tacaaggtcctattaagtctaacatttatcaag

SEQ ID NO: 1014021 - DNA, 33 bp, Homo sapien
accaggtcagtttccacgccttaagggacactc

SEQ ID NO: 1014022 - DNA, 33 bp, Homo sapien
accaggtcagtttccaggccttaagggacactc

SEQ ID NO: 1014023 - DNA, 33 bp, Homo sapien
gctatcactgtagaaacaaagacaagttgcaga

SEQ ID NO: 1014024 - DNA, 33 bp, Homo sapien
gctatcactgtagaaataaagacaagttgcaga

SEQ ID NO: 1014025 - DNA, 33 bp, Homo sapien
tgcccaatgcctcacaagtagtagaatttcaat

SEQ ID NO: 1014026 - DNA, 33 bp, Homo sapien
tgcccaatgcctcacaggtagtagaatttcaat

SEQ ID NO: 1014027 - DNA, 33 bp, Homo sapien
aaatggctgtggtcaacaagaagttcaacagca

SEQ ID NO: 1014028 - DNA, 33 bp, Homo sapien
aaatggctgtggtcaagaagaagttcaacagca

SEQ ID NO: 1014029 - DNA, 33 bp, Homo sapien
tttgcataaagaactgaaggagaagggctctct

SEQ ID NO: 1014030 - DNA, 33 bp, Homo sapien
tttgcataaagaactggaggagaagggctctct

SEQ ID NO: 1014031 - DNA, 33 bp, Homo sapien
ccccttcctcaatttacgcaaagtactgaaaag

SEQ ID NO: 1014032 - DNA, 33 bp, Homo sapien
ccccttcctcaatttatgcaaagtactgaaaag

SEQ ID NO: 1014033 - DNA, 33 bp, Homo sapien
ctggtacaaatgcccaatattttctaagaactg

SEQ ID NO: 1014034 - DNA, 33 bp, Homo sapien
ctggtacaaatgcccagtattttctaagaactg

SEQ ID NO: 1014035 - DNA, 33 bp, Homo sapien
aatccttgatgtgaggacaaactttgggtttcc

SEQ ID NO: 1014036 - DNA, 33 bp, Homo sapien
aatccttgatgtgaggccaaactttgggtttcc

SEQ ID NO: 1014037 - DNA, 33 bp, Homo sapien
tccatgcaatttgccaaacacttacagagttta

SEQ ID NO: 1014038 - DNA, 33 bp, Homo sapien
tccatgcaatttgccagacacttacagagttta

SEQ ID NO: 1014039 - DNA, 33 bp, Homo sapien
gtccccctaagagcccaagagtatcacatagta

SEQ ID NO: 1014040 - DNA, 33 bp, Homo sapien
gtccccctaagagcccgagagtatcacatagta

SEQ ID NO: 1014041 - DNA, 33 bp, Homo sapien
cactcaataaaggcaaactttcaaaatgaaatt

SEQ ID NO: 1014042 - DNA, 33 bp, Homo sapien
cactcaataaaggcaagctttcaaaatgaaatt

SEQ ID NO: 1014043 - DNA, 33 bp, Homo sapien
ataaggccagacgtcaataagcctgtttcccag

SEQ ID NO: 1014044 - DNA, 33 bp, Homo sapien
ataaggccagacgtcagtaagcctgtttcccag

SEQ ID NO: 1014045 - DNA, 33 bp, Homo sapien
actgagcacaaagccaataaatgcttaatacta

SEQ ID NO: 1014046 - DNA, 33 bp, Homo sapien
actgagcacaaagccagtaaatgcttaatacta

SEQ ID NO: 1014047 - DNA, 33 bp, Homo sapien
cctcttaatctttctacgactcagcttccttct

SEQ ID NO: 1014048 - DNA, 33 bp, Homo sapien
cctcttaatctttctaggactcagcttccttct

SEQ ID NO: 1014049 - DNA, 33 bp, Homo sapien
tcattagcagcatagaaccagcttagacaatct

SEQ ID NO: 1014050 - DNA, 33 bp, Homo sapien
tcattagcagcatagagccagcttagacaatct

SEQ ID NO: 1014051 - DNA, 33 bp, Homo sapien
tggaaagccttctcaagaatagctccaaataag

SEQ ID NO: 1014052 - DNA, 33 bp, Homo sapien
tggaaagccttctcaataatagctccaaataag

SEQ ID NO: 1014053 - DNA, 33 bp, Homo sapien
aagcttcccagggaagaaacagttgtgcccctc

SEQ ID NO: 1014054 - DNA, 33 bp, Homo sapien
aagcttcccagggaaggaacagttgtgcccctc

SEQ ID NO: 1014055 - DNA, 33 bp, Homo sapien
gaagttgttctctaggaataaaacaagactcca

SEQ ID NO: 1014056 - DNA, 33 bp, Homo sapien
gaagttgttctctagggataaaacaagactcca

SEQ ID NO: 1014057 - DNA, 33 bp, Homo sapien
acattctggcttctaacacctgatatcaatatg

SEQ ID NO: 1014058 - DNA, 33 bp, Homo sapien
acattctggcttctaatacctgatatcaatatg

SEQ ID NO: 1014059 - DNA, 33 bp, Homo sapien
gggtgggctaccagggcacttgcacaggaaact

SEQ ID NO: 1014060 - DNA, 33 bp, Homo sapien
gggtgggctaccaggggacttgcacaggaaact

SEQ ID NO: 1014061 - DNA, 33 bp, Homo sapien
taatggatgatgaaagaagaagctgtgaacaga

SEQ ID NO: 1014062 - DNA, 33 bp, Homo sapien
taatggatgatgaaaggagaagctgtgaacaga

SEQ ID NO: 1014063 - DNA, 33 bp, Homo sapien
gccaaattcatgttccagctgtttttcaagtat

SEQ ID NO: 1014064 - DNA, 33 bp, Homo sapien
gccaaattcatgttccggctgtttttcaagtat

SEQ ID NO: 1014065 - DNA, 33 bp, Homo sapien
tctctctgaaggttctaaagggagaatttgttc

SEQ ID NO: 1014066 - DNA, 33 bp, Homo sapien
tctctctgaaggttctgaagggagaatttgttc

SEQ ID NO: 1014067 - DNA, 33 bp, Homo sapien
aaatatattgtgagaacttccatacactattta

SEQ ID NO: 1014068 - DNA, 33 bp, Homo sapien
aaatatattgtgagaagttccatacactattta

SEQ ID NO: 1014069 - DNA, 33 bp, Homo sapien
ccagaaatcctatgcaaatggcctgttacttat

SEQ ID NO: 1014070 - DNA, 33 bp, Homo sapien
ccagaaatcctatgcagatggcctgttacttat

SEQ ID NO: 1014071 - DNA, 33 bp, Homo sapien
gaaggcttgacttgtaagagaaaaatacttcaa

SEQ ID NO: 1014072 - DNA, 33 bp, Homo sapien
gaaggcttgacttgtatgagaaaaatacttcaa

SEQ ID NO: 1014073 - DNA, 33 bp, Homo sapien
tggctattagacttaagcaccatctaccggatc

SEQ ID NO: 1014074 - DNA, 33 bp, Homo sapien
tggctattagacttaatcaccatctaccggatc

SEQ ID NO: 1014075 - DNA, 33 bp, Homo sapien
gtctgtggtatgtctacggaaaggccttttctc

SEQ ID NO: 1014076 - DNA, 33 bp, Homo sapien
gtctgtggtatgtctatggaaaggccttttctc

SEQ ID NO: 1014077 - DNA, 33 bp, Homo sapien
aggcatagattacagacaagtttgaaattactg

SEQ ID NO: 1014078 - DNA, 33 bp, Homo sapien
aggcatagattacagagaagtttgaaattactg

SEQ ID NO: 1014079 - DNA, 33 bp, Homo sapien
aacttgtgtagaaactaagaattagatgctggt

SEQ ID NO: 1014080 - DNA, 33 bp, Homo sapien
aacttgtgtagaaactgagaattagatgctggt

SEQ ID NO: 1014081 - DNA, 33 bp, Homo sapien
ctctgatttctgtttacactggcaaagtcccat

SEQ ID NO: 1014082 - DNA, 33 bp, Homo sapien
ctctgatttctgtttatactggcaaagtcccat

SEQ ID NO: 1014083 - DNA, 33 bp, Homo sapien
aaactactgagtttcaaaggtctattttccacc

SEQ ID NO: 1014084 - DNA, 33 bp, Homo sapien
aaactactgagtttcagaggtctattttccacc

SEQ ID NO: 1014085 - DNA, 33 bp, Homo sapien
taggcagcttagcatgaaacaatcacattgctt

SEQ ID NO: 1014086 - DNA, 33 bp, Homo sapien
taggcagcttagcatgcaacaatcacattgctt

SEQ ID NO: 1014087 - DNA, 33 bp, Homo sapien
gacttcataaacaagacgtagactataaacata

SEQ ID NO: 1014088 - DNA, 33 bp, Homo sapien
gacttcataaacaagatgtagactataaacata

SEQ ID NO: 1014089 - DNA, 33 bp, Homo sapien
gataagaagacacttacgcaatgatgttactgt

SEQ ID NO: 1014090 - DNA, 33 bp, Homo sapien
gataagaagacacttatgcaatgatgttactgt

SEQ ID NO: 1014091 - DNA, 33 bp, Homo sapien
gcatcatttgcctgcactgacattccttccagc

SEQ ID NO: 1014092 - DNA, 33 bp, Homo sapien
gcatcatttgcctgcattgacattccttccagc

SEQ ID NO: 1014093 - DNA, 33 bp, Homo sapien
tttcacttggatccccaaaccctaatgacagat

SEQ ID NO: 1014094 - DNA, 33 bp, Homo sapien
tttcacttggatcccctaaccctaatgacagat

SEQ ID NO: 1014095 - DNA, 33 bp, Homo sapien
acgacttcagaagcaactgttctatcagcagaa

SEQ ID NO: 1014096 - DNA, 33 bp, Homo sapien
acgacttcagaagcaattgttctatcagcagaa

SEQ ID NO: 1014097 - DNA, 33 bp, Homo sapien
caaacatctgtaacaaatgctacaatcaaacat

SEQ ID NO: 1014098 - DNA, 33 bp, Homo sapien
caaacatctgtaacaagtgctacaatcaaacat

SEQ ID NO: 1014099 - DNA, 33 bp, Homo sapien
aataaatggtctctcacgatattacatctcccc

SEQ ID NO: 1014100 - DNA, 33 bp, Homo sapien
aataaatggtctctcatgatattacatctcccc

SEQ ID NO: 1014101 - DNA, 33 bp, Homo sapien
ttcacttcaaggatgcacatatgtacctgacat

SEQ ID NO: 1014102 - DNA, 33 bp, Homo sapien
ttcacttcaaggatgcgcatatgtacctgacat

SEQ ID NO: 1014103 - DNA, 33 bp, Homo sapien
ataggaaaattacaaaatgacccctggctagga

SEQ ID NO: 1014104 - DNA, 33 bp, Homo sapien
ataggaaaattacaaactgacccctggctagga

SEQ ID NO: 1014105 - DNA, 33 bp, Homo sapien
aatgttgcaatgaataaggctacccttgttcca

SEQ ID NO: 1014106 - DNA, 33 bp, Homo sapien
aatgttgcaatgaatatggctacccttgttcca

SEQ ID NO: 1014107 - DNA, 33 bp, Homo sapien
taacagttgcactagtaaattccttgtgtctga

SEQ ID NO: 1014108 - DNA, 33 bp, Homo sapien
taacagttgcactagtcaattccttgtgtctga

SEQ ID NO: 1014109 - DNA, 33 bp, Homo sapien
ctctggtcttcttttccaccttatgtctccaaa

SEQ ID NO: 1014110 - DNA, 33 bp, Homo sapien
ctctggtcttcttttctaccttatgtctccaaa

SEQ ID NO: 1014111 - DNA, 33 bp, Homo sapien
ggtccttctaagttggcagcctcaaatctgcta

SEQ ID NO: 1014112 - DNA, 33 bp, Homo sapien
ggtccttctaagttgggagcctcaaatctgcta

SEQ ID NO: 1014113 - DNA, 33 bp, Homo sapien
aactccaactagaatacggctacagtgtgattt

SEQ ID NO: 1014114 - DNA, 33 bp, Homo sapien
aactccaactagaatatggctacagtgtgattt

SEQ ID NO: 1014115 - DNA, 33 bp, Homo sapien
atgagaacgcaggggaaatgtcaggtacttatc

SEQ ID NO: 1014116 - DNA, 33 bp, Homo sapien
atgagaacgcaggggagatgtcaggtacttatc

SEQ ID NO: 1014117 - DNA, 33 bp, Homo sapien
atgtcaaagacaaatacggtgaattgcaaaaca

SEQ ID NO: 1014118 - DNA, 33 bp, Homo sapien
atgtcaaagacaaatatggtgaattgcaaaaca

SEQ ID NO: 1014119 - DNA, 33 bp, Homo sapien
agactaatatatacaaagactgaggtagtttcc

SEQ ID NO: 1014120 - DNA, 33 bp, Homo sapien
agactaatatatacaatgactgaggtagtttcc

SEQ ID NO: 1014121 - DNA, 33 bp, Homo sapien
tgcgcacatatgtaaaaatcctctgagctgtac

SEQ ID NO: 1014122 - DNA, 33 bp, Homo sapien
tgcgcacatatgtaaagatcctctgagctgtac

SEQ ID NO: 1014123 - DNA, 33 bp, Homo sapien
ggtggaaccagagctacggctaatattttgcaa

SEQ ID NO: 1014124 - DNA, 33 bp, Homo sapien
ggtggaaccagagctagggctaatattttgcaa

SEQ ID NO: 1014125 - DNA, 33 bp, Homo sapien
agttctcagggccaagcactggagatgagagaa

SEQ ID NO: 1014126 - DNA, 33 bp, Homo sapien
agttctcagggccaagtactggagatgagagaa

SEQ ID NO: 1014127 - DNA, 33 bp, Homo sapien
taaggaaaacaatgatcacatttagtagcccag

SEQ ID NO: 1014128 - DNA, 33 bp, Homo sapien
taaggaaaacaatgatgacatttagtagcccag

SEQ ID NO: 1014129 - DNA, 33 bp, Homo sapien
taaatacccgttagtagcatttccttgcattta

SEQ ID NO: 1014130 - DNA, 33 bp, Homo sapien
taaatacccgttagtatcatttccttgcattta

SEQ ID NO: 1014131 - DNA, 33 bp, Homo sapien
cactgtgaatctcagacacgtctaggcactgtg

SEQ ID NO: 1014132 - DNA, 33 bp, Homo sapien
cactgtgaatctcagagacgtctaggcactgtg

SEQ ID NO: 1014133 - DNA, 33 bp, Homo sapien
agaatttctagggggaagtctaagctggaccac

SEQ ID NO: 1014134 - DNA, 33 bp, Homo sapien
agaatttctagggggaggtctaagctggaccac

SEQ ID NO: 1014135 - DNA, 33 bp, Homo sapien
caaaaatgtagactaaaccatgtgatcatcata

SEQ ID NO: 1014136 - DNA, 33 bp, Homo sapien
caaaaatgtagactaagccatgtgatcatcata

SEQ ID NO: 1014137 - DNA, 33 bp, Homo sapien
gtttcttcctgcataccaggtgctatgttcttc

SEQ ID NO: 1014138 - DNA, 33 bp, Homo sapien
gtttcttcctgcatactaggtgctatgttcttc

SEQ ID NO: 1014139 - DNA, 33 bp, Homo sapien
ggagtaacctttcaccccaagcccatacacccc

SEQ ID NO: 1014140 - DNA, 33 bp, Homo sapien
ggagtaacctttcacctcaagcccatacacccc

SEQ ID NO: 1014141 - DNA, 33 bp, Homo sapien
cacacaagagaagcaccaagagatgctttcaat

SEQ ID NO: 1014142 - DNA, 33 bp, Homo sapien
cacacaagagaagcactaagagatgctttcaat

SEQ ID NO: 1014143 - DNA, 33 bp, Homo sapien
gacatttctgaaacaaccttgtgatgggacctg

SEQ ID NO: 1014144 - DNA, 33 bp, Homo sapien
gacatttctgaaacaatcttgtgatgggacctg

SEQ ID NO: 1014145 - DNA, 33 bp, Homo sapien
acaggaaattagatccaaccatccccctgctta

SEQ ID NO: 1014146 - DNA, 33 bp, Homo sapien
acaggaaattagatcctaccatccccctgctta

SEQ ID NO: 1014147 - DNA, 33 bp, Homo sapien
gaactctttagcctcagattgtccttccgttct

SEQ ID NO: 1014148 - DNA, 33 bp, Homo sapien
gaactctttagcctcatattgtccttccgttct

SEQ ID NO: 1014149 - DNA, 33 bp, Homo sapien
tttgagtgagaaagacacttaaacactgagctc

SEQ ID NO: 1014150 - DNA, 33 bp, Homo sapien
tttgagtgagaaagactcttaaacactgagctc

SEQ ID NO: 1014151 - DNA, 33 bp, Homo sapien
aattattattgcttcaaaaacttttatcttaga

SEQ ID NO: 1014152 - DNA, 33 bp, Homo sapien
aattattattgcttcagaaacttttatcttaga

SEQ ID NO: 1014153 - DNA, 33 bp, Homo sapien
ctctgctagttgtccacgtttttattgaaagtt

SEQ ID NO: 1014154 - DNA, 33 bp, Homo sapien
ctctgctagttgtccatgtttttattgaaagtt

SEQ ID NO: 1014155 - DNA, 33 bp, Homo sapien
ttattacactggtaaacttaggcattgaggctc

SEQ ID NO: 1014156 - DNA, 33 bp, Homo sapien
ttattacactggtaaatttaggcattgaggctc

SEQ ID NO: 1014157 - DNA, 33 bp, Homo sapien
acaaatgattatctccaaagtagaaagaaataa

SEQ ID NO: 1014158 - DNA, 33 bp, Homo sapien
acaaatgattatctcccaagtagaaagaaataa

SEQ ID NO: 1014159 - DNA, 33 bp, Homo sapien
aacttgcatttttagaatagagtcaaggcctag

SEQ ID NO: 1014160 - DNA, 33 bp, Homo sapien
aacttgcatttttagagtagagtcaaggcctag

SEQ ID NO: 1014161 - DNA, 33 bp, Homo sapien
tgaggcagcactctagaaaggatttttaactgc

SEQ ID NO: 1014162 - DNA, 33 bp, Homo sapien
tgaggcagcactctagtaaggatttttaactgc

SEQ ID NO: 1014163 - DNA, 33 bp, Homo sapien
acaaaacaactggcctcactgatttttgagcca

SEQ ID NO: 1014164 - DNA, 33 bp, Homo sapien
acaaaacaactggccttactgatttttgagcca

SEQ ID NO: 1014165 - DNA, 33 bp, Homo sapien
tcagaaaacaccaagccctagttgctgggtcat

SEQ ID NO: 1014166 - DNA, 33 bp, Homo sapien
tcagaaaacaccaagctctagttgctgggtcat

SEQ ID NO: 1014167 - DNA, 33 bp, Homo sapien
agcttagtgtaaaatcaaacggctgagagcaac

SEQ ID NO: 1014168 - DNA, 33 bp, Homo sapien
agcttagtgtaaaatccaacggctgagagcaac

SEQ ID NO: 1014169 - DNA, 33 bp, Homo sapien
gtgatctaggacttcacgaaacagctccagatt

SEQ ID NO: 1014170 - DNA, 33 bp, Homo sapien
gtgatctaggacttcatgaaacagctccagatt

SEQ ID NO: 1014171 - DNA, 33 bp, Homo sapien
gaggattacaaacctaccttgcagagttgttgt

SEQ ID NO: 1014172 - DNA, 33 bp, Homo sapien
gaggattacaaacctatcttgcagagttgttgt

SEQ ID NO: 1014173 - DNA, 33 bp, Homo sapien
gggacagaaaggaaacaaagataacagaaccag

SEQ ID NO: 1014174 - DNA, 33 bp, Homo sapien
gggacagaaaggaaaccaagataacagaaccag

SEQ ID NO: 1014175 - DNA, 33 bp, Homo sapien
gagatcttttatcagccacttatctccttcaac

SEQ ID NO: 1014176 - DNA, 33 bp, Homo sapien
gagatcttttatcagctacttatctccttcaac

SEQ ID NO: 1014177 - DNA, 33 bp, Homo sapien
aatctccaagtacatacagaactgctttactta

SEQ ID NO: 1014178 - DNA, 33 bp, Homo sapien
aatctccaagtacatagagaactgctttactta

SEQ ID NO: 1014179 - DNA, 33 bp, Homo sapien
ctcttctgaactgttacgggggagataacgaaa

SEQ ID NO: 1014180 - DNA, 33 bp, Homo sapien
ctcttctgaactgttatgggggagataacgaaa

SEQ ID NO: 1014181 - DNA, 33 bp, Homo sapien
ctcttcaccttctgtaagttcaagttctcctgt

SEQ ID NO: 1014182 - DNA, 33 bp, Homo sapien
ctcttcaccttctgtatgttcaagttctcctgt

SEQ ID NO: 1014183 - DNA, 33 bp, Homo sapien
tttattcttccttgctcagagtgaggaaatagc

SEQ ID NO: 1014184 - DNA, 33 bp, Homo sapien
tttattcttccttgctgagagtgaggaaatagc

SEQ ID NO: 1014185 - DNA, 33 bp, Homo sapien
gaaggaaactgtttagcaaaatggataagattc

SEQ ID NO: 1014186 - DNA, 33 bp, Homo sapien
gaaggaaactgtttaggaaaatggataagattc

SEQ ID NO: 1014187 - DNA, 33 bp, Homo sapien
ttaaagagctgggatccaaaataagattttttg

SEQ ID NO: 1014188 - DNA, 33 bp, Homo sapien
ttaaagagctgggatctaaaataagattttttg

SEQ ID NO: 1014189 - DNA, 33 bp, Homo sapien
aaatgtaaagaaaggagattgagtgactctctc

SEQ ID NO: 1014190 - DNA, 33 bp, Homo sapien
aaatgtaaagaaaggatattgagtgactctctc

SEQ ID NO: 1014191 - DNA, 33 bp, Homo sapien
gacatagaatttaccacctgtacatttttaaga

SEQ ID NO: 1014192 - DNA, 33 bp, Homo sapien
gacatagaatttaccatctgtacatttttaaga

SEQ ID NO: 1014193 - DNA, 33 bp, Homo sapien
aggttctgttcaggtcacttttactttctattt

SEQ ID NO: 1014194 - DNA, 33 bp, Homo sapien
aggttctgttcaggtcgcttttactttctattt

SEQ ID NO: 1014195 - DNA, 33 bp, Homo sapien
ttttttgctctaaatgccatgtactttttccca

SEQ ID NO: 1014196 - DNA, 33 bp, Homo sapien
ttttttgctctaaatgtcatgtactttttccca

SEQ ID NO: 1014197 - DNA, 33 bp, Homo sapien
tagaaataactcttcccccttgcatttatagag

SEQ ID NO: 1014198 - DNA, 33 bp, Homo sapien
tagaaataactcttcctccttgcatttatagag

SEQ ID NO: 1014199 - DNA, 33 bp, Homo sapien
atacttccaaaagtgagaatataatcttgaaat

SEQ ID NO: 1014200 - DNA, 33 bp, Homo sapien
atacttccaaaagtgataatataatcttgaaat

SEQ ID NO: 1014201 - DNA, 33 bp, Homo sapien
gaaacaagccttgaaaatcatgaagttttgtgg

SEQ ID NO: 1014202 - DNA, 33 bp, Homo sapien
gaaacaagccttgaaagtcatgaagttttgtgg

SEQ ID NO: 1014203 - DNA, 33 bp, Homo sapien
aacctggttggtggtgaagctcaaaataaatct

SEQ ID NO: 1014204 - DNA, 33 bp, Homo sapien
aacctggttggtggtggagctcaaaataaatct

SEQ ID NO: 1014205 - DNA, 33 bp, Homo sapien
aaattcactctgacccaagagaaacagctgtca

SEQ ID NO: 1014206 - DNA, 33 bp, Homo sapien
aaattcactctgacccgagagaaacagctgtca

SEQ ID NO: 1014207 - DNA, 33 bp, Homo sapien
tttctgttacctacaaacttgaggaagaaatga

SEQ ID NO: 1014208 - DNA, 33 bp, Homo sapien
tttctgttacctacaaccttgaggaagaaatga

SEQ ID NO: 1014209 - DNA, 33 bp, Homo sapien
gaatattagaggcccactatcttttgatttgtt

SEQ ID NO: 1014210 - DNA, 33 bp, Homo sapien
gaatattagaggcccattatcttttgatttgtt

SEQ ID NO: 1014211 - DNA, 33 bp, Homo sapien
tgttacacgataaaaacgatcctaaaatgtgtg

SEQ ID NO: 1014212 - DNA, 33 bp, Homo sapien
tgttacacgataaaaatgatcctaaaatgtgtg

SEQ ID NO: 1014213 - DNA, 33 bp, Homo sapien
tctacaaagaacgtaaacaaatatacaagaaaa

SEQ ID NO: 1014214 - DNA, 33 bp, Homo sapien
tctacaaagaacgtaagcaaatatacaagaaaa

SEQ ID NO: 1014215 - DNA, 33 bp, Homo sapien
tattcctggacaattccaggagtctcacatctt

SEQ ID NO: 1014216 - DNA, 33 bp, Homo sapien
tattcctggacaattctaggagtctcacatctt

SEQ ID NO: 1014217 - DNA, 33 bp, Homo sapien
acaggcaggcagtgagaaggtaaataaaaccaa

SEQ ID NO: 1014218 - DNA, 33 bp, Homo sapien
acaggcaggcagtgaggaggtaaataaaaccaa

SEQ ID NO: 1014219 - DNA, 33 bp, Homo sapien
ccttcccagcctctaacaatcacaattctactc

SEQ ID NO: 1014220 - DNA, 33 bp, Homo sapien
ccttcccagcctctaataatcacaattctactc

SEQ ID NO: 1014221 - DNA, 33 bp, Homo sapien
tttggaagttaaaatagcttcgattgtgcttta

SEQ ID NO: 1014222 - DNA, 33 bp, Homo sapien
tttggaagttaaaatatcttcgattgtgcttta

SEQ ID NO: 1014223 - DNA, 33 bp, Homo sapien
ggaattcatggagaaacgtgagtcaattacaac

SEQ ID NO: 1014224 - DNA, 33 bp, Homo sapien
ggaattcatggagaaatgtgagtcaattacaac

SEQ ID NO: 1014225 - DNA, 33 bp, Homo sapien
gacatttacaatacaccctgacattatggagag

SEQ ID NO: 1014226 - DNA, 33 bp, Homo sapien
gacatttacaatacacgctgacattatggagag

SEQ ID NO: 1014227 - DNA, 33 bp, Homo sapien
caaaaattcctaagttcaaccacggttggggat

SEQ ID NO: 1014228 - DNA, 33 bp, Homo sapien
caaaaattcctaagttgaaccacggttggggat

SEQ ID NO: 1014229 - DNA, 33 bp, Homo sapien
taatacacaaacacaaaaattttaaacaaggca

SEQ ID NO: 1014230 - DNA, 33 bp, Homo sapien
taatacacaaacacaacaattttaaacaaggca

SEQ ID NO: 1014231 - DNA, 33 bp, Homo sapien
ctgtttgtgaggagaccgactttcatgttttgc

SEQ ID NO: 1014232 - DNA, 33 bp, Homo sapien
ctgtttgtgaggagactgactttcatgttttgc

SEQ ID NO: 1014233 - DNA, 33 bp, Homo sapien
ttcctccaattaagaaccttcatccataaacac

SEQ ID NO: 1014234 - DNA, 33 bp, Homo sapien
ttcctccaattaagaagcttcatccataaacac

SEQ ID NO: 1014235 - DNA, 33 bp, Homo sapien
ctggtcagatagatgacctggagaaagacattg

SEQ ID NO: 1014236 - DNA, 33 bp, Homo sapien
ctggtcagatagatgatctggagaaagacattg

SEQ ID NO: 1014237 - DNA, 33 bp, Homo sapien
gtatttaggttacatggatctttctcctttttt

SEQ ID NO: 1014238 - DNA, 33 bp, Homo sapien
gtatttaggttacatgtatctttctcctttttt

SEQ ID NO: 1014239 - DNA, 33 bp, Homo sapien
ttaacataccaaattacgcaatacaaaatataa

SEQ ID NO: 1014240 - DNA, 33 bp, Homo sapien
ttaacataccaaattatgcaatacaaaatataa

SEQ ID NO: 1014241 - DNA, 33 bp, Homo sapien
aattaaatggtatataaaatgaccaaaatcaat

SEQ ID NO: 1014242 - DNA, 33 bp, Homo sapien
aattaaatggtatatacaatgaccaaaatcaat

SEQ ID NO: 1014243 - DNA, 33 bp, Homo sapien
ggaaggtttcgtagtactaactaaagacagtaa

SEQ ID NO: 1014244 - DNA, 33 bp, Homo sapien
ggaaggtttcgtagtagtaactaaagacagtaa

SEQ ID NO: 1014245 - DNA, 33 bp, Homo sapien
tggaggggcattgtataaatataaatggttttt

SEQ ID NO: 1014246 - DNA, 33 bp, Homo sapien
tggaggggcattgtatgaatataaatggttttt

SEQ ID NO: 1014247 - DNA, 33 bp, Homo sapien
aattccttggcgctcacgtttagtagctactcc

SEQ ID NO: 1014248 - DNA, 33 bp, Homo sapien
aattccttggcgctcaggtttagtagctactcc

SEQ ID NO: 1014249 - DNA, 33 bp, Homo sapien
ctcacatttgaaaaaccaatcatgcctttccaa

SEQ ID NO: 1014250 - DNA, 33 bp, Homo sapien
ctcacatttgaaaaacgaatcatgcctttccaa

SEQ ID NO: 1014251 - DNA, 33 bp, Homo sapien
taaatacttgtgtcacaggcagtagtacacgta

SEQ ID NO: 1014252 - DNA, 33 bp, Homo sapien
taaatacttgtgtcacgggcagtagtacacgta

SEQ ID NO: 1014253 - DNA, 33 bp, Homo sapien
aatgtttaggcaagaaatgtgttgactctgtgg

SEQ ID NO: 1014254 - DNA, 33 bp, Homo sapien
aatgtttaggcaagaagtgtgttgactctgtgg

SEQ ID NO: 1014255 - DNA, 33 bp, Homo sapien
agtacatatcacctgtaaagtattcctacaaat

SEQ ID NO: 1014256 - DNA, 33 bp, Homo sapien
agtacatatcacctgttaagtattcctacaaat

SEQ ID NO: 1014257 - DNA, 33 bp, Homo sapien
aaataatacagtttgaggtactcttgcttatgt

SEQ ID NO: 1014258 - DNA, 33 bp, Homo sapien
aaataatacagtttgatgtactcttgcttatgt

SEQ ID NO: 1014259 - DNA, 33 bp, Homo sapien
tgtaatatatattcaactgtaagtcaataacct

SEQ ID NO: 1014260 - DNA, 33 bp, Homo sapien
tgtaatatatattcaagtgtaagtcaataacct

SEQ ID NO: 1014261 - DNA, 33 bp, Homo sapien
ccttgtttattgcacgcactgaatagttgcata

SEQ ID NO: 1014262 - DNA, 33 bp, Homo sapien
ccttgtttattgcacgtactgaatagttgcata

SEQ ID NO: 1014263 - DNA, 33 bp, Homo sapien
tactgcttattccaaaggatgtagtaggtatta

SEQ ID NO: 1014264 - DNA, 33 bp, Homo sapien
tactgcttattccaaatgatgtagtaggtatta

SEQ ID NO: 1014265 - DNA, 33 bp, Homo sapien
atttgaaagcttgcaaattctaggggaaggctt

SEQ ID NO: 1014266 - DNA, 33 bp, Homo sapien
atttgaaagcttgcaacttctaggggaaggctt

SEQ ID NO: 1014267 - DNA, 33 bp, Homo sapien
ctttcttacagtctgacggggaagatagattaa

SEQ ID NO: 1014268 - DNA, 33 bp, Homo sapien
ctttcttacagtctgatggggaagatagattaa

SEQ ID NO: 1014269 - DNA, 33 bp, Homo sapien
gggcatcactgactcacgtggactattatacca

SEQ ID NO: 1014270 - DNA, 33 bp, Homo sapien
gggcatcactgactcaggtggactattatacca

SEQ ID NO: 1014271 - DNA, 33 bp, Homo sapien
ggaggaatttcatcacacgcttggctgtttatt

SEQ ID NO: 1014272 - DNA, 33 bp, Homo sapien
ggaggaatttcatcacgcgcttggctgtttatt

SEQ ID NO: 1014273 - DNA, 33 bp, Homo sapien
tatttttcctgtcttacgtgaaacatttcccat

SEQ ID NO: 1014274 - DNA, 33 bp, Homo sapien
tatttttcctgtcttatgtgaaacatttcccat

SEQ ID NO: 1014275 - DNA, 33 bp, Homo sapien
tcagtcttacaaataacgagtagtaacttaagt

SEQ ID NO: 1014276 - DNA, 33 bp, Homo sapien
tcagtcttacaaataatgagtagtaacttaagt

SEQ ID NO: 1014277 - DNA, 33 bp, Homo sapien
tccttcctgcttaataaacagctaaccttttta

SEQ ID NO: 1014278 - DNA, 33 bp, Homo sapien
tccttcctgcttaatacacagctaaccttttta

SEQ ID NO: 1014279 - DNA, 33 bp, Homo sapien
tcttaggagtgaaccaaatttatatttacatat

SEQ ID NO: 1014280 - DNA, 33 bp, Homo sapien
tcttaggagtgaaccatatttatatttacatat

SEQ ID NO: 1014281 - DNA, 33 bp, Homo sapien
tattagaatcatttcaaaaaggtattaaatcta

SEQ ID NO: 1014282 - DNA, 33 bp, Homo sapien
tattagaatcatttcagaaaggtattaaatcta

SEQ ID NO: 1014283 - DNA, 33 bp, Homo sapien
cgtgccattcataccaagaaatgacaattataa

SEQ ID NO: 1014284 - DNA, 33 bp, Homo sapien
cgtgccattcataccaggaaatgacaattataa

SEQ ID NO: 1014285 - DNA, 33 bp, Homo sapien
gaacaatgttcccaacgaaagccgtctgtatta

SEQ ID NO: 1014286 - DNA, 33 bp, Homo sapien
gaacaatgttcccaactaaagccgtctgtatta

SEQ ID NO: 1014287 - DNA, 33 bp, Homo sapien
actctatcagcagtaacctctcttatgttttcc

SEQ ID NO: 1014288 - DNA, 33 bp, Homo sapien
actctatcagcagtaatctctcttatgttttcc

SEQ ID NO: 1014289 - DNA, 33 bp, Homo sapien
ttaaatgagaagatacaatagtgagccgttcta

SEQ ID NO: 1014290 - DNA, 33 bp, Homo sapien
ttaaatgagaagatacgatagtgagccgttcta

SEQ ID NO: 1014291 - DNA, 33 bp, Homo sapien
atttatgtcacacatacctgttttatttatgta

SEQ ID NO: 1014292 - DNA, 33 bp, Homo sapien
atttatgtcacacatatctgttttatttatgta

SEQ ID NO: 1014293 - DNA, 33 bp, Homo sapien
ctggtttggtcattaggagaatatgtgacaccc

SEQ ID NO: 1014294 - DNA, 33 bp, Homo sapien
ctggtttggtcattagtagaatatgtgacaccc

SEQ ID NO: 1014295 - DNA, 33 bp, Homo sapien
ttcctgactggtctggcaggatatcttgaatgt

SEQ ID NO: 1014296 - DNA, 33 bp, Homo sapien
ttcctgactggtctggtaggatatcttgaatgt

SEQ ID NO: 1014297 - DNA, 33 bp, Homo sapien
ctttcgaaggtgaataaaaatgtaactgtgaat

SEQ ID NO: 1014298 - DNA, 33 bp, Homo sapien
ctttcgaaggtgaatagaaatgtaactgtgaat

SEQ ID NO: 1014299 - DNA, 33 bp, Homo sapien
cacaaaagaatagacaaataggcctggtgcagt

SEQ ID NO: 1014300 - DNA, 33 bp, Homo sapien
cacaaaagaatagacacataggcctggtgcagt

SEQ ID NO: 1014301 - DNA, 33 bp, Homo sapien
taaatgtttgatgtaaataaagttgaaagaaag

SEQ ID NO: 1014302 - DNA, 33 bp, Homo sapien
taaatgtttgatgtaagtaaagttgaaagaaag

SEQ ID NO: 1014303 - DNA, 33 bp, Homo sapien
tacctcatcttaagtaaggccctggttagaacc

SEQ ID NO: 1014304 - DNA, 33 bp, Homo sapien
tacctcatcttaagtatggccctggttagaacc

SEQ ID NO: 1014305 - DNA, 33 bp, Homo sapien
gagggagcaacctatacaaagggggtgtgtata

SEQ ID NO: 1014306 - DNA, 33 bp, Homo sapien
gagggagcaacctatataaagggggtgtgtata

SEQ ID NO: 1014307 - DNA, 33 bp, Homo sapien
acctagagggaaagcacggcagttcttgaaagt

SEQ ID NO: 1014308 - DNA, 33 bp, Homo sapien
acctagagggaaagcatggcagttcttgaaagt

SEQ ID NO: 1014309 - DNA, 33 bp, Homo sapien
aagaaatagctctccccccatttcagcacatat

SEQ ID NO: 1014310 - DNA, 33 bp, Homo sapien
aagaaatagctctccctccatttcagcacatat

SEQ ID NO: 1014311 - DNA, 33 bp, Homo sapien
gactgcacctgctcaaagatcagaagtgggccc

SEQ ID NO: 1014312 - DNA, 33 bp, Homo sapien
gactgcacctgctcaaggatcagaagtgggccc

SEQ ID NO: 1014313 - DNA, 33 bp, Homo sapien
agataccaattttccacgtcaaactagcgaaga

SEQ ID NO: 1014314 - DNA, 33 bp, Homo sapien
agataccaattttccatgtcaaactagcgaaga

SEQ ID NO: 1014315 - DNA, 33 bp, Homo sapien
gaggaaaacagtttcaaccataggatcattgac

SEQ ID NO: 1014316 - DNA, 33 bp, Homo sapien
gaggaaaacagtttcacccataggatcattgac

SEQ ID NO: 1014317 - DNA, 33 bp, Homo sapien
gtgactttactttccacgagatctctctggttt

SEQ ID NO: 1014318 - DNA, 33 bp, Homo sapien
gtgactttactttccatgagatctctctggttt

SEQ ID NO: 1014319 - DNA, 33 bp, Homo sapien
tgagtctgtcttttgcccttcactttaccattt

SEQ ID NO: 1014320 - DNA, 33 bp, Homo sapien
tgagtctgtcttttgctcttcactttaccattt

SEQ ID NO: 1014321 - DNA, 33 bp, Homo sapien
atacagatactaaaaaatagcaataagtggagg

SEQ ID NO: 1014322 - DNA, 33 bp, Homo sapien
atacagatactaaaaagtagcaataagtggagg

SEQ ID NO: 1014323 - DNA, 33 bp, Homo sapien
agtttgccatgtactccaggaactgaagtctaa

SEQ ID NO: 1014324 - DNA, 33 bp, Homo sapien
agtttgccatgtactctaggaactgaagtctaa

SEQ ID NO: 1014325 - DNA, 33 bp, Homo sapien
gagccacagcagcatacgtatttctgaaaactc

SEQ ID NO: 1014326 - DNA, 33 bp, Homo sapien
gagccacagcagcatatgtatttctgaaaactc

SEQ ID NO: 1014327 - DNA, 33 bp, Homo sapien
tatgtatagtacagcaagagtaacaacagggtt

SEQ ID NO: 1014328 - DNA, 33 bp, Homo sapien
tatgtatagtacagcaggagtaacaacagggtt

SEQ ID NO: 1014329 - DNA, 33 bp, Homo sapien
gctaagcaaagtcctgaaagttggtgagatcac

SEQ ID NO: 1014330 - DNA, 33 bp, Homo sapien
gctaagcaaagtcctggaagttggtgagatcac

SEQ ID NO: 1014331 - DNA, 33 bp, Homo sapien
aacacataaatacagacaggtactaagagagag

SEQ ID NO: 1014332 - DNA, 33 bp, Homo sapien
aacacataaatacagataggtactaagagagag

SEQ ID NO: 1014333 - DNA, 33 bp, Homo sapien
tacctacttctgttacaaagatgaaattaccat

SEQ ID NO: 1014334 - DNA, 33 bp, Homo sapien
tacctacttctgttaccaagatgaaattaccat

SEQ ID NO: 1014335 - DNA, 33 bp, Homo sapien
tgttctgaagacatgacgcattattccaaacac

SEQ ID NO: 1014336 - DNA, 33 bp, Homo sapien
tgttctgaagacatgatgcattattccaaacac

SEQ ID NO: 1014337 - DNA, 33 bp, Homo sapien
aaatgaaaattgctgacctttgaggttttatgt

SEQ ID NO: 1014338 - DNA, 33 bp, Homo sapien
aaatgaaaattgctgatctttgaggttttatgt

SEQ ID NO: 1014339 - DNA, 33 bp, Homo sapien
agatttagtgagaagacgctactaagaaagatt

SEQ ID NO: 1014340 - DNA, 33 bp, Homo sapien
agatttagtgagaagatgctactaagaaagatt

SEQ ID NO: 1014341 - DNA, 33 bp, Homo sapien
acgtctaccaagttaacaaccaagcatcacaag

SEQ ID NO: 1014342 - DNA, 33 bp, Homo sapien
acgtctaccaagttaataaccaagcatcacaag

SEQ ID NO: 1014343 - DNA, 33 bp, Homo sapien
ttaaaatgagaatctacagttgtatttgctagt

SEQ ID NO: 1014344 - DNA, 33 bp, Homo sapien
ttaaaatgagaatctatagttgtatttgctagt

SEQ ID NO: 1014345 - DNA, 33 bp, Homo sapien
ataagcactttacacaaatttaattgtcaacct

SEQ ID NO: 1014346 - DNA, 33 bp, Homo sapien
ataagcactttacacagatttaattgtcaacct

SEQ ID NO: 1014347 - DNA, 33 bp, Homo sapien
ccttcgttagtactcaacagagagcaatcagcc

SEQ ID NO: 1014348 - DNA, 33 bp, Homo sapien
ccttcgttagtactcagcagagagcaatcagcc

SEQ ID NO: 1014349 - DNA, 33 bp, Homo sapien
aacatcctgtcccccaaagtaagaattcctata

SEQ ID NO: 1014350 - DNA, 33 bp, Homo sapien
aacatcctgtcccccagagtaagaattcctata

SEQ ID NO: 1014351 - DNA, 33 bp, Homo sapien
gccaaaccataccagacggggacactaaggact

SEQ ID NO: 1014352 - DNA, 33 bp, Homo sapien
gccaaaccataccagatggggacactaaggact

SEQ ID NO: 1014353 - DNA, 33 bp, Homo sapien
ggcagtttcattatcagtaaaatgggccataag

SEQ ID NO: 1014354 - DNA, 33 bp, Homo sapien
ggcagtttcattatcattaaaatgggccataag

SEQ ID NO: 1014355 - DNA, 33 bp, Homo sapien
tttgtctgcaggttcaagttgagctactatgca

SEQ ID NO: 1014356 - DNA, 33 bp, Homo sapien
tttgtctgcaggttcatgttgagctactatgca

SEQ ID NO: 1014357 - DNA, 33 bp, Homo sapien
ttgaaatcaaataatcactgtatggacttagca

SEQ ID NO: 1014358 - DNA, 33 bp, Homo sapien
ttgaaatcaaataatcgctgtatggacttagca

SEQ ID NO: 1014359 - DNA, 33 bp, Homo sapien
ggtactgacccttctcacagtagaaaatctaca

SEQ ID NO: 1014360 - DNA, 33 bp, Homo sapien
ggtactgacccttctcgcagtagaaaatctaca

SEQ ID NO: 1014361 - DNA, 33 bp, Homo sapien
atttttccttctttcaatattggcagcaacatt

SEQ ID NO: 1014362 - DNA, 33 bp, Homo sapien
atttttccttctttcagtattggcagcaacatt

SEQ ID NO: 1014363 - DNA, 33 bp, Homo sapien
tttttccagtactccccacttgacagcctctca

SEQ ID NO: 1014364 - DNA, 33 bp, Homo sapien
tttttccagtactccctacttgacagcctctca

SEQ ID NO: 1014365 - DNA, 33 bp, Homo sapien
agacagcagtgacttacgactggagaagcttct

SEQ ID NO: 1014366 - DNA, 33 bp, Homo sapien
agacagcagtgacttaggactggagaagcttct

SEQ ID NO: 1014367 - DNA, 33 bp, Homo sapien
aaatactataataaaacatgctgattaaattga

SEQ ID NO: 1014368 - DNA, 33 bp, Homo sapien
aaatactataataaaagatgctgattaaattga

SEQ ID NO: 1014369 - DNA, 33 bp, Homo sapien
gtggaactgctggttcacaggctaagtaaatgt

SEQ ID NO: 1014370 - DNA, 33 bp, Homo sapien
gtggaactgctggttcccaggctaagtaaatgt

SEQ ID NO: 1014371 - DNA, 33 bp, Homo sapien
ctacttatttatttgcccactgtttatctccct

SEQ ID NO: 1014372 - DNA, 33 bp, Homo sapien
ctacttatttatttgctcactgtttatctccct

SEQ ID NO: 1014373 - DNA, 33 bp, Homo sapien
agaatgtacagttcacgaaaatgctgagtgtct

SEQ ID NO: 1014374 - DNA, 33 bp, Homo sapien
agaatgtacagttcactaaaatgctgagtgtct

SEQ ID NO: 1014375 - DNA, 33 bp, Homo sapien
gcctcatagtgattaacgggtttgtatagaagc

SEQ ID NO: 1014376 - DNA, 33 bp, Homo sapien
gcctcatagtgattaatgggtttgtatagaagc

SEQ ID NO: 1014377 - DNA, 33 bp, Homo sapien
ttctagaataagatacaacctcataagctatca

SEQ ID NO: 1014378 - DNA, 33 bp, Homo sapien
ttctagaataagataccacctcataagctatca

SEQ ID NO: 1014379 - DNA, 33 bp, Homo sapien
atttccaatagtcctgaagtgatgttagctaag

SEQ ID NO: 1014380 - DNA, 33 bp, Homo sapien
atttccaatagtcctgcagtgatgttagctaag

SEQ ID NO: 1014381 - DNA, 33 bp, Homo sapien
atagtgattcatcccacagttactgacatttca

SEQ ID NO: 1014382 - DNA, 33 bp, Homo sapien
atagtgattcatcccatagttactgacatttca

SEQ ID NO: 1014383 - DNA, 33 bp, Homo sapien
gatagtgtgattttgaaagtgtatcattctaat

SEQ ID NO: 1014384 - DNA, 33 bp, Homo sapien
gatagtgtgattttgagagtgtatcattctaat

SEQ ID NO: 1014385 - DNA, 33 bp, Homo sapien
gatgccaatagccaataaaaaatgtatccagat

SEQ ID NO: 1014386 - DNA, 33 bp, Homo sapien
gatgccaatagccaatcaaaaatgtatccagat

SEQ ID NO: 1014387 - DNA, 33 bp, Homo sapien
cagccattactgcccaaaggtattcatggctcc

SEQ ID NO: 1014388 - DNA, 33 bp, Homo sapien
cagccattactgcccacaggtattcatggctcc

SEQ ID NO: 1014389 - DNA, 33 bp, Homo sapien
gaaagatccaaaatgactacgttcactgtggtt

SEQ ID NO: 1014390 - DNA, 33 bp, Homo sapien
gaaagatccaaaatgattacgttcactgtggtt

SEQ ID NO: 1014391 - DNA, 33 bp, Homo sapien
acaggaatgtcctgtacctctcgggaacaaagg

SEQ ID NO: 1014392 - DNA, 33 bp, Homo sapien
acaggaatgtcctgtagctctcgggaacaaagg

SEQ ID NO: 1014393 - DNA, 33 bp, Homo sapien
aaacccaaaacctgccacaagtgattctgcact

SEQ ID NO: 1014394 - DNA, 33 bp, Homo sapien
aaacccaaaacctgccgcaagtgattctgcact

SEQ ID NO: 1014395 - DNA, 33 bp, Homo sapien
tgaagttgtgtattccgcatgtgcttcaagttg

SEQ ID NO: 1014396 - DNA, 33 bp, Homo sapien
tgaagttgtgtattcctcatgtgcttcaagttg

SEQ ID NO: 1014397 - DNA, 33 bp, Homo sapien
cctggaaatggggtacaaggcaagatgacctaa

SEQ ID NO: 1014398 - DNA, 33 bp, Homo sapien
cctggaaatggggtacgaggcaagatgacctaa

SEQ ID NO: 1014399 - DNA, 33 bp, Homo sapien
ctgttctacaataaacaaacatgcatggctttt

SEQ ID NO: 1014400 - DNA, 33 bp, Homo sapien
ctgttctacaataaaccaacatgcatggctttt

SEQ ID NO: 1014401 - DNA, 33 bp, Homo sapien
gcacaccctactgcggaatgacttgtgcagaac

SEQ ID NO: 1014402 - DNA, 33 bp, Homo sapien
gcacaccctactgcgggatgacttgtgcagaac

SEQ ID NO: 1014403 - DNA, 33 bp, Homo sapien
tccagtgagattaacaacctccttcactcttag

SEQ ID NO: 1014404 - DNA, 33 bp, Homo sapien
tccagtgagattaacaccctccttcactcttag

SEQ ID NO: 1014405 - DNA, 33 bp, Homo sapien
gggtcaggctatatgacgaaaattccttccaac

SEQ ID NO: 1014406 - DNA, 33 bp, Homo sapien
gggtcaggctatatgatgaaaattccttccaac

SEQ ID NO: 1014407 - DNA, 33 bp, Homo sapien
ttagtataatgcataactcattgttgtcctaga

SEQ ID NO: 1014408 - DNA, 33 bp, Homo sapien
ttagtataatgcataagtcattgttgtcctaga

SEQ ID NO: 1014409 - DNA, 33 bp, Homo sapien
acatgactaaatgaaacgggactggctgctaca

SEQ ID NO: 1014410 - DNA, 33 bp, Homo sapien
acatgactaaatgaaatgggactggctgctaca

SEQ ID NO: 1014411 - DNA, 33 bp, Homo sapien
cacagagcaaaataaacgctgctcacataacac

SEQ ID NO: 1014412 - DNA, 33 bp, Homo sapien
cacagagcaaaataaaggctgctcacataacac

SEQ ID NO: 1014413 - DNA, 33 bp, Homo sapien
caccaggagatgtctacgaacaaaggtggaggc

SEQ ID NO: 1014414 - DNA, 33 bp, Homo sapien
caccaggagatgtctaggaacaaaggtggaggc

SEQ ID NO: 1014415 - DNA, 33 bp, Homo sapien
aaggatgaaaagtaatcaagaatgcatatggaa

SEQ ID NO: 1014416 - DNA, 33 bp, Homo sapien
aaggatgaaaagtaatgaagaatgcatatggaa

SEQ ID NO: 1014417 - DNA, 33 bp, Homo sapien
tgcatgtcctccagaccagaaaatttcaaaaca

SEQ ID NO: 1014418 - DNA, 33 bp, Homo sapien
tgcatgtcctccagactagaaaatttcaaaaca

SEQ ID NO: 1014419 - DNA, 33 bp, Homo sapien
gaaatttgaccgataaaaagacactcaggacag

SEQ ID NO: 1014420 - DNA, 33 bp, Homo sapien
gaaatttgaccgataataagacactcaggacag

SEQ ID NO: 1014421 - DNA, 33 bp, Homo sapien
cactgtccagatgaaacggtgtacaaaaaggag

SEQ ID NO: 1014422 - DNA, 33 bp, Homo sapien
cactgtccagatgaaagggtgtacaaaaaggag

SEQ ID NO: 1014423 - DNA, 33 bp, Homo sapien
agcagggcattatttcccaaaggctttgttttt

SEQ ID NO: 1014424 - DNA, 33 bp, Homo sapien
agcagggcattatttcgcaaaggctttgttttt

SEQ ID NO: 1014425 - DNA, 33 bp, Homo sapien
tgttgagtcataaaggcaagtatttggtagttc

SEQ ID NO: 1014426 - DNA, 33 bp, Homo sapien
tgttgagtcataaaggtaagtatttggtagttc

SEQ ID NO: 1014427 - DNA, 33 bp, Homo sapien
agagcttcttaggtgccgaaacaaaacatgaag

SEQ ID NO: 1014428 - DNA, 33 bp, Homo sapien
agagcttcttaggtgctgaaacaaaacatgaag

SEQ ID NO: 1014429 - DNA, 33 bp, Homo sapien
gagaaaaggtaaatgaaccaatgtggagacttg

SEQ ID NO: 1014430 - DNA, 33 bp, Homo sapien
gagaaaaggtaaatgagccaatgtggagacttg

SEQ ID NO: 1014431 - DNA, 33 bp, Homo sapien
atagtgatgaagagtaagagctcaggagttgga

SEQ ID NO: 1014432 - DNA, 33 bp, Homo sapien
atagtgatgaagagtaggagctcaggagttgga

SEQ ID NO: 1014433 - DNA, 33 bp, Homo sapien
atgaaaagggaaatgaaacacagtgcaaaaatg

SEQ ID NO: 1014434 - DNA, 33 bp, Homo sapien
atgaaaagggaaatgatacacagtgcaaaaatg

SEQ ID NO: 1014435 - DNA, 33 bp, Homo sapien
ataatcaaggaccacaaagggaaacacgacaag

SEQ ID NO: 1014436 - DNA, 33 bp, Homo sapien
ataatcaaggaccacagagggaaacacgacaag

SEQ ID NO: 1014437 - DNA, 33 bp, Homo sapien
gagcccctcatttttacggattcttttagaatt

SEQ ID NO: 1014438 - DNA, 33 bp, Homo sapien
gagcccctcatttttatggattcttttagaatt

SEQ ID NO: 1014439 - DNA, 33 bp, Homo sapien
atctattttgttttcagtctcatatgtaaggct

SEQ ID NO: 1014440 - DNA, 33 bp, Homo sapien
atctattttgttttcattctcatatgtaaggct

SEQ ID NO: 1014441 - DNA, 33 bp, Homo sapien
ttcagtaggtctgggaaggatctcaaaccctga

SEQ ID NO: 1014442 - DNA, 33 bp, Homo sapien
ttcagtaggtctgggagggatctcaaaccctga

SEQ ID NO: 1014443 - DNA, 33 bp, Homo sapien
catgggtttgaattacacgggactcttgttaaa

SEQ ID NO: 1014444 - DNA, 33 bp, Homo sapien
catgggtttgaattacccgggactcttgttaaa

SEQ ID NO: 1014445 - DNA, 33 bp, Homo sapien
ctttggatgcagttagcaatatttaccagtttc

SEQ ID NO: 1014446 - DNA, 33 bp, Homo sapien
ctttggatgcagttagtaatatttaccagtttc

SEQ ID NO: 1014447 - DNA, 33 bp, Homo sapien
tgttaacatctggatcaatatcatgctttttat

SEQ ID NO: 1014448 - DNA, 33 bp, Homo sapien
tgttaacatctggatctatatcatgctttttat

SEQ ID NO: 1014449 - DNA, 33 bp, Homo sapien
tgagaaatgctattccacatagaagtgagttac

SEQ ID NO: 1014450 - DNA, 33 bp, Homo sapien
tgagaaatgctattccgcatagaagtgagttac

SEQ ID NO: 1014451 - DNA, 33 bp, Homo sapien
ttcctctctcctttcaatctctggtaatctcta

SEQ ID NO: 1014452 - DNA, 33 bp, Homo sapien
ttcctctctcctttcagtctctggtaatctcta

SEQ ID NO: 1014453 - DNA, 33 bp, Homo sapien
tgtaaggtttaacacaaaaagtcaatgcaatgt

SEQ ID NO: 1014454 - DNA, 33 bp, Homo sapien
tgtaaggtttaacacagaaagtcaatgcaatgt

SEQ ID NO: 1014455 - DNA, 33 bp, Homo sapien
atacatagttgaaggacggcaacctacaaactt

SEQ ID NO: 1014456 - DNA, 33 bp, Homo sapien
atacatagttgaaggatggcaacctacaaactt

SEQ ID NO: 1014457 - DNA, 33 bp, Homo sapien
ggcattatttagtaaacagctgtctctgtctca

SEQ ID NO: 1014458 - DNA, 33 bp, Homo sapien
ggcattatttagtaaagagctgtctctgtctca

SEQ ID NO: 1014459 - DNA, 33 bp, Homo sapien
ttgaaagactgttgagccaggaaaaagcttatt

SEQ ID NO: 1014460 - DNA, 33 bp, Homo sapien
ttgaaagactgttgagtcaggaaaaagcttatt

SEQ ID NO: 1014461 - DNA, 33 bp, Homo sapien
ccttggggatgagtgacggagagaggatacctt

SEQ ID NO: 1014462 - DNA, 33 bp, Homo sapien
ccttggggatgagtgagggagagaggatacctt

SEQ ID NO: 1014463 - DNA, 33 bp, Homo sapien
tttgcagcccacttaacgccacgttttttgcat

SEQ ID NO: 1014464 - DNA, 33 bp, Homo sapien
tttgcagcccacttaatgccacgttttttgcat

SEQ ID NO: 1014465 - DNA, 33 bp, Homo sapien
ttcagcttaaaaagcaaatcatttgataacaat

SEQ ID NO: 1014466 - DNA, 33 bp, Homo sapien
ttcagcttaaaaagcatatcatttgataacaat

SEQ ID NO: 1014467 - DNA, 33 bp, Homo sapien
tggaacaacttcttccaagtttcaccagggctg

SEQ ID NO: 1014468 - DNA, 33 bp, Homo sapien
tggaacaacttcttccgagtttcaccagggctg

SEQ ID NO: 1014469 - DNA, 33 bp, Homo sapien
tgcagaagcagaatatcaggattaacaaagaag

SEQ ID NO: 1014470 - DNA, 33 bp, Homo sapien
tgcagaagcagaatattaggattaacaaagaag

SEQ ID NO: 1014471 - DNA, 33 bp, Homo sapien
ttctcaaaactgcttaaacttttattctttgct

SEQ ID NO: 1014472 - DNA, 33 bp, Homo sapien
ttctcaaaactgcttagacttttattctttgct

SEQ ID NO: 1014473 - DNA, 33 bp, Homo sapien
tctaatcaaataattcacctgttttactagctt

SEQ ID NO: 1014474 - DNA, 33 bp, Homo sapien
tctaatcaaataattcgcctgttttactagctt

SEQ ID NO: 1014475 - DNA, 33 bp, Homo sapien
atttgtcaaattgccactcatttttccacctca

SEQ ID NO: 1014476 - DNA, 33 bp, Homo sapien
atttgtcaaattgccattcatttttccacctca

SEQ ID NO: 1014477 - DNA, 33 bp, Homo sapien
aactcagaccatcggaaagtaagtgacttccct

SEQ ID NO: 1014478 - DNA, 33 bp, Homo sapien
aactcagaccatcggagagtaagtgacttccct

SEQ ID NO: 1014479 - DNA, 33 bp, Homo sapien
tctccactgtaacatacgatgctgttcctgatc

SEQ ID NO: 1014480 - DNA, 33 bp, Homo sapien
tctccactgtaacatatgatgctgttcctgatc

SEQ ID NO: 1014481 - DNA, 33 bp, Homo sapien
gctagtcagtgtaacaataatgatttagtggac

SEQ ID NO: 1014482 - DNA, 33 bp, Homo sapien
gctagtcagtgtaacagtaatgatttagtggac

SEQ ID NO: 1014483 - DNA, 33 bp, Homo sapien
ttgtggtaaggcattcaatgatcaaaatgaaaa

SEQ ID NO: 1014484 - DNA, 33 bp, Homo sapien
ttgtggtaaggcattcgatgatcaaaatgaaaa

SEQ ID NO: 1014485 - DNA, 33 bp, Homo sapien
caaggcccagaagcaccactctctaatgcctgc

SEQ ID NO: 1014486 - DNA, 33 bp, Homo sapien
caaggcccagaagcactactctctaatgcctgc

SEQ ID NO: 1014487 - DNA, 33 bp, Homo sapien
ctcccctgggaaaacaaaggattccatagaagc

SEQ ID NO: 1014488 - DNA, 33 bp, Homo sapien
ctcccctgggaaaacagaggattccatagaagc

SEQ ID NO: 1014489 - DNA, 33 bp, Homo sapien
aacaagttttattggaataagccacacccattt

SEQ ID NO: 1014490 - DNA, 33 bp, Homo sapien
aacaagttttattggagtaagccacacccattt

SEQ ID NO: 1014491 - DNA, 33 bp, Homo sapien
ccactggtaaaaataaaaaggcatagccaagat

SEQ ID NO: 1014492 - DNA, 33 bp, Homo sapien
ccactggtaaaaataagaaggcatagccaagat

SEQ ID NO: 1014493 - DNA, 33 bp, Homo sapien
gctgccagcagggggtaacaaaaacaccattag

SEQ ID NO: 1014494 - DNA, 33 bp, Homo sapien
gctgccagcagggggtgacaaaaacaccattag

SEQ ID NO: 1014495 - DNA, 33 bp, Homo sapien
atgagcactttggagaggtagcagacttgtgct

SEQ ID NO: 1014496 - DNA, 33 bp, Homo sapien
atgagcactttggagatgtagcagacttgtgct

SEQ ID NO: 1014497 - DNA, 33 bp, Homo sapien
aaaactgtactggaaaatcactaatcatatgtc

SEQ ID NO: 1014498 - DNA, 33 bp, Homo sapien
aaaactgtactggaaactcactaatcatatgtc

SEQ ID NO: 1014499 - DNA, 33 bp, Homo sapien
tctgctggaaataataataacaagtctggccag

SEQ ID NO: 1014500 - DNA, 33 bp, Homo sapien
tctgctggaaataatagtaacaagtctggccag

SEQ ID NO: 1014501 - DNA, 33 bp, Homo sapien
agccttggagagagaaggagaaggtcctggacc

SEQ ID NO: 1014502 - DNA, 33 bp, Homo sapien
agccttggagagagaatgagaaggtcctggacc

SEQ ID NO: 1014503 - DNA, 33 bp, Homo sapien
tagtcccaacatggaaatgggtaagtggaggtc

SEQ ID NO: 1014504 - DNA, 33 bp, Homo sapien
tagtcccaacatggaactgggtaagtggaggtc

SEQ ID NO: 1014505 - DNA, 33 bp, Homo sapien
atacgccccttatctcagaacatgcatgcagac

SEQ ID NO: 1014506 - DNA, 33 bp, Homo sapien
atacgccccttatctcggaacatgcatgcagac

SEQ ID NO: 1014507 - DNA, 33 bp, Homo sapien
gctgcatggatcctcaacacaacctgtgtggta

SEQ ID NO: 1014508 - DNA, 33 bp, Homo sapien
gctgcatggatcctcagcacaacctgtgtggta

SEQ ID NO: 1014509 - DNA, 33 bp, Homo sapien
gtggattgctattgccaaaatgaccatttcaac

SEQ ID NO: 1014510 - DNA, 33 bp, Homo sapien
gtggattgctattgccgaaatgaccatttcaac

SEQ ID NO: 1014511 - DNA, 33 bp, Homo sapien
aatggtctttgtgacaaactttgggattaaatt

SEQ ID NO: 1014512 - DNA, 33 bp, Homo sapien
aatggtctttgtgacacactttgggattaaatt

SEQ ID NO: 1014513 - DNA, 33 bp, Homo sapien
aagggcatgttctgagactcaattattgattgc

SEQ ID NO: 1014514 - DNA, 33 bp, Homo sapien
aagggcatgttctgagtctcaattattgattgc

SEQ ID NO: 1014515 - DNA, 33 bp, Homo sapien
aaacaggtagttttccagagttattaaagtttg

SEQ ID NO: 1014516 - DNA, 33 bp, Homo sapien
aaacaggtagttttccggagttattaaagtttg

SEQ ID NO: 1014517 - DNA, 33 bp, Homo sapien
ctttctaattctctgaaaaaacttctaatctac

SEQ ID NO: 1014518 - DNA, 33 bp, Homo sapien
ctttctaattctctgagaaaacttctaatctac

SEQ ID NO: 1014519 - DNA, 33 bp, Homo sapien
ttttttgcttttttcagtactcatcacatatta

SEQ ID NO: 1014520 - DNA, 33 bp, Homo sapien
ttttttgcttttttcattactcatcacatatta

SEQ ID NO: 1014521 - DNA, 33 bp, Homo sapien
cagtggctgccacacaataagtgtctattgatg

SEQ ID NO: 1014522 - DNA, 33 bp, Homo sapien
cagtggctgccacacagtaagtgtctattgatg

SEQ ID NO: 1014523 - DNA, 33 bp, Homo sapien
tcaggaacagcacgaagaatttttttcttcaca

SEQ ID NO: 1014524 - DNA, 33 bp, Homo sapien
tcaggaacagcacgaataatttttttcttcaca

SEQ ID NO: 1014525 - DNA, 33 bp, Homo sapien
acctctcacctcagcaaattcttcagtaataat

SEQ ID NO: 1014526 - DNA, 33 bp, Homo sapien
acctctcacctcagcagattcttcagtaataat

SEQ ID NO: 1014527 - DNA, 33 bp, Homo sapien
agctacaaaatcctccagagcaaatgttatatc

SEQ ID NO: 1014528 - DNA, 33 bp, Homo sapien
agctacaaaatcctccggagcaaatgttatatc

SEQ ID NO: 1014529 - DNA, 33 bp, Homo sapien
tactcagaattgaagaacacagtagacataaag

SEQ ID NO: 1014530 - DNA, 33 bp, Homo sapien
tactcagaattgaagatcacagtagacataaag

SEQ ID NO: 1014531 - DNA, 33 bp, Homo sapien
atttcaagtccatatacagaaagtctaatgaga

SEQ ID NO: 1014532 - DNA, 33 bp, Homo sapien
atttcaagtccatatatagaaagtctaatgaga

SEQ ID NO: 1014533 - DNA, 33 bp, Homo sapien
ttcagtccaacttcaacgctttatttttagagg

SEQ ID NO: 1014534 - DNA, 33 bp, Homo sapien
ttcagtccaacttcaatgctttatttttagagg

SEQ ID NO: 1014535 - DNA, 33 bp, Homo sapien
ggagagccagaaagaacgctacatggcaagtca

SEQ ID NO: 1014536 - DNA, 33 bp, Homo sapien
ggagagccagaaagaatgctacatggcaagtca

SEQ ID NO: 1014537 - DNA, 33 bp, Homo sapien
tttatgttcaacaaaaagagaaacttcaggaac

SEQ ID NO: 1014538 - DNA, 33 bp, Homo sapien
tttatgttcaacaaaaggagaaacttcaggaac

SEQ ID NO: 1014539 - DNA, 33 bp, Homo sapien
aactgatcaacatgacagataaacacaactctg

SEQ ID NO: 1014540 - DNA, 33 bp, Homo sapien
aactgatcaacatgacggataaacacaactctg

SEQ ID NO: 1014541 - DNA, 33 bp, Homo sapien
aattcatggctgcttcacagtttaaaatcatct

SEQ ID NO: 1014542 - DNA, 33 bp, Homo sapien
aattcatggctgcttctcagtttaaaatcatct

SEQ ID NO: 1014543 - DNA, 33 bp, Homo sapien
ccacatagaggtgaaactgctgtcagatgttta

SEQ ID NO: 1014544 - DNA, 33 bp, Homo sapien
ccacatagaggtgaaattgctgtcagatgttta

SEQ ID NO: 1014545 - DNA, 33 bp, Homo sapien
gatgcctcagttttctaacgtcaggacctttgt

SEQ ID NO: 1014546 - DNA, 33 bp, Homo sapien
gatgcctcagttttctcacgtcaggacctttgt

SEQ ID NO: 1014547 - DNA, 33 bp, Homo sapien
tgtctagtcttcccacggcatcttgaagcttaa

SEQ ID NO: 1014548 - DNA, 33 bp, Homo sapien
tgtctagtcttcccactgcatcttgaagcttaa

SEQ ID NO: 1014549 - DNA, 33 bp, Homo sapien
actacaaataatagagaacaggatgaataatgt

SEQ ID NO: 1014550 - DNA, 33 bp, Homo sapien
actacaaataatagagtacaggatgaataatgt

SEQ ID NO: 1014551 - DNA, 33 bp, Homo sapien
tggaagccagagattacaaacaaaggccataat

SEQ ID NO: 1014552 - DNA, 33 bp, Homo sapien
tggaagccagagattataaacaaaggccataat

SEQ ID NO: 1014553 - DNA, 33 bp, Homo sapien
cacctgtgggatctagcaaactgtttggcttcc

SEQ ID NO: 1014554 - DNA, 33 bp, Homo sapien
cacctgtgggatctagtaaactgtttggcttcc

SEQ ID NO: 1014555 - DNA, 33 bp, Homo sapien
ttaggaggttgtttagcatggagaaaattttat

SEQ ID NO: 1014556 - DNA, 33 bp, Homo sapien
ttaggaggttgtttaggatggagaaaattttat

SEQ ID NO: 1014557 - DNA, 33 bp, Homo sapien
cagtatgcttagggaacgtgcttacctggtcag

SEQ ID NO: 1014558 - DNA, 33 bp, Homo sapien
cagtatgcttagggaatgtgcttacctggtcag

SEQ ID NO: 1014559 - DNA, 33 bp, Homo sapien
tcttcaacctgatttccaccttgtgttcttggc

SEQ ID NO: 1014560 - DNA, 33 bp, Homo sapien
tcttcaacctgatttctaccttgtgttcttggc

SEQ ID NO: 1014561 - DNA, 33 bp, Homo sapien
ccaatacacagagaaacagagacaagagcctaa

SEQ ID NO: 1014562 - DNA, 33 bp, Homo sapien
ccaatacacagagaaagagagacaagagcctaa

SEQ ID NO: 1014563 - DNA, 33 bp, Homo sapien
agttagctgaaatacaataaggctttgactaat

SEQ ID NO: 1014564 - DNA, 33 bp, Homo sapien
agttagctgaaatacagtaaggctttgactaat

SEQ ID NO: 1014565 - DNA, 33 bp, Homo sapien
gcacattggaaggtgaaaaatactgtcatagtt

SEQ ID NO: 1014566 - DNA, 33 bp, Homo sapien
gcacattggaaggtgacaaatactgtcatagtt

SEQ ID NO: 1014567 - DNA, 33 bp, Homo sapien
cagctctgaagtcttcaatgccctcttctccac

SEQ ID NO: 1014568 - DNA, 33 bp, Homo sapien
cagctctgaagtcttcgatgccctcttctccac

SEQ ID NO: 1014569 - DNA, 33 bp, Homo sapien
cagacaaggaaacagacactcagatctcctagt

SEQ ID NO: 1014570 - DNA, 33 bp, Homo sapien
cagacaaggaaacagagactcagatctcctagt

SEQ ID NO: 1014571 - DNA, 33 bp, Homo sapien
aaacgaccattgaagaactagaagatgagcaga

SEQ ID NO: 1014572 - DNA, 33 bp, Homo sapien
aaacgaccattgaagagctagaagatgagcaga

SEQ ID NO: 1014573 - DNA, 33 bp, Homo sapien
atgtgcggtttgccaactaagtgaatccatccc

SEQ ID NO: 1014574 - DNA, 33 bp, Homo sapien
atgtgcggtttgccaattaagtgaatccatccc

SEQ ID NO: 1014575 - DNA, 33 bp, Homo sapien
aacatcaggattaagacatttggtatttaaaaa

SEQ ID NO: 1014576 - DNA, 33 bp, Homo sapien
aacatcaggattaagatatttggtatttaaaaa

SEQ ID NO: 1014577 - DNA, 33 bp, Homo sapien
cacagatagctattccaactcagagattttaag

SEQ ID NO: 1014578 - DNA, 33 bp, Homo sapien
cacagatagctattccgactcagagattttaag

SEQ ID NO: 1014579 - DNA, 33 bp, Homo sapien
ttatactagttatcaacgaatggacttttggtt

SEQ ID NO: 1014580 - DNA, 33 bp, Homo sapien
ttatactagttatcaatgaatggacttttggtt

SEQ ID NO: 1014581 - DNA, 33 bp, Homo sapien
catgtgacttttaaaaaatggcagatatcgaca

SEQ ID NO: 1014582 - DNA, 33 bp, Homo sapien
catgtgacttttaaaacatggcagatatcgaca

SEQ ID NO: 1014583 - DNA, 33 bp, Homo sapien
taggttaaagtgactcaaaggttgaaggctaac

SEQ ID NO: 1014584 - DNA, 33 bp, Homo sapien
taggttaaagtgactcgaaggttgaaggctaac

SEQ ID NO: 1014585 - DNA, 33 bp, Homo sapien
accctggaatgtaaacagatctctgggcagggg

SEQ ID NO: 1014586 - DNA, 33 bp, Homo sapien
accctggaatgtaaaccgatctctgggcagggg

SEQ ID NO: 1014587 - DNA, 33 bp, Homo sapien
cttactgttcctccaggataggagatgtccctt

SEQ ID NO: 1014588 - DNA, 33 bp, Homo sapien
cttactgttcctccagtataggagatgtccctt

SEQ ID NO: 1014589 - DNA, 33 bp, Homo sapien
gattaaaccagagctaaattttaaaacacacct

SEQ ID NO: 1014590 - DNA, 33 bp, Homo sapien
gattaaaccagagctacattttaaaacacacct

SEQ ID NO: 1014591 - DNA, 33 bp, Homo sapien
atgcacagtgatggaaaccatgaatatgaatag

SEQ ID NO: 1014592 - DNA, 33 bp, Homo sapien
atgcacagtgatggaatccatgaatatgaatag

SEQ ID NO: 1014593 - DNA, 33 bp, Homo sapien
ctcgcacagctcatacaactcccaaagccaatt

SEQ ID NO: 1014594 - DNA, 33 bp, Homo sapien
ctcgcacagctcatacgactcccaaagccaatt

SEQ ID NO: 1014595 - DNA, 33 bp, Homo sapien
tcttccatatatacaccatccttctccctacaa

SEQ ID NO: 1014596 - DNA, 33 bp, Homo sapien
tcttccatatatacacgatccttctccctacaa

SEQ ID NO: 1014597 - DNA, 33 bp, Homo sapien
gacctccttgactatcagagtcctgaacaggag

SEQ ID NO: 1014598 - DNA, 33 bp, Homo sapien
gacctccttgactatcggagtcctgaacaggag

SEQ ID NO: 1014599 - DNA, 33 bp, Homo sapien
ggaaagtacatcaggggatactctaagaaattt

SEQ ID NO: 1014600 - DNA, 33 bp, Homo sapien
ggaaagtacatcagggtatactctaagaaattt

SEQ ID NO: 1014601 - DNA, 33 bp, Homo sapien
ggtactaagtgtaacaagtagtgtgctgataag

SEQ ID NO: 1014602 - DNA, 33 bp, Homo sapien
ggtactaagtgtaacaggtagtgtgctgataag

SEQ ID NO: 1014603 - DNA, 33 bp, Homo sapien
taaagtaatgaaataccattccacaagcatcaa

SEQ ID NO: 1014604 - DNA, 33 bp, Homo sapien
taaagtaatgaaatactattccacaagcatcaa

SEQ ID NO: 1014605 - DNA, 33 bp, Homo sapien
atgtgcctgaaataaaatgtccagagtcataat

SEQ ID NO: 1014606 - DNA, 33 bp, Homo sapien
atgtgcctgaaataaagtgtccagagtcataat

SEQ ID NO: 1014607 - DNA, 33 bp, Homo sapien
acagagattgtggctacgcaaatgcaccaaaaa

SEQ ID NO: 1014608 - DNA, 33 bp, Homo sapien
acagagattgtggctatgcaaatgcaccaaaaa

SEQ ID NO: 1014609 - DNA, 33 bp, Homo sapien
aactttactggaatgaggtcaattactttagtc

SEQ ID NO: 1014610 - DNA, 33 bp, Homo sapien
aactttactggaatgatgtcaattactttagtc

SEQ ID NO: 1014611 - DNA, 33 bp, Homo sapien
gagtttccatttaacaaaaaagaagtgagactg

SEQ ID NO: 1014612 - DNA, 33 bp, Homo sapien
gagtttccatttaacataaaagaagtgagactg

SEQ ID NO: 1014613 - DNA, 33 bp, Homo sapien
gagttttccctttgcgaactcaacagaactttt

SEQ ID NO: 1014614 - DNA, 33 bp, Homo sapien
gagttttccctttgcgcactcaacagaactttt

SEQ ID NO: 1014615 - DNA, 33 bp, Homo sapien
aagtcagttttagtgcgcaaattgagttttatg

SEQ ID NO: 1014616 - DNA, 33 bp, Homo sapien
aagtcagttttagtgctcaaattgagttttatg

SEQ ID NO: 1014617 - DNA, 33 bp, Homo sapien
agtgtaataaatgcaacaaaagaaatacgtact

SEQ ID NO: 1014618 - DNA, 33 bp, Homo sapien
agtgtaataaatgcaataaaagaaatacgtact

SEQ ID NO: 1014619 - DNA, 33 bp, Homo sapien
tgtaagtgttggagagccattaagcagaagtga

SEQ ID NO: 1014620 - DNA, 33 bp, Homo sapien
tgtaagtgttggagagtcattaagcagaagtga

SEQ ID NO: 1014621 - DNA, 33 bp, Homo sapien
agaaatggattagagaccaaaaagggtatcaga

SEQ ID NO: 1014622 - DNA, 33 bp, Homo sapien
agaaatggattagagagcaaaaagggtatcaga

SEQ ID NO: 1014623 - DNA, 33 bp, Homo sapien
tgctacagtttaaacagatcactcttatataat

SEQ ID NO: 1014624 - DNA, 33 bp, Homo sapien
tgctacagtttaaacatatcactcttatataat

SEQ ID NO: 1014625 - DNA, 33 bp, Homo sapien
aaacatcaagctgtccacatctttctgattcat

SEQ ID NO: 1014626 - DNA, 33 bp, Homo sapien
aaacatcaagctgtccgcatctttctgattcat

SEQ ID NO: 1014627 - DNA, 33 bp, Homo sapien
gatgtccactctcaccactccttttcagcatag

SEQ ID NO: 1014628 - DNA, 33 bp, Homo sapien
gatgtccactctcaccgctccttttcagcatag

SEQ ID NO: 1014629 - DNA, 33 bp, Homo sapien
gacttatttgaccatgcaacttttatagcttct

SEQ ID NO: 1014630 - DNA, 33 bp, Homo sapien
gacttatttgaccatggaacttttatagcttct

SEQ ID NO: 1014631 - DNA, 33 bp, Homo sapien
tactatcagcatgtagaagtttccaactgattc

SEQ ID NO: 1014632 - DNA, 33 bp, Homo sapien
tactatcagcatgtagcagtttccaactgattc

SEQ ID NO: 1014633 - DNA, 33 bp, Homo sapien
atcagaatccagataaacttcctgctgtgtcaa

SEQ ID NO: 1014634 - DNA, 33 bp, Homo sapien
atcagaatccagataaccttcctgctgtgtcaa

SEQ ID NO: 1014635 - DNA, 33 bp, Homo sapien
gaaatacactaatagcaagaatgccttcctgac

SEQ ID NO: 1014636 - DNA, 33 bp, Homo sapien
gaaatacactaatagcgagaatgccttcctgac

SEQ ID NO: 1014637 - DNA, 33 bp, Homo sapien
aggaacttcctctcccaagaactctgtattcca

SEQ ID NO: 1014638 - DNA, 33 bp, Homo sapien
aggaacttcctctccccagaactctgtattcca

SEQ ID NO: 1014639 - DNA, 33 bp, Homo sapien
atcaaattatgaccaaactatcaaggtactagt

SEQ ID NO: 1014640 - DNA, 33 bp, Homo sapien
atcaaattatgaccaacctatcaaggtactagt

SEQ ID NO: 1014641 - DNA, 33 bp, Homo sapien
ggtaagagagaagcttcaaagtcaagtggagcc

SEQ ID NO: 1014642 - DNA, 33 bp, Homo sapien
ggtaagagagaagcttgaaagtcaagtggagcc

SEQ ID NO: 1014643 - DNA, 33 bp, Homo sapien
aagtgaaagaatgaagaaagatctaccatgcaa

SEQ ID NO: 1014644 - DNA, 33 bp, Homo sapien
aagtgaaagaatgaagcaagatctaccatgcaa

SEQ ID NO: 1014645 - DNA, 33 bp, Homo sapien
taaaacgtagatggcaacacaatattagtgggg

SEQ ID NO: 1014646 - DNA, 33 bp, Homo sapien
taaaacgtagatggcagcacaatattagtgggg

SEQ ID NO: 1014647 - DNA, 33 bp, Homo sapien
cagtaaactgagattgcagttgcggaaattaag

SEQ ID NO: 1014648 - DNA, 33 bp, Homo sapien
cagtaaactgagattgtagttgcggaaattaag

SEQ ID NO: 1014649 - DNA, 33 bp, Homo sapien
gcttaaggctctgtcccagtaggaaaagaatac

SEQ ID NO: 1014650 - DNA, 33 bp, Homo sapien
gcttaaggctctgtcctagtaggaaaagaatac

SEQ ID NO: 1014651 - DNA, 33 bp, Homo sapien
tagagtctggtctcacactttcaggcagtgctg

SEQ ID NO: 1014652 - DNA, 33 bp, Homo sapien
tagagtctggtctcacgctttcaggcagtgctg

SEQ ID NO: 1014653 - DNA, 33 bp, Homo sapien
atcctgagtatgtgaaacgaccaatgctctgac

SEQ ID NO: 1014654 - DNA, 33 bp, Homo sapien
atcctgagtatgtgaaccgaccaatgctctgac

SEQ ID NO: 1014655 - DNA, 33 bp, Homo sapien
gctagtgattactcctcacttgatcatttacac

SEQ ID NO: 1014656 - DNA, 33 bp, Homo sapien
gctagtgattactcctgacttgatcatttacac

SEQ ID NO: 1014657 - DNA, 33 bp, Homo sapien
gagagcacgttaacaagtactcattataaagtc

SEQ ID NO: 1014658 - DNA, 33 bp, Homo sapien
gagagcacgttaacaattactcattataaagtc

SEQ ID NO: 1014659 - DNA, 33 bp, Homo sapien
aaaaattcttctgcaacgcaactgtcaataatg

SEQ ID NO: 1014660 - DNA, 33 bp, Homo sapien
aaaaattcttctgcaaggcaactgtcaataatg

SEQ ID NO: 1014661 - DNA, 33 bp, Homo sapien
acatacctcttcctcaaattttcttgtcaccaa

SEQ ID NO: 1014662 - DNA, 33 bp, Homo sapien
acatacctcttcctcacattttcttgtcaccaa

SEQ ID NO: 1014663 - DNA, 33 bp, Homo sapien; identical to SEQ ID NO: 1014661

SEQ ID NO: 1014664 - DNA, 33 bp, Homo sapien; identical to SEQ ID NO: 1014662

SEQ ID NO: 1014665 - DNA, 33 bp, Homo sapien
aaaaagaccaaaactacgaatgattgaagtacc

SEQ ID NO: 1014666 - DNA, 33 bp, Homo sapien
aaaaagaccaaaactatgaatgattgaagtacc

SEQ ID NO: 1014667 - DNA, 33 bp, Homo sapien; identical to SEQ ID NO: 1014665

SEQ ID NO: 1014668 - DNA, 33 bp, Homo sapien; identical to SEQ ID NO: 1014666

SEQ ID NO: 1014669 - DNA, 33 bp, Homo sapien
aagcttagtttggctcaatatgaaaatctgggt

SEQ ID NO: 1014670 - DNA, 33 bp, Homo sapien
aagcttagtttggctcgatatgaaaatctgggt

SEQ ID NO: 1014671 - DNA, 33 bp, Homo sapien
catgtactaaccatccacatctttgtttttttt

SEQ ID NO: 1014672 - DNA, 33 bp, Homo sapien
catgtactaaccatccgcatctttgtttttttt

SEQ ID NO: 1014673 - DNA, 33 bp, Homo sapien
atgtaagttcactctacgatgtttacacaaata

SEQ ID NO: 1014674 - DNA, 33 bp, Homo sapien
atgtaagttcactctatgatgtttacacaaata

SEQ ID NO: 1014675 - DNA, 33 bp, Homo sapien
tggaagaactgtgccaccttctctaaagattca

SEQ ID NO: 1014676 - DNA, 33 bp, Homo sapien
tggaagaactgtgccagcttctctaaagattca

SEQ ID NO: 1014677 - DNA, 33 bp, Homo sapien
tgttatgtgcagaaaactgtcaaagaaaatgaa

SEQ ID NO: 1014678 - DNA, 33 bp, Homo sapien
tgttatgtgcagaaaagtgtcaaagaaaatgaa

SEQ ID NO: 1014679 - DNA, 33 bp, Homo sapien
catacatggtgtctaaaaaagcaaaacatttta

SEQ ID NO: 1014680 - DNA, 33 bp, Homo sapien
catacatggtgtctaataaagcaaaacatttta

SEQ ID NO: 1014681 - DNA, 33 bp, Homo sapien
tccattcacatctctccaaagtaggtctcctca

SEQ ID NO: 1014682 - DNA, 33 bp, Homo sapien
tccattcacatctctctaaagtaggtctcctca

SEQ ID NO: 1014683 - DNA, 33 bp, Homo sapien
ggtgttaagattgaggccaacagtctcttatgt

SEQ ID NO: 1014684 - DNA, 33 bp, Homo sapien
ggtgttaagattgaggtcaacagtctcttatgt

SEQ ID NO: 1014685 - DNA, 33 bp, Homo sapien
aaaagatcatgccaaacctctctatataaaaca

SEQ ID NO: 1014686 - DNA, 33 bp, Homo sapien
aaaagatcatgccaaagctctctatataaaaca

SEQ ID NO: 1014687 - DNA, 33 bp, Homo sapien
gattaactctaggggccaccttgcattgcattt

SEQ ID NO: 1014688 - DNA, 33 bp, Homo sapien
gattaactctaggggctaccttgcattgcattt

SEQ ID NO: 1014689 - DNA, 33 bp, Homo sapien
tttttatttctctggaactctgtgaattacgac

SEQ ID NO: 1014690 - DNA, 33 bp, Homo sapien
tttttatttctctggacctctgtgaattacgac

SEQ ID NO: 1014691 - DNA, 33 bp, Homo sapien
agactctgtcaataaaatgccaaattataaatg

SEQ ID NO: 1014692 - DNA, 33 bp, Homo sapien
agactctgtcaataaactgccaaattataaatg

SEQ ID NO: 1014693 - DNA, 33 bp, Homo sapien
catgttccaggaccacagtcattaatactcata

SEQ ID NO: 1014694 - DNA, 33 bp, Homo sapien
catgttccaggaccaccgtcattaatactcata

SEQ ID NO: 1014695 - DNA, 33 bp, Homo sapien
gttaaatgcaacttatcagatgtgcagaatctc

SEQ ID NO: 1014696 - DNA, 33 bp, Homo sapien
gttaaatgcaacttattagatgtgcagaatctc

SEQ ID NO: 1014697 - DNA, 33 bp, Homo sapien
gtgggctgaaaccagaacataagagacctaaga

SEQ ID NO: 1014698 - DNA, 33 bp, Homo sapien
gtgggctgaaaccagatcataagagacctaaga

SEQ ID NO: 1014699 - DNA, 33 bp, Homo sapien
gaagagtaaaatgaagacaaggagggtcatgag

SEQ ID NO: 1014700 - DNA, 33 bp, Homo sapien
gaagagtaaaatgaagtcaaggagggtcatgag

SEQ ID NO: 1014701 - DNA, 33 bp, Homo sapien
aatgctactagtgtaccactgaagagtttgcta

SEQ ID NO: 1014702 - DNA, 33 bp, Homo sapien
aatgctactagtgtactactgaagagtttgcta

SEQ ID NO: 1014703 - DNA, 33 bp, Homo sapien
tgcacttcaaaggcaacgcgagtttctaaagct

SEQ ID NO: 1014704 - DNA, 33 bp, Homo sapien
tgcacttcaaaggcaatgcgagtttctaaagct

SEQ ID NO: 1014705 - DNA, 33 bp, Homo sapien
tccctgtaattcaccccaataactgactccagc

SEQ ID NO: 1014706 - DNA, 33 bp, Homo sapien
tccctgtaattcaccctaataactgactccagc

SEQ ID NO: 1014707 - DNA, 33 bp, Homo sapien
actgagaggtttaccacgatgccagacttgcag

SEQ ID NO: 1014708 - DNA, 33 bp, Homo sapien
actgagaggtttaccatgatgccagacttgcag

SEQ ID NO: 1014709 - DNA, 33 bp, Homo sapien
agatacttctgaatccacataccctagcaagac

SEQ ID NO: 1014710 - DNA, 33 bp, Homo sapien
agatacttctgaatccccataccctagcaagac

SEQ ID NO: 1014711 - DNA, 33 bp, Homo sapien
tgtctcttcttgtgacaaggggacctattttca

SEQ ID NO: 1014712 - DNA, 33 bp, Homo sapien
tgtctcttcttgtgacgaggggacctattttca

SEQ ID NO: 1014713 - DNA, 33 bp, Homo sapien
agactcttctatatcacgtaaaaatcacatatg

SEQ ID NO: 1014714 - DNA, 33 bp, Homo sapien
agactcttctatatcaggtaaaaatcacatatg

SEQ ID NO: 1014715 - DNA, 33 bp, Homo sapien
gccaagtacatcctgacacaaacccttccactc

SEQ ID NO: 1014716 - DNA, 33 bp, Homo sapien
gccaagtacatcctgatacaaacccttccactc

SEQ ID NO: 1014717 - DNA, 33 bp, Homo sapien
tgagaacatgtcacaaaaggtgaagatactgtg

SEQ ID NO: 1014718 - DNA, 33 bp, Homo sapien
tgagaacatgtcacaagaggtgaagatactgtg

SEQ ID NO: 1014719 - DNA, 33 bp, Homo sapien
aattggagcgggccccaagcataccacagcagt

SEQ ID NO: 1014720 - DNA, 33 bp, Homo sapien
aattggagcgggccccgagcataccacagcagt

SEQ ID NO: 1014721 - DNA, 33 bp, Homo sapien
ccacctctccaacttacggggctcactgttacc

SEQ ID NO: 1014722 - DNA, 33 bp, Homo sapien
ccacctctccaacttatggggctcactgttacc

SEQ ID NO: 1014723 - DNA, 33 bp, Homo sapien
cccaaaagtggtacaccctgctctgctcacatc

SEQ ID NO: 1014724 - DNA, 33 bp, Homo sapien
cccaaaagtggtacactctgctctgctcacatc

SEQ ID NO: 1014725 - DNA, 33 bp, Homo sapien
tggtaggccccatggacaagttaataaataagg

SEQ ID NO: 1014726 - DNA, 33 bp, Homo sapien
tggtaggccccatggataagttaataaataagg

SEQ ID NO: 1014727 - DNA, 33 bp, Homo sapien
cttttataaacatgaaaaattgacaccaaataa

SEQ ID NO: 1014728 - DNA, 33 bp, Homo sapien
cttttataaacatgaacaattgacaccaaataa

SEQ ID NO: 1014729 - DNA, 33 bp, Homo sapien
catttctcttgatctcaactggtcttgcttgga

SEQ ID NO: 1014730 - DNA, 33 bp, Homo sapien
catttctcttgatctcgactggtcttgcttgga

SEQ ID NO: 1014731 - DNA, 33 bp, Homo sapien
ggtcagactaaaccagaagaaggtgtgggtgtc

SEQ ID NO: 1014732 - DNA, 33 bp, Homo sapien
ggtcagactaaaccaggagaaggtgtgggtgtc

SEQ ID NO: 1014733 - DNA, 33 bp, Homo sapien
gatatgctattacctaaatctgactgaaaggaa

SEQ ID NO: 1014734 - DNA, 33 bp, Homo sapien
gatatgctattacctacatctgactgaaaggaa

SEQ ID NO: 1014735 - DNA, 33 bp, Homo sapien
gacctgccaaagaagaaattacctcccatgagt

SEQ ID NO: 1014736 - DNA, 33 bp, Homo sapien
gacctgccaaagaagacattacctcccatgagt

SEQ ID NO: 1014737 - DNA, 33 bp, Homo sapien
aggctgtggagctggaagtaaagtgtggtagat

SEQ ID NO: 1014738 - DNA, 33 bp, Homo sapien
aggctgtggagctggaggtaaagtgtggtagat

SEQ ID NO: 1014739 - DNA, 33 bp, Homo sapien
tattctcaaatgataacggcagatactctcgag

SEQ ID NO: 1014740 - DNA, 33 bp, Homo sapien
tattctcaaatgataagggcagatactctcgag

SEQ ID NO: 1014741 - DNA, 33 bp, Homo sapien
cacttcctttgggtaactgtgttagtctgttct

SEQ ID NO: 1014742 - DNA, 33 bp, Homo sapien
cacttcctttgggtaagtgtgttagtctgttct

SEQ ID NO: 1014743 - DNA, 33 bp, Homo sapien
aaagactttttctaccaatctatttaagctcat

SEQ ID NO: 1014744 - DNA, 33 bp, Homo sapien
aaagactttttctacccatctatttaagctcat

SEQ ID NO: 1014745 - DNA, 33 bp, Homo sapien
ttgccgccaaggaaaaatgcctccaaattacat

SEQ ID NO: 1014746 - DNA, 33 bp, Homo sapien
ttgccgccaaggaaaagtgcctccaaattacat

SEQ ID NO: 1014747 - DNA, 33 bp, Homo sapien
ttacgcccctgtagaggcactggtcctggcagt

SEQ ID NO: 1014748 - DNA, 33 bp, Homo sapien
ttacgcccctgtagagtcactggtcctggcagt

SEQ ID NO: 1014749 - DNA, 33 bp, Homo sapien
agtgcaccactgaaggaacatcccaagattctt

SEQ ID NO: 1014750 - DNA, 33 bp, Homo sapien
agtgcaccactgaagggacatcccaagattctt

SEQ ID NO: 1014751 - DNA, 33 bp, Homo sapien
ttgagtattgaaaagacagacaaattgtgtcat

SEQ ID NO: 1014752 - DNA, 33 bp, Homo sapien
ttgagtattgaaaagatagacaaattgtgtcat

SEQ ID NO: 1014753 - DNA, 33 bp, Homo sapien
actccagctcttaaaaacttacgtacaatctcc

SEQ ID NO: 1014754 - DNA, 33 bp, Homo sapien
actccagctcttaaaatcttacgtacaatctcc

SEQ ID NO: 1014755 - DNA, 33 bp, Homo sapien
atgacagatatacaatcaaacaagctgtgatca

SEQ ID NO: 1014756 - DNA, 33 bp, Homo sapien
atgacagatatacaattaaacaagctgtgatca

SEQ ID NO: 1014757 - DNA, 33 bp, Homo sapien
gaaaaacctcagatacacttttttgagaaagtg

SEQ ID NO: 1014758 - DNA, 33 bp, Homo sapien
gaaaaacctcagatacgcttttttgagaaagtg

SEQ ID NO: 1014759 - DNA, 33 bp, Homo sapien
agaaataatcacctcacgaaaagaatggagttg

SEQ ID NO: 1014760 - DNA, 33 bp, Homo sapien
agaaataatcacctcaggaaaagaatggagttg

SEQ ID NO: 1014761 - DNA, 33 bp, Homo sapien
ttctcaatgactctccacaaagtctttcattat

SEQ ID NO: 1014762 - DNA, 33 bp, Homo sapien
ttctcaatgactctccgcaaagtctttcattat

SEQ ID NO: 1014763 - DNA, 33 bp, Homo sapien
gggtgggagatgaagaaataaagagtggatgca

SEQ ID NO: 1014764 - DNA, 33 bp, Homo sapien
gggtgggagatgaagacataaagagtggatgca

SEQ ID NO: 1014765 - DNA, 33 bp, Homo sapien
tatggtctgacttacacattcctttagatgaat

SEQ ID NO: 1014766 - DNA, 33 bp, Homo sapien
tatggtctgacttacatattcctttagatgaat

SEQ ID NO: 1014767 - DNA, 33 bp, Homo sapien
gttgtaccaagttctaacatgtcttatgattga

SEQ ID NO: 1014768 - DNA, 33 bp, Homo sapien
gttgtaccaagttctagcatgtcttatgattga

SEQ ID NO: 1014769 - DNA, 33 bp, Homo sapien
tgacagatcatgggaacactgcctttttaggct

SEQ ID NO: 1014770 - DNA, 33 bp, Homo sapien
tgacagatcatgggaagactgcctttttaggct

SEQ ID NO: 1014771 - DNA, 33 bp, Homo sapien
cccttggtctgtgataaggatcagatgaaagtc

SEQ ID NO: 1014772 - DNA, 33 bp, Homo sapien
cccttggtctgtgatagggatcagatgaaagtc

SEQ ID NO: 1014773 - DNA, 33 bp, Homo sapien
cttcaaaaggacatgccattttatctgagcctc

SEQ ID NO: 1014774 - DNA, 33 bp, Homo sapien
cttcaaaaggacatgctattttatctgagcctc

SEQ ID NO: 1014775 - DNA, 33 bp, Homo sapien
gctatctttgccccaacaatactgtcacatcca

SEQ ID NO: 1014776 - DNA, 33 bp, Homo sapien
gctatctttgccccaagaatactgtcacatcca

SEQ ID NO: 1014777 - DNA, 33 bp, Homo sapien
gaggacacagccaaagcatatcactcatggtgc

SEQ ID NO: 1014778 - DNA, 33 bp, Homo sapien
gaggacacagccaaagtatatcactcatggtgc

SEQ ID NO: 1014779 - DNA, 33 bp, Homo sapien
atcaatgtggaacaacaatttaaagaatattgc

SEQ ID NO: 1014780 - DNA, 33 bp, Homo sapien
atcaatgtggaacaaccatttaaagaatattgc

SEQ ID NO: 1014781 - DNA, 33 bp, Homo sapien
cattgaaaattttttccctctgccaagcagccc

SEQ ID NO: 1014782 - DNA, 33 bp, Homo sapien
cattgaaaattttttctctctgccaagcagccc

SEQ ID NO: 1014783 - DNA, 33 bp, Homo sapien
cctttcccactctctcagaagtccgtgccatac

SEQ ID NO: 1014784 - DNA, 33 bp, Homo sapien
cctttcccactctctccgaagtccgtgccatac

SEQ ID NO: 1014785 - DNA, 33 bp, Homo sapien
aacctttagcaggtcacgtaccttctgatcctg

SEQ ID NO: 1014786 - DNA, 33 bp, Homo sapien
aacctttagcaggtcatgtaccttctgatcctg

SEQ ID NO: 1014787 - DNA, 33 bp, Homo sapien
gaattatttaaaggcacctcaagtgggatttga

SEQ ID NO: 1014788 - DNA, 33 bp, Homo sapien
gaattatttaaaggcatctcaagtgggatttga

SEQ ID NO: 1014789 - DNA, 33 bp, Homo sapien
ttgtgggcctgaagtacatatgattcttcaaca

SEQ ID NO: 1014790 - DNA, 33 bp, Homo sapien
ttgtgggcctgaagtatatatgattcttcaaca

SEQ ID NO: 1014791 - DNA, 33 bp, Homo sapien
gaagatgcctacctgaaaagatgcacccattga

SEQ ID NO: 1014792 - DNA, 33 bp, Homo sapien
gaagatgcctacctgagaagatgcacccattga

SEQ ID NO: 1014793 - DNA, 33 bp, Homo sapien
ctaccctattccaccccgataaacacagtgttg

SEQ ID NO: 1014794 - DNA, 33 bp, Homo sapien
ctaccctattccaccctgataaacacagtgttg

SEQ ID NO: 1014795 - DNA, 33 bp, Homo sapien
aatcattgagaagaataatcagcacaaatttaa

SEQ ID NO: 1014796 - DNA, 33 bp, Homo sapien
aatcattgagaagaatcatcagcacaaatttaa

SEQ ID NO: 1014797 - DNA, 33 bp, Homo sapien
ggtgctagatacactaaagcatgggtccccaac

SEQ ID NO: 1014798 - DNA, 33 bp, Homo sapien
ggtgctagatacactagagcatgggtccccaac

SEQ ID NO: 1014799 - DNA, 33 bp, Homo sapien
ggtttcgtcctaataaataaggcttgaaaggca

SEQ ID NO: 1014800 - DNA, 33 bp, Homo sapien
ggtttcgtcctaataattaaggcttgaaaggca

SEQ ID NO: 1014801 - DNA, 33 bp, Homo sapien
atttattacagcgtaaagaattggcaaagtgat

SEQ ID NO: 1014802 - DNA, 33 bp, Homo sapien
atttattacagcgtaaggaattggcaaagtgat

SEQ ID NO: 1014803 - DNA, 33 bp, Homo sapien
atgatcaacaaagtcaacaactgattatttgag

SEQ ID NO: 1014804 - DNA, 33 bp, Homo sapien
atgatcaacaaagtcatcaactgattatttgag

SEQ ID NO: 1014805 - DNA, 33 bp, Homo sapien
aggcaggctgttcagcaaaagcatgattgagtg

SEQ ID NO: 1014806 - DNA, 33 bp, Homo sapien
aggcaggctgttcagcgaaagcatgattgagtg

SEQ ID NO: 1014807 - DNA, 33 bp, Homo sapien
tcagcatctatctttaaggaacacactcaatca

SEQ ID NO: 1014808 - DNA, 33 bp, Homo sapien
tcagcatctatctttagggaacacactcaatca

SEQ ID NO: 1014809 - DNA, 33 bp, Homo sapien
ttccagacatctgaccaaaatttaacctcttcc

SEQ ID NO: 1014810 - DNA, 33 bp, Homo sapien
ttccagacatctgaccgaaatttaacctcttcc

SEQ ID NO: 1014811 - DNA, 33 bp, Homo sapien
ggcttcctggggatataagcacattcaacaaat

SEQ ID NO: 1014812 - DNA, 33 bp, Homo sapien
ggcttcctggggatatcagcacattcaacaaat

SEQ ID NO: 1014813 - DNA, 33 bp, Homo sapien
tatacctgtcaaaaaccgcatgagaattcccta

SEQ ID NO: 1014814 - DNA, 33 bp, Homo sapien
tatacctgtcaaaaactgcatgagaattcccta

SEQ ID NO: 1014815 - DNA, 33 bp, Homo sapien
agaacagccatcttaaccaataagaaaagcatt

SEQ ID NO: 1014816 - DNA, 33 bp, Homo sapien
agaacagccatcttaatcaataagaaaagcatt

SEQ ID NO: 1014817 - DNA, 33 bp, Homo sapien
agaaacccagagagaaagagcacagccctttag

SEQ ID NO: 1014818 - DNA, 33 bp, Homo sapien
agaaacccagagagaacgagcacagccctttag

SEQ ID NO: 1014819 - DNA, 33 bp, Homo sapien
gtaaaggtttatagaacagaggttaggaaagaa

SEQ ID NO: 1014820 - DNA, 33 bp, Homo sapien
gtaaaggtttatagaagagaggttaggaaagaa

SEQ ID NO: 1014821 - DNA, 33 bp, Homo sapien
tctgtgagtgattaccgaaagactgcttgaaga

SEQ ID NO: 1014822 - DNA, 33 bp, Homo sapien
tctgtgagtgattacctaaagactgcttgaaga

SEQ ID NO: 1014823 - DNA, 33 bp, Homo sapien
tttacttaggactttggaaagatagcaaaacaa

SEQ ID NO: 1014824 - DNA, 33 bp, Homo sapien
tttacttaggactttgtaaagatagcaaaacaa

SEQ ID NO: 1014825 - DNA, 33 bp, Homo sapien
catatatacaatgaaaaagtatgcaaccataaa

SEQ ID NO: 1014826 - DNA, 33 bp, Homo sapien
catatatacaatgaaacagtatgcaaccataaa

SEQ ID NO: 1014827 - DNA, 33 bp, Homo sapien
aagacctgaacaggcacctcgtcacagaaaata

SEQ ID NO: 1014828 - DNA, 33 bp, Homo sapien
aagacctgaacaggcatctcgtcacagaaaata

SEQ ID NO: 1014829 - DNA, 33 bp, Homo sapien
agacagtctgccaatacacaaggagaaataggc

SEQ ID NO: 1014830 - DNA, 33 bp, Homo sapien
agacagtctgccaatatacaaggagaaataggc

SEQ ID NO: 1014831 - DNA, 33 bp, Homo sapien
gggtgggacaaaaaggccagtccttgagaaata

SEQ ID NO: 1014832 - DNA, 33 bp, Homo sapien
gggtgggacaaaaaggtcagtccttgagaaata

SEQ ID NO: 1014833 - DNA, 33 bp, Homo sapien
ttcaccagcatcaacagatctaatataaataga

SEQ ID NO: 1014834 - DNA, 33 bp, Homo sapien
ttcaccagcatcaacatatctaatataaataga

SEQ ID NO: 1014835 - DNA, 33 bp, Homo sapien
ttcatctaattcagcaactctagcaatcacctc

SEQ ID NO: 1014836 - DNA, 33 bp, Homo sapien
ttcatctaattcagcatctctagcaatcacctc

SEQ ID NO: 1014837 - DNA, 33 bp, Homo sapien
aaaaggcccagaggaacgaatacaggaaatatt

SEQ ID NO: 1014838 - DNA, 33 bp, Homo sapien
aaaaggcccagaggaatgaatacaggaaatatt

SEQ ID NO: 1014839 - DNA, 33 bp, Homo sapien
atttggctcattcttcaattttgttgcttgctg

SEQ ID NO: 1014840 - DNA, 33 bp, Homo sapien
atttggctcattcttcgattttgttgcttgctg

SEQ ID NO: 1014841 - DNA, 33 bp, Homo sapien
cttgtttggattcacaaatttcaaagagaactc

SEQ ID NO: 1014842 - DNA, 33 bp, Homo sapien
cttgtttggattcacagatttcaaagagaactc

SEQ ID NO: 1014843 - DNA, 33 bp, Homo sapien
tttaacacaatttactcaggccagtctttagag

SEQ ID NO: 1014844 - DNA, 33 bp, Homo sapien
tttaacacaatttacttaggccagtctttagag

SEQ ID NO: 1014845 - DNA, 33 bp, Homo sapien
aatgtagagacccaaactgtttgaagaagataa

SEQ ID NO: 1014846 - DNA, 33 bp, Homo sapien
aatgtagagacccaaagtgtttgaagaagataa

SEQ ID NO: 1014847 - DNA, 33 bp, Homo sapien
agaaggtgtccacctacagcccaagcagagagc

SEQ ID NO: 1014848 - DNA, 33 bp, Homo sapien
agaaggtgtccacctagagcccaagcagagagc

SEQ ID NO: 1014849 - DNA, 33 bp, Homo sapien
cccatctaaggcagaaataacatttatgtgaac

SEQ ID NO: 1014850 - DNA, 33 bp, Homo sapien
cccatctaaggcagaagtaacatttatgtgaac

SEQ ID NO: 1014851 - DNA, 33 bp, Homo sapien
ttttttggtccttttacaacaggcataaagtct

SEQ ID NO: 1014852 - DNA, 33 bp, Homo sapien
ttttttggtccttttagaacaggcataaagtct

SEQ ID NO: 1014853 - DNA, 33 bp, Homo sapien
ttgattttactttccacagtcactattagcggg

SEQ ID NO: 1014854 - DNA, 33 bp, Homo sapien
ttgattttactttccagagtcactattagcggg

SEQ ID NO: 1014855 - DNA, 33 bp, Homo sapien
ttgtgtatttcaaaacagctggaagacttgaaa

SEQ ID NO: 1014856 - DNA, 33 bp, Homo sapien
ttgtgtatttcaaaacggctggaagacttgaaa

SEQ ID NO: 1014857 - DNA, 33 bp, Homo sapien
gagctaaaaacattgagagcatggaggttgaaa

SEQ ID NO: 1014858 - DNA, 33 bp, Homo sapien
gagctaaaaacattgatagcatggaggttgaaa

SEQ ID NO: 1014859 - DNA, 33 bp, Homo sapien
tggcaacagaggtgaactgatagcattcgataa

SEQ ID NO: 1014860 - DNA, 33 bp, Homo sapien
tggcaacagaggtgaagtgatagcattcgataa

SEQ ID NO: 1014861 - DNA, 33 bp, Homo sapien
catgtgggcacacccaactaaatgcaaaggagg

SEQ ID NO: 1014862 - DNA, 33 bp, Homo sapien
catgtgggcacacccagctaaatgcaaaggagg

SEQ ID NO: 1014863 - DNA, 33 bp, Homo sapien
ccattgcgagaaaaaaatgttactttaagaata

SEQ ID NO: 1014864 - DNA, 33 bp, Homo sapien
ccattgcgagaaaaaactgttactttaagaata

SEQ ID NO: 1014865 - DNA, 33 bp, Homo sapien
tactcaagagtacaaacggactcaagagtaagt

SEQ ID NO: 1014866 - DNA, 33 bp, Homo sapien
tactcaagagtacaaatggactcaagagtaagt

SEQ ID NO: 1014867 - DNA, 33 bp, Homo sapien
ctctaaggtgataagcaagaaacttttttttct

SEQ ID NO: 1014868 - DNA, 33 bp, Homo sapien
ctctaaggtgataagcgagaaacttttttttct

SEQ ID NO: 1014869 - DNA, 33 bp, Homo sapien
gttgagattattcttaaacttgccctgtcgacc

SEQ ID NO: 1014870 - DNA, 33 bp, Homo sapien
gttgagattattcttacacttgccctgtcgacc

SEQ ID NO: 1014871 - DNA, 33 bp, Homo sapien
ttttctgtgtatcataccatttactcctcacaa

SEQ ID NO: 1014872 - DNA, 33 bp, Homo sapien
ttttctgtgtatcatagcatttactcctcacaa

SEQ ID NO: 1014873 - DNA, 33 bp, Homo sapien
tctactcaactggaaaatatgaaggatgtaaca

SEQ ID NO: 1014874 - DNA, 33 bp, Homo sapien
tctactcaactggaaactatgaaggatgtaaca

SEQ ID NO: 1014875 - DNA, 33 bp, Homo sapien
atttcagggttactccgaatgctaagtatctga

SEQ ID NO: 1014876 - DNA, 33 bp, Homo sapien
atttcagggttactcctaatgctaagtatctga

SEQ ID NO: 1014877 - DNA, 33 bp, Homo sapien
aatgcctagcctcaccactttgtttaatatgag

SEQ ID NO: 1014878 - DNA, 33 bp, Homo sapien
aatgcctagcctcaccgctttgtttaatatgag

SEQ ID NO: 1014879 - DNA, 33 bp, Homo sapien
ctatcctgaattctaaaaacttttaagccttct

SEQ ID NO: 1014880 - DNA, 33 bp, Homo sapien
ctatcctgaattctaagaacttttaagccttct

SEQ ID NO: 1014881 - DNA, 33 bp, Homo sapien
actgtaatttggaagaacattccactgggatcc

SEQ ID NO: 1014882 - DNA, 33 bp, Homo sapien
actgtaatttggaagagcattccactgggatcc

SEQ ID NO: 1014883 - DNA, 33 bp, Homo sapien
aaggggacaggacttaaggtgcatagtaactat

SEQ ID NO: 1014884 - DNA, 33 bp, Homo sapien
aaggggacaggacttagggtgcatagtaactat

SEQ ID NO: 1014885 - DNA, 33 bp, Homo sapien
aagccccatgtgttgaatacaaatacatactca

SEQ ID NO: 1014886 - DNA, 33 bp, Homo sapien
aagccccatgtgttgagtacaaatacatactca

SEQ ID NO: 1014887 - DNA, 33 bp, Homo sapien
aatagttagattaggacgtatgaaaatgtttca

SEQ ID NO: 1014888 - DNA, 33 bp, Homo sapien
aatagttagattaggatgtatgaaaatgtttca

SEQ ID NO: 1014889 - DNA, 33 bp, Homo sapien
gtgttccgtatcataaatacacagactggaagt

SEQ ID NO: 1014890 - DNA, 33 bp, Homo sapien
gtgttccgtatcataattacacagactggaagt

SEQ ID NO: 1014891 - DNA, 33 bp, Homo sapien
agcacttctgttttgaaaaaaataattagacac

SEQ ID NO: 1014892 - DNA, 33 bp, Homo sapien
agcacttctgttttgacaaaaataattagacac

SEQ ID NO: 1014893 - DNA, 33 bp, Homo sapien
agtgtcttgggttggaaaggaaattgaaaatcc

SEQ ID NO: 1014894 - DNA, 33 bp, Homo sapien
agtgtcttgggttggagaggaaattgaaaatcc

SEQ ID NO: 1014895 - DNA, 33 bp, Homo sapien
aggagacacaaaaggaaactgacagactttcta

SEQ ID NO: 1014896 - DNA, 33 bp, Homo sapien
aggagacacaaaaggatactgacagactttcta

SEQ ID NO: 1014897 - DNA, 33 bp, Homo sapien
catgtatgcttatgtaaggagtgtgatagacct

SEQ ID NO: 1014898 - DNA, 33 bp, Homo sapien
catgtatgcttatgtagggagtgtgatagacct

SEQ ID NO: 1014899 - DNA, 33 bp, Homo sapien
ttaagtagtaatcaatcagtcgaaaatattttg

SEQ ID NO: 1014900 - DNA, 33 bp, Homo sapien
ttaagtagtaatcaattagtcgaaaatattttg

SEQ ID NO: 1014901 - DNA, 33 bp, Homo sapien
tggcgccacttcctaacgtggacgatgaggctg

SEQ ID NO: 1014902 - DNA, 33 bp, Homo sapien
tggcgccacttcctaatgtggacgatgaggctg

SEQ ID NO: 1014903 - DNA, 33 bp, Homo sapien
agtgtccaggtgtctacgttacaaactatgtta

SEQ ID NO: 1014904 - DNA, 33 bp, Homo sapien
agtgtccaggtgtctaggttacaaactatgtta

SEQ ID NO: 1014905 - DNA, 33 bp, Homo sapien
gtttagtagtcaattacgtacaataacatatgg

SEQ ID NO: 1014906 - DNA, 33 bp, Homo sapien
gtttagtagtcaattaggtacaataacatatgg

SEQ ID NO: 1014907 - DNA, 33 bp, Homo sapien
tttccctccctacgaaaaattctggtgccagca

SEQ ID NO: 1014908 - DNA, 33 bp, Homo sapien
tttccctccctacgaataattctggtgccagca

SEQ ID NO: 1014909 - DNA, 33 bp, Homo sapien
atggaagagtagctgaataacttttaaggacag

SEQ ID NO: 1014910 - DNA, 33 bp, Homo sapien
atggaagagtagctgagtaacttttaaggacag

SEQ ID NO: 1014911 - DNA, 33 bp, Homo sapien
ttctttatgtaattccacaatcagaatcaggat

SEQ ID NO: 1014912 - DNA, 33 bp, Homo sapien
ttctttatgtaattccgcaatcagaatcaggat

SEQ ID NO: 1014913 - DNA, 33 bp, Homo sapien
catagttattcaggaaccaatcaatcaaaatta

SEQ ID NO: 1014914 - DNA, 33 bp, Homo sapien
catagttattcaggaatcaatcaatcaaaatta

SEQ ID NO: 1014915 - DNA, 33 bp, Homo sapien
atattggatataactacgcaccctgaactgtgc

SEQ ID NO: 1014916 - DNA, 33 bp, Homo sapien
atattggatataactatgcaccctgaactgtgc

SEQ ID NO: 1014917 - DNA, 33 bp, Homo sapien
cctcgactcattctatcaaatcaggaacctaat

SEQ ID NO: 1014918 - DNA, 33 bp, Homo sapien
cctcgactcattctatgaaatcaggaacctaat

SEQ ID NO: 1014919 - DNA, 33 bp, Homo sapien
atccctctctaagtggaaaaatgactcttgttg

SEQ ID NO: 1014920 - DNA, 33 bp, Homo sapien
atccctctctaagtgggaaaatgactcttgttg

SEQ ID NO: 1014921 - DNA, 33 bp, Homo sapien
ataatgacatctgaggcacttataactggcaat

SEQ ID NO: 1014922 - DNA, 33 bp, Homo sapien
ataatgacatctgaggtacttataactggcaat

SEQ ID NO: 1014923 - DNA, 33 bp, Homo sapien
ttctgagattctgagagagcaaagtataaaacc

SEQ ID NO: 1014924 - DNA, 33 bp, Homo sapien
ttctgagattctgagatagcaaagtataaaacc

SEQ ID NO: 1014925 - DNA, 33 bp, Homo sapien
taattggtaaatgttacgcagttttatcttcag

SEQ ID NO: 1014926 - DNA, 33 bp, Homo sapien
taattggtaaatgttatgcagttttatcttcag

SEQ ID NO: 1014927 - DNA, 33 bp, Homo sapien
gaggaacaattgttcacatagaggtccgtcctc

SEQ ID NO: 1014928 - DNA, 33 bp, Homo sapien
gaggaacaattgttcatatagaggtccgtcctc

SEQ ID NO: 1014929 - DNA, 33 bp, Homo sapien
tttatatctttatggactatacttctgagtgaa

SEQ ID NO: 1014930 - DNA, 33 bp, Homo sapien
tttatatctttatggagtatacttctgagtgaa

SEQ ID NO: 1014931 - DNA, 33 bp, Homo sapien
agtcacattgcattagacccttaaagtgtacct

SEQ ID NO: 1014932 - DNA, 33 bp, Homo sapien
agtcacattgcattagtcccttaaagtgtacct

SEQ ID NO: 1014933 - DNA, 33 bp, Homo sapien
cccctgccaggcaggacggaaatttgaaaatta

SEQ ID NO: 1014934 - DNA, 33 bp, Homo sapien
cccctgccaggcaggatggaaatttgaaaatta

SEQ ID NO: 1014935 - DNA, 33 bp, Homo sapien
ttattccacttcttaccgcagttttatcatgtg

SEQ ID NO: 1014936 - DNA, 33 bp, Homo sapien
ttattccacttcttactgcagttttatcatgtg

SEQ ID NO: 1014937 - DNA, 33 bp, Homo sapien
atcttgattcaaacacaatgtaaaaatgtcagg

SEQ ID NO: 1014938 - DNA, 33 bp, Homo sapien
atcttgattcaaacacgatgtaaaaatgtcagg

SEQ ID NO: 1014939 - DNA, 33 bp, Homo sapien
aaggtaggaaatagcacggtgagtaagaaatat

SEQ ID NO: 1014940 - DNA, 33 bp, Homo sapien
aaggtaggaaatagcatggtgagtaagaaatat

SEQ ID NO: 1014941 - DNA, 33 bp, Homo sapien
ggtctgcattgacgaaccagctgggcttgtctc

SEQ ID NO: 1014942 - DNA, 33 bp, Homo sapien
ggtctgcattgacgaatcagctgggcttgtctc

SEQ ID NO: 1014943 - DNA, 33 bp, Homo sapien
gtggatttctcatcaaacttactggagaaagtc

SEQ ID NO: 1014944 - DNA, 33 bp, Homo sapien
gtggatttctcatcaagcttactggagaaagtc

SEQ ID NO: 1014945 - DNA, 33 bp, Homo sapien
cttgcccaaacaaaaccaaacctggtgcctttg

SEQ ID NO: 1014946 - DNA, 33 bp, Homo sapien
cttgcccaaacaaaactaaacctggtgcctttg

SEQ ID NO: 1014947 - DNA, 33 bp, Homo sapien
tataagaaaggcattcagaaggaatatcaaaac

SEQ ID NO: 1014948 - DNA, 33 bp, Homo sapien
tataagaaaggcattcggaaggaatatcaaaac

SEQ ID NO: 1014949 - DNA, 33 bp, Homo sapien
gtagtgactatggctgcaaacttgattggcaat

SEQ ID NO: 1014950 - DNA, 33 bp, Homo sapien
gtagtgactatggctggaaacttgattggcaat

SEQ ID NO: 1014951 - DNA, 33 bp, Homo sapien
aagcaccatgagtaccactacgttgtccattcc

SEQ ID NO: 1014952 - DNA, 33 bp, Homo sapien
aagcaccatgagtaccgctacgttgtccattcc

SEQ ID NO: 1014953 - DNA, 33 bp, Homo sapien
attaagaagtgggccacagagaaaaccgcagat

SEQ ID NO: 1014954 - DNA, 33 bp, Homo sapien
attaagaagtgggccagagagaaaaccgcagat

SEQ ID NO: 1014955 - DNA, 33 bp, Homo sapien
tctccactaatgaggaacatatattacaagctg

SEQ ID NO: 1014956 - DNA, 33 bp, Homo sapien
tctccactaatgaggagcatatattacaagctg

SEQ ID NO: 1014957 - DNA, 33 bp, Homo sapien
caaaagaataaactggcagtgcatagactagaa

SEQ ID NO: 1014958 - DNA, 33 bp, Homo sapien
caaaagaataaactggtagtgcatagactagaa

SEQ ID NO: 1014959 - DNA, 33 bp, Homo sapien
cttatagcaaaggatacgggttggacagcttat

SEQ ID NO: 1014960 - DNA, 33 bp, Homo sapien
cttatagcaaaggatatgggttggacagcttat

SEQ ID NO: 1014961 - DNA, 33 bp, Homo sapien
ctctcattatttccaaagctttctatctgattc

SEQ ID NO: 1014962 - DNA, 33 bp, Homo sapien
ctctcattatttccaaggctttctatctgattc

SEQ ID NO: 1014963 - DNA, 33 bp, Homo sapien
ccatgtgtaatcagaaaacagtaccttaattga

SEQ ID NO: 1014964 - DNA, 33 bp, Homo sapien
ccatgtgtaatcagaagacagtaccttaattga

SEQ ID NO: 1014965 - DNA, 33 bp, Homo sapien
ttctcagacttcaataaccacctctaagagtag

SEQ ID NO: 1014966 - DNA, 33 bp, Homo sapien
ttctcagacttcaatacccacctctaagagtag

SEQ ID NO: 1014967 - DNA, 33 bp, Homo sapien
gtcctttcattctggaaaaaaacgcactgtata

SEQ ID NO: 1014968 - DNA, 33 bp, Homo sapien
gtcctttcattctggagaaaaacgcactgtata

SEQ ID NO: 1014969 - DNA, 33 bp, Homo sapien
tttccaaaattttgcacggttgtcaatggttaa

SEQ ID NO: 1014970 - DNA, 33 bp, Homo sapien
tttccaaaattttgcatggttgtcaatggttaa

SEQ ID NO: 1014971 - DNA, 33 bp, Homo sapien
aacctatttagggaagaaaatgactgtaagatg

SEQ ID NO: 1014972 - DNA, 33 bp, Homo sapien
aacctatttagggaaggaaatgactgtaagatg

SEQ ID NO: 1014973 - DNA, 33 bp, Homo sapien
tttgctcaatggaaaaaaagtctatgttcacct

SEQ ID NO: 1014974 - DNA, 33 bp, Homo sapien
tttgctcaatggaaaagaagtctatgttcacct

SEQ ID NO: 1014975 - DNA, 33 bp, Homo sapien
tacaaaaagattaagaaattatccaggcattgt

SEQ ID NO: 1014976 - DNA, 33 bp, Homo sapien
tacaaaaagattaagacattatccaggcattgt

SEQ ID NO: 1014977 - DNA, 33 bp, Homo sapien
gatttagcccatacaggagtaaccaagacaaac

SEQ ID NO: 1014978 - DNA, 33 bp, Homo sapien
gatttagcccatacagtagtaaccaagacaaac

SEQ ID NO: 1014979 - DNA, 33 bp, Homo sapien
acaatgacgaatgagaaacatgatgtataagtg

SEQ ID NO: 1014980 - DNA, 33 bp, Homo sapien
acaatgacgaatgagatacatgatgtataagtg

SEQ ID NO: 1014981 - DNA, 33 bp, Homo sapien
ttttataaataactcaaattctccctctatgat

SEQ ID NO: 1014982 - DNA, 33 bp, Homo sapien
ttttataaataactcagattctccctctatgat

SEQ ID NO: 1014983 - DNA, 33 bp, Homo sapien
attttcttgcccagaactaccacagtgttttaa

SEQ ID NO: 1014984 - DNA, 33 bp, Homo sapien
attttcttgcccagaagtaccacagtgttttaa

SEQ ID NO: 1014985 - DNA, 33 bp, Homo sapien
ttctaagaaaaaggcactcattttagagaccca

SEQ ID NO: 1014986 - DNA, 33 bp, Homo sapien
ttctaagaaaaaggcagtcattttagagaccca

SEQ ID NO: 1014987 - DNA, 33 bp, Homo sapien
tacaactatactgttgaagagaggcaggccctg

SEQ ID NO: 1014988 - DNA, 33 bp, Homo sapien
tacaactatactgttggagagaggcaggccctg

SEQ ID NO: 1014989 - DNA, 33 bp, Homo sapien
aagcactcttgctgcaaagaattaagtcttaac

SEQ ID NO: 1014990 - DNA, 33 bp, Homo sapien
aagcactcttgctgcacagaattaagtcttaac

SEQ ID NO: 1014991 - DNA, 33 bp, Homo sapien
aatttcctggaaacataaaccttgtaatgactt

SEQ ID NO: 1014992 - DNA, 33 bp, Homo sapien
aatttcctggaaacatgaaccttgtaatgactt

SEQ ID NO: 1014993 - DNA, 33 bp, Homo sapien
atcttcaaaggtaatacgcctatcattatgaaa

SEQ ID NO: 1014994 - DNA, 33 bp, Homo sapien
atcttcaaaggtaatatgcctatcattatgaaa

SEQ ID NO: 1014995 - DNA, 33 bp, Homo sapien
aatgtcaataggacaaatggaagctttttgaaa

SEQ ID NO: 1014996 - DNA, 33 bp, Homo sapien
aatgtcaataggacaactggaagctttttgaaa

SEQ ID NO: 1014997 - DNA, 33 bp, Homo sapien
ctcagtgtttccacaacgaagagaaaacttctg

SEQ ID NO: 1014998 - DNA, 33 bp, Homo sapien
ctcagtgtttccacaatgaagagaaaacttctg

SEQ ID NO: 1014999 - DNA, 33 bp, Homo sapien
taaagcagaccagatgcattgcaaatagcacct

SEQ ID NO: 1015000 - DNA, 33 bp, Homo sapien
taaagcagaccagatgtattgcaaatagcacct

SEQ ID NO: 1015001 - DNA, 33 bp, Homo sapien
tctcatttaaccataacaaatgcatccggtagg

SEQ ID NO: 1015002 - DNA, 33 bp, Homo sapien
tctcatttaaccataagaaatgcatccggtagg

SEQ ID NO: 1015003 - DNA, 33 bp, Homo sapien
tattactgaggaagagactcaagggaatgtata

SEQ ID NO: 1015004 - DNA, 33 bp, Homo sapien
tattactgaggaagagcctcaagggaatgtata

SEQ ID NO: 1015005 - DNA, 33 bp, Homo sapien
tcatactgttactcaagcatttaaaactcaaga

SEQ ID NO: 1015006 - DNA, 33 bp, Homo sapien
tcatactgttactcaatcatttaaaactcaaga

SEQ ID NO: 1015007 - DNA, 33 bp, Homo sapien
ttctctactcattgaaatcttcacattttttga

SEQ ID NO: 1015008 - DNA, 33 bp, Homo sapien
ttctctactcattgaagtcttcacattttttga

SEQ ID NO: 1015009 - DNA, 33 bp, Homo sapien
ggaccagggtgccggaacagatcagcaaggaga

SEQ ID NO: 1015010 - DNA, 33 bp, Homo sapien
ggaccagggtgccggagcagatcagcaaggaga

SEQ ID NO: 1015011 - DNA, 33 bp, Homo sapien
atccatgtttgtgaaacgtttaaagaacttaca

SEQ ID NO: 1015012 - DNA, 33 bp, Homo sapien
atccatgtttgtgaaaggtttaaagaacttaca

SEQ ID NO: 1015013 - DNA, 33 bp, Homo sapien
atgtcagtaaccatcaaatgtgagctattcagc

SEQ ID NO: 1015014 - DNA, 33 bp, Homo sapien
atgtcagtaaccatcagatgtgagctattcagc

SEQ ID NO: 1015015 - DNA, 33 bp, Homo sapien
ctgatttgatcattacaccttgcatacttatat

SEQ ID NO: 1015016 - DNA, 33 bp, Homo sapien
ctgatttgatcattacgccttgcatacttatat

SEQ ID NO: 1015017 - DNA, 33 bp, Homo sapien
gcacagatactctctgcataaatatactgtata

SEQ ID NO: 1015018 - DNA, 33 bp, Homo sapien
gcacagatactctctggataaatatactgtata

SEQ ID NO: 1015019 - DNA, 33 bp, Homo sapien
cagctgctgagaggtcacaaccatcacttaaca

SEQ ID NO: 1015020 - DNA, 33 bp, Homo sapien
cagctgctgagaggtcgcaaccatcacttaaca

SEQ ID NO: 1015021 - DNA, 33 bp, Homo sapien
tgcacatacaatctcacggaaatttaggatctc

SEQ ID NO: 1015022 - DNA, 33 bp, Homo sapien
tgcacatacaatctcatggaaatttaggatctc

SEQ ID NO: 1015023 - DNA, 33 bp, Homo sapien
agtattccatgcaacactagccctttgtggcat

SEQ ID NO: 1015024 - DNA, 33 bp, Homo sapien
agtattccatgcaacagtagccctttgtggcat

SEQ ID NO: 1015025 - DNA, 33 bp, Homo sapien
atgtaagttcctcacccgaatgttttcttttct

SEQ ID NO: 1015026 - DNA, 33 bp, Homo sapien
atgtaagttcctcacctgaatgttttcttttct

SEQ ID NO: 1015027 - DNA, 33 bp, Homo sapien
acctgtaataagcttacgtaatcttgaaagcag

SEQ ID NO: 1015028 - DNA, 33 bp, Homo sapien
acctgtaataagcttatgtaatcttgaaagcag

SEQ ID NO: 1015029 - DNA, 33 bp, Homo sapien
attcaagacacttcccactagctcttagcttta

SEQ ID NO: 1015030 - DNA, 33 bp, Homo sapien
attcaagacacttccctctagctcttagcttta

SEQ ID NO: 1015031 - DNA, 33 bp, Homo sapien
gagaccacctgcagtacgaaaagaaattcccaa

SEQ ID NO: 1015032 - DNA, 33 bp, Homo sapien
gagaccacctgcagtatgaaaagaaattcccaa

SEQ ID NO: 1015033 - DNA, 33 bp, Homo sapien
tatacaaaattcctccaagacacagagagcttt

SEQ ID NO: 1015034 - DNA, 33 bp, Homo sapien
tatacaaaattcctccgagacacagagagcttt

SEQ ID NO: 1015035 - DNA, 33 bp, Homo sapien
gcacttacgaagtggaccatgccctccagtgac

SEQ ID NO: 1015036 - DNA, 33 bp, Homo sapien
gcacttacgaagtggatcatgccctccagtgac

SEQ ID NO: 1015037 - DNA, 33 bp, Homo sapien
cacgataaagaacagacgtgacaaagccatggc

SEQ ID NO: 1015038 - DNA, 33 bp, Homo sapien
cacgataaagaacagatgtgacaaagccatggc

SEQ ID NO: 1015039 - DNA, 33 bp, Homo sapien
agacattgggctgtgaaattgtacaaaattctt

SEQ ID NO: 1015040 - DNA, 33 bp, Homo sapien
agacattgggctgtgagattgtacaaaattctt

SEQ ID NO: 1015041 - DNA, 33 bp, Homo sapien
ttgttatgaatctccaagaggaaaacatagtat

SEQ ID NO: 1015042 - DNA, 33 bp, Homo sapien
ttgttatgaatctccaggaggaaaacatagtat

SEQ ID NO: 1015043 - DNA, 33 bp, Homo sapien
gttcttggatggtaaggctgaatatttaaagaa

SEQ ID NO: 1015044 - DNA, 33 bp, Homo sapien
gttcttggatggtaagtctgaatatttaaagaa

SEQ ID NO: 1015045 - DNA, 33 bp, Homo sapien
ggacttactgtacagaataatgactgcagttaa

SEQ ID NO: 1015046 - DNA, 33 bp, Homo sapien
ggacttactgtacagattaatgactgcagttaa

SEQ ID NO: 1015047 - DNA, 33 bp, Homo sapien
agagggaaacagaacaacatgcagatttagccc

SEQ ID NO: 1015048 - DNA, 33 bp, Homo sapien
agagggaaacagaacatcatgcagatttagccc

SEQ ID NO: 1015049 - DNA, 33 bp, Homo sapien
tctcacttgtttgtgagatcttaaaaatcaaaa

SEQ ID NO: 1015050 - DNA, 33 bp, Homo sapien
tctcacttgtttgtgatatcttaaaaatcaaaa

SEQ ID NO: 1015051 - DNA, 33 bp, Homo sapien
gatcatacctgcctgactatacaaaagggtaga

SEQ ID NO: 1015052 - DNA, 33 bp, Homo sapien
gatcatacctgcctgattatacaaaagggtaga

SEQ ID NO: 1015053 - DNA, 33 bp, Homo sapien
acagatgttactatacacctagaaatagcgaaa

SEQ ID NO: 1015054 - DNA, 33 bp, Homo sapien
acagatgttactatacgcctagaaatagcgaaa

SEQ ID NO: 1015055 - DNA, 33 bp, Homo sapien
aagagatatagaccaacgatttggagacagagt

SEQ ID NO: 1015056 - DNA, 33 bp, Homo sapien
aagagatatagaccaaggatttggagacagagt

SEQ ID NO: 1015057 - DNA, 33 bp, Homo sapien
gtgtcattgaagctataatagatcttttgtaat

SEQ ID NO: 1015058 - DNA, 33 bp, Homo sapien
gtgtcattgaagctattatagatcttttgtaat

SEQ ID NO: 1015059 - DNA, 33 bp, Homo sapien
tagcagctcatacaagcataggtgatatcacaa

SEQ ID NO: 1015060 - DNA, 33 bp, Homo sapien
tagcagctcatacaaggataggtgatatcacaa

SEQ ID NO: 1015061 - DNA, 33 bp, Homo sapien
cttgcttgaacctgtaactgtttccaaacagga

SEQ ID NO: 1015062 - DNA, 33 bp, Homo sapien
cttgcttgaacctgtacctgtttccaaacagga

SEQ ID NO: 1015063 - DNA, 33 bp, Homo sapien
atcaatagcagattcaacttgcctttaccatgt

SEQ ID NO: 1015064 - DNA, 33 bp, Homo sapien
atcaatagcagattcagcttgcctttaccatgt

SEQ ID NO: 1015065 - DNA, 33 bp, Homo sapien
atattttgacatcacaaagtgacatataatcat

SEQ ID NO: 1015066 - DNA, 33 bp, Homo sapien
atattttgacatcacagagtgacatataatcat

SEQ ID NO: 1015067 - DNA, 33 bp, Homo sapien
caactggtctgaccaaaaagagagagatatgct

SEQ ID NO: 1015068 - DNA, 33 bp, Homo sapien
caactggtctgaccaacaagagagagatatgct

SEQ ID NO: 1015069 - DNA, 33 bp, Homo sapien
atatgtacagagagaaatgataaactaagagcg

SEQ ID NO: 1015070 - DNA, 33 bp, Homo sapien
atatgtacagagagaattgataaactaagagcg

SEQ ID NO: 1015071 - DNA, 33 bp, Homo sapien; identical to SEQ ID NO: 1015069

SEQ ID NO: 1015072 - DNA, 33 bp, Homo sapien; identical to SEQ ID NO: 1015070

SEQ ID NO: 1015073 - DNA, 33 bp, Homo sapien
ccaggcccttcactccccatgattgcttccttg

SEQ ID NO: 1015074 - DNA, 33 bp, Homo sapien
ccaggcccttcactcctcatgattgcttccttg

SEQ ID NO: 1015075 - DNA, 33 bp, Homo sapien
ggcatctcattgtctgaatgtgggtatttagtg

SEQ ID NO: 1015076 - DNA, 33 bp, Homo sapien
ggcatctcattgtctggatgtgggtatttagtg

SEQ ID NO: 1015077 - DNA, 33 bp, Homo sapien
cattttcctcaagtaaatattctgccacattct

SEQ ID NO: 1015078 - DNA, 33 bp, Homo sapien
cattttcctcaagtaagtattctgccacattct

SEQ ID NO: 1015079 - DNA, 33 bp, Homo sapien
tatctctggtttttagcagtttgctgatgactt

SEQ ID NO: 1015080 - DNA, 33 bp, Homo sapien
tatctctggtttttagtagtttgctgatgactt

SEQ ID NO: 1015081 - DNA, 33 bp, Homo sapien
ccaaacaagtgcttccacagatcaaatgatgca

SEQ ID NO: 1015082 - DNA, 33 bp, Homo sapien
ccaaacaagtgcttcctcagatcaaatgatgca

SEQ ID NO: 1015083 - DNA, 33 bp, Homo sapien
ttagtagaagaaagtgaaaccgagttctatgct

SEQ ID NO: 1015084 - DNA, 33 bp, Homo sapien
ttagtagaagaaagtgcaaccgagttctatgct

SEQ ID NO: 1015085 - DNA, 33 bp, Homo sapien
ctctgaggatttaaaacattgcactcttattca

SEQ ID NO: 1015086 - DNA, 33 bp, Homo sapien
ctctgaggatttaaaatattgcactcttattca

SEQ ID NO: 1015087 - DNA, 33 bp, Homo sapien
caatcttgtggatttcactctaactgctcatgg

SEQ ID NO: 1015088 - DNA, 33 bp, Homo sapien
caatcttgtggatttcgctctaactgctcatgg

SEQ ID NO: 1015089 - DNA, 33 bp, Homo sapien
aactttgagggacatacgtaaggtgttgcaaat

SEQ ID NO: 1015090 - DNA, 33 bp, Homo sapien
aactttgagggacatatgtaaggtgttgcaaat

SEQ ID NO: 1015091 - DNA, 33 bp, Homo sapien
caacaagtgcaaatcaatagcctataaaatgag

SEQ ID NO: 1015092 - DNA, 33 bp, Homo sapien
caacaagtgcaaatcagtagcctataaaatgag

SEQ ID NO: 1015093 - DNA, 33 bp, Homo sapien
cgcctgaggacgcagacaggaaacaggaaggaa

SEQ ID NO: 1015094 - DNA, 33 bp, Homo sapien
cgcctgaggacgcagagaggaaacaggaaggaa

SEQ ID NO: 1015095 - DNA, 33 bp, Homo sapien
ttttgcttccaataatcatctgaaagttctgaa

SEQ ID NO: 1015096 - DNA, 33 bp, Homo sapien
ttttgcttccaataatgatctgaaagttctgaa

SEQ ID NO: 1015097 - DNA, 33 bp, Homo sapien
cttcacaatcggaacaagaatgactcaaagcac

SEQ ID NO: 1015098 - DNA, 33 bp, Homo sapien
cttcacaatcggaacaggaatgactcaaagcac

SEQ ID NO: 1015099 - DNA, 33 bp, Homo sapien
gtaaataactccagagcgtagcatcaaagcaaa

SEQ ID NO: 1015100 - DNA, 33 bp, Homo sapien
gtaaataactccagagtgtagcatcaaagcaaa

SEQ ID NO: 1015101 - DNA, 33 bp, Homo sapien
cataccatctcatggaagaaccaggtaatagac

SEQ ID NO: 1015102 - DNA, 33 bp, Homo sapien
cataccatctcatggaggaaccaggtaatagac

SEQ ID NO: 1015103 - DNA, 33 bp, Homo sapien
ttaaggaaaccccagagcaatgtgcacaaatcc

SEQ ID NO: 1015104 - DNA, 33 bp, Homo sapien
ttaaggaaaccccagatcaatgtgcacaaatcc

SEQ ID NO: 1015105 - DNA, 33 bp, Homo sapien
aaatgattgagaaatacacctgcttggaactag

SEQ ID NO: 1015106 - DNA, 33 bp, Homo sapien
aaatgattgagaaatatacctgcttggaactag

SEQ ID NO: 1015107 - DNA, 33 bp, Homo sapien
aaggaacctatacctgaaaagtataatttaact

SEQ ID NO: 1015108 - DNA, 33 bp, Homo sapien
aaggaacctatacctgcaaagtataatttaact

SEQ ID NO: 1015109 - DNA, 33 bp, Homo sapien
aatgggttgaaatggaactatcatctccacact

SEQ ID NO: 1015110 - DNA, 33 bp, Homo sapien
aatgggttgaaatggagctatcatctccacact

SEQ ID NO: 1015111 - DNA, 33 bp, Homo sapien
catttcaacccattgacgttttaaacttttata

SEQ ID NO: 1015112 - DNA, 33 bp, Homo sapien
catttcaacccattgatgttttaaacttttata

SEQ ID NO: 1015113 - DNA, 33 bp, Homo sapien
atatgatacttttaataatgccatttttctagg

SEQ ID NO: 1015114 - DNA, 33 bp, Homo sapien
atatgatacttttaatcatgccatttttctagg

SEQ ID NO: 1015115 - DNA, 33 bp, Homo sapien
agatgctcacattaaaccagctttaggagattg

SEQ ID NO: 1015116 - DNA, 33 bp, Homo sapien
agatgctcacattaaatcagctttaggagattg

SEQ ID NO: 1015117 - DNA, 33 bp, Homo sapien
ggaatgctgacgtctaaagatcttgggtaggtg

SEQ ID NO: 1015118 - DNA, 33 bp, Homo sapien
ggaatgctgacgtctagagatcttgggtaggtg

SEQ ID NO: 1015119 - DNA, 33 bp, Homo sapien
gtttgtgctgaaagaaatagtttaattttgtag

SEQ ID NO: 1015120 - DNA, 33 bp, Homo sapien
gtttgtgctgaaagaagtagtttaattttgtag

SEQ ID NO: 1015121 - DNA, 33 bp, Homo sapien
actgcctctttcatagcagttagtaggagttat

SEQ ID NO: 1015122 - DNA, 33 bp, Homo sapien
actgcctctttcataggagttagtaggagttat

SEQ ID NO: 1015123 - DNA, 33 bp, Homo sapien
taaagaaatgccattagaagtgccaggttggga

SEQ ID NO: 1015124 - DNA, 33 bp, Homo sapien
taaagaaatgccattataagtgccaggttggga

SEQ ID NO: 1015125 - DNA, 33 bp, Homo sapien
gcatcaatgatatataaggggactctgttacct

SEQ ID NO: 1015126 - DNA, 33 bp, Homo sapien
gcatcaatgatatatacggggactctgttacct

SEQ ID NO: 1015127 - DNA, 33 bp, Homo sapien
agaaggtgagtaaaaacgagactgagagagaga

SEQ ID NO: 1015128 - DNA, 33 bp, Homo sapien
agaaggtgagtaaaaatgagactgagagagaga

SEQ ID NO: 1015129 - DNA, 33 bp, Homo sapien
gagagaaggccaaaaaagaggctctataactta

SEQ ID NO: 1015130 - DNA, 33 bp, Homo sapien
gagagaaggccaaaaacgaggctctataactta

SEQ ID NO: 1015131 - DNA, 33 bp, Homo sapien
aaaatggacacatagactagcaaacctttcttc

SEQ ID NO: 1015132 - DNA, 33 bp, Homo sapien
aaaatggacacatagattagcaaacctttcttc

SEQ ID NO: 1015133 - DNA, 33 bp, Homo sapien
agtcaccttgattcaacgtccatgaaagaaata

SEQ ID NO: 1015134 - DNA, 33 bp, Homo sapien
agtcaccttgattcaatgtccatgaaagaaata

SEQ ID NO: 1015135 - DNA, 33 bp, Homo sapien
aagagaagcagtctgactattttactaatttgc

SEQ ID NO: 1015136 - DNA, 33 bp, Homo sapien
aagagaagcagtctgattattttactaatttgc

SEQ ID NO: 1015137 - DNA, 33 bp, Homo sapien
agttactgactctataggaacctagacgagtgt

SEQ ID NO: 1015138 - DNA, 33 bp, Homo sapien
agttactgactctatatgaacctagacgagtgt

SEQ ID NO: 1015139 - DNA, 33 bp, Homo sapien
tcccaaccacaaaatgaaagcttaaatgataga

SEQ ID NO: 1015140 - DNA, 33 bp, Homo sapien
tcccaaccacaaaatggaagcttaaatgataga

SEQ ID NO: 1015141 - DNA, 33 bp, Homo sapien
tagagcactgaaaacaagtccagagttaaaaaa

SEQ ID NO: 1015142 - DNA, 33 bp, Homo sapien
tagagcactgaaaacaggtccagagttaaaaaa

SEQ ID NO: 1015143 - DNA, 33 bp, Homo sapien
agtttgtggttccctgaagaaacatcaggttgc

SEQ ID NO: 1015144 - DNA, 33 bp, Homo sapien
agtttgtggttccctgcagaaacatcaggttgc

SEQ ID NO: 1015145 - DNA, 33 bp, Homo sapien
aatttataatagcatcaagaacaagaataaacc

SEQ ID NO: 1015146 - DNA, 33 bp, Homo sapien
aatttataatagcatcgagaacaagaataaacc

SEQ ID NO: 1015147 - DNA, 33 bp, Homo sapien
atgacttgtaactaaaaactacaaaacattgct

SEQ ID NO: 1015148 - DNA, 33 bp, Homo sapien
atgacttgtaactaaacactacaaaacattgct

SEQ ID NO: 1015149 - DNA, 33 bp, Homo sapien
ttaagtcacttggtagaatcacctctatataag

SEQ ID NO: 1015150 - DNA, 33 bp, Homo sapien
ttaagtcacttggtaggatcacctctatataag

SEQ ID NO: 1015151 - DNA, 33 bp, Homo sapien
tttaatcttgaaaatacgcctaaagtagatctc

SEQ ID NO: 1015152 - DNA, 33 bp, Homo sapien
tttaatcttgaaaatatgcctaaagtagatctc

SEQ ID NO: 1015153 - DNA, 33 bp, Homo sapien
cacttgctacaatacaacgacaataatttatcc

SEQ ID NO: 1015154 - DNA, 33 bp, Homo sapien
cacttgctacaatacagcgacaataatttatcc

SEQ ID NO: 1015155 - DNA, 33 bp, Homo sapien
ggtaaagaatgctcgacgcaatttccctttaaa

SEQ ID NO: 1015156 - DNA, 33 bp, Homo sapien
ggtaaagaatgctcgatgcaatttccctttaaa

SEQ ID NO: 1015157 - DNA, 33 bp, Homo sapien
cacttagcatatagaggcattttagaaaaccta

SEQ ID NO: 1015158 - DNA, 33 bp, Homo sapien
cacttagcatatagagtcattttagaaaaccta

SEQ ID NO: 1015159 - DNA, 33 bp, Homo sapien
aagcagctgagaggtaagaaaccagatattagg

SEQ ID NO: 1015160 - DNA, 33 bp, Homo sapien
aagcagctgagaggtatgaaaccagatattagg

SEQ ID NO: 1015161 - DNA, 33 bp, Homo sapien
taaaagacatttttccagaagtgaacgttttat

SEQ ID NO: 1015162 - DNA, 33 bp, Homo sapien
taaaagacatttttccggaagtgaacgttttat

SEQ ID NO: 1015163 - DNA, 33 bp, Homo sapien
tactcttagcataaacaatcagagaagtataca

SEQ ID NO: 1015164 - DNA, 33 bp, Homo sapien
tactcttagcataaacgatcagagaagtataca

SEQ ID NO: 1015165 - DNA, 33 bp, Homo sapien
atatatataactgtcacaggaatgcttatacca

SEQ ID NO: 1015166 - DNA, 33 bp, Homo sapien
atatatataactgtcagaggaatgcttatacca

SEQ ID NO: 1015167 - DNA, 33 bp, Homo sapien
tatccttaatggataacgtcatttaaacttatg

SEQ ID NO: 1015168 - DNA, 33 bp, Homo sapien
tatccttaatggataatgtcatttaaacttatg

SEQ ID NO: 1015169 - DNA, 33 bp, Homo sapien
gtgactttggctaaatgacttaagtgaggtagt

SEQ ID NO: 1015170 - DNA, 33 bp, Homo sapien
gtgactttggctaaattacttaagtgaggtagt

SEQ ID NO: 1015171 - DNA, 33 bp, Homo sapien
atgctcctctgaaacccagcttaaaatggccaa

SEQ ID NO: 1015172 - DNA, 33 bp, Homo sapien
atgctcctctgaaaccgagcttaaaatggccaa

SEQ ID NO: 1015173 - DNA, 33 bp, Homo sapien
tgattgaatgtggtgaagagcaaaaagaaaaag

SEQ ID NO: 1015174 - DNA, 33 bp, Homo sapien
tgattgaatgtggtgaggagcaaaaagaaaaag

SEQ ID NO: 1015175 - DNA, 33 bp, Homo sapien
agggactgtgcactcaataaaatttgctactct

SEQ ID NO: 1015176 - DNA, 33 bp, Homo sapien
agggactgtgcactcagtaaaatttgctactct

SEQ ID NO: 1015177 - DNA, 33 bp, Homo sapien
gtatcactcagaaaatcaagcagtcatacatgg

SEQ ID NO: 1015178 - DNA, 33 bp, Homo sapien
gtatcactcagaaaattaagcagtcatacatgg

SEQ ID NO: 1015179 - DNA, 33 bp, Homo sapien
cagctagtgttaccctcaagcagattattagaa

SEQ ID NO: 1015180 - DNA, 33 bp, Homo sapien
cagctagtgttaccctgaagcagattattagaa

SEQ ID NO: 1015181 - DNA, 33 bp, Homo sapien
gcctaagaaaggcacacgtttccatttgatttt

SEQ ID NO: 1015182 - DNA, 33 bp, Homo sapien
gcctaagaaaggcacaggtttccatttgatttt

SEQ ID NO: 1015183 - DNA, 33 bp, Homo sapien
aaggacctgcagttgggagatagaatgttataa

SEQ ID NO: 1015184 - DNA, 33 bp, Homo sapien
aaggacctgcagttggtagatagaatgttataa

SEQ ID NO: 1015185 - DNA, 33 bp, Homo sapien
aataaatacttcctaaataccaacaatttgtgt

SEQ ID NO: 1015186 - DNA, 33 bp, Homo sapien
aataaatacttcctaattaccaacaatttgtgt

SEQ ID NO: 1015187 - DNA, 33 bp, Homo sapien
aattatggtacctagaaacaaaacaactcacag

SEQ ID NO: 1015188 - DNA, 33 bp, Homo sapien
aattatggtacctagagacaaaacaactcacag

SEQ ID NO: 1015189 - DNA, 33 bp, Homo sapien
tggaaagttcacacaacttggaattaaacaaaa

SEQ ID NO: 1015190 - DNA, 33 bp, Homo sapien
tggaaagttcacacaatttggaattaaacaaaa

SEQ ID NO: 1015191 - DNA, 33 bp, Homo sapien
cttgtttccacatttaccagctgaaaattcttg

SEQ ID NO: 1015192 - DNA, 33 bp, Homo sapien
cttgtttccacatttagcagctgaaaattcttg

SEQ ID NO: 1015193 - DNA, 33 bp, Homo sapien
caaaaatcagaaatagaccttactgcatttcag

SEQ ID NO: 1015194 - DNA, 33 bp, Homo sapien
caaaaatcagaaatagtccttactgcatttcag

SEQ ID NO: 1015195 - DNA, 33 bp, Homo sapien
ctgcttgtatttaatgaagaaaactctatttgt

SEQ ID NO: 1015196 - DNA, 33 bp, Homo sapien
ctgcttgtatttaatggagaaaactctatttgt

SEQ ID NO: 1015197 - DNA, 33 bp, Homo sapien
tgatttactacacatacgatctttgagttagtt

SEQ ID NO: 1015198 - DNA, 33 bp, Homo sapien
tgatttactacacatatgatctttgagttagtt

SEQ ID NO: 1015199 - DNA, 33 bp, Homo sapien
caggtttcacattttccctcggacatgaaaaat

SEQ ID NO: 1015200 - DNA, 33 bp, Homo sapien
caggtttcacattttcgctcggacatgaaaaat

SEQ ID NO: 1015201 - DNA, 33 bp, Homo sapien
agagctttaacatacaaattttgataggggcac

SEQ ID NO: 1015202 - DNA, 33 bp, Homo sapien
agagctttaacatacacattttgataggggcac

SEQ ID NO: 1015203 - DNA, 33 bp, Homo sapien
tgctcaccactgattaagttaccaatacttctc

SEQ ID NO: 1015204 - DNA, 33 bp, Homo sapien
tgctcaccactgattacgttaccaatacttctc

SEQ ID NO: 1015205 - DNA, 33 bp, Homo sapien
ctggcataagtcctcaagaaaaatcatctaaat

SEQ ID NO: 1015206 - DNA, 33 bp, Homo sapien
ctggcataagtcctcatgaaaaatcatctaaat

SEQ ID NO: 1015207 - DNA, 33 bp, Homo sapien
gagtgagaaattcctacagaccagccagtgaaa

SEQ ID NO: 1015208 - DNA, 33 bp, Homo sapien
gagtgagaaattcctatagaccagccagtgaaa

SEQ ID NO: 1015209 - DNA, 33 bp, Homo sapien
ccactgcagtaggtaccggcttcagagttacat

SEQ ID NO: 1015210 - DNA, 33 bp, Homo sapien
ccactgcagtaggtactggcttcagagttacat

SEQ ID NO: 1015211 - DNA, 33 bp, Homo sapien
gctggagtcacaaataactctttaatgagttca

SEQ ID NO: 1015212 - DNA, 33 bp, Homo sapien
gctggagtcacaaatatctctttaatgagttca

SEQ ID NO: 1015213 - DNA, 33 bp, Homo sapien
cctaacatatttaaaacttctctgcaagccaag

SEQ ID NO: 1015214 - DNA, 33 bp, Homo sapien
cctaacatatttaaaatttctctgcaagccaag

SEQ ID NO: 1015215 - DNA, 33 bp, Homo sapien
tgctagagcacttccccgagatttcatgaagat

SEQ ID NO: 1015216 - DNA, 33 bp, Homo sapien
tgctagagcacttcccggagatttcatgaagat

SEQ ID NO: 1015217 - DNA, 33 bp, Homo sapien
gacaagacagaatgaaaagtatcctggattatt

SEQ ID NO: 1015218 - DNA, 33 bp, Homo sapien
gacaagacagaatgaatagtatcctggattatt

SEQ ID NO: 1015219 - DNA, 33 bp, Homo sapien
ccctgagtttccaatacatacaggttcatgcta

SEQ ID NO: 1015220 - DNA, 33 bp, Homo sapien
ccctgagtttccaatatatacaggttcatgcta

SEQ ID NO: 1015221 - DNA, 33 bp, Homo sapien
aataatcctttgtcaaatacatagcatgaacct

SEQ ID NO: 1015222 - DNA, 33 bp, Homo sapien
aataatcctttgtcaagtacatagcatgaacct

SEQ ID NO: 1015223 - DNA, 33 bp, Homo sapien
atgactgtagcataaaaggctttaatgaatatg

SEQ ID NO: 1015224 - DNA, 33 bp, Homo sapien
atgactgtagcataaagggctttaatgaatatg

SEQ ID NO: 1015225 - DNA, 33 bp, Homo sapien
tacagtcatttaataaactgctctaatgaaaaa

SEQ ID NO: 1015226 - DNA, 33 bp, Homo sapien
tacagtcatttaataatctgctctaatgaaaaa

SEQ ID NO: 1015227 - DNA, 33 bp, Homo sapien
gtaagtctggatataaatcttgcgctcgaaacc

SEQ ID NO: 1015228 - DNA, 33 bp, Homo sapien
gtaagtctggatataagtcttgcgctcgaaacc

SEQ ID NO: 1015229 - DNA, 33 bp, Homo sapien
gcatttttgacattaaacccttgtcagatatgt

SEQ ID NO: 1015230 - DNA, 33 bp, Homo sapien
gcatttttgacattaaccccttgtcagatatgt

SEQ ID NO: 1015231 - DNA, 33 bp, Homo sapien
cagttacatcattgacaatattcagacagagga

SEQ ID NO: 1015232 - DNA, 33 bp, Homo sapien
cagttacatcattgaccatattcagacagagga

SEQ ID NO: 1015233 - DNA, 33 bp, Homo sapien
tgatgacgagaattcccagatctatgatgaaaa

SEQ ID NO: 1015234 - DNA, 33 bp, Homo sapien
tgatgacgagaattcctagatctatgatgaaaa

SEQ ID NO: 1015235 - DNA, 33 bp, Homo sapien
ctgtaggtgagttgtaaacccattgagctgtca

SEQ ID NO: 1015236 - DNA, 33 bp, Homo sapien
ctgtaggtgagttgtatacccattgagctgtca

SEQ ID NO: 1015237 - DNA, 33 bp, Homo sapien
gtgatggaaagatacacattttcaatgacttgt

SEQ ID NO: 1015238 - DNA, 33 bp, Homo sapien
gtgatggaaagatacatattttcaatgacttgt

SEQ ID NO: 1015239 - DNA, 33 bp, Homo sapien
aaaacacagattgaagcaattgaataacatcag

SEQ ID NO: 1015240 - DNA, 33 bp, Homo sapien
aaaacacagattgaaggaattgaataacatcag

SEQ ID NO: 1015241 - DNA, 33 bp, Homo sapien
aagtaactagtttgaaatactccggagcattct

SEQ ID NO: 1015242 - DNA, 33 bp, Homo sapien
aagtaactagtttgaagtactccggagcattct

SEQ ID NO: 1015243 - DNA, 33 bp, Homo sapien
tgcactgtttgaaaccaaccttgaggaaggcag

SEQ ID NO: 1015244 - DNA, 33 bp, Homo sapien
tgcactgtttgaaaccgaccttgaggaaggcag

SEQ ID NO: 1015245 - DNA, 33 bp, Homo sapien
acaataagaataaccaaattccataacaagtat

SEQ ID NO: 1015246 - DNA, 33 bp, Homo sapien
acaataagaataaccacattccataacaagtat

SEQ ID NO: 1015247 - DNA, 33 bp, Homo sapien
tagctagagatatttacgtgactaaaccacgag

SEQ ID NO: 1015248 - DNA, 33 bp, Homo sapien
tagctagagatatttatgtgactaaaccacgag

SEQ ID NO: 1015249 - DNA, 33 bp, Homo sapien
tgtaattgacatgtaacaaatagatgagtgaat

SEQ ID NO: 1015250 - DNA, 33 bp, Homo sapien
tgtaattgacatgtaataaatagatgagtgaat

SEQ ID NO: 1015251 - DNA, 33 bp, Homo sapien
aacttctatttgatcactaagctgttaagtgca

SEQ ID NO: 1015252 - DNA, 33 bp, Homo sapien
aacttctatttgatcattaagctgttaagtgca

SEQ ID NO: 1015253 - DNA, 33 bp, Homo sapien
atcattattctcttaaacacctaagccccacca

SEQ ID NO: 1015254 - DNA, 33 bp, Homo sapien
atcattattctcttaaccacctaagccccacca

SEQ ID NO: 1015255 - DNA, 33 bp, Homo sapien
gcaaggttttcaaaaacaactgatatgtattta

SEQ ID NO: 1015256 - DNA, 33 bp, Homo sapien
gcaaggttttcaaaaagaactgatatgtattta

SEQ ID NO: 1015257 - DNA, 33 bp, Homo sapien
atgctagccaaaagaacgtgagcaaaaatgata

SEQ ID NO: 1015258 - DNA, 33 bp, Homo sapien
atgctagccaaaagaaggtgagcaaaaatgata

SEQ ID NO: 1015259 - DNA, 33 bp, Homo sapien
cctaacattagataacagaattagagaagtgga

SEQ ID NO: 1015260 - DNA, 33 bp, Homo sapien
cctaacattagataacggaattagagaagtgga

SEQ ID NO: 1015261 - DNA, 33 bp, Homo sapien
gtattataagaagctacgccactgttaatttaa

SEQ ID NO: 1015262 - DNA, 33 bp, Homo sapien
gtattataagaagctatgccactgttaatttaa

SEQ ID NO: 1015263 - DNA, 33 bp, Homo sapien
aggcatcatttgtgtagattaaagccacaggta

SEQ ID NO: 1015264 - DNA, 33 bp, Homo sapien
aggcatcatttgtgtatattaaagccacaggta

SEQ ID NO: 1015265 - DNA, 33 bp, Homo sapien
actcctctaagatgcacgtccatagcttttatt

SEQ ID NO: 1015266 - DNA, 33 bp, Homo sapien
actcctctaagatgcaggtccatagcttttatt

SEQ ID NO: 1015267 - DNA, 33 bp, Homo sapien
atcttctctgaactaccgaagcatctaatttga

SEQ ID NO: 1015268 - DNA, 33 bp, Homo sapien
atcttctctgaactactgaagcatctaatttga

SEQ ID NO: 1015269 - DNA, 33 bp, Homo sapien
atgttagaagattggaagaagaggaatatgtgt

SEQ ID NO: 1015270 - DNA, 33 bp, Homo sapien
atgttagaagattggaggaagaggaatatgtgt

SEQ ID NO: 1015271 - DNA, 33 bp, Homo sapien
cataataaacacagaaaaagcaaatagagtata

SEQ ID NO: 1015272 - DNA, 33 bp, Homo sapien
cataataaacacagaagaagcaaatagagtata

SEQ ID NO: 1015273 - DNA, 33 bp, Homo sapien
aggctaagtgactaacaagtgattagtgagcag

SEQ ID NO: 1015274 - DNA, 33 bp, Homo sapien
aggctaagtgactaacgagtgattagtgagcag

SEQ ID NO: 1015275 - DNA, 33 bp, Homo sapien
cccaaaataaaagcaaatacgttagtgacataa

SEQ ID NO: 1015276 - DNA, 33 bp, Homo sapien
cccaaaataaaagcaagtacgttagtgacataa

SEQ ID NO: 1015277 - DNA, 33 bp, Homo sapien
ttagcagaagtatagactaaattggcaaaaata

SEQ ID NO: 1015278 - DNA, 33 bp, Homo sapien
ttagcagaagtatagattaaattggcaaaaata

SEQ ID NO: 1015279 - DNA, 33 bp, Homo sapien
cctgatgccaccaggaacccaatacttacacaa

SEQ ID NO: 1015280 - DNA, 33 bp, Homo sapien
cctgatgccaccaggagcccaatacttacacaa

SEQ ID NO: 1015281 - DNA, 33 bp, Homo sapien
cacaaataggcacacaatctatgctatattgta

SEQ ID NO: 1015282 - DNA, 33 bp, Homo sapien
cacaaataggcacacagtctatgctatattgta

SEQ ID NO: 1015283 - DNA, 33 bp, Homo sapien
atacagtaggtacccaacgaatgggacacatca

SEQ ID NO: 1015284 - DNA, 33 bp, Homo sapien
atacagtaggtacccagcgaatgggacacatca

SEQ ID NO: 1015285 - DNA, 33 bp, Homo sapien
agtctgaagaagataacgtcatcatggcttaat

SEQ ID NO: 1015286 - DNA, 33 bp, Homo sapien
agtctgaagaagataatgtcatcatggcttaat

SEQ ID NO: 1015287 - DNA, 33 bp, Homo sapien
ccaatatttgtaaggaactcacataacttaata

SEQ ID NO: 1015288 - DNA, 33 bp, Homo sapien
ccaatatttgtaaggatctcacataacttaata

SEQ ID NO: 1015289 - DNA, 33 bp, Homo sapien
atattcactccctgtaacccttatttaatctta

SEQ ID NO: 1015290 - DNA, 33 bp, Homo sapien
atattcactccctgtagcccttatttaatctta

SEQ ID NO: 1015291 - DNA, 33 bp, Homo sapien
ggatcaaagtaaattacgttcaggaatatctac

SEQ ID NO: 1015292 - DNA, 33 bp, Homo sapien
ggatcaaagtaaattatgttcaggaatatctac

SEQ ID NO: 1015293 - DNA, 33 bp, Homo sapien
tggcaggtcaacaatcaatcttggctcattgct

SEQ ID NO: 1015294 - DNA, 33 bp, Homo sapien
tggcaggtcaacaatccatcttggctcattgct

SEQ ID NO: 1015295 - DNA, 33 bp, Homo sapien
attttccatagtctgcacaatctgtctctcagt

SEQ ID NO: 1015296 - DNA, 33 bp, Homo sapien
attttccatagtctgcgcaatctgtctctcagt

SEQ ID NO: 1015297 - DNA, 33 bp, Homo sapien
ctctgccttttgcggacagttgttattttattc

SEQ ID NO: 1015298 - DNA, 33 bp, Homo sapien
ctctgccttttgcggagagttgttattttattc

SEQ ID NO: 1015299 - DNA, 33 bp, Homo sapien
attcagatgatttgtaaggtctgttgctctgat

SEQ ID NO: 1015300 - DNA, 33 bp, Homo sapien
attcagatgatttgtagggtctgttgctctgat

SEQ ID NO: 1015301 - DNA, 33 bp, Homo sapien
ttccttaaatagtgtacagcagtgcatcttaaa

SEQ ID NO: 1015302 - DNA, 33 bp, Homo sapien
ttccttaaatagtgtagagcagtgcatcttaaa

SEQ ID NO: 1015303 - DNA, 33 bp, Homo sapien
caaggtgtagcataaacttaatctagttcagaa

SEQ ID NO: 1015304 - DNA, 33 bp, Homo sapien
caaggtgtagcataaagttaatctagttcagaa

SEQ ID NO: 1015305 - DNA, 33 bp, Homo sapien
agggccaccgattactcaggcaagaattaacat

SEQ ID NO: 1015306 - DNA, 33 bp, Homo sapien
agggccaccgattacttaggcaagaattaacat

SEQ ID NO: 1015307 - DNA, 33 bp, Homo sapien
cagattttttaaaacaactagcactcaccaaaa

SEQ ID NO: 1015308 - DNA, 33 bp, Homo sapien
cagattttttaaaacagctagcactcaccaaaa

SEQ ID NO: 1015309 - DNA, 33 bp, Homo sapien
tgtattcttgaggttgaactgagacactttgcc

SEQ ID NO: 1015310 - DNA, 33 bp, Homo sapien
tgtattcttgaggttggactgagacactttgcc

SEQ ID NO: 1015311 - DNA, 33 bp, Homo sapien
aaacgcagagatctaaaaatacaatggtcttac

SEQ ID NO: 1015312 - DNA, 33 bp, Homo sapien
aaacgcagagatctaagaatacaatggtcttac

SEQ ID NO: 1015313 - DNA, 33 bp, Homo sapien
attatgtctggcataaagctttttcatcttccc

SEQ ID NO: 1015314 - DNA, 33 bp, Homo sapien
attatgtctggcataaggctttttcatcttccc

SEQ ID NO: 1015315 - DNA, 33 bp, Homo sapien
aaccaggatgtctaagaacaggtaagactaaat

SEQ ID NO: 1015316 - DNA, 33 bp, Homo sapien
aaccaggatgtctaaggacaggtaagactaaat

SEQ ID NO: 1015317 - DNA, 33 bp, Homo sapien
gattattggccttcaccgaatattcacagctct

SEQ ID NO: 1015318 - DNA, 33 bp, Homo sapien
gattattggccttcactgaatattcacagctct

SEQ ID NO: 1015319 - DNA, 33 bp, Homo sapien
ctgtcttgttgtcagacagtatttcagtaaatt

SEQ ID NO: 1015320 - DNA, 33 bp, Homo sapien
ctgtcttgttgtcagatagtatttcagtaaatt

SEQ ID NO: 1015321 - DNA, 33 bp, Homo sapien
gacctctggagatgaacgaataaaatcaaggct

SEQ ID NO: 1015322 - DNA, 33 bp, Homo sapien
gacctctggagatgaatgaataaaatcaaggct

SEQ ID NO: 1015323 - DNA, 33 bp, Homo sapien
atataaaaagaatagaaagaaagcacgtttcta

SEQ ID NO: 1015324 - DNA, 33 bp, Homo sapien
atataaaaagaatagagagaaagcacgtttcta

SEQ ID NO: 1015325 - DNA, 33 bp, Homo sapien
gtatatagacactaatgaaacattccataagta

SEQ ID NO: 1015326 - DNA, 33 bp, Homo sapien
gtatatagacactaattaaacattccataagta

SEQ ID NO: 1015327 - DNA, 33 bp, Homo sapien
aatcttttgttcatccacttttcaaataatttt

SEQ ID NO: 1015328 - DNA, 33 bp, Homo sapien
aatcttttgttcatccgcttttcaaataatttt

SEQ ID NO: 1015329 - DNA, 33 bp, Homo sapien
attatttctgccaaaagaaaatgacaggaaacg

SEQ ID NO: 1015330 - DNA, 33 bp, Homo sapien
attatttctgccaaaataaaatgacaggaaacg

SEQ ID NO: 1015331 - DNA, 33 bp, Homo sapien
tcactcctgaaataaaagctatgaatattaaat

SEQ ID NO: 1015332 - DNA, 33 bp, Homo sapien
tcactcctgaaataaaggctatgaatattaaat

SEQ ID NO: 1015333 - DNA, 33 bp, Homo sapien
agagagttgagcataaagggcaagtctgtagta

SEQ ID NO: 1015334 - DNA, 33 bp, Homo sapien
agagagttgagcataatgggcaagtctgtagta

SEQ ID NO: 1015335 - DNA, 33 bp, Homo sapien
tattatcaatattataacagcacaatttaagaa

SEQ ID NO: 1015336 - DNA, 33 bp, Homo sapien
tattatcaatattataccagcacaatttaagaa

SEQ ID NO: 1015337 - DNA, 33 bp, Homo sapien
gtgttcctctcttctcacaaccagagactcatt

SEQ ID NO: 1015338 - DNA, 33 bp, Homo sapien
gtgttcctctcttctctcaaccagagactcatt

SEQ ID NO: 1015339 - DNA, 33 bp, Homo sapien
ttgaacatcatttgtaaacagattgccttctta

SEQ ID NO: 1015340 - DNA, 33 bp, Homo sapien
ttgaacatcatttgtagacagattgccttctta

SEQ ID NO: 1015341 - DNA, 33 bp, Homo sapien
tgtttgtgccaaagaacataaggctgaatttgc

SEQ ID NO: 1015342 - DNA, 33 bp, Homo sapien
tgtttgtgccaaagaatataaggctgaatttgc

SEQ ID NO: 1015343 - DNA, 33 bp, Homo sapien
cctgaccaagtcctggaaccaaatatatactca

SEQ ID NO: 1015344 - DNA, 33 bp, Homo sapien
cctgaccaagtcctgggaccaaatatatactca

SEQ ID NO: 1015345 - DNA, 33 bp, Homo sapien
ttttaaaaccatcttgaaaaacatggaatgata

SEQ ID NO: 1015346 - DNA, 33 bp, Homo sapien
ttttaaaaccatcttgcaaaacatggaatgata

SEQ ID NO: 1015347 - DNA, 33 bp, Homo sapien
acatccttggaggatcgcaaatagtctgcacta

SEQ ID NO: 1015348 - DNA, 33 bp, Homo sapien
acatccttggaggatctcaaatagtctgcacta

SEQ ID NO: 1015349 - DNA, 33 bp, Homo sapien
gtttaaagatcaggtaagttttataatatacct

SEQ ID NO: 1015350 - DNA, 33 bp, Homo sapien
gtttaaagatcaggtaggttttataatatacct

SEQ ID NO: 1015351 - DNA, 33 bp, Homo sapien
cacatgccaaagaaaacataagataggtgcccc

SEQ ID NO: 1015352 - DNA, 33 bp, Homo sapien
cacatgccaaagaaaatataagataggtgcccc

SEQ ID NO: 1015353 - DNA, 33 bp, Homo sapien
tctcagactttagggacaaatctgtttagttcc

SEQ ID NO: 1015354 - DNA, 33 bp, Homo sapien
tctcagactttagggagaaatctgtttagttcc

SEQ ID NO: 1015355 - DNA, 33 bp, Homo sapien
gtcatctttgcaagccagatgaaacccgcattt

SEQ ID NO: 1015356 - DNA, 33 bp, Homo sapien
gtcatctttgcaagccggatgaaacccgcattt

SEQ ID NO: 1015357 - DNA, 33 bp, Homo sapien
gatgtcttcaagccccggatcatttaccaaact

SEQ ID NO: 1015358 - DNA, 33 bp, Homo sapien
gatgtcttcaagcccctgatcatttaccaaact

SEQ ID NO: 1015359 - DNA, 33 bp, Homo sapien
agtataaaatcaaatgccatcaatgaggactta

SEQ ID NO: 1015360 - DNA, 33 bp, Homo sapien
agtataaaatcaaatgtcatcaatgaggactta

SEQ ID NO: 1015361 - DNA, 33 bp, Homo sapien
aactcccactgttgcacctactacaaataataa

SEQ ID NO: 1015362 - DNA, 33 bp, Homo sapien
aactcccactgttgcatctactacaaataataa

SEQ ID NO: 1015363 - DNA, 33 bp, Homo sapien
ggtgggaaattgggaaaagggtgctatgtttat

SEQ ID NO: 1015364 - DNA, 33 bp, Homo sapien
ggtgggaaattgggaagagggtgctatgtttat

SEQ ID NO: 1015365 - DNA, 33 bp, Homo sapien
atttgtagacacatggccagttcattgaaatgg

SEQ ID NO: 1015366 - DNA, 33 bp, Homo sapien
atttgtagacacatggtcagttcattgaaatgg

SEQ ID NO: 1015367 - DNA, 33 bp, Homo sapien
cattttctctaaaccaaacctgatatttgtaat

SEQ ID NO: 1015368 - DNA, 33 bp, Homo sapien
cattttctctaaaccatacctgatatttgtaat

SEQ ID NO: 1015369 - DNA, 33 bp, Homo sapien
tgtgtacgtctacacaaaattatacatatttta

SEQ ID NO: 1015370 - DNA, 33 bp, Homo sapien
tgtgtacgtctacacagaattatacatatttta

SEQ ID NO: 1015371 - DNA, 33 bp, Homo sapien
cagaggtatgttaaaacacacacattcaaataa

SEQ ID NO: 1015372 - DNA, 33 bp, Homo sapien
cagaggtatgttaaaagacacacattcaaataa

SEQ ID NO: 1015373 - DNA, 33 bp, Homo sapien
aaatgtcttaaaaatcacaaatcactgtgcaga

SEQ ID NO: 1015374 - DNA, 33 bp, Homo sapien
aaatgtcttaaaaatcgcaaatcactgtgcaga

SEQ ID NO: 1015375 - DNA, 33 bp, Homo sapien
aaaaaagtggtagaaacagctagacagggaatc

SEQ ID NO: 1015376 - DNA, 33 bp, Homo sapien
aaaaaagtggtagaaagagctagacagggaatc

SEQ ID NO: 1015377 - DNA, 33 bp, Homo sapien
aagtaaataagtattaggaagactaggaactgg

SEQ ID NO: 1015378 - DNA, 33 bp, Homo sapien
aagtaaataagtattatgaagactaggaactgg

SEQ ID NO: 1015379 - DNA, 33 bp, Homo sapien
ttatagctggcaggaaacttagagataatttaa

SEQ ID NO: 1015380 - DNA, 33 bp, Homo sapien
ttatagctggcaggaatcttagagataatttaa

SEQ ID NO: 1015381 - DNA, 33 bp, Homo sapien
tacattgagttctaaaccattgacttacttatg

SEQ ID NO: 1015382 - DNA, 33 bp, Homo sapien
tacattgagttctaaatcattgacttacttatg

SEQ ID NO: 1015383 - DNA, 33 bp, Homo sapien
gttcagcaacaagtgacagtaactatacagttg

SEQ ID NO: 1015384 - DNA, 33 bp, Homo sapien
gttcagcaacaagtgagagtaactatacagttg

SEQ ID NO: 1015385 - DNA, 33 bp, Homo sapien
atggaggctcaaaaaactggatctaagctaaaa

SEQ ID NO: 1015386 - DNA, 33 bp, Homo sapien
atggaggctcaaaaaattggatctaagctaaaa

SEQ ID NO: 1015387 - DNA, 33 bp, Homo sapien
ttctaagaagacaggcccagttcttgaccagga

SEQ ID NO: 1015388 - DNA, 33 bp, Homo sapien
ttctaagaagacaggctcagttcttgaccagga

SEQ ID NO: 1015389 - DNA, 33 bp, Homo sapien
gtttggaggacaatggaacattctctctttaat

SEQ ID NO: 1015390 - DNA, 33 bp, Homo sapien
gtttggaggacaatgggacattctctctttaat

SEQ ID NO: 1015391 - DNA, 33 bp, Homo sapien
ccaattaaaattccaactgacagtcaagaatcc

SEQ ID NO: 1015392 - DNA, 33 bp, Homo sapien
ccaattaaaattccaattgacagtcaagaatcc

SEQ ID NO: 1015393 - DNA, 33 bp, Homo sapien
taagaaacagcaatgaaaactgtattgacttta

SEQ ID NO: 1015394 - DNA, 33 bp, Homo sapien
taagaaacagcaatgataactgtattgacttta

SEQ ID NO: 1015395 - DNA, 33 bp, Homo sapien
attgtaatttctgtgacagttgttggtgaaagg

SEQ ID NO: 1015396 - DNA, 33 bp, Homo sapien
attgtaatttctgtgatagttgttggtgaaagg

SEQ ID NO: 1015397 - DNA, 33 bp, Homo sapien
ttgtggaaggttgccacggtctctttgcaaggt

SEQ ID NO: 1015398 - DNA, 33 bp, Homo sapien
ttgtggaaggttgccatggtctctttgcaaggt

SEQ ID NO: 1015399 - DNA, 33 bp, Homo sapien
ttatcttggtccccaacgaaacagactctatga

SEQ ID NO: 1015400 - DNA, 33 bp, Homo sapien
ttatcttggtccccaatgaaacagactctatga

SEQ ID NO: 1015401 - DNA, 33 bp, Homo sapien
atcaggccagaccctaaggaccaaaactccagg

SEQ ID NO: 1015402 - DNA, 33 bp, Homo sapien
atcaggccagaccctatggaccaaaactccagg

SEQ ID NO: 1015403 - DNA, 33 bp, Homo sapien
gccatctctgcatacccgggtgccaagcccact

SEQ ID NO: 1015404 - DNA, 33 bp, Homo sapien
gccatctctgcatacctgggtgccaagcccact

SEQ ID NO: 1015405 - DNA, 33 bp, Homo sapien
agtcagtggaacatgaaagtttaagtattccat

SEQ ID NO: 1015406 - DNA, 33 bp, Homo sapien
agtcagtggaacatgacagtttaagtattccat

SEQ ID NO: 1015407 - DNA, 33 bp, Homo sapien
tcaatcaatacatggaaggtacattggctcagc

SEQ ID NO: 1015408 - DNA, 33 bp, Homo sapien
tcaatcaatacatggatggtacattggctcagc

SEQ ID NO: 1015409 - DNA, 33 bp, Homo sapien
caaagataattcatgacaaccacaaaaggtaga

SEQ ID NO: 1015410 - DNA, 33 bp, Homo sapien
caaagataattcatgagaaccacaaaaggtaga

SEQ ID NO: 1015411 - DNA, 33 bp, Homo sapien
attctccatagttggagatcttagggtgtttta

SEQ ID NO: 1015412 - DNA, 33 bp, Homo sapien
attctccatagttggatatcttagggtgtttta

SEQ ID NO: 1015413 - DNA, 33 bp, Homo sapien
taaatatataggcacccgacatcggacacataa

SEQ ID NO: 1015414 - DNA, 33 bp, Homo sapien
taaatatataggcacctgacatcggacacataa

SEQ ID NO: 1015415 - DNA, 33 bp, Homo sapien
tcctggccaatgtaacgactgggggaaaaatgg

SEQ ID NO: 1015416 - DNA, 33 bp, Homo sapien
tcctggccaatgtaactactgggggaaaaatgg

SEQ ID NO: 1015417 - DNA, 33 bp, Homo sapien
agtcatgtgtgggcaaattagattcaacaagaa

SEQ ID NO: 1015418 - DNA, 33 bp, Homo sapien
agtcatgtgtgggcaagttagattcaacaagaa

SEQ ID NO: 1015419 - DNA, 33 bp, Homo sapien
gattaacagtattggccctattgatctcattta

SEQ ID NO: 1015420 - DNA, 33 bp, Homo sapien
gattaacagtattggctctattgatctcattta

SEQ ID NO: 1015421 - DNA, 33 bp, Homo sapien
ggtccccaaatccataagttgaaggtctagtgc

SEQ ID NO: 1015422 - DNA, 33 bp, Homo sapien
ggtccccaaatccatatgttgaaggtctagtgc

SEQ ID NO: 1015423 - DNA, 33 bp, Homo sapien
agcttaagtagccttcgaactgcagaacataag

SEQ ID NO: 1015424 - DNA, 33 bp, Homo sapien
agcttaagtagccttctaactgcagaacataag

SEQ ID NO: 1015425 - DNA, 33 bp, Homo sapien
ggacctccctcaaaaacctactattccatctac

SEQ ID NO: 1015426 - DNA, 33 bp, Homo sapien
ggacctccctcaaaaatctactattccatctac

SEQ ID NO: 1015427 - DNA, 33 bp, Homo sapien
ttctttcatactttcacagaactgtaactataa

SEQ ID NO: 1015428 - DNA, 33 bp, Homo sapien
ttctttcatactttcatagaactgtaactataa

SEQ ID NO: 1015429 - DNA, 33 bp, Homo sapien
caaggtaaatacagcaactggaatatagaaggt

SEQ ID NO: 1015430 - DNA, 33 bp, Homo sapien
caaggtaaatacagcagctggaatatagaaggt

SEQ ID NO: 1015431 - DNA, 33 bp, Homo sapien
ttatataatttaattgcacagtatcattagcat

SEQ ID NO: 1015432 - DNA, 33 bp, Homo sapien
ttatataatttaattggacagtatcattagcat

SEQ ID NO: 1015433 - DNA, 33 bp, Homo sapien
ctctcttgagaagtgaaaacaattgtactataa

SEQ ID NO: 1015434 - DNA, 33 bp, Homo sapien
ctctcttgagaagtgagaacaattgtactataa

SEQ ID NO: 1015435 - DNA, 33 bp, Homo sapien
aggatagatcaggtgacggattgagtgaagggc

SEQ ID NO: 1015436 - DNA, 33 bp, Homo sapien
aggatagatcaggtgatggattgagtgaagggc

SEQ ID NO: 1015437 - DNA, 33 bp, Homo sapien
ccttaaagcttctcccaagataacaacatccaa

SEQ ID NO: 1015438 - DNA, 33 bp, Homo sapien
ccttaaagcttctcccgagataacaacatccaa

SEQ ID NO: 1015439 - DNA, 33 bp, Homo sapien
ttaaacaaagaatgccactgtgattgcctagat

SEQ ID NO: 1015440 - DNA, 33 bp, Homo sapien
ttaaacaaagaatgcccctgtgattgcctagat

SEQ ID NO: 1015441 - DNA, 33 bp, Homo sapien
tgacatagttttcaagcagtcacagattttctc

SEQ ID NO: 1015442 - DNA, 33 bp, Homo sapien
tgacatagttttcaagtagtcacagattttctc

SEQ ID NO: 1015443 - DNA, 33 bp, Homo sapien
ttactgccacctggaactgtgaagcctcacctt

SEQ ID NO: 1015444 - DNA, 33 bp, Homo sapien
ttactgccacctggaattgtgaagcctcacctt

SEQ ID NO: 1015445 - DNA, 33 bp, Homo sapien
caaggaaggagcctcaatcaaagatgatgccaa

SEQ ID NO: 1015446 - DNA, 33 bp, Homo sapien
caaggaaggagcctcagtcaaagatgatgccaa

SEQ ID NO: 1015447 - DNA, 33 bp, Homo sapien
tttactttaacaagaaacacctgaagaaacctt

SEQ ID NO: 1015448 - DNA, 33 bp, Homo sapien
tttactttaacaagaatcacctgaagaaacctt

SEQ ID NO: 1015449 - DNA, 33 bp, Homo sapien
ttggtttccagtagtccaggcccttcagtagca

SEQ ID NO: 1015450 - DNA, 33 bp, Homo sapien
ttggtttccagtagtctaggcccttcagtagca

SEQ ID NO: 1015451 - DNA, 33 bp, Homo sapien
gccaatctaagcaaagacctaatcttaaggtcc

SEQ ID NO: 1015452 - DNA, 33 bp, Homo sapien
gccaatctaagcaaagccctaatcttaaggtcc

SEQ ID NO: 1015453 - DNA, 33 bp, Homo sapien
catcatcctacaactactaaattggtgtctgtg

SEQ ID NO: 1015454 - DNA, 33 bp, Homo sapien
catcatcctacaactagtaaattggtgtctgtg

SEQ ID NO: 1015455 - DNA, 33 bp, Homo sapien
tttctgttgagatgaacggtcctttattgaaaa

SEQ ID NO: 1015456 - DNA, 33 bp, Homo sapien
tttctgttgagatgaatggtcctttattgaaaa

SEQ ID NO: 1015457 - DNA, 33 bp, Homo sapien
atattagaaaggatatcagactagaatctagag

SEQ ID NO: 1015458 - DNA, 33 bp, Homo sapien
atattagaaaggatattagactagaatctagag

SEQ ID NO: 1015459 - DNA, 33 bp, Homo sapien
aaaataatgtggaaaaagtgagtggtatgccca

SEQ ID NO: 1015460 - DNA, 33 bp, Homo sapien
aaaataatgtggaaaaggtgagtggtatgccca

SEQ ID NO: 1015461 - DNA, 33 bp, Homo sapien
tgcatgataattgaaaaataaaaggacataagt

SEQ ID NO: 1015462 - DNA, 33 bp, Homo sapien
tgcatgataattgaaatataaaaggacataagt

SEQ ID NO: 1015463 - DNA, 33 bp, Homo sapien
aaacagatccagagaaaatccatataaacaatg

SEQ ID NO: 1015464 - DNA, 33 bp, Homo sapien
aaacagatccagagaagatccatataaacaatg

SEQ ID NO: 1015465 - DNA, 33 bp, Homo sapien
catgaagagggaacaaggtggctagtaaacact

SEQ ID NO: 1015466 - DNA, 33 bp, Homo sapien
catgaagagggaacaatgtggctagtaaacact

SEQ ID NO: 1015467 - DNA, 33 bp, Homo sapien
tgtgcaatcctgcaaacgggagaatcacctggc

SEQ ID NO: 1015468 - DNA, 33 bp, Homo sapien
tgtgcaatcctgcaaatgggagaatcacctggc

SEQ ID NO: 1015469 - DNA, 33 bp, Homo sapien
gtctctagactgacacagagaattgcaagtcta

SEQ ID NO: 1015470 - DNA, 33 bp, Homo sapien
gtctctagactgacacggagaattgcaagtcta

SEQ ID NO: 1015471 - DNA, 33 bp, Homo sapien
aatacctctcaggttacgtttataggtcaccta

SEQ ID NO: 1015472 - DNA, 33 bp, Homo sapien
aatacctctcaggttatgtttataggtcaccta

SEQ ID NO: 1015473 - DNA, 33 bp, Homo sapien
caatgctcagtggggacattttcagtggatttg

SEQ ID NO: 1015474 - DNA, 33 bp, Homo sapien
caatgctcagtggggagattttcagtggatttg

SEQ ID NO: 1015475 - DNA, 33 bp, Homo sapien
atatgtttagcagccaaatgttttgctgaatac

SEQ ID NO: 1015476 - DNA, 33 bp, Homo sapien
atatgtttagcagccacatgttttgctgaatac

SEQ ID NO: 1015477 - DNA, 33 bp, Homo sapien
tagagtttcatacttaccggaagagctgtgtta

SEQ ID NO: 1015478 - DNA, 33 bp, Homo sapien
tagagtttcatacttatcggaagagctgtgtta

SEQ ID NO: 1015479 - DNA, 33 bp, Homo sapien
tatctgcaaaatgacaatacatacagcaaagct

SEQ ID NO: 1015480 - DNA, 33 bp, Homo sapien
tatctgcaaaatgacattacatacagcaaagct

SEQ ID NO: 1015481 - DNA, 33 bp, Homo sapien
caagaaaattataaaacagcttaggacggaaac

SEQ ID NO: 1015482 - DNA, 33 bp, Homo sapien
caagaaaattataaaagagcttaggacggaaac

SEQ ID NO: 1015483 - DNA, 33 bp, Homo sapien
atttgaactagacttccatcttttaaaagtaca

SEQ ID NO: 1015484 - DNA, 33 bp, Homo sapien
atttgaactagacttcgatcttttaaaagtaca

SEQ ID NO: 1015485 - DNA, 33 bp, Homo sapien
tcctaatagagttcaacgacaaggcttgaaagg

SEQ ID NO: 1015486 - DNA, 33 bp, Homo sapien
tcctaatagagttcaatgacaaggcttgaaagg

SEQ ID NO: 1015487 - DNA, 33 bp, Homo sapien
tctcttgcgacgtatcactgctgtttcagcttc

SEQ ID NO: 1015488 - DNA, 33 bp, Homo sapien
tctcttgcgacgtatcgctgctgtttcagcttc

SEQ ID NO: 1015489 - DNA, 33 bp, Homo sapien
tgccacctgtgctgtacatcctgttatgccagt

SEQ ID NO: 1015490 - DNA, 33 bp, Homo sapien
tgccacctgtgctgtatatcctgttatgccagt

SEQ ID NO: 1015491 - DNA, 33 bp, Homo sapien
gcctctgttgatccaacgggcacaaatgcactt

SEQ ID NO: 1015492 - DNA, 33 bp, Homo sapien
gcctctgttgatccaaggggcacaaatgcactt

SEQ ID NO: 1015493 - DNA, 33 bp, Homo sapien
tcttccagaaaaacaaacaagtacaagcctctg

SEQ ID NO: 1015494 - DNA, 33 bp, Homo sapien
tcttccagaaaaacaagcaagtacaagcctctg

SEQ ID NO: 1015495 - DNA, 33 bp, Homo sapien
agaggaccattctttacaccttagataccatgc

SEQ ID NO: 1015496 - DNA, 33 bp, Homo sapien
agaggaccattctttataccttagataccatgc

SEQ ID NO: 1015497 - DNA, 33 bp, Homo sapien
attaagtaatacaactaaggcacagattctagc

SEQ ID NO: 1015498 - DNA, 33 bp, Homo sapien
attaagtaatacaacttaggcacagattctagc

SEQ ID NO: 1015499 - DNA, 33 bp, Homo sapien
ttcaacaaaattgtcaatagattagtgtgaatc

SEQ ID NO: 1015500 - DNA, 33 bp, Homo sapien
ttcaacaaaattgtcagtagattagtgtgaatc

SEQ ID NO: 1015501 - DNA, 33 bp, Homo sapien
ttgactggcttaaactgacgtgacaatttaaat

SEQ ID NO: 1015502 - DNA, 33 bp, Homo sapien
ttgactggcttaaacttacgtgacaatttaaat

SEQ ID NO: 1015503 - DNA, 33 bp, Homo sapien
atgtcataaaggaagacgaatttttctacgtaa

SEQ ID NO: 1015504 - DNA, 33 bp, Homo sapien
atgtcataaaggaagatgaatttttctacgtaa

SEQ ID NO: 1015505 - DNA, 33 bp, Homo sapien
ttatcttaattggaaacggtatgcttgactcag

SEQ ID NO: 1015506 - DNA, 33 bp, Homo sapien
ttatcttaattggaaatggtatgcttgactcag

SEQ ID NO: 1015507 - DNA, 33 bp, Homo sapien
atttcctgcagagacactgtcaagcacctctca

SEQ ID NO: 1015508 - DNA, 33 bp, Homo sapien
atttcctgcagagacattgtcaagcacctctca

SEQ ID NO: 1015509 - DNA, 33 bp, Homo sapien
tctgtaccttttgcaacgcatagagttaattta

SEQ ID NO: 1015510 - DNA, 33 bp, Homo sapien
tctgtaccttttgcaatgcatagagttaattta

SEQ ID NO: 1015511 - DNA, 33 bp, Homo sapien
cttttctcagcccttgaagtgaatgaaaagaaa

SEQ ID NO: 1015512 - DNA, 33 bp, Homo sapien
cttttctcagcccttgcagtgaatgaaaagaaa

SEQ ID NO: 1015513 - DNA, 33 bp, Homo sapien
tctgtgaagccagataactcatttttaactggt

SEQ ID NO: 1015514 - DNA, 33 bp, Homo sapien
tctgtgaagccagatagctcatttttaactggt

SEQ ID NO: 1015515 - DNA, 33 bp, Homo sapien
tgctgagaaattgctgaaaaaaaaagtggattg

SEQ ID NO: 1015516 - DNA, 33 bp, Homo sapien
tgctgagaaattgctggaaaaaaaagtggattg

SEQ ID NO: 1015517 - DNA, 33 bp, Homo sapien
atttgatgaaaagttacacattttattagaacg

SEQ ID NO: 1015518 - DNA, 33 bp, Homo sapien
atttgatgaaaagttagacattttattagaacg

SEQ ID NO: 1015519 - DNA, 33 bp, Homo sapien
tggggaaactcagatcgaggaaggctaagtgac

SEQ ID NO: 1015520 - DNA, 33 bp, Homo sapien
tggggaaactcagatctaggaaggctaagtgac

SEQ ID NO: 1015521 - DNA, 33 bp, Homo sapien
tttcatgatttatgtaaggcttaatggtcatct

SEQ ID NO: 1015522 - DNA, 33 bp, Homo sapien
tttcatgatttatgtagggcttaatggtcatct

SEQ ID NO: 1015523 - DNA, 33 bp, Homo sapien
gctgcatcctcaaccactggaatcaatttgacc

SEQ ID NO: 1015524 - DNA, 33 bp, Homo sapien
gctgcatcctcaaccattggaatcaatttgacc

SEQ ID NO: 1015525 - DNA, 33 bp, Homo sapien
ggaacaattttagcacacttttcaaaattttgt

SEQ ID NO: 1015526 - DNA, 33 bp, Homo sapien
ggaacaattttagcacgcttttcaaaattttgt

SEQ ID NO: 1015527 - DNA, 33 bp, Homo sapien
aagccgtggttatggactatattatgcattagt

SEQ ID NO: 1015528 - DNA, 33 bp, Homo sapien
aagccgtggttatggattatattatgcattagt

SEQ ID NO: 1015529 - DNA, 33 bp, Homo sapien
caataaaagacactaagatcaacaactaagaat

SEQ ID NO: 1015530 - DNA, 33 bp, Homo sapien
caataaaagacactaatatcaacaactaagaat

SEQ ID NO: 1015531 - DNA, 33 bp, Homo sapien
tggtgatccaggtgtacagatggaagtccatct

SEQ ID NO: 1015532 - DNA, 33 bp, Homo sapien
tggtgatccaggtgtagagatggaagtccatct

SEQ ID NO: 1015533 - DNA, 33 bp, Homo sapien
atttatcacactgaagaaacaggttttgaaata

SEQ ID NO: 1015534 - DNA, 33 bp, Homo sapien
atttatcacactgaaggaacaggttttgaaata

SEQ ID NO: 1015535 - DNA, 33 bp, Homo sapien
ggactgtcaaagtggactaactctgaaccaaag

SEQ ID NO: 1015536 - DNA, 33 bp, Homo sapien
ggactgtcaaagtggagtaactctgaaccaaag

SEQ ID NO: 1015537 - DNA, 33 bp, Homo sapien
gttactgtctcctctaatacaaaaatccacatc

SEQ ID NO: 1015538 - DNA, 33 bp, Homo sapien
gttactgtctcctctagtacaaaaatccacatc

SEQ ID NO: 1015539 - DNA, 33 bp, Homo sapien
gtactagggagcagacaaaagtttcctgtggga

SEQ ID NO: 1015540 - DNA, 33 bp, Homo sapien
gtactagggagcagactaaagtttcctgtggga

SEQ ID NO: 1015541 - DNA, 33 bp, Homo sapien
agtaggcaaataactaagctttggctggtacta

SEQ ID NO: 1015542 - DNA, 33 bp, Homo sapien
agtaggcaaataactatgctttggctggtacta

SEQ ID NO: 1015543 - DNA, 33 bp, Homo sapien
ttcatgagaatattcacctaaggcaagaagtaa

SEQ ID NO: 1015544 - DNA, 33 bp, Homo sapien
ttcatgagaatattcatctaaggcaagaagtaa

SEQ ID NO: 1015545 - DNA, 33 bp, Homo sapien
ccccagcatcatttgacagtgtccacagtacct

SEQ ID NO: 1015546 - DNA, 33 bp, Homo sapien
ccccagcatcatttgatagtgtccacagtacct

SEQ ID NO: 1015547 - DNA, 33 bp, Homo sapien
gtctcctttcaaggcaaatttctgtctttgatc

SEQ ID NO: 1015548 - DNA, 33 bp, Homo sapien
gtctcctttcaaggcagatttctgtctttgatc

SEQ ID NO: 1015549 - DNA, 33 bp, Homo sapien
aaatcagtaactattcaatcttaatctttgaat

SEQ ID NO: 1015550 - DNA, 33 bp, Homo sapien
aaatcagtaactattcgatcttaatctttgaat

SEQ ID NO: 1015551 - DNA, 33 bp, Homo sapien
tttattgaatttttaaaacaactccatggctta

SEQ ID NO: 1015552 - DNA, 33 bp, Homo sapien
tttattgaatttttaatacaactccatggctta

SEQ ID NO: 1015553 - DNA, 33 bp, Homo sapien
agaaatgggattccctaaactggaagatgaaaa

SEQ ID NO: 1015554 - DNA, 33 bp, Homo sapien
agaaatgggattcccttaactggaagatgaaaa

SEQ ID NO: 1015555 - DNA, 33 bp, Homo sapien
tttcttctcactaaaacttcatattacctaaat

SEQ ID NO: 1015556 - DNA, 33 bp, Homo sapien
tttcttctcactaaaatttcatattacctaaat

SEQ ID NO: 1015557 - DNA, 33 bp, Homo sapien
tattttggaagctataaattctcaaggtgaaaa

SEQ ID NO: 1015558 - DNA, 33 bp, Homo sapien
tattttggaagctatagattctcaaggtgaaaa

SEQ ID NO: 1015559 - DNA, 33 bp, Homo sapien
aactgaatctatctacaatattgctttatctcc

SEQ ID NO: 1015560 - DNA, 33 bp, Homo sapien
aactgaatctatctacgatattgctttatctcc

SEQ ID NO: 1015561 - DNA, 33 bp, Homo sapien
tcatattcttaaactacggatccaatcatgaaa

SEQ ID NO: 1015562 - DNA, 33 bp, Homo sapien
tcatattcttaaactatggatccaatcatgaaa

SEQ ID NO: 1015563 - DNA, 33 bp, Homo sapien
gaaaatctcagacctaatacccacatcttgcct

SEQ ID NO: 1015564 - DNA, 33 bp, Homo sapien
gaaaatctcagacctactacccacatcttgcct

SEQ ID NO: 1015565 - DNA, 33 bp, Homo sapien
taggtaggtattaaaccatgacacatgaagata

SEQ ID NO: 1015566 - DNA, 33 bp, Homo sapien
taggtaggtattaaactatgacacatgaagata

SEQ ID NO: 1015567 - DNA, 33 bp, Homo sapien
ttttatgagaagttgacattactgcctatctag

SEQ ID NO: 1015568 - DNA, 33 bp, Homo sapien
ttttatgagaagttgagattactgcctatctag

SEQ ID NO: 1015569 - DNA, 33 bp, Homo sapien
gatagtcctgaagtcacatttacaagtactttg

SEQ ID NO: 1015570 - DNA, 33 bp, Homo sapien
gatagtcctgaagtcatatttacaagtactttg

SEQ ID NO: 1015571 - DNA, 33 bp, Homo sapien
aactgatgggagggcacaagtaaattgatgtaa

SEQ ID NO: 1015572 - DNA, 33 bp, Homo sapien
aactgatgggagggcagaagtaaattgatgtaa

SEQ ID NO: 1015573 - DNA, 33 bp, Homo sapien
ggagatcaaaacatataaaggatgcagatgaca

SEQ ID NO: 1015574 - DNA, 33 bp, Homo sapien
ggagatcaaaacatatgaaggatgcagatgaca

SEQ ID NO: 1015575 - DNA, 33 bp, Homo sapien
catctgtgtttataccaatcgatgatgtgataa

SEQ ID NO: 1015576 - DNA, 33 bp, Homo sapien
catctgtgtttataccgatcgatgatgtgataa

SEQ ID NO: 1015577 - DNA, 33 bp, Homo sapien
agaagaaacaagcgaaagtctcagcaacaggac

SEQ ID NO: 1015578 - DNA, 33 bp, Homo sapien
agaagaaacaagcgaacgtctcagcaacaggac

SEQ ID NO: 1015579 - DNA, 33 bp, Homo sapien
tttgttgtttggttcacgtaataatttgtagtg

SEQ ID NO: 1015580 - DNA, 33 bp, Homo sapien
tttgttgtttggttcaggtaataatttgtagtg

SEQ ID NO: 1015581 - DNA, 33 bp, Homo sapien
atagttttaccttagcacagttttgaaatagaa

SEQ ID NO: 1015582 - DNA, 33 bp, Homo sapien
atagttttaccttagcgcagttttgaaatagaa

SEQ ID NO: 1015583 - DNA, 33 bp, Homo sapien
ttctatctataaagccaagggaaactcagatgc

SEQ ID NO: 1015584 - DNA, 33 bp, Homo sapien
ttctatctataaagcctagggaaactcagatgc

SEQ ID NO: 1015585 - DNA, 33 bp, Homo sapien
ttctccttcatccaaagaaatcattatctgcat

SEQ ID NO: 1015586 - DNA, 33 bp, Homo sapien
ttctccttcatccaaataaatcattatctgcat

SEQ ID NO: 1015587 - DNA, 33 bp, Homo sapien
cacaaacctctccatcagaaatttgcacattca

SEQ ID NO: 1015588 - DNA, 33 bp, Homo sapien
cacaaacctctccatcggaaatttgcacattca

SEQ ID NO: 1015589 - DNA, 33 bp, Homo sapien
tctaaccaaggaaagacggctacaacatttgga

SEQ ID NO: 1015590 - DNA, 33 bp, Homo sapien
tctaaccaaggaaagatggctacaacatttgga

SEQ ID NO: 1015591 - DNA, 33 bp, Homo sapien
agaatcaaaagcaaaaccatatggtcttctcaa

SEQ ID NO: 1015592 - DNA, 33 bp, Homo sapien
agaatcaaaagcaaaatcatatggtcttctcaa

SEQ ID NO: 1015593 - DNA, 33 bp, Homo sapien
ggcttaatgattgtcaaaacacccctcccctca

SEQ ID NO: 1015594 - DNA, 33 bp, Homo sapien
ggcttaatgattgtcagaacacccctcccctca

SEQ ID NO: 1015595 - DNA, 33 bp, Homo sapien
agatgggagcaagtgacatcagcacagtgttga

SEQ ID NO: 1015596 - DNA, 33 bp, Homo sapien
agatgggagcaagtgagatcagcacagtgttga

SEQ ID NO: 1015597 - DNA, 33 bp, Homo sapien
caatatagatgtggtgcatcaaattaaaaaaac

SEQ ID NO: 1015598 - DNA, 33 bp, Homo sapien
caatatagatgtggtgtatcaaattaaaaaaac

SEQ ID NO: 1015599 - DNA, 33 bp, Homo sapien
tggtatttgctgttctaaatctttgagggattg

SEQ ID NO: 1015600 - DNA, 33 bp, Homo sapien
tggtatttgctgttctgaatctttgagggattg

SEQ ID NO: 1015601 - DNA, 33 bp, Homo sapien
tagtgggaaatgaaaaaagtcaccttcctattg

SEQ ID NO: 1015602 - DNA, 33 bp, Homo sapien
tagtgggaaatgaaaagagtcaccttcctattg

SEQ ID NO: 1015603 - DNA, 33 bp, Homo sapien
actgactaggagaaaactgagaaggaaccctta

SEQ ID NO: 1015604 - DNA, 33 bp, Homo sapien
actgactaggagaaaattgagaaggaaccctta

SEQ ID NO: 1015605 - DNA, 33 bp, Homo sapien
atgttgatgcatgtaaatacattttatcaccag

SEQ ID NO: 1015606 - DNA, 33 bp, Homo sapien
atgttgatgcatgtaagtacattttatcaccag

SEQ ID NO: 1015607 - DNA, 33 bp, Homo sapien
cccctctcccagatccaaaagttggcaagaagc

SEQ ID NO: 1015608 - DNA, 33 bp, Homo sapien
cccctctcccagatccgaaagttggcaagaagc

SEQ ID NO: 1015609 - DNA, 33 bp, Homo sapien
gtggggtagatagttaaatatgtttgccacctt

SEQ ID NO: 1015610 - DNA, 33 bp, Homo sapien
gtggggtagatagttatatatgtttgccacctt

SEQ ID NO: 1015611 - DNA, 33 bp, Homo sapien
tcccaaattaccgtcacgtaaccctcactgatt

SEQ ID NO: 1015612 - DNA, 33 bp, Homo sapien
tcccaaattaccgtcatgtaaccctcactgatt

SEQ ID NO: 1015613 - DNA, 33 bp, Homo sapien
ttgggaccaataagtcaatctcctactgaaggt

SEQ ID NO: 1015614 - DNA, 33 bp, Homo sapien
ttgggaccaataagtcgatctcctactgaaggt

SEQ ID NO: 1015615 - DNA, 33 bp, Homo sapien
gatgagccataacataagataggtatcagaggc

SEQ ID NO: 1015616 - DNA, 33 bp, Homo sapien
gatgagccataacatacgataggtatcagaggc

SEQ ID NO: 1015617 - DNA, 33 bp, Homo sapien
atgctcagtatgattaagtaatttaaccaaggt

SEQ ID NO: 1015618 - DNA, 33 bp, Homo sapien
atgctcagtatgattaggtaatttaaccaaggt

SEQ ID NO: 1015619 - DNA, 33 bp, Homo sapien
cttacgccaaattatccgaccagtggataggta

SEQ ID NO: 1015620 - DNA, 33 bp, Homo sapien
cttacgccaaattatctgaccagtggataggta

SEQ ID NO: 1015621 - DNA, 33 bp, Homo sapien
aactcggggtaccagaatattgaacaaaagtat

SEQ ID NO: 1015622 - DNA, 33 bp, Homo sapien
aactcggggtaccagagtattgaacaaaagtat

SEQ ID NO: 1015623 - DNA, 33 bp, Homo sapien
gattagtagtattcaggacttttccatatgttt

SEQ ID NO: 1015624 - DNA, 33 bp, Homo sapien
gattagtagtattcagtacttttccatatgttt

SEQ ID NO: 1015625 - DNA, 33 bp, Homo sapien
aatcaacaggactgataagcagtaagaaccaga

SEQ ID NO: 1015626 - DNA, 33 bp, Homo sapien
aatcaacaggactgatcagcagtaagaaccaga

SEQ ID NO: 1015627 - DNA, 33 bp, Homo sapien
attccagctctatggacggaaatttttctggtg

SEQ ID NO: 1015628 - DNA, 33 bp, Homo sapien
attccagctctatggatggaaatttttctggtg

SEQ ID NO: 1015629 - DNA, 33 bp, Homo sapien
acccacttcatcacaacaggtagggaggcttgt

SEQ ID NO: 1015630 - DNA, 33 bp, Homo sapien
acccacttcatcacaagaggtagggaggcttgt

SEQ ID NO: 1015631 - DNA, 33 bp, Homo sapien
tctggagggtttctagaatagttcctgtcatat

SEQ ID NO: 1015632 - DNA, 33 bp, Homo sapien
tctggagggtttctaggatagttcctgtcatat

SEQ ID NO: 1015633 - DNA, 33 bp, Homo sapien
gcatatactacagacacatacctaggcacacac

SEQ ID NO: 1015634 - DNA, 33 bp, Homo sapien
gcatatactacagacatatacctaggcacacac

SEQ ID NO: 1015635 - DNA, 33 bp, Homo sapien
tttctagttaacctgcccaaaaagttgccattc

SEQ ID NO: 1015636 - DNA, 33 bp, Homo sapien
tttctagttaacctgctcaaaaagttgccattc

SEQ ID NO: 1015637 - DNA, 33 bp, Homo sapien
atcagtttgaagcaataaacagaataaataacc

SEQ ID NO: 1015638 - DNA, 33 bp, Homo sapien
atcagtttgaagcaattaacagaataaataacc

SEQ ID NO: 1015639 - DNA, 33 bp, Homo sapien
attgaatgaataaatcaatcaaacaatcaatca

SEQ ID NO: 1015640 - DNA, 33 bp, Homo sapien
attgaatgaataaatccatcaaacaatcaatca

SEQ ID NO: 1015641 - DNA, 33 bp, Homo sapien
ctttgtgcatgaaaagcctattctctgaggaac

SEQ ID NO: 1015642 - DNA, 33 bp, Homo sapien
ctttgtgcatgaaaaggctattctctgaggaac

SEQ ID NO: 1015643 - DNA, 33 bp, Homo sapien
gagaggatgtggagaaataggaattcctttaca

SEQ ID NO: 1015644 - DNA, 33 bp, Homo sapien
gagaggatgtggagaagtaggaattcctttaca

SEQ ID NO: 1015645 - DNA, 33 bp, Homo sapien
agcaggaaagggtatcacaagccactcactccc

SEQ ID NO: 1015646 - DNA, 33 bp, Homo sapien
agcaggaaagggtatcgcaagccactcactccc

SEQ ID NO: 1015647 - DNA, 33 bp, Homo sapien
tgaaaggagcttgcagaaatggaatggaagttg

SEQ ID NO: 1015648 - DNA, 33 bp, Homo sapien
tgaaaggagcttgcaggaatggaatggaagttg

SEQ ID NO: 1015649 - DNA, 33 bp, Homo sapien
cctaattatgtaggcacccaatataggagcacc

SEQ ID NO: 1015650 - DNA, 33 bp, Homo sapien
cctaattatgtaggcatccaatataggagcacc

SEQ ID NO: 1015651 - DNA, 33 bp, Homo sapien; identical to SEQ ID NO: 1015649

SEQ ID NO: 1015652 - DNA, 33 bp, Homo sapien; identical to SEQ ID NO: 1015650

SEQ ID NO: 1015653 - DNA, 33 bp, Homo sapien
aagggaagaggaggaacagtttgaaagtcttca

SEQ ID NO: 1015654 - DNA, 33 bp, Homo sapien
aagggaagaggaggaatagtttgaaagtcttca

SEQ ID NO: 1015655 - DNA, 33 bp, Homo sapien
ggaccatagccttaaagttaaacataaatctgc

SEQ ID NO: 1015656 - DNA, 33 bp, Homo sapien
ggaccatagccttaaatttaaacataaatctgc

SEQ ID NO: 1015657 - DNA, 33 bp, Homo sapien
ttttgcaattttagtaacttttttatccatgga

SEQ ID NO: 1015658 - DNA, 33 bp, Homo sapien
ttttgcaattttagtaccttttttatccatgga

SEQ ID NO: 1015659 - DNA, 33 bp, Homo sapien
atagccagatgtagaggaagtgaaatttgtgcc

SEQ ID NO: 1015660 - DNA, 33 bp, Homo sapien
atagccagatgtagagtaagtgaaatttgtgcc

SEQ ID NO: 1015661 - DNA, 33 bp, Homo sapien
cctgcaaggcttccgccagtgataaaaatgtac

SEQ ID NO: 1015662 - DNA, 33 bp, Homo sapien
cctgcaaggcttccgctagtgataaaaatgtac

SEQ ID NO: 1015663 - DNA, 33 bp, Homo sapien
gtcatgagaagaacacaggaacaacacacccct

SEQ ID NO: 1015664 - DNA, 33 bp, Homo sapien
gtcatgagaagaacacgggaacaacacacccct

SEQ ID NO: 1015665 - DNA, 33 bp, Homo sapien
ggtaaattgtcataaacttaatgcttcttagat

SEQ ID NO: 1015666 - DNA, 33 bp, Homo sapien
ggtaaattgtcataaagttaatgcttcttagat

SEQ ID NO: 1015667 - DNA, 33 bp, Homo sapien
tagcatcatgaaataacatacttaggactgaat

SEQ ID NO: 1015668 - DNA, 33 bp, Homo sapien
tagcatcatgaaataagatacttaggactgaat

SEQ ID NO: 1015669 - DNA, 33 bp, Homo sapien
attaaaaacatatacccacgcaaaaacatggcc

SEQ ID NO: 1015670 - DNA, 33 bp, Homo sapien
attaaaaacatataccgacgcaaaaacatggcc

SEQ ID NO: 1015671 - DNA, 33 bp, Homo sapien
caaatgtattggtacaacaattggccccatagc

SEQ ID NO: 1015672 - DNA, 33 bp, Homo sapien
caaatgtattggtacatcaattggccccatagc

SEQ ID NO: 1015673 - DNA, 33 bp, Homo sapien
cctcattttccatgcccatttaaatccctacaa

SEQ ID NO: 1015674 - DNA, 33 bp, Homo sapien
cctcattttccatgcctatttaaatccctacaa

SEQ ID NO: 1015675 - DNA, 33 bp, Homo sapien
ctagtgtctcctataacaggctgataatttgtc

SEQ ID NO: 1015676 - DNA, 33 bp, Homo sapien
ctagtgtctcctataataggctgataatttgtc

SEQ ID NO: 1015677 - DNA, 33 bp, Homo sapien
acattgcattttaaaggcacttaaatatcttta

SEQ ID NO: 1015678 - DNA, 33 bp, Homo sapien
acattgcattttaaagtcacttaaatatcttta

SEQ ID NO: 1015679 - DNA, 33 bp, Homo sapien
agatacattaaataaactgcttgatcttgagaa

SEQ ID NO: 1015680 - DNA, 33 bp, Homo sapien
agatacattaaataaattgcttgatcttgagaa

SEQ ID NO: 1015681 - DNA, 33 bp, Homo sapien
ttgaattgctctttcccgagtcaggcagaaagc

SEQ ID NO: 1015682 - DNA, 33 bp, Homo sapien
ttgaattgctctttcctgagtcaggcagaaagc

SEQ ID NO: 1015683 - DNA, 33 bp, Homo sapien
ggttacaggcattagacaaatgttcccattccg

SEQ ID NO: 1015684 - DNA, 33 bp, Homo sapien
ggttacaggcattagataaatgttcccattccg

SEQ ID NO: 1015685 - DNA, 33 bp, Homo sapien
tgcaagagtgatacaaactattcctgtgtgaat

SEQ ID NO: 1015686 - DNA, 33 bp, Homo sapien
tgcaagagtgatacaagctattcctgtgtgaat

SEQ ID NO: 1015687 - DNA, 33 bp, Homo sapien
aaaattaagagctgaaagaaaatctaattatgt

SEQ ID NO: 1015688 - DNA, 33 bp, Homo sapien
aaaattaagagctgaaggaaaatctaattatgt

SEQ ID NO: 1015689 - DNA, 33 bp, Homo sapien
aagttaaagtcctggccctgatactaactagtc

SEQ ID NO: 1015690 - DNA, 33 bp, Homo sapien
aagttaaagtcctggctctgatactaactagtc

SEQ ID NO: 1015691 - DNA, 33 bp, Homo sapien
ctaggaaaatctggccaattgcttgctcaaata

SEQ ID NO: 1015692 - DNA, 33 bp, Homo sapien
ctaggaaaatctggccgattgcttgctcaaata

SEQ ID NO: 1015693 - DNA, 33 bp, Homo sapien
tttgggtaatgggtacactcaaagactaatccc

SEQ ID NO: 1015694 - DNA, 33 bp, Homo sapien
tttgggtaatgggtactctcaaagactaatccc

SEQ ID NO: 1015695 - DNA, 33 bp, Homo sapien
gtttctactcaaactcaaaactctgaaacacag

SEQ ID NO: 1015696 - DNA, 33 bp, Homo sapien
gtttctactcaaactcgaaactctgaaacacag

SEQ ID NO: 1015697 - DNA, 33 bp, Homo sapien
tggtatttgtaaggcacgtatcagagataaaaa

SEQ ID NO: 1015698 - DNA, 33 bp, Homo sapien
tggtatttgtaaggcaggtatcagagataaaaa

SEQ ID NO: 1015699 - DNA, 33 bp, Homo sapien
agacatggtgaatgtccaacttaataaatgaaa

SEQ ID NO: 1015700 - DNA, 33 bp, Homo sapien
agacatggtgaatgtctaacttaataaatgaaa

SEQ ID NO: 1015701 - DNA, 33 bp, Homo sapien
atcaccttaaagttcacgtgggaatctgaaaat

SEQ ID NO: 1015702 - DNA, 33 bp, Homo sapien
atcaccttaaagttcatgtgggaatctgaaaat

SEQ ID NO: 1015703 - DNA, 33 bp, Homo sapien
gaaaactttgcctaaagcttctctgtggtttgc

SEQ ID NO: 1015704 - DNA, 33 bp, Homo sapien
gaaaactttgcctaaatcttctctgtggtttgc

SEQ ID NO: 1015705 - DNA, 33 bp, Homo sapien
gaaaggaagtagaaagaaacatttgattagcat

SEQ ID NO: 1015706 - DNA, 33 bp, Homo sapien
gaaaggaagtagaaaggaacatttgattagcat

SEQ ID NO: 1015707 - DNA, 33 bp, Homo sapien
acttcgctaagaataacggcctcccgctgcatc

SEQ ID NO: 1015708 - DNA, 33 bp, Homo sapien
acttcgctaagaataatggcctcccgctgcatc

SEQ ID NO: 1015709 - DNA, 33 bp, Homo sapien
tggaaatgtgcaaagaaagccaatgttctccag

SEQ ID NO: 1015710 - DNA, 33 bp, Homo sapien
tggaaatgtgcaaagagagccaatgttctccag

SEQ ID NO: 1015711 - DNA, 33 bp, Homo sapien
acatttggaaaaaaggaaactgtagaacaatga

SEQ ID NO: 1015712 - DNA, 33 bp, Homo sapien
acatttggaaaaaagggaactgtagaacaatga

SEQ ID NO: 1015713 - DNA, 33 bp, Homo sapien
ttttatttttactggaatagttatgcttcaaac

SEQ ID NO: 1015714 - DNA, 33 bp, Homo sapien
ttttatttttactggactagttatgcttcaaac

SEQ ID NO: 1015715 - DNA, 33 bp, Homo sapien
gatcactgtgtagtagcaacattttaaccatat

SEQ ID NO: 1015716 - DNA, 33 bp, Homo sapien
gatcactgtgtagtaggaacattttaaccatat

SEQ ID NO: 1015717 - DNA, 33 bp, Homo sapien
tcatcaaatctttaagacactgaggcatatcac

SEQ ID NO: 1015718 - DNA, 33 bp, Homo sapien
tcatcaaatctttaaggcactgaggcatatcac

SEQ ID NO: 1015719 - DNA, 33 bp, Homo sapien
taaatcaatgtagttcacttgcacacctattgg

SEQ ID NO: 1015720 - DNA, 33 bp, Homo sapien
taaatcaatgtagttcgcttgcacacctattgg

SEQ ID NO: 1015721 - DNA, 33 bp, Homo sapien
ttttatcatccaggtactacatctactatccat

SEQ ID NO: 1015722 - DNA, 33 bp, Homo sapien
ttttatcatccaggtattacatctactatccat

SEQ ID NO: 1015723 - DNA, 33 bp, Homo sapien
ttccttagctcttatgaaggttttctcatgcat

SEQ ID NO: 1015724 - DNA, 33 bp, Homo sapien
ttccttagctcttatggaggttttctcatgcat

SEQ ID NO: 1015725 - DNA, 33 bp, Homo sapien
ggttttcttaatctcaaaagccagagtaaaact

SEQ ID NO: 1015726 - DNA, 33 bp, Homo sapien
ggttttcttaatctcagaagccagagtaaaact

SEQ ID NO: 1015727 - DNA, 33 bp, Homo sapien
atattaatttgtttagcatcactgcttagaatc

SEQ ID NO: 1015728 - DNA, 33 bp, Homo sapien
atattaatttgtttagtatcactgcttagaatc

SEQ ID NO: 1015729 - DNA, 33 bp, Homo sapien
aaaaaaatccaacaagaacagcttaaaatactt

SEQ ID NO: 1015730 - DNA, 33 bp, Homo sapien
aaaaaaatccaacaaggacagcttaaaatactt

SEQ ID NO: 1015731 - DNA, 33 bp, Homo sapien
caagtgaataaagaaaatgtgatgtatatatac

SEQ ID NO: 1015732 - DNA, 33 bp, Homo sapien
caagtgaataaagaaattgtgatgtatatatac

SEQ ID NO: 1015733 - DNA, 33 bp, Homo sapien
gaaaagaagtcattacacgcaaaaggatacttg

SEQ ID NO: 1015734 - DNA, 33 bp, Homo sapien
gaaaagaagtcattacgcgcaaaaggatacttg

SEQ ID NO: 1015735 - DNA, 33 bp, Homo sapien
ttgtttgcagaatcccaaaacaaggactagaga

SEQ ID NO: 1015736 - DNA, 33 bp, Homo sapien
ttgtttgcagaatcccgaaacaaggactagaga

SEQ ID NO: 1015737 - DNA, 33 bp, Homo sapien
atttggcaaggaacaacgtactctcaccatggg

SEQ ID NO: 1015738 - DNA, 33 bp, Homo sapien
atttggcaaggaacaatgtactctcaccatggg

SEQ ID NO: 1015739 - DNA, 33 bp, Homo sapien
aatttattatcagagagagtggcccaggataat

SEQ ID NO: 1015740 - DNA, 33 bp, Homo sapien
aatttattatcagagatagtggcccaggataat

SEQ ID NO: 1015741 - DNA, 33 bp, Homo sapien
gagagtgcgcaacacaatcaatctggctaattc

SEQ ID NO: 1015742 - DNA, 33 bp, Homo sapien
gagagtgcgcaacacagtcaatctggctaattc

SEQ ID NO: 1015743 - DNA, 33 bp, Homo sapien
gacagaacctgagaaacaaggtgtgatgaaaaa

SEQ ID NO: 1015744 - DNA, 33 bp, Homo sapien
gacagaacctgagaaagaaggtgtgatgaaaaa

SEQ ID NO: 1015745 - DNA, 33 bp, Homo sapien
taatcatgaggttttccaggataaaaggtagag

SEQ ID NO: 1015746 - DNA, 33 bp, Homo sapien
taatcatgaggttttctaggataaaaggtagag

SEQ ID NO: 1015747 - DNA, 33 bp, Homo sapien
gctcagataaccaggaacaataaccaagtttgt

SEQ ID NO: 1015748 - DNA, 33 bp, Homo sapien
gctcagataaccaggatcaataaccaagtttgt

SEQ ID NO: 1015749 - DNA, 33 bp, Homo sapien
tcacttataagtaggacctgaagaatgagaaca

SEQ ID NO: 1015750 - DNA, 33 bp, Homo sapien
tcacttataagtaggagctgaagaatgagaaca

SEQ ID NO: 1015751 - DNA, 33 bp, Homo sapien
aaaagctaggaagacactgagatttttctttta

SEQ ID NO: 1015752 - DNA, 33 bp, Homo sapien
aaaagctaggaagacattgagatttttctttta

SEQ ID NO: 1015753 - DNA, 33 bp, Homo sapien
atacattggtattgagccaggtctgtgaagcag

SEQ ID NO: 1015754 - DNA, 33 bp, Homo sapien
atacattggtattgagtcaggtctgtgaagcag

SEQ ID NO: 1015755 - DNA, 33 bp, Homo sapien
gaccaataggaattgacaaactcaactatcatg

SEQ ID NO: 1015756 - DNA, 33 bp, Homo sapien
gaccaataggaattgagaaactcaactatcatg

SEQ ID NO: 1015757 - DNA, 33 bp, Homo sapien
tctctagttactgaagaaacttttggattacct

SEQ ID NO: 1015758 - DNA, 33 bp, Homo sapien
tctctagttactgaaggaacttttggattacct

SEQ ID NO: 1015759 - DNA, 33 bp, Homo sapien
aattttggagggtatcaaagagcctttttttgt

SEQ ID NO: 1015760 - DNA, 33 bp, Homo sapien
aattttggagggtatcgaagagcctttttttgt

SEQ ID NO: 1015761 - DNA, 33 bp, Homo sapien
aaaattcgtaattgtgaaatcgtgaaaccaacc

SEQ ID NO: 1015762 - DNA, 33 bp, Homo sapien
aaaattcgtaattgtggaatcgtgaaaccaacc

SEQ ID NO: 1015763 - DNA, 33 bp, Homo sapien
aaaagatcatgaaaccaggttaatataagaaac

SEQ ID NO: 1015764 - DNA, 33 bp, Homo sapien
aaaagatcatgaaacctggttaatataagaaac

SEQ ID NO: 1015765 - DNA, 33 bp, Homo sapien
agcgtagaaatatcaagaaacacaatttacatt

SEQ ID NO: 1015766 - DNA, 33 bp, Homo sapien
agcgtagaaatatcaataaacacaatttacatt

SEQ ID NO: 1015767 - DNA, 33 bp, Homo sapien
ccctgtaaatagagtgcagtttttgacggagtg

SEQ ID NO: 1015768 - DNA, 33 bp, Homo sapien
ccctgtaaatagagtgtagtttttgacggagtg

SEQ ID NO: 1015769 - DNA, 33 bp, Homo sapien
aaaactgcagaggccaaggaataaattcaaaca

SEQ ID NO: 1015770 - DNA, 33 bp, Homo sapien
aaaactgcagaggccagggaataaattcaaaca

SEQ ID NO: 1015771 - DNA, 33 bp, Homo sapien
taccctcatatgcccacgttagtaaatctacca

SEQ ID NO: 1015772 - DNA, 33 bp, Homo sapien
taccctcatatgcccatgttagtaaatctacca

SEQ ID NO: 1015773 - DNA, 33 bp, Homo sapien
tgattaaagaaattaaagaggacaccataaaat

SEQ ID NO: 1015774 - DNA, 33 bp, Homo sapien
tgattaaagaaattaaggaggacaccataaaat

SEQ ID NO: 1015775 - DNA, 33 bp, Homo sapien
gaaataggtcaaagggaataaatttgccatcag

SEQ ID NO: 1015776 - DNA, 33 bp, Homo sapien
gaaataggtcaaagggcataaatttgccatcag

SEQ ID NO: 1015777 - DNA, 33 bp, Homo sapien
gatgtgagtggcactaagcagtattatatttta

SEQ ID NO: 1015778 - DNA, 33 bp, Homo sapien
gatgtgagtggcactatgcagtattatatttta

SEQ ID NO: 1015779 - DNA, 33 bp, Homo sapien
tgtgcaaagttaaagccaaggctgtcttgtgaa

SEQ ID NO: 1015780 - DNA, 33 bp, Homo sapien
tgtgcaaagttaaagctaaggctgtcttgtgaa

SEQ ID NO: 1015781 - DNA, 33 bp, Homo sapien
gggaaattcacacaacaagattgtcccagaata

SEQ ID NO: 1015782 - DNA, 33 bp, Homo sapien
gggaaattcacacaacgagattgtcccagaata

SEQ ID NO: 1015783 - DNA, 33 bp, Homo sapien
tttttcaggcttgagacattgctgcaaggttgc

SEQ ID NO: 1015784 - DNA, 33 bp, Homo sapien
tttttcaggcttgagatattgctgcaaggttgc

SEQ ID NO: 1015785 - DNA, 33 bp, Homo sapien
tctgtataaagttaagactggcatcatgtgaga

SEQ ID NO: 1015786 - DNA, 33 bp, Homo sapien
tctgtataaagttaaggctggcatcatgtgaga

SEQ ID NO: 1015787 - DNA, 33 bp, Homo sapien
gaggacttgatgccaacatttatgtgaggactg

SEQ ID NO: 1015788 - DNA, 33 bp, Homo sapien
gaggacttgatgccaagatttatgtgaggactg

SEQ ID NO: 1015789 - DNA, 33 bp, Homo sapien
ttttctctgaacagtaaatctcaacagtgagct

SEQ ID NO: 1015790 - DNA, 33 bp, Homo sapien
ttttctctgaacagtagatctcaacagtgagct

SEQ ID NO: 1015791 - DNA, 33 bp, Homo sapien
aatatccatatactgaaacattgattaacgatt

SEQ ID NO: 1015792 - DNA, 33 bp, Homo sapien
aatatccatatactgagacattgattaacgatt

SEQ ID NO: 1015793 - DNA, 33 bp, Homo sapien
tcttcttgccttgacactgaaagggttaaagca

SEQ ID NO: 1015794 - DNA, 33 bp, Homo sapien
tcttcttgccttgacattgaaagggttaaagca

SEQ ID NO: 1015795 - DNA, 33 bp, Homo sapien
gtctcagagtcagaggaatgatttcttgtcttt

SEQ ID NO: 1015796 - DNA, 33 bp, Homo sapien
gtctcagagtcagagggatgatttcttgtcttt

SEQ ID NO: 1015797 - DNA, 33 bp, Homo sapien
gaaagagaacagtcaaatatgcattcatctcac

SEQ ID NO: 1015798 - DNA, 33 bp, Homo sapien
gaaagagaacagtcaagtatgcattcatctcac

SEQ ID NO: 1015799 - DNA, 33 bp, Homo sapien
aaaataaaatgaacaacgaactaccgtttcttt

SEQ ID NO: 1015800 - DNA, 33 bp, Homo sapien
aaaataaaatgaacaatgaactaccgtttcttt

SEQ ID NO: 1015801 - DNA, 33 bp, Homo sapien
gactttcagcaccttcacttacccagtggtaga

SEQ ID NO: 1015802 - DNA, 33 bp, Homo sapien
gactttcagcaccttcgcttacccagtggtaga

SEQ ID NO: 1015803 - DNA, 33 bp, Homo sapien
gataatggagtatagacgttgagcaaaggagat

SEQ ID NO: 1015804 - DNA, 33 bp, Homo sapien
gataatggagtatagatgttgagcaaaggagat

SEQ ID NO: 1015805 - DNA, 33 bp, Homo sapien
gtttgaaagtagctcacgttgtaagtgatggaa

SEQ ID NO: 1015806 - DNA, 33 bp, Homo sapien
gtttgaaagtagctcatgttgtaagtgatggaa

SEQ ID NO: 1015807 - DNA, 33 bp, Homo sapien
cacatgttaataattgacaactatgacaaattt

SEQ ID NO: 1015808 - DNA, 33 bp, Homo sapien
cacatgttaataattgccaactatgacaaattt

SEQ ID NO: 1015809 - DNA, 33 bp, Homo sapien
ctatttcacattccaaagtacattcaagaacaa

SEQ ID NO: 1015810 - DNA, 33 bp, Homo sapien
ctatttcacattccaaggtacattcaagaacaa

SEQ ID NO: 1015811 - DNA, 33 bp, Homo sapien
ttttgctttttaaaggaatctccacactctttt

SEQ ID NO: 1015812 - DNA, 33 bp, Homo sapien
ttttgctttttaaaggtatctccacactctttt

SEQ ID NO: 1015813 - DNA, 33 bp, Homo sapien
ccaactacattttttacagtcacaatcaattta

SEQ ID NO: 1015814 - DNA, 33 bp, Homo sapien
ccaactacattttttatagtcacaatcaattta

SEQ ID NO: 1015815 - DNA, 33 bp, Homo sapien
tctcatctgtgtgggcaaatattcctttattct

SEQ ID NO: 1015816 - DNA, 33 bp, Homo sapien
tctcatctgtgtgggccaatattcctttattct

SEQ ID NO: 1015817 - DNA, 33 bp, Homo sapien
agtaaagctcacggtaacatggtatacaaacag

SEQ ID NO: 1015818 - DNA, 33 bp, Homo sapien
agtaaagctcacggtatcatggtatacaaacag

SEQ ID NO: 1015819 - DNA, 33 bp, Homo sapien
tcttaaatgtaatacccgcaattgtaccataaa

SEQ ID NO: 1015820 - DNA, 33 bp, Homo sapien
tcttaaatgtaatacctgcaattgtaccataaa

SEQ ID NO: 1015821 - DNA, 33 bp, Homo sapien
ataattcatgagttctaaatacagttagacttg

SEQ ID NO: 1015822 - DNA, 33 bp, Homo sapien
ataattcatgagttctgaatacagttagacttg

SEQ ID NO: 1015823 - DNA, 33 bp, Homo sapien
aacactgaatcattgcccaggtattgcgcttgt

SEQ ID NO: 1015824 - DNA, 33 bp, Homo sapien
aacactgaatcattgctcaggtattgcgcttgt

SEQ ID NO: 1015825 - DNA, 33 bp, Homo sapien
cctggtccagcggtaaacttgcagggatctggc

SEQ ID NO: 1015826 - DNA, 33 bp, Homo sapien
cctggtccagcggtaaccttgcagggatctggc

SEQ ID NO: 1015827 - DNA, 33 bp, Homo sapien
gctcaaccagactggggcagaaaacaggatgac

SEQ ID NO: 1015828 - DNA, 33 bp, Homo sapien
gctcaaccagactgggtcagaaaacaggatgac

SEQ ID NO: 1015829 - DNA, 33 bp, Homo sapien
ccagttgaaaatttgcacttctgaaagcttcgt

SEQ ID NO: 1015830 - DNA, 33 bp, Homo sapien
ccagttgaaaatttgcgcttctgaaagcttcgt

SEQ ID NO: 1015831 - DNA, 33 bp, Homo sapien
attagatggtgaattaaatgataagtaaggctc

SEQ ID NO: 1015832 - DNA, 33 bp, Homo sapien
attagatggtgaattagatgataagtaaggctc

SEQ ID NO: 1015833 - DNA, 33 bp, Homo sapien
gaaaactgcagacctacggatttaagaaagcaa

SEQ ID NO: 1015834 - DNA, 33 bp, Homo sapien
gaaaactgcagacctatggatttaagaaagcaa

SEQ ID NO: 1015835 - DNA, 33 bp, Homo sapien
gatttagaaatcctcacaggtttgtttgctacc

SEQ ID NO: 1015836 - DNA, 33 bp, Homo sapien
gatttagaaatcctcataggtttgtttgctacc

SEQ ID NO: 1015837 - DNA, 33 bp, Homo sapien
attacagagacttgggaatttatatcattctat

SEQ ID NO: 1015838 - DNA, 33 bp, Homo sapien
attacagagacttggggatttatatcattctat

SEQ ID NO: 1015839 - DNA, 33 bp, Homo sapien
gagactggcctggcaacgtagttagactttatc

SEQ ID NO: 1015840 - DNA, 33 bp, Homo sapien
gagactggcctggcaatgtagttagactttatc

SEQ ID NO: 1015841 - DNA, 33 bp, Homo sapien
gaggtagggattgtaccctttttcatccttcca

SEQ ID NO: 1015842 - DNA, 33 bp, Homo sapien
gaggtagggattgtactctttttcatccttcca

SEQ ID NO: 1015843 - DNA, 33 bp, Homo sapien
ctactaaaggatgaaccggcaggtagcatatac

SEQ ID NO: 1015844 - DNA, 33 bp, Homo sapien
ctactaaaggatgaactggcaggtagcatatac

SEQ ID NO: 1015845 - DNA, 33 bp, Homo sapien
atatacctattataaactagactaggcacagta

SEQ ID NO: 1015846 - DNA, 33 bp, Homo sapien
atatacctattataaattagactaggcacagta

SEQ ID NO: 1015847 - DNA, 33 bp, Homo sapien
tagattctgtgcatagaagaggaaaaaggtcta

SEQ ID NO: 1015848 - DNA, 33 bp, Homo sapien
tagattctgtgcataggagaggaaaaaggtcta

SEQ ID NO: 1015849 - DNA, 33 bp, Homo sapien
tatgtaaaaaattgagccacatagcgatagttt

SEQ ID NO: 1015850 - DNA, 33 bp, Homo sapien
tatgtaaaaaattgagtcacatagcgatagttt

SEQ ID NO: 1015851 - DNA, 33 bp, Homo sapien
tcacttacgatattagacaagttgcttaacttc

SEQ ID NO: 1015852 - DNA, 33 bp, Homo sapien
tcacttacgatattaggcaagttgcttaacttc

SEQ ID NO: 1015853 - DNA, 33 bp, Homo sapien
atagcaacgttttggacgatgatgaaaacagta

SEQ ID NO: 1015854 - DNA, 33 bp, Homo sapien
atagcaacgttttggatgatgatgaaaacagta

SEQ ID NO: 1015855 - DNA, 33 bp, Homo sapien
ttctgactactattacaaaaagcttctctggac

SEQ ID NO: 1015856 - DNA, 33 bp, Homo sapien
ttctgactactattacgaaaagcttctctggac

SEQ ID NO: 1015857 - DNA, 33 bp, Homo sapien
cacaagcataaataaaagtgaaattggggatat

SEQ ID NO: 1015858 - DNA, 33 bp, Homo sapien
cacaagcataaataaacgtgaaattggggatat

SEQ ID NO: 1015859 - DNA, 33 bp, Homo sapien
agcttcctttagaagacgatgaactgttttcct

SEQ ID NO: 1015860 - DNA, 33 bp, Homo sapien
agcttcctttagaagatgatgaactgttttcct

SEQ ID NO: 1015861 - DNA, 33 bp, Homo sapien
accagagagtgaataaagcagagaagaatttta

SEQ ID NO: 1015862 - DNA, 33 bp, Homo sapien
accagagagtgaataaggcagagaagaatttta

SEQ ID NO: 1015863 - DNA, 33 bp, Homo sapien
ctcatattttctcccaaatgagttcttgtgttc

SEQ ID NO: 1015864 - DNA, 33 bp, Homo sapien
ctcatattttctcccagatgagttcttgtgttc

SEQ ID NO: 1015865 - DNA, 33 bp, Homo sapien
gaaatttctaggcaaacatcccccgctcatagt

SEQ ID NO: 1015866 - DNA, 33 bp, Homo sapien
gaaatttctaggcaaatatcccccgctcatagt

SEQ ID NO: 1015867 - DNA, 33 bp, Homo sapien
atgggaactatggtaactgcctctaggtggttg

SEQ ID NO: 1015868 - DNA, 33 bp, Homo sapien
atgggaactatggtaagtgcctctaggtggttg

SEQ ID NO: 1015869 - DNA, 33 bp, Homo sapien
cagttttcagtgaccacgtaggctgcctctcaa

SEQ ID NO: 1015870 - DNA, 33 bp, Homo sapien
cagttttcagtgaccatgtaggctgcctctcaa

SEQ ID NO: 1015871 - DNA, 33 bp, Homo sapien
ggagtcttaagcaggcccttataggtgaatcac

SEQ ID NO: 1015872 - DNA, 33 bp, Homo sapien
ggagtcttaagcaggctcttataggtgaatcac

SEQ ID NO: 1015873 - DNA, 33 bp, Homo sapien
ccttaacaaagtaacacggactggatgacttaa

SEQ ID NO: 1015874 - DNA, 33 bp, Homo sapien
ccttaacaaagtaacatggactggatgacttaa

SEQ ID NO: 1015875 - DNA, 33 bp, Homo sapien
agagcaattcttacaacttccagaagctctagg

SEQ ID NO: 1015876 - DNA, 33 bp, Homo sapien
agagcaattcttacaatttccagaagctctagg

SEQ ID NO: 1015877 - DNA, 33 bp, Homo sapien
gtcatattaatgagctcaacttgcctattaaaa

SEQ ID NO: 1015878 - DNA, 33 bp, Homo sapien
gtcatattaatgagcttaacttgcctattaaaa

SEQ ID NO: 1015879 - DNA, 33 bp, Homo sapien
ggaagtgggggcaaaacttacacacagattttt

SEQ ID NO: 1015880 - DNA, 33 bp, Homo sapien
ggaagtgggggcaaaagttacacacagattttt

SEQ ID NO: 1015881 - DNA, 33 bp, Homo sapien
tccatctgtgagaactgaatcagtatgccttgg

SEQ ID NO: 1015882 - DNA, 33 bp, Homo sapien
tccatctgtgagaacttaatcagtatgccttgg

SEQ ID NO: 1015883 - DNA, 33 bp, Homo sapien
gctctgatgctggtacaatctggttccagcaga

SEQ ID NO: 1015884 - DNA, 33 bp, Homo sapien
gctctgatgctggtacgatctggttccagcaga

SEQ ID NO: 1015885 - DNA, 33 bp, Homo sapien
caaataagatgaaataggttttacgagaacctt

SEQ ID NO: 1015886 - DNA, 33 bp, Homo sapien
caaataagatgaaatatgttttacgagaacctt

SEQ ID NO: 1015887 - DNA, 33 bp, Homo sapien
attgctgtataatatccaattgtataaatgcaa

SEQ ID NO: 1015888 - DNA, 33 bp, Homo sapien
attgctgtataatatctaattgtataaatgcaa

SEQ ID NO: 1015889 - DNA, 33 bp, Homo sapien
tggagtaagggcaaaaaactaaagatgcaagga

SEQ ID NO: 1015890 - DNA, 33 bp, Homo sapien
tggagtaagggcaaaagactaaagatgcaagga

SEQ ID NO: 1015891 - DNA, 33 bp, Homo sapien
ataaactatccttttcaaaacaatggataaata

SEQ ID NO: 1015892 - DNA, 33 bp, Homo sapien
ataaactatccttttcgaaacaatggataaata

SEQ ID NO: 1015893 - DNA, 33 bp, Homo sapien
agaatgtgatttacagcactaaactcaaattgc

SEQ ID NO: 1015894 - DNA, 33 bp, Homo sapien
agaatgtgatttacaggactaaactcaaattgc

SEQ ID NO: 1015895 - DNA, 33 bp, Homo sapien
ccagagagggaaagataaatagtgtacagaaaa

SEQ ID NO: 1015896 - DNA, 33 bp, Homo sapien
ccagagagggaaagatgaatagtgtacagaaaa

SEQ ID NO: 1015897 - DNA, 33 bp, Homo sapien
taacttatgaccctgcagattttttctcactct

SEQ ID NO: 1015898 - DNA, 33 bp, Homo sapien
taacttatgaccctgcggattttttctcactct

SEQ ID NO: 1015899 - DNA, 33 bp, Homo sapien
gtagatcctgtcagaaataaacatggatactga

SEQ ID NO: 1015900 - DNA, 33 bp, Homo sapien
gtagatcctgtcagaagtaaacatggatactga

SEQ ID NO: 1015901 - DNA, 33 bp, Homo sapien
tgtgagccatatgtacagcatcagcagtgcagt

SEQ ID NO: 1015902 - DNA, 33 bp, Homo sapien
tgtgagccatatgtacggcatcagcagtgcagt

SEQ ID NO: 1015903 - DNA, 33 bp, Homo sapien
gtagtcacatataggcaaagaaataccagtgtg

SEQ ID NO: 1015904 - DNA, 33 bp, Homo sapien
gtagtcacatataggcgaagaaataccagtgtg

SEQ ID NO: 1015905 - DNA, 33 bp, Homo sapien
aacatgttattcaccactattttaaagtgcata

SEQ ID NO: 1015906 - DNA, 33 bp, Homo sapien
aacatgttattcaccattattttaaagtgcata

SEQ ID NO: 1015907 - DNA, 33 bp, Homo sapien
ttctagtgaggatgacaaacttatagtggcata

SEQ ID NO: 1015908 - DNA, 33 bp, Homo sapien
ttctagtgaggatgacgaacttatagtggcata

SEQ ID NO: 1015909 - DNA, 33 bp, Homo sapien
tttcaagaatagaatacgagcaggataactaaa

SEQ ID NO: 1015910 - DNA, 33 bp, Homo sapien
tttcaagaatagaatatgagcaggataactaaa

SEQ ID NO: 1015911 - DNA, 33 bp, Homo sapien
agtaattaggaatttcccatggcagttaaatct

SEQ ID NO: 1015912 - DNA, 33 bp, Homo sapien
agtaattaggaatttcgcatggcagttaaatct

SEQ ID NO: 1015913 - DNA, 33 bp, Homo sapien
ttcttacgtggttacaataatatttcttcagtc

SEQ ID NO: 1015914 - DNA, 33 bp, Homo sapien
ttcttacgtggttacagtaatatttcttcagtc

SEQ ID NO: 1015915 - DNA, 33 bp, Homo sapien
tcttgcttgaaatataaggcagaatttgatgct

SEQ ID NO: 1015916 - DNA, 33 bp, Homo sapien
tcttgcttgaaatatacggcagaatttgatgct

SEQ ID NO: 1015917 - DNA, 33 bp, Homo sapien
tgcttttccaagccaaattagtacaatcttctc

SEQ ID NO: 1015918 - DNA, 33 bp, Homo sapien
tgcttttccaagccaatttagtacaatcttctc

SEQ ID NO: 1015919 - DNA, 33 bp, Homo sapien
aatgttcctttatccaccatcaacttctatcac

SEQ ID NO: 1015920 - DNA, 33 bp, Homo sapien
aatgttcctttatccatcatcaacttctatcac

SEQ ID NO: 1015921 - DNA, 33 bp, Homo sapien
acaaagcataagaggaatcaaaatggaagaaag

SEQ ID NO: 1015922 - DNA, 33 bp, Homo sapien
acaaagcataagaggagtcaaaatggaagaaag

SEQ ID NO: 1015923 - DNA, 33 bp, Homo sapien
tcactgatctcgctgtcaaacacacctgttctg

SEQ ID NO: 1015924 - DNA, 33 bp, Homo sapien
tcactgatctcgctgtgaaacacacctgttctg

SEQ ID NO: 1015925 - DNA, 33 bp, Homo sapien
gattaggaagcaatgccatcttttgagctcctg

SEQ ID NO: 1015926 - DNA, 33 bp, Homo sapien
gattaggaagcaatgcgatcttttgagctcctg

SEQ ID NO: 1015927 - DNA, 33 bp, Homo sapien
aaaaagcaatgcaatcgcagttcaaatgaagat

SEQ ID NO: 1015928 - DNA, 33 bp, Homo sapien
aaaaagcaatgcaatctcagttcaaatgaagat

SEQ ID NO: 1015929 - DNA, 33 bp, Homo sapien
accaaacacttcgatacaaaactcaaaattcca

SEQ ID NO: 1015930 - DNA, 33 bp, Homo sapien
accaaacacttcgatagaaaactcaaaattcca

SEQ ID NO: 1015931 - DNA, 33 bp, Homo sapien
tccagtctgttaagccgaaaagcgttcatttat

SEQ ID NO: 1015932 - DNA, 33 bp, Homo sapien
tccagtctgttaagcctaaaagcgttcatttat

SEQ ID NO: 1015933 - DNA, 33 bp, Homo sapien
ttcagtaccaagatacaattcaggaattctgca

SEQ ID NO: 1015934 - DNA, 33 bp, Homo sapien
ttcagtaccaagatactattcaggaattctgca

SEQ ID NO: 1015935 - DNA, 33 bp, Homo sapien
ggttattcagatcatacgcctatcctttaattc

SEQ ID NO: 1015936 - DNA, 33 bp, Homo sapien
ggttattcagatcatatgcctatcctttaattc

SEQ ID NO: 1015937 - DNA, 33 bp, Homo sapien
atctatttttattgaacgtctctagtcggtctt

SEQ ID NO: 1015938 - DNA, 33 bp, Homo sapien
atctatttttattgaatgtctctagtcggtctt

SEQ ID NO: 1015939 - DNA, 33 bp, Homo sapien
acataagaaaagtaagcatgtgtaccatctatt

SEQ ID NO: 1015940 - DNA, 33 bp, Homo sapien
acataagaaaagtaagtatgtgtaccatctatt

SEQ ID NO: 1015941 - DNA, 33 bp, Homo sapien
ttgaacagtgtgcaaacattaagatgggaaaat

SEQ ID NO: 1015942 - DNA, 33 bp, Homo sapien
ttgaacagtgtgcaaatattaagatgggaaaat

SEQ ID NO: 1015943 - DNA, 33 bp, Homo sapien
ttagcagaaaaatatacgggtgaagagttctag

SEQ ID NO: 1015944 - DNA, 33 bp, Homo sapien
ttagcagaaaaatatatgggtgaagagttctag

SEQ ID NO: 1015945 - DNA, 33 bp, Homo sapien
taaggaaaggaatcaaggaggaagcttcaatgc

SEQ ID NO: 1015946 - DNA, 33 bp, Homo sapien
taaggaaaggaatcaatgaggaagcttcaatgc

SEQ ID NO: 1015947 - DNA, 33 bp, Homo sapien
agctcaccaggcagaaaggaggatcacagctca

SEQ ID NO: 1015948 - DNA, 33 bp, Homo sapien
agctcaccaggcagaagggaggatcacagctca

SEQ ID NO: 1015949 - DNA, 33 bp, Homo sapien
acacccatagatcaataagtacacactccccca

SEQ ID NO: 1015950 - DNA, 33 bp, Homo sapien
acacccatagatcaatgagtacacactccccca

SEQ ID NO: 1015951 - DNA, 33 bp, Homo sapien
tggtcatgtaatggagccccagacaatgactcc

SEQ ID NO: 1015952 - DNA, 33 bp, Homo sapien
tggtcatgtaatggaggcccagacaatgactcc

SEQ ID NO: 1015953 - DNA, 33 bp, Homo sapien
tcagcttggctaaaagccgtattccttgtatgc

SEQ ID NO: 1015954 - DNA, 33 bp, Homo sapien
tcagcttggctaaaaggcgtattccttgtatgc

SEQ ID NO: 1015955 - DNA, 33 bp, Homo sapien
catttctaaaattaggccatttgctactggaga

SEQ ID NO: 1015956 - DNA, 33 bp, Homo sapien
catttctaaaattaggtcatttgctactggaga

SEQ ID NO: 1015957 - DNA, 33 bp, Homo sapien
cctgccactgacaaaaggtgttatgaacaatgg

SEQ ID NO: 1015958 - DNA, 33 bp, Homo sapien
cctgccactgacaaaatgtgttatgaacaatgg

SEQ ID NO: 1015959 - DNA, 33 bp, Homo sapien
aggggctgatcagtcagctacctggtggcagtt

SEQ ID NO: 1015960 - DNA, 33 bp, Homo sapien
aggggctgatcagtcatctacctggtggcagtt

SEQ ID NO: 1015961 - DNA, 33 bp, Homo sapien
atgtttacctaatgccaatgcctacattgtatt

SEQ ID NO: 1015962 - DNA, 33 bp, Homo sapien
atgtttacctaatgcctatgcctacattgtatt

SEQ ID NO: 1015963 - DNA, 33 bp, Homo sapien
gtaaaatagttaagaaagtgtctggccaatagc

SEQ ID NO: 1015964 - DNA, 33 bp, Homo sapien
gtaaaatagttaagaacgtgtctggccaatagc

SEQ ID NO: 1015965 - DNA, 33 bp, Homo sapien
acataaaaattgtctcaatcttggtacctttca

SEQ ID NO: 1015966 - DNA, 33 bp, Homo sapien
acataaaaattgtctctatcttggtacctttca

SEQ ID NO: 1015967 - DNA, 33 bp, Homo sapien
tttttctccttttgaacgtgacgggactaatat

SEQ ID NO: 1015968 - DNA, 33 bp, Homo sapien
tttttctccttttgaatgtgacgggactaatat

SEQ ID NO: 1015969 - DNA, 33 bp, Homo sapien
ataaacccataggacacgctgttgtgctgtgat

SEQ ID NO: 1015970 - DNA, 33 bp, Homo sapien
ataaacccataggacaggctgttgtgctgtgat

SEQ ID NO: 1015971 - DNA, 33 bp, Homo sapien
gtcagaatgtctggaaagtgaagggtgaagtcc

SEQ ID NO: 1015972 - DNA, 33 bp, Homo sapien
gtcagaatgtctggaaggtgaagggtgaagtcc

SEQ ID NO: 1015973 - DNA, 33 bp, Homo sapien
ttctgttaatatacaaaaatcctggacttgtac

SEQ ID NO: 1015974 - DNA, 33 bp, Homo sapien
ttctgttaatatacaagaatcctggacttgtac

SEQ ID NO: 1015975 - DNA, 33 bp, Homo sapien
tccattctgtttcacacgtctatatgtctgtct

SEQ ID NO: 1015976 - DNA, 33 bp, Homo sapien
tccattctgtttcacaggtctatatgtctgtct

SEQ ID NO: 1015977 - DNA, 33 bp, Homo sapien
ttatgtcagtaccataacactttatttactgca

SEQ ID NO: 1015978 - DNA, 33 bp, Homo sapien
ttatgtcagtaccataccactttatttactgca

SEQ ID NO: 1015979 - DNA, 33 bp, Homo sapien
cttgttttctttttggaaacacacatctgtaaa

SEQ ID NO: 1015980 - DNA, 33 bp, Homo sapien
cttgttttctttttggtaacacacatctgtaaa

SEQ ID NO: 1015981 - DNA, 33 bp, Homo sapien
agatgggtgtgcacgcccttgaggtagcactga

SEQ ID NO: 1015982 - DNA, 33 bp, Homo sapien
agatgggtgtgcacgctcttgaggtagcactga

SEQ ID NO: 1015983 - DNA, 33 bp, Homo sapien
aaatttctcctggatacctgaccattttcacta

SEQ ID NO: 1015984 - DNA, 33 bp, Homo sapien
aaatttctcctggatagctgaccattttcacta

SEQ ID NO: 1015985 - DNA, 33 bp, Homo sapien
catcataatgatctcaaataaaacaggtaaaag

SEQ ID NO: 1015986 - DNA, 33 bp, Homo sapien
catcataatgatctcagataaaacaggtaaaag

SEQ ID NO: 1015987 - DNA, 33 bp, Homo sapien
ttaaactaccaaaggccgaatttgggctagtgt

SEQ ID NO: 1015988 - DNA, 33 bp, Homo sapien
ttaaactaccaaaggctgaatttgggctagtgt

SEQ ID NO: 1015989 - DNA, 33 bp, Homo sapien
aaatctcaagtgcattaaaaaaagaataaaaag

SEQ ID NO: 1015990 - DNA, 33 bp, Homo sapien
aaatctcaagtgcattgaaaaaagaataaaaag

SEQ ID NO: 1015991 - DNA, 33 bp, Homo sapien
acctgacattccacatcaactatttttatctgg

SEQ ID NO: 1015992 - DNA, 33 bp, Homo sapien
acctgacattccacattaactatttttatctgg

SEQ ID NO: 1015993 - DNA, 33 bp, Homo sapien
tctccctattgtgtcagacatcttcgactaaaa

SEQ ID NO: 1015994 - DNA, 33 bp, Homo sapien
tctccctattgtgtcatacatcttcgactaaaa

SEQ ID NO: 1015995 - DNA, 33 bp, Homo sapien
ttacactatctgaagcaaagatgtactataaag

SEQ ID NO: 1015996 - DNA, 33 bp, Homo sapien
ttacactatctgaagcgaagatgtactataaag

SEQ ID NO: 1015997 - DNA, 33 bp, Homo sapien
tttcattgtagtctgaaaaagcattttgtatta

SEQ ID NO: 1015998 - DNA, 33 bp, Homo sapien
tttcattgtagtctgagaaagcattttgtatta

SEQ ID NO: 1015999 - DNA, 33 bp, Homo sapien
attgtgatcaaaagacaatagtactggcataga

SEQ ID NO: 1016000 - DNA, 33 bp, Homo sapien
attgtgatcaaaagacgatagtactggcataga

SEQ ID NO: 1016001 - DNA, 33 bp, Homo sapien
tacagattcttctgcacaccaacatttttgttt

SEQ ID NO: 1016002 - DNA, 33 bp, Homo sapien
tacagattcttctgcataccaacatttttgttt

SEQ ID NO: 1016003 - DNA, 33 bp, Homo sapien
cagtccaacactcttacaatggaaacaaatgag

SEQ ID NO: 1016004 - DNA, 33 bp, Homo sapien
cagtccaacactcttagaatggaaacaaatgag

SEQ ID NO: 1016005 - DNA, 33 bp, Homo sapien
aaagaaaatcatttgacggagagaaaaaagcta

SEQ ID NO: 1016006 - DNA, 33 bp, Homo sapien
aaagaaaatcatttgatggagagaaaaaagcta

SEQ ID NO: 1016007 - DNA, 33 bp, Homo sapien
aacttcacgagtctgaaaaaaacagtgtcactg

SEQ ID NO: 1016008 - DNA, 33 bp, Homo sapien
aacttcacgagtctgagaaaaacagtgtcactg

SEQ ID NO: 1016009 - DNA, 33 bp, Homo sapien
gaaacactaaaaacaacctatctacagaggtgg

SEQ ID NO: 1016010 - DNA, 33 bp, Homo sapien
gaaacactaaaaacaatctatctacagaggtgg

SEQ ID NO: 1016011 - DNA, 33 bp, Homo sapien
tatcggtgtataaaaaattcaaatgtctcagtt

SEQ ID NO: 1016012 - DNA, 33 bp, Homo sapien
tatcggtgtataaaaatttcaaatgtctcagtt

SEQ ID NO: 1016013 - DNA, 33 bp, Homo sapien
ctagccatcctggaaaaccaggacattggatgg

SEQ ID NO: 1016014 - DNA, 33 bp, Homo sapien
ctagccatcctggaaagccaggacattggatgg

SEQ ID NO: 1016015 - DNA, 33 bp, Homo sapien
ctggcataatagaaaagagaggcagaacatggt

SEQ ID NO: 1016016 - DNA, 33 bp, Homo sapien
ctggcataatagaaaatagaggcagaacatggt

SEQ ID NO: 1016017 - DNA, 33 bp, Homo sapien
gagccatttactccaacgcagaggaaaataatt

SEQ ID NO: 1016018 - DNA, 33 bp, Homo sapien
gagccatttactccaaggcagaggaaaataatt

SEQ ID NO: 1016019 - DNA, 33 bp, Homo sapien
gtgagataacacctcacaactgtcaggatggtt

SEQ ID NO: 1016020 - DNA, 33 bp, Homo sapien
gtgagataacacctcagaactgtcaggatggtt

SEQ ID NO: 1016021 - DNA, 33 bp, Homo sapien
agatttatgagtaattaaacatcatagcaagag

SEQ ID NO: 1016022 - DNA, 33 bp, Homo sapien
agatttatgagtaattgaacatcatagcaagag

SEQ ID NO: 1016023 - DNA, 33 bp, Homo sapien
tctgcatagaaaattacagcatctctgacattt

SEQ ID NO: 1016024 - DNA, 33 bp, Homo sapien
tctgcatagaaaattatagcatctctgacattt

SEQ ID NO: 1016025 - DNA, 33 bp, Homo sapien
tgcaaagttcctcaacaaatactgacaaaccaa

SEQ ID NO: 1016026 - DNA, 33 bp, Homo sapien
tgcaaagttcctcaactaatactgacaaaccaa

SEQ ID NO: 1016027 - DNA, 33 bp, Homo sapien
agccattatagcaaagaacataactgaattaat

SEQ ID NO: 1016028 - DNA, 33 bp, Homo sapien
agccattatagcaaagtacataactgaattaat

SEQ ID NO: 1016029 - DNA, 33 bp, Homo sapien
gcatacatatcatcaaccagttttgtatttgca

SEQ ID NO: 1016030 - DNA, 33 bp, Homo sapien
gcatacatatcatcaatcagttttgtatttgca

SEQ ID NO: 1016031 - DNA, 33 bp, Homo sapien
ttcaactgcttgtgccaaaaagccaagttatga

SEQ ID NO: 1016032 - DNA, 33 bp, Homo sapien
ttcaactgcttgtgccgaaaagccaagttatga

SEQ ID NO: 1016033 - DNA, 33 bp, Homo sapien
attatctcttcaaacaatgctaaattatagcca

SEQ ID NO: 1016034 - DNA, 33 bp, Homo sapien
attatctcttcaaacagtgctaaattatagcca

SEQ ID NO: 1016035 - DNA, 33 bp, Homo sapien
tgctttttaaagattacgttttgtatatcaatc

SEQ ID NO: 1016036 - DNA, 33 bp, Homo sapien
tgctttttaaagattatgttttgtatatcaatc

SEQ ID NO: 1016037 - DNA, 33 bp, Homo sapien
aaatcaattcttttcaatataagcaattacttt

SEQ ID NO: 1016038 - DNA, 33 bp, Homo sapien
aaatcaattcttttcagtataagcaattacttt

SEQ ID NO: 1016039 - DNA, 33 bp, Homo sapien
gctgtgtggtagagaaggaacaagtctatttag

SEQ ID NO: 1016040 - DNA, 33 bp, Homo sapien
gctgtgtggtagagaatgaacaagtctatttag

SEQ ID NO: 1016041 - DNA, 33 bp, Homo sapien
ccagcagaggttagtcacaaacctagcattgtc

SEQ ID NO: 1016042 - DNA, 33 bp, Homo sapien
ccagcagaggttagtcgcaaacctagcattgtc

SEQ ID NO: 1016043 - DNA, 33 bp, Homo sapien
ggatccccttttctgccgagagacacagaaata

SEQ ID NO: 1016044 - DNA, 33 bp, Homo sapien
ggatccccttttctgctgagagacacagaaata

SEQ ID NO: 1016045 - DNA, 33 bp, Homo sapien
acccattttcaaacaccgtactaatgtaatctt

SEQ ID NO: 1016046 - DNA, 33 bp, Homo sapien
acccattttcaaacactgtactaatgtaatctt

SEQ ID NO: 1016047 - DNA, 33 bp, Homo sapien
ccagcctggaaggtccagagtatagtctttcca

SEQ ID NO: 1016048 - DNA, 33 bp, Homo sapien
ccagcctggaaggtccggagtatagtctttcca

SEQ ID NO: 1016049 - DNA, 33 bp, Homo sapien
gaaagagggcaagttacctaccttttattttga

SEQ ID NO: 1016050 - DNA, 33 bp, Homo sapien
gaaagagggcaagttagctaccttttattttga

SEQ ID NO: 1016051 - DNA, 33 bp, Homo sapien
gaatcagaaactatgccgatagaactaattgaa

SEQ ID NO: 1016052 - DNA, 33 bp, Homo sapien
gaatcagaaactatgctgatagaactaattgaa

SEQ ID NO: 1016053 - DNA, 33 bp, Homo sapien
acactggtatctccaaaggtttcatgggccaag

SEQ ID NO: 1016054 - DNA, 33 bp, Homo sapien
acactggtatctccaagggtttcatgggccaag

SEQ ID NO: 1016055 - DNA, 33 bp, Homo sapien
tgtggtgaagagtctcgccattttaatcagcct

SEQ ID NO: 1016056 - DNA, 33 bp, Homo sapien
tgtggtgaagagtctctccattttaatcagcct

SEQ ID NO: 1016057 - DNA, 33 bp, Homo sapien
tgaagccataaagaaaaaagtgtaagaacaaga

SEQ ID NO: 1016058 - DNA, 33 bp, Homo sapien
tgaagccataaagaaagaagtgtaagaacaaga

SEQ ID NO: 1016059 - DNA, 33 bp, Homo sapien
ttcagccatgtgaagacaaaaggaaaagtccag

SEQ ID NO: 1016060 - DNA, 33 bp, Homo sapien
ttcagccatgtgaagataaaaggaaaagtccag

SEQ ID NO: 1016061 - DNA, 33 bp, Homo sapien
gccaagaacacagaacaaaaagcctgtcaccag

SEQ ID NO: 1016062 - DNA, 33 bp, Homo sapien
gccaagaacacagaacgaaaagcctgtcaccag

SEQ ID NO: 1016063 - DNA, 33 bp, Homo sapien
tacacacttatacaggaaagttgaaaagtaaat

SEQ ID NO: 1016064 - DNA, 33 bp, Homo sapien
tacacacttatacaggcaagttgaaaagtaaat

SEQ ID NO: 1016065 - DNA, 33 bp, Homo sapien
cccataaggaatctggaaatggtaactaaaaat

SEQ ID NO: 1016066 - DNA, 33 bp, Homo sapien
cccataaggaatctggcaatggtaactaaaaat

SEQ ID NO: 1016067 - DNA, 33 bp, Homo sapien
tcatcatgcagatccacaaagcactatcagaaa

SEQ ID NO: 1016068 - DNA, 33 bp, Homo sapien
tcatcatgcagatccataaagcactatcagaaa

SEQ ID NO: 1016069 - DNA, 33 bp, Homo sapien
tacacaaatcataggaaaatatggaaaaaaata

SEQ ID NO: 1016070 - DNA, 33 bp, Homo sapien
tacacaaatcataggagaatatggaaaaaaata

SEQ ID NO: 1016071 - DNA, 33 bp, Homo sapien
cccatccaggaaaaatcaggttatactgaggac

SEQ ID NO: 1016072 - DNA, 33 bp, Homo sapien
cccatccaggaaaaatgaggttatactgaggac

SEQ ID NO: 1016073 - DNA, 33 bp, Homo sapien
agagtgagagttaggaagtgctgagaataacct

SEQ ID NO: 1016074 - DNA, 33 bp, Homo sapien
agagtgagagttaggaggtgctgagaataacct

SEQ ID NO: 1016075 - DNA, 33 bp, Homo sapien
tggctcaaaaataaccagaatcatccctctgct

SEQ ID NO: 1016076 - DNA, 33 bp, Homo sapien
tggctcaaaaataacctgaatcatccctctgct

SEQ ID NO: 1016077 - DNA, 33 bp, Homo sapien
aatgctcctgttccaccattagttttagcaatc

SEQ ID NO: 1016078 - DNA, 33 bp, Homo sapien
aatgctcctgttccactattagttttagcaatc

SEQ ID NO: 1016079 - DNA, 33 bp, Homo sapien
aaataaattgtggggccaaaataattattggca

SEQ ID NO: 1016080 - DNA, 33 bp, Homo sapien
aaataaattgtggggctaaaataattattggca

SEQ ID NO: 1016081 - DNA, 33 bp, Homo sapien
ttaaaccattcaatcaaaagtatcttcaattgc

SEQ ID NO: 1016082 - DNA, 33 bp, Homo sapien
ttaaaccattcaatcataagtatcttcaattgc

SEQ ID NO: 1016083 - DNA, 33 bp, Homo sapien
aaggagcttgtcatctaaacagtgtgaactagg

SEQ ID NO: 1016084 - DNA, 33 bp, Homo sapien
aaggagcttgtcatcttaacagtgtgaactagg

SEQ ID NO: 1016085 - DNA, 33 bp, Homo sapien
gagttatgtgtcagtgcaagttgccaaaattat

SEQ ID NO: 1016086 - DNA, 33 bp, Homo sapien
gagttatgtgtcagtgtaagttgccaaaattat

SEQ ID NO: 1016087 - DNA, 33 bp, Homo sapien
tactatctaaaactaaatagatggactaagaga

SEQ ID NO: 1016088 - DNA, 33 bp, Homo sapien
tactatctaaaactaagtagatggactaagaga

SEQ ID NO: 1016089 - DNA, 33 bp, Homo sapien
tatcaacaaatgaacaaaagtaaatttaagaag

SEQ ID NO: 1016090 - DNA, 33 bp, Homo sapien
tatcaacaaatgaacagaagtaaatttaagaag

SEQ ID NO: 1016091 - DNA, 33 bp, Homo sapien
tataatgcattctgtcaattcctactttttgat

SEQ ID NO: 1016092 - DNA, 33 bp, Homo sapien
tataatgcattctgtccattcctactttttgat

SEQ ID NO: 1016093 - DNA, 33 bp, Homo sapien
tacaacttgtataaaacttgtttgcatagagta

SEQ ID NO: 1016094 - DNA, 33 bp, Homo sapien
tacaacttgtataaaagttgtttgcatagagta

SEQ ID NO: 1016095 - DNA, 33 bp, Homo sapien
tcatgtaccagccatagtatatctatttcctca

SEQ ID NO: 1016096 - DNA, 33 bp, Homo sapien
tcatgtaccagccatattatatctatttcctca

SEQ ID NO: 1016097 - DNA, 33 bp, Homo sapien
ggcctctaaaactatgcagctggtcctccactt

SEQ ID NO: 1016098 - DNA, 33 bp, Homo sapien
ggcctctaaaactatgtagctggtcctccactt

SEQ ID NO: 1016099 - DNA, 33 bp, Homo sapien
aagattgaggttcaaacagtagtgttgtactac

SEQ ID NO: 1016100 - DNA, 33 bp, Homo sapien
aagattgaggttcaaatagtagtgttgtactac

SEQ ID NO: 1016101 - DNA, 33 bp, Homo sapien
aagaacttcaaagagcaagtctgaatattagaa

SEQ ID NO: 1016102 - DNA, 33 bp, Homo sapien
aagaacttcaaagagcgagtctgaatattagaa

SEQ ID NO: 1016103 - DNA, 33 bp, Homo sapien
caacaacaacaaattaagggacatagccagtca

SEQ ID NO: 1016104 - DNA, 33 bp, Homo sapien
caacaacaacaaattaggggacatagccagtca

SEQ ID NO: 1016105 - DNA, 33 bp, Homo sapien
aataaaagaggtgcagccctttgtcctcataga

SEQ ID NO: 1016106 - DNA, 33 bp, Homo sapien
aataaaagaggtgcaggcctttgtcctcataga

SEQ ID NO: 1016107 - DNA, 33 bp, Homo sapien
tccaattgttaagctcccgttagtgctatttta

SEQ ID NO: 1016108 - DNA, 33 bp, Homo sapien
tccaattgttaagctctcgttagtgctatttta

SEQ ID NO: 1016109 - DNA, 33 bp, Homo sapien
gcagacttgtctaaggaaaatcacactgtggct

SEQ ID NO: 1016110 - DNA, 33 bp, Homo sapien
gcagacttgtctaaggcaaatcacactgtggct

SEQ ID NO: 1016111 - DNA, 33 bp, Homo sapien
ctggaacagataggacaaacaacataaagcacc

SEQ ID NO: 1016112 - DNA, 33 bp, Homo sapien
ctggaacagataggaccaacaacataaagcacc

SEQ ID NO: 1016113 - DNA, 33 bp, Homo sapien
aggaatatctttgtgcaattatttccttcccta

SEQ ID NO: 1016114 - DNA, 33 bp, Homo sapien
aggaatatctttgtgcgattatttccttcccta

SEQ ID NO: 1016115 - DNA, 33 bp, Homo sapien
tgtaaagtttcagtagaatgctttggagagtgg

SEQ ID NO: 1016116 - DNA, 33 bp, Homo sapien
tgtaaagtttcagtaggatgctttggagagtgg

SEQ ID NO: 1016117 - DNA, 33 bp, Homo sapien
tgacatatctcagacactgaagaagtttgagcc

SEQ ID NO: 1016118 - DNA, 33 bp, Homo sapien
tgacatatctcagacattgaagaagtttgagcc

SEQ ID NO: 1016119 - DNA, 33 bp, Homo sapien
gctgaattacaacctacccacagactgtaagca

SEQ ID NO: 1016120 - DNA, 33 bp, Homo sapien
gctgaattacaacctatccacagactgtaagca

SEQ ID NO: 1016121 - DNA, 33 bp, Homo sapien
tattgacacctattctaaaacccagtatatata

SEQ ID NO: 1016122 - DNA, 33 bp, Homo sapien
tattgacacctattctcaaacccagtatatata

SEQ ID NO: 1016123 - DNA, 33 bp, Homo sapien
agaaggagaaggattaaaattgaaattaaccca

SEQ ID NO: 1016124 - DNA, 33 bp, Homo sapien
agaaggagaaggattagaattgaaattaaccca

SEQ ID NO: 1016125 - DNA, 33 bp, Homo sapien
ataaaaatggccagccaaaatataaataaatgc

SEQ ID NO: 1016126 - DNA, 33 bp, Homo sapien
ataaaaatggccagccgaaatataaataaatgc

SEQ ID NO: 1016127 - DNA, 33 bp, Homo sapien
tagaagagaacacagacgaataatacaaaaaaa

SEQ ID NO: 1016128 - DNA, 33 bp, Homo sapien
tagaagagaacacagatgaataatacaaaaaaa

SEQ ID NO: 1016129 - DNA, 33 bp, Homo sapien
agaagtgactgtcaccagatgggagatatgacc

SEQ ID NO: 1016130 - DNA, 33 bp, Homo sapien
agaagtgactgtcacccgatgggagatatgacc

SEQ ID NO: 1016131 - DNA, 33 bp, Homo sapien
tttggccctcaaaaacagttaatgcctccttca

SEQ ID NO: 1016132 - DNA, 33 bp, Homo sapien
tttggccctcaaaaacggttaatgcctccttca

SEQ ID NO: 1016133 - DNA, 33 bp, Homo sapien
agtttagtgcaccaaaatgctatatacccaact

SEQ ID NO: 1016134 - DNA, 33 bp, Homo sapien
agtttagtgcaccaaattgctatatacccaact

SEQ ID NO: 1016135 - DNA, 33 bp, Homo sapien
aatctaatattgtgaaagtagagatgagtgact

SEQ ID NO: 1016136 - DNA, 33 bp, Homo sapien
aatctaatattgtgaatgtagagatgagtgact

SEQ ID NO: 1016137 - DNA, 33 bp, Homo sapien
ccctttggataatcgccattccaggccctgaag

SEQ ID NO: 1016138 - DNA, 33 bp, Homo sapien
ccctttggataatcgctattccaggccctgaag

SEQ ID NO: 1016139 - DNA, 33 bp, Homo sapien
agcatagatatgtaatcaagtggtagtatttcc

SEQ ID NO: 1016140 - DNA, 33 bp, Homo sapien
agcatagatatgtaatgaagtggtagtatttcc

SEQ ID NO: 1016141 - DNA, 33 bp, Homo sapien
acatacacttaacataactcatattggttttct

SEQ ID NO: 1016142 - DNA, 33 bp, Homo sapien
acatacacttaacatacctcatattggttttct

SEQ ID NO: 1016143 - DNA, 33 bp, Homo sapien
gagcgtcacttcggcaactccaacctcagcgga

SEQ ID NO: 1016144 - DNA, 33 bp, Homo sapien
gagcgtcacttcggcagctccaacctcagcgga

SEQ ID NO: 1016145 - DNA, 33 bp, Homo sapien
aaagaagttgaatctaaatctctttctcaatta

SEQ ID NO: 1016146 - DNA, 33 bp, Homo sapien
aaagaagttgaatctatatctctttctcaatta

SEQ ID NO: 1016147 - DNA, 33 bp, Homo sapien
atgaatgtacacaaaactgtaaagtatattgcc

SEQ ID NO: 1016148 - DNA, 33 bp, Homo sapien
atgaatgtacacaaaattgtaaagtatattgcc

SEQ ID NO: 1016149 - DNA, 33 bp, Homo sapien
ttctttgagcagtcagaagcatacaactgtagc

SEQ ID NO: 1016150 - DNA, 33 bp, Homo sapien
ttctttgagcagtcaggagcatacaactgtagc

SEQ ID NO: 1016151 - DNA, 33 bp, Homo sapien
caaagggaaaggctctaactggtccaagttgga

SEQ ID NO: 1016152 - DNA, 33 bp, Homo sapien
caaagggaaaggctctgactggtccaagttgga

SEQ ID NO: 1016153 - DNA, 33 bp, Homo sapien
tttcaatggcaatataagacttgagtttaagtc

SEQ ID NO: 1016154 - DNA, 33 bp, Homo sapien
tttcaatggcaatatacgacttgagtttaagtc

SEQ ID NO: 1016155 - DNA, 33 bp, Homo sapien
caggtggtgatctcacaaaataaagagggttta

SEQ ID NO: 1016156 - DNA, 33 bp, Homo sapien
caggtggtgatctcacgaaataaagagggttta

SEQ ID NO: 1016157 - DNA, 33 bp, Homo sapien
tggcaaaaagtggttacgcaggatgggaaaaat

SEQ ID NO: 1016158 - DNA, 33 bp, Homo sapien
tggcaaaaagtggttatgcaggatgggaaaaat

SEQ ID NO: 1016159 - DNA, 33 bp, Homo sapien
cctcttctgcattatcaagcgaaaagacaacat

SEQ ID NO: 1016160 - DNA, 33 bp, Homo sapien
cctcttctgcattatcgagcgaaaagacaacat

SEQ ID NO: 1016161 - DNA, 33 bp, Homo sapien
aaaatcaagtcatgcaaagcaaatactgttcct

SEQ ID NO: 1016162 - DNA, 33 bp, Homo sapien
aaaatcaagtcatgcagagcaaatactgttcct

SEQ ID NO: 1016163 - DNA, 33 bp, Homo sapien
ctactgtttgaaaaaagaattgaaaatattaca

SEQ ID NO: 1016164 - DNA, 33 bp, Homo sapien
ctactgtttgaaaaaataattgaaaatattaca

SEQ ID NO: 1016165 - DNA, 33 bp, Homo sapien
ataacagaaggagtaaagagcatatctaaacga

SEQ ID NO: 1016166 - DNA, 33 bp, Homo sapien
ataacagaaggagtaaggagcatatctaaacga

SEQ ID NO: 1016167 - DNA, 33 bp, Homo sapien
cactcatgcccataaccgaaactctaattttac

SEQ ID NO: 1016168 - DNA, 33 bp, Homo sapien
cactcatgcccataactgaaactctaattttac

SEQ ID NO: 1016169 - DNA, 33 bp, Homo sapien
ccacttctcagttcaaccacaaaccctaagatg

SEQ ID NO: 1016170 - DNA, 33 bp, Homo sapien
ccacttctcagttcaatcacaaaccctaagatg

SEQ ID NO: 1016171 - DNA, 33 bp, Homo sapien
gaagaatttagcagtacgtcttatttttctttt

SEQ ID NO: 1016172 - DNA, 33 bp, Homo sapien
gaagaatttagcagtaggtcttatttttctttt

SEQ ID NO: 1016173 - DNA, 33 bp, Homo sapien
cattgatgggagagcaaaaaaggaaaaacagac

SEQ ID NO: 1016174 - DNA, 33 bp, Homo sapien
cattgatgggagagcagaaaaggaaaaacagac

SEQ ID NO: 1016175 - DNA, 33 bp, Homo sapien
cagaatttcagaaaacactttcaggatatagtt

SEQ ID NO: 1016176 - DNA, 33 bp, Homo sapien
cagaatttcagaaaacgctttcaggatatagtt

SEQ ID NO: 1016177 - DNA, 33 bp, Homo sapien
catacgcagatgattgaaactgatgtaaataat

SEQ ID NO: 1016178 - DNA, 33 bp, Homo sapien
catacgcagatgattgtaactgatgtaaataat

SEQ ID NO: 1016179 - DNA, 33 bp, Homo sapien
tgctacggacccttacagatacgctgctggtac

SEQ ID NO: 1016180 - DNA, 33 bp, Homo sapien
tgctacggacccttacggatacgctgctggtac

SEQ ID NO: 1016181 - DNA, 33 bp, Homo sapien
tggcacctggacatgaagagtctttttttcact

SEQ ID NO: 1016182 - DNA, 33 bp, Homo sapien
tggcacctggacatgaggagtctttttttcact

SEQ ID NO: 1016183 - DNA, 33 bp, Homo sapien
tggcaccataggaaacagtttcagcaaagctcc

SEQ ID NO: 1016184 - DNA, 33 bp, Homo sapien
tggcaccataggaaaccgtttcagcaaagctcc

SEQ ID NO: 1016185 - DNA, 33 bp, Homo sapien
cagataatgaacaaaaatttgacacattacaca

SEQ ID NO: 1016186 - DNA, 33 bp, Homo sapien
cagataatgaacaaaagtttgacacattacaca

SEQ ID NO: 1016187 - DNA, 33 bp, Homo sapien
gaaactttgctatgaacgattatgtgattacaa

SEQ ID NO: 1016188 - DNA, 33 bp, Homo sapien
gaaactttgctatgaatgattatgtgattacaa

SEQ ID NO: 1016189 - DNA, 33 bp, Homo sapien
tcagtatgcaacttcacgtaaacatacaaaaga

SEQ ID NO: 1016190 - DNA, 33 bp, Homo sapien
tcagtatgcaacttcatgtaaacatacaaaaga

SEQ ID NO: 1016191 - DNA, 33 bp, Homo sapien
caggcctggctgggaaagcatctcttgcaaagg

SEQ ID NO: 1016192 - DNA, 33 bp, Homo sapien
caggcctggctgggaaggcatctcttgcaaagg

SEQ ID NO: 1016193 - DNA, 33 bp, Homo sapien
ctatgccttacaaaataaacatcaatctatgcc

SEQ ID NO: 1016194 - DNA, 33 bp, Homo sapien
ctatgccttacaaaatgaacatcaatctatgcc

SEQ ID NO: 1016195 - DNA, 33 bp, Homo sapien
tttctatttgttctgacctcgagcaacgtagaa

SEQ ID NO: 1016196 - DNA, 33 bp, Homo sapien
tttctatttgttctgatctcgagcaacgtagaa

SEQ ID NO: 1016197 - DNA, 33 bp, Homo sapien
agtgattatggctgtacattttcctcaggactt

SEQ ID NO: 1016198 - DNA, 33 bp, Homo sapien
agtgattatggctgtatattttcctcaggactt

SEQ ID NO: 1016199 - DNA, 33 bp, Homo sapien
gactgcaggaatgtaggaggaaagccaagagaa

SEQ ID NO: 1016200 - DNA, 33 bp, Homo sapien
gactgcaggaatgtagtaggaaagccaagagaa

SEQ ID NO: 1016201 - DNA, 33 bp, Homo sapien
aatatctaccagctcactaatcaaactagggtt

SEQ ID NO: 1016202 - DNA, 33 bp, Homo sapien
aatatctaccagctcattaatcaaactagggtt

SEQ ID NO: 1016203 - DNA, 33 bp, Homo sapien
aaaagtcaagaggcaacaaaaattcaattagaa

SEQ ID NO: 1016204 - DNA, 33 bp, Homo sapien
aaaagtcaagaggcaagaaaaattcaattagaa

SEQ ID NO: 1016205 - DNA, 33 bp, Homo sapien
aaataccattgttagaagcattaaagagaagac

SEQ ID NO: 1016206 - DNA, 33 bp, Homo sapien
aaataccattgttagaggcattaaagagaagac

SEQ ID NO: 1016207 - DNA, 33 bp, Homo sapien
tgtacagcatcaaaaactatcatgtattatgta

SEQ ID NO: 1016208 - DNA, 33 bp, Homo sapien
tgtacagcatcaaaaattatcatgtattatgta

SEQ ID NO: 1016209 - DNA, 33 bp, Homo sapien
tattaaatccatctaactactgtcatcatttca

SEQ ID NO: 1016210 - DNA, 33 bp, Homo sapien
tattaaatccatctaattactgtcatcatttca

SEQ ID NO: 1016211 - DNA, 33 bp, Homo sapien
ataggtctagcatctgaaagtttgatgttgaca

SEQ ID NO: 1016212 - DNA, 33 bp, Homo sapien
ataggtctagcatctggaagtttgatgttgaca

SEQ ID NO: 1016213 - DNA, 33 bp, Homo sapien
tctgtctttaggttgaacaattgcaacaaaagc

SEQ ID NO: 1016214 - DNA, 33 bp, Homo sapien
tctgtctttaggttgagcaattgcaacaaaagc

SEQ ID NO: 1016215 - DNA, 33 bp, Homo sapien
gtgtgaacacattcaaaacaaattaccaatttt

SEQ ID NO: 1016216 - DNA, 33 bp, Homo sapien
gtgtgaacacattcaagacaaattaccaatttt

SEQ ID NO: 1016217 - DNA, 33 bp, Homo sapien
acttctcaaaagaggacatttatgtgcccaaaa

SEQ ID NO: 1016218 - DNA, 33 bp, Homo sapien
acttctcaaaagaggatatttatgtgcccaaaa

SEQ ID NO: 1016219 - DNA, 33 bp, Homo sapien
tctaacacttaaaccccagagagctcacacatc

SEQ ID NO: 1016220 - DNA, 33 bp, Homo sapien
tctaacacttaaaccctagagagctcacacatc

SEQ ID NO: 1016221 - DNA, 33 bp, Homo sapien
ttagaagggaatatctaaaagagaagtagagtg

SEQ ID NO: 1016222 - DNA, 33 bp, Homo sapien
ttagaagggaatatctgaaagagaagtagagtg

SEQ ID NO: 1016223 - DNA, 33 bp, Homo sapien
ttttccctctcacttgaattttggaaggcggtg

SEQ ID NO: 1016224 - DNA, 33 bp, Homo sapien
ttttccctctcacttggattttggaaggcggtg

SEQ ID NO: 1016225 - DNA, 33 bp, Homo sapien
atgtcacaatacttaacgaggccagagttaata

SEQ ID NO: 1016226 - DNA, 33 bp, Homo sapien
atgtcacaatacttaatgaggccagagttaata

SEQ ID NO: 1016227 - DNA, 33 bp, Homo sapien
gccccctatatggaagaattatctgacccaaaa

SEQ ID NO: 1016228 - DNA, 33 bp, Homo sapien
gccccctatatggaagtattatctgacccaaaa

SEQ ID NO: 1016229 - DNA, 33 bp, Homo sapien
aaacagtttgctttaacccttcagtctaaggcc

SEQ ID NO: 1016230 - DNA, 33 bp, Homo sapien
aaacagtttgctttaatccttcagtctaaggcc

SEQ ID NO: 1016231 - DNA, 33 bp, Homo sapien
ggagacattaggcaaaataactaatggtactag

SEQ ID NO: 1016232 - DNA, 33 bp, Homo sapien
ggagacattaggcaaagtaactaatggtactag

SEQ ID NO: 1016233 - DNA, 33 bp, Homo sapien
gattgttggtggtatgcatatcttcatttgaaa

SEQ ID NO: 1016234 - DNA, 33 bp, Homo sapien
gattgttggtggtatgtatatcttcatttgaaa

SEQ ID NO: 1016235 - DNA, 33 bp, Homo sapien
aaacctatctgttcacaaaatcaccagagaact

SEQ ID NO: 1016236 - DNA, 33 bp, Homo sapien
aaacctatctgttcaccaaatcaccagagaact

SEQ ID NO: 1016237 - DNA, 33 bp, Homo sapien
gaattggaggagtgaaagaatacaaatgtgtga

SEQ ID NO: 1016238 - DNA, 33 bp, Homo sapien
gaattggaggagtgaaggaatacaaatgtgtga

SEQ ID NO: 1016239 - DNA, 33 bp, Homo sapien
tagcaccctctcttaacacaaaaagatattcac

SEQ ID NO: 1016240 - DNA, 33 bp, Homo sapien
tagcaccctctcttaatacaaaaagatattcac

SEQ ID NO: 1016241 - DNA, 33 bp, Homo sapien
gtctactccaacacctaaaagaatagcaggaga

SEQ ID NO: 1016242 - DNA, 33 bp, Homo sapien
gtctactccaacaccttaaagaatagcaggaga

SEQ ID NO: 1016243 - DNA, 33 bp, Homo sapien
ctgaaccaataggaaactcaaaatattgggtga

SEQ ID NO: 1016244 - DNA, 33 bp, Homo sapien
ctgaaccaataggaaagtcaaaatattgggtga

SEQ ID NO: 1016245 - DNA, 33 bp, Homo sapien
tttgacaaacatcataaaggaaagtacagaaga

SEQ ID NO: 1016246 - DNA, 33 bp, Homo sapien
tttgacaaacatcatagaggaaagtacagaaga

SEQ ID NO: 1016247 - DNA, 33 bp, Homo sapien
tgtaggcaaaagcacaatggagaaaatgagcaa

SEQ ID NO: 1016248 - DNA, 33 bp, Homo sapien
tgtaggcaaaagcacagtggagaaaatgagcaa

SEQ ID NO: 1016249 - DNA, 33 bp, Homo sapien
atttattgcatctttacgatgatttttgccttg

SEQ ID NO: 1016250 - DNA, 33 bp, Homo sapien
atttattgcatctttatgatgatttttgccttg

SEQ ID NO: 1016251 - DNA, 33 bp, Homo sapien
tgttgtataatgaaaccaatttactacaggctg

SEQ ID NO: 1016252 - DNA, 33 bp, Homo sapien
tgttgtataatgaaacgaatttactacaggctg

SEQ ID NO: 1016253 - DNA, 33 bp, Homo sapien
cttcattaagaacaacagggctgacaaataagt

SEQ ID NO: 1016254 - DNA, 33 bp, Homo sapien
cttcattaagaacaacggggctgacaaataagt

SEQ ID NO: 1016255 - DNA, 33 bp, Homo sapien
tgctgcaggtagggaaacctcatggataacatc

SEQ ID NO: 1016256 - DNA, 33 bp, Homo sapien
tgctgcaggtagggaaccctcatggataacatc

SEQ ID NO: 1016257 - DNA, 33 bp, Homo sapien; identical to SEQ ID NO: 1016255

SEQ ID NO: 1016258 - DNA, 33 bp, Homo sapien; identical to SEQ ID NO: 1016256

SEQ ID NO: 1016259 - DNA, 33 bp, Homo sapien
ttccattatgcacatactatgcttttaggggcc

SEQ ID NO: 1016260 - DNA, 33 bp, Homo sapien
ttccattatgcacatagtatgcttttaggggcc

SEQ ID NO: 1016261 - DNA, 33 bp, Homo sapien
tggcccagaatcatctcacttacacatctaaga

SEQ ID NO: 1016262 - DNA, 33 bp, Homo sapien
tggcccagaatcatctgacttacacatctaaga

SEQ ID NO: 1016263 - DNA, 33 bp, Homo sapien
aggagaggaaataatgacaatttggatttgttt

SEQ ID NO: 1016264 - DNA, 33 bp, Homo sapien
aggagaggaaataatgtcaatttggatttgttt

SEQ ID NO: 1016265 - DNA, 33 bp, Homo sapien
caaactacttttatacggacttactcttaaagc

SEQ ID NO: 1016266 - DNA, 33 bp, Homo sapien
caaactacttttatactgacttactcttaaagc

SEQ ID NO: 1016267 - DNA, 33 bp, Homo sapien
attcaaaacagacttcccatagttcaccagtta

SEQ ID NO: 1016268 - DNA, 33 bp, Homo sapien
attcaaaacagacttctcatagttcaccagtta

SEQ ID NO: 1016269 - DNA, 33 bp, Homo sapien
ctgttgttcctcaaatgacaacttatctgtttt

SEQ ID NO: 1016270 - DNA, 33 bp, Homo sapien
ctgttgttcctcaaattacaacttatctgtttt

SEQ ID NO: 1016271 - DNA, 33 bp, Homo sapien
atctctctcatgttaacattactgagtcatcaa

SEQ ID NO: 1016272 - DNA, 33 bp, Homo sapien
atctctctcatgttaatattactgagtcatcaa

SEQ ID NO: 1016273 - DNA, 33 bp, Homo sapien
tatgaagagtggagggaatcataaagctgatgg

SEQ ID NO: 1016274 - DNA, 33 bp, Homo sapien
tatgaagagtggaggggatcataaagctgatgg

SEQ ID NO: 1016275 - DNA, 33 bp, Homo sapien
ttccagagtactgctacatagtttccattttgt

SEQ ID NO: 1016276 - DNA, 33 bp, Homo sapien
ttccagagtactgctagatagtttccattttgt

SEQ ID NO: 1016277 - DNA, 33 bp, Homo sapien
aaagacagtgtagtaccggcaaaaagatagaca

SEQ ID NO: 1016278 - DNA, 33 bp, Homo sapien
aaagacagtgtagtactggcaaaaagatagaca

SEQ ID NO: 1016279 - DNA, 33 bp, Homo sapien
ataaagtgatgttcaggaaatgcaattttttat

SEQ ID NO: 1016280 - DNA, 33 bp, Homo sapien
ataaagtgatgttcagtaaatgcaattttttat

SEQ ID NO: 1016281 - DNA, 33 bp, Homo sapien
cgtacagaggatcagacatgacagatatgagaa

SEQ ID NO: 1016282 - DNA, 33 bp, Homo sapien
cgtacagaggatcagatatgacagatatgagaa

SEQ ID NO: 1016283 - DNA, 33 bp, Homo sapien
aaaaaatcagctaaacaaaaaatctctcctaga

SEQ ID NO: 1016284 - DNA, 33 bp, Homo sapien
aaaaaatcagctaaacgaaaaatctctcctaga

SEQ ID NO: 1016285 - DNA, 33 bp, Homo sapien
aagtgtgtacaaataaatatttccaggcagcaa

SEQ ID NO: 1016286 - DNA, 33 bp, Homo sapien
aagtgtgtacaaataagtatttccaggcagcaa

SEQ ID NO: 1016287 - DNA, 33 bp, Homo sapien
tattcagcactactgtaaatgttttatatttta

SEQ ID NO: 1016288 - DNA, 33 bp, Homo sapien
tattcagcactactgtgaatgttttatatttta

SEQ ID NO: 1016289 - DNA, 33 bp, Homo sapien
gaatcagccgattcaccatgaagacttcaatat

SEQ ID NO: 1016290 - DNA, 33 bp, Homo sapien
gaatcagccgattcactatgaagacttcaatat

SEQ ID NO: 1016291 - DNA, 33 bp, Homo sapien
caacagtgcttcaatcaagaacggctgggcata

SEQ ID NO: 1016292 - DNA, 33 bp, Homo sapien
caacagtgcttcaatccagaacggctgggcata

SEQ ID NO: 1016293 - DNA, 33 bp, Homo sapien
gaaaagctggttatccccattggcttgtcctct

SEQ ID NO: 1016294 - DNA, 33 bp, Homo sapien
gaaaagctggttatcctcattggcttgtcctct

SEQ ID NO: 1016295 - DNA, 33 bp, Homo sapien
atatactggttgcaaaacttagaaaattcaagg

SEQ ID NO: 1016296 - DNA, 33 bp, Homo sapien
atatactggttgcaaagcttagaaaattcaagg

SEQ ID NO: 1016297 - DNA, 33 bp, Homo sapien
tgcactgtttgaaaaaatatggctggtctatgg

SEQ ID NO: 1016298 - DNA, 33 bp, Homo sapien
tgcactgtttgaaaaagtatggctggtctatgg

SEQ ID NO: 1016299 - DNA, 33 bp, Homo sapien
tatttaattaaaagtgaatcaacaagctatatg

SEQ ID NO: 1016300 - DNA, 33 bp, Homo sapien
tatttaattaaaagtggatcaacaagctatatg

SEQ ID NO: 1016301 - DNA, 33 bp, Homo sapien
ttaacagtgtgaaacaatatgtcattcaggttt

SEQ ID NO: 1016302 - DNA, 33 bp, Homo sapien
ttaacagtgtgaaacagtatgtcattcaggttt

SEQ ID NO: 1016303 - DNA, 33 bp, Homo sapien
agtaaatgagatagcacgtaaaggccatataat

SEQ ID NO: 1016304 - DNA, 33 bp, Homo sapien
agtaaatgagatagcatgtaaaggccatataat

SEQ ID NO: 1016305 - DNA, 33 bp, Homo sapien
tggcattgagattaccgagatagataatgtaga

SEQ ID NO: 1016306 - DNA, 33 bp, Homo sapien
tggcattgagattacctagatagataatgtaga

SEQ ID NO: 1016307 - DNA, 33 bp, Homo sapien
agatagtttggtgttcaaaagtaacaaaaagat

SEQ ID NO: 1016308 - DNA, 33 bp, Homo sapien
agatagtttggtgttcgaaagtaacaaaaagat

SEQ ID NO: 1016309 - DNA, 33 bp, Homo sapien
cctccttgctgaggaaatggctcctatactgaa

SEQ ID NO: 1016310 - DNA, 33 bp, Homo sapien
cctccttgctgaggaagtggctcctatactgaa

SEQ ID NO: 1016311 - DNA, 33 bp, Homo sapien
cgaaatgtgccaaaaaagatcccatcatagtag

SEQ ID NO: 1016312 - DNA, 33 bp, Homo sapien
cgaaatgtgccaaaaaggatcccatcatagtag

SEQ ID NO: 1016313 - DNA, 33 bp, Homo sapien
ttccaggaaaatgctcagaccagaataaacctt

SEQ ID NO: 1016314 - DNA, 33 bp, Homo sapien
ttccaggaaaatgctcggaccagaataaacctt

SEQ ID NO: 1016315 - DNA, 33 bp, Homo sapien
gactctggatagttaagtcattcaaataaatct

SEQ ID NO: 1016316 - DNA, 33 bp, Homo sapien
gactctggatagttaattcattcaaataaatct

SEQ ID NO: 1016317 - DNA, 33 bp, Homo sapien
tctagaatgcttgacaaaaggaatcagaagacc

SEQ ID NO: 1016318 - DNA, 33 bp, Homo sapien
tctagaatgcttgacagaaggaatcagaagacc

SEQ ID NO: 1016319 - DNA, 33 bp, Homo sapien
agcaaagccactatgtcacaagaaaaggtttat

SEQ ID NO: 1016320 - DNA, 33 bp, Homo sapien
agcaaagccactatgtgacaagaaaaggtttat

SEQ ID NO: 1016321 - DNA, 33 bp, Homo sapien
agccaggtatgcccagaactttatattgccttg

SEQ ID NO: 1016322 - DNA, 33 bp, Homo sapien
agccaggtatgcccagcactttatattgccttg

SEQ ID NO: 1016323 - DNA, 33 bp, Homo sapien
cctaactcctgggaaacaaatgatgatttggat

SEQ ID NO: 1016324 - DNA, 33 bp, Homo sapien
cctaactcctgggaaataaatgatgatttggat

SEQ ID NO: 1016325 - DNA, 33 bp, Homo sapien
ggcagagctaaaaccacaagtggccagactccc

SEQ ID NO: 1016326 - DNA, 33 bp, Homo sapien
ggcagagctaaaaccataagtggccagactccc

SEQ ID NO: 1016327 - DNA, 33 bp, Homo sapien
cataaagccaaatattactcctacatacataac

SEQ ID NO: 1016328 - DNA, 33 bp, Homo sapien
cataaagccaaatattgctcctacatacataac

SEQ ID NO: 1016329 - DNA, 33 bp, Homo sapien
tggaggtaatttatgacacatattccacaatat

SEQ ID NO: 1016330 - DNA, 33 bp, Homo sapien
tggaggtaatttatgagacatattccacaatat

SEQ ID NO: 1016331 - DNA, 33 bp, Homo sapien
gtctattcaggtgggactattatggtcatgttc

SEQ ID NO: 1016332 - DNA, 33 bp, Homo sapien
gtctattcaggtgggattattatggtcatgttc

SEQ ID NO: 1016333 - DNA, 33 bp, Homo sapien
gttcagattattgaaacgtgttatccaaacatg

SEQ ID NO: 1016334 - DNA, 33 bp, Homo sapien
gttcagattattgaaatgtgttatccaaacatg

SEQ ID NO: 1016335 - DNA, 33 bp, Homo sapien
tctcaggtagtgctaaatactgtggaataaagc

SEQ ID NO: 1016336 - DNA, 33 bp, Homo sapien
tctcaggtagtgctaagtactgtggaataaagc

SEQ ID NO: 1016337 - DNA, 33 bp, Homo sapien
tgtaaataaactggtaagtgaaacataacacca

SEQ ID NO: 1016338 - DNA, 33 bp, Homo sapien
tgtaaataaactggtacgtgaaacataacacca

SEQ ID NO: 1016339 - DNA, 33 bp, Homo sapien
cttgaaagaaaatcaacacaatatagctattca

SEQ ID NO: 1016340 - DNA, 33 bp, Homo sapien
cttgaaagaaaatcaagacaatatagctattca

SEQ ID NO: 1016341 - DNA, 33 bp, Homo sapien
attcactttatcagtcacagaaaggttataaat

SEQ ID NO: 1016342 - DNA, 33 bp, Homo sapien
attcactttatcagtcgcagaaaggttataaat

SEQ ID NO: 1016343 - DNA, 33 bp, Homo sapien
gaatgtaggaaacaataaagtttagagcaaaaa

SEQ ID NO: 1016344 - DNA, 33 bp, Homo sapien
gaatgtaggaaacaatgaagtttagagcaaaaa

SEQ ID NO: 1016345 - DNA, 33 bp, Homo sapien
tatagtggcattattcagaaaagctaaaaatga

SEQ ID NO: 1016346 - DNA, 33 bp, Homo sapien
tatagtggcattattcggaaaagctaaaaatga

SEQ ID NO: 1016347 - DNA, 33 bp, Homo sapien
atacttccactgaaaacgaatgcttgatgctga

SEQ ID NO: 1016348 - DNA, 33 bp, Homo sapien
atacttccactgaaaatgaatgcttgatgctga

SEQ ID NO: 1016349 - DNA, 33 bp, Homo sapien
tcccacccttgatctaagtagacacaatctaat

SEQ ID NO: 1016350 - DNA, 33 bp, Homo sapien
tcccacccttgatctaggtagacacaatctaat

SEQ ID NO: 1016351 - DNA, 33 bp, Homo sapien
ttttgctactgaaaataagaggagattgtttct

SEQ ID NO: 1016352 - DNA, 33 bp, Homo sapien
ttttgctactgaaaatgagaggagattgtttct

SEQ ID NO: 1016353 - DNA, 33 bp, Homo sapien
gtgtggttagggaagcaaggaactgacaaacag

SEQ ID NO: 1016354 - DNA, 33 bp, Homo sapien
gtgtggttagggaagcgaggaactgacaaacag

SEQ ID NO: 1016355 - DNA, 33 bp, Homo sapien
tatacattattaaaacaggtttcagagacaaag

SEQ ID NO: 1016356 - DNA, 33 bp, Homo sapien
tatacattattaaaactggtttcagagacaaag

SEQ ID NO: 1016357 - DNA, 33 bp, Homo sapien
taaatcagttgaatcacctacatagttggcaaa

SEQ ID NO: 1016358 - DNA, 33 bp, Homo sapien
taaatcagttgaatcatctacatagttggcaaa

SEQ ID NO: 1016359 - DNA, 33 bp, Homo sapien
aaagacaacagaattccctgcctatatacggag

SEQ ID NO: 1016360 - DNA, 33 bp, Homo sapien
aaagacaacagaattcgctgcctatatacggag

SEQ ID NO: 1016361 - DNA, 33 bp, Homo sapien
acatgtacaattaattgaatgctcacaacacta

SEQ ID NO: 1016362 - DNA, 33 bp, Homo sapien
acatgtacaattaatttaatgctcacaacacta

SEQ ID NO: 1016363 - DNA, 33 bp, Homo sapien
ttaggaatcaggataaatgtgttctagttctaa

SEQ ID NO: 1016364 - DNA, 33 bp, Homo sapien
ttaggaatcaggataagtgtgttctagttctaa

SEQ ID NO: 1016365 - DNA, 33 bp, Homo sapien
atcttcttctctaaccaaaccctgtgtgtatct

SEQ ID NO: 1016366 - DNA, 33 bp, Homo sapien
atcttcttctctaaccgaaccctgtgtgtatct

SEQ ID NO: 1016367 - DNA, 33 bp, Homo sapien
ttactcgatgggatacagagatgcttgaacaag

SEQ ID NO: 1016368 - DNA, 33 bp, Homo sapien
ttactcgatgggatacggagatgcttgaacaag

SEQ ID NO: 1016369 - DNA, 33 bp, Homo sapien
ataggttcaatttcatcactatcccagaagtgt

SEQ ID NO: 1016370 - DNA, 33 bp, Homo sapien
ataggttcaatttcattactatcccagaagtgt

SEQ ID NO: 1016371 - DNA, 33 bp, Homo sapien
taaagctacttggaagactcctgggattcccct

SEQ ID NO: 1016372 - DNA, 33 bp, Homo sapien
taaagctacttggaaggctcctgggattcccct

SEQ ID NO: 1016373 - DNA, 33 bp, Homo sapien
agataagctattttcaccaattgtatacatatg

SEQ ID NO: 1016374 - DNA, 33 bp, Homo sapien
agataagctattttcagcaattgtatacatatg

SEQ ID NO: 1016375 - DNA, 33 bp, Homo sapien
acaagcaaaaaaattacgtgcagatcaatgaag

SEQ ID NO: 1016376 - DNA, 33 bp, Homo sapien
acaagcaaaaaaattatgtgcagatcaatgaag

SEQ ID NO: 1016377 - DNA, 33 bp, Homo sapien
caatagtaaccaaaaccaaactggtactggtgt

SEQ ID NO: 1016378 - DNA, 33 bp, Homo sapien
caatagtaaccaaaactaaactggtactggtgt

SEQ ID NO: 1016379 - DNA, 33 bp, Homo sapien
gatcaaatggtgtttcaagttctaaagccttga

SEQ ID NO: 1016380 - DNA, 33 bp, Homo sapien
gatcaaatggtgtttccagttctaaagccttga

SEQ ID NO: 1016381 - DNA, 33 bp, Homo sapien
ttgcagaaaaaaggcccatttggtgtcattttt

SEQ ID NO: 1016382 - DNA, 33 bp, Homo sapien
ttgcagaaaaaaggcctatttggtgtcattttt

SEQ ID NO: 1016383 - DNA, 33 bp, Homo sapien
ctgtggaactttgtcactaatatctgtgtaact

SEQ ID NO: 1016384 - DNA, 33 bp, Homo sapien
ctgtggaactttgtcattaatatctgtgtaact

SEQ ID NO: 1016385 - DNA, 33 bp, Homo sapien
tcttggcaattgaaaacgagagagatggaatat

SEQ ID NO: 1016386 - DNA, 33 bp, Homo sapien
tcttggcaattgaaaatgagagagatggaatat

SEQ ID NO: 1016387 - DNA, 33 bp, Homo sapien
tttgctttcaagtatgacaaaaaggtaaatagc

SEQ ID NO: 1016388 - DNA, 33 bp, Homo sapien
tttgctttcaagtatggcaaaaaggtaaatagc

SEQ ID NO: 1016389 - DNA, 33 bp, Homo sapien
gcttcctatgagacaaattagcatggtgataag

SEQ ID NO: 1016390 - DNA, 33 bp, Homo sapien
gcttcctatgagacaagttagcatggtgataag

SEQ ID NO: 1016391 - DNA, 33 bp, Homo sapien
tttttgagggaattgcacttttgaataggtttc

SEQ ID NO: 1016392 - DNA, 33 bp, Homo sapien
tttttgagggaattgcgcttttgaataggtttc

SEQ ID NO: 1016393 - DNA, 33 bp, Homo sapien
agaagcccatgacaaaatgaggcactctttcca

SEQ ID NO: 1016394 - DNA, 33 bp, Homo sapien
agaagcccatgacaaattgaggcactctttcca

SEQ ID NO: 1016395 - DNA, 33 bp, Homo sapien
aaatgtgaaagttgctaacgtgatttcctaaag

SEQ ID NO: 1016396 - DNA, 33 bp, Homo sapien
aaatgtgaaagttgcttacgtgatttcctaaag

SEQ ID NO: 1016397 - DNA, 33 bp, Homo sapien
tatttgttaactgtaaatcccacaagataactt

SEQ ID NO: 1016398 - DNA, 33 bp, Homo sapien
tatttgttaactgtaagtcccacaagataactt

SEQ ID NO: 1016399 - DNA, 33 bp, Homo sapien
gactttaacagacttacgaattcactcatttat

SEQ ID NO: 1016400 - DNA, 33 bp, Homo sapien
gactttaacagacttatgaattcactcatttat

SEQ ID NO: 1016401 - DNA, 33 bp, Homo sapien
gaccttgcagacaaaacagtttgcagtaaagga

SEQ ID NO: 1016402 - DNA, 33 bp, Homo sapien
gaccttgcagacaaaagagtttgcagtaaagga

SEQ ID NO: 1016403 - DNA, 33 bp, Homo sapien
cgagaagctttcaatacctttgcagaatgcatg

SEQ ID NO: 1016404 - DNA, 33 bp, Homo sapien
cgagaagctttcaatatctttgcagaatgcatg

SEQ ID NO: 1016405 - DNA, 33 bp, Homo sapien
aaatataaaatatggacagaaactacaacaaaa

SEQ ID NO: 1016406 - DNA, 33 bp, Homo sapien
aaatataaaatatggatagaaactacaacaaaa

SEQ ID NO: 1016407 - DNA, 33 bp, Homo sapien
ggggcatggtgcagaaagagagaccaaagcaag

SEQ ID NO: 1016408 - DNA, 33 bp, Homo sapien
ggggcatggtgcagaaggagagaccaaagcaag

SEQ ID NO: 1016409 - DNA, 33 bp, Homo sapien
tgagaaactttccccaaatttgcaacataaaat

SEQ ID NO: 1016410 - DNA, 33 bp, Homo sapien
tgagaaactttccccagatttgcaacataaaat

SEQ ID NO: 1016411 - DNA, 33 bp, Homo sapien
aaaatgacaggaatacacgaaaagtttttggta

SEQ ID NO: 1016412 - DNA, 33 bp, Homo sapien
aaaatgacaggaatacgcgaaaagtttttggta

SEQ ID NO: 1016413 - DNA, 33 bp, Homo sapien
attgaacattcatgcaatagacatacattacct

SEQ ID NO: 1016414 - DNA, 33 bp, Homo sapien
attgaacattcatgcagtagacatacattacct

SEQ ID NO: 1016415 - DNA, 33 bp, Homo sapien
atcttggctgtcttgaaaaaattatttggagtg

SEQ ID NO: 1016416 - DNA, 33 bp, Homo sapien
atcttggctgtcttgagaaaattatttggagtg

SEQ ID NO: 1016417 - DNA, 33 bp, Homo sapien
catcaggcaccgaggagacccatgatattgcat

SEQ ID NO: 1016418 - DNA, 33 bp, Homo sapien
catcaggcaccgaggatacccatgatattgcat

SEQ ID NO: 1016419 - DNA, 33 bp, Homo sapien
gctcacaggcctcctgaagtacatattggctta

SEQ ID NO: 1016420 - DNA, 33 bp, Homo sapien
gctcacaggcctcctgcagtacatattggctta

SEQ ID NO: 1016421 - DNA, 33 bp, Homo sapien
tgacctcagaacatagcaaagcctcccaatgat

SEQ ID NO: 1016422 - DNA, 33 bp, Homo sapien
tgacctcagaacatagtaaagcctcccaatgat

SEQ ID NO: 1016423 - DNA, 33 bp, Homo sapien
ttaatgagctgggacactgaagtttgtgggact

SEQ ID NO: 1016424 - DNA, 33 bp, Homo sapien
ttaatgagctgggacagtgaagtttgtgggact

SEQ ID NO: 1016425 - DNA, 33 bp, Homo sapien
gaaagccttagtagcccctgtacctaatttgat

SEQ ID NO: 1016426 - DNA, 33 bp, Homo sapien
gaaagccttagtagcctctgtacctaatttgat

SEQ ID NO: 1016427 - DNA, 33 bp, Homo sapien
tatagacacctaattacaggctgttagactaat

SEQ ID NO: 1016428 - DNA, 33 bp, Homo sapien
tatagacacctaattagaggctgttagactaat

SEQ ID NO: 1016429 - DNA, 33 bp, Homo sapien
ttctcattcccacaaaagtactatgcatcctga

SEQ ID NO: 1016430 - DNA, 33 bp, Homo sapien
ttctcattcccacaaaggtactatgcatcctga

SEQ ID NO: 1016431 - DNA, 33 bp, Homo sapien
ctgcttcccacacacaatcaacaatggaaagaa

SEQ ID NO: 1016432 - DNA, 33 bp, Homo sapien
ctgcttcccacacacagtcaacaatggaaagaa

SEQ ID NO: 1016433 - DNA, 33 bp, Homo sapien
ggataactcagatgcccggcactggtaacaata

SEQ ID NO: 1016434 - DNA, 33 bp, Homo sapien
ggataactcagatgcctggcactggtaacaata

SEQ ID NO: 1016435 - DNA, 33 bp, Homo sapien
catttgagagtcacgccgagtatgaaccaaata

SEQ ID NO: 1016436 - DNA, 33 bp, Homo sapien
catttgagagtcacgctgagtatgaaccaaata

SEQ ID NO: 1016437 - DNA, 33 bp, Homo sapien
tagttatgccatttgaacagtagaagattgtat

SEQ ID NO: 1016438 - DNA, 33 bp, Homo sapien
tagttatgccatttgagcagtagaagattgtat

SEQ ID NO: 1016439 - DNA, 33 bp, Homo sapien
ggatgctgatgacagacattcataaaccagtaa

SEQ ID NO: 1016440 - DNA, 33 bp, Homo sapien
ggatgctgatgacagatattcataaaccagtaa

SEQ ID NO: 1016441 - DNA, 33 bp, Homo sapien
taatgtggtcctagaaaccaaatcacagtgagt

SEQ ID NO: 1016442 - DNA, 33 bp, Homo sapien
taatgtggtcctagaacccaaatcacagtgagt

SEQ ID NO: 1016443 - DNA, 33 bp, Homo sapien
aaatcaaacagcagggcattggatagtgaacag

SEQ ID NO: 1016444 - DNA, 33 bp, Homo sapien
aaatcaaacagcaggggattggatagtgaacag

SEQ ID NO: 1016445 - DNA, 33 bp, Homo sapien
tctttttagtttgagacgatccaaattttttct

SEQ ID NO: 1016446 - DNA, 33 bp, Homo sapien
tctttttagtttgagatgatccaaattttttct

SEQ ID NO: 1016447 - DNA, 33 bp, Homo sapien
catgaatagtgggcagaacctggccagacgtac

SEQ ID NO: 1016448 - DNA, 33 bp, Homo sapien
catgaatagtgggcaggacctggccagacgtac

SEQ ID NO: 1016449 - DNA, 33 bp, Homo sapien
ctagggttagcaaatacgtagcctccaattaag

SEQ ID NO: 1016450 - DNA, 33 bp, Homo sapien
ctagggttagcaaatatgtagcctccaattaag

SEQ ID NO: 1016451 - DNA, 33 bp, Homo sapien
gtgtggagggtgtaaacagtacctgacaaaata

SEQ ID NO: 1016452 - DNA, 33 bp, Homo sapien
gtgtggagggtgtaaatagtacctgacaaaata

SEQ ID NO: 1016453 - DNA, 33 bp, Homo sapien
taaacactgcggaccactagagagggagagaga

SEQ ID NO: 1016454 - DNA, 33 bp, Homo sapien
taaacactgcggaccagtagagagggagagaga

SEQ ID NO: 1016455 - DNA, 33 bp, Homo sapien
agcagttggcaagaagaacacttacaaaaataa

SEQ ID NO: 1016456 - DNA, 33 bp, Homo sapien
agcagttggcaagaaggacacttacaaaaataa

SEQ ID NO: 1016457 - DNA, 33 bp, Homo sapien
tctgcggatgacttctcactctatccttgaaga

SEQ ID NO: 1016458 - DNA, 33 bp, Homo sapien
tctgcggatgacttcttactctatccttgaaga

SEQ ID NO: 1016459 - DNA, 33 bp, Homo sapien
tagcttaatcagtccaataaccccatcaatcta

SEQ ID NO: 1016460 - DNA, 33 bp, Homo sapien
tagcttaatcagtccactaaccccatcaatcta

SEQ ID NO: 1016461 - DNA, 33 bp, Homo sapien
tagcacctgctgttgacgcttaaatgcatacat

SEQ ID NO: 1016462 - DNA, 33 bp, Homo sapien
tagcacctgctgttgatgcttaaatgcatacat

SEQ ID NO: 1016463 - DNA, 33 bp, Homo sapien
acaagataaggtgagtaaatcctggctattatg

SEQ ID NO: 1016464 - DNA, 33 bp, Homo sapien
acaagataaggtgagtgaatcctggctattatg

SEQ ID NO: 1016465 - DNA, 33 bp, Homo sapien
gagtttgtacatagcactgatcaagcaccaaat

SEQ ID NO: 1016466 - DNA, 33 bp, Homo sapien
gagtttgtacatagcattgatcaagcaccaaat

SEQ ID NO: 1016467 - DNA, 33 bp, Homo sapien
ccagattgttacaaaaagaagaaccaattacct

SEQ ID NO: 1016468 - DNA, 33 bp, Homo sapien
ccagattgttacaaaaggaagaaccaattacct

SEQ ID NO: 1016469 - DNA, 33 bp, Homo sapien
agttatagtaattaggcccatggtgaggtagta

SEQ ID NO: 1016470 - DNA, 33 bp, Homo sapien
agttatagtaattaggtccatggtgaggtagta

SEQ ID NO: 1016471 - DNA, 33 bp, Homo sapien
gagagaaattgtatgaactgaggccaatgatag

SEQ ID NO: 1016472 - DNA, 33 bp, Homo sapien
gagagaaattgtatgagctgaggccaatgatag

SEQ ID NO: 1016473 - DNA, 33 bp, Homo sapien
gtgttaggtgatgcaccacgaccttcacgggct

SEQ ID NO: 1016474 - DNA, 33 bp, Homo sapien
gtgttaggtgatgcactacgaccttcacgggct

SEQ ID NO: 1016475 - DNA, 33 bp, Homo sapien
ttaggataataatctccatctggaatcaccaaa

SEQ ID NO: 1016476 - DNA, 33 bp, Homo sapien
ttaggataataatctctatctggaatcaccaaa

SEQ ID NO: 1016477 - DNA, 33 bp, Homo sapien
ggtataagagtatggtcaatttttaggctgata

SEQ ID NO: 1016478 - DNA, 33 bp, Homo sapien
ggtataagagtatggtgaatttttaggctgata

SEQ ID NO: 1016479 - DNA, 33 bp, Homo sapien
ggactgtccctctgtaacatcaaactttccttt

SEQ ID NO: 1016480 - DNA, 33 bp, Homo sapien
ggactgtccctctgtagcatcaaactttccttt

SEQ ID NO: 1016481 - DNA, 33 bp, Homo sapien
gacataagcatggagaagtatatttcaaattat

SEQ ID NO: 1016482 - DNA, 33 bp, Homo sapien
gacataagcatggagacgtatatttcaaattat

SEQ ID NO: 1016483 - DNA, 33 bp, Homo sapien
agttttcttctcctcaatacacttgtatgtgca

SEQ ID NO: 1016484 - DNA, 33 bp, Homo sapien
agttttcttctcctcagtacacttgtatgtgca

SEQ ID NO: 1016485 - DNA, 33 bp, Homo sapien
ataattatcctagaaacgtgtatcagaatatat

SEQ ID NO: 1016486 - DNA, 33 bp, Homo sapien
ataattatcctagaaaggtgtatcagaatatat

SEQ ID NO: 1016487 - DNA, 33 bp, Homo sapien
accaataacttcctaaactagtacctgatgtaa

SEQ ID NO: 1016488 - DNA, 33 bp, Homo sapien
accaataacttcctaacctagtacctgatgtaa

SEQ ID NO: 1016489 - DNA, 33 bp, Homo sapien
cccagcactacctatacaactgtactgacatat

SEQ ID NO: 1016490 - DNA, 33 bp, Homo sapien
cccagcactacctatataactgtactgacatat

SEQ ID NO: 1016491 - DNA, 33 bp, Homo sapien
tttgagagaaaagatacgagcaacctgtgcatt

SEQ ID NO: 1016492 - DNA, 33 bp, Homo sapien
tttgagagaaaagatatgagcaacctgtgcatt

SEQ ID NO: 1016493 - DNA, 33 bp, Homo sapien
acaatgagatattatcaaatgccaatcagaatg

SEQ ID NO: 1016494 - DNA, 33 bp, Homo sapien
acaatgagatattatcgaatgccaatcagaatg

SEQ ID NO: 1016495 - DNA, 33 bp, Homo sapien
acaatacacgctgttacgaatttgtttttattt

SEQ ID NO: 1016496 - DNA, 33 bp, Homo sapien
acaatacacgctgttatgaatttgtttttattt

SEQ ID NO: 1016497 - DNA, 33 bp, Homo sapien
ctgactccatagctcaataatcactatgataca

SEQ ID NO: 1016498 - DNA, 33 bp, Homo sapien
ctgactccatagctcagtaatcactatgataca

SEQ ID NO: 1016499 - DNA, 33 bp, Homo sapien
tggtaaacatacactacaccactgatattacca

SEQ ID NO: 1016500 - DNA, 33 bp, Homo sapien
tggtaaacatacactataccactgatattacca

SEQ ID NO: 1016501 - DNA, 33 bp, Homo sapien
caagcctctggagtcacactttatgagcttata

SEQ ID NO: 1016502 - DNA, 33 bp, Homo sapien
caagcctctggagtcagactttatgagcttata

SEQ ID NO: 1016503 - DNA, 33 bp, Homo sapien
tcttcctctcctacatgatcaataaaggcagca

SEQ ID NO: 1016504 - DNA, 33 bp, Homo sapien
tcttcctctcctacattatcaataaaggcagca

SEQ ID NO: 1016505 - DNA, 33 bp, Homo sapien
caccactgtaaaatagacaaacacttctctgct

SEQ ID NO: 1016506 - DNA, 33 bp, Homo sapien
caccactgtaaaataggcaaacacttctctgct

SEQ ID NO: 1016507 - DNA, 33 bp, Homo sapien
tggtgtttgtatatgccatatccattaacctgt

SEQ ID NO: 1016508 - DNA, 33 bp, Homo sapien
tggtgtttgtatatgctatatccattaacctgt

SEQ ID NO: 1016509 - DNA, 33 bp, Homo sapien
ttcatcaggtatgtcaagagctatgtcactgtg

SEQ ID NO: 1016510 - DNA, 33 bp, Homo sapien
ttcatcaggtatgtcatgagctatgtcactgtg

SEQ ID NO: 1016511 - DNA, 33 bp, Homo sapien
gatgaagctgaaacaaaacccttattaagctac

SEQ ID NO: 1016512 - DNA, 33 bp, Homo sapien
gatgaagctgaaacaagacccttattaagctac

SEQ ID NO: 1016513 - DNA, 33 bp, Homo sapien
ctttgaaatgatctggaaacatatgtatctaac

SEQ ID NO: 1016514 - DNA, 33 bp, Homo sapien
ctttgaaatgatctgggaacatatgtatctaac

SEQ ID NO: 1016515 - DNA, 33 bp, Homo sapien
cattaacagaagtctacacacaaatacaaacac

SEQ ID NO: 1016516 - DNA, 33 bp, Homo sapien
cattaacagaagtctatacacaaatacaaacac

SEQ ID NO: 1016517 - DNA, 33 bp, Homo sapien
attgtgacaccatggaatatcaaggaaaaatga

SEQ ID NO: 1016518 - DNA, 33 bp, Homo sapien
attgtgacaccatggattatcaaggaaaaatga

SEQ ID NO: 1016519 - DNA, 33 bp, Homo sapien
gtttatttagttcactcacctgagggctaacag

SEQ ID NO: 1016520 - DNA, 33 bp, Homo sapien
gtttatttagttcacttacctgagggctaacag

SEQ ID NO: 1016521 - DNA, 33 bp, Homo sapien
aaatttattcttaataacctgggaatctaaact

SEQ ID NO: 1016522 - DNA, 33 bp, Homo sapien
aaatttattcttaatagcctgggaatctaaact

SEQ ID NO: 1016523 - DNA, 33 bp, Homo sapien
aagactccggcaaaaaactcttagaactgataa

SEQ ID NO: 1016524 - DNA, 33 bp, Homo sapien
aagactccggcaaaaatctcttagaactgataa

SEQ ID NO: 1016525 - DNA, 33 bp, Homo sapien
acgtactcagacaaaacgataacaaatccacag

SEQ ID NO: 1016526 - DNA, 33 bp, Homo sapien
acgtactcagacaaaaggataacaaatccacag

SEQ ID NO: 1016527 - DNA, 33 bp, Homo sapien
attttattttaaagaacgttcatgtgatgataa

SEQ ID NO: 1016528 - DNA, 33 bp, Homo sapien
attttattttaaagaatgttcatgtgatgataa

SEQ ID NO: 1016529 - DNA, 33 bp, Homo sapien
tctttctttttactgacaggtgatagatgcaca

SEQ ID NO: 1016530 - DNA, 33 bp, Homo sapien
tctttctttttactgataggtgatagatgcaca

SEQ ID NO: 1016531 - DNA, 33 bp, Homo sapien
tttatcaaagctacaaacctaaccaccactgca

SEQ ID NO: 1016532 - DNA, 33 bp, Homo sapien
tttatcaaagctacaagcctaaccaccactgca

SEQ ID NO: 1016533 - DNA, 33 bp, Homo sapien
ccctccagagctacaactgaccataatccaact

SEQ ID NO: 1016534 - DNA, 33 bp, Homo sapien
ccctccagagctacaattgaccataatccaact

SEQ ID NO: 1016535 - DNA, 33 bp, Homo sapien
acagacaagtccaataccaatggagtgaagaag

SEQ ID NO: 1016536 - DNA, 33 bp, Homo sapien
acagacaagtccaatatcaatggagtgaagaag

SEQ ID NO: 1016537 - DNA, 33 bp, Homo sapien
tggtacaaggtatataagttacaagtacgctct

SEQ ID NO: 1016538 - DNA, 33 bp, Homo sapien
tggtacaaggtatatatgttacaagtacgctct

SEQ ID NO: 1016539 - DNA, 33 bp, Homo sapien
agtccagcatagataaaccaaccccatccacca

SEQ ID NO: 1016540 - DNA, 33 bp, Homo sapien
agtccagcatagataagccaaccccatccacca

SEQ ID NO: 1016541 - DNA, 33 bp, Homo sapien
tgtgtgtcacctaaggccagatggtaaagaaag

SEQ ID NO: 1016542 - DNA, 33 bp, Homo sapien
tgtgtgtcacctaaggtcagatggtaaagaaag

SEQ ID NO: 1016543 - DNA, 33 bp, Homo sapien
ttgaagtttttcaaccccttgcaaaagctcctc

SEQ ID NO: 1016544 - DNA, 33 bp, Homo sapien
ttgaagtttttcaacctcttgcaaaagctcctc

SEQ ID NO: 1016545 - DNA, 33 bp, Homo sapien
ctcctcttccttcaagccttattatttgtattg

SEQ ID NO: 1016546 - DNA, 33 bp, Homo sapien
ctcctcttccttcaagtcttattatttgtattg

SEQ ID NO: 1016547 - DNA, 33 bp, Homo sapien
gaatttttttttgatgccagagtcacccaggac

SEQ ID NO: 1016548 - DNA, 33 bp, Homo sapien
gaatttttttttgatgtcagagtcacccaggac

SEQ ID NO: 1016549 - DNA, 33 bp, Homo sapien
agacactgaaagctagaaacgtggctgaatttt

SEQ ID NO: 1016550 - DNA, 33 bp, Homo sapien
agacactgaaagctaggaacgtggctgaatttt

SEQ ID NO: 1016551 - DNA, 33 bp, Homo sapien
ttggcattttgctgaacgtatgaaaagtatggg

SEQ ID NO: 1016552 - DNA, 33 bp, Homo sapien
ttggcattttgctgaatgtatgaaaagtatggg

SEQ ID NO: 1016553 - DNA, 33 bp, Homo sapien
ccccagtctccttcccaagctcatcagcaccca

SEQ ID NO: 1016554 - DNA, 33 bp, Homo sapien
ccccagtctccttcccgagctcatcagcaccca

SEQ ID NO: 1016555 - DNA, 33 bp, Homo sapien
ctctcagcagagagggaacccttagcaggtagc

SEQ ID NO: 1016556 - DNA, 33 bp, Homo sapien
ctctcagcagagaggggacccttagcaggtagc

SEQ ID NO: 1016557 - DNA, 33 bp, Homo sapien
accacaggctgcatgacgctggtgcttgtgcca

SEQ ID NO: 1016558 - DNA, 33 bp, Homo sapien
accacaggctgcatgatgctggtgcttgtgcca

SEQ ID NO: 1016559 - DNA, 33 bp, Homo sapien
ggactcaagtgctaccagggctttctctctcca

SEQ ID NO: 1016560 - DNA, 33 bp, Homo sapien
ggactcaagtgctacccgggctttctctctcca

SEQ ID NO: 1016561 - DNA, 33 bp, Homo sapien
gggcctaaacacagaactaattgaccaatgaga

SEQ ID NO: 1016562 - DNA, 33 bp, Homo sapien
gggcctaaacacagaattaattgaccaatgaga

SEQ ID NO: 1016563 - DNA, 33 bp, Homo sapien
agctatccctttgaaaagtcagcaacaagagag

SEQ ID NO: 1016564 - DNA, 33 bp, Homo sapien
agctatccctttgaaatgtcagcaacaagagag

SEQ ID NO: 1016565 - DNA, 33 bp, Homo sapien
cctcctgtcataaagacatgagaagtttgtttt

SEQ ID NO: 1016566 - DNA, 33 bp, Homo sapien
cctcctgtcataaagatatgagaagtttgtttt

SEQ ID NO: 1016567 - DNA, 33 bp, Homo sapien
ctattgtcaagaccacacgattgctgctttcta

SEQ ID NO: 1016568 - DNA, 33 bp, Homo sapien
ctattgtcaagaccacgcgattgctgctttcta

SEQ ID NO: 1016569 - DNA, 33 bp, Homo sapien
agtctaggagccattcaaggaattattctgttg

SEQ ID NO: 1016570 - DNA, 33 bp, Homo sapien
agtctaggagccattccaggaattattctgttg

SEQ ID NO: 1016571 - DNA, 33 bp, Homo sapien
gaaaccaagactttcccagatgaactgagacat

SEQ ID NO: 1016572 - DNA, 33 bp, Homo sapien
gaaaccaagactttcctagatgaactgagacat

SEQ ID NO: 1016573 - DNA, 33 bp, Homo sapien
cagtgtgaactgtggaaagctacatggtgactc

SEQ ID NO: 1016574 - DNA, 33 bp, Homo sapien
cagtgtgaactgtggatagctacatggtgactc

SEQ ID NO: 1016575 - DNA, 33 bp, Homo sapien
atatgaaaagtcactcaaggaaattaggaacag

SEQ ID NO: 1016576 - DNA, 33 bp, Homo sapien
atatgaaaagtcactcgaggaaattaggaacag

SEQ ID NO: 1016577 - DNA, 33 bp, Homo sapien
agaagaagtagaaggacgataaaggacaggcca

SEQ ID NO: 1016578 - DNA, 33 bp, Homo sapien
agaagaagtagaaggatgataaaggacaggcca

SEQ ID NO: 1016579 - DNA, 33 bp, Homo sapien
gtgcaccaaaacaacaaaagcactctaaagtga

SEQ ID NO: 1016580 - DNA, 33 bp, Homo sapien
gtgcaccaaaacaacacaagcactctaaagtga

SEQ ID NO: 1016581 - DNA, 33 bp, Homo sapien
gtaaggagtgagcatactatattatactgccaa

SEQ ID NO: 1016582 - DNA, 33 bp, Homo sapien
gtaaggagtgagcatattatattatactgccaa

SEQ ID NO: 1016583 - DNA, 33 bp, Homo sapien
atgagtctgagaaacacagacttgcaatacatg

SEQ ID NO: 1016584 - DNA, 33 bp, Homo sapien
atgagtctgagaaacatagacttgcaatacatg

SEQ ID NO: 1016585 - DNA, 33 bp, Homo sapien
tattagaatagccttacaaaattccatctgttt

SEQ ID NO: 1016586 - DNA, 33 bp, Homo sapien
tattagaatagccttataaaattccatctgttt

SEQ ID NO: 1016587 - DNA, 33 bp, Homo sapien
aagatgactgactagaagaatctgatactgatc

SEQ ID NO: 1016588 - DNA, 33 bp, Homo sapien
aagatgactgactagaggaatctgatactgatc

SEQ ID NO: 1016589 - DNA, 33 bp, Homo sapien
tagcaccatgaaaatcagacagaggcaggaggt

SEQ ID NO: 1016590 - DNA, 33 bp, Homo sapien
tagcaccatgaaaatcggacagaggcaggaggt

SEQ ID NO: 1016591 - DNA, 33 bp, Homo sapien
aaagccctttatctgcaaggaatcaatagtgcc

SEQ ID NO: 1016592 - DNA, 33 bp, Homo sapien
aaagccctttatctgcgaggaatcaatagtgcc

SEQ ID NO: 1016593 - DNA, 33 bp, Homo sapien
agataagatggtccaccccgtagcagagaagat

SEQ ID NO: 1016594 - DNA, 33 bp, Homo sapien
agataagatggtccactccgtagcagagaagat

SEQ ID NO: 1016595 - DNA, 33 bp, Homo sapien
ttgaacctgagctcccacttttcctctccacaa

SEQ ID NO: 1016596 - DNA, 33 bp, Homo sapien
ttgaacctgagctcccgcttttcctctccacaa

SEQ ID NO: 1016597 - DNA, 33 bp, Homo sapien
aaaaactgtttgcaacgggctattgcagaactc

SEQ ID NO: 1016598 - DNA, 33 bp, Homo sapien
aaaaactgtttgcaactggctattgcagaactc

SEQ ID NO: 1016599 - DNA, 33 bp, Homo sapien
agcaagtatgaattccacaacatccagtgaaag

SEQ ID NO: 1016600 - DNA, 33 bp, Homo sapien
agcaagtatgaattccgcaacatccagtgaaag

SEQ ID NO: 1016601 - DNA, 33 bp, Homo sapien
ggcacaatatccatcaatgaatttgcccgcttg

SEQ ID NO: 1016602 - DNA, 33 bp, Homo sapien
ggcacaatatccatcagtgaatttgcccgcttg

SEQ ID NO: 1016603 - DNA, 33 bp, Homo sapien
tcttaagtgcatgatccaacttggaaaggtaaa

SEQ ID NO: 1016604 - DNA, 33 bp, Homo sapien
tcttaagtgcatgatcgaacttggaaaggtaaa

SEQ ID NO: 1016605 - DNA, 33 bp, Homo sapien
atgggcttcagcaaggcaattagcaagtacagc

SEQ ID NO: 1016606 - DNA, 33 bp, Homo sapien
atgggcttcagcaagggaattagcaagtacagc

SEQ ID NO: 1016607 - DNA, 33 bp, Homo sapien
cttgtgtatccattgggcataaaggagtattag

SEQ ID NO: 1016608 - DNA, 33 bp, Homo sapien
cttgtgtatccattggtcataaaggagtattag

SEQ ID NO: 1016609 - DNA, 33 bp, Homo sapien
ttatagtcattgctataaaatcccatcaagcct

SEQ ID NO: 1016610 - DNA, 33 bp, Homo sapien
ttatagtcattgctatgaaatcccatcaagcct

SEQ ID NO: 1016611 - DNA, 33 bp, Homo sapien
ttgcaaatgtctgttaacccctgttattgtgcc

SEQ ID NO: 1016612 - DNA, 33 bp, Homo sapien
ttgcaaatgtctgttagcccctgttattgtgcc

SEQ ID NO: 1016613 - DNA, 33 bp, Homo sapien
cagtctttgtaaatacaggctcttcttccattc

SEQ ID NO: 1016614 - DNA, 33 bp, Homo sapien
cagtctttgtaaatacgggctcttcttccattc

SEQ ID NO: 1016615 - DNA, 33 bp, Homo sapien
tatctcaaacaagcacaaaatcagaatgtaaac

SEQ ID NO: 1016616 - DNA, 33 bp, Homo sapien
tatctcaaacaagcacgaaatcagaatgtaaac

SEQ ID NO: 1016617 - DNA, 33 bp, Homo sapien
aagtccgtcaactaccaccttccatgtgaacca

SEQ ID NO: 1016618 - DNA, 33 bp, Homo sapien
aagtccgtcaactaccgccttccatgtgaacca

SEQ ID NO: 1016619 - DNA, 33 bp, Homo sapien
atcccatatgctaatagctggcttatgtgtttg

SEQ ID NO: 1016620 - DNA, 33 bp, Homo sapien
atcccatatgctaatatctggcttatgtgtttg

SEQ ID NO: 1016621 - DNA, 33 bp, Homo sapien
aacacaggtacacacgacataatattaggataa

SEQ ID NO: 1016622 - DNA, 33 bp, Homo sapien
aacacaggtacacacggcataatattaggataa

SEQ ID NO: 1016623 - DNA, 33 bp, Homo sapien
tttacttaaagtggaacagggacattgatataa

SEQ ID NO: 1016624 - DNA, 33 bp, Homo sapien
tttacttaaagtggaatagggacattgatataa

SEQ ID NO: 1016625 - DNA, 33 bp, Homo sapien
taaaattctgagctacaggactataacaaagga

SEQ ID NO: 1016626 - DNA, 33 bp, Homo sapien
taaaattctgagctactggactataacaaagga

SEQ ID NO: 1016627 - DNA, 33 bp, Homo sapien
aaatctgattttgtgaagaataaactctggttg

SEQ ID NO: 1016628 - DNA, 33 bp, Homo sapien
aaatctgattttgtgaggaataaactctggttg

SEQ ID NO: 1016629 - DNA, 33 bp, Homo sapien
gtgtcatttacagacagaatttttacagtagaa

SEQ ID NO: 1016630 - DNA, 33 bp, Homo sapien
gtgtcatttacagacataatttttacagtagaa

SEQ ID NO: 1016631 - DNA, 33 bp, Homo sapien
tttgatactaaccagtaaaaagaatcttactac

SEQ ID NO: 1016632 - DNA, 33 bp, Homo sapien
tttgatactaaccagtgaaaagaatcttactac

SEQ ID NO: 1016633 - DNA, 33 bp, Homo sapien
ttgcccaaagaccaaactgggtttcaagttcag

SEQ ID NO: 1016634 - DNA, 33 bp, Homo sapien
ttgcccaaagaccaaattgggtttcaagttcag

SEQ ID NO: 1016635 - DNA, 33 bp, Homo sapien
agcttagtgggagaatgacatccatttctgtct

SEQ ID NO: 1016636 - DNA, 33 bp, Homo sapien
agcttagtgggagaattacatccatttctgtct

SEQ ID NO: 1016637 - DNA, 33 bp, Homo sapien
acccagctctgaggaacaaggtatgatgttctg

SEQ ID NO: 1016638 - DNA, 33 bp, Homo sapien
acccagctctgaggaagaaggtatgatgttctg

SEQ ID NO: 1016639 - DNA, 33 bp, Homo sapien
gaagcagcacaccaataactaccttctccacgg

SEQ ID NO: 1016640 - DNA, 33 bp, Homo sapien
gaagcagcacaccaatgactaccttctccacgg

SEQ ID NO: 1016641 - DNA, 33 bp, Homo sapien
tgagggaactcagataataagatgttaagaata

SEQ ID NO: 1016642 - DNA, 33 bp, Homo sapien
tgagggaactcagatattaagatgttaagaata

SEQ ID NO: 1016643 - DNA, 33 bp, Homo sapien
ttatctttactttccaacatgatcttacttggt

SEQ ID NO: 1016644 - DNA, 33 bp, Homo sapien
ttatctttactttccaccatgatcttacttggt

SEQ ID NO: 1016645 - DNA, 33 bp, Homo sapien
attcttatagttccacaccggaaatttattaag

SEQ ID NO: 1016646 - DNA, 33 bp, Homo sapien
attcttatagttccacgccggaaatttattaag

SEQ ID NO: 1016647 - DNA, 33 bp, Homo sapien
aggtaaatgaagtgcacaccagttaggtaattc

SEQ ID NO: 1016648 - DNA, 33 bp, Homo sapien
aggtaaatgaagtgcataccagttaggtaattc

SEQ ID NO: 1016649 - DNA, 33 bp, Homo sapien
ttctaaaattcatatgcaacaaaaaatagctca

SEQ ID NO: 1016650 - DNA, 33 bp, Homo sapien
ttctaaaattcatatggaacaaaaaatagctca

SEQ ID NO: 1016651 - DNA, 33 bp, Homo sapien
gtgtccctcctcttcaactgtttggaatagttt

SEQ ID NO: 1016652 - DNA, 33 bp, Homo sapien
gtgtccctcctcttcagctgtttggaatagttt

SEQ ID NO: 1016653 - DNA, 33 bp, Homo sapien
gagaggagttacccacaccagggcttcacctct

SEQ ID NO: 1016654 - DNA, 33 bp, Homo sapien
gagaggagttacccacgccagggcttcacctct

SEQ ID NO: 1016655 - DNA, 33 bp, Homo sapien
cattagtgcaattttacgtaagactgtttttca

SEQ ID NO: 1016656 - DNA, 33 bp, Homo sapien
cattagtgcaattttatgtaagactgtttttca

SEQ ID NO: 1016657 - DNA, 33 bp, Homo sapien
agaatataaagaaagaatatcttgtccagctgt

SEQ ID NO: 1016658 - DNA, 33 bp, Homo sapien
agaatataaagaaagactatcttgtccagctgt

SEQ ID NO: 1016659 - DNA, 33 bp, Homo sapien
catgttccgccaactgcattatcttatttgtgt

SEQ ID NO: 1016660 - DNA, 33 bp, Homo sapien
catgttccgccaactggattatcttatttgtgt

SEQ ID NO: 1016661 - DNA, 33 bp, Homo sapien
gtaatctgttcacataagatttggtaaaattgg

SEQ ID NO: 1016662 - DNA, 33 bp, Homo sapien
gtaatctgttcacatatgatttggtaaaattgg

SEQ ID NO: 1016663 - DNA, 33 bp, Homo sapien
acataggaacaacttccaggaatactcctatgc

SEQ ID NO: 1016664 - DNA, 33 bp, Homo sapien
acataggaacaacttctaggaatactcctatgc

SEQ ID NO: 1016665 - DNA, 33 bp, Homo sapien
tattcaaccacggagcaacatggtttttagaga

SEQ ID NO: 1016666 - DNA, 33 bp, Homo sapien
tattcaaccacggagccacatggtttttagaga

SEQ ID NO: 1016667 - DNA, 33 bp, Homo sapien
ccagagatagcagatcaatttttactgtcaaaa

SEQ ID NO: 1016668 - DNA, 33 bp, Homo sapien
ccagagatagcagatcgatttttactgtcaaaa

SEQ ID NO: 1016669 - DNA, 33 bp, Homo sapien
actgtttaaagccaatcatgaagaacaaatctt

SEQ ID NO: 1016670 - DNA, 33 bp, Homo sapien
actgtttaaagccaatgatgaagaacaaatctt

SEQ ID NO: 1016671 - DNA, 33 bp, Homo sapien
acatggtaaaaatgtcaaagactgtaacactgg

SEQ ID NO: 1016672 - DNA, 33 bp, Homo sapien
acatggtaaaaatgtcgaagactgtaacactgg

SEQ ID NO: 1016673 - DNA, 33 bp, Homo sapien
gaatgtgatgccctgaaattgattttgaaattc

SEQ ID NO: 1016674 - DNA, 33 bp, Homo sapien
gaatgtgatgccctgatattgattttgaaattc

SEQ ID NO: 1016675 - DNA, 33 bp, Homo sapien
ttagaacagaggaaaaaattcatgggatttata

SEQ ID NO: 1016676 - DNA, 33 bp, Homo sapien
ttagaacagaggaaaacattcatgggatttata

SEQ ID NO: 1016677 - DNA, 33 bp, Homo sapien
agtcaagagactcgtgcaattatgacctgcttt

SEQ ID NO: 1016678 - DNA, 33 bp, Homo sapien
agtcaagagactcgtgtaattatgacctgcttt

SEQ ID NO: 1016679 - DNA, 33 bp, Homo sapien
tacctgcatttaccagccagaacagagaataga

SEQ ID NO: 1016680 - DNA, 33 bp, Homo sapien
tacctgcatttaccagtcagaacagagaataga

SEQ ID NO: 1016681 - DNA, 33 bp, Homo sapien
gctagattataaaccaaactggccggtgtctta

SEQ ID NO: 1016682 - DNA, 33 bp, Homo sapien
gctagattataaaccagactggccggtgtctta

SEQ ID NO: 1016683 - DNA, 33 bp, Homo sapien
tcagatacttaagcacaaagtagcaggagaagg

SEQ ID NO: 1016684 - DNA, 33 bp, Homo sapien
tcagatacttaagcacgaagtagcaggagaagg

SEQ ID NO: 1016685 - DNA, 33 bp, Homo sapien
tgtgggtagtgatatacggaattagtgggaaaa

SEQ ID NO: 1016686 - DNA, 33 bp, Homo sapien
tgtgggtagtgatatatggaattagtgggaaaa

SEQ ID NO: 1016687 - DNA, 33 bp, Homo sapien
ttatcagtgtaatccacgtctttgatctctaag

SEQ ID NO: 1016688 - DNA, 33 bp, Homo sapien
ttatcagtgtaatccatgtctttgatctctaag

SEQ ID NO: 1016689 - DNA, 33 bp, Homo sapien
tcactaaggattagtaaagtagacctacaacaa

SEQ ID NO: 1016690 - DNA, 33 bp, Homo sapien
tcactaaggattagtatagtagacctacaacaa

SEQ ID NO: 1016691 - DNA, 33 bp, Homo sapien
gctggtgggcttcacactattatgagactcagt

SEQ ID NO: 1016692 - DNA, 33 bp, Homo sapien
gctggtgggcttcacattattatgagactcagt

SEQ ID NO: 1016693 - DNA, 33 bp, Homo sapien
ttcctgcctgtaacttaaaggatatcttcccca

SEQ ID NO: 1016694 - DNA, 33 bp, Homo sapien
ttcctgcctgtaacttgaaggatatcttcccca

SEQ ID NO: 1016695 - DNA, 33 bp, Homo sapien
tgtggaggcaaatactaaaattatctgctagga

SEQ ID NO: 1016696 - DNA, 33 bp, Homo sapien
tgtggaggcaaatactgaaattatctgctagga

SEQ ID NO: 1016697 - DNA, 33 bp, Homo sapien
ggttagattctcacaaagcttcatttaaggtgt

SEQ ID NO: 1016698 - DNA, 33 bp, Homo sapien
ggttagattctcacaaggcttcatttaaggtgt

SEQ ID NO: 1016699 - DNA, 33 bp, Homo sapien
ttttcgttgggtaggagtccaagctcagcttat

SEQ ID NO: 1016700 - DNA, 33 bp, Homo sapien
ttttcgttgggtaggattccaagctcagcttat

SEQ ID NO: 1016701 - DNA, 33 bp, Homo sapien
ttttaacttttctgcaaaggttagtcatcatat

SEQ ID NO: 1016702 - DNA, 33 bp, Homo sapien
ttttaacttttctgcataggttagtcatcatat

SEQ ID NO: 1016703 - DNA, 33 bp, Homo sapien
cataagatggccactccaggtagtcacactata

SEQ ID NO: 1016704 - DNA, 33 bp, Homo sapien
cataagatggccactctaggtagtcacactata

SEQ ID NO: 1016705 - DNA, 33 bp, Homo sapien
atttggacatggtacactggggatggcttattt

SEQ ID NO: 1016706 - DNA, 33 bp, Homo sapien
atttggacatggtacagtggggatggcttattt

SEQ ID NO: 1016707 - DNA, 33 bp, Homo sapien
aaaccagaatgctttcacctaaactaacacaac

SEQ ID NO: 1016708 - DNA, 33 bp, Homo sapien
aaaccagaatgctttcgcctaaactaacacaac

SEQ ID NO: 1016709 - DNA, 33 bp, Homo sapien
aacttgtgtaactctacaggcaaatttgaaaat

SEQ ID NO: 1016710 - DNA, 33 bp, Homo sapien
aacttgtgtaactctataggcaaatttgaaaat

SEQ ID NO: 1016711 - DNA, 33 bp, Homo sapien
agagtaattatccaaaaatcccaatggagccta

SEQ ID NO: 1016712 - DNA, 33 bp, Homo sapien
agagtaattatccaaatatcccaatggagccta

SEQ ID NO: 1016713 - DNA, 33 bp, Homo sapien
ttttgacaacctgctacaaataatgaggctttt

SEQ ID NO: 1016714 - DNA, 33 bp, Homo sapien
ttttgacaacctgctataaataatgaggctttt

SEQ ID NO: 1016715 - DNA, 33 bp, Homo sapien
tctctgagatacagcaaacctgactcaactttt

SEQ ID NO: 1016716 - DNA, 33 bp, Homo sapien
tctctgagatacagcagacctgactcaactttt

SEQ ID NO: 1016717 - DNA, 33 bp, Homo sapien
caaactactctacaagacactaatgaggttcta

SEQ ID NO: 1016718 - DNA, 33 bp, Homo sapien
caaactactctacaaggcactaatgaggttcta

SEQ ID NO: 1016719 - DNA, 33 bp, Homo sapien
ggaaatattgatatacaaacctgtagagggtga

SEQ ID NO: 1016720 - DNA, 33 bp, Homo sapien
ggaaatattgatatacgaacctgtagagggtga

SEQ ID NO: 1016721 - DNA, 33 bp, Homo sapien
ctctacataaactcaaactgttcttcctaaatc

SEQ ID NO: 1016722 - DNA, 33 bp, Homo sapien
ctctacataaactcaagctgttcttcctaaatc

SEQ ID NO: 1016723 - DNA, 33 bp, Homo sapien
cctattatagacaaagcaaaagacgaatagcat

SEQ ID NO: 1016724 - DNA, 33 bp, Homo sapien
cctattatagacaaaggaaaagacgaatagcat

SEQ ID NO: 1016725 - DNA, 33 bp, Homo sapien
gagccacattttctggaattatggaatgagatg

SEQ ID NO: 1016726 - DNA, 33 bp, Homo sapien
gagccacattttctggcattatggaatgagatg

SEQ ID NO: 1016727 - DNA, 33 bp, Homo sapien
ttaaatttgaaaattacgcctcattaaagctgg

SEQ ID NO: 1016728 - DNA, 33 bp, Homo sapien
ttaaatttgaaaattatgcctcattaaagctgg

SEQ ID NO: 1016729 - DNA, 33 bp, Homo sapien
atactgcaataaacttaaaagtgtagatatgtc

SEQ ID NO: 1016730 - DNA, 33 bp, Homo sapien
atactgcaataaactttaaagtgtagatatgtc

SEQ ID NO: 1016731 - DNA, 33 bp, Homo sapien
agacatacaaatgaccaacaagtatatgaaaat

SEQ ID NO: 1016732 - DNA, 33 bp, Homo sapien
agacatacaaatgaccgacaagtatatgaaaat

SEQ ID NO: 1016733 - DNA, 33 bp, Homo sapien
gagggtatcagtgatcaaaaatcaaatgaatga

SEQ ID NO: 1016734 - DNA, 33 bp, Homo sapien
gagggtatcagtgatcgaaaatcaaatgaatga

SEQ ID NO: 1016735 - DNA, 33 bp, Homo sapien
atataatcctgacttccctgaaatagacataca

SEQ ID NO: 1016736 - DNA, 33 bp, Homo sapien
atataatcctgacttctctgaaatagacataca

SEQ ID NO: 1016737 - DNA, 33 bp, Homo sapien
aaaattcttcgaaaaaattattgctacttgaca

SEQ ID NO: 1016738 - DNA, 33 bp, Homo sapien
aaaattcttcgaaaaagttattgctacttgaca

SEQ ID NO: 1016739 - DNA, 33 bp, Homo sapien
ttggtgatttcttgcaaaattaaatatgttctt

SEQ ID NO: 1016740 - DNA, 33 bp, Homo sapien
ttggtgatttcttgcacaattaaatatgttctt

SEQ ID NO: 1016741 - DNA, 33 bp, Homo sapien
atataaaacaataggaacacttaagcaacctaa

SEQ ID NO: 1016742 - DNA, 33 bp, Homo sapien
atataaaacaataggatcacttaagcaacctaa

SEQ ID NO: 1016743 - DNA, 33 bp, Homo sapien
gttcacctttactgtgcaatgccaaattgttcc

SEQ ID NO: 1016744 - DNA, 33 bp, Homo sapien
gttcacctttactgtgtaatgccaaattgttcc

SEQ ID NO: 1016745 - DNA, 33 bp, Homo sapien
gcacagaccctggcaccggtatgcactcctcat

SEQ ID NO: 1016746 - DNA, 33 bp, Homo sapien
gcacagaccctggcactggtatgcactcctcat

SEQ ID NO: 1016747 - DNA, 33 bp, Homo sapien
aggaaactgaggattacccagctgatgcaaatt

SEQ ID NO: 1016748 - DNA, 33 bp, Homo sapien
aggaaactgaggattatccagctgatgcaaatt

SEQ ID NO: 1016749 - DNA, 33 bp, Homo sapien
acagacatcgctttgacatatttctttcaattc

SEQ ID NO: 1016750 - DNA, 33 bp, Homo sapien
acagacatcgctttgagatatttctttcaattc

SEQ ID NO: 1016751 - DNA, 33 bp, Homo sapien
agctgatggagcaaaagctggaaatagtacttt

SEQ ID NO: 1016752 - DNA, 33 bp, Homo sapien
agctgatggagcaaaatctggaaatagtacttt

SEQ ID NO: 1016753 - DNA, 33 bp, Homo sapien
tgaaatatgattaatgcactgtaggtgttcttt

SEQ ID NO: 1016754 - DNA, 33 bp, Homo sapien
tgaaatatgattaatgtactgtaggtgttcttt

SEQ ID NO: 1016755 - DNA, 33 bp, Homo sapien
agactagatttgacctcaaggccataattttcc

SEQ ID NO: 1016756 - DNA, 33 bp, Homo sapien
agactagatttgacctgaaggccataattttcc

SEQ ID NO: 1016757 - DNA, 33 bp, Homo sapien
acattcaccacatttcaccatatttccttcttt

SEQ ID NO: 1016758 - DNA, 33 bp, Homo sapien
acattcaccacatttcgccatatttccttcttt

SEQ ID NO: 1016759 - DNA, 33 bp, Homo sapien
ggggtgcataacttaacccttgcctggcgtggc

SEQ ID NO: 1016760 - DNA, 33 bp, Homo sapien
ggggtgcataacttaatccttgcctggcgtggc

SEQ ID NO: 1016761 - DNA, 33 bp, Homo sapien
tcagttgttttgtgtaaactgcaaaagggaaca

SEQ ID NO: 1016762 - DNA, 33 bp, Homo sapien
tcagttgttttgtgtagactgcaaaagggaaca

SEQ ID NO: 1016763 - DNA, 33 bp, Homo sapien
tcacactgaaacctatcagctcacttttctctc

SEQ ID NO: 1016764 - DNA, 33 bp, Homo sapien
tcacactgaaacctattagctcacttttctctc

SEQ ID NO: 1016765 - DNA, 33 bp, Homo sapien
aagatgctaatgactaagctgatgactccagca

SEQ ID NO: 1016766 - DNA, 33 bp, Homo sapien
aagatgctaatgactacgctgatgactccagca

SEQ ID NO: 1016767 - DNA, 33 bp, Homo sapien
cactatcatgaggtcaacatcaataagatagtg

SEQ ID NO: 1016768 - DNA, 33 bp, Homo sapien
cactatcatgaggtcagcatcaataagatagtg

SEQ ID NO: 1016769 - DNA, 33 bp, Homo sapien
atcatcaaaaaataaaacctaactgcctgtgtc

SEQ ID NO: 1016770 - DNA, 33 bp, Homo sapien
atcatcaaaaaataaagcctaactgcctgtgtc

SEQ ID NO: 1016771 - DNA, 33 bp, Homo sapien
attgaaagggtgagtagattgagcattggagaa

SEQ ID NO: 1016772 - DNA, 33 bp, Homo sapien
attgaaagggtgagtatattgagcattggagaa

SEQ ID NO: 1016773 - DNA, 33 bp, Homo sapien
taagtcactcttctaaaagtactctgctaacag

SEQ ID NO: 1016774 - DNA, 33 bp, Homo sapien
taagtcactcttctaacagtactctgctaacag

SEQ ID NO: 1016775 - DNA, 33 bp, Homo sapien
caagccttctgttttgcagaaactggtcatttc

SEQ ID NO: 1016776 - DNA, 33 bp, Homo sapien
caagccttctgttttgtagaaactggtcatttc

SEQ ID NO: 1016777 - DNA, 33 bp, Homo sapien
aacctggttggtaaaactagactaattatctgg

SEQ ID NO: 1016778 - DNA, 33 bp, Homo sapien
aacctggttggtaaaattagactaattatctgg

SEQ ID NO: 1016779 - DNA, 33 bp, Homo sapien
gatatctgctcttctacgtatgtggcaagcagg

SEQ ID NO: 1016780 - DNA, 33 bp, Homo sapien
gatatctgctcttctatgtatgtggcaagcagg

SEQ ID NO: 1016781 - DNA, 33 bp, Homo sapien
attgtagaaataaagaaataaatgaacgacttt

SEQ ID NO: 1016782 - DNA, 33 bp, Homo sapien
attgtagaaataaagagataaatgaacgacttt

SEQ ID NO: 1016783 - DNA, 33 bp, Homo sapien
aataaagtgcataggacgtaacatttttgagat

SEQ ID NO: 1016784 - DNA, 33 bp, Homo sapien
aataaagtgcataggatgtaacatttttgagat

SEQ ID NO: 1016785 - DNA, 33 bp, Homo sapien
tagtatcgtgggtacacaagagaatgcctttaa

SEQ ID NO: 1016786 - DNA, 33 bp, Homo sapien
tagtatcgtgggtacataagagaatgcctttaa

SEQ ID NO: 1016787 - DNA, 33 bp, Homo sapien
caaggatggaagtataagctcttcacttagtat

SEQ ID NO: 1016788 - DNA, 33 bp, Homo sapien
caaggatggaagtataggctcttcacttagtat

SEQ ID NO: 1016789 - DNA, 33 bp, Homo sapien
tccgaagcaaaccataaactctctgtggaagag

SEQ ID NO: 1016790 - DNA, 33 bp, Homo sapien
tccgaagcaaaccatagactctctgtggaagag

SEQ ID NO: 1016791 - DNA, 33 bp, Homo sapien
tccactaaggaacaaacgaacgactgcttctga

SEQ ID NO: 1016792 - DNA, 33 bp, Homo sapien
tccactaaggaacaaatgaacgactgcttctga

SEQ ID NO: 1016793 - DNA, 33 bp, Homo sapien
taatcacggctcatggcatagccctgaatctcc

SEQ ID NO: 1016794 - DNA, 33 bp, Homo sapien
taatcacggctcatggtatagccctgaatctcc

SEQ ID NO: 1016795 - DNA, 33 bp, Homo sapien
tcaatgaatataaagtcacagttacacaagcat

SEQ ID NO: 1016796 - DNA, 33 bp, Homo sapien
tcaatgaatataaagttacagttacacaagcat

SEQ ID NO: 1016797 - DNA, 33 bp, Homo sapien
tgtttggcattgtaaactcaggattaaggcttt

SEQ ID NO: 1016798 - DNA, 33 bp, Homo sapien
tgtttggcattgtaaattcaggattaaggcttt

SEQ ID NO: 1016799 - DNA, 33 bp, Homo sapien
caacatttagacttggcagctttggttgtacat

SEQ ID NO: 1016800 - DNA, 33 bp, Homo sapien
caacatttagacttgggagctttggttgtacat

SEQ ID NO: 1016801 - DNA, 33 bp, Homo sapien
ggatgcctgtgatgatgaattttacatgcaaac

SEQ ID NO: 1016802 - DNA, 33 bp, Homo sapien
ggatgcctgtgatgattaattttacatgcaaac

SEQ ID NO: 1016803 - DNA, 33 bp, Homo sapien
tgagaacagaggaaacaattatgaacttgatca

SEQ ID NO: 1016804 - DNA, 33 bp, Homo sapien
tgagaacagaggaaacgattatgaacttgatca

SEQ ID NO: 1016805 - DNA, 33 bp, Homo sapien
cagatgtaattaccaaaaaaggagtgttgaacc

SEQ ID NO: 1016806 - DNA, 33 bp, Homo sapien
cagatgtaattaccaagaaaggagtgttgaacc

SEQ ID NO: 1016807 - DNA, 33 bp, Homo sapien
tgaccacaatggtgcacagaaaaattaactcat

SEQ ID NO: 1016808 - DNA, 33 bp, Homo sapien
tgaccacaatggtgcagagaaaaattaactcat

SEQ ID NO: 1016809 - DNA, 33 bp, Homo sapien
ttcacttcttgtatcacgtttttgaatctcctt

SEQ ID NO: 1016810 - DNA, 33 bp, Homo sapien
ttcacttcttgtatcatgtttttgaatctcctt

SEQ ID NO: 1016811 - DNA, 33 bp, Homo sapien
tttcatagaagcttaacgatgttgttaaaatta

SEQ ID NO: 1016812 - DNA, 33 bp, Homo sapien
tttcatagaagcttaatgatgttgttaaaatta

SEQ ID NO: 1016813 - DNA, 33 bp, Homo sapien
atttgtttatcatttacgtggtggagtctttag

SEQ ID NO: 1016814 - DNA, 33 bp, Homo sapien
atttgtttatcatttatgtggtggagtctttag

SEQ ID NO: 1016815 - DNA, 33 bp, Homo sapien
atgtgactgttacgggaagctgatttttcatac

SEQ ID NO: 1016816 - DNA, 33 bp, Homo sapien
atgtgactgttacgggcagctgatttttcatac

SEQ ID NO: 1016817 - DNA, 33 bp, Homo sapien
agcatgcctgggaaaacaaaggggtaggttggg

SEQ ID NO: 1016818 - DNA, 33 bp, Homo sapien
agcatgcctgggaaaagaaaggggtaggttggg

SEQ ID NO: 1016819 - DNA, 33 bp, Homo sapien
gataccatgttgcaccagagttgaggccgccgc

SEQ ID NO: 1016820 - DNA, 33 bp, Homo sapien
gataccatgttgcaccggagttgaggccgccgc

SEQ ID NO: 1016821 - DNA, 33 bp, Homo sapien
cagcaagtgcaccggacacctcatgtaccatca

SEQ ID NO: 1016822 - DNA, 33 bp, Homo sapien
cagcaagtgcaccggatacctcatgtaccatca

SEQ ID NO: 1016823 - DNA, 33 bp, Homo sapien
gaggaaatgagggttacaggaccaaaatgagac

SEQ ID NO: 1016824 - DNA, 33 bp, Homo sapien
gaggaaatgagggttagaggaccaaaatgagac

SEQ ID NO: 1016825 - DNA, 33 bp, Homo sapien
aattacaatggtagcactaaagatcactgaaca

SEQ ID NO: 1016826 - DNA, 33 bp, Homo sapien
aattacaatggtagcattaaagatcactgaaca

SEQ ID NO: 1016827 - DNA, 33 bp, Homo sapien
gacatatgcataaggacctggaagaaacccctt

SEQ ID NO: 1016828 - DNA, 33 bp, Homo sapien
gacatatgcataaggatctggaagaaacccctt

SEQ ID NO: 1016829 - DNA, 33 bp, Homo sapien
agaatcagatagcaccaacagaatccatccact

SEQ ID NO: 1016830 - DNA, 33 bp, Homo sapien
agaatcagatagcaccgacagaatccatccact

SEQ ID NO: 1016831 - DNA, 33 bp, Homo sapien
agtctcaagataacacaatgtagagagatgccc

SEQ ID NO: 1016832 - DNA, 33 bp, Homo sapien
agtctcaagataacacgatgtagagagatgccc

SEQ ID NO: 1016833 - DNA, 33 bp, Homo sapien
actgctttgtccatgacatttgagggcagggag

SEQ ID NO: 1016834 - DNA, 33 bp, Homo sapien
actgctttgtccatgagatttgagggcagggag

SEQ ID NO: 1016835 - DNA, 33 bp, Homo sapien
caagttcccttaacaaatcccgtcatgtgtctg

SEQ ID NO: 1016836 - DNA, 33 bp, Homo sapien
caagttcccttaacaattcccgtcatgtgtctg

SEQ ID NO: 1016837 - DNA, 33 bp, Homo sapien
ccttggatgaaggacaaatgatacctcctctgg

SEQ ID NO: 1016838 - DNA, 33 bp, Homo sapien
ccttggatgaaggacacatgatacctcctctgg

SEQ ID NO: 1016839 - DNA, 33 bp, Homo sapien
tgaaaatgcaacatataaaactaccaactgtgt

SEQ ID NO: 1016840 - DNA, 33 bp, Homo sapien
tgaaaatgcaacatatgaaactaccaactgtgt

SEQ ID NO: 1016841 - DNA, 33 bp, Homo sapien
ggctccttgttaaaaacttcttattctttgctt

SEQ ID NO: 1016842 - DNA, 33 bp, Homo sapien
ggctccttgttaaaaagttcttattctttgctt

SEQ ID NO: 1016843 - DNA, 33 bp, Homo sapien
gtatcccttttggctacactgctaaaggtagga

SEQ ID NO: 1016844 - DNA, 33 bp, Homo sapien
gtatcccttttggctatactgctaaaggtagga

SEQ ID NO: 1016845 - DNA, 33 bp, Homo sapien
gtgggaggaaaattaacgtgaccttgtaggacc

SEQ ID NO: 1016846 - DNA, 33 bp, Homo sapien
gtgggaggaaaattaatgtgaccttgtaggacc

SEQ ID NO: 1016847 - DNA, 33 bp, Homo sapien
tatatgacaattaggcagcaaaagtggggaagc

SEQ ID NO: 1016848 - DNA, 33 bp, Homo sapien
tatatgacaattaggccgcaaaagtggggaagc

SEQ ID NO: 1016849 - DNA, 33 bp, Homo sapien
gggcagcttgagtatgaattccaggattggtac

SEQ ID NO: 1016850 - DNA, 33 bp, Homo sapien
gggcagcttgagtatgcattccaggattggtac

SEQ ID NO: 1016851 - DNA, 33 bp, Homo sapien
tcctcctacatgattaccaggtttgaatttttg

SEQ ID NO: 1016852 - DNA, 33 bp, Homo sapien
tcctcctacatgattagcaggtttgaatttttg

SEQ ID NO: 1016853 - DNA, 33 bp, Homo sapien
agaagacaggatctgacgggctaagtatcttgc

SEQ ID NO: 1016854 - DNA, 33 bp, Homo sapien
agaagacaggatctgatgggctaagtatcttgc

SEQ ID NO: 1016855 - DNA, 33 bp, Homo sapien
ctgccagtactttagaccatagagagatgattc

SEQ ID NO: 1016856 - DNA, 33 bp, Homo sapien
ctgccagtactttagatcatagagagatgattc

SEQ ID NO: 1016857 - DNA, 33 bp, Homo sapien
gtcttgcgcccgttaccggtacctgtggcgtgt

SEQ ID NO: 1016858 - DNA, 33 bp, Homo sapien
gtcttgcgcccgttactggtacctgtggcgtgt

SEQ ID NO: 1016859 - DNA, 33 bp, Homo sapien
tcctgtgtgtaggaccaaggtttatgaggaaga

SEQ ID NO: 1016860 - DNA, 33 bp, Homo sapien
tcctgtgtgtaggacccaggtttatgaggaaga

SEQ ID NO: 1016861 - DNA, 33 bp, Homo sapien
tttggttttctttgtaggcagggtacgagggag

SEQ ID NO: 1016862 - DNA, 33 bp, Homo sapien
tttggttttctttgtatgcagggtacgagggag

SEQ ID NO: 1016863 - DNA, 33 bp, Homo sapien
aaccaaaatccaaaccagagcttgacccaaaag

SEQ ID NO: 1016864 - DNA, 33 bp, Homo sapien
aaccaaaatccaaacctgagcttgacccaaaag

SEQ ID NO: 1016865 - DNA, 33 bp, Homo sapien
ttcattgaaaatctaccgcatgtaagatactgt

SEQ ID NO: 1016866 - DNA, 33 bp, Homo sapien
ttcattgaaaatctactgcatgtaagatactgt

SEQ ID NO: 1016867 - DNA, 33 bp, Homo sapien
cttgcagagatacttaggcttttgttaagaatt

SEQ ID NO: 1016868 - DNA, 33 bp, Homo sapien
cttgcagagatacttatgcttttgttaagaatt

SEQ ID NO: 1016869 - DNA, 33 bp, Homo sapien
ttatctgtgctttaaactgagaagtgaagcata

SEQ ID NO: 1016870 - DNA, 33 bp, Homo sapien
ttatctgtgctttaaattgagaagtgaagcata

SEQ ID NO: 1016871 - DNA, 33 bp, Homo sapien
agtttctgatattgagccaaaatgtttaggtca

SEQ ID NO: 1016872 - DNA, 33 bp, Homo sapien
agtttctgatattgagtcaaaatgtttaggtca

SEQ ID NO: 1016873 - DNA, 33 bp, Homo sapien
tttctacctgccttcacagcataggatgatgcc

SEQ ID NO: 1016874 - DNA, 33 bp, Homo sapien
tttctacctgccttcatagcataggatgatgcc

SEQ ID NO: 1016875 - DNA, 33 bp, Homo sapien
acttattgcttgttgacggaactgctcagatac

SEQ ID NO: 1016876 - DNA, 33 bp, Homo sapien
acttattgcttgttgatggaactgctcagatac

SEQ ID NO: 1016877 - DNA, 33 bp, Homo sapien
gagcagcaggattcgaagagattgagcaagatc

SEQ ID NO: 1016878 - DNA, 33 bp, Homo sapien
gagcagcaggattcgatgagattgagcaagatc

SEQ ID NO: 1016879 - DNA, 33 bp, Homo sapien
gtcacaaaacacagggaaagtaacacctaattc

SEQ ID NO: 1016880 - DNA, 33 bp, Homo sapien
gtcacaaaacacaggggaagtaacacctaattc

SEQ ID NO: 1016881 - DNA, 33 bp, Homo sapien
gagcttcatgcctttccatgggacccatgttca

SEQ ID NO: 1016882 - DNA, 33 bp, Homo sapien
gagcttcatgcctttctatgggacccatgttca

SEQ ID NO: 1016883 - DNA, 33 bp, Homo sapien
aaggctaaaatgaaaaagatggtaagaagtact

SEQ ID NO: 1016884 - DNA, 33 bp, Homo sapien
aaggctaaaatgaaaacgatggtaagaagtact

SEQ ID NO: 1016885 - DNA, 33 bp, Homo sapien
gaggtttgacatcacaatgggccccaggacagc

SEQ ID NO: 1016886 - DNA, 33 bp, Homo sapien
gaggtttgacatcacagtgggccccaggacagc

SEQ ID NO: 1016887 - DNA, 33 bp, Homo sapien
ctttgctttccacggacggcaaaaaaatatgag

SEQ ID NO: 1016888 - DNA, 33 bp, Homo sapien
ctttgctttccacggatggcaaaaaaatatgag

SEQ ID NO: 1016889 - DNA, 33 bp, Homo sapien
aaaaatatgagtcaaaagttttatatccagcca

SEQ ID NO: 1016890 - DNA, 33 bp, Homo sapien
aaaaatatgagtcaaaggttttatatccagcca

SEQ ID NO: 1016891 - DNA, 33 bp, Homo sapien
gcagcattttaggctacaggttgccagagtttg

SEQ ID NO: 1016892 - DNA, 33 bp, Homo sapien
gcagcattttaggctagaggttgccagagtttg

SEQ ID NO: 1016893 - DNA, 33 bp, Homo sapien
tagatacatggagataagtggaaaagagtctct

SEQ ID NO: 1016894 - DNA, 33 bp, Homo sapien
tagatacatggagatacgtggaaaagagtctct

SEQ ID NO: 1016895 - DNA, 33 bp, Homo sapien
actgagcaaatgaataaatgggtggatttatga

SEQ ID NO: 1016896 - DNA, 33 bp, Homo sapien
actgagcaaatgaatacatgggtggatttatga

SEQ ID NO: 1016897 - DNA, 33 bp, Homo sapien
aattcacttcgtgttcacgtaacatagagaaca

SEQ ID NO: 1016898 - DNA, 33 bp, Homo sapien
aattcacttcgtgttcgcgtaacatagagaaca

SEQ ID NO: 1016899 - DNA, 33 bp, Homo sapien
tcatttatgactgcaaaatctctagccttggaa

SEQ ID NO: 1016900 - DNA, 33 bp, Homo sapien
tcatttatgactgcaatatctctagccttggaa

SEQ ID NO: 1016901 - DNA, 33 bp, Homo sapien
catctatatctatttcgaggtctatcaatacat

SEQ ID NO: 1016902 - DNA, 33 bp, Homo sapien
catctatatctatttctaggtctatcaatacat

SEQ ID NO: 1016903 - DNA, 33 bp, Homo sapien
gtacagatggagggacagatgagacagctgccc

SEQ ID NO: 1016904 - DNA, 33 bp, Homo sapien
gtacagatggagggacggatgagacagctgccc

SEQ ID NO: 1016905 - DNA, 33 bp, Homo sapien
aaaagatattacaaaggctacagaagaacagtc

SEQ ID NO: 1016906 - DNA, 33 bp, Homo sapien
aaaagatattacaaagtctacagaagaacagtc

SEQ ID NO: 1016907 - DNA, 33 bp, Homo sapien
ttgcagaaaagagttcaaatgctcacatgtgtc

SEQ ID NO: 1016908 - DNA, 33 bp, Homo sapien
ttgcagaaaagagttcgaatgctcacatgtgtc

SEQ ID NO: 1016909 - DNA, 33 bp, Homo sapien
tttcaacagaatatccaagataactagatagcc

SEQ ID NO: 1016910 - DNA, 33 bp, Homo sapien
tttcaacagaatatccgagataactagatagcc

SEQ ID NO: 1016911 - DNA, 33 bp, Homo sapien
tgactgcaaatgggaacgaggttattttggggg

SEQ ID NO: 1016912 - DNA, 33 bp, Homo sapien
tgactgcaaatgggaatgaggttattttggggg

SEQ ID NO: 1016913 - DNA, 33 bp, Homo sapien
ggagagctttccatagcaatatacgtggatcaa

SEQ ID NO: 1016914 - DNA, 33 bp, Homo sapien
ggagagctttccatagtaatatacgtggatcaa

SEQ ID NO: 1016915 - DNA, 33 bp, Homo sapien
ttaagaaaacagcataacatggagtaaatgtaa

SEQ ID NO: 1016916 - DNA, 33 bp, Homo sapien
ttaagaaaacagcatagcatggagtaaatgtaa

SEQ ID NO: 1016917 - DNA, 33 bp, Homo sapien
aattagtccaaaattagaaaattaagctggaag

SEQ ID NO: 1016918 - DNA, 33 bp, Homo sapien
aattagtccaaaattataaaattaagctggaag

SEQ ID NO: 1016919 - DNA, 33 bp, Homo sapien
ccccagctgtctccacaatcctattattcgtca

SEQ ID NO: 1016920 - DNA, 33 bp, Homo sapien
ccccagctgtctccacgatcctattattcgtca

SEQ ID NO: 1016921 - DNA, 33 bp, Homo sapien
acattgctgtttataacgagctgagctgacaac

SEQ ID NO: 1016922 - DNA, 33 bp, Homo sapien
acattgctgtttataatgagctgagctgacaac

SEQ ID NO: 1016923 - DNA, 33 bp, Homo sapien
tgcactgtgagtgacaactacgtatacagctga

SEQ ID NO: 1016924 - DNA, 33 bp, Homo sapien
tgcactgtgagtgacagctacgtatacagctga

SEQ ID NO: 1016925 - DNA, 33 bp, Homo sapien
atctgcaagcgcagagcctaatatatagtaggt

SEQ ID NO: 1016926 - DNA, 33 bp, Homo sapien
atctgcaagcgcagaggctaatatatagtaggt

SEQ ID NO: 1016927 - DNA, 33 bp, Homo sapien
ttattgccattcaacactctcaccctcttctat

SEQ ID NO: 1016928 - DNA, 33 bp, Homo sapien
ttattgccattcaacattctcaccctcttctat

SEQ ID NO: 1016929 - DNA, 33 bp, Homo sapien
tagaaaagtgagatgacaccatgcttggaaatt

SEQ ID NO: 1016930 - DNA, 33 bp, Homo sapien
tagaaaagtgagatgataccatgcttggaaatt

SEQ ID NO: 1016931 - DNA, 33 bp, Homo sapien
cctttaggacagaggccgcaaagtggtagcgct

SEQ ID NO: 1016932 - DNA, 33 bp, Homo sapien
cctttaggacagaggctgcaaagtggtagcgct

SEQ ID NO: 1016933 - DNA, 33 bp, Homo sapien
aggaccagcagatggaaagctcagtgtgacacg

SEQ ID NO: 1016934 - DNA, 33 bp, Homo sapien
aggaccagcagatggacagctcagtgtgacacg

SEQ ID NO: 1016935 - DNA, 33 bp, Homo sapien
cacatcaatagaacccacatgacaggtgactaa

SEQ ID NO: 1016936 - DNA, 33 bp, Homo sapien
cacatcaatagaacccgcatgacaggtgactaa

SEQ ID NO: 1016937 - DNA, 33 bp, Homo sapien
cttcctactaagatacccagttctccttgtagt

SEQ ID NO: 1016938 - DNA, 33 bp, Homo sapien
cttcctactaagatacgcagttctccttgtagt

SEQ ID NO: 1016939 - DNA, 33 bp, Homo sapien
cagggacaacacagccaaaatggagaggaccgc

SEQ ID NO: 1016940 - DNA, 33 bp, Homo sapien
cagggacaacacagccgaaatggagaggaccgc

SEQ ID NO: 1016941 - DNA, 33 bp, Homo sapien
acaaactagacatcaaagggtaggtaaccaagg

SEQ ID NO: 1016942 - DNA, 33 bp, Homo sapien
acaaactagacatcaaggggtaggtaaccaagg

SEQ ID NO: 1016943 - DNA, 33 bp, Homo sapien
atggagttttatcttacaactgaggatgaaggg

SEQ ID NO: 1016944 - DNA, 33 bp, Homo sapien
atggagttttatcttataactgaggatgaaggg

SEQ ID NO: 1016945 - DNA, 33 bp, Homo sapien
aagtgtgctaaagggacaaaagtgatacagatg

SEQ ID NO: 1016946 - DNA, 33 bp, Homo sapien
aagtgtgctaaagggagaaaagtgatacagatg

SEQ ID NO: 1016947 - DNA, 33 bp, Homo sapien
aggcagctatagactcccataatcccagcttag

SEQ ID NO: 1016948 - DNA, 33 bp, Homo sapien
aggcagctatagactcgcataatcccagcttag

SEQ ID NO: 1016949 - DNA, 33 bp, Homo sapien
tctcatgatttccagaaatgaaaatgaattgat

SEQ ID NO: 1016950 - DNA, 33 bp, Homo sapien
tctcatgatttccagatatgaaaatgaattgat

SEQ ID NO: 1016951 - DNA, 33 bp, Homo sapien
atggctttgcatttgggacatcgggaaattctg

SEQ ID NO: 1016952 - DNA, 33 bp, Homo sapien
atggctttgcatttggtacatcgggaaattctg

SEQ ID NO: 1016953 - DNA, 33 bp, Homo sapien
tgtctgggatcagccaaactccaatcaaaggga

SEQ ID NO: 1016954 - DNA, 33 bp, Homo sapien
tgtctgggatcagccagactccaatcaaaggga

SEQ ID NO: 1016955 - DNA, 33 bp, Homo sapien
tgctgctgggactctccatttctagcaacacct

SEQ ID NO: 1016956 - DNA, 33 bp, Homo sapien
tgctgctgggactctctatttctagcaacacct

SEQ ID NO: 1016957 - DNA, 33 bp, Homo sapien
ttggataaataagaacagtgatcatacctatac

SEQ ID NO: 1016958 - DNA, 33 bp, Homo sapien
ttggataaataagaacggtgatcatacctatac

SEQ ID NO: 1016959 - DNA, 33 bp, Homo sapien
gaggagaggtgctctaagtggagaagagagaaa

SEQ ID NO: 1016960 - DNA, 33 bp, Homo sapien
gaggagaggtgctctaggtggagaagagagaaa

SEQ ID NO: 1016961 - DNA, 33 bp, Homo sapien
catttctaggtcttccaaattatgaaaattggc

SEQ ID NO: 1016962 - DNA, 33 bp, Homo sapien
catttctaggtcttccgaattatgaaaattggc

SEQ ID NO: 1016963 - DNA, 33 bp, Homo sapien
agaagtgtcccactccaaattccagcagtgccc

SEQ ID NO: 1016964 - DNA, 33 bp, Homo sapien
agaagtgtcccactccgaattccagcagtgccc

SEQ ID NO: 1016965 - DNA, 33 bp, Homo sapien
tacaaatgtttcattacattcatggctctaata

SEQ ID NO: 1016966 - DNA, 33 bp, Homo sapien
tacaaatgtttcattatattcatggctctaata

SEQ ID NO: 1016967 - DNA, 33 bp, Homo sapien
aacagcatcttgaagaagagccgggtaaaatga

SEQ ID NO: 1016968 - DNA, 33 bp, Homo sapien
aacagcatcttgaagaggagccgggtaaaatga

SEQ ID NO: 1016969 - DNA, 33 bp, Homo sapien
accttgctgataaaacagtttgcagtaaaggag

SEQ ID NO: 1016970 - DNA, 33 bp, Homo sapien
accttgctgataaaaccgtttgcagtaaaggag

SEQ ID NO: 1016971 - DNA, 33 bp, Homo sapien
tcgtcgccttcttgtcaccatcttggtttgggt

SEQ ID NO: 1016972 - DNA, 33 bp, Homo sapien
tcgtcgccttcttgtcgccatcttggtttgggt

SEQ ID NO: 1016973 - DNA, 33 bp, Homo sapien
catgggatagtcagaaacacaaaggtaaatgcc

SEQ ID NO: 1016974 - DNA, 33 bp, Homo sapien
catgggatagtcagaagcacaaaggtaaatgcc

SEQ ID NO: 1016975 - DNA, 33 bp, Homo sapien
tctggttttgaatcatcaagatgcaggtgtggt

SEQ ID NO: 1016976 - DNA, 33 bp, Homo sapien
tctggttttgaatcatgaagatgcaggtgtggt

SEQ ID NO: 1016977 - DNA, 33 bp, Homo sapien
agcaatcgtccaaaccaccaagacatgacactt

SEQ ID NO: 1016978 - DNA, 33 bp, Homo sapien
agcaatcgtccaaaccgccaagacatgacactt

SEQ ID NO: 1016979 - DNA, 33 bp, Homo sapien
aaaggctttgtggagaatatggcatttgaacaa

SEQ ID NO: 1016980 - DNA, 33 bp, Homo sapien
aaaggctttgtggagagtatggcatttgaacaa

SEQ ID NO: 1016981 - DNA, 33 bp, Homo sapien
cagcatcgactgccagacacggagagtgagtct

SEQ ID NO: 1016982 - DNA, 33 bp, Homo sapien
cagcatcgactgccaggcacggagagtgagtct

SEQ ID NO: 1016983 - DNA, 33 bp, Homo sapien
ggtgagtgctagtccccgagcaagaccctgtac

SEQ ID NO: 1016984 - DNA, 33 bp, Homo sapien
ggtgagtgctagtccctgagcaagaccctgtac

SEQ ID NO: 1016985 - DNA, 33 bp, Homo sapien
aactgtgctctcttcacctggttttagaaataa

SEQ ID NO: 1016986 - DNA, 33 bp, Homo sapien
aactgtgctctcttcagctggttttagaaataa

SEQ ID NO: 1016987 - DNA, 33 bp, Homo sapien
cctagattcctcagggaccaattctgtgctgat

SEQ ID NO: 1016988 - DNA, 33 bp, Homo sapien
cctagattcctcagggtccaattctgtgctgat

SEQ ID NO: 1016989 - DNA, 33 bp, Homo sapien
aaaaaaggataccagacgctacagaaggaactg

SEQ ID NO: 1016990 - DNA, 33 bp, Homo sapien
aaaaaaggataccagaggctacagaaggaactg

SEQ ID NO: 1016991 - DNA, 33 bp, Homo sapien
taaagaagagtagttacaagtatatgcatgggt

SEQ ID NO: 1016992 - DNA, 33 bp, Homo sapien
taaagaagagtagttagaagtatatgcatgggt

SEQ ID NO: 1016993 - DNA, 33 bp, Homo sapien
ttgtcaaatggacaaactacactaggatgacct

SEQ ID NO: 1016994 - DNA, 33 bp, Homo sapien
ttgtcaaatggacaaattacactaggatgacct

SEQ ID NO: 1016995 - DNA, 33 bp, Homo sapien
agactacaggagctgccgaactgacaccatcta

SEQ ID NO: 1016996 - DNA, 33 bp, Homo sapien
agactacaggagctgctgaactgacaccatcta

SEQ ID NO: 1016997 - DNA, 33 bp, Homo sapien
cagctatcttggtgaaatctaacctagagctat

SEQ ID NO: 1016998 - DNA, 33 bp, Homo sapien
cagctatcttggtgaagtctaacctagagctat

SEQ ID NO: 1016999 - DNA, 33 bp, Homo sapien
atgtaggaagttgggactaaagatatcagcaac

SEQ ID NO: 1017000 - DNA, 33 bp, Homo sapien
atgtaggaagttgggagtaaagatatcagcaac

SEQ ID NO: 1017001 - DNA, 33 bp, Homo sapien
ttgtggagtgtgtggcagaattcctctatagga

SEQ ID NO: 1017002 - DNA, 33 bp, Homo sapien
ttgtggagtgtgtggcggaattcctctatagga

SEQ ID NO: 1017003 - DNA, 33 bp, Homo sapien
atgactaaatctataaagagagaacaaatttga

SEQ ID NO: 1017004 - DNA, 33 bp, Homo sapien
atgactaaatctataaggagagaacaaatttga

SEQ ID NO: 1017005 - DNA, 33 bp, Homo sapien
gctcaggtgacaaataaaactatgactaaatct

SEQ ID NO: 1017006 - DNA, 33 bp, Homo sapien
gctcaggtgacaaatacaactatgactaaatct

SEQ ID NO: 1017007 - DNA, 33 bp, Homo sapien
ttctgtacatctttccagaatatggcacagaga

SEQ ID NO: 1017008 - DNA, 33 bp, Homo sapien
ttctgtacatctttccggaatatggcacagaga

SEQ ID NO: 1017009 - DNA, 33 bp, Homo sapien
ccctgccataagaaacagataaaagctctgctc

SEQ ID NO: 1017010 - DNA, 33 bp, Homo sapien
ccctgccataagaaaccgataaaagctctgctc

SEQ ID NO: 1017011 - DNA, 33 bp, Homo sapien
gtagccctgtatgaacagccattcttgggtctg

SEQ ID NO: 1017012 - DNA, 33 bp, Homo sapien
gtagccctgtatgaactgccattcttgggtctg

SEQ ID NO: 1017013 - DNA, 33 bp, Homo sapien
ttctgctcatggccaaattaaattcctctggct

SEQ ID NO: 1017014 - DNA, 33 bp, Homo sapien
ttctgctcatggccaacttaaattcctctggct

SEQ ID NO: 1017015 - DNA, 33 bp, Homo sapien
cgttatcacatggtaacattttgtgtcaaaaat

SEQ ID NO: 1017016 - DNA, 33 bp, Homo sapien
cgttatcacatggtaatattttgtgtcaaaaat

SEQ ID NO: 1017017 - DNA, 33 bp, Homo sapien
ctctatgaagcctccccgctgggtcaccatgct

SEQ ID NO: 1017018 - DNA, 33 bp, Homo sapien
ctctatgaagcctccctgctgggtcaccatgct

SEQ ID NO: 1017019 - DNA, 33 bp, Homo sapien
cacccttcttcacccaccattctgccctagaac

SEQ ID NO: 1017020 - DNA, 33 bp, Homo sapien
cacccttcttcacccagcattctgccctagaac

SEQ ID NO: 1017021 - DNA, 33 bp, Homo sapien
agtcttttgattccacagtgcttgttacttaca

SEQ ID NO: 1017022 - DNA, 33 bp, Homo sapien
agtcttttgattccacggtgcttgttacttaca

SEQ ID NO: 1017023 - DNA, 33 bp, Homo sapien
agtaaccattacatagaaaaacattgtctttta

SEQ ID NO: 1017024 - DNA, 33 bp, Homo sapien
agtaaccattacataggaaaacattgtctttta

SEQ ID NO: 1017025 - DNA, 33 bp, Homo sapien
catactagaaggtaataaaccaatccctactga

SEQ ID NO: 1017026 - DNA, 33 bp, Homo sapien
catactagaaggtaatcaaccaatccctactga

SEQ ID NO: 1017027 - DNA, 33 bp, Homo sapien
tgggtgacttactggacgtaggctgttagggag

SEQ ID NO: 1017028 - DNA, 33 bp, Homo sapien
tgggtgacttactggatgtaggctgttagggag

SEQ ID NO: 1017029 - DNA, 33 bp, Homo sapien
tattgagagattgctacgcagtgaatgacgagg

SEQ ID NO: 1017030 - DNA, 33 bp, Homo sapien
tattgagagattgctatgcagtgaatgacgagg

SEQ ID NO: 1017031 - DNA, 33 bp, Homo sapien
ccaatttttgtacctacagtgaaggcaggacct

SEQ ID NO: 1017032 - DNA, 33 bp, Homo sapien
ccaatttttgtacctagagtgaaggcaggacct

SEQ ID NO: 1017033 - DNA, 33 bp, Homo sapien
tggctcctttcctgagaaacaaggagcctgggg

SEQ ID NO: 1017034 - DNA, 33 bp, Homo sapien
tggctcctttcctgaggaacaaggagcctgggg

SEQ ID NO: 1017035 - DNA, 33 bp, Homo sapien
tatgtggtgtgaagaacacattttaaagagcca

SEQ ID NO: 1017036 - DNA, 33 bp, Homo sapien
tatgtggtgtgaagaatacattttaaagagcca

SEQ ID NO: 1017037 - DNA, 33 bp, Homo sapien
tctcagatttgtccacactaagcctctagtaat

SEQ ID NO: 1017038 - DNA, 33 bp, Homo sapien
tctcagatttgtccacgctaagcctctagtaat

SEQ ID NO: 1017039 - DNA, 33 bp, Homo sapien
aagagaatctactttacgagagcctaaactatt

SEQ ID NO: 1017040 - DNA, 33 bp, Homo sapien
aagagaatctactttatgagagcctaaactatt

SEQ ID NO: 1017041 - DNA, 33 bp, Homo sapien
catgtagctgaaggaacaatctctgagcttgag

SEQ ID NO: 1017042 - DNA, 33 bp, Homo sapien
catgtagctgaaggaagaatctctgagcttgag

SEQ ID NO: 1017043 - DNA, 33 bp, Homo sapien
attagcctatttcatccaggttattaaatttgt

SEQ ID NO: 1017044 - DNA, 33 bp, Homo sapien
attagcctatttcatctaggttattaaatttgt

SEQ ID NO: 1017045 - DNA, 33 bp, Homo sapien
tggccagaaatgatcaagaccagtgattttacc

SEQ ID NO: 1017046 - DNA, 33 bp, Homo sapien
tggccagaaatgatcaggaccagtgattttacc

SEQ ID NO: 1017047 - DNA, 33 bp, Homo sapien
actgctctgtaggtcaccttaaagtcatgtctt

SEQ ID NO: 1017048 - DNA, 33 bp, Homo sapien
actgctctgtaggtcagcttaaagtcatgtctt

SEQ ID NO: 1017049 - DNA, 33 bp, Homo sapien
agagaatgtggaaaaaaaacagacatattttgc

SEQ ID NO: 1017050 - DNA, 33 bp, Homo sapien
agagaatgtggaaaaacaacagacatattttgc

SEQ ID NO: 1017051 - DNA, 33 bp, Homo sapien
gcttaatgaagcttaactaggtgggcagggtaa

SEQ ID NO: 1017052 - DNA, 33 bp, Homo sapien
gcttaatgaagcttaattaggtgggcagggtaa

SEQ ID NO: 1017053 - DNA, 33 bp, Homo sapien
tggtaacgtggatgaactgtatagtgaagtctg

SEQ ID NO: 1017054 - DNA, 33 bp, Homo sapien
tggtaacgtggatgaattgtatagtgaagtctg

SEQ ID NO: 1017055 - DNA, 33 bp, Homo sapien
ggtttctttccaccaacgagttcttttgatagt

SEQ ID NO: 1017056 - DNA, 33 bp, Homo sapien
ggtttctttccaccaatgagttcttttgatagt

SEQ ID NO: 1017057 - DNA, 33 bp, Homo sapien
ggtagaagccatgaggaaagagcagtgtggcca

SEQ ID NO: 1017058 - DNA, 33 bp, Homo sapien
ggtagaagccatgagggaagagcagtgtggcca

SEQ ID NO: 1017059 - DNA, 33 bp, Homo sapien
atcctcgagtagtgtcccttaggcacctccacc

SEQ ID NO: 1017060 - DNA, 33 bp, Homo sapien
atcctcgagtagtgtctcttaggcacctccacc

SEQ ID NO: 1017061 - DNA, 33 bp, Homo sapien
ggagtgaaataattccacctggtatgcaggaag

SEQ ID NO: 1017062 - DNA, 33 bp, Homo sapien
ggagtgaaataattccccctggtatgcaggaag

SEQ ID NO: 1017063 - DNA, 33 bp, Homo sapien
actggcagcctgtacaaccaatccagctggcat

SEQ ID NO: 1017064 - DNA, 33 bp, Homo sapien
actggcagcctgtacatccaatccagctggcat

SEQ ID NO: 1017065 - DNA, 33 bp, Homo sapien
agtattttgcctaaacagtgttagaaaatatag

SEQ ID NO: 1017066 - DNA, 33 bp, Homo sapien
agtattttgcctaaacggtgttagaaaatatag

SEQ ID NO: 1017067 - DNA, 33 bp, Homo sapien
gctggcatcctttaacagcgcagatttaacttt

SEQ ID NO: 1017068 - DNA, 33 bp, Homo sapien
gctggcatcctttaacggcgcagatttaacttt

SEQ ID NO: 1017069 - DNA, 33 bp, Homo sapien
ggaagcaagtcagtagaaggtacctggcagaga

SEQ ID NO: 1017070 - DNA, 33 bp, Homo sapien
ggaagcaagtcagtaggaggtacctggcagaga

SEQ ID NO: 1017071 - DNA, 33 bp, Homo sapien
atgggggactgttcccaattcagatatgctact

SEQ ID NO: 1017072 - DNA, 33 bp, Homo sapien
atgggggactgttcccgattcagatatgctact

SEQ ID NO: 1017073 - DNA, 33 bp, Homo sapien
cctttcaaagttacaaatctcattttatgtttt

SEQ ID NO: 1017074 - DNA, 33 bp, Homo sapien
cctttcaaagttacaattctcattttatgtttt

SEQ ID NO: 1017075 - DNA, 33 bp, Homo sapien
gaaacaaagcaagcacacttgtatatgcagcat

SEQ ID NO: 1017076 - DNA, 33 bp, Homo sapien
gaaacaaagcaagcacgcttgtatatgcagcat

SEQ ID NO: 1017077 - DNA, 33 bp, Homo sapien
ataagtgtaccaccgacgaatttttataaactg

SEQ ID NO: 1017078 - DNA, 33 bp, Homo sapien
ataagtgtaccaccgatgaatttttataaactg

SEQ ID NO: 1017079 - DNA, 33 bp, Homo sapien
gctagatcctaaacctaacttggcctaattccc

SEQ ID NO: 1017080 - DNA, 33 bp, Homo sapien
gctagatcctaaacctgacttggcctaattccc

SEQ ID NO: 1017081 - DNA, 33 bp, Homo sapien
caggttgttcacagtaaagtgcagacatgtgca

SEQ ID NO: 1017082 - DNA, 33 bp, Homo sapien
caggttgttcacagtacagtgcagacatgtgca

SEQ ID NO: 1017083 - DNA, 33 bp, Homo sapien
attctacaatcttacactgaaagctggctctgc

SEQ ID NO: 1017084 - DNA, 33 bp, Homo sapien
attctacaatcttacattgaaagctggctctgc

SEQ ID NO: 1017085 - DNA, 33 bp, Homo sapien
ctgactccacacttgacacgctttcccctacct

SEQ ID NO: 1017086 - DNA, 33 bp, Homo sapien
ctgactccacacttgatacgctttcccctacct

SEQ ID NO: 1017087 - DNA, 33 bp, Homo sapien
aatacctttgctgtgaaattatggtagggaata

SEQ ID NO: 1017088 - DNA, 33 bp, Homo sapien
aatacctttgctgtgagattatggtagggaata

SEQ ID NO: 1017089 - DNA, 33 bp, Homo sapien
cacaaggcagagtgtacaagagtgggcttggag

SEQ ID NO: 1017090 - DNA, 33 bp, Homo sapien
cacaaggcagagtgtataagagtgggcttggag

SEQ ID NO: 1017091 - DNA, 33 bp, Homo sapien
aaaataatgttgctacaatttgtcctcttagaa

SEQ ID NO: 1017092 - DNA, 33 bp, Homo sapien
aaaataatgttgctacgatttgtcctcttagaa

SEQ ID NO: 1017093 - DNA, 33 bp, Homo sapien
tgctcactcttgaagccagtaatcttttcttag

SEQ ID NO: 1017094 - DNA, 33 bp, Homo sapien
tgctcactcttgaagctagtaatcttttcttag

SEQ ID NO: 1017095 - DNA, 33 bp, Homo sapien
acccacaggacgcccaagcaccaacatcccgga

SEQ ID NO: 1017096 - DNA, 33 bp, Homo sapien
acccacaggacgcccaggcaccaacatcccgga

SEQ ID NO: 1017097 - DNA, 33 bp, Homo sapien
atggttttggatttcaagttttctactcatcag

SEQ ID NO: 1017098 - DNA, 33 bp, Homo sapien
atggttttggatttcatgttttctactcatcag

SEQ ID NO: 1017099 - DNA, 33 bp, Homo sapien
ctcctctcctttataagaactcctttaaacagc

SEQ ID NO: 1017100 - DNA, 33 bp, Homo sapien
ctcctctcctttataataactcctttaaacagc

SEQ ID NO: 1017101 - DNA, 33 bp, Homo sapien
ttagaggtatgacataaatgttctctttcactc

SEQ ID NO: 1017102 - DNA, 33 bp, Homo sapien
ttagaggtatgacatagatgttctctttcactc

SEQ ID NO: 1017103 - DNA, 33 bp, Homo sapien
ggattactgttttcaaaaagtagaaggtctgta

SEQ ID NO: 1017104 - DNA, 33 bp, Homo sapien
ggattactgttttcaagaagtagaaggtctgta

SEQ ID NO: 1017105 - DNA, 33 bp, Homo sapien
tgagaccatctggcacaaaggcttcatctgtga

SEQ ID NO: 1017106 - DNA, 33 bp, Homo sapien
tgagaccatctggcacgaaggcttcatctgtga

SEQ ID NO: 1017107 - DNA, 33 bp, Homo sapien
caggtactgaactcccagctcctctacagcctg

SEQ ID NO: 1017108 - DNA, 33 bp, Homo sapien
caggtactgaactcccggctcctctacagcctg

SEQ ID NO: 1017109 - DNA, 33 bp, Homo sapien
gcacacatatacatgcacacacactttctctct

SEQ ID NO: 1017110 - DNA, 33 bp, Homo sapien
gcacacatatacatgcgcacacactttctctct

SEQ ID NO: 1017111 - DNA, 33 bp, Homo sapien
acctgcaaagaaaagccatccacgattatccac

SEQ ID NO: 1017112 - DNA, 33 bp, Homo sapien
acctgcaaagaaaagctatccacgattatccac

SEQ ID NO: 1017113 - DNA, 33 bp, Homo sapien
gtttcacttccagagccctgcttaggcccgacc

SEQ ID NO: 1017114 - DNA, 33 bp, Homo sapien
gtttcacttccagagcgctgcttaggcccgacc

SEQ ID NO: 1017115 - DNA, 33 bp, Homo sapien
tgtgaagcaatttggacgataccaatacacaca

SEQ ID NO: 1017116 - DNA, 33 bp, Homo sapien
tgtgaagcaatttggatgataccaatacacaca

SEQ ID NO: 1017117 - DNA, 33 bp, Homo sapien
ctttaagggatgtatacgatgtacatgatgaaa

SEQ ID NO: 1017118 - DNA, 33 bp, Homo sapien
ctttaagggatgtatatgatgtacatgatgaaa

SEQ ID NO: 1017119 - DNA, 33 bp, Homo sapien
ttgaaagtgacggtagaaaaattataatgtctt

SEQ ID NO: 1017120 - DNA, 33 bp, Homo sapien
ttgaaagtgacggtaggaaaattataatgtctt

SEQ ID NO: 1017121 - DNA, 33 bp, Homo sapien
ctgtaccacatcaaggaagtaatttgctaccat

SEQ ID NO: 1017122 - DNA, 33 bp, Homo sapien
ctgtaccacatcaaggcagtaatttgctaccat

SEQ ID NO: 1017123 - DNA, 33 bp, Homo sapien
aatattcactgcatagcacagttgaggaaaaag

SEQ ID NO: 1017124 - DNA, 33 bp, Homo sapien
aatattcactgcatagtacagttgaggaaaaag

SEQ ID NO: 1017125 - DNA, 33 bp, Homo sapien
agccatcaggaatccactgatacagtctttcct

SEQ ID NO: 1017126 - DNA, 33 bp, Homo sapien
agccatcaggaatccattgatacagtctttcct

SEQ ID NO: 1017127 - DNA, 33 bp, Homo sapien
tgtgagatgattaaggacaaaatgttaatttgg

SEQ ID NO: 1017128 - DNA, 33 bp, Homo sapien
tgtgagatgattaaggccaaaatgttaatttgg

SEQ ID NO: 1017129 - DNA, 33 bp, Homo sapien
ccacctgccacttgtaaatgccctgtctgtgac

SEQ ID NO: 1017130 - DNA, 33 bp, Homo sapien
ccacctgccacttgtacatgccctgtctgtgac

SEQ ID NO: 1017131 - DNA, 33 bp, Homo sapien
agtattacagaaaaggacagtggatttcgaata

SEQ ID NO: 1017132 - DNA, 33 bp, Homo sapien
agtattacagaaaaggtcagtggatttcgaata

SEQ ID NO: 1017133 - DNA, 33 bp, Homo sapien
aagtatgcattcaacaaagggctaatattcaga

SEQ ID NO: 1017134 - DNA, 33 bp, Homo sapien
aagtatgcattcaacagagggctaatattcaga

SEQ ID NO: 1017135 - DNA, 33 bp, Homo sapien
ttcatgtaaggtgagaataagagccaaagcttg

SEQ ID NO: 1017136 - DNA, 33 bp, Homo sapien
ttcatgtaaggtgagattaagagccaaagcttg

SEQ ID NO: 1017137 - DNA, 33 bp, Homo sapien
tttcaaatctttgaaacggtgagaaacatccca

SEQ ID NO: 1017138 - DNA, 33 bp, Homo sapien
tttcaaatctttgaaatggtgagaaacatccca

SEQ ID NO: 1017139 - DNA, 33 bp, Homo sapien
agactggcctactagaagtggtgttccagtttc

SEQ ID NO: 1017140 - DNA, 33 bp, Homo sapien
agactggcctactagaggtggtgttccagtttc

SEQ ID NO: 1017141 - DNA, 33 bp, Homo sapien
cctatctgattctccccgctttaattcctggcc

SEQ ID NO: 1017142 - DNA, 33 bp, Homo sapien
cctatctgattctccctgctttaattcctggcc

SEQ ID NO: 1017143 - DNA, 33 bp, Homo sapien
agggctacaacgtggacaaaccttgaaacatta

SEQ ID NO: 1017144 - DNA, 33 bp, Homo sapien
agggctacaacgtggagaaaccttgaaacatta

SEQ ID NO: 1017145 - DNA, 33 bp, Homo sapien
gttttccttttaggccaaaaacaagaacaacat

SEQ ID NO: 1017146 - DNA, 33 bp, Homo sapien
gttttccttttaggccgaaaacaagaacaacat

SEQ ID NO: 1017147 - DNA, 33 bp, Homo sapien
agtaagagccaaagaccaagaaccctggctggt

SEQ ID NO: 1017148 - DNA, 33 bp, Homo sapien
agtaagagccaaagacgaagaaccctggctggt

SEQ ID NO: 1017149 - DNA, 33 bp, Homo sapien
gagcgggctttacactaaattctggccctctga

SEQ ID NO: 1017150 - DNA, 33 bp, Homo sapien
gagcgggctttacactgaattctggccctctga

SEQ ID NO: 1017151 - DNA, 33 bp, Homo sapien
ctggtaatatgtttggcaaaaactggtaattca

SEQ ID NO: 1017152 - DNA, 33 bp, Homo sapien
ctggtaatatgtttggtaaaaactggtaattca

SEQ ID NO: 1017153 - DNA, 33 bp, Homo sapien
attgacagtatattcccgatatatccctccagt

SEQ ID NO: 1017154 - DNA, 33 bp, Homo sapien
attgacagtatattcctgatatatccctccagt

SEQ ID NO: 1017155 - DNA, 33 bp, Homo sapien
taagggttcttgaagcaatagcagagtctgaga

SEQ ID NO: 1017156 - DNA, 33 bp, Homo sapien
taagggttcttgaagcgatagcagagtctgaga

SEQ ID NO: 1017157 - DNA, 33 bp, Homo sapien
actgtgatttcaaagacgagctagatggagtct

SEQ ID NO: 1017158 - DNA, 33 bp, Homo sapien
actgtgatttcaaagatgagctagatggagtct

SEQ ID NO: 1017159 - DNA, 33 bp, Homo sapien
cagagcataaaagaaacagacatacacacagat

SEQ ID NO: 1017160 - DNA, 33 bp, Homo sapien
cagagcataaaagaaatagacatacacacagat

SEQ ID NO: 1017161 - DNA, 33 bp, Homo sapien
ctgaataatctagtaaatcttctcctagggctg

SEQ ID NO: 1017162 - DNA, 33 bp, Homo sapien
ctgaataatctagtaagtcttctcctagggctg

SEQ ID NO: 1017163 - DNA, 33 bp, Homo sapien
ccataaactgggtggcgcaaacaacacatgtat

SEQ ID NO: 1017164 - DNA, 33 bp, Homo sapien
ccataaactgggtggctcaaacaacacatgtat

SEQ ID NO: 1017165 - DNA, 33 bp, Homo sapien
gaatcatttacatcaccgaacatacaggctatt

SEQ ID NO: 1017166 - DNA, 33 bp, Homo sapien
gaatcatttacatcactgaacatacaggctatt

SEQ ID NO: 1017167 - DNA, 33 bp, Homo sapien
ggtctgtgaaattgatcaagctgagagaatcta

SEQ ID NO: 1017168 - DNA, 33 bp, Homo sapien
ggtctgtgaaattgattaagctgagagaatcta

SEQ ID NO: 1017169 - DNA, 33 bp, Homo sapien
acaacccataaaacagcatggaaagctccttta

SEQ ID NO: 1017170 - DNA, 33 bp, Homo sapien
acaacccataaaacaggatggaaagctccttta

SEQ ID NO: 1017171 - DNA, 33 bp, Homo sapien
ttctttctgtgtgagacgactccgtagacacaa

SEQ ID NO: 1017172 - DNA, 33 bp, Homo sapien
ttctttctgtgtgagatgactccgtagacacaa

SEQ ID NO: 1017173 - DNA, 33 bp, Homo sapien
ggagacaccaaataaacagtactgaggctccct

SEQ ID NO: 1017174 - DNA, 33 bp, Homo sapien
ggagacaccaaataaagagtactgaggctccct

SEQ ID NO: 1017175 - DNA, 33 bp, Homo sapien
caattgtgaaaattcaatcatgctttccacaaa

SEQ ID NO: 1017176 - DNA, 33 bp, Homo sapien
caattgtgaaaattcagtcatgctttccacaaa

SEQ ID NO: 1017177 - DNA, 33 bp, Homo sapien
gtagtttggaaaaaagcactgccagttggttca

SEQ ID NO: 1017178 - DNA, 33 bp, Homo sapien
gtagtttggaaaaaaggactgccagttggttca

SEQ ID NO: 1017179 - DNA, 33 bp, Homo sapien
cctccatatgaaaagaccacagctttaatgatt

SEQ ID NO: 1017180 - DNA, 33 bp, Homo sapien
cctccatatgaaaagatcacagctttaatgatt

SEQ ID NO: 1017181 - DNA, 33 bp, Homo sapien
ctcccttaactacaagccagatgagcactgttt

SEQ ID NO: 1017182 - DNA, 33 bp, Homo sapien
ctcccttaactacaagtcagatgagcactgttt

SEQ ID NO: 1017183 - DNA, 33 bp, Homo sapien
tgagttggaataactaccaaaatatctggacta

SEQ ID NO: 1017184 - DNA, 33 bp, Homo sapien
tgagttggaataactatcaaaatatctggacta

SEQ ID NO: 1017185 - DNA, 33 bp, Homo sapien
tcaagaaattaaggaacataggtacgaaatgca

SEQ ID NO: 1017186 - DNA, 33 bp, Homo sapien
tcaagaaattaaggaatataggtacgaaatgca

SEQ ID NO: 1017187 - DNA, 33 bp, Homo sapien
ttctttgatttaagcaataagatgataagtcta

SEQ ID NO: 1017188 - DNA, 33 bp, Homo sapien
ttctttgatttaagcagtaagatgataagtcta

SEQ ID NO: 1017189 - DNA, 33 bp, Homo sapien
cctctcaaaatataaaccttcgagagcctaata

SEQ ID NO: 1017190 - DNA, 33 bp, Homo sapien
cctctcaaaatataaatcttcgagagcctaata

SEQ ID NO: 1017191 - DNA, 33 bp, Homo sapien
aggcagggtgggtgaaagttgggagcagtcaag

SEQ ID NO: 1017192 - DNA, 33 bp, Homo sapien
aggcagggtgggtgaaggttgggagcagtcaag

SEQ ID NO: 1017193 - DNA, 33 bp, Homo sapien
ctccctgcctgaatcacgctaggcaatcaaata

SEQ ID NO: 1017194 - DNA, 33 bp, Homo sapien
ctccctgcctgaatcatgctaggcaatcaaata

SEQ ID NO: 1017195 - DNA, 33 bp, Homo sapien
gaggaagggatattaacgtgcggttttaaagga

SEQ ID NO: 1017196 - DNA, 33 bp, Homo sapien
gaggaagggatattaatgtgcggttttaaagga

SEQ ID NO: 1017197 - DNA, 33 bp, Homo sapien
tatgtcatgacagggaaggaaaacctatgacac

SEQ ID NO: 1017198 - DNA, 33 bp, Homo sapien
tatgtcatgacagggagggaaaacctatgacac

SEQ ID NO: 1017199 - DNA, 33 bp, Homo sapien
atcaagaggagacaacggccaggttttgagctt

SEQ ID NO: 1017200 - DNA, 33 bp, Homo sapien
atcaagaggagacaactgccaggttttgagctt

SEQ ID NO: 1017201 - DNA, 33 bp, Homo sapien
ccaaaccttcagcaaccatgaccctgatcagtc

SEQ ID NO: 1017202 - DNA, 33 bp, Homo sapien
ccaaaccttcagcaactatgaccctgatcagtc

SEQ ID NO: 1017203 - DNA, 33 bp, Homo sapien
atctctgtatcccaatcaatacttgttgaataa

SEQ ID NO: 1017204 - DNA, 33 bp, Homo sapien
atctctgtatcccaattaatacttgttgaataa

SEQ ID NO: 1017205 - DNA, 33 bp, Homo sapien
tttctttcttcggcaacgggaagtgtcagagat

SEQ ID NO: 1017206 - DNA, 33 bp, Homo sapien
tttctttcttcggcaaggggaagtgtcagagat

SEQ ID NO: 1017207 - DNA, 33 bp, Homo sapien
ctccactggacttctaccaactctaaaagaata

SEQ ID NO: 1017208 - DNA, 33 bp, Homo sapien
ctccactggacttctagcaactctaaaagaata

SEQ ID NO: 1017209 - DNA, 33 bp, Homo sapien
gtgaaaggaagataagcaggcctgagcaaggac

SEQ ID NO: 1017210 - DNA, 33 bp, Homo sapien
gtgaaaggaagataaggaggcctgagcaaggac

SEQ ID NO: 1017211 - DNA, 33 bp, Homo sapien
ctaaaagcaggagttgaaaataatagagggtaa

SEQ ID NO: 1017212 - DNA, 33 bp, Homo sapien
ctaaaagcaggagttgcaaataatagagggtaa

SEQ ID NO: 1017213 - DNA, 33 bp, Homo sapien
ctcccctgattaccaaaacctgatgtcctgctc

SEQ ID NO: 1017214 - DNA, 33 bp, Homo sapien
ctcccctgattaccaagacctgatgtcctgctc

SEQ ID NO: 1017215 - DNA, 33 bp, Homo sapien
tatatgccaattactacactaggtgctggagat

SEQ ID NO: 1017216 - DNA, 33 bp, Homo sapien
tatatgccaattactatactaggtgctggagat

SEQ ID NO: 1017217 - DNA, 33 bp, Homo sapien
agagacaaagctaaaaggcatacaagaatgacc

SEQ ID NO: 1017218 - DNA, 33 bp, Homo sapien
agagacaaagctaaaatgcatacaagaatgacc

SEQ ID NO: 1017219 - DNA, 33 bp, Homo sapien
gaaaaaaattgatgaaaggaaactctcatggaa

SEQ ID NO: 1017220 - DNA, 33 bp, Homo sapien
gaaaaaaattgatgaagggaaactctcatggaa

SEQ ID NO: 1017221 - DNA, 33 bp, Homo sapien
tgagactaaagagatacgataactcaaagtaat

SEQ ID NO: 1017222 - DNA, 33 bp, Homo sapien
tgagactaaagagatatgataactcaaagtaat

SEQ ID NO: 1017223 - DNA, 33 bp, Homo sapien
tctccagctacctctacgaacacttacggccat

SEQ ID NO: 1017224 - DNA, 33 bp, Homo sapien
tctccagctacctctatgaacacttacggccat

SEQ ID NO: 1017225 - DNA, 33 bp, Homo sapien
ctgaagaaaggtatcacagtggagaacacaaac

SEQ ID NO: 1017226 - DNA, 33 bp, Homo sapien
ctgaagaaaggtatcatagtggagaacacaaac

SEQ ID NO: 1017227 - DNA, 33 bp, Homo sapien
ctgaacaatggttaacaatcttcctgagaaata

SEQ ID NO: 1017228 - DNA, 33 bp, Homo sapien
ctgaacaatggttaacgatcttcctgagaaata

SEQ ID NO: 1017229 - DNA, 33 bp, Homo sapien
tgatcctatgtattcaacctcttatgatctgaa

SEQ ID NO: 1017230 - DNA, 33 bp, Homo sapien
tgatcctatgtattcagcctcttatgatctgaa

SEQ ID NO: 1017231 - DNA, 33 bp, Homo sapien
tctcaccagttttcaacctcatttatgataaat

SEQ ID NO: 1017232 - DNA, 33 bp, Homo sapien
tctcaccagttttcaatctcatttatgataaat

SEQ ID NO: 1017233 - DNA, 33 bp, Homo sapien
acagagcactgtcctagctcattggcaggagta

SEQ ID NO: 1017234 - DNA, 33 bp, Homo sapien
acagagcactgtcctatctcattggcaggagta

SEQ ID NO: 1017235 - DNA, 33 bp, Homo sapien
ccaagttcttccttaactatggtcacattttta

SEQ ID NO: 1017236 - DNA, 33 bp, Homo sapien
ccaagttcttccttaagtatggtcacattttta

SEQ ID NO: 1017237 - DNA, 33 bp, Homo sapien
tacacatggtggttaaatctgttttgccatagg

SEQ ID NO: 1017238 - DNA, 33 bp, Homo sapien
tacacatggtggttaattctgttttgccatagg

SEQ ID NO: 1017239 - DNA, 33 bp, Homo sapien
tatagtgaaaattacaccgtatacacaatcaca

SEQ ID NO: 1017240 - DNA, 33 bp, Homo sapien
tatagtgaaaattacatcgtatacacaatcaca

SEQ ID NO: 1017241 - DNA, 33 bp, Homo sapien
ctgatagtcttcccaaacttagagattaaacac

SEQ ID NO: 1017242 - DNA, 33 bp, Homo sapien
ctgatagtcttcccaagcttagagattaaacac

SEQ ID NO: 1017243 - DNA, 33 bp, Homo sapien
cattttggtagtggacacaagaacatctgttgc

SEQ ID NO: 1017244 - DNA, 33 bp, Homo sapien
cattttggtagtggacgcaagaacatctgttgc

SEQ ID NO: 1017245 - DNA, 33 bp, Homo sapien
agagaaaatgaggacacatgctattgttgcgat

SEQ ID NO: 1017246 - DNA, 33 bp, Homo sapien
agagaaaatgaggacatatgctattgttgcgat

SEQ ID NO: 1017247 - DNA, 33 bp, Homo sapien
ccacaatcctgtggctcaaggaagtaagatttt

SEQ ID NO: 1017248 - DNA, 33 bp, Homo sapien
ccacaatcctgtggcttaaggaagtaagatttt

SEQ ID NO: 1017249 - DNA, 33 bp, Homo sapien
tgggcgatggtgaataaaaaaagctgattagag

SEQ ID NO: 1017250 - DNA, 33 bp, Homo sapien
tgggcgatggtgaatagaaaaagctgattagag

SEQ ID NO: 1017251 - DNA, 33 bp, Homo sapien
aatttactgtgagaaacatacctgtcatgagga

SEQ ID NO: 1017252 - DNA, 33 bp, Homo sapien
aatttactgtgagaaatatacctgtcatgagga

SEQ ID NO: 1017253 - DNA, 33 bp, Homo sapien
tttactgggtcacagaacacctccatagcttgg

SEQ ID NO: 1017254 - DNA, 33 bp, Homo sapien
tttactgggtcacagagcacctccatagcttgg

SEQ ID NO: 1017255 - DNA, 33 bp, Homo sapien
tttagcagcactctccaaattttcacgaataag

SEQ ID NO: 1017256 - DNA, 33 bp, Homo sapien
tttagcagcactctccgaattttcacgaataag

SEQ ID NO: 1017257 - DNA, 33 bp, Homo sapien
gttcgcagtgtcacccaagagtcagaactgtac

SEQ ID NO: 1017258 - DNA, 33 bp, Homo sapien
gttcgcagtgtcaccccagagtcagaactgtac

SEQ ID NO: 1017259 - DNA, 33 bp, Homo sapien
acatggtcactaggaaactcttgggcctcactt

SEQ ID NO: 1017260 - DNA, 33 bp, Homo sapien
acatggtcactaggaagctcttgggcctcactt

SEQ ID NO: 1017261 - DNA, 33 bp, Homo sapien
atgctgttatcctaacaagaatcttcacaacac

SEQ ID NO: 1017262 - DNA, 33 bp, Homo sapien
atgctgttatcctaaccagaatcttcacaacac

SEQ ID NO: 1017263 - DNA, 33 bp, Homo sapien
ggaagcaaaccacttacagaaagagaggcacca

SEQ ID NO: 1017264 - DNA, 33 bp, Homo sapien
ggaagcaaaccacttagagaaagagaggcacca

SEQ ID NO: 1017265 - DNA, 33 bp, Homo sapien
ctcttctgctgtgagaaactctaatcatgtaag

SEQ ID NO: 1017266 - DNA, 33 bp, Homo sapien
ctcttctgctgtgagagactctaatcatgtaag

SEQ ID NO: 1017267 - DNA, 33 bp, Homo sapien
ttccagaagctgttggaacttggacaagagtgg

SEQ ID NO: 1017268 - DNA, 33 bp, Homo sapien
ttccagaagctgttgggacttggacaagagtgg

SEQ ID NO: 1017269 - DNA, 33 bp, Homo sapien
gttactgtttcatgcaacccactcggcctagtt

SEQ ID NO: 1017270 - DNA, 33 bp, Homo sapien
gttactgtttcatgcagcccactcggcctagtt

SEQ ID NO: 1017271 - DNA, 33 bp, Homo sapien
attggacattacctaaaggacttctaagagaga

SEQ ID NO: 1017272 - DNA, 33 bp, Homo sapien
attggacattacctaagggacttctaagagaga

SEQ ID NO: 1017273 - DNA, 33 bp, Homo sapien
cctggtaatgttcacacgtcctcaaatcaaccc

SEQ ID NO: 1017274 - DNA, 33 bp, Homo sapien
cctggtaatgttcacatgtcctcaaatcaaccc

SEQ ID NO: 1017275 - DNA, 33 bp, Homo sapien
acattgttctgggaaacgccattttttctgctc

SEQ ID NO: 1017276 - DNA, 33 bp, Homo sapien
acattgttctgggaaatgccattttttctgctc

SEQ ID NO: 1017277 - DNA, 33 bp, Homo sapien
aagttgttatgactcacactctgtctatagtaa

SEQ ID NO: 1017278 - DNA, 33 bp, Homo sapien
aagttgttatgactcatactctgtctatagtaa

SEQ ID NO: 1017279 - DNA, 33 bp, Homo sapien
acacatatggatcagacgagcagtgagaaactt

SEQ ID NO: 1017280 - DNA, 33 bp, Homo sapien
acacatatggatcagatgagcagtgagaaactt

SEQ ID NO: 1017281 - DNA, 33 bp, Homo sapien
ggagtgatttcacagacacctggcacttacagc

SEQ ID NO: 1017282 - DNA, 33 bp, Homo sapien
ggagtgatttcacagatacctggcacttacagc

SEQ ID NO: 1017283 - DNA, 33 bp, Homo sapien
ggctatattatttgcacccagtcctgcagcgcc

SEQ ID NO: 1017284 - DNA, 33 bp, Homo sapien
ggctatattatttgcatccagtcctgcagcgcc

SEQ ID NO: 1017285 - DNA, 33 bp, Homo sapien
atggatgcagatgagagaagtaagttagtaaga

SEQ ID NO: 1017286 - DNA, 33 bp, Homo sapien
atggatgcagatgagataagtaagttagtaaga

SEQ ID NO: 1017287 - DNA, 33 bp, Homo sapien
cttatttgaccacgagacatgtttttccattaa

SEQ ID NO: 1017288 - DNA, 33 bp, Homo sapien
cttatttgaccacgagtcatgtttttccattaa

SEQ ID NO: 1017289 - DNA, 33 bp, Homo sapien
gtctgcaagggcttcaatctaacaaatctaaca

SEQ ID NO: 1017290 - DNA, 33 bp, Homo sapien
gtctgcaagggcttcagtctaacaaatctaaca

SEQ ID NO: 1017291 - DNA, 33 bp, Homo sapien
tcagtaatgaaagagggactatccctacaccaa

SEQ ID NO: 1017292 - DNA, 33 bp, Homo sapien
tcagtaatgaaagaggtactatccctacaccaa

SEQ ID NO: 1017293 - DNA, 33 bp, Homo sapien
tatcccagaagagaaacatgaggttcagagaga

SEQ ID NO: 1017294 - DNA, 33 bp, Homo sapien
tatcccagaagagaaatatgaggttcagagaga

SEQ ID NO: 1017295 - DNA, 33 bp, Homo sapien
attacagtgctgtgaaccaaaactttaagactc

SEQ ID NO: 1017296 - DNA, 33 bp, Homo sapien
attacagtgctgtgaatcaaaactttaagactc

SEQ ID NO: 1017297 - DNA, 33 bp, Homo sapien
tttttctggctgtatacaatgccctgggccctc

SEQ ID NO: 1017298 - DNA, 33 bp, Homo sapien
tttttctggctgtatataatgccctgggccctc

SEQ ID NO: 1017299 - DNA, 33 bp, Homo sapien
ctttttcacaggcagccaaagggagtaagttgg

SEQ ID NO: 1017300 - DNA, 33 bp, Homo sapien
ctttttcacaggcagctaaagggagtaagttgg

SEQ ID NO: 1017301 - DNA, 33 bp, Homo sapien
ctatggggccaaactacagcctcagctggcagg

SEQ ID NO: 1017302 - DNA, 33 bp, Homo sapien
ctatggggccaaactatagcctcagctggcagg

SEQ ID NO: 1017303 - DNA, 33 bp, Homo sapien
accaatgaggcatcaacaatggtttcctgaata

SEQ ID NO: 1017304 - DNA, 33 bp, Homo sapien
accaatgaggcatcaataatggtttcctgaata

SEQ ID NO: 1017305 - DNA, 33 bp, Homo sapien
ttgaacttctaagggcagcaaattgtgggacgg

SEQ ID NO: 1017306 - DNA, 33 bp, Homo sapien
ttgaacttctaagggctgcaaattgtgggacgg

SEQ ID NO: 1017307 - DNA, 33 bp, Homo sapien
tctagggaaactgaacaaccctcaacggtcccc

SEQ ID NO: 1017308 - DNA, 33 bp, Homo sapien
tctagggaaactgaacgaccctcaacggtcccc

SEQ ID NO: 1017309 - DNA, 33 bp, Homo sapien
gtgtggagcagcccaaagggaaggacttaacag

SEQ ID NO: 1017310 - DNA, 33 bp, Homo sapien
gtgtggagcagcccaacgggaaggacttaacag

SEQ ID NO: 1017311 - DNA, 33 bp, Homo sapien
tccagtgttttaaatcaaaatatagcagccaca

SEQ ID NO: 1017312 - DNA, 33 bp, Homo sapien
tccagtgttttaaatccaaatatagcagccaca

SEQ ID NO: 1017313 - DNA, 33 bp, Homo sapien
gctcaactcttatcaaccctgaaggctttctgt

SEQ ID NO: 1017314 - DNA, 33 bp, Homo sapien
gctcaactcttatcaatcctgaaggctttctgt

SEQ ID NO: 1017315 - DNA, 33 bp, Homo sapien
aaggtaaagcttcagaataacttcttgtttccc

SEQ ID NO: 1017316 - DNA, 33 bp, Homo sapien
aaggtaaagcttcagagtaacttcttgtttccc

SEQ ID NO: 1017317 - DNA, 33 bp, Homo sapien
aatatggaatagttataaatcagtgaattgatg

SEQ ID NO: 1017318 - DNA, 33 bp, Homo sapien
aatatggaatagttatcaatcagtgaattgatg

SEQ ID NO: 1017319 - DNA, 33 bp, Homo sapien
tttgtccctccagatacgtgctccttccctttc

SEQ ID NO: 1017320 - DNA, 33 bp, Homo sapien
tttgtccctccagatatgtgctccttccctttc

SEQ ID NO: 1017321 - DNA, 33 bp, Homo sapien
gtcttacctgaccacacaatctgaaataggttc

SEQ ID NO: 1017322 - DNA, 33 bp, Homo sapien
gtcttacctgaccacataatctgaaataggttc

SEQ ID NO: 1017323 - DNA, 33 bp, Homo sapien
cgctggatactggagaagtttatctatagaacc

SEQ ID NO: 1017324 - DNA, 33 bp, Homo sapien
cgctggatactggagaggtttatctatagaacc

SEQ ID NO: 1017325 - DNA, 33 bp, Homo sapien
ttagcatcaggttcccacaaagacagatggctt

SEQ ID NO: 1017326 - DNA, 33 bp, Homo sapien
ttagcatcaggttcccgcaaagacagatggctt

SEQ ID NO: 1017327 - DNA, 33 bp, Homo sapien
aaggagcaacaatacaaactgcagcgatgggtg

SEQ ID NO: 1017328 - DNA, 33 bp, Homo sapien
aaggagcaacaatacagactgcagcgatgggtg

SEQ ID NO: 1017329 - DNA, 33 bp, Homo sapien
tgggttacctgggtgaacttgggccataaagtt

SEQ ID NO: 1017330 - DNA, 33 bp, Homo sapien
tgggttacctgggtgagcttgggccataaagtt

SEQ ID NO: 1017331 - DNA, 33 bp, Homo sapien
gggaactccttgtgcgaatctaaggacccctcc

SEQ ID NO: 1017332 - DNA, 33 bp, Homo sapien
gggaactccttgtgcggatctaaggacccctcc

SEQ ID NO: 1017333 - DNA, 33 bp, Homo sapien
accttggatatggaaaagaaacatcatgaaaag

SEQ ID NO: 1017334 - DNA, 33 bp, Homo sapien
accttggatatggaaaggaaacatcatgaaaag

SEQ ID NO: 1017335 - DNA, 33 bp, Homo sapien
gaggtatggctgcagaccgcttttcccaacttt

SEQ ID NO: 1017336 - DNA, 33 bp, Homo sapien
gaggtatggctgcagatcgcttttcccaacttt

SEQ ID NO: 1017337 - DNA, 33 bp, Homo sapien
caactaaagttactcaatcacaatgactcaagc

SEQ ID NO: 1017338 - DNA, 33 bp, Homo sapien
caactaaagttactcagtcacaatgactcaagc

SEQ ID NO: 1017339 - DNA, 33 bp, Homo sapien
atatgagaggtggtgaagaggtgaaatcagtaa

SEQ ID NO: 1017340 - DNA, 33 bp, Homo sapien
atatgagaggtggtgaggaggtgaaatcagtaa

SEQ ID NO: 1017341 - DNA, 33 bp, Homo sapien
cttgagcaggaatctacaaaatgctgtggtgag

SEQ ID NO: 1017342 - DNA, 33 bp, Homo sapien
cttgagcaggaatctataaaatgctgtggtgag

SEQ ID NO: 1017343 - DNA, 33 bp, Homo sapien
agggtggcagccttacccctttgccagagacac

SEQ ID NO: 1017344 - DNA, 33 bp, Homo sapien
agggtggcagccttactcctttgccagagacac

SEQ ID NO: 1017345 - DNA, 33 bp, Homo sapien
aggacaaagtctagaaaccaacaacccagccag

SEQ ID NO: 1017346 - DNA, 33 bp, Homo sapien
aggacaaagtctagaacccaacaacccagccag

SEQ ID NO: 1017347 - DNA, 33 bp, Homo sapien
gggcttgttttggttacatttatcagcaggaac

SEQ ID NO: 1017348 - DNA, 33 bp, Homo sapien
gggcttgttttggttatatttatcagcaggaac

SEQ ID NO: 1017349 - DNA, 33 bp, Homo sapien
cagcctccaattgagcgctcctgtttaatgtga

SEQ ID NO: 1017350 - DNA, 33 bp, Homo sapien
cagcctccaattgagctctcctgtttaatgtga

SEQ ID NO: 1017351 - DNA, 33 bp, Homo sapien
cttgccacaaagagaaatgaataatttgggata

SEQ ID NO: 1017352 - DNA, 33 bp, Homo sapien
cttgccacaaagagaagtgaataatttgggata

SEQ ID NO: 1017353 - DNA, 33 bp, Homo sapien
accttcgactggaaagaaaggttcagactaaag

SEQ ID NO: 1017354 - DNA, 33 bp, Homo sapien
accttcgactggaaaggaaggttcagactaaag

SEQ ID NO: 1017355 - DNA, 33 bp, Homo sapien
agagagaaagcagtacagcctgattcaagcagt

SEQ ID NO: 1017356 - DNA, 33 bp, Homo sapien
agagagaaagcagtacggcctgattcaagcagt

SEQ ID NO: 1017357 - DNA, 33 bp, Homo sapien
cacagacaggaacagaactagtgttgataaagc

SEQ ID NO: 1017358 - DNA, 33 bp, Homo sapien
cacagacaggaacagatctagtgttgataaagc

SEQ ID NO: 1017359 - DNA, 33 bp, Homo sapien
aacctgatgattgatacccctgaactgttagct

SEQ ID NO: 1017360 - DNA, 33 bp, Homo sapien
aacctgatgattgatatccctgaactgttagct

SEQ ID NO: 1017361 - DNA, 33 bp, Homo sapien
cagaaaggcagcatgaaactggaagtaagagat

SEQ ID NO: 1017362 - DNA, 33 bp, Homo sapien
cagaaaggcagcatgacactggaagtaagagat

SEQ ID NO: 1017363 - DNA, 33 bp, Homo sapien
gcagggtcaggattcacaataggtgatggaagc

SEQ ID NO: 1017364 - DNA, 33 bp, Homo sapien
gcagggtcaggattcataataggtgatggaagc

SEQ ID NO: 1017365 - DNA, 33 bp, Homo sapien
aagagactgggatccacagaaatttgtacaaaa

SEQ ID NO: 1017366 - DNA, 33 bp, Homo sapien
aagagactgggatccatagaaatttgtacaaaa

SEQ ID NO: 1017367 - DNA, 33 bp, Homo sapien
tcacatggtatcggtacacctcgggagagactg

SEQ ID NO: 1017368 - DNA, 33 bp, Homo sapien
tcacatggtatcggtagacctcgggagagactg

SEQ ID NO: 1017369 - DNA, 33 bp, Homo sapien
aaaacttgggatatgaacagtgatcctgagatg

SEQ ID NO: 1017370 - DNA, 33 bp, Homo sapien
aaaacttgggatatgagcagtgatcctgagatg

SEQ ID NO: 1017371 - DNA, 33 bp, Homo sapien
cacactctagcctagacgatacagcaagactca

SEQ ID NO: 1017372 - DNA, 33 bp, Homo sapien
cacactctagcctagatgatacagcaagactca

SEQ ID NO: 1017373 - DNA, 33 bp, Homo sapien
tatcccatgttgttcacaatagagaagtgttgg

SEQ ID NO: 1017374 - DNA, 33 bp, Homo sapien
tatcccatgttgttcataatagagaagtgttgg

SEQ ID NO: 1017375 - DNA, 33 bp, Homo sapien
agcccatggtataaacaagcaaggaaggagcca

SEQ ID NO: 1017376 - DNA, 33 bp, Homo sapien
agcccatggtataaacgagcaaggaaggagcca

SEQ ID NO: 1017377 - DNA, 33 bp, Homo sapien
agatgcttgaagagggccaaagagtctggacta

SEQ ID NO: 1017378 - DNA, 33 bp, Homo sapien
agatgcttgaagaggggcaaagagtctggacta

SEQ ID NO: 1017379 - DNA, 33 bp, Homo sapien
ccgcttcttatggctccacaggctctgaagctg

SEQ ID NO: 1017380 - DNA, 33 bp, Homo sapien
ccgcttcttatggctcgacaggctctgaagctg

SEQ ID NO: 1017381 - DNA, 33 bp, Homo sapien
gtaaacaagaagctacaatgcaagtatagaggt

SEQ ID NO: 1017382 - DNA, 33 bp, Homo sapien
gtaaacaagaagctacgatgcaagtatagaggt

SEQ ID NO: 1017383 - DNA, 33 bp, Homo sapien
agttgcagtaataacggcaggagttggtggtaa

SEQ ID NO: 1017384 - DNA, 33 bp, Homo sapien
agttgcagtaataacgtcaggagttggtggtaa

SEQ ID NO: 1017385 - DNA, 33 bp, Homo sapien
ggctgcctgtgtttataaataaagttttcctag

SEQ ID NO: 1017386 - DNA, 33 bp, Homo sapien
ggctgcctgtgtttatgaataaagttttcctag

SEQ ID NO: 1017387 - DNA, 33 bp, Homo sapien
ttaagtaccattttggacacattttcccacccc

SEQ ID NO: 1017388 - DNA, 33 bp, Homo sapien
ttaagtaccattttgggcacattttcccacccc

SEQ ID NO: 1017389 - DNA, 33 bp, Homo sapien
catccttcaggactcaatataaaggtggagggg

SEQ ID NO: 1017390 - DNA, 33 bp, Homo sapien
catccttcaggactcagtataaaggtggagggg

SEQ ID NO: 1017391 - DNA, 33 bp, Homo sapien
ggatcccccagctaaaagttgcctctgtcagga

SEQ ID NO: 1017392 - DNA, 33 bp, Homo sapien
ggatcccccagctaaaggttgcctctgtcagga

SEQ ID NO: 1017393 - DNA, 33 bp, Homo sapien
tggatatcagtgagaaccagaacttcaaggact

SEQ ID NO: 1017394 - DNA, 33 bp, Homo sapien
tggatatcagtgagaagcagaacttcaaggact

SEQ ID NO: 1017395 - DNA, 33 bp, Homo sapien
ccctgctcgcttctcaatgaaccgtgggagccc

SEQ ID NO: 1017396 - DNA, 33 bp, Homo sapien
ccctgctcgcttctcattgaaccgtgggagccc

SEQ ID NO: 1017397 - DNA, 33 bp, Homo sapien
ccatctgcctgtgctgaatggcccctgagcaaa

SEQ ID NO: 1017398 - DNA, 33 bp, Homo sapien
ccatctgcctgtgctggatggcccctgagcaaa

SEQ ID NO: 1017399 - DNA, 33 bp, Homo sapien
gagacacaaaggacacaccattcctccagctag

SEQ ID NO: 1017400 - DNA, 33 bp, Homo sapien
gagacacaaaggacacgccattcctccagctag

SEQ ID NO: 1017401 - DNA, 33 bp, Homo sapien
ccttcagtgaagcaagcaggaaaggcccaagtg

SEQ ID NO: 1017402 - DNA, 33 bp, Homo sapien
ccttcagtgaagcaaggaggaaaggcccaagtg

SEQ ID NO: 1017403 - DNA, 33 bp, Homo sapien
tcatccattcttccaccgactcaactggtttca

SEQ ID NO: 1017404 - DNA, 33 bp, Homo sapien
tcatccattcttccactgactcaactggtttca

SEQ ID NO: 1017405 - DNA, 33 bp, Homo sapien
gaacttgaggcatcatcaaaaatgtgacttccc

SEQ ID NO: 1017406 - DNA, 33 bp, Homo sapien
gaacttgaggcatcatgaaaaatgtgacttccc

SEQ ID NO: 1017407 - DNA, 33 bp, Homo sapien
actataggatgtttcgaagcaactgtggtctct

SEQ ID NO: 1017408 - DNA, 33 bp, Homo sapien
actataggatgtttcgtagcaactgtggtctct

SEQ ID NO: 1017409 - DNA, 33 bp, Homo sapien
tcagtagcttcatcaggataatccgaaaaacct

SEQ ID NO: 1017410 - DNA, 33 bp, Homo sapien
tcagtagcttcatcagtataatccgaaaaacct

SEQ ID NO: 1017411 - DNA, 33 bp, Homo sapien
aggagacaggttcggacggttggagcaggaagt

SEQ ID NO: 1017412 - DNA, 33 bp, Homo sapien
aggagacaggttcggagggttggagcaggaagt

SEQ ID NO: 1017413 - DNA, 33 bp, Homo sapien
gactatgactaaattcacagtacctttgaaagg

SEQ ID NO: 1017414 - DNA, 33 bp, Homo sapien
gactatgactaaattctcagtacctttgaaagg

SEQ ID NO: 1017415 - DNA, 33 bp, Homo sapien
aattagcttagtgtgacggcacgtgcctgtatt

SEQ ID NO: 1017416 - DNA, 33 bp, Homo sapien
aattagcttagtgtgatggcacgtgcctgtatt

SEQ ID NO: 1017417 - DNA, 33 bp, Homo sapien
tgccaccacatctgacaaaattgtgcttttttt

SEQ ID NO: 1017418 - DNA, 33 bp, Homo sapien
tgccaccacatctgacgaaattgtgcttttttt

SEQ ID NO: 1017419 - DNA, 33 bp, Homo sapien
gtgacctcaccttttcacatcactgcaatgagc

SEQ ID NO: 1017420 - DNA, 33 bp, Homo sapien
gtgacctcaccttttcgcatcactgcaatgagc

SEQ ID NO: 1017421 - DNA, 33 bp, Homo sapien
attaatccttacccaacagacttttccttccaa

SEQ ID NO: 1017422 - DNA, 33 bp, Homo sapien
attaatccttacccaagagacttttccttccaa

SEQ ID NO: 1017423 - DNA, 33 bp, Homo sapien
tacttaatgtaaggccgcatggattgtgtgata

SEQ ID NO: 1017424 - DNA, 33 bp, Homo sapien
tacttaatgtaaggcctcatggattgtgtgata

SEQ ID NO: 1017425 - DNA, 33 bp, Homo sapien
agtaaatacatggaaaagtagctgtgttcaggg

SEQ ID NO: 1017426 - DNA, 33 bp, Homo sapien
agtaaatacatggaaaggtagctgtgttcaggg

SEQ ID NO: 1017427 - DNA, 33 bp, Homo sapien
gctccatgataaccaacatgcaggtccagagac

SEQ ID NO: 1017428 - DNA, 33 bp, Homo sapien
gctccatgataaccaagatgcaggtccagagac

SEQ ID NO: 1017429 - DNA, 33 bp, Homo sapien
aagcagattatggtgacgggttttaagaaggag

SEQ ID NO: 1017430 - DNA, 33 bp, Homo sapien
aagcagattatggtgatgggttttaagaaggag

SEQ ID NO: 1017431 - DNA, 33 bp, Homo sapien; identical to SEQ ID NO: 1017429

SEQ ID NO: 1017432 - DNA, 33 bp, Homo sapien; identical to SEQ ID NO: 1017430

SEQ ID NO: 1017433 - DNA, 33 bp, Homo sapien
gagtttcaattgagaacaaagccatccttgtac

SEQ ID NO: 1017434 - DNA, 33 bp, Homo sapien
gagtttcaattgagaataaagccatccttgtac

SEQ ID NO: 1017435 - DNA, 33 bp, Homo sapien
gcaaacatgacctaaaccatgctatgaattcct

SEQ ID NO: 1017436 - DNA, 33 bp, Homo sapien
gcaaacatgacctaaatcatgctatgaattcct

SEQ ID NO: 1017437 - DNA, 33 bp, Homo sapien
ggtcacacagaagaccaggacacagacaggaca

SEQ ID NO: 1017438 - DNA, 33 bp, Homo sapien
ggtcacacagaagacccggacacagacaggaca

SEQ ID NO: 1017439 - DNA, 33 bp, Homo sapien
tgagtcccaactcttacattaaatgagaaacag

SEQ ID NO: 1017440 - DNA, 33 bp, Homo sapien
tgagtcccaactcttatattaaatgagaaacag

SEQ ID NO: 1017441 - DNA, 33 bp, Homo sapien
acatctacagacagaagagtgctctggtgagac

SEQ ID NO: 1017442 - DNA, 33 bp, Homo sapien
acatctacagacagaatagtgctctggtgagac

SEQ ID NO: 1017443 - DNA, 33 bp, Homo sapien
agctcaaatctcaggccagtgaaatctgcagga

SEQ ID NO: 1017444 - DNA, 33 bp, Homo sapien
agctcaaatctcaggctagtgaaatctgcagga

SEQ ID NO: 1017445 - DNA, 33 bp, Homo sapien
cccttgctgtttcgtggattggcctgagtgtga

SEQ ID NO: 1017446 - DNA, 33 bp, Homo sapien
cccttgctgtttcgtgtattggcctgagtgtga

SEQ ID NO: 1017447 - DNA, 33 bp, Homo sapien
taatcctatgaatccacaccctcgctaacattt

SEQ ID NO: 1017448 - DNA, 33 bp, Homo sapien
taatcctatgaatccataccctcgctaacattt

SEQ ID NO: 1017449 - DNA, 33 bp, Homo sapien
gaaataggaatgtaacaactgtctccctatttc

SEQ ID NO: 1017450 - DNA, 33 bp, Homo sapien
gaaataggaatgtaaccactgtctccctatttc

SEQ ID NO: 1017451 - DNA, 33 bp, Homo sapien
aattgaactgtggggacagaaaattccacccaa

SEQ ID NO: 1017452 - DNA, 33 bp, Homo sapien
aattgaactgtggggatagaaaattccacccaa

SEQ ID NO: 1017453 - DNA, 33 bp, Homo sapien
atagccatttttatcaatcggttccctactgat

SEQ ID NO: 1017454 - DNA, 33 bp, Homo sapien
atagccatttttatcagtcggttccctactgat

SEQ ID NO: 1017455 - DNA, 33 bp, Homo sapien
taataataggtggcaaaaatctagaaagctgaa

SEQ ID NO: 1017456 - DNA, 33 bp, Homo sapien
taataataggtggcaacaatctagaaagctgaa

SEQ ID NO: 1017457 - DNA, 33 bp, Homo sapien
aatcactggtggcactcaagtaacctagaagct

SEQ ID NO: 1017458 - DNA, 33 bp, Homo sapien
aatcactggtggcactgaagtaacctagaagct

SEQ ID NO: 1017459 - DNA, 33 bp, Homo sapien
tctgtctgcatctgcacgttaaaatgaatctca

SEQ ID NO: 1017460 - DNA, 33 bp, Homo sapien
tctgtctgcatctgcaggttaaaatgaatctca

SEQ ID NO: 1017461 - DNA, 33 bp, Homo sapien
ttagttttgacaaaaaaggaatagagaagctca

SEQ ID NO: 1017462 - DNA, 33 bp, Homo sapien
ttagttttgacaaaaatggaatagagaagctca

SEQ ID NO: 1017463 - DNA, 33 bp, Homo sapien
agccacagtaccctgaccgtgcaaaggtagcat

SEQ ID NO: 1017464 - DNA, 33 bp, Homo sapien
agccacagtaccctgagcgtgcaaaggtagcat

SEQ ID NO: 1017465 - DNA, 33 bp, Homo sapien; identical to SEQ ID NO: 1017463

SEQ ID NO: 1017466 - DNA, 33 bp, Homo sapien; identical to SEQ ID NO: 1017464

SEQ ID NO: 1017467 - DNA, 33 bp, Homo sapien
ccaactgtaaatctcaatgaactagggcaaagg

SEQ ID NO: 1017468 - DNA, 33 bp, Homo sapien
ccaactgtaaatctcagtgaactagggcaaagg

SEQ ID NO: 1017469 - DNA, 33 bp, Homo sapien; identical to SEQ ID NO: 1017467

SEQ ID NO: 1017470 - DNA, 33 bp, Homo sapien; identical to SEQ ID NO: 1017468

SEQ ID NO: 1017471 - DNA, 33 bp, Homo sapien
taaacaatgtctaaacaaagtgtcattttccct

SEQ ID NO: 1017472 - DNA, 33 bp, Homo sapien
taaacaatgtctaaaccaagtgtcattttccct

SEQ ID NO: 1017473 - DNA, 33 bp, Homo sapien
attgacttggtgttcagcctttatcagcttaat

SEQ ID NO: 1017474 - DNA, 33 bp, Homo sapien
attgacttggtgttcatcctttatcagcttaat

SEQ ID NO: 1017475 - DNA, 33 bp, Homo sapien
agtgttatcaattttacagcgtttcaagtaacc

SEQ ID NO: 1017476 - DNA, 33 bp, Homo sapien
agtgttatcaattttatagcgtttcaagtaacc

SEQ ID NO: 1017477 - DNA, 33 bp, Homo sapien
gaaatagaaaatgatgcaatttgaactggccat

SEQ ID NO: 1017478 - DNA, 33 bp, Homo sapien
gaaatagaaaatgatggaatttgaactggccat

SEQ ID NO: 1017479 - DNA, 33 bp, Homo sapien
tgacattagaaaataacctacaaattggcgttt

SEQ ID NO: 1017480 - DNA, 33 bp, Homo sapien
tgacattagaaaataatctacaaattggcgttt

SEQ ID NO: 1017481 - DNA, 33 bp, Homo sapien
acaaattggcgtttgccccaggatggtaagggt

SEQ ID NO: 1017482 - DNA, 33 bp, Homo sapien
acaaattggcgtttgctccaggatggtaagggt

SEQ ID NO: 1017483 - DNA, 33 bp, Homo sapien
agacaagatagacaacaggtagagaacttgaga

SEQ ID NO: 1017484 - DNA, 33 bp, Homo sapien
agacaagatagacaactggtagagaacttgaga

SEQ ID NO: 1017485 - DNA, 33 bp, Homo sapien
acttctttgtgggaaacgttgacagagctaata

SEQ ID NO: 1017486 - DNA, 33 bp, Homo sapien
acttctttgtgggaaatgttgacagagctaata

SEQ ID NO: 1017487 - DNA, 33 bp, Homo sapien; identical to SEQ ID NO: 1017485

SEQ ID NO: 1017488 - DNA, 33 bp, Homo sapien; identical to SEQ ID NO: 1017486

SEQ ID NO: 1017489 - DNA, 33 bp, Homo sapien
cctcgtttgtacaggagcttgttccagttattt

SEQ ID NO: 1017490 - DNA, 33 bp, Homo sapien
cctcgtttgtacaggatcttgttccagttattt

SEQ ID NO: 1017491 - DNA, 33 bp, Homo sapien
tgtagttacacaattcccaagacacagaatcat

SEQ ID NO: 1017492 - DNA, 33 bp, Homo sapien
tgtagttacacaattctcaagacacagaatcat

SEQ ID NO: 1017493 - DNA, 33 bp, Homo sapien; identical to SEQ ID NO: 1017491

SEQ ID NO: 1017494 - DNA, 33 bp, Homo sapien; identical to SEQ ID NO: 1017492

SEQ ID NO: 1017495 - DNA, 33 bp, Homo sapien
caccaacttgctgataataaagtcgcagtaggt

SEQ ID NO: 1017496 - DNA, 33 bp, Homo sapien
caccaacttgctgatagtaaagtcgcagtaggt

SEQ ID NO: 1017497 - DNA, 33 bp, Homo sapien; identical to SEQ ID NO: 1017495

SEQ ID NO: 1017498 - DNA, 33 bp, Homo sapien; identical to SEQ ID NO: 1017496

SEQ ID NO: 1017499 - DNA, 33 bp, Homo sapien
gaacttgaagctgtaaccatgtggccatgtttt

SEQ ID NO: 1017500 - DNA, 33 bp, Homo sapien
gaacttgaagctgtaagcatgtggccatgtttt

SEQ ID NO: 1017501 - DNA, 33 bp, Homo sapien
gggcgtggctaactccacaggtccccaggtctt

SEQ ID NO: 1017502 - DNA, 33 bp, Homo sapien
gggcgtggctaactccgcaggtccccaggtctt

SEQ ID NO: 1017503 - DNA, 33 bp, Homo sapien
taaaacagtttgcagtaaagaaaccagccaaaa

SEQ ID NO: 1017504 - DNA, 33 bp, Homo sapien
taaaacagtttgcagtgaagaaaccagccaaaa

SEQ ID NO: 1017505 - DNA, 33 bp, Homo sapien
tactcagactcctcataaattctttcttgcaca

SEQ ID NO: 1017506 - DNA, 33 bp, Homo sapien
tactcagactcctcatgaattctttcttgcaca

SEQ ID NO: 1017507 - DNA, 33 bp, Homo sapien
ccaccctttacactgcactcagagggatcttct

SEQ ID NO: 1017508 - DNA, 33 bp, Homo sapien
ccaccctttacactgctctcagagggatcttct

SEQ ID NO: 1017509 - DNA, 33 bp, Homo sapien
gcctcatttgtccttacctgtaaagtagaagta

SEQ ID NO: 1017510 - DNA, 33 bp, Homo sapien
gcctcatttgtccttatctgtaaagtagaagta

SEQ ID NO: 1017511 - DNA, 33 bp, Homo sapien
tagaacatttatacacaggtttttatgtgagca

SEQ ID NO: 1017512 - DNA, 33 bp, Homo sapien
tagaacatttatacactggtttttatgtgagca

SEQ ID NO: 1017513 - DNA, 33 bp, Homo sapien
acagagctcaatggaacagaatcgagtccagaa

SEQ ID NO: 1017514 - DNA, 33 bp, Homo sapien
acagagctcaatggaagagaatcgagtccagaa

SEQ ID NO: 1017515 - DNA, 33 bp, Homo sapien
aaataaggagaaaatacacatggcaattaccat

SEQ ID NO: 1017516 - DNA, 33 bp, Homo sapien
aaataaggagaaaatagacatggcaattaccat

SEQ ID NO: 1017517 - DNA, 33 bp, Homo sapien
aggctgtatatgctatcaatcagtgtccaatat

SEQ ID NO: 1017518 - DNA, 33 bp, Homo sapien
aggctgtatatgctatgaatcagtgtccaatat

SEQ ID NO: 1017519 - DNA, 33 bp, Homo sapien
cttgcaggggtggagtcaagttcctcagaaggc

SEQ ID NO: 1017520 - DNA, 33 bp, Homo sapien
cttgcaggggtggagtgaagttcctcagaaggc

SEQ ID NO: 1017521 - DNA, 33 bp, Homo sapien
ttcttgatggcttatcgcctgtctctagtgctt

SEQ ID NO: 1017522 - DNA, 33 bp, Homo sapien
ttcttgatggcttatctcctgtctctagtgctt

SEQ ID NO: 1017523 - DNA, 33 bp, Homo sapien
gtagtcagatatacacagaaggtggatgactgg

SEQ ID NO: 1017524 - DNA, 33 bp, Homo sapien
gtagtcagatatacacggaaggtggatgactgg

SEQ ID NO: 1017525 - DNA, 33 bp, Homo sapien
caggactagaggcctcacagtgtttaggaaaaa

SEQ ID NO: 1017526 - DNA, 33 bp, Homo sapien
caggactagaggcctcgcagtgtttaggaaaaa

SEQ ID NO: 1017527 - DNA, 33 bp, Homo sapien
gttttggttcctgatcagaagatagtctgagcc

SEQ ID NO: 1017528 - DNA, 33 bp, Homo sapien
gttttggttcctgatcggaagatagtctgagcc

SEQ ID NO: 1017529 - DNA, 33 bp, Homo sapien
ccaaaatgaaaaagtaacgatgctggcagtttg

SEQ ID NO: 1017530 - DNA, 33 bp, Homo sapien
ccaaaatgaaaaagtagcgatgctggcagtttg

SEQ ID NO: 1017531 - DNA, 33 bp, Homo sapien; identical to SEQ ID NO: 1017529

SEQ ID NO: 1017532 - DNA, 33 bp, Homo sapien; identical to SEQ ID NO: 1017530

SEQ ID NO: 1017533 - DNA, 33 bp, Homo sapien
tgctggtataaattctcaaaaaccttgttggcc

SEQ ID NO: 1017534 - DNA, 33 bp, Homo sapien
tgctggtataaattctgaaaaaccttgttggcc

SEQ ID NO: 1017535 - DNA, 33 bp, Homo sapien
agccagtacagcgataaggctatgatcatgagt

SEQ ID NO: 1017536 - DNA, 33 bp, Homo sapien
agccagtacagcgatatggctatgatcatgagt

SEQ ID NO: 1017537 - DNA, 33 bp, Homo sapien; identical to SEQ ID NO: 1017535

SEQ ID NO: 1017538 - DNA, 33 bp, Homo sapien; identical to SEQ ID NO: 1017536

SEQ ID NO: 1017539 - DNA, 33 bp, Homo sapien
aaagctgaagatcaaaagataaggaaaaccttt

SEQ ID NO: 1017540 - DNA, 33 bp, Homo sapien
aaagctgaagatcaaaggataaggaaaaccttt

SEQ ID NO: 1017541 - DNA, 33 bp, Homo sapien; identical to SEQ ID NO: 1017539

SEQ ID NO: 1017542 - DNA, 33 bp, Homo sapien; identical to SEQ ID NO: 1017540

SEQ ID NO: 1017543 - DNA, 33 bp, Homo sapien
caaatgcagtatatccaaagtttaattcaaagt

SEQ ID NO: 1017544 - DNA, 33 bp, Homo sapien
caaatgcagtatatccgaagtttaattcaaagt

SEQ ID NO: 1017545 - DNA, 33 bp, Homo sapien
tcacacacaaattacacgaagagtgtttattac

SEQ ID NO: 1017546 - DNA, 33 bp, Homo sapien
tcacacacaaattacatgaagagtgtttattac

SEQ ID NO: 1017547 - DNA, 33 bp, Homo sapien
cccacggcacaatttcgctttatccaataagga

SEQ ID NO: 1017548 - DNA, 33 bp, Homo sapien
cccacggcacaatttctctttatccaataagga

SEQ ID NO: 1017549 - DNA, 33 bp, Homo sapien
gtacactagagtagcacatacaaagagatggaa

SEQ ID NO: 1017550 - DNA, 33 bp, Homo sapien
gtacactagagtagcatatacaaagagatggaa

SEQ ID NO: 1017551 - DNA, 33 bp, Homo sapien
ctgagccctgtttcccccggaagatagtgagtg

SEQ ID NO: 1017552 - DNA, 33 bp, Homo sapien
ctgagccctgtttccctcggaagatagtgagtg

SEQ ID NO: 1017553 - DNA, 33 bp, Homo sapien
ccttagaggataaggaaagactcttgctgtagc

SEQ ID NO: 1017554 - DNA, 33 bp, Homo sapien
ccttagaggataaggagagactcttgctgtagc

SEQ ID NO: 1017555 - DNA, 33 bp, Homo sapien
acacctctctgctcacaaataactggccaagcc

SEQ ID NO: 1017556 - DNA, 33 bp, Homo sapien
acacctctctgctcacgaataactggccaagcc

SEQ ID NO: 1017557 - DNA, 33 bp, Homo sapien
atgactgccatgtagacgacacacctctctgct

SEQ ID NO: 1017558 - DNA, 33 bp, Homo sapien
atgactgccatgtagatgacacacctctctgct

SEQ ID NO: 1017559 - DNA, 33 bp, Homo sapien
aggaattggggcaatcaataggaaaataaaaat

SEQ ID NO: 1017560 - DNA, 33 bp, Homo sapien
aggaattggggcaatccataggaaaataaaaat

SEQ ID NO: 1017561 - DNA, 33 bp, Homo sapien
catgtgccagtcactacgctaaatgctgtacat

SEQ ID NO: 1017562 - DNA, 33 bp, Homo sapien
catgtgccagtcactatgctaaatgctgtacat

SEQ ID NO: 1017563 - DNA, 33 bp, Homo sapien
gagaagggctagagacccagtttgttattgtct

SEQ ID NO: 1017564 - DNA, 33 bp, Homo sapien
gagaagggctagagactcagtttgttattgtct

SEQ ID NO: 1017565 - DNA, 33 bp, Homo sapien
gtactcagtgactatacacagtagtgaatatta

SEQ ID NO: 1017566 - DNA, 33 bp, Homo sapien
gtactcagtgactatatacagtagtgaatatta

SEQ ID NO: 1017567 - DNA, 33 bp, Homo sapien
cagagaatatgcttcaacataaacacagcaata

SEQ ID NO: 1017568 - DNA, 33 bp, Homo sapien
cagagaatatgcttcatcataaacacagcaata

SEQ ID NO: 1017569 - DNA, 33 bp, Homo sapien
tttcccagagtaatgaatatttcctttttgtcc

SEQ ID NO: 1017570 - DNA, 33 bp, Homo sapien
tttcccagagtaatgagtatttcctttttgtcc

SEQ ID NO: 1017571 - DNA, 33 bp, Homo sapien
tcatggtaaactttcccgagatgtttgctaatg

SEQ ID NO: 1017572 - DNA, 33 bp, Homo sapien
tcatggtaaactttcctgagatgtttgctaatg

SEQ ID NO: 1017573 - DNA, 33 bp, Homo sapien
taattcagttcaacctgaaatggaatctgctaa

SEQ ID NO: 1017574 - DNA, 33 bp, Homo sapien
taattcagttcaaccttaaatggaatctgctaa

SEQ ID NO: 1017575 - DNA, 33 bp, Homo sapien
aaaaccccaggaaaaacaaactcatgaaccaaa

SEQ ID NO: 1017576 - DNA, 33 bp, Homo sapien
aaaaccccaggaaaaagaaactcatgaaccaaa

SEQ ID NO: 1017577 - DNA, 33 bp, Homo sapien
gggagtaattccagaagagttgaaaaggttcaa

SEQ ID NO: 1017578 - DNA, 33 bp, Homo sapien
gggagtaattccagaatagttgaaaaggttcaa

SEQ ID NO: 1017579 - DNA, 33 bp, Homo sapien
gtatttttgagacacacaggaagtatagtcaat

SEQ ID NO: 1017580 - DNA, 33 bp, Homo sapien
gtatttttgagacacataggaagtatagtcaat

SEQ ID NO: 1017581 - DNA, 33 bp, Homo sapien
gctctttaagcaactaatagagatttcatttga

SEQ ID NO: 1017582 - DNA, 33 bp, Homo sapien
gctctttaagcaactagtagagatttcatttga

SEQ ID NO: 1017583 - DNA, 33 bp, Homo sapien
gactccctaaggctatcaaacttcttaaggaag

SEQ ID NO: 1017584 - DNA, 33 bp, Homo sapien
gactccctaaggctatgaaacttcttaaggaag

SEQ ID NO: 1017585 - DNA, 33 bp, Homo sapien
cttatttatttatgaacgaaggatacagtcttg

SEQ ID NO: 1017586 - DNA, 33 bp, Homo sapien
cttatttatttatgaatgaaggatacagtcttg

SEQ ID NO: 1017587 - DNA, 33 bp, Homo sapien
cagaagtaattgtagcacattattttgacatta

SEQ ID NO: 1017588 - DNA, 33 bp, Homo sapien
cagaagtaattgtagcgcattattttgacatta

SEQ ID NO: 1017589 - DNA, 33 bp, Homo sapien
gctgctattcccagatcaagatttggtggaagg

SEQ ID NO: 1017590 - DNA, 33 bp, Homo sapien
gctgctattcccagatgaagatttggtggaagg

SEQ ID NO: 1017591 - DNA, 33 bp, Homo sapien
accaaagacctgacaaaaaaaggaaccaagaat

SEQ ID NO: 1017592 - DNA, 33 bp, Homo sapien
accaaagacctgacaacaaaaggaaccaagaat

SEQ ID NO: 1017593 - DNA, 33 bp, Homo sapien
tgggaagaatcattgccccagaccttatctgtc

SEQ ID NO: 1017594 - DNA, 33 bp, Homo sapien
tgggaagaatcattgctccagaccttatctgtc

SEQ ID NO: 1017595 - DNA, 33 bp, Homo sapien
cctgaaaatatgctcaatatcttgtgacatgtc

SEQ ID NO: 1017596 - DNA, 33 bp, Homo sapien
cctgaaaatatgctcagtatcttgtgacatgtc

SEQ ID NO: 1017597 - DNA, 33 bp, Homo sapien
ctaccactgctagagtaaaaagttcctctgtca

SEQ ID NO: 1017598 - DNA, 33 bp, Homo sapien
ctaccactgctagagtcaaaagttcctctgtca

SEQ ID NO: 1017599 - DNA, 33 bp, Homo sapien
ctgctttttaacgaataagccattgaccaactg

SEQ ID NO: 1017600 - DNA, 33 bp, Homo sapien
ctgctttttaacgaatgagccattgaccaactg

SEQ ID NO: 1017601 - DNA, 33 bp, Homo sapien
gaataccaataaacccaccaacaatgctaacag

SEQ ID NO: 1017602 - DNA, 33 bp, Homo sapien
gaataccaataaacccgccaacaatgctaacag

SEQ ID NO: 1017603 - DNA, 33 bp, Homo sapien
agccaggaatatgagaactgcctgagtaacaaa

SEQ ID NO: 1017604 - DNA, 33 bp, Homo sapien
agccaggaatatgagacctgcctgagtaacaaa

SEQ ID NO: 1017605 - DNA, 33 bp, Homo sapien
gccttgaaagattatacgtctccttgtctgctt

SEQ ID NO: 1017606 - DNA, 33 bp, Homo sapien
gccttgaaagattatatgtctccttgtctgctt

SEQ ID NO: 1017607 - DNA, 33 bp, Homo sapien
tatactcactacccagacaatattatcattatt

SEQ ID NO: 1017608 - DNA, 33 bp, Homo sapien
tatactcactacccaggcaatattatcattatt

SEQ ID NO: 1017609 - DNA, 33 bp, Homo sapien
ggtgtacgtgccaacactcttcgttgccatctt

SEQ ID NO: 1017610 - DNA, 33 bp, Homo sapien
ggtgtacgtgccaacattcttcgttgccatctt

SEQ ID NO: 1017611 - DNA, 33 bp, Homo sapien
atgctgatacgaaaccacatgggaggcgcttat

SEQ ID NO: 1017612 - DNA, 33 bp, Homo sapien
atgctgatacgaaaccgcatgggaggcgcttat

SEQ ID NO: 1017613 - DNA, 33 bp, Homo sapien
agttatatgacaccctaaagtcttacaagtgga

SEQ ID NO: 1017614 - DNA, 33 bp, Homo sapien
agttatatgacaccctgaagtcttacaagtgga

SEQ ID NO: 1017615 - DNA, 33 bp, Homo sapien
ccagaacagccaccaacacaaagtctacacccg

SEQ ID NO: 1017616 - DNA, 33 bp, Homo sapien
ccagaacagccaccaagacaaagtctacacccg

SEQ ID NO: 1017617 - DNA, 33 bp, Homo sapien
tacctaaggccacgaaaggaattaattgcccat

SEQ ID NO: 1017618 - DNA, 33 bp, Homo sapien
tacctaaggccacgaagggaattaattgcccat

SEQ ID NO: 1017619 - DNA, 33 bp, Homo sapien
tctgcagtaatgtaaacttagcattcacagaaa

SEQ ID NO: 1017620 - DNA, 33 bp, Homo sapien
tctgcagtaatgtaaatttagcattcacagaaa

SEQ ID NO: 1017621 - DNA, 33 bp, Homo sapien
gcccagccaacatagcaatacactctaattaat

SEQ ID NO: 1017622 - DNA, 33 bp, Homo sapien
gcccagccaacatagcgatacactctaattaat

SEQ ID NO: 1017623 - DNA, 33 bp, Homo sapien
gttcagcttatacacacagtggatgccctaaga

SEQ ID NO: 1017624 - DNA, 33 bp, Homo sapien
gttcagcttatacacagagtggatgccctaaga

SEQ ID NO: 1017625 - DNA, 33 bp, Homo sapien
taagctgaactttttcaagacacctagaatgaa

SEQ ID NO: 1017626 - DNA, 33 bp, Homo sapien
taagctgaactttttccagacacctagaatgaa

SEQ ID NO: 1017627 - DNA, 33 bp, Homo sapien
attttcacaagccggtgaagtgttattacagag

SEQ ID NO: 1017628 - DNA, 33 bp, Homo sapien
attttcacaagccggttaagtgttattacagag

SEQ ID NO: 1017629 - DNA, 33 bp, Homo sapien
aaacaaagaatgcttaaactgtgcctttaacaa

SEQ ID NO: 1017630 - DNA, 33 bp, Homo sapien
aaacaaagaatgcttagactgtgcctttaacaa

SEQ ID NO: 1017631 - DNA, 33 bp, Homo sapien
attcctgaataaatacaattttctttagagagc

SEQ ID NO: 1017632 - DNA, 33 bp, Homo sapien
attcctgaataaataccattttctttagagagc

SEQ ID NO: 1017633 - DNA, 33 bp, Homo sapien
aaacgttagagaagaacggagcagctgaagaat

SEQ ID NO: 1017634 - DNA, 33 bp, Homo sapien
aaacgttagagaagaatggagcagctgaagaat

SEQ ID NO: 1017635 - DNA, 33 bp, Homo sapien
tcatcacgagacaggaataaaggaccctgacct

SEQ ID NO: 1017636 - DNA, 33 bp, Homo sapien
tcatcacgagacaggagtaaaggaccctgacct

SEQ ID NO: 1017637 - DNA, 33 bp, Homo sapien
gatggggaaggaaaaacgagtgcatatcccaag

SEQ ID NO: 1017638 - DNA, 33 bp, Homo sapien
gatggggaaggaaaaaggagtgcatatcccaag

SEQ ID NO: 1017639 - DNA, 33 bp, Homo sapien
ttgcccctttatcaaacatacactgtgccctat

SEQ ID NO: 1017640 - DNA, 33 bp, Homo sapien
ttgcccctttatcaaatatacactgtgccctat

SEQ ID NO: 1017641 - DNA, 33 bp, Homo sapien
gagccttgtttttaaacgggtctcagtgattaa

SEQ ID NO: 1017642 - DNA, 33 bp, Homo sapien
gagccttgtttttaaatgggtctcagtgattaa

SEQ ID NO: 1017643 - DNA, 33 bp, Homo sapien
tgaacacagctatgaacgagagaaataatatct

SEQ ID NO: 1017644 - DNA, 33 bp, Homo sapien
tgaacacagctatgaatgagagaaataatatct

SEQ ID NO: 1017645 - DNA, 33 bp, Homo sapien
gaatagcatgatgtcacaagactggcaaatgaa

SEQ ID NO: 1017646 - DNA, 33 bp, Homo sapien
gaatagcatgatgtcagaagactggcaaatgaa

SEQ ID NO: 1017647 - DNA, 33 bp, Homo sapien
aacccaattataggccaggataaaataagtcaa

SEQ ID NO: 1017648 - DNA, 33 bp, Homo sapien
aacccaattataggccgggataaaataagtcaa

SEQ ID NO: 1017649 - DNA, 33 bp, Homo sapien
tatctggtgctaaaaacctggaaccagtgtaat

SEQ ID NO: 1017650 - DNA, 33 bp, Homo sapien
tatctggtgctaaaaatctggaaccagtgtaat

SEQ ID NO: 1017651 - DNA, 33 bp, Homo sapien
tgtagacattcttaacactcgtaaattacatag

SEQ ID NO: 1017652 - DNA, 33 bp, Homo sapien
tgtagacattcttaactctcgtaaattacatag

SEQ ID NO: 1017653 - DNA, 33 bp, Homo sapien
cttggcagtatataaaaatactatcatctccta

SEQ ID NO: 1017654 - DNA, 33 bp, Homo sapien
cttggcagtatataaagatactatcatctccta

SEQ ID NO: 1017655 - DNA, 33 bp, Homo sapien
gttttattatagttcacggaccttctttaatag

SEQ ID NO: 1017656 - DNA, 33 bp, Homo sapien
gttttattatagttcatggaccttctttaatag

SEQ ID NO: 1017657 - DNA, 33 bp, Homo sapien
aaggacaaaaagatcaataagaatcaaggaggc

SEQ ID NO: 1017658 - DNA, 33 bp, Homo sapien
aaggacaaaaagatcattaagaatcaaggaggc

SEQ ID NO: 1017659 - DNA, 33 bp, Homo sapien
ctccacaaaggttgacaaattattcaaaccagc

SEQ ID NO: 1017660 - DNA, 33 bp, Homo sapien
ctccacaaaggttgacgaattattcaaaccagc

SEQ ID NO: 1017661 - DNA, 33 bp, Homo sapien
tgagatgaacaggtcacaaagaaactcccatca

SEQ ID NO: 1017662 - DNA, 33 bp, Homo sapien
tgagatgaacaggtcagaaagaaactcccatca

SEQ ID NO: 1017663 - DNA, 33 bp, Homo sapien
ttttttaaagatgcacaggatattaaatgactg

SEQ ID NO: 1017664 - DNA, 33 bp, Homo sapien
ttttttaaagatgcacgggatattaaatgactg

SEQ ID NO: 1017665 - DNA, 33 bp, Homo sapien
gtgatgggtaaggaaccatgtttttacaggttc

SEQ ID NO: 1017666 - DNA, 33 bp, Homo sapien
gtgatgggtaaggaactatgtttttacaggttc

SEQ ID NO: 1017667 - DNA, 33 bp, Homo sapien
atgttgaattagtgaaatctctaagcctttgca

SEQ ID NO: 1017668 - DNA, 33 bp, Homo sapien
atgttgaattagtgaagtctctaagcctttgca

SEQ ID NO: 1017669 - DNA, 33 bp, Homo sapien
gtcattgggtactaacgaggtataatttagtgt

SEQ ID NO: 1017670 - DNA, 33 bp, Homo sapien
gtcattgggtactaactaggtataatttagtgt

SEQ ID NO: 1017671 - DNA, 33 bp, Homo sapien
agatgggtattaggagaccttgctttggagcca

SEQ ID NO: 1017672 - DNA, 33 bp, Homo sapien
agatgggtattaggagtccttgctttggagcca

SEQ ID NO: 1017673 - DNA, 33 bp, Homo sapien
tagagtatcgtgaaaaaggcttcagagtgagat

SEQ ID NO: 1017674 - DNA, 33 bp, Homo sapien
tagagtatcgtgaaaagggcttcagagtgagat

SEQ ID NO: 1017675 - DNA, 33 bp, Homo sapien
gagaaatagggagtaaatgctaatggagtttca

SEQ ID NO: 1017676 - DNA, 33 bp, Homo sapien
gagaaatagggagtaactgctaatggagtttca

SEQ ID NO: 1017677 - DNA, 33 bp, Homo sapien
tgatgaaagttttctgcaattagatagtgacaa

SEQ ID NO: 1017678 - DNA, 33 bp, Homo sapien
tgatgaaagttttctggaattagatagtgacaa

SEQ ID NO: 1017679 - DNA, 33 bp, Homo sapien
actcactttgtaatataacatctgcattagctt

SEQ ID NO: 1017680 - DNA, 33 bp, Homo sapien
actcactttgtaatatgacatctgcattagctt

SEQ ID NO: 1017681 - DNA, 33 bp, Homo sapien
tcatttatttattccacctgcagtttcatgcaa

SEQ ID NO: 1017682 - DNA, 33 bp, Homo sapien
tcatttatttattccatctgcagtttcatgcaa

SEQ ID NO: 1017683 - DNA, 33 bp, Homo sapien
attgttcagggctctacgatgactcatatgaac

SEQ ID NO: 1017684 - DNA, 33 bp, Homo sapien
attgttcagggctctaggatgactcatatgaac

SEQ ID NO: 1017685 - DNA, 33 bp, Homo sapien
caaattctaactcgaaacactaggtgaaaataa

SEQ ID NO: 1017686 - DNA, 33 bp, Homo sapien
caaattctaactcgaagcactaggtgaaaataa

SEQ ID NO: 1017687 - DNA, 33 bp, Homo sapien
aaaaaattacacaatccacaggacttttttaag

SEQ ID NO: 1017688 - DNA, 33 bp, Homo sapien
aaaaaattacacaatctacaggacttttttaag

SEQ ID NO: 1017689 - DNA, 33 bp, Homo sapien
tccatgacatgaacgaccgcaaacgtctcttcc

SEQ ID NO: 1017690 - DNA, 33 bp, Homo sapien
tccatgacatgaacgagcgcaaacgtctcttcc

SEQ ID NO: 1017691 - DNA, 33 bp, Homo sapien
cagaccgaggagtttgcaccgaggtgagaaagg

SEQ ID NO: 1017692 - DNA, 33 bp, Homo sapien
cagaccgaggagtttggaccgaggtgagaaagg

SEQ ID NO: 1017693 - DNA, 33 bp, Homo sapien
tctccctcacagaagcagagacagaggagtgaa

SEQ ID NO: 1017694 - DNA, 33 bp, Homo sapien
tctccctcacagaagcggagacagaggagtgaa

SEQ ID NO: 1017695 - DNA, 33 bp, Homo sapien
gcaaacaggataccaacgttctagtgcagctgt

SEQ ID NO: 1017696 - DNA, 33 bp, Homo sapien
gcaaacaggataccaatgttctagtgcagctgt

SEQ ID NO: 1017697 - DNA, 33 bp, Homo sapien
aagaatacatatgcgacacggtgtggaggaagc

SEQ ID NO: 1017698 - DNA, 33 bp, Homo sapien
aagaatacatatgcgagacggtgtggaggaagc

SEQ ID NO: 1017699 - DNA, 33 bp, Homo sapien
agcatttggctacaacccctctagctcccactg

SEQ ID NO: 1017700 - DNA, 33 bp, Homo sapien
agcatttggctacaactcctctagctcccactg

SEQ ID NO: 1017701 - DNA, 33 bp, Homo sapien
ttctctcctattcaacaaattccttttttcatt

SEQ ID NO: 1017702 - DNA, 33 bp, Homo sapien
ttctctcctattcaacgaattccttttttcatt

SEQ ID NO: 1017703 - DNA, 33 bp, Homo sapien
gaggatgaaggacttgaagcatgggaagttgcc

SEQ ID NO: 1017704 - DNA, 33 bp, Homo sapien
gaggatgaaggacttgcagcatgggaagttgcc

SEQ ID NO: 1017705 - DNA, 33 bp, Homo sapien
gtatcagaaaagactccaggcagaaggaagtgc

SEQ ID NO: 1017706 - DNA, 33 bp, Homo sapien
gtatcagaaaagactctaggcagaaggaagtgc

SEQ ID NO: 1017707 - DNA, 33 bp, Homo sapien
tacccttagcactatacccatgttaactgtaaa

SEQ ID NO: 1017708 - DNA, 33 bp, Homo sapien
tacccttagcactatatccatgttaactgtaaa

SEQ ID NO: 1017709 - DNA, 33 bp, Homo sapien
tctacccaaccatgagcacttagtgaagttaag

SEQ ID NO: 1017710 - DNA, 33 bp, Homo sapien
tctacccaaccatgaggacttagtgaagttaag

SEQ ID NO: 1017711 - DNA, 33 bp, Homo sapien
gctcctgtttttgttccccatctccctttctcc

SEQ ID NO: 1017712 - DNA, 33 bp, Homo sapien
gctcctgtttttgttctccatctccctttctcc

SEQ ID NO: 1017713 - DNA, 33 bp, Homo sapien
ggaaccaggtaaatgaagactggaacagagctc

SEQ ID NO: 1017714 - DNA, 33 bp, Homo sapien
ggaaccaggtaaatgaggactggaacagagctc

SEQ ID NO: 1017715 - DNA, 33 bp, Homo sapien
ccaaagatttatgaaccagtgcaggccaggctc

SEQ ID NO: 1017716 - DNA, 33 bp, Homo sapien
ccaaagatttatgaacgagtgcaggccaggctc

SEQ ID NO: 1017717 - DNA, 33 bp, Homo sapien
atcaataggaaaggcccctgaaacagcaaatga

SEQ ID NO: 1017718 - DNA, 33 bp, Homo sapien
atcaataggaaaggccgctgaaacagcaaatga

SEQ ID NO: 1017719 - DNA, 33 bp, Homo sapien
agttttggaagaactacacctgggctaaattgt

SEQ ID NO: 1017720 - DNA, 33 bp, Homo sapien
agttttggaagaactatacctgggctaaattgt

SEQ ID NO: 1017721 - DNA, 33 bp, Homo sapien
agaatagccattcaagcagtattttggctttta

SEQ ID NO: 1017722 - DNA, 33 bp, Homo sapien
agaatagccattcaaggagtattttggctttta

SEQ ID NO: 1017723 - DNA, 33 bp, Homo sapien
cacacagataaataaacggcacaaataggactt

SEQ ID NO: 1017724 - DNA, 33 bp, Homo sapien
cacacagataaataaatggcacaaataggactt

SEQ ID NO: 1017725 - DNA, 33 bp, Homo sapien
tcggtatattctagaactgaaagccccaagaag

SEQ ID NO: 1017726 - DNA, 33 bp, Homo sapien
tcggtatattctagaattgaaagccccaagaag

SEQ ID NO: 1017727 - DNA, 33 bp, Homo sapien
agcagtctcagagaaaccattttgaggttttca

SEQ ID NO: 1017728 - DNA, 33 bp, Homo sapien
agcagtctcagagaaagcattttgaggttttca

SEQ ID NO: 1017729 - DNA, 33 bp, Homo sapien
gggtaaacaaaagagcactaaggctgtataacc

SEQ ID NO: 1017730 - DNA, 33 bp, Homo sapien
gggtaaacaaaagagcgctaaggctgtataacc

SEQ ID NO: 1017731 - DNA, 33 bp, Homo sapien
tttgttgcctaggctacagtgtaatagtgcaat

SEQ ID NO: 1017732 - DNA, 33 bp, Homo sapien
tttgttgcctaggctagagtgtaatagtgcaat

SEQ ID NO: 1017733 - DNA, 33 bp, Homo sapien
taatgattctctctaccatccctcaaaaggtgt

SEQ ID NO: 1017734 - DNA, 33 bp, Homo sapien
taatgattctctctactatccctcaaaaggtgt

SEQ ID NO: 1017735 - DNA, 33 bp, Homo sapien
gtgaaaagcattccagaaagggggcagcacata

SEQ ID NO: 1017736 - DNA, 33 bp, Homo sapien
gtgaaaagcattccaggaagggggcagcacata

SEQ ID NO: 1017737 - DNA, 33 bp, Homo sapien
tttaccagaaacaatacggaagttactttagag

SEQ ID NO: 1017738 - DNA, 33 bp, Homo sapien
tttaccagaaacaatatggaagttactttagag

SEQ ID NO: 1017739 - DNA, 33 bp, Homo sapien
gtcttccattttgcaaaggcagcagccctgttt

SEQ ID NO: 1017740 - DNA, 33 bp, Homo sapien
gtcttccattttgcaacggcagcagccctgttt

SEQ ID NO: 1017741 - DNA, 33 bp, Homo sapien
gactgacggactttagaatggtgccttcatcgc

SEQ ID NO: 1017742 - DNA, 33 bp, Homo sapien
gactgacggactttaggatggtgccttcatcgc

SEQ ID NO: 1017743 - DNA, 33 bp, Homo sapien
tcacctggatgcaagacgggtccatgagacaga

SEQ ID NO: 1017744 - DNA, 33 bp, Homo sapien
tcacctggatgcaagatgggtccatgagacaga

SEQ ID NO: 1017745 - DNA, 33 bp, Homo sapien
gaaaagtctgggaaaaagcctttgtaaggagaa

SEQ ID NO: 1017746 - DNA, 33 bp, Homo sapien
gaaaagtctgggaaaacgcctttgtaaggagaa

SEQ ID NO: 1017747 - DNA, 33 bp, Homo sapien
caaacccttcacctccaactaggctccggaaat

SEQ ID NO: 1017748 - DNA, 33 bp, Homo sapien
caaacccttcacctccgactaggctccggaaat

SEQ ID NO: 1017749 - DNA, 33 bp, Homo sapien
ccctgacctttaccaccgtatcagggccacagg

SEQ ID NO: 1017750 - DNA, 33 bp, Homo sapien
ccctgacctttaccactgtatcagggccacagg

SEQ ID NO: 1017751 - DNA, 33 bp, Homo sapien
ctttctgctcggcaaacataccctctggctgag

SEQ ID NO: 1017752 - DNA, 33 bp, Homo sapien
ctttctgctcggcaaagataccctctggctgag

SEQ ID NO: 1017753 - DNA, 33 bp, Homo sapien
accatacgtgtgtgcaactaacatgccgagacc

SEQ ID NO: 1017754 - DNA, 33 bp, Homo sapien
accatacgtgtgtgcagctaacatgccgagacc

SEQ ID NO: 1017755 - DNA, 33 bp, Homo sapien
caaagcaagagaaccccaagtctgccccagacc

SEQ ID NO: 1017756 - DNA, 33 bp, Homo sapien
caaagcaagagaacccgaagtctgccccagacc

SEQ ID NO: 1017757 - DNA, 33 bp, Homo sapien
tataaagtgactgagacgataatgattaatatc

SEQ ID NO: 1017758 - DNA, 33 bp, Homo sapien
tataaagtgactgagatgataatgattaatatc

SEQ ID NO: 1017759 - DNA, 33 bp, Homo sapien
tcttctgacagcgaggcaagtgtctgctcccag

SEQ ID NO: 1017760 - DNA, 33 bp, Homo sapien
tcttctgacagcgagggaagtgtctgctcccag

SEQ ID NO: 1017761 - DNA, 33 bp, Homo sapien
aggtatgtgaatgggccatcttctgtgtgtgtg

SEQ ID NO: 1017762 - DNA, 33 bp, Homo sapien
aggtatgtgaatgggcgatcttctgtgtgtgtg
